United States Patent Application Publication US 2018/0305689 A1 - sequence listing, part 81

SEQ ID NO: 1183152 - RNA, 19 nt, Artificial Sequence
  Description of Artificial Sequence: Synthetic oligonucleotide
  Sense strand starting at position 182 of SEQ ID NO: 916777
cagagaaguguccaaaguc

SEQ ID NO: 1183153 - RNA, 19 nt, Artificial Sequence
  Description of Artificial Sequence: Synthetic oligonucleotide
  Antisense strand to SEQ ID NO: 1183152
gacuuuggacacuucucug

SEQ ID NO: 1183154 - RNA, 19 nt, Artificial Sequence
  Description of Artificial Sequence: Synthetic oligonucleotide
  Sense strand starting at position 305 of SEQ ID NO: 916777
accaauugcuaugugacua

SEQ ID NO: 1183155 - RNA, 19 nt, Artificial Sequence
  Description of Artificial Sequence: Synthetic oligonucleotide
  Antisense strand to SEQ ID NO: 1183154
uagucacauagcaauuggu

SEQ ID NO: 1183156 - RNA, 19 nt, Artificial Sequence
  Description of Artificial Sequence: Synthetic oligonucleotide
  Sense strand starting at position 309 of SEQ ID NO: 916777
auugcuaugugacuaaauu

SEQ ID NO: 1183157 - RNA, 19 nt, Artificial Sequence
  Description of Artificial Sequence: Synthetic oligonucleotide
  Antisense strand to SEQ ID NO: 1183156
aauuuagucacauagcaau

SEQ ID NO: 1183158 - RNA, 19 nt, Artificial Sequence
  Description of Artificial Sequence: Synthetic oligonucleotide
  Sense strand starting at position 310 of SEQ ID NO: 916777
uugcuaugugacuaaauua

SEQ ID NO: 1183159 - RNA, 19 nt, Artificial Sequence
  Description of Artificial Sequence: Synthetic oligonucleotide
  Antisense strand to SEQ ID NO: 1183158
uaauuuagucacauagcaa

SEQ ID NO: 1183160 - RNA, 19 nt, Artificial Sequence
  Description of Artificial Sequence: Synthetic oligonucleotide
  Sense strand starting at position 326 of SEQ ID NO: 916777
uuacuauguuaggcaaagu

SEQ ID NO: 1183161 - RNA, 19 nt, Artificial Sequence
  Description of Artificial Sequence: Synthetic oligonucleotide
  Antisense strand to SEQ ID NO: 1183160
acuuugccuaacauaguaa

SEQ ID NO: 1183162 - RNA, 19 nt, Artificial Sequence
  Description of Artificial Sequence: Synthetic oligonucleotide
  Sense strand starting at position 486 of SEQ ID NO: 916777
uuuauugagcccuugcguu

SEQ ID NO: 1183163 - RNA, 19 nt, Artificial Sequence
  Description of Artificial Sequence: Synthetic oligonucleotide
  Antisense strand to SEQ ID NO: 1183162
aacgcaagggcucaauaaa

SEQ ID NO: 1183164 - RNA, 19 nt, Artificial Sequence
  Description of Artificial Sequence: Synthetic oligonucleotide
  Sense strand starting at position 492 of SEQ ID NO: 916777
gagcccuugcguuaaagaa

SEQ ID NO: 1183165 - RNA, 19 nt, Artificial Sequence
  Description of Artificial Sequence: Synthetic oligonucleotide
  Antisense strand to SEQ ID NO: 1183164
uucuuuaacgcaagggcuc

SEQ ID NO: 1183166 - RNA, 19 nt, Artificial Sequence
  Description of Artificial Sequence: Synthetic oligonucleotide
  Sense strand starting at position 872 of SEQ ID NO: 916777
cuugcuaaagaauguggaa

SEQ ID NO: 1183167 - RNA, 19 nt, Artificial Sequence
  Description of Artificial Sequence: Synthetic oligonucleotide
  Antisense strand to SEQ ID NO: 1183166
uuccacauucuuuagcaag

SEQ ID NO: 1183168 - RNA, 19 nt, Artificial Sequence
  Description of Artificial Sequence: Synthetic oligonucleotide
  Sense strand starting at position 874 of SEQ ID NO: 916777
ugcuaaagaauguggaaua

SEQ ID NO: 1183169 - RNA, 19 nt, Artificial Sequence
  Description of Artificial Sequence: Synthetic oligonucleotide
  Antisense strand to SEQ ID NO: 1183168
uauuccacauucuuuagca

SEQ ID NO: 1183170 - RNA, 19 nt, Artificial Sequence
  Description of Artificial Sequence: Synthetic oligonucleotide
  Sense strand starting at position 1281 of SEQ ID NO: 916777
ucugucacucagcaguaua

SEQ ID NO: 1183171 - RNA, 19 nt, Artificial Sequence
  Description of Artificial Sequence: Synthetic oligonucleotide
  Antisense strand to SEQ ID NO: 1183170
uauacugcugagugacaga

SEQ ID NO: 1183172 - RNA, 19 nt, Artificial Sequence
  Description of Artificial Sequence: Synthetic oligonucleotide
  Sense strand starting at position 1341 of SEQ ID NO: 916777
gucaucaauguuggaggaa

SEQ ID NO: 1183173 - RNA, 19 nt, Artificial Sequence
  Description of Artificial Sequence: Synthetic oligonucleotide
  Antisense strand to SEQ ID NO: 1183172
uuccuccaacauugaugac

SEQ ID NO: 1183174 - RNA, 19 nt, Artificial Sequence
  Description of Artificial Sequence: Synthetic oligonucleotide
  Sense strand starting at position 1355 of SEQ ID NO: 916777
aggaaacgccacugagaua

SEQ ID NO: 1183175 - RNA, 19 nt, Artificial Sequence
  Description of Artificial Sequence: Synthetic oligonucleotide
  Antisense strand to SEQ ID NO: 1183174
uaucucaguggcguuuccu

SEQ ID NO: 1183176 - RNA, 19 nt, Artificial Sequence
  Description of Artificial Sequence: Synthetic oligonucleotide
  Sense strand starting at position 1489 of SEQ ID NO: 916777
aguaguauuuaccaacaaa

SEQ ID NO: 1183177 - RNA, 19 nt, Artificial Sequence
  Description of Artificial Sequence: Synthetic oligonucleotide
  Antisense strand to SEQ ID NO: 1183176
uuuguugguaaauacuacu

SEQ ID NO: 1183178 - RNA, 19 nt, Artificial Sequence
  Description of Artificial Sequence: Synthetic oligonucleotide
  Sense strand starting at position 1619 of SEQ ID NO: 916777
agagcagggcagugauuaa

SEQ ID NO: 1183179 - RNA, 19 nt, Artificial Sequence
  Description of Artificial Sequence: Synthetic oligonucleotide
  Antisense strand to SEQ ID NO: 1183178
uuaaucacugcccugcucu

SEQ ID NO: 1183180 - RNA, 19 nt, Artificial Sequence
  Description of Artificial Sequence: Synthetic oligonucleotide
  Sense strand starting at position 1768 of SEQ ID NO: 916777
guaguuaucccagagccuc

SEQ ID NO: 1183181 - RNA, 19 nt, Artificial Sequence
  Description of Artificial Sequence: Synthetic oligonucleotide
  Antisense strand to SEQ ID NO: 1183180
gaggcucugggauaacuac

SEQ ID NO: 1183182 - RNA, 19 nt, Artificial Sequence
  Description of Artificial Sequence: Synthetic oligonucleotide
  Sense strand starting at position 1874 of SEQ ID NO: 916777
ucggaucuccgacaccaaa

SEQ ID NO: 1183183 - RNA, 19 nt, Artificial Sequence
  Description of Artificial Sequence: Synthetic oligonucleotide
  Antisense strand to SEQ ID NO: 1183182
uuuggugucggagauccga

SEQ ID NO: 1183184 - RNA, 19 nt, Artificial Sequence
  Description of Artificial Sequence: Synthetic oligonucleotide
  Sense strand starting at position 1917 of SEQ ID NO: 916777
uccgcuacucgggaguaaa

SEQ ID NO: 1183185 - RNA, 19 nt, Artificial Sequence
  Description of Artificial Sequence: Synthetic oligonucleotide
  Antisense strand to SEQ ID NO: 1183184
uuuacucccgaguagcgga

SEQ ID NO: 1183186 - RNA, 19 nt, Artificial Sequence
  Description of Artificial Sequence: Synthetic oligonucleotide
  Sense strand starting at position 2060 of SEQ ID NO: 916777
acgaguuauugguugagau

SEQ ID NO: 1183187 - RNA, 19 nt, Artificial Sequence
  Description of Artificial Sequence: Synthetic oligonucleotide
  Antisense strand to SEQ ID NO: 1183186
aucucaaccaauaacucgu

SEQ ID NO: 1183188 - RNA, 19 nt, Artificial Sequence
  Description of Artificial Sequence: Synthetic oligonucleotide
  Sense strand starting at position 2062 of SEQ ID NO: 916777
gaguuauugguugagauug

SEQ ID NO: 1183189 - RNA, 19 nt, Artificial Sequence
  Description of Artificial Sequence: Synthetic oligonucleotide
  Antisense strand to SEQ ID NO: 1183188
caaucucaaccaauaacuc

SEQ ID NO: 1183190 - RNA, 19 nt, Artificial Sequence
  Description of Artificial Sequence: Synthetic oligonucleotide
  Sense strand starting at position 2086 of SEQ ID NO: 916777
agguuucgccaauaggaag

SEQ ID NO: 1183191 - RNA, 19 nt, Artificial Sequence
  Description of Artificial Sequence: Synthetic oligonucleotide
  Antisense strand to SEQ ID NO: 1183190
cuuccuauuggcgaaaccu

SEQ ID NO: 1183192 - RNA, 19 nt, Artificial Sequence
  Description of Artificial Sequence: Synthetic oligonucleotide
  Sense strand starting at position 2579 of SEQ ID NO: 916777
gugagaugggcgcuuuguu

SEQ ID NO: 1183193 - RNA, 19 nt, Artificial Sequence
  Description of Artificial Sequence: Synthetic oligonucleotide
  Antisense strand to SEQ ID NO: 1183192
aacaaagcgcccaucucac

SEQ ID NO: 1183194 - RNA, 19 nt, Artificial Sequence
  Description of Artificial Sequence: Synthetic oligonucleotide
  Sense strand starting at position 2704 of SEQ ID NO: 916777
gguuauuugggaggcggua

SEQ ID NO: 1183195 - RNA, 19 nt, Artificial Sequence
  Description of Artificial Sequence: Synthetic oligonucleotide
  Antisense strand to SEQ ID NO: 1183194
uaccgccucccaaauaacc

SEQ ID NO: 1183196 - RNA, 19 nt, Artificial Sequence
  Description of Artificial Sequence: Synthetic oligonucleotide
  Sense strand starting at position 3092 of SEQ ID NO: 916777
uguauuuaugucugcccaa

SEQ ID NO: 1183197 - RNA, 19 nt, Artificial Sequence
  Description of Artificial Sequence: Synthetic oligonucleotide
  Antisense strand to SEQ ID NO: 1183196
uugggcagacauaaauaca

SEQ ID NO: 1183198 - RNA, 19 nt, Artificial Sequence
  Description of Artificial Sequence: Synthetic oligonucleotide
  Sense strand starting at position 3093 of SEQ ID NO: 916777
guauuuaugucugcccaag

SEQ ID NO: 1183199 - RNA, 19 nt, Artificial Sequence
  Description of Artificial Sequence: Synthetic oligonucleotide
  Antisense strand to SEQ ID NO: 1183198
cuugggcagacauaaauac

SEQ ID NO: 1183200 - RNA, 19 nt, Artificial Sequence
  Description of Artificial Sequence: Synthetic oligonucleotide
  Sense strand starting at position 3456 of SEQ ID NO: 916777
gccuguucugaucaaagaa

SEQ ID NO: 1183201 - RNA, 19 nt, Artificial Sequence
  Description of Artificial Sequence: Synthetic oligonucleotide
  Antisense strand to SEQ ID NO: 1183200
uucuuugaucagaacaggc

SEQ ID NO: 1183202 - RNA, 19 nt, Artificial Sequence
  Description of Artificial Sequence: Synthetic oligonucleotide
  Sense strand starting at position 3569 of SEQ ID NO: 916777
ucaugugaaucauuaugca

SEQ ID NO: 1183203 - RNA, 19 nt, Artificial Sequence
  Description of Artificial Sequence: Synthetic oligonucleotide
  Antisense strand to SEQ ID NO: 1183202
ugcauaaugauucacauga

SEQ ID NO: 1183204 - RNA, 19 nt, Artificial Sequence
  Description of Artificial Sequence: Synthetic oligonucleotide
  Sense strand starting at position 3573 of SEQ ID NO: 916777
gugaaucauuaugcauaau

SEQ ID NO: 1183205 - RNA, 19 nt, Artificial Sequence
  Description of Artificial Sequence: Synthetic oligonucleotide
  Antisense strand to SEQ ID NO: 1183204
auuaugcauaaugauucac

SEQ ID NO: 1183206 - RNA, 19 nt, Artificial Sequence
  Description of Artificial Sequence: Synthetic oligonucleotide
  Sense strand starting at position 3603 of SEQ ID NO: 916777
cccuguaaggcucacagaa

SEQ ID NO: 1183207 - RNA, 19 nt, Artificial Sequence
  Description of Artificial Sequence: Synthetic oligonucleotide
  Antisense strand to SEQ ID NO: 1183206
uucugugagccuuacaggg

SEQ ID NO: 1183208 - RNA, 19 nt, Artificial Sequence
  Description of Artificial Sequence: Synthetic oligonucleotide
  Sense strand starting at position 3659 of SEQ ID NO: 916777
aauugagugcauggucaaa

SEQ ID NO: 1183209 - RNA, 19 nt, Artificial Sequence
  Description of Artificial Sequence: Synthetic oligonucleotide
  Antisense strand to SEQ ID NO: 1183208
uuugaccaugcacucaauu

SEQ ID NO: 1183210 - RNA, 19 nt, Artificial Sequence
  Description of Artificial Sequence: Synthetic oligonucleotide
  Sense strand starting at position 3661 of SEQ ID NO: 916777
uugagugcauggucaaaga

SEQ ID NO: 1183211 - RNA, 19 nt, Artificial Sequence
  Description of Artificial Sequence: Synthetic oligonucleotide
  Antisense strand to SEQ ID NO: 1183210
ucuuugaccaugcacucaa

SEQ ID NO: 1183212 - RNA, 19 nt, Artificial Sequence
  Description of Artificial Sequence: Synthetic oligonucleotide
  Sense strand starting at position 3787 of SEQ ID NO: 916777
ugagaauaaucugugcaua

SEQ ID NO: 1183213 - RNA, 19 nt, Artificial Sequence
  Description of Artificial Sequence: Synthetic oligonucleotide
  Antisense strand to SEQ ID NO: 1183212
uaugcacagauuauucuca

SEQ ID NO: 1183214 - RNA, 19 nt, Artificial Sequence
  Description of Artificial Sequence: Synthetic oligonucleotide
  Sense strand starting at position 3789 of SEQ ID NO: 916777
agaauaaucugugcauaga

SEQ ID NO: 1183215 - RNA, 19 nt, Artificial Sequence
  Description of Artificial Sequence: Synthetic oligonucleotide
  Antisense strand to SEQ ID NO: 1183214
ucuaugcacagauuauucu

SEQ ID NO: 1183216 - RNA, 19 nt, Artificial Sequence
  Description of Artificial Sequence: Synthetic oligonucleotide
  Sense strand starting at position 3792 of SEQ ID NO: 916777
auaaucugugcauagaaau

SEQ ID NO: 1183217 - RNA, 19 nt, Artificial Sequence
  Description of Artificial Sequence: Synthetic oligonucleotide
  Antisense strand to SEQ ID NO: 1183216
auuucuaugcacagauuau

SEQ ID NO: 1183218 - RNA, 19 nt, Artificial Sequence
  Description of Artificial Sequence: Synthetic oligonucleotide
  Sense strand starting at position 3880 of SEQ ID NO: 916777
ugggcauucucccugagaa

SEQ ID NO: 1183219 - RNA, 19 nt, Artificial Sequence
  Description of Artificial Sequence: Synthetic oligonucleotide
  Antisense strand to SEQ ID NO: 1183218
uucucagggagaaugccca

SEQ ID NO: 1183220 - RNA, 19 nt, Artificial Sequence
  Description of Artificial Sequence: Synthetic oligonucleotide
  Sense strand starting at position 3881 of SEQ ID NO: 916777
gggcauucucccugagaag

SEQ ID NO: 1183221 - RNA, 19 nt, Artificial Sequence
  Description of Artificial Sequence: Synthetic oligonucleotide
  Antisense strand to SEQ ID NO: 1183220
cuucucagggagaaugccc

SEQ ID NO: 1183222 - RNA, 19 nt, Artificial Sequence
  Description of Artificial Sequence: Synthetic oligonucleotide
  Sense strand starting at position 3882 of SEQ ID NO: 916777
ggcauucucccugagaagc

SEQ ID NO: 1183223 - RNA, 19 nt, Artificial Sequence
  Description of Artificial Sequence: Synthetic oligonucleotide
  Antisense strand to SEQ ID NO: 1183222
gcuucucagggagaaugcc

SEQ ID NO: 1183224 - RNA, 19 nt, Artificial Sequence
  Description of Artificial Sequence: Synthetic oligonucleotide
  Sense strand starting at position 3923 of SEQ ID NO: 916777
uugugagggcaaugaaauu

SEQ ID NO: 1183225 - RNA, 19 nt, Artificial Sequence
  Description of Artificial Sequence: Synthetic oligonucleotide
  Antisense strand to SEQ ID NO: 1183224
aauuucauugcccucacaa

SEQ ID NO: 1183226 - RNA, 19 nt, Artificial Sequence
  Description of Artificial Sequence: Synthetic oligonucleotide
  Sense strand starting at position 3974 of SEQ ID NO: 916777
aggugaaacaguggauuga

SEQ ID NO: 1183227 - RNA, 19 nt, Artificial Sequence
  Description of Artificial Sequence: Synthetic oligonucleotide
  Antisense strand to SEQ ID NO: 1183226
ucaauccacuguuucaccu

SEQ ID NO: 1183228 - RNA, 19 nt, Artificial Sequence
  Description of Artificial Sequence: Synthetic oligonucleotide
  Sense strand starting at position 20 of SEQ ID NO: 916778
gcuacucuuccuggccaaa

SEQ ID NO: 1183229 - RNA, 19 nt, Artificial Sequence
  Description of Artificial Sequence: Synthetic oligonucleotide
  Antisense strand to SEQ ID NO: 1183228
uuuggccaggaagaguagc

SEQ ID NO: 1183230 - RNA, 19 nt, Artificial Sequence
  Description of Artificial Sequence: Synthetic oligonucleotide
  Sense strand starting at position 112 of SEQ ID NO: 916778
ucuuuacacgacuguagaa

SEQ ID NO: 1183231 - RNA, 19 nt, Artificial Sequence
  Description of Artificial Sequence: Synthetic oligonucleotide
  Antisense strand to SEQ ID NO: 1183230
uucuacagucguguaaaga

SEQ ID NO: 1183232 - RNA, 19 nt, Artificial Sequence
  Description of Artificial Sequence: Synthetic oligonucleotide
  Sense strand starting at position 114 of SEQ ID NO: 916778
uuuacacgacuguagaaua

SEQ ID NO: 1183233 - RNA, 19 nt, Artificial Sequence
  Description of Artificial Sequence: Synthetic oligonucleotide
  Antisense strand to SEQ ID NO: 1183232
uauucuacagucguguaaa

SEQ ID NO: 1183234 - RNA, 19 nt, Artificial Sequence
  Description of Artificial Sequence: Synthetic oligonucleotide
  Sense strand starting at position 128 of SEQ ID NO: 916778
gaauaugggcuuuguaacu

SEQ ID NO: 1183235 - RNA, 19 nt, Artificial Sequence
  Description of Artificial Sequence: Synthetic oligonucleotide
  Antisense strand to SEQ ID NO: 1183234
aguuacaaagcccauauuc

SEQ ID NO: 1183236 - RNA, 19 nt, Artificial Sequence
  Description of Artificial Sequence: Synthetic oligonucleotide
  Sense strand starting at position 135 of SEQ ID NO: 916778
ggcuuuguaacugggcaga

SEQ ID NO: 1183237 - RNA, 19 nt, Artificial Sequence
  Description of Artificial Sequence: Synthetic oligonucleotide
  Antisense strand to SEQ ID NO: 1183236
ucugcccaguuacaaagcc

SEQ ID NO: 1183238 - RNA, 19 nt, Artificial Sequence
  Description of Artificial Sequence: Synthetic oligonucleotide
  Sense strand starting at position 190 of SEQ ID NO: 916778
ugaguuaucuagccucuuu

SEQ ID NO: 1183239 - RNA, 19 nt, Artificial Sequence
  Description of Artificial Sequence: Synthetic oligonucleotide
  Antisense strand to SEQ ID NO: 1183238
aaagaggcuagauaacuca

SEQ ID NO: 1183240 - RNA, 19 nt, Artificial Sequence
  Description of Artificial Sequence: Synthetic oligonucleotide
  Sense strand starting at position 202 of SEQ ID NO: 916778
ccucuuugauuuggcaaau

SEQ ID NO: 1183241 - RNA, 19 nt, Artificial Sequence
  Description of Artificial Sequence: Synthetic oligonucleotide
  Antisense strand to SEQ ID NO: 1183240
auuugccaaaucaaagagg

SEQ ID NO: 1183242 - RNA, 19 nt, Artificial Sequence
  Description of Artificial Sequence: Synthetic oligonucleotide
  Sense strand starting at position 219 of SEQ ID NO: 916778
auagaaaccucuuagaguc

SEQ ID NO: 1183243 - RNA, 19 nt, Artificial Sequence
  Description of Artificial Sequence: Synthetic oligonucleotide
  Antisense strand to SEQ ID NO: 1183242
gacucuaagagguuucuau

SEQ ID NO: 1183244 - RNA, 19 nt, Artificial Sequence
  Description of Artificial Sequence: Synthetic oligonucleotide
  Sense strand starting at position 221 of SEQ ID NO: 916778
agaaaccucuuagagucau

SEQ ID NO: 1183245 - RNA, 19 nt, Artificial Sequence
  Description of Artificial Sequence: Synthetic oligonucleotide
  Antisense strand to SEQ ID NO: 1183244
augacucuaagagguuucu

SEQ ID NO: 1183246 - RNA, 19 nt, Artificial Sequence
  Description of Artificial Sequence: Synthetic oligonucleotide
  Sense strand starting at position 227 of SEQ ID NO: 916778
cucuuagagucauggaaga

SEQ ID NO: 1183247 - RNA, 19 nt, Artificial Sequence
  Description of Artificial Sequence: Synthetic oligonucleotide
  Antisense strand to SEQ ID NO: 1183246
ucuuccaugacucuaagag

SEQ ID NO: 1183248 - RNA, 19 nt, Artificial Sequence
  Description of Artificial Sequence: Synthetic oligonucleotide
  Sense strand starting at position 250 of SEQ ID NO: 916778
ugcaaaucacgcuaauaua

SEQ ID NO: 1183249 - RNA, 19 nt, Artificial Sequence
  Description of Artificial Sequence: Synthetic oligonucleotide
  Antisense strand to SEQ ID NO: 1183248
uauauuagcgugauuugca

SEQ ID NO: 1183250 - RNA, 19 nt, Artificial Sequence
  Description of Artificial Sequence: Synthetic oligonucleotide
  Sense strand starting at position 491 of SEQ ID NO: 916778
ccaucaaaguccucucagu

SEQ ID NO: 1183251 - RNA, 19 nt, Artificial Sequence
  Description of Artificial Sequence: Synthetic oligonucleotide
  Antisense strand to SEQ ID NO: 1183250
acugagaggacuuugaugg

SEQ ID NO: 1183252 - RNA, 19 nt, Artificial Sequence
  Description of Artificial Sequence: Synthetic oligonucleotide
  Sense strand starting at position 537 of SEQ ID NO: 916778
gaauaagguaaguguuaga

SEQ ID NO: 1183253 - RNA, 19 nt, Artificial Sequence
  Description of Artificial Sequence: Synthetic oligonucleotide
  Antisense strand to SEQ ID NO: 1183252
ucuaacacuuaccuuauuc

SEQ ID NO: 1183254 - RNA, 19 nt, Artificial Sequence
  Description of Artificial Sequence: Synthetic oligonucleotide
  Sense strand starting at position 540 of SEQ ID NO: 916778
uaagguaaguguuagagga

SEQ ID NO: 1183255 - RNA, 19 nt, Artificial Sequence
  Description of Artificial Sequence: Synthetic oligonucleotide
  Antisense strand to SEQ ID NO: 1183254
uccucuaacacuuaccuua

SEQ ID NO: 1183256 - RNA, 19 nt, Artificial Sequence
  Description of Artificial Sequence: Synthetic oligonucleotide
  Sense strand starting at position 542 of SEQ ID NO: 916778
agguaaguguuagaggaaa

SEQ ID NO: 1183257 - RNA, 19 nt, Artificial Sequence
  Description of Artificial Sequence: Synthetic oligonucleotide
  Antisense strand to SEQ ID NO: 1183256
uuuccucuaacacuuaccu

SEQ ID NO: 1183258 - RNA, 19 nt, Artificial Sequence
  Description of Artificial Sequence: Synthetic oligonucleotide
  Sense strand starting at position 759 of SEQ ID NO: 916778
uggcuugaaacuggcauua

SEQ ID NO: 1183259 - RNA, 19 nt, Artificial Sequence
  Description of Artificial Sequence: Synthetic oligonucleotide
  Antisense strand to SEQ ID NO: 1183258
uaaugccaguuucaagcca

SEQ ID NO: 1183260 - RNA, 19 nt, Artificial Sequence
  Description of Artificial Sequence: Synthetic oligonucleotide
  Sense strand starting at position 761 of SEQ ID NO: 916778
gcuugaaacuggcauuaca

SEQ ID NO: 1183261 - RNA, 19 nt, Artificial Sequence
  Description of Artificial Sequence: Synthetic oligonucleotide
  Antisense strand to SEQ ID NO: 1183260
uguaaugccaguuucaagc

SEQ ID NO: 1183262 - RNA, 19 nt, Artificial Sequence
  Description of Artificial Sequence: Synthetic oligonucleotide
  Sense strand starting at position 2008 of SEQ ID NO: 916778
ggaggccacaucuguuaau

SEQ ID NO: 1183263 - RNA, 19 nt, Artificial Sequence
  Description of Artificial Sequence: Synthetic oligonucleotide
  Antisense strand to SEQ ID NO: 1183262
auuaacagauguggccucc

SEQ ID NO: 1183264 - RNA, 19 nt, Artificial Sequence
  Description of Artificial Sequence: Synthetic oligonucleotide
  Sense strand starting at position 2011 of SEQ ID NO: 916778
ggccacaucuguuaauggu

SEQ ID NO: 1183265 - RNA, 19 nt, Artificial Sequence
  Description of Artificial Sequence: Synthetic oligonucleotide
  Antisense strand to SEQ ID NO: 1183264
accauuaacagauguggcc

SEQ ID NO: 1183266 - RNA, 19 nt, Artificial Sequence
  Description of Artificial Sequence: Synthetic oligonucleotide
  Sense strand starting at position 2051 of SEQ ID NO: 916778
gcuuccucggguguaguua

SEQ ID NO: 1183267 - RNA, 19 nt, Artificial Sequence
  Description of Artificial Sequence: Synthetic oligonucleotide
  Antisense strand to SEQ ID NO: 1183266
uaacuacacccgaggaagc

SEQ ID NO: 1183268 - RNA, 19 nt, Artificial Sequence
  Description of Artificial Sequence: Synthetic oligonucleotide
  Sense strand starting at position 2059 of SEQ ID NO: 916778
ggguguaguuaagcauaua

SEQ ID NO: 1183269 - RNA, 19 nt, Artificial Sequence
  Description of Artificial Sequence: Synthetic oligonucleotide
  Antisense strand to SEQ ID NO: 1183268
uauaugcuuaacuacaccc

SEQ ID NO: 1183270 - RNA, 19 nt, Artificial Sequence
  Description of Artificial Sequence: Synthetic oligonucleotide
  Sense strand starting at position 2060 of SEQ ID NO: 916778
gguguaguuaagcauauau

SEQ ID NO: 1183271 - RNA, 19 nt, Artificial Sequence
  Description of Artificial Sequence: Synthetic oligonucleotide
  Antisense strand to SEQ ID NO: 1183270
auauaugcuuaacuacacc

SEQ ID NO: 1183272 - RNA, 19 nt, Artificial Sequence
  Description of Artificial Sequence: Synthetic oligonucleotide
  Sense strand starting at position 2062 of SEQ ID NO: 916778
uguaguuaagcauauauac

SEQ ID NO: 1183273 - RNA, 19 nt, Artificial Sequence
  Description of Artificial Sequence: Synthetic oligonucleotide
  Antisense strand to SEQ ID NO: 1183272
guauauaugcuuaacuaca

SEQ ID NO: 1183274 - RNA, 19 nt, Artificial Sequence
  Description of Artificial Sequence: Synthetic oligonucleotide
  Sense strand starting at position 2095 of SEQ ID NO: 916778
acauguuaguucucucugu

SEQ ID NO: 1183275 - RNA, 19 nt, Artificial Sequence
  Description of Artificial Sequence: Synthetic oligonucleotide
  Antisense strand to SEQ ID NO: 1183274
acagagagaacuaacaugu

SEQ ID NO: 1183276 - RNA, 19 nt, Artificial Sequence
  Description of Artificial Sequence: Synthetic oligonucleotide
  Sense strand starting at position 2096 of SEQ ID NO: 916778
cauguuaguucucucuguu

SEQ ID NO: 1183277 - RNA, 19 nt, Artificial Sequence
  Description of Artificial Sequence: Synthetic oligonucleotide
  Antisense strand to SEQ ID NO: 1183276
aacagagagaacuaacaug

SEQ ID NO: 1183278 - RNA, 19 nt, Artificial Sequence
  Description of Artificial Sequence: Synthetic oligonucleotide
  Sense strand starting at position 2099 of SEQ ID NO: 916778
guuaguucucucuguuugu

SEQ ID NO: 1183279 - RNA, 19 nt, Artificial Sequence
  Description of Artificial Sequence: Synthetic oligonucleotide
  Antisense strand to SEQ ID NO: 1183278
acaaacagagagaacuaac

SEQ ID NO: 1183280 - RNA, 19 nt, Artificial Sequence
  Description of Artificial Sequence: Synthetic oligonucleotide
  Sense strand starting at position 2125 of SEQ ID NO: 916778
guguguuguguucauacag

SEQ ID NO: 1183281 - RNA, 19 nt, Artificial Sequence
  Description of Artificial Sequence: Synthetic oligonucleotide
  Antisense strand to SEQ ID NO: 1183280
cuguaugaacacaacacac

SEQ ID NO: 1183282 - RNA, 19 nt, Artificial Sequence
  Description of Artificial Sequence: Synthetic oligonucleotide
  Sense strand starting at position 2142 of SEQ ID NO: 916778
aguuccugcugguuuauua

SEQ ID NO: 1183283 - RNA, 19 nt, Artificial Sequence
  Description of Artificial Sequence: Synthetic oligonucleotide
  Antisense strand to SEQ ID NO: 1183282
uaauaaaccagcaggaacu

SEQ ID NO: 1183284 - RNA, 19 nt, Artificial Sequence
  Description of Artificial Sequence: Synthetic oligonucleotide
  Sense strand starting at position 2150 of SEQ ID NO: 916778
cugguuuauuaaguuaaag

SEQ ID NO: 1183285 - RNA, 19 nt, Artificial Sequence
  Description of Artificial Sequence: Synthetic oligonucleotide
  Antisense strand to SEQ ID NO: 1183284
cuuuaacuuaauaaaccag

SEQ ID NO: 1183286 - RNA, 19 nt, Artificial Sequence
  Description of Artificial Sequence: Synthetic oligonucleotide
  Sense strand starting at position 2192 of SEQ ID NO: 916778
cuguucuaucuagguuaua

SEQ ID NO: 1183287 - RNA, 19 nt, Artificial Sequence
  Description of Artificial Sequence: Synthetic oligonucleotide
  Antisense strand to SEQ ID NO: 1183286
uauaaccuagauagaacag

SEQ ID NO: 1183288 - RNA, 19 nt, Artificial Sequence
  Description of Artificial Sequence: Synthetic oligonucleotide
  Sense strand starting at position 2193 of SEQ ID NO: 916778
uguucuaucuagguuauau

SEQ ID NO: 1183289 - RNA, 19 nt, Artificial Sequence
  Description of Artificial Sequence: Synthetic oligonucleotide
  Antisense strand to SEQ ID NO: 1183288
auauaaccuagauagaaca

SEQ ID NO: 1183290 - RNA, 19 nt, Artificial Sequence
  Description of Artificial Sequence: Synthetic oligonucleotide
  Sense strand starting at position 2232 of SEQ ID NO: 916778
gguaaucucuuccaacaug

SEQ ID NO: 1183291 - RNA, 19 nt, Artificial Sequence
  Description of Artificial Sequence: Synthetic oligonucleotide
  Antisense strand to SEQ ID NO: 1183290
cauguuggaagagauuacc

SEQ ID NO: 1183292 - RNA, 19 nt, Artificial Sequence
  Description of Artificial Sequence: Synthetic oligonucleotide
  Sense strand starting at position 2647 of SEQ ID NO: 916778
uuccaaucucuaggugagu

SEQ ID NO: 1183293 - RNA, 19 nt, Artificial Sequence
  Description of Artificial Sequence: Synthetic oligonucleotide
  Antisense strand to SEQ ID NO: 1183292
acucaccuagagauuggaa

SEQ ID NO: 1183294 - RNA, 19 nt, Artificial Sequence
  Description of Artificial Sequence: Synthetic oligonucleotide
  Sense strand starting at position 2650 of SEQ ID NO: 916778
caaucucuaggugagucau

SEQ ID NO: 1183295 - RNA, 19 nt, Artificial Sequence
  Description of Artificial Sequence: Synthetic oligonucleotide
  Antisense strand to SEQ ID NO: 1183294
augacucaccuagagauug

SEQ ID NO: 1183296 - RNA, 19 nt, Artificial Sequence
  Description of Artificial Sequence: Synthetic oligonucleotide
  Sense strand starting at position 2794 of SEQ ID NO: 916778
auuccuaucuguugauaca

SEQ ID NO: 1183297 - RNA, 19 nt, Artificial Sequence
  Description of Artificial Sequence: Synthetic oligonucleotide
  Antisense strand to SEQ ID NO: 1183296
uguaucaacagauaggaau

SEQ ID NO: 1183298 - RNA, 19 nt, Artificial Sequence
  Description of Artificial Sequence: Synthetic oligonucleotide
  Sense strand starting at position 2797 of SEQ ID NO: 916778
ccuaucuguugauacacau

SEQ ID NO: 1183299 - RNA, 19 nt, Artificial Sequence
  Description of Artificial Sequence: Synthetic oligonucleotide
  Antisense strand to SEQ ID NO: 1183298
auguguaucaacagauagg

SEQ ID NO: 1183300 - RNA, 19 nt, Artificial Sequence
  Description of Artificial Sequence: Synthetic oligonucleotide
  Sense strand starting at position 2829 of SEQ ID NO: 916778
cgaacaaauuuauggcagu

SEQ ID NO: 1183301 - RNA, 19 nt, Artificial Sequence
  Description of Artificial Sequence: Synthetic oligonucleotide
  Antisense strand to SEQ ID NO: 1183300
acugccauaaauuuguucg

SEQ ID NO: 1183302 - RNA, 19 nt, Artificial Sequence
  Description of Artificial Sequence: Synthetic oligonucleotide
  Sense strand starting at position 2830 of SEQ ID NO: 916778
gaacaaauuuauggcaguu

SEQ ID NO: 1183303 - RNA, 19 nt, Artificial Sequence
  Description of Artificial Sequence: Synthetic oligonucleotide
  Antisense strand to SEQ ID NO: 1183302
aacugccauaaauuuguuc

SEQ ID NO: 1183304 - RNA, 19 nt, Artificial Sequence
  Description of Artificial Sequence: Synthetic oligonucleotide
  Sense strand starting at position 2832 of SEQ ID NO: 916778
acaaauuuauggcaguuua

SEQ ID NO: 1183305 - RNA, 19 nt, Artificial Sequence
  Description of Artificial Sequence: Synthetic oligonucleotide
  Antisense strand to SEQ ID NO: 1183304
uaaacugccauaaauuugu

SEQ ID NO: 1183306 - RNA, 19 nt, Artificial Sequence
  Description of Artificial Sequence: Synthetic oligonucleotide
  Sense strand starting at position 2887 of SEQ ID NO: 916778
gccuguuacuaugaacaac

SEQ ID NO: 1183307 - RNA, 19 nt, Artificial Sequence
  Description of Artificial Sequence: Synthetic oligonucleotide
  Antisense strand to SEQ ID NO: 1183306
guuguucauaguaacaggc

SEQ ID NO: 1183308 - RNA, 19 nt, Artificial Sequence
  Description of Artificial Sequence: Synthetic oligonucleotide
  Sense strand starting at position 332 of SEQ ID NO: 916779
ucaugaaaguagccaucaa

SEQ ID NO: 1183309 - RNA, 19 nt, Artificial Sequence
  Description of Artificial Sequence: Synthetic oligonucleotide
  Antisense strand to SEQ ID NO: 1183308
uugauggcuacuuucauga

SEQ ID NO: 1183310 - RNA, 19 nt, Artificial Sequence
  Description of Artificial Sequence: Synthetic oligonucleotide
  Sense strand starting at position 336 of SEQ ID NO: 916779
gaaaguagccaucaaaugu

SEQ ID NO: 1183311 - RNA, 19 nt, Artificial Sequence
  Description of Artificial Sequence: Synthetic oligonucleotide
  Antisense strand to SEQ ID NO: 1183310
acauuugauggcuacuuuc

SEQ ID NO: 1183312 - RNA, 19 nt, Artificial Sequence
  Description of Artificial Sequence: Synthetic oligonucleotide
  Sense strand starting at position 473 of SEQ ID NO: 916779
aaagauacagcugguuauu

SEQ ID NO: 1183313 - RNA, 19 nt, Artificial Sequence
  Description of Artificial Sequence: Synthetic oligonucleotide
  Antisense strand to SEQ ID NO: 1183312
aauaaccagcuguaucuuu

SEQ ID NO: 1183314 - RNA, 19 nt, Artificial Sequence
  Description of Artificial Sequence: Synthetic oligonucleotide
  Sense strand starting at position 588 of SEQ ID NO: 916779
aguuacauuugacaagaua

SEQ ID NO: 1183315 - RNA, 19 nt, Artificial Sequence
  Description of Artificial Sequence: Synthetic oligonucleotide
  Antisense strand to SEQ ID NO: 1183314
uaucuugucaaauguaacu

SEQ ID NO: 1183316 - RNA, 19 nt, Artificial Sequence
  Description of Artificial Sequence: Synthetic oligonucleotide
  Sense strand starting at position 692 of SEQ ID NO: 916779
cuuccauacguggaucuaa

SEQ ID NO: 1183317 - RNA, 19 nt, Artificial Sequence
  Description of Artificial Sequence: Synthetic oligonucleotide
  Antisense strand to SEQ ID NO: 1183316
uuagauccacguauggaag

SEQ ID NO: 1183318 - RNA, 19 nt, Artificial Sequence
  Description of Artificial Sequence: Synthetic oligonucleotide
  Sense strand starting at position 739 of SEQ ID NO: 916779
gaaauauucugaguagggc

SEQ ID NO: 1183319 - RNA, 19 nt, Artificial Sequence
  Description of Artificial Sequence: Synthetic oligonucleotide
  Antisense strand to SEQ ID NO: 1183318
gcccuacucagaauauuuc

SEQ ID NO: 1183320 - RNA, 19 nt, Artificial Sequence
  Description of Artificial Sequence: Synthetic oligonucleotide
  Sense strand starting at position 816 of SEQ ID NO: 916779
cugcuaucacucuaaaggu

SEQ ID NO: 1183321 - RNA, 19 nt, Artificial Sequence
  Description of Artificial Sequence: Synthetic oligonucleotide
  Antisense strand to SEQ ID NO: 1183320
accuuuagagugauagcag

SEQ ID NO: 1183322 - RNA, 19 nt, Artificial Sequence
  Description of Artificial Sequence: Synthetic oligonucleotide
  Sense strand starting at position 1168 of SEQ ID NO: 916779
agguaaucaugcuuggaac

SEQ ID NO: 1183323 - RNA, 19 nt, Artificial Sequence
  Description of Artificial Sequence: Synthetic oligonucleotide
  Antisense strand to SEQ ID NO: 1183322
guuccaagcaugauuaccu

SEQ ID NO: 1183324 - RNA, 19 nt, Artificial Sequence
  Description of Artificial Sequence: Synthetic oligonucleotide
  Sense strand starting at position 1191 of SEQ ID NO: 916779
guuugcaugcgcucaucaa

SEQ ID NO: 1183325 - RNA, 19 nt, Artificial Sequence
  Description of Artificial Sequence: Synthetic oligonucleotide
  Antisense strand to SEQ ID NO: 1183324
uugaugagcgcaugcaaac

SEQ ID NO: 1183326 - RNA, 19 nt, Artificial Sequence
  Description of Artificial Sequence: Synthetic oligonucleotide
  Sense strand starting at position 1244 of SEQ ID NO: 916779
uagucuaggccuggaaaug

SEQ ID NO: 1183327 - RNA, 19 nt, Artificial Sequence
  Description of Artificial Sequence: Synthetic oligonucleotide
  Antisense strand to SEQ ID NO: 1183326
cauuuccaggccuagacua

SEQ ID NO: 1183328 - RNA, 19 nt, Artificial Sequence
  Description of Artificial Sequence: Synthetic oligonucleotide
  Sense strand starting at position 1315 of SEQ ID NO: 916779
cuggucucauuacuaggaa

SEQ ID NO: 1183329 - RNA, 19 nt, Artificial Sequence
  Description of Artificial Sequence: Synthetic oligonucleotide
  Antisense strand to SEQ ID NO: 1183328
uuccuaguaaugagaccag

SEQ ID NO: 1183330 - RNA, 19 nt, Artificial Sequence
  Description of Artificial Sequence: Synthetic oligonucleotide
  Sense strand starting at position 1318 of SEQ ID NO: 916779
gucucauuacuaggaauuc

SEQ ID NO: 1183331 - RNA, 19 nt, Artificial Sequence
  Description of Artificial Sequence: Synthetic oligonucleotide
  Antisense strand to SEQ ID NO: 1183330
gaauuccuaguaaugagac

SEQ ID NO: 1183332 - RNA, 19 nt, Artificial Sequence
  Description of Artificial Sequence: Synthetic oligonucleotide
  Sense strand starting at position 1530 of SEQ ID NO: 916779
cuaggagagcccugucaag

SEQ ID NO: 1183333 - RNA, 19 nt, Artificial Sequence
  Description of Artificial Sequence: Synthetic oligonucleotide
  Antisense strand to SEQ ID NO: 1183332
cuugacagggcucuccuag

SEQ ID NO: 1183334 - RNA, 19 nt, Artificial Sequence
  Description of Artificial Sequence: Synthetic oligonucleotide
  Sense strand starting at position 1672 of SEQ ID NO: 916779
ggaagucgucccgaaagag

SEQ ID NO: 1183335 - RNA, 19 nt, Artificial Sequence
  Description of Artificial Sequence: Synthetic oligonucleotide
  Antisense strand to SEQ ID NO: 1183334
cucuuucgggacgacuucc

SEQ ID NO: 1183336 - RNA, 19 nt, Artificial Sequence
  Description of Artificial Sequence: Synthetic oligonucleotide
  Sense strand starting at position 2310 of SEQ ID NO: 916779
uaguaaauggcuggaauga

SEQ ID NO: 1183337 - RNA, 19 nt, Artificial Sequence
  Description of Artificial Sequence: Synthetic oligonucleotide
  Antisense strand to SEQ ID NO: 1183336
ucauuccagccauuuacua

SEQ ID NO: 1183338 - RNA, 19 nt, Artificial Sequence
  Description of Artificial Sequence: Synthetic oligonucleotide
  Sense strand starting at position 2678 of SEQ ID NO: 916779
gcaggaggcacuuauguua

SEQ ID NO: 1183339 - RNA, 19 nt, Artificial Sequence
  Description of Artificial Sequence: Synthetic oligonucleotide
  Antisense strand to SEQ ID NO: 1183338
uaacauaagugccuccugc

SEQ ID NO: 1183340 - RNA, 19 nt, Artificial Sequence
  Description of Artificial Sequence: Synthetic oligonucleotide
  Sense strand starting at position 2707 of SEQ ID NO: 916779
cuuauaaaucuggguauuc

SEQ ID NO: 1183341 - RNA, 19 nt, Artificial Sequence
  Description of Artificial Sequence: Synthetic oligonucleotide
  Antisense strand to SEQ ID NO: 1183340
gaauacccagauuuauaag

SEQ ID NO: 1183342 - RNA, 19 nt, Artificial Sequence
  Description of Artificial Sequence: Synthetic oligonucleotide
  Sense strand starting at position 2708 of SEQ ID NO: 916779
uuauaaaucuggguauucu

SEQ ID NO: 1183343 - RNA, 19 nt, Artificial Sequence
  Description of Artificial Sequence: Synthetic oligonucleotide
  Antisense strand to SEQ ID NO: 1183342
agaauacccagauuuauaa

SEQ ID NO: 1183344 - RNA, 19 nt, Artificial Sequence
  Description of Artificial Sequence: Synthetic oligonucleotide
  Sense strand starting at position 2717 of SEQ ID NO: 916779
uggguauucuuaccaagau

SEQ ID NO: 1183345 - RNA, 19 nt, Artificial Sequence
  Description of Artificial Sequence: Synthetic oligonucleotide
  Antisense strand to SEQ ID NO: 1183344
aucuugguaagaauaccca

SEQ ID NO: 1183346 - RNA, 19 nt, Artificial Sequence
  Description of Artificial Sequence: Synthetic oligonucleotide
  Sense strand starting at position 2792 of SEQ ID NO: 916779
acugaacgaucuguagaau

SEQ ID NO: 1183347 - RNA, 19 nt, Artificial Sequence
  Description of Artificial Sequence: Synthetic oligonucleotide
  Antisense strand to SEQ ID NO: 1183346
auucuacagaucguucagu

SEQ ID NO: 1183348 - RNA, 19 nt, Artificial Sequence
  Description of Artificial Sequence: Synthetic oligonucleotide
  Sense strand starting at position 2795 of SEQ ID NO: 916779
gaacgaucuguagaauguc

SEQ ID NO: 1183349 - RNA, 19 nt, Artificial Sequence
  Description of Artificial Sequence: Synthetic oligonucleotide
  Antisense strand to SEQ ID NO: 1183348
gacauucuacagaucguuc

SEQ ID NO: 1183350 - RNA, 19 nt, Artificial Sequence
  Description of Artificial Sequence: Synthetic oligonucleotide
  Sense strand starting at position 2803 of SEQ ID NO: 916779
uguagaaugucaucaaugg

SEQ ID NO: 1183351 - RNA, 19 nt, Artificial Sequence
  Description of Artificial Sequence: Synthetic oligonucleotide
  Antisense strand to SEQ ID NO: 1183350
ccauugaugacauucuaca

SEQ ID NO: 1183352 - RNA, 19 nt, Artificial Sequence
  Description of Artificial Sequence: Synthetic oligonucleotide
  Sense strand starting at position 2927 of SEQ ID NO: 916779
agaggaguugccuagcuga

SEQ ID NO: 1183353 - RNA, 19 nt, Artificial Sequence
  Description of Artificial Sequence: Synthetic oligonucleotide
  Antisense strand to SEQ ID NO: 1183352
ucagcuaggcaacuccucu

SEQ ID NO: 1183354 - RNA, 19 nt, Artificial Sequence
  Description of Artificial Sequence: Synthetic oligonucleotide
  Sense strand starting at position 2979 of SEQ ID NO: 916779
ucaaacauuguaugguuua

SEQ ID NO: 1183355 - RNA, 19 nt, Artificial Sequence
  Description of Artificial Sequence: Synthetic oligonucleotide
  Antisense strand to SEQ ID NO: 1183354
uaaaccauacaauguuuga

SEQ ID NO: 1183356 - RNA, 19 nt, Artificial Sequence
  Description of Artificial Sequence: Synthetic oligonucleotide
  Sense strand starting at position 2982 of SEQ ID NO: 916779
aacauuguaugguuuauga

SEQ ID NO: 1183357 - RNA, 19 nt, Artificial Sequence
  Description of Artificial Sequence: Synthetic oligonucleotide
  Antisense strand to SEQ ID NO: 1183356
ucauaaaccauacaauguu

SEQ ID NO: 1183358 - RNA, 19 nt, Artificial Sequence
  Description of Artificial Sequence: Synthetic oligonucleotide
  Sense strand starting at position 2984 of SEQ ID NO: 916779
cauuguaugguuuaugagu

SEQ ID NO: 1183359 - RNA, 19 nt, Artificial Sequence
  Description of Artificial Sequence: Synthetic oligonucleotide
  Antisense strand to SEQ ID NO: 1183358
acucauaaaccauacaaug

SEQ ID NO: 1183360 - RNA, 19 nt, Artificial Sequence
  Description of Artificial Sequence: Synthetic oligonucleotide
  Sense strand starting at position 2998 of SEQ ID NO: 916779
ugaguuuccugaucacuaa

SEQ ID NO: 1183361 - RNA, 19 nt, Artificial Sequence
  Description of Artificial Sequence: Synthetic oligonucleotide
  Antisense strand to SEQ ID NO: 1183360
uuagugaucaggaaacuca

SEQ ID NO: 1183362 - RNA, 19 nt, Artificial Sequence
  Description of Artificial Sequence: Synthetic oligonucleotide
  Sense strand starting at position 3096 of SEQ ID NO: 916779
uguguuuguguuguacuca

SEQ ID NO: 1183363 - RNA, 19 nt, Artificial Sequence
  Description of Artificial Sequence: Synthetic oligonucleotide
  Antisense strand to SEQ ID NO: 1183362
ugaguacaacacaaacaca

SEQ ID NO: 1183364 - RNA, 19 nt, Artificial Sequence
  Description of Artificial Sequence: Synthetic oligonucleotide
  Sense strand starting at position 3162 of SEQ ID NO: 916779
aggaauguaccauguguga

SEQ ID NO: 1183365 - RNA, 19 nt, Artificial Sequence
  Description of Artificial Sequence: Synthetic oligonucleotide
  Antisense strand to SEQ ID NO: 1183364
ucacacaugguacauuccu

SEQ ID NO: 1183366 - RNA, 19 nt, Artificial Sequence
  Description of Artificial Sequence: Synthetic oligonucleotide
  Sense strand starting at position 3229 of SEQ ID NO: 916779
gcauauaguagguaguuaa

SEQ ID NO: 1183367 - RNA, 19 nt, Artificial Sequence
  Description of Artificial Sequence: Synthetic oligonucleotide
  Antisense strand to SEQ ID NO: 1183366
uuaacuaccuacuauaugc

SEQ ID NO: 1183368 - RNA, 19 nt, Artificial Sequence
  Description of Artificial Sequence: Synthetic oligonucleotide
  Sense strand starting at position 3232 of SEQ ID NO: 916779
uauaguagguaguuaaaga

SEQ ID NO: 1183369 - RNA, 19 nt, Artificial Sequence
  Description of Artificial Sequence: Synthetic oligonucleotide
  Antisense strand to SEQ ID NO: 1183368
ucuuuaacuaccuacuaua

SEQ ID NO: 1183370 - RNA, 19 nt, Artificial Sequence
  Description of Artificial Sequence: Synthetic oligonucleotide
  Sense strand starting at position 3285 of SEQ ID NO: 916779
gaaguugugauaggauaug

SEQ ID NO: 1183371 - RNA, 19 nt, Artificial Sequence
  Description of Artificial Sequence: Synthetic oligonucleotide
  Antisense strand to SEQ ID NO: 1183370
cauauccuaucacaacuuc

SEQ ID NO: 1183372 - RNA, 19 nt, Artificial Sequence
  Description of Artificial Sequence: Synthetic oligonucleotide
  Sense strand starting at position 3290 of SEQ ID NO: 916779
ugugauaggauauguuuga

SEQ ID NO: 1183373 - RNA, 19 nt, Artificial Sequence
  Description of Artificial Sequence: Synthetic oligonucleotide
  Antisense strand to SEQ ID NO: 1183372
ucaaacauauccuaucaca

SEQ ID NO: 1183374 - RNA, 19 nt, Artificial Sequence
  Description of Artificial Sequence: Synthetic oligonucleotide
  Sense strand starting at position 3411 of SEQ ID NO: 916779
ugucuuagcaugcagaaga

SEQ ID NO: 1183375 - RNA, 19 nt, Artificial Sequence
  Description of Artificial Sequence: Synthetic oligonucleotide
  Antisense strand to SEQ ID NO: 1183374
ucuucugcaugcuaagaca

SEQ ID NO: 1183376 - RNA, 19 nt, Artificial Sequence
  Description of Artificial Sequence: Synthetic oligonucleotide
  Sense strand starting at position 3421 of SEQ ID NO: 916779
ugcagaagaucuuugaagu

SEQ ID NO: 1183377 - RNA, 19 nt, Artificial Sequence
  Description of Artificial Sequence: Synthetic oligonucleotide
  Antisense strand to SEQ ID NO: 1183376
acuucaaagaucuucugca

SEQ ID NO: 1183378 - RNA, 19 nt, Artificial Sequence
  Description of Artificial Sequence: Synthetic oligonucleotide
  Sense strand starting at position 3422 of SEQ ID NO: 916779
gcagaagaucuuugaaguc

SEQ ID NO: 1183379 - RNA, 19 nt, Artificial Sequence
  Description of Artificial Sequence: Synthetic oligonucleotide
  Antisense strand to SEQ ID NO: 1183378
gacuucaaagaucuucugc

SEQ ID NO: 1183380 - RNA, 19 nt, Artificial Sequence
  Description of Artificial Sequence: Synthetic oligonucleotide
  Sense strand starting at position 3561 of SEQ ID NO: 916779
ucuuauacucagggcaaga

SEQ ID NO: 1183381 - RNA, 19 nt, Artificial Sequence
  Description of Artificial Sequence: Synthetic oligonucleotide
  Antisense strand to SEQ ID NO: 1183380
ucuugcccugaguauaaga

SEQ ID NO: 1183382 - RNA, 19 nt, Artificial Sequence
  Description of Artificial Sequence: Synthetic oligonucleotide
  Sense strand starting at position 3602 of SEQ ID NO: 916779
gugacccuauaucuguaaa

SEQ ID NO: 1183383 - RNA, 19 nt, Artificial Sequence
  Description of Artificial Sequence: Synthetic oligonucleotide
  Antisense strand to SEQ ID NO: 1183382
uuuacagauauagggucac

SEQ ID NO: 1183384 - RNA, 19 nt, Artificial Sequence
  Description of Artificial Sequence: Synthetic oligonucleotide
  Sense strand starting at position 3634 of SEQ ID NO: 916779
gagacuugaguuggaauuc

SEQ ID NO: 1183385 - RNA, 19 nt, Artificial Sequence
  Description of Artificial Sequence: Synthetic oligonucleotide
  Antisense strand to SEQ ID NO: 1183384
gaauuccaacucaagucuc

SEQ ID NO: 1183386 - RNA, 19 nt, Artificial Sequence
  Description of Artificial Sequence: Synthetic oligonucleotide
  Sense strand starting at position 3676 of SEQ ID NO: 916779
aagaguuauugaccagccu

SEQ ID NO: 1183387 - RNA, 19 nt, Artificial Sequence
  Description of Artificial Sequence: Synthetic oligonucleotide
  Antisense strand to SEQ ID NO: 1183386
aggcuggucaauaacucuu

SEQ ID NO: 1183388 - RNA, 19 nt, Artificial Sequence
  Description of Artificial Sequence: Synthetic oligonucleotide
  Sense strand starting at position 46 of SEQ ID NO: 916780
uguuuaauuggugagccaa

SEQ ID NO: 1183389 - RNA, 19 nt, Artificial Sequence
  Description of Artificial Sequence: Synthetic oligonucleotide
  Antisense strand to SEQ ID NO: 1183388
uuggcucaccaauuaaaca

SEQ ID NO: 1183390 - RNA, 19 nt, Artificial Sequence
  Description of Artificial Sequence: Synthetic oligonucleotide
  Sense strand starting at position 503 of SEQ ID NO: 916780
acaucaaauugggugaauu

SEQ ID NO: 1183391 - RNA, 19 nt, Artificial Sequence
  Description of Artificial Sequence: Synthetic oligonucleotide
  Antisense strand to SEQ ID NO: 1183390
aauucacccaauuugaugu

SEQ ID NO: 1183392 - RNA, 19 nt, Artificial Sequence
  Description of Artificial Sequence: Synthetic oligonucleotide
  Sense strand starting at position 728 of SEQ ID NO: 916780
caaugaaucgcuuaguaag

SEQ ID NO: 1183393 - RNA, 19 nt, Artificial Sequence
  Description of Artificial Sequence: Synthetic oligonucleotide
  Antisense strand to SEQ ID NO: 1183392
cuuacuaagcgauucauug

SEQ ID NO: 1183394 - RNA, 19 nt, Artificial Sequence
  Description of Artificial Sequence: Synthetic oligonucleotide
  Sense strand starting at position 730 of SEQ ID NO: 916780
augaaucgcuuaguaagaa

SEQ ID NO: 1183395 - RNA, 19 nt, Artificial Sequence
  Description of Artificial Sequence: Synthetic oligonucleotide
  Antisense strand to SEQ ID NO: 1183394
uucuuacuaagcgauucau

SEQ ID NO: 1183396 - RNA, 19 nt, Artificial Sequence
  Description of Artificial Sequence: Synthetic oligonucleotide
  Sense strand starting at position 814 of SEQ ID NO: 916780
uaauuugguuaugugcaua

SEQ ID NO: 1183397 - RNA, 19 nt, Artificial Sequence
  Description of Artificial Sequence: Synthetic oligonucleotide
  Antisense strand to SEQ ID NO: 1183396
uaugcacauaaccaaauua

SEQ ID NO: 1183398 - RNA, 19 nt, Artificial Sequence
  Description of Artificial Sequence: Synthetic oligonucleotide
  Sense strand starting at position 1073 of SEQ ID NO: 916780
augcaagaaguuugacauc

SEQ ID NO: 1183399 - RNA, 19 nt, Artificial Sequence
  Description of Artificial Sequence: Synthetic oligonucleotide
  Antisense strand to SEQ ID NO: 1183398
gaugucaaacuucuugcau

SEQ ID NO: 1183400 - RNA, 19 nt, Artificial Sequence
  Description of Artificial Sequence: Synthetic oligonucleotide
  Sense strand starting at position 1127 of SEQ ID NO: 916780
agguacuauguguaauagu

SEQ ID NO: 1183401 - RNA, 19 nt, Artificial Sequence
  Description of Artificial Sequence: Synthetic oligonucleotide
  Antisense strand to SEQ ID NO: 1183400
acuauuacacauaguaccu

SEQ ID NO: 1183402 - RNA, 19 nt, Artificial Sequence
  Description of Artificial Sequence: Synthetic oligonucleotide
  Sense strand starting at position 1278 of SEQ ID NO: 916780
auucuuuaggcucaaguga

SEQ ID NO: 1183403 - RNA, 19 nt, Artificial Sequence
  Description of Artificial Sequence: Synthetic oligonucleotide
  Antisense strand to SEQ ID NO: 1183402
ucacuugagccuaaagaau

SEQ ID NO: 1183404 - RNA, 19 nt, Artificial Sequence
  Description of Artificial Sequence: Synthetic oligonucleotide
  Sense strand starting at position 1305 of SEQ ID NO: 916780
guagcaugucaccauuaua

SEQ ID NO: 1183405 - RNA, 19 nt, Artificial Sequence
  Description of Artificial Sequence: Synthetic oligonucleotide
  Antisense strand to SEQ ID NO: 1183404
uauaauggugacaugcuac

SEQ ID NO: 1183406 - RNA, 19 nt, Artificial Sequence
  Description of Artificial Sequence: Synthetic oligonucleotide
  Sense strand starting at position 1308 of SEQ ID NO: 916780
gcaugucaccauuauaaug

SEQ ID NO: 1183407 - RNA, 19 nt, Artificial Sequence
  Description of Artificial Sequence: Synthetic oligonucleotide
  Antisense strand to SEQ ID NO: 1183406
cauuauaauggugacaugc

SEQ ID NO: 1183408 - RNA, 19 nt, Artificial Sequence
  Description of Artificial Sequence: Synthetic oligonucleotide
  Sense strand starting at position 1318 of SEQ ID NO: 916780
auuauaaugugaccgaaac

SEQ ID NO: 1183409 - RNA, 19 nt, Artificial Sequence
  Description of Artificial Sequence: Synthetic oligonucleotide
  Antisense strand to SEQ ID NO: 1183408
guuucggucacauuauaau

SEQ ID NO: 1183410 - RNA, 19 nt, Artificial Sequence
  Description of Artificial Sequence: Synthetic oligonucleotide
  Sense strand starting at position 1391 of SEQ ID NO: 916780
ugcucaguuccagaacauc

SEQ ID NO: 1183411 - RNA, 19 nt, Artificial Sequence
  Description of Artificial Sequence: Synthetic oligonucleotide
  Antisense strand to SEQ ID NO: 1183410
gauguucuggaacugagca

SEQ ID NO: 1183412 - RNA, 19 nt, Artificial Sequence
  Description of Artificial Sequence: Synthetic oligonucleotide
  Sense strand starting at position 1505 of SEQ ID NO: 916780
cagagcagaugaguucuau

SEQ ID NO: 1183413 - RNA, 19 nt, Artificial Sequence
  Description of Artificial Sequence: Synthetic oligonucleotide
  Antisense strand to SEQ ID NO: 1183412
auagaacucaucugcucug

SEQ ID NO: 1183414 - RNA, 19 nt, Artificial Sequence
  Description of Artificial Sequence: Synthetic oligonucleotide
  Sense strand starting at position 1536 of SEQ ID NO: 916780
uugggaacuaguggguaua

SEQ ID NO: 1183415 - RNA, 19 nt, Artificial Sequence
  Description of Artificial Sequence: Synthetic oligonucleotide
  Antisense strand to SEQ ID NO: 1183414
uauacccacuaguucccaa

SEQ ID NO: 1183416 - RNA, 19 nt, Artificial Sequence
  Description of Artificial Sequence: Synthetic oligonucleotide
  Sense strand starting at position 1537 of SEQ ID NO: 916780
ugggaacuaguggguauaa

SEQ ID NO: 1183417 - RNA, 19 nt, Artificial Sequence
  Description of Artificial Sequence: Synthetic oligonucleotide
  Antisense strand to SEQ ID NO: 1183416
uuauacccacuaguuccca

SEQ ID NO: 1183418 - RNA, 19 nt, Artificial Sequence
  Description of Artificial Sequence: Synthetic oligonucleotide
  Sense strand starting at position 1571 of SEQ ID NO: 916780
gugagaaguaggugggaua

SEQ ID NO: 1183419 - RNA, 19 nt, Artificial Sequence
  Description of Artificial Sequence: Synthetic oligonucleotide
  Antisense strand to SEQ ID NO: 1183418
uaucccaccuacuucucac

SEQ ID NO: 1183420 - RNA, 19 nt, Artificial Sequence
  Description of Artificial Sequence: Synthetic oligonucleotide
  Sense strand starting at position 1606 of SEQ ID NO: 916780
cuguuauuccuaugaauug

SEQ ID NO: 1183421 - RNA, 19 nt, Artificial Sequence
  Description of Artificial Sequence: Synthetic oligonucleotide
  Antisense strand to SEQ ID NO: 1183420
caauucauaggaauaacag

SEQ ID NO: 1183422 - RNA, 19 nt, Artificial Sequence
  Description of Artificial Sequence: Synthetic oligonucleotide
  Sense strand starting at position 1622 of SEQ ID NO: 916780
uuguaaacaucaguagaac

SEQ ID NO: 1183423 - RNA, 19 nt, Artificial Sequence
  Description of Artificial Sequence: Synthetic oligonucleotide
  Antisense strand to SEQ ID NO: 1183422
guucuacugauguuuacaa

SEQ ID NO: 1183424 - RNA, 19 nt, Artificial Sequence
  Description of Artificial Sequence: Synthetic oligonucleotide
  Sense strand starting at position 1739 of SEQ ID NO: 916780
gaaagauaaugugccuauc

SEQ ID NO: 1183425 - RNA, 19 nt, Artificial Sequence
  Description of Artificial Sequence: Synthetic oligonucleotide
  Antisense strand to SEQ ID NO: 1183424
gauaggcacauuaucuuuc

SEQ ID NO: 1183426 - RNA, 19 nt, Artificial Sequence
  Description of Artificial Sequence: Synthetic oligonucleotide
  Sense strand starting at position 1742 of SEQ ID NO: 916780
agauaaugugccuaucauc

SEQ ID NO: 1183427 - RNA, 19 nt, Artificial Sequence
  Description of Artificial Sequence: Synthetic oligonucleotide
  Antisense strand to SEQ ID NO: 1183426
gaugauaggcacauuaucu

SEQ ID NO: 1183428 - RNA, 19 nt, Artificial Sequence
  Description of Artificial Sequence: Synthetic oligonucleotide
  Sense strand starting at position 1753 of SEQ ID NO: 916780
cuaucaucccagugagaua

SEQ ID NO: 1183429 - RNA, 19 nt, Artificial Sequence
  Description of Artificial Sequence: Synthetic oligonucleotide
  Antisense strand to SEQ ID NO: 1183428
uaucucacugggaugauag

SEQ ID NO: 1183430 - RNA, 19 nt, Artificial Sequence
  Description of Artificial Sequence: Synthetic oligonucleotide
  Sense strand starting at position 1809 of SEQ ID NO: 916780
auaugaaauacgugguuaa

SEQ ID NO: 1183431 - RNA, 19 nt, Artificial Sequence
  Description of Artificial Sequence: Synthetic oligonucleotide
  Antisense strand to SEQ ID NO: 1183430
uuaaccacguauuucauau

SEQ ID NO: 1183432 - RNA, 19 nt, Artificial Sequence
  Description of Artificial Sequence: Synthetic oligonucleotide
  Sense strand starting at position 1810 of SEQ ID NO: 916780
uaugaaauacgugguuaau

SEQ ID NO: 1183433 - RNA, 19 nt, Artificial Sequence
  Description of Artificial Sequence: Synthetic oligonucleotide
  Antisense strand to SEQ ID NO: 1183432
auuaaccacguauuucaua

SEQ ID NO: 1183434 - RNA, 19 nt, Artificial Sequence
  Description of Artificial Sequence: Synthetic oligonucleotide
  Sense strand starting at position 1813 of SEQ ID NO: 916780
gaaauacgugguuaauggu

SEQ ID NO: 1183435 - RNA, 19 nt, Artificial Sequence
  Description of Artificial Sequence: Synthetic oligonucleotide
  Antisense strand to SEQ ID NO: 1183434
accauuaaccacguauuuc

SEQ ID NO: 1183436 - RNA, 19 nt, Artificial Sequence
  Description of Artificial Sequence: Synthetic oligonucleotide
  Sense strand starting at position 1820 of SEQ ID NO: 916780
gugguuaaugguuaacaug

SEQ ID NO: 1183437 - RNA, 19 nt, Artificial Sequence
  Description of Artificial Sequence: Synthetic oligonucleotide
  Antisense strand to SEQ ID NO: 1183436
cauguuaaccauuaaccac

SEQ ID NO: 1183438 - RNA, 19 nt, Artificial Sequence
  Description of Artificial Sequence: Synthetic oligonucleotide
  Sense strand starting at position 1894 of SEQ ID NO: 916780
accagauuugccuguuccu

SEQ ID NO: 1183439 - RNA, 19 nt, Artificial Sequence
  Description of Artificial Sequence: Synthetic oligonucleotide
  Antisense strand to SEQ ID NO: 1183438
aggaacaggcaaaucuggu

SEQ ID NO: 1183440 - RNA, 19 nt, Artificial Sequence
  Description of Artificial Sequence: Synthetic oligonucleotide
  Sense strand starting at position 2145 of SEQ ID NO: 916780
uggaguuacuguuuagaca

SEQ ID NO: 1183441 - RNA, 19 nt, Artificial Sequence
  Description of Artificial Sequence: Synthetic oligonucleotide
  Antisense strand to SEQ ID NO: 1183440
ugucuaaacaguaacucca

SEQ ID NO: 1183442 - RNA, 19 nt, Artificial Sequence
  Description of Artificial Sequence: Synthetic oligonucleotide
  Sense strand starting at position 2146 of SEQ ID NO: 916780
ggaguuacuguuuagacac

SEQ ID NO: 1183443 - RNA, 19 nt, Artificial Sequence
  Description of Artificial Sequence: Synthetic oligonucleotide
  Antisense strand to SEQ ID NO: 1183442
gugucuaaacaguaacucc

SEQ ID NO: 1183444 - RNA, 19 nt, Artificial Sequence
  Description of Artificial Sequence: Synthetic oligonucleotide
  Sense strand starting at position 2307 of SEQ ID NO: 916780
ggguaaacaucucuguaaa

SEQ ID NO: 1183445 - RNA, 19 nt, Artificial Sequence
  Description of Artificial Sequence: Synthetic oligonucleotide
  Antisense strand to SEQ ID NO: 1183444
uuuacagagauguuuaccc

SEQ ID NO: 1183446 - RNA, 19 nt, Artificial Sequence
  Description of Artificial Sequence: Synthetic oligonucleotide
  Sense strand starting at position 2308 of SEQ ID NO: 916780
gguaaacaucucuguaaau

SEQ ID NO: 1183447 - RNA, 19 nt, Artificial Sequence
  Description of Artificial Sequence: Synthetic oligonucleotide
  Antisense strand to SEQ ID NO: 1183446
auuuacagagauguuuacc

SEQ ID NO: 1183448 - RNA, 19 nt, Artificial Sequence
  Description of Artificial Sequence: Synthetic oligonucleotide
  Sense strand starting at position 2309 of SEQ ID NO: 916780
guaaacaucucuguaaauu

SEQ ID NO: 1183449 - RNA, 19 nt, Artificial Sequence
  Description of Artificial Sequence: Synthetic oligonucleotide
  Antisense strand to SEQ ID NO: 1183448
aauuuacagagauguuuac

SEQ ID NO: 1183450 - RNA, 19 nt, Artificial Sequence
  Description of Artificial Sequence: Synthetic oligonucleotide
  Sense strand starting at position 2357 of SEQ ID NO: 916780
auuaguaucugagccuaua

SEQ ID NO: 1183451 - RNA, 19 nt, Artificial Sequence
  Description of Artificial Sequence: Synthetic oligonucleotide
  Antisense strand to SEQ ID NO: 1183450
uauaggcucagauacuaau

SEQ ID NO: 1183452 - RNA, 19 nt, Artificial Sequence
  Description of Artificial Sequence: Synthetic oligonucleotide
  Sense strand starting at position 2437 of SEQ ID NO: 916780
acaacuaucuaggauuuag

SEQ ID NO: 1183453 - RNA, 19 nt, Artificial Sequence
  Description of Artificial Sequence: Synthetic oligonucleotide
  Antisense strand to SEQ ID NO: 1183452
cuaaauccuagauaguugu

SEQ ID NO: 1183454 - RNA, 19 nt, Artificial Sequence
  Description of Artificial Sequence: Synthetic oligonucleotide
  Sense strand starting at position 2452 of SEQ ID NO: 916780
uuagaaguuuagguuggau

SEQ ID NO: 1183455 - RNA, 19 nt, Artificial Sequence
  Description of Artificial Sequence: Synthetic oligonucleotide
  Antisense strand to SEQ ID NO: 1183454
auccaaccuaaacuucuaa

SEQ ID NO: 1183456 - RNA, 19 nt, Artificial Sequence
  Description of Artificial Sequence: Synthetic oligonucleotide
  Sense strand starting at position 2464 of SEQ ID NO: 916780
guuggauaccaaugcaaau

SEQ ID NO: 1183457 - RNA, 19 nt, Artificial Sequence
  Description of Artificial Sequence: Synthetic oligonucleotide
  Antisense strand to SEQ ID NO: 1183456
auuugcauugguauccaac

SEQ ID NO: 1183458 - RNA, 19 nt, Artificial Sequence
  Description of Artificial Sequence: Synthetic oligonucleotide
  Sense strand starting at position 2488 of SEQ ID NO: 916780
ucuagaccauguuugugaa

SEQ ID NO: 1183459 - RNA, 19 nt, Artificial Sequence
  Description of Artificial Sequence: Synthetic oligonucleotide
  Antisense strand to SEQ ID NO: 1183458
uucacaaacauggucuaga

SEQ ID NO: 1183460 - RNA, 19 nt, Artificial Sequence
  Description of Artificial Sequence: Synthetic oligonucleotide
  Sense strand starting at position 2489 of SEQ ID NO: 916780
cuagaccauguuugugaau

SEQ ID NO: 1183461 - RNA, 19 nt, Artificial Sequence
  Description of Artificial Sequence: Synthetic oligonucleotide
  Antisense strand to SEQ ID NO: 1183460
auucacaaacauggucuag

SEQ ID NO: 1183462 - RNA, 19 nt, Artificial Sequence
  Description of Artificial Sequence: Synthetic oligonucleotide
  Sense strand starting at position 2692 of SEQ ID NO: 916780
ucuguaguacauugaaauu

SEQ ID NO: 1183463 - RNA, 19 nt, Artificial Sequence
  Description of Artificial Sequence: Synthetic oligonucleotide
  Antisense strand to SEQ ID NO: 1183462
aauuucaauguacuacaga

SEQ ID NO: 1183464 - RNA, 19 nt, Artificial Sequence
  Description of Artificial Sequence: Synthetic oligonucleotide
  Sense strand starting at position 2919 of SEQ ID NO: 916780
ucuacauguguguacuaaa

SEQ ID NO: 1183465 - RNA, 19 nt, Artificial Sequence
  Description of Artificial Sequence: Synthetic oligonucleotide
  Antisense strand to SEQ ID NO: 1183464
uuuaguacacacauguaga

SEQ ID NO: 1183466 - RNA, 19 nt, Artificial Sequence
  Description of Artificial Sequence: Synthetic oligonucleotide
  Sense strand starting at position 3775 of SEQ ID NO: 916780
auguguguuccagcugcau

SEQ ID NO: 1183467 - RNA, 19 nt, Artificial Sequence
  Description of Artificial Sequence: Synthetic oligonucleotide
  Antisense strand to SEQ ID NO: 1183466
augcagcuggaacacacau

SEQ ID NO: 1183468 - RNA, 19 nt, Artificial Sequence
  Description of Artificial Sequence: Synthetic oligonucleotide
  Sense strand starting at position 137 of SEQ ID NO: 916781
gcacuuuaaguuugaacag

SEQ ID NO: 1183469 - RNA, 19 nt, Artificial Sequence
  Description of Artificial Sequence: Synthetic oligonucleotide
  Antisense strand to SEQ ID NO: 1183468
cuguucaaacuuaaagugc

SEQ ID NO: 1183470 - RNA, 19 nt, Artificial Sequence
  Description of Artificial Sequence: Synthetic oligonucleotide
  Sense strand starting at position 182 of SEQ ID NO: 916781
uuugucuuccuaggaacau

SEQ ID NO: 1183471 - RNA, 19 nt, Artificial Sequence
  Description of Artificial Sequence: Synthetic oligonucleotide
  Antisense strand to SEQ ID NO: 1183470
auguuccuaggaagacaaa

SEQ ID NO: 1183472 - RNA, 19 nt, Artificial Sequence
  Description of Artificial Sequence: Synthetic oligonucleotide
  Sense strand starting at position 262 of SEQ ID NO: 916781
guguguagucuccaggaau

SEQ ID NO: 1183473 - RNA, 19 nt, Artificial Sequence
  Description of Artificial Sequence: Synthetic oligonucleotide
  Antisense strand to SEQ ID NO: 1183472
auuccuggagacuacacac

SEQ ID NO: 1183474 - RNA, 19 nt, Artificial Sequence
  Description of Artificial Sequence: Synthetic oligonucleotide
  Sense strand starting at position 395 of SEQ ID NO: 916781
gcuguuugccuauaaucuc

SEQ ID NO: 1183475 - RNA, 19 nt, Artificial Sequence
  Description of Artificial Sequence: Synthetic oligonucleotide
  Antisense strand to SEQ ID NO: 1183474
gagauuauaggcaaacagc

SEQ ID NO: 1183476 - RNA, 19 nt, Artificial Sequence
  Description of Artificial Sequence: Synthetic oligonucleotide
  Sense strand starting at position 622 of SEQ ID NO: 916781
ggccacauaguguaggauu

SEQ ID NO: 1183477 - RNA, 19 nt, Artificial Sequence
  Description of Artificial Sequence: Synthetic oligonucleotide
  Antisense strand to SEQ ID NO: 1183476
aauccuacacuauguggcc

SEQ ID NO: 1183478 - RNA, 19 nt, Artificial Sequence
  Description of Artificial Sequence: Synthetic oligonucleotide
  Sense strand starting at position 1164 of SEQ ID NO: 916781
gaagcauugcgagaacaua

SEQ ID NO: 1183479 - RNA, 19 nt, Artificial Sequence
  Description of Artificial Sequence: Synthetic oligonucleotide
  Antisense strand to SEQ ID NO: 1183478
uauguucucgcaaugcuuc

SEQ ID NO: 1183480 - RNA, 19 nt, Artificial Sequence
  Description of Artificial Sequence: Synthetic oligonucleotide
  Sense strand starting at position 1172 of SEQ ID NO: 916781
gcgagaacauagcuguuua

SEQ ID NO: 1183481 - RNA, 19 nt, Artificial Sequence
  Description of Artificial Sequence: Synthetic oligonucleotide
  Antisense strand to SEQ ID NO: 1183480
uaaacagcuauguucucgc

SEQ ID NO: 1183482 - RNA, 19 nt, Artificial Sequence
  Description of Artificial Sequence: Synthetic oligonucleotide
  Sense strand starting at position 1173 of SEQ ID NO: 916781
cgagaacauagcuguuuaa

SEQ ID NO: 1183483 - RNA, 19 nt, Artificial Sequence
  Description of Artificial Sequence: Synthetic oligonucleotide
  Antisense strand to SEQ ID NO: 1183482
uuaaacagcuauguucucg

SEQ ID NO: 1183484 - RNA, 19 nt, Artificial Sequence
  Description of Artificial Sequence: Synthetic oligonucleotide
  Sense strand starting at position 1176 of SEQ ID NO: 916781
gaacauagcuguuuaagua

SEQ ID NO: 1183485 - RNA, 19 nt, Artificial Sequence
  Description of Artificial Sequence: Synthetic oligonucleotide
  Antisense strand to SEQ ID NO: 1183484
uacuuaaacagcuauguuc

SEQ ID NO: 1183486 - RNA, 19 nt, Artificial Sequence
  Description of Artificial Sequence: Synthetic oligonucleotide
  Sense strand starting at position 1186 of SEQ ID NO: 916781
guuuaaguaggaugguuaa

SEQ ID NO: 1183487 - RNA, 19 nt, Artificial Sequence
  Description of Artificial Sequence: Synthetic oligonucleotide
  Antisense strand to SEQ ID NO: 1183486
uuaaccauccuacuuaaac

SEQ ID NO: 1183488 - RNA, 19 nt, Artificial Sequence
  Description of Artificial Sequence: Synthetic oligonucleotide
  Sense strand starting at position 1296 of SEQ ID NO: 916781
ugcaguuuccuccugugua

SEQ ID NO: 1183489 - RNA, 19 nt, Artificial Sequence
  Description of Artificial Sequence: Synthetic oligonucleotide
  Antisense strand to SEQ ID NO: 1183488
uacacaggaggaaacugca

SEQ ID NO: 1183490 - RNA, 19 nt, Artificial Sequence
  Description of Artificial Sequence: Synthetic oligonucleotide
  Sense strand starting at position 1342 of SEQ ID NO: 916781
ggucuuuguaaggaucgaa

SEQ ID NO: 1183491 - RNA, 19 nt, Artificial Sequence
  Description of Artificial Sequence: Synthetic oligonucleotide
  Antisense strand to SEQ ID NO: 1183490
uucgauccuuacaaagacc

SEQ ID NO: 1183492 - RNA, 19 nt, Artificial Sequence
  Description of Artificial Sequence: Synthetic oligonucleotide
  Sense strand starting at position 1345 of SEQ ID NO: 916781
cuuuguaaggaucgaacau

SEQ ID NO: 1183493 - RNA, 19 nt, Artificial Sequence
  Description of Artificial Sequence: Synthetic oligonucleotide
  Antisense strand to SEQ ID NO: 1183492
auguucgauccuuacaaag

SEQ ID NO: 1183494 - RNA, 19 nt, Artificial Sequence
  Description of Artificial Sequence: Synthetic oligonucleotide
  Sense strand starting at position 1551 of SEQ ID NO: 916781
gugcgaaagccgccuucuu

SEQ ID NO: 1183495 - RNA, 19 nt, Artificial Sequence
  Description of Artificial Sequence: Synthetic oligonucleotide
  Antisense strand to SEQ ID NO: 1183494
aagaaggcggcuuucgcac

SEQ ID NO: 1183496 - RNA, 19 nt, Artificial Sequence
  Description of Artificial Sequence: Synthetic oligonucleotide
  Sense strand starting at position 1563 of SEQ ID NO: 916781
ccuucuucuucggcaaaug

SEQ ID NO: 1183497 - RNA, 19 nt, Artificial Sequence
  Description of Artificial Sequence: Synthetic oligonucleotide
  Antisense strand to SEQ ID NO: 1183496
cauuugccgaagaagaagg

SEQ ID NO: 1183498 - RNA, 19 nt, Artificial Sequence
  Description of Artificial Sequence: Synthetic oligonucleotide
  Sense strand starting at position 2214 of SEQ ID NO: 916781
uuaagaucucaaggccaaa

SEQ ID NO: 1183499 - RNA, 19 nt, Artificial Sequence
  Description of Artificial Sequence: Synthetic oligonucleotide
  Antisense strand to SEQ ID NO: 1183498
uuuggccuugagaucuuaa

SEQ ID NO: 1183500 - RNA, 19 nt, Artificial Sequence
  Description of Artificial Sequence: Synthetic oligonucleotide
  Sense strand starting at position 2359 of SEQ ID NO: 916781
uauagaugccuuugcgaaa

SEQ ID NO: 1183501 - RNA, 19 nt, Artificial Sequence
  Description of Artificial Sequence: Synthetic oligonucleotide
  Antisense strand to SEQ ID NO: 1183500
uuucgcaaaggcaucuaua

SEQ ID NO: 1183502 - RNA, 19 nt, Artificial Sequence
  Description of Artificial Sequence: Synthetic oligonucleotide
  Sense strand starting at position 2360 of SEQ ID NO: 916781
auagaugccuuugcgaaag

SEQ ID NO: 1183503 - RNA, 19 nt, Artificial Sequence
  Description of Artificial Sequence: Synthetic oligonucleotide
  Antisense strand to SEQ ID NO: 1183502
cuuucgcaaaggcaucuau

SEQ ID NO: 1183504 - RNA, 19 nt, Artificial Sequence
  Description of Artificial Sequence: Synthetic oligonucleotide
  Sense strand starting at position 2404 of SEQ ID NO: 916781
caagcugggaggugaauau

SEQ ID NO: 1183505 - RNA, 19 nt, Artificial Sequence
  Description of Artificial Sequence: Synthetic oligonucleotide
  Antisense strand to SEQ ID NO: 1183504
auauucaccucccagcuug

SEQ ID NO: 1183506 - RNA, 19 nt, Artificial Sequence
  Description of Artificial Sequence: Synthetic oligonucleotide
  Sense strand starting at position 2413 of SEQ ID NO: 916781
aggugaauauuuggaaaug

SEQ ID NO: 1183507 - RNA, 19 nt, Artificial Sequence
  Description of Artificial Sequence: Synthetic oligonucleotide
  Antisense strand to SEQ ID NO: 1183506
cauuuccaaauauucaccu

SEQ ID NO: 1183508 - RNA, 19 nt, Artificial Sequence
  Description of Artificial Sequence: Synthetic oligonucleotide
  Sense strand starting at position 2414 of SEQ ID NO: 916781
ggugaauauuuggaaauga

SEQ ID NO: 1183509 - RNA, 19 nt, Artificial Sequence
  Description of Artificial Sequence: Synthetic oligonucleotide
  Antisense strand to SEQ ID NO: 1183508
ucauuuccaaauauucacc

SEQ ID NO: 1183510 - RNA, 19 nt, Artificial Sequence
  Description of Artificial Sequence: Synthetic oligonucleotide
  Sense strand starting at position 2601 of SEQ ID NO: 916781
aggacaagguccuugugau

SEQ ID NO: 1183511 - RNA, 19 nt, Artificial Sequence
  Description of Artificial Sequence: Synthetic oligonucleotide
  Antisense strand to SEQ ID NO: 1183510
aucacaaggaccuuguccu

SEQ ID NO: 1183512 - RNA, 19 nt, Artificial Sequence
  Description of Artificial Sequence: Synthetic oligonucleotide
  Sense strand starting at position 2602 of SEQ ID NO: 916781
ggacaagguccuugugauc

SEQ ID NO: 1183513 - RNA, 19 nt, Artificial Sequence
  Description of Artificial Sequence: Synthetic oligonucleotide
  Antisense strand to SEQ ID NO: 1183512
gaucacaaggaccuugucc

SEQ ID NO: 1183514 - RNA, 19 nt, Artificial Sequence
  Description of Artificial Sequence: Synthetic oligonucleotide
  Sense strand starting at position 2607 of SEQ ID NO: 916781
agguccuugugaucugaga

SEQ ID NO: 1183515 - RNA, 19 nt, Artificial Sequence
  Description of Artificial Sequence: Synthetic oligonucleotide
  Antisense strand to SEQ ID NO: 1183514
ucucagaucacaaggaccu

SEQ ID NO: 1183516 - RNA, 19 nt, Artificial Sequence
  Description of Artificial Sequence: Synthetic oligonucleotide
  Sense strand starting at position 2609 of SEQ ID NO: 916781
guccuugugaucugagaua

SEQ ID NO: 1183517 - RNA, 19 nt, Artificial Sequence
  Description of Artificial Sequence: Synthetic oligonucleotide
  Antisense strand to SEQ ID NO: 1183516
uaucucagaucacaaggac

SEQ ID NO: 1183518 - RNA, 19 nt, Artificial Sequence
  Description of Artificial Sequence: Synthetic oligonucleotide
  Sense strand starting at position 2620 of SEQ ID NO: 916781
cugagauacugaggagaau

SEQ ID NO: 1183519 - RNA, 19 nt, Artificial Sequence
  Description of Artificial Sequence: Synthetic oligonucleotide
  Antisense strand to SEQ ID NO: 1183518
auucuccucaguaucucag

SEQ ID NO: 1183520 - RNA, 19 nt, Artificial Sequence
  Description of Artificial Sequence: Synthetic oligonucleotide
  Sense strand starting at position 2663 of SEQ ID NO: 916781
uccugaggcgaggagaauu

SEQ ID NO: 1183521 - RNA, 19 nt, Artificial Sequence
  Description of Artificial Sequence: Synthetic oligonucleotide
  Antisense strand to SEQ ID NO: 1183520
aauucuccucgccucagga

SEQ ID NO: 1183522 - RNA, 19 nt, Artificial Sequence
  Description of Artificial Sequence: Synthetic oligonucleotide
  Sense strand starting at position 2671 of SEQ ID NO: 916781
cgaggagaauucuagauca

SEQ ID NO: 1183523 - RNA, 19 nt, Artificial Sequence
  Description of Artificial Sequence: Synthetic oligonucleotide
  Antisense strand to SEQ ID NO: 1183522
ugaucuagaauucuccucg

SEQ ID NO: 1183524 - RNA, 19 nt, Artificial Sequence
  Description of Artificial Sequence: Synthetic oligonucleotide
  Sense strand starting at position 3161 of SEQ ID NO: 916781
agcaauacucuuugcauag

SEQ ID NO: 1183525 - RNA, 19 nt, Artificial Sequence
  Description of Artificial Sequence: Synthetic oligonucleotide
  Antisense strand to SEQ ID NO: 1183524
cuaugcaaagaguauugcu

SEQ ID NO: 1183526 - RNA, 19 nt, Artificial Sequence
  Description of Artificial Sequence: Synthetic oligonucleotide
  Sense strand starting at position 3165 of SEQ ID NO: 916781
auacucuuugcauaggauu

SEQ ID NO: 1183527 - RNA, 19 nt, Artificial Sequence
  Description of Artificial Sequence: Synthetic oligonucleotide
  Antisense strand to SEQ ID NO: 1183526
aauccuaugcaaagaguau

SEQ ID NO: 1183528 - RNA, 19 nt, Artificial Sequence
  Description of Artificial Sequence: Synthetic oligonucleotide
  Sense strand starting at position 3228 of SEQ ID NO: 916781
caaguaugugauggcaguu

SEQ ID NO: 1183529 - RNA, 19 nt, Artificial Sequence
  Description of Artificial Sequence: Synthetic oligonucleotide
  Antisense strand to SEQ ID NO: 1183528
aacugccaucacauacuug

SEQ ID NO: 1183530 - RNA, 19 nt, Artificial Sequence
  Description of Artificial Sequence: Synthetic oligonucleotide
  Sense strand starting at position 3298 of SEQ ID NO: 916781
gggcuugugaugugacagu

SEQ ID NO: 1183531 - RNA, 19 nt, Artificial Sequence
  Description of Artificial Sequence: Synthetic oligonucleotide
  Antisense strand to SEQ ID NO: 1183530
acugucacaucacaagccc

SEQ ID NO: 1183532 - RNA, 19 nt, Artificial Sequence
  Description of Artificial Sequence: Synthetic oligonucleotide
  Sense strand starting at position 3328 of SEQ ID NO: 916781
gcuugcucccaggaaacuu

SEQ ID NO: 1183533 - RNA, 19 nt, Artificial Sequence
  Description of Artificial Sequence: Synthetic oligonucleotide
  Antisense strand to SEQ ID NO: 1183532
aaguuuccugggagcaagc

SEQ ID NO: 1183534 - RNA, 19 nt, Artificial Sequence
  Description of Artificial Sequence: Synthetic oligonucleotide
  Sense strand starting at position 3356 of SEQ ID NO: 916781
gggcuuagaucauuagcau

SEQ ID NO: 1183535 - RNA, 19 nt, Artificial Sequence
  Description of Artificial Sequence: Synthetic oligonucleotide
  Antisense strand to SEQ ID NO: 1183534
augcuaaugaucuaagccc

SEQ ID NO: 1183536 - RNA, 19 nt, Artificial Sequence
  Description of Artificial Sequence: Synthetic oligonucleotide
  Sense strand starting at position 3357 of SEQ ID NO: 916781
ggcuuagaucauuagcaug

SEQ ID NO: 1183537 - RNA, 19 nt, Artificial Sequence
  Description of Artificial Sequence: Synthetic oligonucleotide
  Antisense strand to SEQ ID NO: 1183536
caugcuaaugaucuaagcc

SEQ ID NO: 1183538 - RNA, 19 nt, Artificial Sequence
  Description of Artificial Sequence: Synthetic oligonucleotide
  Sense strand starting at position 3362 of SEQ ID NO: 916781
agaucauuagcaugccauu

SEQ ID NO: 1183539 - RNA, 19 nt, Artificial Sequence
  Description of Artificial Sequence: Synthetic oligonucleotide
  Antisense strand to SEQ ID NO: 1183538
aauggcaugcuaaugaucu

SEQ ID NO: 1183540 - RNA, 19 nt, Artificial Sequence
  Description of Artificial Sequence: Synthetic oligonucleotide
  Sense strand starting at position 3532 of SEQ ID NO: 916781
gugagauauagaugccucu

SEQ ID NO: 1183541 - RNA, 19 nt, Artificial Sequence
  Description of Artificial Sequence: Synthetic oligonucleotide
  Antisense strand to SEQ ID NO: 1183540
agaggcaucuauaucucac

SEQ ID NO: 1183542 - RNA, 19 nt, Artificial Sequence
  Description of Artificial Sequence: Synthetic oligonucleotide
  Sense strand starting at position 3535 of SEQ ID NO: 916781
agauauagaugccucugaa

SEQ ID NO: 1183543 - RNA, 19 nt, Artificial Sequence
  Description of Artificial Sequence: Synthetic oligonucleotide
  Antisense strand to SEQ ID NO: 1183542
uucagaggcaucuauaucu

SEQ ID NO: 1183544 - RNA, 19 nt, Artificial Sequence
  Description of Artificial Sequence: Synthetic oligonucleotide
  Sense strand starting at position 3819 of SEQ ID NO: 916781
aauacaagugauggguaua

SEQ ID NO: 1183545 - RNA, 19 nt, Artificial Sequence
  Description of Artificial Sequence: Synthetic oligonucleotide
  Antisense strand to SEQ ID NO: 1183544
uauacccaucacuuguauu

SEQ ID NO: 1183546 - RNA, 19 nt, Artificial Sequence
  Description of Artificial Sequence: Synthetic oligonucleotide
  Sense strand starting at position 3820 of SEQ ID NO: 916781
auacaagugauggguauaa

SEQ ID NO: 1183547 - RNA, 19 nt, Artificial Sequence
  Description of Artificial Sequence: Synthetic oligonucleotide
  Antisense strand to SEQ ID NO: 1183546
uuauacccaucacuuguau

SEQ ID NO: 1183548 - RNA, 19 nt, Artificial Sequence
  Description of Artificial Sequence: Synthetic oligonucleotide
  Sense strand starting at position 124 of SEQ ID NO: 916782
acaggauaucucuggugga

SEQ ID NO: 1183549 - RNA, 19 nt, Artificial Sequence
  Description of Artificial Sequence: Synthetic oligonucleotide
  Antisense strand to SEQ ID NO: 1183548
uccaccagagauauccugu

SEQ ID NO: 1183550 - RNA, 19 nt, Artificial Sequence
  Description of Artificial Sequence: Synthetic oligonucleotide
  Sense strand starting at position 409 of SEQ ID NO: 916782
ugagcagacacugaguuua

SEQ ID NO: 1183551 - RNA, 19 nt, Artificial Sequence
  Description of Artificial Sequence: Synthetic oligonucleotide
  Antisense strand to SEQ ID NO: 1183550
uaaacucagugucugcuca

SEQ ID NO: 1183552 - RNA, 19 nt, Artificial Sequence
  Description of Artificial Sequence: Synthetic oligonucleotide
  Sense strand starting at position 411 of SEQ ID NO: 916782
agcagacacugaguuuagu

SEQ ID NO: 1183553 - RNA, 19 nt, Artificial Sequence
  Description of Artificial Sequence: Synthetic oligonucleotide
  Antisense strand to SEQ ID NO: 1183552
acuaaacucagugucugcu

SEQ ID NO: 1183554 - RNA, 19 nt, Artificial Sequence
  Description of Artificial Sequence: Synthetic oligonucleotide
  Sense strand starting at position 421 of SEQ ID NO: 916782
gaguuuagugagggagcaa

SEQ ID NO: 1183555 - RNA, 19 nt, Artificial Sequence
  Description of Artificial Sequence: Synthetic oligonucleotide
  Antisense strand to SEQ ID NO: 1183554
uugcucccucacuaaacuc

SEQ ID NO: 1183556 - RNA, 19 nt, Artificial Sequence
  Description of Artificial Sequence: Synthetic oligonucleotide
  Sense strand starting at position 433 of SEQ ID NO: 916782
ggagcaagguuucccaaga

SEQ ID NO: 1183557 - RNA, 19 nt, Artificial Sequence
  Description of Artificial Sequence: Synthetic oligonucleotide
  Antisense strand to SEQ ID NO: 1183556
ucuugggaaaccuugcucc

SEQ ID NO: 1183558 - RNA, 19 nt, Artificial Sequence
  Description of Artificial Sequence: Synthetic oligonucleotide
  Sense strand starting at position 434 of SEQ ID NO: 916782
gagcaagguuucccaagau

SEQ ID NO: 1183559 - RNA, 19 nt, Artificial Sequence
  Description of Artificial Sequence: Synthetic oligonucleotide
  Antisense strand to SEQ ID NO: 1183558
aucuugggaaaccuugcuc

SEQ ID NO: 1183560 - RNA, 19 nt, Artificial Sequence
  Description of Artificial Sequence: Synthetic oligonucleotide
  Sense strand starting at position 571 of SEQ ID NO: 916782
gguggugcaacaugaaaga

SEQ ID NO: 1183561 - RNA, 19 nt, Artificial Sequence
  Description of Artificial Sequence: Synthetic oligonucleotide
  Antisense strand to SEQ ID NO: 1183560
ucuuucauguugcaccacc

SEQ ID NO: 1183562 - RNA, 19 nt, Artificial Sequence
  Description of Artificial Sequence: Synthetic oligonucleotide
  Sense strand starting at position 619 of SEQ ID NO: 916782
ggguuuggagcucaaaucu

SEQ ID NO: 1183563 - RNA, 19 nt, Artificial Sequence
  Description of Artificial Sequence: Synthetic oligonucleotide
  Antisense strand to SEQ ID NO: 1183562
agauuugagcuccaaaccc

SEQ ID NO: 1183564 - RNA, 19 nt, Artificial Sequence
  Description of Artificial Sequence: Synthetic oligonucleotide
  Sense strand starting at position 628 of SEQ ID NO: 916782
gcucaaaucugacuggauu

SEQ ID NO: 1183565 - RNA, 19 nt, Artificial Sequence
  Description of Artificial Sequence: Synthetic oligonucleotide
  Antisense strand to SEQ ID NO: 1183564
aauccagucagauuugagc

SEQ ID NO: 1183566 - RNA, 19 nt, Artificial Sequence
  Description of Artificial Sequence: Synthetic oligonucleotide
  Sense strand starting at position 666 of SEQ ID NO: 916782
cuuacuaguuauguaacau

SEQ ID NO: 1183567 - RNA, 19 nt, Artificial Sequence
  Description of Artificial Sequence: Synthetic oligonucleotide
  Antisense strand to SEQ ID NO: 1183566
auguuacauaacuaguaag

SEQ ID NO: 1183568 - RNA, 19 nt, Artificial Sequence
  Description of Artificial Sequence: Synthetic oligonucleotide
  Sense strand starting at position 684 of SEQ ID NO: 916782
uugggaugguuccuaaauu

SEQ ID NO: 1183569 - RNA, 19 nt, Artificial Sequence
  Description of Artificial Sequence: Synthetic oligonucleotide
  Antisense strand to SEQ ID NO: 1183568
aauuuaggaaccaucccaa

SEQ ID NO: 1183570 - RNA, 19 nt, Artificial Sequence
  Description of Artificial Sequence: Synthetic oligonucleotide
  Sense strand starting at position 692 of SEQ ID NO: 916782
guuccuaaauuguccuaaa

SEQ ID NO: 1183571 - RNA, 19 nt, Artificial Sequence
  Description of Artificial Sequence: Synthetic oligonucleotide
  Antisense strand to SEQ ID NO: 1183570
uuuaggacaauuuaggaac

SEQ ID NO: 1183572 - RNA, 19 nt, Artificial Sequence
  Description of Artificial Sequence: Synthetic oligonucleotide
  Sense strand starting at position 776 of SEQ ID NO: 916782
ggcuuuaagggccauagaa

SEQ ID NO: 1183573 - RNA, 19 nt, Artificial Sequence
  Description of Artificial Sequence: Synthetic oligonucleotide
  Antisense strand to SEQ ID NO: 1183572
uucuauggcccuuaaagcc

SEQ ID NO: 1183574 - RNA, 19 nt, Artificial Sequence
  Description of Artificial Sequence: Synthetic oligonucleotide
  Sense strand starting at position 846 of SEQ ID NO: 916782
gggacagaugccuaauggu

SEQ ID NO: 1183575 - RNA, 19 nt, Artificial Sequence
  Description of Artificial Sequence: Synthetic oligonucleotide
  Antisense strand to SEQ ID NO: 1183574
accauuaggcaucuguccc

SEQ ID NO: 1183576 - RNA, 19 nt, Artificial Sequence
  Description of Artificial Sequence: Synthetic oligonucleotide
  Sense strand starting at position 1204 of SEQ ID NO: 916782
ucagcugguccuuaaagga

SEQ ID NO: 1183577 - RNA, 19 nt, Artificial Sequence
  Description of Artificial Sequence: Synthetic oligonucleotide
  Antisense strand to SEQ ID NO: 1183576
uccuuuaaggaccagcuga

SEQ ID NO: 1183578 - RNA, 19 nt, Artificial Sequence
  Description of Artificial Sequence: Synthetic oligonucleotide
  Sense strand starting at position 1371 of SEQ ID NO: 916782
guggaagaguccguuagga

SEQ ID NO: 1183579 - RNA, 19 nt, Artificial Sequence
  Description of Artificial Sequence: Synthetic oligonucleotide
  Antisense strand to SEQ ID NO: 1183578
uccuaacggacucuuccac

SEQ ID NO: 1183580 - RNA, 19 nt, Artificial Sequence
  Description of Artificial Sequence: Synthetic oligonucleotide
  Sense strand starting at position 1588 of SEQ ID NO: 916782
uuuaauagaggccauuauu

SEQ ID NO: 1183581 - RNA, 19 nt, Artificial Sequence
  Description of Artificial Sequence: Synthetic oligonucleotide
  Antisense strand to SEQ ID NO: 1183580
aauaauggccucuauuaaa

SEQ ID NO: 1183582 - RNA, 19 nt, Artificial Sequence
  Description of Artificial Sequence: Synthetic oligonucleotide
  Sense strand starting at position 2123 of SEQ ID NO: 916782
gcagcuagugaucaacaug

SEQ ID NO: 1183583 - RNA, 19 nt, Artificial Sequence
  Description of Artificial Sequence: Synthetic oligonucleotide
  Antisense strand to SEQ ID NO: 1183582
cauguugaucacuagcugc

SEQ ID NO: 1183584 - RNA, 19 nt, Artificial Sequence
  Description of Artificial Sequence: Synthetic oligonucleotide
  Sense strand starting at position 2126 of SEQ ID NO: 916782
gcuagugaucaacauggca

SEQ ID NO: 1183585 - RNA, 19 nt, Artificial Sequence
  Description of Artificial Sequence: Synthetic oligonucleotide
  Antisense strand to SEQ ID NO: 1183584
ugccauguugaucacuagc

SEQ ID NO: 1183586 - RNA, 19 nt, Artificial Sequence
  Description of Artificial Sequence: Synthetic oligonucleotide
  Sense strand starting at position 2212 of SEQ ID NO: 916782
agcagaaagugaguguuau

SEQ ID NO: 1183587 - RNA, 19 nt, Artificial Sequence
  Description of Artificial Sequence: Synthetic oligonucleotide
  Antisense strand to SEQ ID NO: 1183586
auaacacucacuuucugcu

SEQ ID NO: 1183588 - RNA, 19 nt, Artificial Sequence
  Description of Artificial Sequence: Synthetic oligonucleotide
  Sense strand starting at position 2500 of SEQ ID NO: 916782
gaagcuauuggaggacuuu

SEQ ID NO: 1183589 - RNA, 19 nt, Artificial Sequence
  Description of Artificial Sequence: Synthetic oligonucleotide
  Antisense strand to SEQ ID NO: 1183588
aaaguccuccaauagcuuc

SEQ ID NO: 1183590 - RNA, 19 nt, Artificial Sequence
  Description of Artificial Sequence: Synthetic oligonucleotide
  Sense strand starting at position 2988 of SEQ ID NO: 916782
auauuauccugcuugauga

SEQ ID NO: 1183591 - RNA, 19 nt, Artificial Sequence
  Description of Artificial Sequence: Synthetic oligonucleotide
  Antisense strand to SEQ ID NO: 1183590
ucaucaagcaggauaauau

SEQ ID NO: 1183592 - RNA, 19 nt, Artificial Sequence
  Description of Artificial Sequence: Synthetic oligonucleotide
  Sense strand starting at position 2996 of SEQ ID NO: 916782
cugcuugaugagcacuuua

SEQ ID NO: 1183593 - RNA, 19 nt, Artificial Sequence
  Description of Artificial Sequence: Synthetic oligonucleotide
  Antisense strand to SEQ ID NO: 1183592
uaaagugcucaucaagcag

SEQ ID NO: 1183594 - RNA, 19 nt, Artificial Sequence
  Description of Artificial Sequence: Synthetic oligonucleotide
  Sense strand starting at position 3057 of SEQ ID NO: 916782
uacucaaugcuggguuaag

SEQ ID NO: 1183595 - RNA, 19 nt, Artificial Sequence
  Description of Artificial Sequence: Synthetic oligonucleotide
  Antisense strand to SEQ ID NO: 1183594
cuuaacccagcauugagua

SEQ ID NO: 1183596 - RNA, 19 nt, Artificial Sequence
  Description of Artificial Sequence: Synthetic oligonucleotide
  Sense strand starting at position 3074 of SEQ ID NO: 916782
aggagucuagauuguauuc

SEQ ID NO: 1183597 - RNA, 19 nt, Artificial Sequence
  Description of Artificial Sequence: Synthetic oligonucleotide
  Antisense strand to SEQ ID NO: 1183596
gaauacaaucuagacuccu

SEQ ID NO: 1183598 - RNA, 19 nt, Artificial Sequence
  Description of Artificial Sequence: Synthetic oligonucleotide
  Sense strand starting at position 3090 of SEQ ID NO: 916782
uucaguaggugguugagaa

SEQ ID NO: 1183599 - RNA, 19 nt, Artificial Sequence
  Description of Artificial Sequence: Synthetic oligonucleotide
  Antisense strand to SEQ ID NO: 1183598
uucucaaccaccuacugaa

SEQ ID NO: 1183600 - RNA, 19 nt, Artificial Sequence
  Description of Artificial Sequence: Synthetic oligonucleotide
  Sense strand starting at position 3308 of SEQ ID NO: 916782
augcauaaaccaggauuga

SEQ ID NO: 1183601 - RNA, 19 nt, Artificial Sequence
  Description of Artificial Sequence: Synthetic oligonucleotide
  Antisense strand to SEQ ID NO: 1183600
ucaauccugguuuaugcau

SEQ ID NO: 1183602 - RNA, 19 nt, Artificial Sequence
  Description of Artificial Sequence: Synthetic oligonucleotide
  Sense strand starting at position 3317 of SEQ ID NO: 916782
ccaggauugagccaggcaa

SEQ ID NO: 1183603 - RNA, 19 nt, Artificial Sequence
  Description of Artificial Sequence: Synthetic oligonucleotide
  Antisense strand to SEQ ID NO: 1183602
uugccuggcucaauccugg

SEQ ID NO: 1183604 - RNA, 19 nt, Artificial Sequence
  Description of Artificial Sequence: Synthetic oligonucleotide
  Sense strand starting at position 3368 of SEQ ID NO: 916782
ccgcuagaggcucauuaug

SEQ ID NO: 1183605 - RNA, 19 nt, Artificial Sequence
  Description of Artificial Sequence: Synthetic oligonucleotide
  Antisense strand to SEQ ID NO: 1183604
cauaaugagccucuagcgg

SEQ ID NO: 1183606 - RNA, 19 nt, Artificial Sequence
  Description of Artificial Sequence: Synthetic oligonucleotide
  Sense strand starting at position 3376 of SEQ ID NO: 916782
ggcucauuaugucuuagag

SEQ ID NO: 1183607 - RNA, 19 nt, Artificial Sequence
  Description of Artificial Sequence: Synthetic oligonucleotide
  Antisense strand to SEQ ID NO: 1183606
cucuaagacauaaugagcc

SEQ ID NO: 1183608 - RNA, 19 nt, Artificial Sequence
  Description of Artificial Sequence: Synthetic oligonucleotide
  Sense strand starting at position 3386 of SEQ ID NO: 916782
gucuuagagaccugaacug

SEQ ID NO: 1183609 - RNA, 19 nt, Artificial Sequence
  Description of Artificial Sequence: Synthetic oligonucleotide
  Antisense strand to SEQ ID NO: 1183608
caguucaggucucuaagac

SEQ ID NO: 1183610 - RNA, 19 nt, Artificial Sequence
  Description of Artificial Sequence: Synthetic oligonucleotide
  Sense strand starting at position 3567 of SEQ ID NO: 916782
cugagaugacgcuaauauc

SEQ ID NO: 1183611 - RNA, 19 nt, Artificial Sequence
  Description of Artificial Sequence: Synthetic oligonucleotide
  Antisense strand to SEQ ID NO: 1183610
gauauuagcgucaucucag

SEQ ID NO: 1183612 - RNA, 19 nt, Artificial Sequence
  Description of Artificial Sequence: Synthetic oligonucleotide
  Sense strand starting at position 3670 of SEQ ID NO: 916782
cgaugacuugcccaagauc

SEQ ID NO: 1183613 - RNA, 19 nt, Artificial Sequence
  Description of Artificial Sequence: Synthetic oligonucleotide
  Antisense strand to SEQ ID NO: 1183612
gaucuugggcaagucaucg

SEQ ID NO: 1183614 - RNA, 19 nt, Artificial Sequence
  Description of Artificial Sequence: Synthetic oligonucleotide
  Sense strand starting at position 3714 of SEQ ID NO: 916782
ggauuugaaucugacucga

SEQ ID NO: 1183615 - RNA, 19 nt, Artificial Sequence
  Description of Artificial Sequence: Synthetic oligonucleotide
  Antisense strand to SEQ ID NO: 1183614
ucgagucagauucaaaucc

SEQ ID NO: 1183616 - RNA, 19 nt, Artificial Sequence
  Description of Artificial Sequence: Synthetic oligonucleotide
  Sense strand starting at position 3741 of SEQ ID NO: 916782
acucaccugugguuauaua

SEQ ID NO: 1183617 - RNA, 19 nt, Artificial Sequence
  Description of Artificial Sequence: Synthetic oligonucleotide
  Antisense strand to SEQ ID NO: 1183616
uauauaaccacaggugagu

SEQ ID NO: 1183618 - RNA, 19 nt, Artificial Sequence
  Description of Artificial Sequence: Synthetic oligonucleotide
  Sense strand starting at position 3777 of SEQ ID NO: 916782
auuaaagucucauugugaa

SEQ ID NO: 1183619 - RNA, 19 nt, Artificial Sequence
  Description of Artificial Sequence: Synthetic oligonucleotide
  Antisense strand to SEQ ID NO: 1183618
uucacaaugagacuuuaau

SEQ ID NO: 1183620 - RNA, 19 nt, Artificial Sequence
  Description of Artificial Sequence: Synthetic oligonucleotide
  Sense strand starting at position 3798 of SEQ ID NO: 916782
cuaagcugugucuaacaua

SEQ ID NO: 1183621 - RNA, 19 nt, Artificial Sequence
  Description of Artificial Sequence: Synthetic oligonucleotide
  Antisense strand to SEQ ID NO: 1183620
uauguuagacacagcuuag

SEQ ID NO: 1183622 - RNA, 19 nt, Artificial Sequence
  Description of Artificial Sequence: Synthetic oligonucleotide
  Sense strand starting at position 3828 of SEQ ID NO: 916782
acaauaggugcucaauaau

SEQ ID NO: 1183623 - RNA, 19 nt, Artificial Sequence
  Description of Artificial Sequence: Synthetic oligonucleotide
  Antisense strand to SEQ ID NO: 1183622
auuauugagcaccuauugu

SEQ ID NO: 1183624 - RNA, 19 nt, Artificial Sequence
  Description of Artificial Sequence: Synthetic oligonucleotide
  Sense strand starting at position 3892 of SEQ ID NO: 916782
uaaagugggcaaggaaauu

SEQ ID NO: 1183625 - RNA, 19 nt, Artificial Sequence
  Description of Artificial Sequence: Synthetic oligonucleotide
  Antisense strand to SEQ ID NO: 1183624
aauuuccuugcccacuuua

SEQ ID NO: 1183626 - RNA, 19 nt, Artificial Sequence
  Description of Artificial Sequence: Synthetic oligonucleotide
  Sense strand starting at position 3925 of SEQ ID NO: 916782
gccugcaauguacaagaaa

SEQ ID NO: 1183627 - RNA, 19 nt, Artificial Sequence
  Description of Artificial Sequence: Synthetic oligonucleotide
  Antisense strand to SEQ ID NO: 1183626
uuucuuguacauugcaggc

SEQ ID NO: 1183628 - RNA, 19 nt, Artificial Sequence
  Description of Artificial Sequence: Synthetic oligonucleotide
  Sense strand starting at position 72 of SEQ ID NO: 916783
agucaaauacuuugcaaag

SEQ ID NO: 1183629 - RNA, 19 nt, Artificial Sequence
  Description of Artificial Sequence: Synthetic oligonucleotide
  Antisense strand to SEQ ID NO: 1183628
cuuugcaaaguauuugacu

SEQ ID NO: 1183630 - RNA, 19 nt, Artificial Sequence
  Description of Artificial Sequence: Synthetic oligonucleotide
  Sense strand starting at position 113 of SEQ ID NO: 916783
ccauuaguacuugaucucu

SEQ ID NO: 1183631 - RNA, 19 nt, Artificial Sequence
  Description of Artificial Sequence: Synthetic oligonucleotide
  Antisense strand to SEQ ID NO: 1183630
agagaucaaguacuaaugg

SEQ ID NO: 1183632 - RNA, 19 nt, Artificial Sequence
  Description of Artificial Sequence: Synthetic oligonucleotide
  Sense strand starting at position 115 of SEQ ID NO: 916783
auuaguacuugaucucuca

SEQ ID NO: 1183633 - RNA, 19 nt, Artificial Sequence
  Description of Artificial Sequence: Synthetic oligonucleotide
  Antisense strand to SEQ ID NO: 1183632
ugagagaucaaguacuaau

SEQ ID NO: 1183634 - RNA, 19 nt, Artificial Sequence
  Description of Artificial Sequence: Synthetic oligonucleotide
  Sense strand starting at position 118 of SEQ ID NO: 916783
aguacuugaucucucaugu

SEQ ID NO: 1183635 - RNA, 19 nt, Artificial Sequence
  Description of Artificial Sequence: Synthetic oligonucleotide
  Antisense strand to SEQ ID NO: 1183634
acaugagagaucaaguacu

SEQ ID NO: 1183636 - RNA, 19 nt, Artificial Sequence
  Description of Artificial Sequence: Synthetic oligonucleotide
  Sense strand starting at position 129 of SEQ ID NO: 916783
ucucaugucuagccaaaug

SEQ ID NO: 1183637 - RNA, 19 nt, Artificial Sequence
  Description of Artificial Sequence: Synthetic oligonucleotide
  Antisense strand to SEQ ID NO: 1183636
cauuuggcuagacaugaga

SEQ ID NO: 1183638 - RNA, 19 nt, Artificial Sequence
  Description of Artificial Sequence: Synthetic oligonucleotide
  Sense strand starting at position 134 of SEQ ID NO: 916783
ugucuagccaaaugggaua

SEQ ID NO: 1183639 - RNA, 19 nt, Artificial Sequence
  Description of Artificial Sequence: Synthetic oligonucleotide
  Antisense strand to SEQ ID NO: 1183638
uaucccauuuggcuagaca

SEQ ID NO: 1183640 - RNA, 19 nt, Artificial Sequence
  Description of Artificial Sequence: Synthetic oligonucleotide
  Sense strand starting at position 190 of SEQ ID NO: 916783
caggauauguuugugacua

SEQ ID NO: 1183641 - RNA, 19 nt, Artificial Sequence
  Description of Artificial Sequence: Synthetic oligonucleotide
  Antisense strand to SEQ ID NO: 1183640
uagucacaaacauauccug

SEQ ID NO: 1183642 - RNA, 19 nt, Artificial Sequence
  Description of Artificial Sequence: Synthetic oligonucleotide
  Sense strand starting at position 194 of SEQ ID NO: 916783
auauguuugugacuacuaa

SEQ ID NO: 1183643 - RNA, 19 nt, Artificial Sequence
  Description of Artificial Sequence: Synthetic oligonucleotide
  Antisense strand to SEQ ID NO: 1183642
uuaguagucacaaacauau

SEQ ID NO: 1183644 - RNA, 19 nt, Artificial Sequence
  Description of Artificial Sequence: Synthetic oligonucleotide
  Sense strand starting at position 599 of SEQ ID NO: 916783
gguagucucaaagaacugu

SEQ ID NO: 1183645 - RNA, 19 nt, Artificial Sequence
  Description of Artificial Sequence: Synthetic oligonucleotide
  Antisense strand to SEQ ID NO: 1183644
acaguucuuugagacuacc

SEQ ID NO: 1183646 - RNA, 19 nt, Artificial Sequence
  Description of Artificial Sequence: Synthetic oligonucleotide
  Sense strand starting at position 922 of SEQ ID NO: 916783
aaggucauauagcuguuua

SEQ ID NO: 1183647 - RNA, 19 nt, Artificial Sequence
  Description of Artificial Sequence: Synthetic oligonucleotide
  Antisense strand to SEQ ID NO: 1183646
uaaacagcuauaugaccuu

SEQ ID NO: 1183648 - RNA, 19 nt, Artificial Sequence
  Description of Artificial Sequence: Synthetic oligonucleotide
  Sense strand starting at position 1013 of SEQ ID NO: 916783
acugcaagauagucuuaua

SEQ ID NO: 1183649 - RNA, 19 nt, Artificial Sequence
  Description of Artificial Sequence: Synthetic oligonucleotide
  Antisense strand to SEQ ID NO: 1183648
uauaagacuaucuugcagu

SEQ ID NO: 1183650 - RNA, 19 nt, Artificial Sequence
  Description of Artificial Sequence: Synthetic oligonucleotide
  Sense strand starting at position 1134 of SEQ ID NO: 916783
aggaaucagcacugaauca

SEQ ID NO: 1183651 - RNA, 19 nt, Artificial Sequence
  Description of Artificial Sequence: Synthetic oligonucleotide
  Antisense strand to SEQ ID NO: 1183650
ugauucagugcugauuccu

SEQ ID NO: 1183652 - RNA, 19 nt, Artificial Sequence
  Description of Artificial Sequence: Synthetic oligonucleotide
  Sense strand starting at position 1175 of SEQ ID NO: 916783
agcacaucaguuugagauc

SEQ ID NO: 1183653 - RNA, 19 nt, Artificial Sequence
  Description of Artificial Sequence: Synthetic oligonucleotide
  Antisense strand to SEQ ID NO: 1183652
gaucucaaacugaugugcu

SEQ ID NO: 1183654 - RNA, 19 nt, Artificial Sequence
  Description of Artificial Sequence: Synthetic oligonucleotide
  Sense strand starting at position 1184 of SEQ ID NO: 916783
guuugagaucucugguacu

SEQ ID NO: 1183655 - RNA, 19 nt, Artificial Sequence
  Description of Artificial Sequence: Synthetic oligonucleotide
  Antisense strand to SEQ ID NO: 1183654
aguaccagagaucucaaac

SEQ ID NO: 1183656 - RNA, 19 nt, Artificial Sequence
  Description of Artificial Sequence: Synthetic oligonucleotide
  Sense strand starting at position 1324 of SEQ ID NO: 916783
aagaucagccagugaguaa

SEQ ID NO: 1183657 - RNA, 19 nt, Artificial Sequence
  Description of Artificial Sequence: Synthetic oligonucleotide
  Antisense strand to SEQ ID NO: 1183656
uuacucacuggcugaucuu

SEQ ID NO: 1183658 - RNA, 19 nt, Artificial Sequence
  Description of Artificial Sequence: Synthetic oligonucleotide
  Sense strand starting at position 1382 of SEQ ID NO: 916783
ccacuaagccagugauucu

SEQ ID NO: 1183659 - RNA, 19 nt, Artificial Sequence
  Description of Artificial Sequence: Synthetic oligonucleotide
  Antisense strand to SEQ ID NO: 1183658
agaaucacuggcuuagugg

SEQ ID NO: 1183660 - RNA, 19 nt, Artificial Sequence
  Description of Artificial Sequence: Synthetic oligonucleotide
  Sense strand starting at position 1540 of SEQ ID NO: 916783
ccuauuuaguacgucuaga

SEQ ID NO: 1183661 - RNA, 19 nt, Artificial Sequence
  Description of Artificial Sequence: Synthetic oligonucleotide
  Antisense strand to SEQ ID NO: 1183660
ucuagacguacuaaauagg

SEQ ID NO: 1183662 - RNA, 19 nt, Artificial Sequence
  Description of Artificial Sequence: Synthetic oligonucleotide
  Sense strand starting at position 1646 of SEQ ID NO: 916783
uuucucuacccauggagau

SEQ ID NO: 1183663 - RNA, 19 nt, Artificial Sequence
  Description of Artificial Sequence: Synthetic oligonucleotide
  Antisense strand to SEQ ID NO: 1183662
aucuccauggguagagaaa

SEQ ID NO: 1183664 - RNA, 19 nt, Artificial Sequence
  Description of Artificial Sequence: Synthetic oligonucleotide
  Sense strand starting at position 1647 of SEQ ID NO: 916783
uucucuacccauggagaua

SEQ ID NO: 1183665 - RNA, 19 nt, Artificial Sequence
  Description of Artificial Sequence: Synthetic oligonucleotide
  Antisense strand to SEQ ID NO: 1183664
uaucuccauggguagagaa

SEQ ID NO: 1183666 - RNA, 19 nt, Artificial Sequence
  Description of Artificial Sequence: Synthetic oligonucleotide
  Sense strand starting at position 1706 of SEQ ID NO: 916783
gaauuaugggaagggcuuu

SEQ ID NO: 1183667 - RNA, 19 nt, Artificial Sequence
  Description of Artificial Sequence: Synthetic oligonucleotide
  Antisense strand to SEQ ID NO: 1183666
aaagcccuucccauaauuc

SEQ ID NO: 1183668 - RNA, 19 nt, Artificial Sequence
  Description of Artificial Sequence: Synthetic oligonucleotide
  Sense strand starting at position 1736 of SEQ ID NO: 916783
aagagaugagcacgucaaa

SEQ ID NO: 1183669 - RNA, 19 nt, Artificial Sequence
  Description of Artificial Sequence: Synthetic oligonucleotide
  Antisense strand to SEQ ID NO: 1183668
uuugacgugcucaucucuu

SEQ ID NO: 1183670 - RNA, 19 nt, Artificial Sequence
  Description of Artificial Sequence: Synthetic oligonucleotide
  Sense strand starting at position 2097 of SEQ ID NO: 916783
ucuuaagagccagaucauc

SEQ ID NO: 1183671 - RNA, 19 nt, Artificial Sequence
  Description of Artificial Sequence: Synthetic oligonucleotide
  Antisense strand to SEQ ID NO: 1183670
gaugaucuggcucuuaaga

SEQ ID NO: 1183672 - RNA, 19 nt, Artificial Sequence
  Description of Artificial Sequence: Synthetic oligonucleotide
  Sense strand starting at position 2102 of SEQ ID NO: 916783
agagccagaucaucuaaua

SEQ ID NO: 1183673 - RNA, 19 nt, Artificial Sequence
  Description of Artificial Sequence: Synthetic oligonucleotide
  Antisense strand to SEQ ID NO: 1183672
uauuagaugaucuggcucu

SEQ ID NO: 1183674 - RNA, 19 nt, Artificial Sequence
  Description of Artificial Sequence: Synthetic oligonucleotide
  Sense strand starting at position 2653 of SEQ ID NO: 916783
aagggaguuucucuauaag

SEQ ID NO: 1183675 - RNA, 19 nt, Artificial Sequence
  Description of Artificial Sequence: Synthetic oligonucleotide
  Antisense strand to SEQ ID NO: 1183674
cuuauagagaaacucccuu

SEQ ID NO: 1183676 - RNA, 19 nt, Artificial Sequence
  Description of Artificial Sequence: Synthetic oligonucleotide
  Sense strand starting at position 2737 of SEQ ID NO: 916783
uuuggaguauccuuaugga

SEQ ID NO: 1183677 - RNA, 19 nt, Artificial Sequence
  Description of Artificial Sequence: Synthetic oligonucleotide
  Antisense strand to SEQ ID NO: 1183676
uccauaaggauacuccaaa

SEQ ID NO: 1183678 - RNA, 19 nt, Artificial Sequence
  Description of Artificial Sequence: Synthetic oligonucleotide
  Sense strand starting at position 2804 of SEQ ID NO: 916783
ugccaaccucgagguuaaa

SEQ ID NO: 1183679 - RNA, 19 nt, Artificial Sequence
  Description of Artificial Sequence: Synthetic oligonucleotide
  Antisense strand to SEQ ID NO: 1183678
uuuaaccucgagguuggca

SEQ ID NO: 1183680 - RNA, 19 nt, Artificial Sequence
  Description of Artificial Sequence: Synthetic oligonucleotide
  Sense strand starting at position 2884 of SEQ ID NO: 916783
cuguuuaugcaggauggga

SEQ ID NO: 1183681 - RNA, 19 nt, Artificial Sequence
  Description of Artificial Sequence: Synthetic oligonucleotide
  Antisense strand to SEQ ID NO: 1183680
ucccauccugcauaaacag

SEQ ID NO: 1183682 - RNA, 19 nt, Artificial Sequence
  Description of Artificial Sequence: Synthetic oligonucleotide
  Sense strand starting at position 2886 of SEQ ID NO: 916783
guuuaugcaggaugggaaa

SEQ ID NO: 1183683 - RNA, 19 nt, Artificial Sequence
  Description of Artificial Sequence: Synthetic oligonucleotide
  Antisense strand to SEQ ID NO: 1183682
uuucccauccugcauaaac

SEQ ID NO: 1183684 - RNA, 19 nt, Artificial Sequence
  Description of Artificial Sequence: Synthetic oligonucleotide
  Sense strand starting at position 2978 of SEQ ID NO: 916783
gccacugauuccucaaaga

SEQ ID NO: 1183685 - RNA, 19 nt, Artificial Sequence
  Description of Artificial Sequence: Synthetic oligonucleotide
  Antisense strand to SEQ ID NO: 1183684
ucuuugaggaaucaguggc

SEQ ID NO: 1183686 - RNA, 19 nt, Artificial Sequence
  Description of Artificial Sequence: Synthetic oligonucleotide
  Sense strand starting at position 3052 of SEQ ID NO: 916783
ccacucuucuguuugacca

SEQ ID NO: 1183687 - RNA, 19 nt, Artificial Sequence
  Description of Artificial Sequence: Synthetic oligonucleotide
  Antisense strand to SEQ ID NO: 1183686
uggucaaacagaagagugg

SEQ ID NO: 1183688 - RNA, 19 nt, Artificial Sequence
  Description of Artificial Sequence: Synthetic oligonucleotide
  Sense strand starting at position 3091 of SEQ ID NO: 916783
uguguuuaccagcaaacaa

SEQ ID NO: 1183689 - RNA, 19 nt, Artificial Sequence
  Description of Artificial Sequence: Synthetic oligonucleotide
  Antisense strand to SEQ ID NO: 1183688
uuguuugcugguaaacaca

SEQ ID NO: 1183690 - RNA, 19 nt, Artificial Sequence
  Description of Artificial Sequence: Synthetic oligonucleotide
  Sense strand starting at position 3233 of SEQ ID NO: 916783
ucagaauagucaucuugga

SEQ ID NO: 1183691 - RNA, 19 nt, Artificial Sequence
  Description of Artificial Sequence: Synthetic oligonucleotide
  Antisense strand to SEQ ID NO: 1183690
uccaagaugacuauucuga

SEQ ID NO: 1183692 - RNA, 19 nt, Artificial Sequence
  Description of Artificial Sequence: Synthetic oligonucleotide
  Sense strand starting at position 3297 of SEQ ID NO: 916783
ucuggaaauuccuuuagag

SEQ ID NO: 1183693 - RNA, 19 nt, Artificial Sequence
  Description of Artificial Sequence: Synthetic oligonucleotide
  Antisense strand to SEQ ID NO: 1183692
cucuaaaggaauuuccaga

SEQ ID NO: 1183694 - RNA, 19 nt, Artificial Sequence
  Description of Artificial Sequence: Synthetic oligonucleotide
  Sense strand starting at position 3328 of SEQ ID NO: 916783
gcuucugagcuacaccaaa

SEQ ID NO: 1183695 - RNA, 19 nt, Artificial Sequence
  Description of Artificial Sequence: Synthetic oligonucleotide
  Antisense strand to SEQ ID NO: 1183694
uuugguguagcucagaagc

SEQ ID NO: 1183696 - RNA, 19 nt, Artificial Sequence
  Description of Artificial Sequence: Synthetic oligonucleotide
  Sense strand starting at position 3457 of SEQ ID NO: 916783
gaaugugcugcccagggau

SEQ ID NO: 1183697 - RNA, 19 nt, Artificial Sequence
  Description of Artificial Sequence: Synthetic oligonucleotide
  Antisense strand to SEQ ID NO: 1183696
aucccugggcagcacauuc

SEQ ID NO: 1183698 - RNA, 19 nt, Artificial Sequence
  Description of Artificial Sequence: Synthetic oligonucleotide
  Sense strand starting at position 3510 of SEQ ID NO: 916783
gggugagagcacuggacau

SEQ ID NO: 1183699 - RNA, 19 nt, Artificial Sequence
  Description of Artificial Sequence: Synthetic oligonucleotide
  Antisense strand to SEQ ID NO: 1183698
auguccagugcucucaccc

SEQ ID NO: 1183700 - RNA, 19 nt, Artificial Sequence
  Description of Artificial Sequence: Synthetic oligonucleotide
  Sense strand starting at position 3644 of SEQ ID NO: 916783
uuagaaaugcugcauaaua

SEQ ID NO: 1183701 - RNA, 19 nt, Artificial Sequence
  Description of Artificial Sequence: Synthetic oligonucleotide
  Antisense strand to SEQ ID NO: 1183700
uauuaugcagcauuucuaa

SEQ ID NO: 1183702 - RNA, 19 nt, Artificial Sequence
  Description of Artificial Sequence: Synthetic oligonucleotide
  Sense strand starting at position 3687 of SEQ ID NO: 916783
uguacauuagcauaauaag

SEQ ID NO: 1183703 - RNA, 19 nt, Artificial Sequence
  Description of Artificial Sequence: Synthetic oligonucleotide
  Antisense strand to SEQ ID NO: 1183702
cuuauuaugcuaauguaca

SEQ ID NO: 1183704 - RNA, 19 nt, Artificial Sequence
  Description of Artificial Sequence: Synthetic oligonucleotide
  Sense strand starting at position 3875 of SEQ ID NO: 916783
ggaagagauucccuuccca

SEQ ID NO: 1183705 - RNA, 19 nt, Artificial Sequence
  Description of Artificial Sequence: Synthetic oligonucleotide
  Antisense strand to SEQ ID NO: 1183704
ugggaagggaaucucuucc

SEQ ID NO: 1183706 - RNA, 19 nt, Artificial Sequence
  Description of Artificial Sequence: Synthetic oligonucleotide
  Sense strand starting at position 3958 of SEQ ID NO: 916783
uguaaccuccucugaaaga

SEQ ID NO: 1183707 - RNA, 19 nt, Artificial Sequence
  Description of Artificial Sequence: Synthetic oligonucleotide
  Antisense strand to SEQ ID NO: 1183706
ucuuucagaggagguuaca

SEQ ID NO: 1183708 - RNA, 19 nt, Artificial Sequence
  Description of Artificial Sequence: Synthetic oligonucleotide
  Sense strand starting at position 1 of SEQ ID NO: 916784
ugccuucguuugucaucga

SEQ ID NO: 1183709 - RNA, 19 nt, Artificial Sequence
  Description of Artificial Sequence: Synthetic oligonucleotide
  Antisense strand to SEQ ID NO: 1183708
ucgaugacaaacgaaggca

SEQ ID NO: 1183710 - RNA, 19 nt, Artificial Sequence
  Description of Artificial Sequence: Synthetic oligonucleotide
  Sense strand starting at position 4 of SEQ ID NO: 916784
cuucguuugucaucgagua

SEQ ID NO: 1183711 - RNA, 19 nt, Artificial Sequence
  Description of Artificial Sequence: Synthetic oligonucleotide
  Antisense strand to SEQ ID NO: 1183710
uacucgaugacaaacgaag

SEQ ID NO: 1183712 - RNA, 19 nt, Artificial Sequence
  Description of Artificial Sequence: Synthetic oligonucleotide
  Sense strand starting at position 5 of SEQ ID NO: 916784
uucguuugucaucgaguau

SEQ ID NO: 1183713 - RNA, 19 nt, Artificial Sequence
  Description of Artificial Sequence: Synthetic oligonucleotide
  Antisense strand to SEQ ID NO: 1183712
auacucgaugacaaacgaa

SEQ ID NO: 1183714 - RNA, 19 nt, Artificial Sequence
  Description of Artificial Sequence: Synthetic oligonucleotide
  Sense strand starting at position 6 of SEQ ID NO: 916784
ucguuugucaucgaguaua

SEQ ID NO: 1183715 - RNA, 19 nt, Artificial Sequence
  Description of Artificial Sequence: Synthetic oligonucleotide
  Antisense strand to SEQ ID NO: 1183714
uauacucgaugacaaacga

SEQ ID NO: 1183716 - RNA, 19 nt, Artificial Sequence
  Description of Artificial Sequence: Synthetic oligonucleotide
  Sense strand starting at position 9 of SEQ ID NO: 916784
uuugucaucgaguauagga

SEQ ID NO: 1183717 - RNA, 19 nt, Artificial Sequence
  Description of Artificial Sequence: Synthetic oligonucleotide
  Antisense strand to SEQ ID NO: 1183716
uccuauacucgaugacaaa

SEQ ID NO: 1183718 - RNA, 19 nt, Artificial Sequence
  Description of Artificial Sequence: Synthetic oligonucleotide
  Sense strand starting at position 101 of SEQ ID NO: 916784
gggccuugacucuaggaau

SEQ ID NO: 1183719 - RNA, 19 nt, Artificial Sequence
  Description of Artificial Sequence: Synthetic oligonucleotide
  Antisense strand to SEQ ID NO: 1183718
auuccuagagucaaggccc

SEQ ID NO: 1183720 - RNA, 19 nt, Artificial Sequence
  Description of Artificial Sequence: Synthetic oligonucleotide
  Sense strand starting at position 323 of SEQ ID NO: 916784
gagacauucgugcggcauu

SEQ ID NO: 1183721 - RNA, 19 nt, Artificial Sequence
  Description of Artificial Sequence: Synthetic oligonucleotide
  Antisense strand to SEQ ID NO: 1183720
aaugccgcacgaaugucuc

SEQ ID NO: 1183722 - RNA, 19 nt, Artificial Sequence
  Description of Artificial Sequence: Synthetic oligonucleotide
  Sense strand starting at position 589 of SEQ ID NO: 916784
ggugaacuguaagagaacu

SEQ ID NO: 1183723 - RNA, 19 nt, Artificial Sequence
  Description of Artificial Sequence: Synthetic oligonucleotide
  Antisense strand to SEQ ID NO: 1183722
aguucucuuacaguucacc

SEQ ID NO: 1183724 - RNA, 19 nt, Artificial Sequence
  Description of Artificial Sequence: Synthetic oligonucleotide
  Sense strand starting at position 632 of SEQ ID NO: 916784
cguuaacagaucuagaagu

SEQ ID NO: 1183725 - RNA, 19 nt, Artificial Sequence
  Description of Artificial Sequence: Synthetic oligonucleotide
  Antisense strand to SEQ ID NO: 1183724
acuucuagaucuguuaacg

SEQ ID NO: 1183726 - RNA, 19 nt, Artificial Sequence
  Description of Artificial Sequence: Synthetic oligonucleotide
  Sense strand starting at position 732 of SEQ ID NO: 916784
gugaaagauuccuuggccu

SEQ ID NO: 1183727 - RNA, 19 nt, Artificial Sequence
  Description of Artificial Sequence: Synthetic oligonucleotide
  Antisense strand to SEQ ID NO: 1183726
aggccaaggaaucuuucac

SEQ ID NO: 1183728 - RNA, 19 nt, Artificial Sequence
  Description of Artificial Sequence: Synthetic oligonucleotide
  Sense strand starting at position 1211 of SEQ ID NO: 916784
ggcaaaguuucugcaagug

SEQ ID NO: 1183729 - RNA, 19 nt, Artificial Sequence
  Description of Artificial Sequence: Synthetic oligonucleotide
  Antisense strand to SEQ ID NO: 1183728
cacuugcagaaacuuugcc

SEQ ID NO: 1183730 - RNA, 19 nt, Artificial Sequence
  Description of Artificial Sequence: Synthetic oligonucleotide
  Sense strand starting at position 1254 of SEQ ID NO: 916784
gcgcaucuuuacguaacuu

SEQ ID NO: 1183731 - RNA, 19 nt, Artificial Sequence
  Description of Artificial Sequence: Synthetic oligonucleotide
  Antisense strand to SEQ ID NO: 1183730
aaguuacguaaagaugcgc

SEQ ID NO: 1183732 - RNA, 19 nt, Artificial Sequence
  Description of Artificial Sequence: Synthetic oligonucleotide
  Sense strand starting at position 1381 of SEQ ID NO: 916784
acacaucgccucgaauuga

SEQ ID NO: 1183733 - RNA, 19 nt, Artificial Sequence
  Description of Artificial Sequence: Synthetic oligonucleotide
  Antisense strand to SEQ ID NO: 1183732
ucaauucgaggcgaugugu

SEQ ID NO: 1183734 - RNA, 19 nt, Artificial Sequence
  Description of Artificial Sequence: Synthetic oligonucleotide
  Sense strand starting at position 1405 of SEQ ID NO: 916784
ucugcaagcucugcguuau

SEQ ID NO: 1183735 - RNA, 19 nt, Artificial Sequence
  Description of Artificial Sequence: Synthetic oligonucleotide
  Antisense strand to SEQ ID NO: 1183734
auaacgcagagcuugcaga

SEQ ID NO: 1183736 - RNA, 19 nt, Artificial Sequence
  Description of Artificial Sequence: Synthetic oligonucleotide
  Sense strand starting at position 1408 of SEQ ID NO: 916784
gcaagcucugcguuauucu

SEQ ID NO: 1183737 - RNA, 19 nt, Artificial Sequence
  Description of Artificial Sequence: Synthetic oligonucleotide
  Antisense strand to SEQ ID NO: 1183736
agaauaacgcagagcuugc

SEQ ID NO: 1183738 - RNA, 19 nt, Artificial Sequence
  Description of Artificial Sequence: Synthetic oligonucleotide
  Sense strand starting at position 1409 of SEQ ID NO: 916784
caagcucugcguuauucuu

SEQ ID NO: 1183739 - RNA, 19 nt, Artificial Sequence
  Description of Artificial Sequence: Synthetic oligonucleotide
  Antisense strand to SEQ ID NO: 1183738
aagaauaacgcagagcuug

SEQ ID NO: 1183740 - RNA, 19 nt, Artificial Sequence
  Description of Artificial Sequence: Synthetic oligonucleotide
  Sense strand starting at position 1444 of SEQ ID NO: 916784
aguugacccgucugaacuu

SEQ ID NO: 1183741 - RNA, 19 nt, Artificial Sequence
  Description of Artificial Sequence: Synthetic oligonucleotide
  Antisense strand to SEQ ID NO: 1183740
aaguucagacgggucaacu

SEQ ID NO: 1183742 - RNA, 19 nt, Artificial Sequence
  Description of Artificial Sequence: Synthetic oligonucleotide
  Sense strand starting at position 1534 of SEQ ID NO: 916784
guaggacuaaccuguggaa

SEQ ID NO: 1183743 - RNA, 19 nt, Artificial Sequence
  Description of Artificial Sequence: Synthetic oligonucleotide
  Antisense strand to SEQ ID NO: 1183742
uuccacagguuaguccuac

SEQ ID NO: 1183744 - RNA, 19 nt, Artificial Sequence
  Description of Artificial Sequence: Synthetic oligonucleotide
  Sense strand starting at position 1536 of SEQ ID NO: 916784
aggacuaaccuguggaauc

SEQ ID NO: 1183745 - RNA, 19 nt, Artificial Sequence
  Description of Artificial Sequence: Synthetic oligonucleotide
  Antisense strand to SEQ ID NO: 1183744
gauuccacagguuaguccu

SEQ ID NO: 1183746 - RNA, 19 nt, Artificial Sequence
  Description of Artificial Sequence: Synthetic oligonucleotide
  Sense strand starting at position 2183 of SEQ ID NO: 916784
gcacucauuauaggcgaaa

SEQ ID NO: 1183747 - RNA, 19 nt, Artificial Sequence
  Description of Artificial Sequence: Synthetic oligonucleotide
  Antisense strand to SEQ ID NO: 1183746
uuucgccuauaaugagugc

SEQ ID NO: 1183748 - RNA, 19 nt, Artificial Sequence
  Description of Artificial Sequence: Synthetic oligonucleotide
  Sense strand starting at position 2186 of SEQ ID NO: 916784
cucauuauaggcgaaauca

SEQ ID NO: 1183749 - RNA, 19 nt, Artificial Sequence
  Description of Artificial Sequence: Synthetic oligonucleotide
  Antisense strand to SEQ ID NO: 1183748
ugauuucgccuauaaugag

SEQ ID NO: 1183750 - RNA, 19 nt, Artificial Sequence
  Description of Artificial Sequence: Synthetic oligonucleotide
  Sense strand starting at position 2410 of SEQ ID NO: 916784
ggguuagauuucggguggu

SEQ ID NO: 1183751 - RNA, 19 nt, Artificial Sequence
  Description of Artificial Sequence: Synthetic oligonucleotide
  Antisense strand to SEQ ID NO: 1183750
accacccgaaaucuaaccc

SEQ ID NO: 1183752 - RNA, 19 nt, Artificial Sequence
  Description of Artificial Sequence: Synthetic oligonucleotide
  Sense strand starting at position 2422 of SEQ ID NO: 916784
gggugguggcccugagaau

SEQ ID NO: 1183753 - RNA, 19 nt, Artificial Sequence
  Description of Artificial Sequence: Synthetic oligonucleotide
  Antisense strand to SEQ ID NO: 1183752
auucucagggccaccaccc

SEQ ID NO: 1183754 - RNA, 19 nt, Artificial Sequence
  Description of Artificial Sequence: Synthetic oligonucleotide
  Sense strand starting at position 2423 of SEQ ID NO: 916784
ggugguggcccugagaaug

SEQ ID NO: 1183755 - RNA, 19 nt, Artificial Sequence
  Description of Artificial Sequence: Synthetic oligonucleotide
  Antisense strand to SEQ ID NO: 1183754
cauucucagggccaccacc

SEQ ID NO: 1183756 - RNA, 19 nt, Artificial Sequence
  Description of Artificial Sequence: Synthetic oligonucleotide
  Sense strand starting at position 2559 of SEQ ID NO: 916784
ccaauaugagcguaacaag

SEQ ID NO: 1183757 - RNA, 19 nt, Artificial Sequence
  Description of Artificial Sequence: Synthetic oligonucleotide
  Antisense strand to SEQ ID NO: 1183756
cuuguuacgcucauauugg

SEQ ID NO: 1183758 - RNA, 19 nt, Artificial Sequence
  Description of Artificial Sequence: Synthetic oligonucleotide
  Sense strand starting at position 2777 of SEQ ID NO: 916784
gcuagugucucuguccaga

SEQ ID NO: 1183759 - RNA, 19 nt, Artificial Sequence
  Description of Artificial Sequence: Synthetic oligonucleotide
  Antisense strand to SEQ ID NO: 1183758
ucuggacagagacacuagc

SEQ ID NO: 1183760 - RNA, 19 nt, Artificial Sequence
  Description of Artificial Sequence: Synthetic oligonucleotide
  Sense strand starting at position 2973 of SEQ ID NO: 916784
ggccucgaaguuugugaga

SEQ ID NO: 1183761 - RNA, 19 nt, Artificial Sequence
  Description of Artificial Sequence: Synthetic oligonucleotide
  Antisense strand to SEQ ID NO: 1183760
ucucacaaacuucgaggcc

SEQ ID NO: 1183762 - RNA, 19 nt, Artificial Sequence
  Description of Artificial Sequence: Synthetic oligonucleotide
  Sense strand starting at position 3043 of SEQ ID NO: 916784
cggaguugaaagugcagaa

SEQ ID NO: 1183763 - RNA, 19 nt, Artificial Sequence
  Description of Artificial Sequence: Synthetic oligonucleotide
  Antisense strand to SEQ ID NO: 1183762
uucugcacuuucaacuccg

SEQ ID NO: 1183764 - RNA, 19 nt, Artificial Sequence
  Description of Artificial Sequence: Synthetic oligonucleotide
  Sense strand starting at position 3159 of SEQ ID NO: 916784
ccgcgcugugauuagaaua

SEQ ID NO: 1183765 - RNA, 19 nt, Artificial Sequence
  Description of Artificial Sequence: Synthetic oligonucleotide
  Antisense strand to SEQ ID NO: 1183764
uauucuaaucacagcgcgg

SEQ ID NO: 1183766 - RNA, 19 nt, Artificial Sequence
  Description of Artificial Sequence: Synthetic oligonucleotide
  Sense strand starting at position 3223 of SEQ ID NO: 916784
ugcuuugaccauggacaga

SEQ ID NO: 1183767 - RNA, 19 nt, Artificial Sequence
  Description of Artificial Sequence: Synthetic oligonucleotide
  Antisense strand to SEQ ID NO: 1183766
ucuguccauggucaaagca

SEQ ID NO: 1183768 - RNA, 19 nt, Artificial Sequence
  Description of Artificial Sequence: Synthetic oligonucleotide
  Sense strand starting at position 3404 of SEQ ID NO: 916784
agcugagugggacaaugua

SEQ ID NO: 1183769 - RNA, 19 nt, Artificial Sequence
  Description of Artificial Sequence: Synthetic oligonucleotide
  Antisense strand to SEQ ID NO: 1183768
uacauugucccacucagcu

SEQ ID NO: 1183770 - RNA, 19 nt, Artificial Sequence
  Description of Artificial Sequence: Synthetic oligonucleotide
  Sense strand starting at position 3449 of SEQ ID NO: 916784
gcacgugccgaguuaaggu

SEQ ID NO: 1183771 - RNA, 19 nt, Artificial Sequence
  Description of Artificial Sequence: Synthetic oligonucleotide
  Antisense strand to SEQ ID NO: 1183770
accuuaacucggcacgugc

SEQ ID NO: 1183772 - RNA, 19 nt, Artificial Sequence
  Description of Artificial Sequence: Synthetic oligonucleotide
  Sense strand starting at position 3584 of SEQ ID NO: 916784
ucagcuuccucgucuguga

SEQ ID NO: 1183773 - RNA, 19 nt, Artificial Sequence
  Description of Artificial Sequence: Synthetic oligonucleotide
  Antisense strand to SEQ ID NO: 1183772
ucacagacgaggaagcuga

SEQ ID NO: 1183774 - RNA, 19 nt, Artificial Sequence
  Description of Artificial Sequence: Synthetic oligonucleotide
  Sense strand starting at position 3593 of SEQ ID NO: 916784
ucgucugugaaauguagca

SEQ ID NO: 1183775 - RNA, 19 nt, Artificial Sequence
  Description of Artificial Sequence: Synthetic oligonucleotide
  Antisense strand to SEQ ID NO: 1183774
ugcuacauuucacagacga

SEQ ID NO: 1183776 - RNA, 19 nt, Artificial Sequence
  Description of Artificial Sequence: Synthetic oligonucleotide
  Sense strand starting at position 3595 of SEQ ID NO: 916784
gucugugaaauguagcaaa

SEQ ID NO: 1183777 - RNA, 19 nt, Artificial Sequence
  Description of Artificial Sequence: Synthetic oligonucleotide
  Antisense strand to SEQ ID NO: 1183776
uuugcuacauuucacagac

SEQ ID NO: 1183778 - RNA, 19 nt, Artificial Sequence
  Description of Artificial Sequence: Synthetic oligonucleotide
  Sense strand starting at position 3841 of SEQ ID NO: 916784
gggcucauuacccgguuua

SEQ ID NO: 1183779 - RNA, 19 nt, Artificial Sequence
  Description of Artificial Sequence: Synthetic oligonucleotide
  Antisense strand to SEQ ID NO: 1183778
uaaaccggguaaugagccc

SEQ ID NO: 1183780 - RNA, 19 nt, Artificial Sequence
  Description of Artificial Sequence: Synthetic oligonucleotide
  Sense strand starting at position 3842 of SEQ ID NO: 916784
ggcucauuacccgguuuau

SEQ ID NO: 1183781 - RNA, 19 nt, Artificial Sequence
  Description of Artificial Sequence: Synthetic oligonucleotide
  Antisense strand to SEQ ID NO: 1183780
auaaaccggguaaugagcc

SEQ ID NO: 1183782 - RNA, 19 nt, Artificial Sequence
  Description of Artificial Sequence: Synthetic oligonucleotide
  Sense strand starting at position 3852 of SEQ ID NO: 916784
ccgguuuauuucuggagga

SEQ ID NO: 1183783 - RNA, 19 nt, Artificial Sequence
  Description of Artificial Sequence: Synthetic oligonucleotide
  Antisense strand to SEQ ID NO: 1183782
uccuccagaaauaaaccgg

SEQ ID NO: 1183784 - RNA, 19 nt, Artificial Sequence
  Description of Artificial Sequence: Synthetic oligonucleotide
  Sense strand starting at position 3853 of SEQ ID NO: 916784
cgguuuauuucuggaggac

SEQ ID NO: 1183785 - RNA, 19 nt, Artificial Sequence
  Description of Artificial Sequence: Synthetic oligonucleotide
  Antisense strand to SEQ ID NO: 1183784
guccuccagaaauaaaccg

SEQ ID NO: 1183786 - RNA, 19 nt, Artificial Sequence
  Description of Artificial Sequence: Synthetic oligonucleotide
  Sense strand starting at position 3916 of SEQ ID NO: 916784
cauucuuucccgcugcgau

SEQ ID NO: 1183787 - RNA, 19 nt, Artificial Sequence
  Description of Artificial Sequence: Synthetic oligonucleotide
  Antisense strand to SEQ ID NO: 1183786
aucgcagcgggaaagaaug

SEQ ID NO: 1183788 - RNA, 19 nt, Artificial Sequence
  Description of Artificial Sequence: Synthetic oligonucleotide
  Sense strand starting at position 780 of SEQ ID NO: 916785
agaucagcuccagggaguu

SEQ ID NO: 1183789 - RNA, 19 nt, Artificial Sequence
  Description of Artificial Sequence: Synthetic oligonucleotide
  Antisense strand to SEQ ID NO: 1183788
aacucccuggagcugaucu

SEQ ID NO: 1183790 - RNA, 19 nt, Artificial Sequence
  Description of Artificial Sequence: Synthetic oligonucleotide
  Sense strand starting at position 792 of SEQ ID NO: 916785
gggaguuauccagguaacu

SEQ ID NO: 1183791 - RNA, 19 nt, Artificial Sequence
  Description of Artificial Sequence: Synthetic oligonucleotide
  Antisense strand to SEQ ID NO: 1183790
aguuaccuggauaacuccc

SEQ ID NO: 1183792 - RNA, 19 nt, Artificial Sequence
  Description of Artificial Sequence: Synthetic oligonucleotide
  Sense strand starting at position 794 of SEQ ID NO: 916785
gaguuauccagguaacugg

SEQ ID NO: 1183793 - RNA, 19 nt, Artificial Sequence
  Description of Artificial Sequence: Synthetic oligonucleotide
  Antisense strand to SEQ ID NO: 1183792
ccaguuaccuggauaacuc

SEQ ID NO: 1183794 - RNA, 19 nt, Artificial Sequence
  Description of Artificial Sequence: Synthetic oligonucleotide
  Sense strand starting at position 827 of SEQ ID NO: 916785
guucuuaaugucuacaucu

SEQ ID NO: 1183795 - RNA, 19 nt, Artificial Sequence
  Description of Artificial Sequence: Synthetic oligonucleotide
  Antisense strand to SEQ ID NO: 1183794
agauguagacauuaagaac

SEQ ID NO: 1183796 - RNA, 19 nt, Artificial Sequence
  Description of Artificial Sequence: Synthetic oligonucleotide
  Sense strand starting at position 894 of SEQ ID NO: 916785
aucgaacaggauugcuaaa

SEQ ID NO: 1183797 - RNA, 19 nt, Artificial Sequence
  Description of Artificial Sequence: Synthetic oligonucleotide
  Antisense strand to SEQ ID NO: 1183796
uuuagcaauccuguucgau

SEQ ID NO: 1183798 - RNA, 19 nt, Artificial Sequence
  Description of Artificial Sequence: Synthetic oligonucleotide
  Sense strand starting at position 896 of SEQ ID NO: 916785
cgaacaggauugcuaaaga

SEQ ID NO: 1183799 - RNA, 19 nt, Artificial Sequence
  Description of Artificial Sequence: Synthetic oligonucleotide
  Antisense strand to SEQ ID NO: 1183798
ucuuuagcaauccuguucg

SEQ ID NO: 1183800 - RNA, 19 nt, Artificial Sequence
  Description of Artificial Sequence: Synthetic oligonucleotide
  Sense strand starting at position 1027 of SEQ ID NO: 916785
ggagaagucuacucacuau

SEQ ID NO: 1183801 - RNA, 19 nt, Artificial Sequence
  Description of Artificial Sequence: Synthetic oligonucleotide
  Antisense strand to SEQ ID NO: 1183800
auagugaguagacuucucc

SEQ ID NO: 1183802 - RNA, 19 nt, Artificial Sequence
  Description of Artificial Sequence: Synthetic oligonucleotide
  Sense strand starting at position 1041 of SEQ ID NO: 916785
acuauucuccacuguagga

SEQ ID NO: 1183803 - RNA, 19 nt, Artificial Sequence
  Description of Artificial Sequence: Synthetic oligonucleotide
  Antisense strand to SEQ ID NO: 1183802
uccuacaguggagaauagu

SEQ ID NO: 1183804 - RNA, 19 nt, Artificial Sequence
  Description of Artificial Sequence: Synthetic oligonucleotide
  Sense strand starting at position 1358 of SEQ ID NO: 916785
aucccacucguaggaagau

SEQ ID NO: 1183805 - RNA, 19 nt, Artificial Sequence
  Description of Artificial Sequence: Synthetic oligonucleotide
  Antisense strand to SEQ ID NO: 1183804
aucuuccuacgagugggau

SEQ ID NO: 1183806 - RNA, 19 nt, Artificial Sequence
  Description of Artificial Sequence: Synthetic oligonucleotide
  Sense strand starting at position 1493 of SEQ ID NO: 916785
cugggaccacucugagauu

SEQ ID NO: 1183807 - RNA, 19 nt, Artificial Sequence
  Description of Artificial Sequence: Synthetic oligonucleotide
  Antisense strand to SEQ ID NO: 1183806
aaucucagaguggucccag

SEQ ID NO: 1183808 - RNA, 19 nt, Artificial Sequence
  Description of Artificial Sequence: Synthetic oligonucleotide
  Sense strand starting at position 1684 of SEQ ID NO: 916785
gcgccucuucuggcuacaa

SEQ ID NO: 1183809 - RNA, 19 nt, Artificial Sequence
  Description of Artificial Sequence: Synthetic oligonucleotide
  Antisense strand to SEQ ID NO: 1183808
uuguagccagaagaggcgc

SEQ ID NO: 1183810 - RNA, 19 nt, Artificial Sequence
  Description of Artificial Sequence: Synthetic oligonucleotide
  Sense strand starting at position 2062 of SEQ ID NO: 916785
gguccauuagaauggguaa

SEQ ID NO: 1183811 - RNA, 19 nt, Artificial Sequence
  Description of Artificial Sequence: Synthetic oligonucleotide
  Antisense strand to SEQ ID NO: 1183810
uuacccauucuaauggacc

SEQ ID NO: 1183812 - RNA, 19 nt, Artificial Sequence
  Description of Artificial Sequence: Synthetic oligonucleotide
  Sense strand starting at position 2063 of SEQ ID NO: 916785
guccauuagaauggguaag

SEQ ID NO: 1183813 - RNA, 19 nt, Artificial Sequence
  Description of Artificial Sequence: Synthetic oligonucleotide
  Antisense strand to SEQ ID NO: 1183812
cuuacccauucuaauggac

SEQ ID NO: 1183814 - RNA, 19 nt, Artificial Sequence
  Description of Artificial Sequence: Synthetic oligonucleotide
  Sense strand starting at position 2233 of SEQ ID NO: 916785
aguggcuucgaagaauuau

SEQ ID NO: 1183815 - RNA, 19 nt, Artificial Sequence
  Description of Artificial Sequence: Synthetic oligonucleotide
  Antisense strand to SEQ ID NO: 1183814
auaauucuucgaagccacu

SEQ ID NO: 1183816 - RNA, 19 nt, Artificial Sequence
  Description of Artificial Sequence: Synthetic oligonucleotide
  Sense strand starting at position 2272 of SEQ ID NO: 916785
gugguuuccggucauaaga

SEQ ID NO: 1183817 - RNA, 19 nt, Artificial Sequence
  Description of Artificial Sequence: Synthetic oligonucleotide
  Antisense strand to SEQ ID NO: 1183816
ucuuaugaccggaaaccac

SEQ ID NO: 1183818 - RNA, 19 nt, Artificial Sequence
  Description of Artificial Sequence: Synthetic oligonucleotide
  Sense strand starting at position 2441 of SEQ ID NO: 916785
cuuauucuugcagaaauug

SEQ ID NO: 1183819 - RNA, 19 nt, Artificial Sequence
  Description of Artificial Sequence: Synthetic oligonucleotide
  Antisense strand to SEQ ID NO: 1183818
caauuucugcaagaauaag

SEQ ID NO: 1183820 - RNA, 19 nt, Artificial Sequence
  Description of Artificial Sequence: Synthetic oligonucleotide
  Sense strand starting at position 2459 of SEQ ID NO: 916785
gcuagaauuuaugaucaag

SEQ ID NO: 1183821 - RNA, 19 nt, Artificial Sequence
  Description of Artificial Sequence: Synthetic oligonucleotide
  Antisense strand to SEQ ID NO: 1183820
cuugaucauaaauucuagc

SEQ ID NO: 1183822 - RNA, 19 nt, Artificial Sequence
  Description of Artificial Sequence: Synthetic oligonucleotide
  Sense strand starting at position 2471 of SEQ ID NO: 916785
gaucaaguagucugagguu

SEQ ID NO: 1183823 - RNA, 19 nt, Artificial Sequence
  Description of Artificial Sequence: Synthetic oligonucleotide
  Antisense strand to SEQ ID NO: 1183822
aaccucagacuacuugauc

SEQ ID NO: 1183824 - RNA, 19 nt, Artificial Sequence
  Description of Artificial Sequence: Synthetic oligonucleotide
  Sense strand starting at position 2610 of SEQ ID NO: 916785
ugcucuuaugaagggagaa

SEQ ID NO: 1183825 - RNA, 19 nt, Artificial Sequence
  Description of Artificial Sequence: Synthetic oligonucleotide
  Antisense strand to SEQ ID NO: 1183824
uucucccuucauaagagca

SEQ ID NO: 1183826 - RNA, 19 nt, Artificial Sequence
  Description of Artificial Sequence: Synthetic oligonucleotide
  Sense strand starting at position 2647 of SEQ ID NO: 916785
aauaucagagaguguuaag

SEQ ID NO: 1183827 - RNA, 19 nt, Artificial Sequence
  Description of Artificial Sequence: Synthetic oligonucleotide
  Antisense strand to SEQ ID NO: 1183826
cuuaacacucucugauauu

SEQ ID NO: 1183828 - RNA, 19 nt, Artificial Sequence
  Description of Artificial Sequence: Synthetic oligonucleotide
  Sense strand starting at position 2659 of SEQ ID NO: 916785
uguuaagugcuguagaaga

SEQ ID NO: 1183829 - RNA, 19 nt, Artificial Sequence
  Description of Artificial Sequence: Synthetic oligonucleotide
  Antisense strand to SEQ ID NO: 1183828
ucuucuacagcacuuaaca

SEQ ID NO: 1183830 - RNA, 19 nt, Artificial Sequence
  Description of Artificial Sequence: Synthetic oligonucleotide
  Sense strand starting at position 3253 of SEQ ID NO: 916785
agugauacuuucucucaua

SEQ ID NO: 1183831 - RNA, 19 nt, Artificial Sequence
  Description of Artificial Sequence: Synthetic oligonucleotide
  Antisense strand to SEQ ID NO: 1183830
uaugagagaaaguaucacu

SEQ ID NO: 1183832 - RNA, 19 nt, Artificial Sequence
  Description of Artificial Sequence: Synthetic oligonucleotide
  Sense strand starting at position 3254 of SEQ ID NO: 916785
gugauacuuucucucauag

SEQ ID NO: 1183833 - RNA, 19 nt, Artificial Sequence
  Description of Artificial Sequence: Synthetic oligonucleotide
  Antisense strand to SEQ ID NO: 1183832
cuaugagagaaaguaucac

SEQ ID NO: 1183834 - RNA, 19 nt, Artificial Sequence
  Description of Artificial Sequence: Synthetic oligonucleotide
  Sense strand starting at position 3337 of SEQ ID NO: 916785
augcuaaggcguuaagaug

SEQ ID NO: 1183835 - RNA, 19 nt, Artificial Sequence
  Description of Artificial Sequence: Synthetic oligonucleotide
  Antisense strand to SEQ ID NO: 1183834
caucuuaacgccuuagcau

SEQ ID NO: 1183836 - RNA, 19 nt, Artificial Sequence
  Description of Artificial Sequence: Synthetic oligonucleotide
  Sense strand starting at position 3343 of SEQ ID NO: 916785
aggcguuaagauggaaaua

SEQ ID NO: 1183837 - RNA, 19 nt, Artificial Sequence
  Description of Artificial Sequence: Synthetic oligonucleotide
  Antisense strand to SEQ ID NO: 1183836
uauuuccaucuuaacgccu

SEQ ID NO: 1183838 - RNA, 19 nt, Artificial Sequence
  Description of Artificial Sequence: Synthetic oligonucleotide
  Sense strand starting at position 3457 of SEQ ID NO: 916785
aaaggagucugggcuaauu

SEQ ID NO: 1183839 - RNA, 19 nt, Artificial Sequence
  Description of Artificial Sequence: Synthetic oligonucleotide
  Antisense strand to SEQ ID NO: 1183838
aauuagcccagacuccuuu

SEQ ID NO: 1183840 - RNA, 19 nt, Artificial Sequence
  Description of Artificial Sequence: Synthetic oligonucleotide
  Sense strand starting at position 3459 of SEQ ID NO: 916785
aggagucugggcuaauucu

SEQ ID NO: 1183841 - RNA, 19 nt, Artificial Sequence
  Description of Artificial Sequence: Synthetic oligonucleotide
  Antisense strand to SEQ ID NO: 1183840
agaauuagcccagacuccu

SEQ ID NO: 1183842 - RNA, 19 nt, Artificial Sequence
  Description of Artificial Sequence: Synthetic oligonucleotide
  Sense strand starting at position 3468 of SEQ ID NO: 916785
ggcuaauucuaaguacuug

SEQ ID NO: 1183843 - RNA, 19 nt, Artificial Sequence
  Description of Artificial Sequence: Synthetic oligonucleotide
  Antisense strand to SEQ ID NO: 1183842
caaguacuuagaauuagcc

SEQ ID NO: 1183844 - RNA, 19 nt, Artificial Sequence
  Description of Artificial Sequence: Synthetic oligonucleotide
  Sense strand starting at position 3474 of SEQ ID NO: 916785
uucuaaguacuugaaggua

SEQ ID NO: 1183845 - RNA, 19 nt, Artificial Sequence
  Description of Artificial Sequence: Synthetic oligonucleotide
  Antisense strand to SEQ ID NO: 1183844
uaccuucaaguacuuagaa

SEQ ID NO: 1183846 - RNA, 19 nt, Artificial Sequence
  Description of Artificial Sequence: Synthetic oligonucleotide
  Sense strand starting at position 3541 of SEQ ID NO: 916785
ccuggcuguagugaauaga

SEQ ID NO: 1183847 - RNA, 19 nt, Artificial Sequence
  Description of Artificial Sequence: Synthetic oligonucleotide
  Antisense strand to SEQ ID NO: 1183846
ucuauucacuacagccagg

SEQ ID NO: 1183848 - RNA, 19 nt, Artificial Sequence
  Description of Artificial Sequence: Synthetic oligonucleotide
  Sense strand starting at position 3596 of SEQ ID NO: 916785
ggagauuggcgaggaaacu

SEQ ID NO: 1183849 - RNA, 19 nt, Artificial Sequence
  Description of Artificial Sequence: Synthetic oligonucleotide
  Antisense strand to SEQ ID NO: 1183848
aguuuccucgccaaucucc

SEQ ID NO: 1183850 - RNA, 19 nt, Artificial Sequence
  Description of Artificial Sequence: Synthetic oligonucleotide
  Sense strand starting at position 3618 of SEQ ID NO: 916785
accuguaguccaggugaga

SEQ ID NO: 1183851 - RNA, 19 nt, Artificial Sequence
  Description of Artificial Sequence: Synthetic oligonucleotide
  Antisense strand to SEQ ID NO: 1183850
ucucaccuggacuacaggu

SEQ ID NO: 1183852 - RNA, 19 nt, Artificial Sequence
  Description of Artificial Sequence: Synthetic oligonucleotide
  Sense strand starting at position 3621 of SEQ ID NO: 916785
uguaguccaggugagagau

SEQ ID NO: 1183853 - RNA, 19 nt, Artificial Sequence
  Description of Artificial Sequence: Synthetic oligonucleotide
  Antisense strand to SEQ ID NO: 1183852
aucucucaccuggacuaca

SEQ ID NO: 1183854 - RNA, 19 nt, Artificial Sequence
  Description of Artificial Sequence: Synthetic oligonucleotide
  Sense strand starting at position 3633 of SEQ ID NO: 916785
gagagaugagagcgcuuga

SEQ ID NO: 1183855 - RNA, 19 nt, Artificial Sequence
  Description of Artificial Sequence: Synthetic oligonucleotide
  Antisense strand to SEQ ID NO: 1183854
ucaagcgcucucaucucuc

SEQ ID NO: 1183856 - RNA, 19 nt, Artificial Sequence
  Description of Artificial Sequence: Synthetic oligonucleotide
  Sense strand starting at position 3638 of SEQ ID NO: 916785
augagagcgcuugacuaga

SEQ ID NO: 1183857 - RNA, 19 nt, Artificial Sequence
  Description of Artificial Sequence: Synthetic oligonucleotide
  Antisense strand to SEQ ID NO: 1183856
ucuagucaagcgcucucau

SEQ ID NO: 1183858 - RNA, 19 nt, Artificial Sequence
  Description of Artificial Sequence: Synthetic oligonucleotide
  Sense strand starting at position 3646 of SEQ ID NO: 916785
gcuugacuagagugaucau

SEQ ID NO: 1183859 - RNA, 19 nt, Artificial Sequence
  Description of Artificial Sequence: Synthetic oligonucleotide
  Antisense strand to SEQ ID NO: 1183858
augaucacucuagucaagc

SEQ ID NO: 1183860 - RNA, 19 nt, Artificial Sequence
  Description of Artificial Sequence: Synthetic oligonucleotide
  Sense strand starting at position 3649 of SEQ ID NO: 916785
ugacuagagugaucauguu

SEQ ID NO: 1183861 - RNA, 19 nt, Artificial Sequence
  Description of Artificial Sequence: Synthetic oligonucleotide
  Antisense strand to SEQ ID NO: 1183860
aacaugaucacucuaguca

SEQ ID NO: 1183862 - RNA, 19 nt, Artificial Sequence
  Description of Artificial Sequence: Synthetic oligonucleotide
  Sense strand starting at position 3659 of SEQ ID NO: 916785
gaucauguugaaugaaguu

SEQ ID NO: 1183863 - RNA, 19 nt, Artificial Sequence
  Description of Artificial Sequence: Synthetic oligonucleotide
  Antisense strand to SEQ ID NO: 1183862
aacuucauucaacaugauc

SEQ ID NO: 1183864 - RNA, 19 nt, Artificial Sequence
  Description of Artificial Sequence: Synthetic oligonucleotide
  Sense strand starting at position 3757 of SEQ ID NO: 916785
caccuagauuuauagagag

SEQ ID NO: 1183865 - RNA, 19 nt, Artificial Sequence
  Description of Artificial Sequence: Synthetic oligonucleotide
  Antisense strand to SEQ ID NO: 1183864
cucucuauaaaucuaggug

SEQ ID NO: 1183866 - RNA, 19 nt, Artificial Sequence
  Description of Artificial Sequence: Synthetic oligonucleotide
  Sense strand starting at position 3772 of SEQ ID NO: 916785
agaguucgacuauacuaug

SEQ ID NO: 1183867 - RNA, 19 nt, Artificial Sequence
  Description of Artificial Sequence: Synthetic oligonucleotide
  Antisense strand to SEQ ID NO: 1183866
cauaguauagucgaacucu

SEQ ID NO: 1183868 - RNA, 19 nt, Artificial Sequence
  Description of Artificial Sequence: Synthetic oligonucleotide
  Sense strand starting at position 239 of SEQ ID NO: 916786
gagcauugcuuuguaguaa

SEQ ID NO: 1183869 - RNA, 19 nt, Artificial Sequence
  Description of Artificial Sequence: Synthetic oligonucleotide
  Antisense strand to SEQ ID NO: 1183868
uuacuacaaagcaaugcuc

SEQ ID NO: 1183870 - RNA, 19 nt, Artificial Sequence
  Description of Artificial Sequence: Synthetic oligonucleotide
  Sense strand starting at position 313 of SEQ ID NO: 916786
ggccaaagugauuaucuuc

SEQ ID NO: 1183871 - RNA, 19 nt, Artificial Sequence
  Description of Artificial Sequence: Synthetic oligonucleotide
  Antisense strand to SEQ ID NO: 1183870
gaagauaaucacuuuggcc

SEQ ID NO: 1183872 - RNA, 19 nt, Artificial Sequence
  Description of Artificial Sequence: Synthetic oligonucleotide
  Sense strand starting at position 348 of SEQ ID NO: 916786
ggaauagugucauuauucc

SEQ ID NO: 1183873 - RNA, 19 nt, Artificial Sequence
  Description of Artificial Sequence: Synthetic oligonucleotide
  Antisense strand to SEQ ID NO: 1183872
ggaauaaugacacuauucc

SEQ ID NO: 1183874 - RNA, 19 nt, Artificial Sequence
  Description of Artificial Sequence: Synthetic oligonucleotide
  Sense strand starting at position 538 of SEQ ID NO: 916786
caguucuugccuggaguau

SEQ ID NO: 1183875 - RNA, 19 nt, Artificial Sequence
  Description of Artificial Sequence: Synthetic oligonucleotide
  Antisense strand to SEQ ID NO: 1183874
auacuccaggcaagaacug

SEQ ID NO: 1183876 - RNA, 19 nt, Artificial Sequence
  Description of Artificial Sequence: Synthetic oligonucleotide
  Sense strand starting at position 539 of SEQ ID NO: 916786
aguucuugccuggaguauu

SEQ ID NO: 1183877 - RNA, 19 nt, Artificial Sequence
  Description of Artificial Sequence: Synthetic oligonucleotide
  Antisense strand to SEQ ID NO: 1183876
aauacuccaggcaagaacu

SEQ ID NO: 1183878 - RNA, 19 nt, Artificial Sequence
  Description of Artificial Sequence: Synthetic oligonucleotide
  Sense strand starting at position 550 of SEQ ID NO: 916786
ggaguauugcaacauccaa

SEQ ID NO: 1183879 - RNA, 19 nt, Artificial Sequence
  Description of Artificial Sequence: Synthetic oligonucleotide
  Antisense strand to SEQ ID NO: 1183878
uuggauguugcaauacucc

SEQ ID NO: 1183880 - RNA, 19 nt, Artificial Sequence
  Description of Artificial Sequence: Synthetic oligonucleotide
  Sense strand starting at position 622 of SEQ ID NO: 916786
augcaaaucugaccuggau

SEQ ID NO: 1183881 - RNA, 19 nt, Artificial Sequence
  Description of Artificial Sequence: Synthetic oligonucleotide
  Antisense strand to SEQ ID NO: 1183880
auccaggucagauuugcau

SEQ ID NO: 1183882 - RNA, 19 nt, Artificial Sequence
  Description of Artificial Sequence: Synthetic oligonucleotide
  Sense strand starting at position 647 of SEQ ID NO: 916786
cugcuuaaagcuuaugacu

SEQ ID NO: 1183883 - RNA, 19 nt, Artificial Sequence
  Description of Artificial Sequence: Synthetic oligonucleotide
  Antisense strand to SEQ ID NO: 1183882
agucauaagcuuuaagcag

SEQ ID NO: 1183884 - RNA, 19 nt, Artificial Sequence
  Description of Artificial Sequence: Synthetic oligonucleotide
  Sense strand starting at position 656 of SEQ ID NO: 916786
gcuuaugacugguuuccuu

SEQ ID NO: 1183885 - RNA, 19 nt, Artificial Sequence
  Description of Artificial Sequence: Synthetic oligonucleotide
  Antisense strand to SEQ ID NO: 1183884
aaggaaaccagucauaagc

SEQ ID NO: 1183886 - RNA, 19 nt, Artificial Sequence
  Description of Artificial Sequence: Synthetic oligonucleotide
  Sense strand starting at position 660 of SEQ ID NO: 916786
augacugguuuccuuuaau

SEQ ID NO: 1183887 - RNA, 19 nt, Artificial Sequence
  Description of Artificial Sequence: Synthetic oligonucleotide
  Antisense strand to SEQ ID NO: 1183886
auuaaaggaaaccagucau

SEQ ID NO: 1183888 - RNA, 19 nt, Artificial Sequence
  Description of Artificial Sequence: Synthetic oligonucleotide
  Sense strand starting at position 671 of SEQ ID NO: 916786
ccuuuaauucuuggauaag

SEQ ID NO: 1183889 - RNA, 19 nt, Artificial Sequence
  Description of Artificial Sequence: Synthetic oligonucleotide
  Antisense strand to SEQ ID NO: 1183888
cuuauccaagaauuaaagg

SEQ ID NO: 1183890 - RNA, 19 nt, Artificial Sequence
  Description of Artificial Sequence: Synthetic oligonucleotide
  Sense strand starting at position 831 of SEQ ID NO: 916786
agccuuugcacgccugauu

SEQ ID NO: 1183891 - RNA, 19 nt, Artificial Sequence
  Description of Artificial Sequence: Synthetic oligonucleotide
  Antisense strand to SEQ ID NO: 1183890
aaucaggcgugcaaaggcu

SEQ ID NO: 1183892 - RNA, 19 nt, Artificial Sequence
  Description of Artificial Sequence: Synthetic oligonucleotide
  Sense strand starting at position 844 of SEQ ID NO: 916786
cugauucccucugcuuaga

SEQ ID NO: 1183893 - RNA, 19 nt, Artificial Sequence
  Description of Artificial Sequence: Synthetic oligonucleotide
  Antisense strand to SEQ ID NO: 1183892
ucuaagcagagggaaucag

SEQ ID NO: 1183894 - RNA, 19 nt, Artificial Sequence
  Description of Artificial Sequence: Synthetic oligonucleotide
  Sense strand starting at position 863 of SEQ ID NO: 916786
ggaguucccuccuuucuuu

SEQ ID NO: 1183895 - RNA, 19 nt, Artificial Sequence
  Description of Artificial Sequence: Synthetic oligonucleotide
  Antisense strand to SEQ ID NO: 1183894
aaagaaaggagggaacucc

SEQ ID NO: 1183896 - RNA, 19 nt, Artificial Sequence
  Description of Artificial Sequence: Synthetic oligonucleotide
  Sense strand starting at position 942 of SEQ ID NO: 916786
ucaagaucucguuauugua

SEQ ID NO: 1183897 - RNA, 19 nt, Artificial Sequence
  Description of Artificial Sequence: Synthetic oligonucleotide
  Antisense strand to SEQ ID NO: 1183896
uacaauaacgagaucuuga

SEQ ID NO: 1183898 - RNA, 19 nt, Artificial Sequence
  Description of Artificial Sequence: Synthetic oligonucleotide
  Sense strand starting at position 944 of SEQ ID NO: 916786
aagaucucguuauuguaaa

SEQ ID NO: 1183899 - RNA, 19 nt, Artificial Sequence
  Description of Artificial Sequence: Synthetic oligonucleotide
  Antisense strand to SEQ ID NO: 1183898
uuuacaauaacgagaucuu

SEQ ID NO: 1183900 - RNA, 19 nt, Artificial Sequence
  Description of Artificial Sequence: Synthetic oligonucleotide
  Sense strand starting at position 1370 of SEQ ID NO: 916786
gaaagaaccuugucugcca

SEQ ID NO: 1183901 - RNA, 19 nt, Artificial Sequence
  Description of Artificial Sequence: Synthetic oligonucleotide
  Antisense strand to SEQ ID NO: 1183900
uggcagacaagguucuuuc

SEQ ID NO: 1183902 - RNA, 19 nt, Artificial Sequence
  Description of Artificial Sequence: Synthetic oligonucleotide
  Sense strand starting at position 1433 of SEQ ID NO: 916786
caacuagacugguugacua

SEQ ID NO: 1183903 - RNA, 19 nt, Artificial Sequence
  Description of Artificial Sequence: Synthetic oligonucleotide
  Antisense strand to SEQ ID NO: 1183902
uagucaaccagucuaguug

SEQ ID NO: 1183904 - RNA, 19 nt, Artificial Sequence
  Description of Artificial Sequence: Synthetic oligonucleotide
  Sense strand starting at position 1441 of SEQ ID NO: 916786
cugguugacuaagucaaua

SEQ ID NO: 1183905 - RNA, 19 nt, Artificial Sequence
  Description of Artificial Sequence: Synthetic oligonucleotide
  Antisense strand to SEQ ID NO: 1183904
uauugacuuagucaaccag

SEQ ID NO: 1183906 - RNA, 19 nt, Artificial Sequence
  Description of Artificial Sequence: Synthetic oligonucleotide
  Sense strand starting at position 1465 of SEQ ID NO: 916786
agcacuacggucuauuaua

SEQ ID NO: 1183907 - RNA, 19 nt, Artificial Sequence
  Description of Artificial Sequence: Synthetic oligonucleotide
  Antisense strand to SEQ ID NO: 1183906
uauaauagaccguagugcu

SEQ ID NO: 1183908 - RNA, 19 nt, Artificial Sequence
  Description of Artificial Sequence: Synthetic oligonucleotide
  Sense strand starting at position 1537 of SEQ ID NO: 916786
guucauggugccgacauuu

SEQ ID NO: 1183909 - RNA, 19 nt, Artificial Sequence
  Description of Artificial Sequence: Synthetic oligonucleotide
  Antisense strand to SEQ ID NO: 1183908
aaaugucggcaccaugaac

SEQ ID NO: 1183910 - RNA, 19 nt, Artificial Sequence
  Description of Artificial Sequence: Synthetic oligonucleotide
  Sense strand starting at position 2388 of SEQ ID NO: 916786
aguggagauuugggucaca

SEQ ID NO: 1183911 - RNA, 19 nt, Artificial Sequence
  Description of Artificial Sequence: Synthetic oligonucleotide
  Antisense strand to SEQ ID NO: 1183910
ugugacccaaaucuccacu

SEQ ID NO: 1183912 - RNA, 19 nt, Artificial Sequence
  Description of Artificial Sequence: Synthetic oligonucleotide
  Sense strand starting at position 2460 of SEQ ID NO: 916786
uggccuucucacugcuuaa

SEQ ID NO: 1183913 - RNA, 19 nt, Artificial Sequence
  Description of Artificial Sequence: Synthetic oligonucleotide
  Antisense strand to SEQ ID NO: 1183912
uuaagcagugagaaggcca

SEQ ID NO: 1183914 - RNA, 19 nt, Artificial Sequence
  Description of Artificial Sequence: Synthetic oligonucleotide
  Sense strand starting at position 2577 of SEQ ID NO: 916786
gaugaagacugagauugua

SEQ ID NO: 1183915 - RNA, 19 nt, Artificial Sequence
  Description of Artificial Sequence: Synthetic oligonucleotide
  Antisense strand to SEQ ID NO: 1183914
uacaaucucagucuucauc

SEQ ID NO: 1183916 - RNA, 19 nt, Artificial Sequence
  Description of Artificial Sequence: Synthetic oligonucleotide
  Sense strand starting at position 2593 of SEQ ID NO: 916786
guacuacauugagucaaag

SEQ ID NO: 1183917 - RNA, 19 nt, Artificial Sequence
  Description of Artificial Sequence: Synthetic oligonucleotide
  Antisense strand to SEQ ID NO: 1183916
cuuugacucaauguaguac

SEQ ID NO: 1183918 - RNA, 19 nt, Artificial Sequence
  Description of Artificial Sequence: Synthetic oligonucleotide
  Sense strand starting at position 2964 of SEQ ID NO: 916786
cugugaacucuaugcagau

SEQ ID NO: 1183919 - RNA, 19 nt, Artificial Sequence
  Description of Artificial Sequence: Synthetic oligonucleotide
  Antisense strand to SEQ ID NO: 1183918
aucugcauagaguucacag

SEQ ID NO: 1183920 - RNA, 19 nt, Artificial Sequence
  Description of Artificial Sequence: Synthetic oligonucleotide
  Sense strand starting at position 2965 of SEQ ID NO: 916786
ugugaacucuaugcagaug

SEQ ID NO: 1183921 - RNA, 19 nt, Artificial Sequence
  Description of Artificial Sequence: Synthetic oligonucleotide
  Antisense strand to SEQ ID NO: 1183920
caucugcauagaguucaca

SEQ ID NO: 1183922 - RNA, 19 nt, Artificial Sequence
  Description of Artificial Sequence: Synthetic oligonucleotide
  Sense strand starting at position 2966 of SEQ ID NO: 916786
gugaacucuaugcagauga

SEQ ID NO: 1183923 - RNA, 19 nt, Artificial Sequence
  Description of Artificial Sequence: Synthetic oligonucleotide
  Antisense strand to SEQ ID NO: 1183922
ucaucugcauagaguucac

SEQ ID NO: 1183924 - RNA, 19 nt, Artificial Sequence
  Description of Artificial Sequence: Synthetic oligonucleotide
  Sense strand starting at position 3061 of SEQ ID NO: 916786
uuccaaaguuccgugaaau

SEQ ID NO: 1183925 - RNA, 19 nt, Artificial Sequence
  Description of Artificial Sequence: Synthetic oligonucleotide
  Antisense strand to SEQ ID NO: 1183924
auuucacggaacuuuggaa

SEQ ID NO: 1183926 - RNA, 19 nt, Artificial Sequence
  Description of Artificial Sequence: Synthetic oligonucleotide
  Sense strand starting at position 3062 of SEQ ID NO: 916786
uccaaaguuccgugaaaua

SEQ ID NO: 1183927 - RNA, 19 nt, Artificial Sequence
  Description of Artificial Sequence: Synthetic oligonucleotide
  Antisense strand to SEQ ID NO: 1183926
uauuucacggaacuuugga

SEQ ID NO: 1183928 - RNA, 19 nt, Artificial Sequence
  Description of Artificial Sequence: Synthetic oligonucleotide
  Sense strand starting at position 3067 of SEQ ID NO: 916786
aguuccgugaaauagaauu

SEQ ID NO: 1183929 - RNA, 19 nt, Artificial Sequence
  Description of Artificial Sequence: Synthetic oligonucleotide
  Antisense strand to SEQ ID NO: 1183928
aauucuauuucacggaacu

SEQ ID NO: 1183930 - RNA, 19 nt, Artificial Sequence
  Description of Artificial Sequence: Synthetic oligonucleotide
  Sense strand starting at position 3095 of SEQ ID NO: 916786
ugcuuaaugguagaauauu

SEQ ID NO: 1183931 - RNA, 19 nt, Artificial Sequence
  Description of Artificial Sequence: Synthetic oligonucleotide
  Antisense strand to SEQ ID NO: 1183930
aauauucuaccauuaagca

SEQ ID NO: 1183932 - RNA, 19 nt, Artificial Sequence
  Description of Artificial Sequence: Synthetic oligonucleotide
  Sense strand starting at position 3493 of SEQ ID NO: 916786
agaaccaccuuaguguaau

SEQ ID NO: 1183933 - RNA, 19 nt, Artificial Sequence
  Description of Artificial Sequence: Synthetic oligonucleotide
  Antisense strand to SEQ ID NO: 1183932
auuacacuaaggugguucu

SEQ ID NO: 1183934 - RNA, 19 nt, Artificial Sequence
  Description of Artificial Sequence: Synthetic oligonucleotide
  Sense strand starting at position 3496 of SEQ ID NO: 916786
accaccuuaguguaaugau

SEQ ID NO: 1183935 - RNA, 19 nt, Artificial Sequence
  Description of Artificial Sequence: Synthetic oligonucleotide
  Antisense strand to SEQ ID NO: 1183934
aucauuacacuaagguggu

SEQ ID NO: 1183936 - RNA, 19 nt, Artificial Sequence
  Description of Artificial Sequence: Synthetic oligonucleotide
  Sense strand starting at position 3513 of SEQ ID NO: 916786
augauagcucauuguggua

SEQ ID NO: 1183937 - RNA, 19 nt, Artificial Sequence
  Description of Artificial Sequence: Synthetic oligonucleotide
  Antisense strand to SEQ ID NO: 1183936
uaccacaaugagcuaucau

SEQ ID NO: 1183938 - RNA, 19 nt, Artificial Sequence
  Description of Artificial Sequence: Synthetic oligonucleotide
  Sense strand starting at position 3544 of SEQ ID NO: 916786
ggguuauagucuuauuucu

SEQ ID NO: 1183939 - RNA, 19 nt, Artificial Sequence
  Description of Artificial Sequence: Synthetic oligonucleotide
  Antisense strand to SEQ ID NO: 1183938
agaaauaagacuauaaccc

SEQ ID NO: 1183940 - RNA, 19 nt, Artificial Sequence
  Description of Artificial Sequence: Synthetic oligonucleotide
  Sense strand starting at position 3687 of SEQ ID NO: 916786
aguauaauagccugugaaa

SEQ ID NO: 1183941 - RNA, 19 nt, Artificial Sequence
  Description of Artificial Sequence: Synthetic oligonucleotide
  Antisense strand to SEQ ID NO: 1183940
uuucacaggcuauuauacu

SEQ ID NO: 1183942 - RNA, 19 nt, Artificial Sequence
  Description of Artificial Sequence: Synthetic oligonucleotide
  Sense strand starting at position 3792 of SEQ ID NO: 916786
uuuguaaacugggagauga

SEQ ID NO: 1183943 - RNA, 19 nt, Artificial Sequence
  Description of Artificial Sequence: Synthetic oligonucleotide
  Antisense strand to SEQ ID NO: 1183942
ucaucucccaguuuacaaa

SEQ ID NO: 1183944 - RNA, 19 nt, Artificial Sequence
  Description of Artificial Sequence: Synthetic oligonucleotide
  Sense strand starting at position 3813 of SEQ ID NO: 916786
uuuccaguaguguggcaau

SEQ ID NO: 1183945 - RNA, 19 nt, Artificial Sequence
  Description of Artificial Sequence: Synthetic oligonucleotide
  Antisense strand to SEQ ID NO: 1183944
auugccacacuacuggaaa

SEQ ID NO: 1183946 - RNA, 19 nt, Artificial Sequence
  Description of Artificial Sequence: Synthetic oligonucleotide
  Sense strand starting at position 3869 of SEQ ID NO: 916786
ugguccuauuuacaaagua

SEQ ID NO: 1183947 - RNA, 19 nt, Artificial Sequence
  Description of Artificial Sequence: Synthetic oligonucleotide
  Antisense strand to SEQ ID NO: 1183946
uacuuuguaaauaggacca

SEQ ID NO: 1183948 - RNA, 19 nt, Artificial Sequence
  Description of Artificial Sequence: Synthetic oligonucleotide
  Sense strand starting at position 9 of SEQ ID NO: 916787
ccaucccuguucuuaugau

SEQ ID NO: 1183949 - RNA, 19 nt, Artificial Sequence
  Description of Artificial Sequence: Synthetic oligonucleotide
  Antisense strand to SEQ ID NO: 1183948
aucauaagaacagggaugg

SEQ ID NO: 1183950 - RNA, 19 nt, Artificial Sequence
  Description of Artificial Sequence: Synthetic oligonucleotide
  Sense strand starting at position 30 of SEQ ID NO: 916787
ggaggcugcccugaacagu

SEQ ID NO: 1183951 - RNA, 19 nt, Artificial Sequence
  Description of Artificial Sequence: Synthetic oligonucleotide
  Antisense strand to SEQ ID NO: 1183950
acuguucagggcagccucc

SEQ ID NO: 1183952 - RNA, 19 nt, Artificial Sequence
  Description of Artificial Sequence: Synthetic oligonucleotide
  Sense strand starting at position 135 of SEQ ID NO: 916787
cugugaaugucuccaccca

SEQ ID NO: 1183953 - RNA, 19 nt, Artificial Sequence
  Description of Artificial Sequence: Synthetic oligonucleotide
  Antisense strand to SEQ ID NO: 1183952
uggguggagacauucacag

SEQ ID NO: 1183954 - RNA, 19 nt, Artificial Sequence
  Description of Artificial Sequence: Synthetic oligonucleotide
  Sense strand starting at position 209 of SEQ ID NO: 916787
caggaaacaugagaguaaa

SEQ ID NO: 1183955 - RNA, 19 nt, Artificial Sequence
  Description of Artificial Sequence: Synthetic oligonucleotide
  Antisense strand to SEQ ID NO: 1183954
uuuacucucauguuuccug

SEQ ID NO: 1183956 - RNA, 19 nt, Artificial Sequence
  Description of Artificial Sequence: Synthetic oligonucleotide
  Sense strand starting at position 271 of SEQ ID NO: 916787
gggaauuccucugaugccu

SEQ ID NO: 1183957 - RNA, 19 nt, Artificial Sequence
  Description of Artificial Sequence: Synthetic oligonucleotide
  Antisense strand to SEQ ID NO: 1183956
aggcaucagaggaauuccc

SEQ ID NO: 1183958 - RNA, 19 nt, Artificial Sequence
  Description of Artificial Sequence: Synthetic oligonucleotide
  Sense strand starting at position 581 of SEQ ID NO: 916787
gucacuaaacacugaguca

SEQ ID NO: 1183959 - RNA, 19 nt, Artificial Sequence
  Description of Artificial Sequence: Synthetic oligonucleotide
  Antisense strand to SEQ ID NO: 1183958
ugacucaguguuuagugac

SEQ ID NO: 1183960 - RNA, 19 nt, Artificial Sequence
  Description of Artificial Sequence: Synthetic oligonucleotide
  Sense strand starting at position 882 of SEQ ID NO: 916787
aguaauuguagccacgcaa

SEQ ID NO: 1183961 - RNA, 19 nt, Artificial Sequence
  Description of Artificial Sequence: Synthetic oligonucleotide
  Antisense strand to SEQ ID NO: 1183960
uugcguggcuacaauuacu

SEQ ID NO: 1183962 - RNA, 19 nt, Artificial Sequence
  Description of Artificial Sequence: Synthetic oligonucleotide
  Sense strand starting at position 1141 of SEQ ID NO: 916787
gcagcaauccuggaaccau

SEQ ID NO: 1183963 - RNA, 19 nt, Artificial Sequence
  Description of Artificial Sequence: Synthetic oligonucleotide
  Antisense strand to SEQ ID NO: 1183962
augguuccaggauugcugc

SEQ ID NO: 1183964 - RNA, 19 nt, Artificial Sequence
  Description of Artificial Sequence: Synthetic oligonucleotide
  Sense strand starting at position 1518 of SEQ ID NO: 916787
ccguguacuucucgaacac

SEQ ID NO: 1183965 - RNA, 19 nt, Artificial Sequence
  Description of Artificial Sequence: Synthetic oligonucleotide
  Antisense strand to SEQ ID NO: 1183964
guguucgagaaguacacgg

SEQ ID NO: 1183966 - RNA, 19 nt, Artificial Sequence
  Description of Artificial Sequence: Synthetic oligonucleotide
  Sense strand starting at position 1522 of SEQ ID NO: 916787
guacuucucgaacaccgau

SEQ ID NO: 1183967 - RNA, 19 nt, Artificial Sequence
  Description of Artificial Sequence: Synthetic oligonucleotide
  Antisense strand to SEQ ID NO: 1183966
aucgguguucgagaaguac

SEQ ID NO: 1183968 - RNA, 19 nt, Artificial Sequence
  Description of Artificial Sequence: Synthetic oligonucleotide
  Sense strand starting at position 2823 of SEQ ID NO: 916787
agcuuuggagacugauaac

SEQ ID NO: 1183969 - RNA, 19 nt, Artificial Sequence
  Description of Artificial Sequence: Synthetic oligonucleotide
  Antisense strand to SEQ ID NO: 1183968
guuaucagucuccaaagcu

SEQ ID NO: 1183970 - RNA, 19 nt, Artificial Sequence
  Description of Artificial Sequence: Synthetic oligonucleotide
  Sense strand starting at position 2946 of SEQ ID NO: 916787
cuuauuuguugagcacuua

SEQ ID NO: 1183971 - RNA, 19 nt, Artificial Sequence
  Description of Artificial Sequence: Synthetic oligonucleotide
  Antisense strand to SEQ ID NO: 1183970
uaagugcucaacaaauaag

SEQ ID NO: 1183972 - RNA, 19 nt, Artificial Sequence
  Description of Artificial Sequence: Synthetic oligonucleotide
  Sense strand starting at position 3214 of SEQ ID NO: 916787
gcaaguggccuucguaguu

SEQ ID NO: 1183973 - RNA, 19 nt, Artificial Sequence
  Description of Artificial Sequence: Synthetic oligonucleotide
  Antisense strand to SEQ ID NO: 1183972
aacuacgaaggccacuugc

SEQ ID NO: 1183974 - RNA, 19 nt, Artificial Sequence
  Description of Artificial Sequence: Synthetic oligonucleotide
  Sense strand starting at position 3223 of SEQ ID NO: 916787
cuucguaguuuccucagau

SEQ ID NO: 1183975 - RNA, 19 nt, Artificial Sequence
  Description of Artificial Sequence: Synthetic oligonucleotide
  Antisense strand to SEQ ID NO: 1183974
aucugaggaaacuacgaag

SEQ ID NO: 1183976 - RNA, 19 nt, Artificial Sequence
  Description of Artificial Sequence: Synthetic oligonucleotide
  Sense strand starting at position 3224 of SEQ ID NO: 916787
uucguaguuuccucagaua

SEQ ID NO: 1183977 - RNA, 19 nt, Artificial Sequence
  Description of Artificial Sequence: Synthetic oligonucleotide
  Antisense strand to SEQ ID NO: 1183976
uaucugaggaaacuacgaa

SEQ ID NO: 1183978 - RNA, 19 nt, Artificial Sequence
  Description of Artificial Sequence: Synthetic oligonucleotide
  Sense strand starting at position 3311 of SEQ ID NO: 916787
cggcaagggucauguaaac

SEQ ID NO: 1183979 - RNA, 19 nt, Artificial Sequence
  Description of Artificial Sequence: Synthetic oligonucleotide
  Antisense strand to SEQ ID NO: 1183978
guuuacaugacccuugccg

SEQ ID NO: 1183980 - RNA, 19 nt, Artificial Sequence
  Description of Artificial Sequence: Synthetic oligonucleotide
  Sense strand starting at position 3328 of SEQ ID NO: 916787
accucacuucguggaggaa

SEQ ID NO: 1183981 - RNA, 19 nt, Artificial Sequence
  Description of Artificial Sequence: Synthetic oligonucleotide
  Antisense strand to SEQ ID NO: 1183980
uuccuccacgaagugaggu

SEQ ID NO: 1183982 - RNA, 19 nt, Artificial Sequence
  Description of Artificial Sequence: Synthetic oligonucleotide
  Sense strand starting at position 3329 of SEQ ID NO: 916787
ccucacuucguggaggaaa

SEQ ID NO: 1183983 - RNA, 19 nt, Artificial Sequence
  Description of Artificial Sequence: Synthetic oligonucleotide
  Antisense strand to SEQ ID NO: 1183982
uuuccuccacgaagugagg

SEQ ID NO: 1183984 - RNA, 19 nt, Artificial Sequence
  Description of Artificial Sequence: Synthetic oligonucleotide
  Sense strand starting at position 3357 of SEQ ID NO: 916787
cuggcaguuccauggucaa

SEQ ID NO: 1183985 - RNA, 19 nt, Artificial Sequence
  Description of Artificial Sequence: Synthetic oligonucleotide
  Antisense strand to SEQ ID NO: 1183984
uugaccauggaacugccag

SEQ ID NO: 1183986 - RNA, 19 nt, Artificial Sequence
  Description of Artificial Sequence: Synthetic oligonucleotide
  Sense strand starting at position 3369 of SEQ ID NO: 916787
uggucaagguucucacagu

SEQ ID NO: 1183987 - RNA, 19 nt, Artificial Sequence
  Description of Artificial Sequence: Synthetic oligonucleotide
  Antisense strand to SEQ ID NO: 1183986
acugugagaaccuugacca

SEQ ID NO: 1183988 - RNA, 19 nt, Artificial Sequence
  Description of Artificial Sequence: Synthetic oligonucleotide
  Sense strand starting at position 3525 of SEQ ID NO: 916787
aggguaaucuccuggguca

SEQ ID NO: 1183989 - RNA, 19 nt, Artificial Sequence
  Description of Artificial Sequence: Synthetic oligonucleotide
  Antisense strand to SEQ ID NO: 1183988
ugacccaggagauuacccu

SEQ ID NO: 1183990 - RNA, 19 nt, Artificial Sequence
  Description of Artificial Sequence: Synthetic oligonucleotide
  Sense strand starting at position 3526 of SEQ ID NO: 916787
ggguaaucuccugggucaa

SEQ ID NO: 1183991 - RNA, 19 nt, Artificial Sequence
  Description of Artificial Sequence: Synthetic oligonucleotide
  Antisense strand to SEQ ID NO: 1183990
uugacccaggagauuaccc

SEQ ID NO: 1183992 - RNA, 19 nt, Artificial Sequence
  Description of Artificial Sequence: Synthetic oligonucleotide
  Sense strand starting at position 3527 of SEQ ID NO: 916787
gguaaucuccugggucaag

SEQ ID NO: 1183993 - RNA, 19 nt, Artificial Sequence
  Description of Artificial Sequence: Synthetic oligonucleotide
  Antisense strand to SEQ ID NO: 1183992
cuugacccaggagauuacc

SEQ ID NO: 1183994 - RNA, 19 nt, Artificial Sequence
  Description of Artificial Sequence: Synthetic oligonucleotide
  Sense strand starting at position 3595 of SEQ ID NO: 916787
cguuuauugagaggcaguu

SEQ ID NO: 1183995 - RNA, 19 nt, Artificial Sequence
  Description of Artificial Sequence: Synthetic oligonucleotide
  Antisense strand to SEQ ID NO: 1183994
aacugccucucaauaaacg

SEQ ID NO: 1183996 - RNA, 19 nt, Artificial Sequence
  Description of Artificial Sequence: Synthetic oligonucleotide
  Sense strand starting at position 3608 of SEQ ID NO: 916787
gcaguugugcuccagccuu

SEQ ID NO: 1183997 - RNA, 19 nt, Artificial Sequence
  Description of Artificial Sequence: Synthetic oligonucleotide
  Antisense strand to SEQ ID NO: 1183996
aaggcuggagcacaacugc

SEQ ID NO: 1183998 - RNA, 19 nt, Artificial Sequence
  Description of Artificial Sequence: Synthetic oligonucleotide
  Sense strand starting at position 3861 of SEQ ID NO: 916787
gggucagaucauggaguug

SEQ ID NO: 1183999 - RNA, 19 nt, Artificial Sequence
  Description of Artificial Sequence: Synthetic oligonucleotide
  Antisense strand to SEQ ID NO: 1183998
caacuccaugaucugaccc

SEQ ID NO: 1184000 - RNA, 19 nt, Artificial Sequence
  Description of Artificial Sequence: Synthetic oligonucleotide
  Sense strand starting at position 70 of SEQ ID NO: 916788
uaaagaacgugauuauauc

SEQ ID NO: 1184001 - RNA, 19 nt, Artificial Sequence
  Description of Artificial Sequence: Synthetic oligonucleotide
  Antisense strand to SEQ ID NO: 1184000
gauauaaucacguucuuua

SEQ ID NO: 1184002 - RNA, 19 nt, Artificial Sequence
  Description of Artificial Sequence: Synthetic oligonucleotide
  Sense strand starting at position 77 of SEQ ID NO: 916788
cgugauuauauccaguuga

SEQ ID NO: 1184003 - RNA, 19 nt, Artificial Sequence
  Description of Artificial Sequence: Synthetic oligonucleotide
  Antisense strand to SEQ ID NO: 1184002
ucaacuggauauaaucacg

SEQ ID NO: 1184004 - RNA, 19 nt, Artificial Sequence
  Description of Artificial Sequence: Synthetic oligonucleotide
  Sense strand starting at position 134 of SEQ ID NO: 916788
uauuuauugcuggguaucu

SEQ ID NO: 1184005 - RNA, 19 nt, Artificial Sequence
  Description of Artificial Sequence: Synthetic oligonucleotide
  Antisense strand to SEQ ID NO: 1184004
agauacccagcaauaaaua

SEQ ID NO: 1184006 - RNA, 19 nt, Artificial Sequence
  Description of Artificial Sequence: Synthetic oligonucleotide
  Sense strand starting at position 145 of SEQ ID NO: 916788
ggguaucuggcauauagua

SEQ ID NO: 1184007 - RNA, 19 nt, Artificial Sequence
  Description of Artificial Sequence: Synthetic oligonucleotide
  Antisense strand to SEQ ID NO: 1184006
uacuauaugccagauaccc

SEQ ID NO: 1184008 - RNA, 19 nt, Artificial Sequence
  Description of Artificial Sequence: Synthetic oligonucleotide
  Sense strand starting at position 307 of SEQ ID NO: 916788
acaacuaugcauugaauga

SEQ ID NO: 1184009 - RNA, 19 nt, Artificial Sequence
  Description of Artificial Sequence: Synthetic oligonucleotide
  Antisense strand to SEQ ID NO: 1184008
ucauucaaugcauaguugu

SEQ ID NO: 1184010 - RNA, 19 nt, Artificial Sequence
  Description of Artificial Sequence: Synthetic oligonucleotide
  Sense strand starting at position 311 of SEQ ID NO: 916788
cuaugcauugaaugaguua

SEQ ID NO: 1184011 - RNA, 19 nt, Artificial Sequence
  Description of Artificial Sequence: Synthetic oligonucleotide
  Antisense strand to SEQ ID NO: 1184010
uaacucauucaaugcauag

SEQ ID NO: 1184012 - RNA, 19 nt, Artificial Sequence
  Description of Artificial Sequence: Synthetic oligonucleotide
  Sense strand starting at position 318 of SEQ ID NO: 916788
uugaaugaguuauuccuaa

SEQ ID NO: 1184013 - RNA, 19 nt, Artificial Sequence
  Description of Artificial Sequence: Synthetic oligonucleotide
  Antisense strand to SEQ ID NO: 1184012
uuaggaauaacucauucaa

SEQ ID NO: 1184014 - RNA, 19 nt, Artificial Sequence
  Description of Artificial Sequence: Synthetic oligonucleotide
  Sense strand starting at position 333 of SEQ ID NO: 916788
cuaaauuaggcagacaugu

SEQ ID NO: 1184015 - RNA, 19 nt, Artificial Sequence
  Description of Artificial Sequence: Synthetic oligonucleotide
  Antisense strand to SEQ ID NO: 1184014
acaugucugccuaauuuag

SEQ ID NO: 1184016 - RNA, 19 nt, Artificial Sequence
  Description of Artificial Sequence: Synthetic oligonucleotide
  Sense strand starting at position 457 of SEQ ID NO: 916788
uggacuuggaguuggacaa

SEQ ID NO: 1184017 - RNA, 19 nt, Artificial Sequence
  Description of Artificial Sequence: Synthetic oligonucleotide
  Antisense strand to SEQ ID NO: 1184016
uuguccaacuccaagucca

SEQ ID NO: 1184018 - RNA, 19 nt, Artificial Sequence
  Description of Artificial Sequence: Synthetic oligonucleotide
  Sense strand starting at position 464 of SEQ ID NO: 916788
ggaguuggacaacguaaau

SEQ ID NO: 1184019 - RNA, 19 nt, Artificial Sequence
  Description of Artificial Sequence: Synthetic oligonucleotide
  Antisense strand to SEQ ID NO: 1184018
auuuacguuguccaacucc

SEQ ID NO: 1184020 - RNA, 19 nt, Artificial Sequence
  Description of Artificial Sequence: Synthetic oligonucleotide
  Sense strand starting at position 664 of SEQ ID NO: 916788
agacaccaauugucaguaa

SEQ ID NO: 1184021 - RNA, 19 nt, Artificial Sequence
  Description of Artificial Sequence: Synthetic oligonucleotide
  Antisense strand to SEQ ID NO: 1184020
uuacugacaauuggugucu

SEQ ID NO: 1184022 - RNA, 19 nt, Artificial Sequence
  Description of Artificial Sequence: Synthetic oligonucleotide
  Sense strand starting at position 850 of SEQ ID NO: 916788
aaaggauaaagguguggua

SEQ ID NO: 1184023 - RNA, 19 nt, Artificial Sequence
  Description of Artificial Sequence: Synthetic oligonucleotide
  Antisense strand to SEQ ID NO: 1184022
uaccacaccuuuauccuuu

SEQ ID NO: 1184024 - RNA, 19 nt, Artificial Sequence
  Description of Artificial Sequence: Synthetic oligonucleotide
  Sense strand starting at position 946 of SEQ ID NO: 916788
cugagaagugacugggauu

SEQ ID NO: 1184025 - RNA, 19 nt, Artificial Sequence
  Description of Artificial Sequence: Synthetic oligonucleotide
  Antisense strand to SEQ ID NO: 1184024
aaucccagucacuucucag

SEQ ID NO: 1184026 - RNA, 19 nt, Artificial Sequence
  Description of Artificial Sequence: Synthetic oligonucleotide
  Sense strand starting at position 949 of SEQ ID NO: 916788
agaagugacugggauuuau

SEQ ID NO: 1184027 - RNA, 19 nt, Artificial Sequence
  Description of Artificial Sequence: Synthetic oligonucleotide
  Antisense strand to SEQ ID NO: 1184026
auaaaucccagucacuucu

SEQ ID NO: 1184028 - RNA, 19 nt, Artificial Sequence
  Description of Artificial Sequence: Synthetic oligonucleotide
  Sense strand starting at position 988 of SEQ ID NO: 916788
agaguugugaaguggaaag

SEQ ID NO: 1184029 - RNA, 19 nt, Artificial Sequence
  Description of Artificial Sequence: Synthetic oligonucleotide
  Antisense strand to SEQ ID NO: 1184028
cuuuccacuucacaacucu

SEQ ID NO: 1184030 - RNA, 19 nt, Artificial Sequence
  Description of Artificial Sequence: Synthetic oligonucleotide
  Sense strand starting at position 1029 of SEQ ID NO: 916788
caaguaugaccuugggcaa

SEQ ID NO: 1184031 - RNA, 19 nt, Artificial Sequence
  Description of Artificial Sequence: Synthetic oligonucleotide
  Antisense strand to SEQ ID NO: 1184030
uugcccaaggucauacuug

SEQ ID NO: 1184032 - RNA, 19 nt, Artificial Sequence
  Description of Artificial Sequence: Synthetic oligonucleotide
  Sense strand starting at position 1139 of SEQ ID NO: 916788
cuguuaaugcgauacaaau

SEQ ID NO: 1184033 - RNA, 19 nt, Artificial Sequence
  Description of Artificial Sequence: Synthetic oligonucleotide
  Antisense strand to SEQ ID NO: 1184032
auuuguaucgcauuaacag

SEQ ID NO: 1184034 - RNA, 19 nt, Artificial Sequence
  Description of Artificial Sequence: Synthetic oligonucleotide
  Sense strand starting at position 1200 of SEQ ID NO: 916788
auuauauguccaugaccuu

SEQ ID NO: 1184035 - RNA, 19 nt, Artificial Sequence
  Description of Artificial Sequence: Synthetic oligonucleotide
  Antisense strand to SEQ ID NO: 1184034
aaggucauggacauauaau

SEQ ID NO: 1184036 - RNA, 19 nt, Artificial Sequence
  Description of Artificial Sequence: Synthetic oligonucleotide
  Sense strand starting at position 1325 of SEQ ID NO: 916788
agacaucaaugccuugaaa

SEQ ID NO: 1184037 - RNA, 19 nt, Artificial Sequence
  Description of Artificial Sequence: Synthetic oligonucleotide
  Antisense strand to SEQ ID NO: 1184036
uuucaaggcauugaugucu

SEQ ID NO: 1184038 - RNA, 19 nt, Artificial Sequence
  Description of Artificial Sequence: Synthetic oligonucleotide
  Sense strand starting at position 1352 of SEQ ID NO: 916788
gugcuaaacguauagaaac

SEQ ID NO: 1184039 - RNA, 19 nt, Artificial Sequence
  Description of Artificial Sequence: Synthetic oligonucleotide
  Antisense strand to SEQ ID NO: 1184038
guuucuauacguuuagcac

SEQ ID NO: 1184040 - RNA, 19 nt, Artificial Sequence
  Description of Artificial Sequence: Synthetic oligonucleotide
  Sense strand starting at position 1438 of SEQ ID NO: 916788
augcuauacaggugaggaa

SEQ ID NO: 1184041 - RNA, 19 nt, Artificial Sequence
  Description of Artificial Sequence: Synthetic oligonucleotide
  Antisense strand to SEQ ID NO: 1184040
uuccucaccuguauagcau

SEQ ID NO: 1184042 - RNA, 19 nt, Artificial Sequence
  Description of Artificial Sequence: Synthetic oligonucleotide
  Sense strand starting at position 2202 of SEQ ID NO: 916788
cggagaacuguccagucuu

SEQ ID NO: 1184043 - RNA, 19 nt, Artificial Sequence
  Description of Artificial Sequence: Synthetic oligonucleotide
  Antisense strand to SEQ ID NO: 1184042
aagacuggacaguucuccg

SEQ ID NO: 1184044 - RNA, 19 nt, Artificial Sequence
  Description of Artificial Sequence: Synthetic oligonucleotide
  Sense strand starting at position 2413 of SEQ ID NO: 916788
ugggauugguagucaucca

SEQ ID NO: 1184045 - RNA, 19 nt, Artificial Sequence
  Description of Artificial Sequence: Synthetic oligonucleotide
  Antisense strand to SEQ ID NO: 1184044
uggaugacuaccaauccca

SEQ ID NO: 1184046 - RNA, 19 nt, Artificial Sequence
  Description of Artificial Sequence: Synthetic oligonucleotide
  Sense strand starting at position 2567 of SEQ ID NO: 916788
guucguuaugucgcugacu

SEQ ID NO: 1184047 - RNA, 19 nt, Artificial Sequence
  Description of Artificial Sequence: Synthetic oligonucleotide
  Antisense strand to SEQ ID NO: 1184046
agucagcgacauaacgaac

SEQ ID NO: 1184048 - RNA, 19 nt, Artificial Sequence
  Description of Artificial Sequence: Synthetic oligonucleotide
  Sense strand starting at position 2697 of SEQ ID NO: 916788
gcgguuucggucucgggaa

SEQ ID NO: 1184049 - RNA, 19 nt, Artificial Sequence
  Description of Artificial Sequence: Synthetic oligonucleotide
  Antisense strand to SEQ ID NO: 1184048
uucccgagaccgaaaccgc

SEQ ID NO: 1184050 - RNA, 19 nt, Artificial Sequence
  Description of Artificial Sequence: Synthetic oligonucleotide
  Sense strand starting at position 2746 of SEQ ID NO: 916788
uguacucagcuacaguaau

SEQ ID NO: 1184051 - RNA, 19 nt, Artificial Sequence
  Description of Artificial Sequence: Synthetic oligonucleotide
  Antisense strand to SEQ ID NO: 1184050
auuacuguagcugaguaca

SEQ ID NO: 1184052 - RNA, 19 nt, Artificial Sequence
  Description of Artificial Sequence: Synthetic oligonucleotide
  Sense strand starting at position 2754 of SEQ ID NO: 916788
gcuacaguaaugugggaaa

SEQ ID NO: 1184053 - RNA, 19 nt, Artificial Sequence
  Description of Artificial Sequence: Synthetic oligonucleotide
  Antisense strand to SEQ ID NO: 1184052
uuucccacauuacuguagc

SEQ ID NO: 1184054 - RNA, 19 nt, Artificial Sequence
  Description of Artificial Sequence: Synthetic oligonucleotide
  Sense strand starting at position 2756 of SEQ ID NO: 916788
uacaguaaugugggaaaua

SEQ ID NO: 1184055 - RNA, 19 nt, Artificial Sequence
  Description of Artificial Sequence: Synthetic oligonucleotide
  Antisense strand to SEQ ID NO: 1184054
uauuucccacauuacugua

SEQ ID NO: 1184056 - RNA, 19 nt, Artificial Sequence
  Description of Artificial Sequence: Synthetic oligonucleotide
  Sense strand starting at position 2778 of SEQ ID NO: 916788
gaaggcaguuaucuggaua

SEQ ID NO: 1184057 - RNA, 19 nt, Artificial Sequence
  Description of Artificial Sequence: Synthetic oligonucleotide
  Antisense strand to SEQ ID NO: 1184056
uauccagauaacugccuuc

SEQ ID NO: 1184058 - RNA, 19 nt, Artificial Sequence
  Description of Artificial Sequence: Synthetic oligonucleotide
  Sense strand starting at position 2981 of SEQ ID NO: 916788
ugggaaagucgagguuuga

SEQ ID NO: 1184059 - RNA, 19 nt, Artificial Sequence
  Description of Artificial Sequence: Synthetic oligonucleotide
  Antisense strand to SEQ ID NO: 1184058
ucaaaccucgacuuuccca

SEQ ID NO: 1184060 - RNA, 19 nt, Artificial Sequence
  Description of Artificial Sequence: Synthetic oligonucleotide
  Sense strand starting at position 3289 of SEQ ID NO: 916788
ccauaugaguuauucucau

SEQ ID NO: 1184061 - RNA, 19 nt, Artificial Sequence
  Description of Artificial Sequence: Synthetic oligonucleotide
  Antisense strand to SEQ ID NO: 1184060
augagaauaacucauaugg

SEQ ID NO: 1184062 - RNA, 19 nt, Artificial Sequence
  Description of Artificial Sequence: Synthetic oligonucleotide
  Sense strand starting at position 3331 of SEQ ID NO: 916788
uggagagguuaguugguua

SEQ ID NO: 1184063 - RNA, 19 nt, Artificial Sequence
  Description of Artificial Sequence: Synthetic oligonucleotide
  Antisense strand to SEQ ID NO: 1184062
uaaccaacuaaccucucca

SEQ ID NO: 1184064 - RNA, 19 nt, Artificial Sequence
  Description of Artificial Sequence: Synthetic oligonucleotide
  Sense strand starting at position 3438 of SEQ ID NO: 916788
guggaugaauucuccaagu

SEQ ID NO: 1184065 - RNA, 19 nt, Artificial Sequence
  Description of Artificial Sequence: Synthetic oligonucleotide
  Antisense strand to SEQ ID NO: 1184064
acuuggagaauucauccac

SEQ ID NO: 1184066 - RNA, 19 nt, Artificial Sequence
  Description of Artificial Sequence: Synthetic oligonucleotide
  Sense strand starting at position 3604 of SEQ ID NO: 916788
gguagauauucugcuagau

SEQ ID NO: 1184067 - RNA, 19 nt, Artificial Sequence
  Description of Artificial Sequence: Synthetic oligonucleotide
  Antisense strand to SEQ ID NO: 1184066
aucuagcagaauaucuacc

SEQ ID NO: 1184068 - RNA, 19 nt, Artificial Sequence
  Description of Artificial Sequence: Synthetic oligonucleotide
  Sense strand starting at position 3608 of SEQ ID NO: 916788
gauauucugcuagauacug

SEQ ID NO: 1184069 - RNA, 19 nt, Artificial Sequence
  Description of Artificial Sequence: Synthetic oligonucleotide
  Antisense strand to SEQ ID NO: 1184068
caguaucuagcagaauauc

SEQ ID NO: 1184070 - RNA, 19 nt, Artificial Sequence
  Description of Artificial Sequence: Synthetic oligonucleotide
  Sense strand starting at position 3614 of SEQ ID NO: 916788
cugcuagauacugggaauu

SEQ ID NO: 1184071 - RNA, 19 nt, Artificial Sequence
  Description of Artificial Sequence: Synthetic oligonucleotide
  Antisense strand to SEQ ID NO: 1184070
aauucccaguaucuagcag

SEQ ID NO: 1184072 - RNA, 19 nt, Artificial Sequence
  Description of Artificial Sequence: Synthetic oligonucleotide
  Sense strand starting at position 3674 of SEQ ID NO: 916788
uuggucuuucuguauauua

SEQ ID NO: 1184073 - RNA, 19 nt, Artificial Sequence
  Description of Artificial Sequence: Synthetic oligonucleotide
  Antisense strand to SEQ ID NO: 1184072
uaauauacagaaagaccaa

SEQ ID NO: 1184074 - RNA, 19 nt, Artificial Sequence
  Description of Artificial Sequence: Synthetic oligonucleotide
  Sense strand starting at position 3676 of SEQ ID NO: 916788
ggucuuucuguauauuaua

SEQ ID NO: 1184075 - RNA, 19 nt, Artificial Sequence
  Description of Artificial Sequence: Synthetic oligonucleotide
  Antisense strand to SEQ ID NO: 1184074
uauaauauacagaaagacc

SEQ ID NO: 1184076 - RNA, 19 nt, Artificial Sequence
  Description of Artificial Sequence: Synthetic oligonucleotide
  Sense strand starting at position 3807 of SEQ ID NO: 916788
uaguaaggucauggaauag

SEQ ID NO: 1184077 - RNA, 19 nt, Artificial Sequence
  Description of Artificial Sequence: Synthetic oligonucleotide
  Antisense strand to SEQ ID NO: 1184076
cuauuccaugaccuuacua

SEQ ID NO: 1184078 - RNA, 19 nt, Artificial Sequence
  Description of Artificial Sequence: Synthetic oligonucleotide
  Sense strand starting at position 3954 of SEQ ID NO: 916788
agggucagaugaguuaagu

SEQ ID NO: 1184079 - RNA, 19 nt, Artificial Sequence
  Description of Artificial Sequence: Synthetic oligonucleotide
  Antisense strand to SEQ ID NO: 1184078
acuuaacucaucugacccu

SEQ ID NO: 1184080 - RNA, 19 nt, Artificial Sequence
  Description of Artificial Sequence: Synthetic oligonucleotide
  Sense strand starting at position 10 of SEQ ID NO: 916789
ggguacuauuacuauccca

SEQ ID NO: 1184081 - RNA, 19 nt, Artificial Sequence
  Description of Artificial Sequence: Synthetic oligonucleotide
  Antisense strand to SEQ ID NO: 1184080
ugggauaguaauaguaccc

SEQ ID NO: 1184082 - RNA, 19 nt, Artificial Sequence
  Description of Artificial Sequence: Synthetic oligonucleotide
  Sense strand starting at position 52 of SEQ ID NO: 916789
cacagagaugcugggugau

SEQ ID NO: 1184083 - RNA, 19 nt, Artificial Sequence
  Description of Artificial Sequence: Synthetic oligonucleotide
  Antisense strand to SEQ ID NO: 1184082
aucacccagcaucucugug

SEQ ID NO: 1184084 - RNA, 19 nt, Artificial Sequence
  Description of Artificial Sequence: Synthetic oligonucleotide
  Sense strand starting at position 152 of SEQ ID NO: 916789
ugaaauuaauuacagguca

SEQ ID NO: 1184085 - RNA, 19 nt, Artificial Sequence
  Description of Artificial Sequence: Synthetic oligonucleotide
  Antisense strand to SEQ ID NO: 1184084
ugaccuguaauuaauuuca

SEQ ID NO: 1184086 - RNA, 19 nt, Artificial Sequence
  Description of Artificial Sequence: Synthetic oligonucleotide
  Sense strand starting at position 157 of SEQ ID NO: 916789
uuaauuacaggucaaagca

SEQ ID NO: 1184087 - RNA, 19 nt, Artificial Sequence
  Description of Artificial Sequence: Synthetic oligonucleotide
  Antisense strand to SEQ ID NO: 1184086
ugcuuugaccuguaauuaa

SEQ ID NO: 1184088 - RNA, 19 nt, Artificial Sequence
  Description of Artificial Sequence: Synthetic oligonucleotide
  Sense strand starting at position 188 of SEQ ID NO: 916789
cagagugaccucggaaaug

SEQ ID NO: 1184089 - RNA, 19 nt, Artificial Sequence
  Description of Artificial Sequence: Synthetic oligonucleotide
  Antisense strand to SEQ ID NO: 1184088
cauuuccgaggucacucug

SEQ ID NO: 1184090 - RNA, 19 nt, Artificial Sequence
  Description of Artificial Sequence: Synthetic oligonucleotide
  Sense strand starting at position 199 of SEQ ID NO: 916789
cggaaaugcugcucaacuc

SEQ ID NO: 1184091 - RNA, 19 nt, Artificial Sequence
  Description of Artificial Sequence: Synthetic oligonucleotide
  Antisense strand to SEQ ID NO: 1184090
gaguugagcagcauuuccg

SEQ ID NO: 1184092 - RNA, 19 nt, Artificial Sequence
  Description of Artificial Sequence: Synthetic oligonucleotide
  Sense strand starting at position 200 of SEQ ID NO: 916789
ggaaaugcugcucaacucu

SEQ ID NO: 1184093 - RNA, 19 nt, Artificial Sequence
  Description of Artificial Sequence: Synthetic oligonucleotide
  Antisense strand to SEQ ID NO: 1184092
agaguugagcagcauuucc

SEQ ID NO: 1184094 - RNA, 19 nt, Artificial Sequence
  Description of Artificial Sequence: Synthetic oligonucleotide
  Sense strand starting at position 426 of SEQ ID NO: 916789
aucuguauuuccugaggcu

SEQ ID NO: 1184095 - RNA, 19 nt, Artificial Sequence
  Description of Artificial Sequence: Synthetic oligonucleotide
  Antisense strand to SEQ ID NO: 1184094
agccucaggaaauacagau

SEQ ID NO: 1184096 - RNA, 19 nt, Artificial Sequence
  Description of Artificial Sequence: Synthetic oligonucleotide
  Sense strand starting at position 429 of SEQ ID NO: 916789
uguauuuccugaggcugaa

SEQ ID NO: 1184097 - RNA, 19 nt, Artificial Sequence
  Description of Artificial Sequence: Synthetic oligonucleotide
  Antisense strand to SEQ ID NO: 1184096
uucagccucaggaaauaca

SEQ ID NO: 1184098 - RNA, 19 nt, Artificial Sequence
  Description of Artificial Sequence: Synthetic oligonucleotide
  Sense strand starting at position 586 of SEQ ID NO: 916789
ccagaaaccucgucugaac

SEQ ID NO: 1184099 - RNA, 19 nt, Artificial Sequence
  Description of Artificial Sequence: Synthetic oligonucleotide
  Antisense strand to SEQ ID NO: 1184098
guucagacgagguuucugg

SEQ ID NO: 1184100 - RNA, 19 nt, Artificial Sequence
  Description of Artificial Sequence: Synthetic oligonucleotide
  Sense strand starting at position 632 of SEQ ID NO: 916789
cagagagacuccugaucac

SEQ ID NO: 1184101 - RNA, 19 nt, Artificial Sequence
  Description of Artificial Sequence: Synthetic oligonucleotide
  Antisense strand to SEQ ID NO: 1184100
gugaucaggagucucucug

SEQ ID NO: 1184102 - RNA, 19 nt, Artificial Sequence
  Description of Artificial Sequence: Synthetic oligonucleotide
  Sense strand starting at position 653 of SEQ ID NO: 916789
ggcagaggcuuagccuuaa

SEQ ID NO: 1184103 - RNA, 19 nt, Artificial Sequence
  Description of Artificial Sequence: Synthetic oligonucleotide
  Antisense strand to SEQ ID NO: 1184102
uuaaggcuaagccucugcc

SEQ ID NO: 1184104 - RNA, 19 nt, Artificial Sequence
  Description of Artificial Sequence: Synthetic oligonucleotide
  Sense strand starting at position 733 of SEQ ID NO: 916789
gggacucucucaccacuaa

SEQ ID NO: 1184105 - RNA, 19 nt, Artificial Sequence
  Description of Artificial Sequence: Synthetic oligonucleotide
  Antisense strand to SEQ ID NO: 1184104
uuaguggugagagaguccc

SEQ ID NO: 1184106 - RNA, 19 nt, Artificial Sequence
  Description of Artificial Sequence: Synthetic oligonucleotide
  Sense strand starting at position 744 of SEQ ID NO: 916789
accacuaauuugggacaaa

SEQ ID NO: 1184107 - RNA, 19 nt, Artificial Sequence
  Description of Artificial Sequence: Synthetic oligonucleotide
  Antisense strand to SEQ ID NO: 1184106
uuugucccaaauuaguggu

SEQ ID NO: 1184108 - RNA, 19 nt, Artificial Sequence
  Description of Artificial Sequence: Synthetic oligonucleotide
  Sense strand starting at position 745 of SEQ ID NO: 916789
ccacuaauuugggacaaau

SEQ ID NO: 1184109 - RNA, 19 nt, Artificial Sequence
  Description of Artificial Sequence: Synthetic oligonucleotide
  Antisense strand to SEQ ID NO: 1184108
auuugucccaaauuagugg

SEQ ID NO: 1184110 - RNA, 19 nt, Artificial Sequence
  Description of Artificial Sequence: Synthetic oligonucleotide
  Sense strand starting at position 805 of SEQ ID NO: 916789
ugaagauagucucuauaga

SEQ ID NO: 1184111 - RNA, 19 nt, Artificial Sequence
  Description of Artificial Sequence: Synthetic oligonucleotide
  Antisense strand to SEQ ID NO: 1184110
ucuauagagacuaucuuca

SEQ ID NO: 1184112 - RNA, 19 nt, Artificial Sequence
  Description of Artificial Sequence: Synthetic oligonucleotide
  Sense strand starting at position 818 of SEQ ID NO: 916789
uauagaguccugugaggau

SEQ ID NO: 1184113 - RNA, 19 nt, Artificial Sequence
  Description of Artificial Sequence: Synthetic oligonucleotide
  Antisense strand to SEQ ID NO: 1184112
auccucacaggacucuaua

SEQ ID NO: 1184114 - RNA, 19 nt, Artificial Sequence
  Description of Artificial Sequence: Synthetic oligonucleotide
  Sense strand starting at position 821 of SEQ ID NO: 916789
agaguccugugaggauuaa

SEQ ID NO: 1184115 - RNA, 19 nt, Artificial Sequence
  Description of Artificial Sequence: Synthetic oligonucleotide
  Antisense strand to SEQ ID NO: 1184114
uuaauccucacaggacucu

SEQ ID NO: 1184116 - RNA, 19 nt, Artificial Sequence
  Description of Artificial Sequence: Synthetic oligonucleotide
  Sense strand starting at position 897 of SEQ ID NO: 916789
cgggaagaaaguugcaaau

SEQ ID NO: 1184117 - RNA, 19 nt, Artificial Sequence
  Description of Artificial Sequence: Synthetic oligonucleotide
  Antisense strand to SEQ ID NO: 1184116
auuugcaacuuucuucccg

SEQ ID NO: 1184118 - RNA, 19 nt, Artificial Sequence
  Description of Artificial Sequence: Synthetic oligonucleotide
  Sense strand starting at position 899 of SEQ ID NO: 916789
ggaagaaaguugcaaauau

SEQ ID NO: 1184119 - RNA, 19 nt, Artificial Sequence
  Description of Artificial Sequence: Synthetic oligonucleotide
  Antisense strand to SEQ ID NO: 1184118
auauuugcaacuuucuucc

SEQ ID NO: 1184120 - RNA, 19 nt, Artificial Sequence
  Description of Artificial Sequence: Synthetic oligonucleotide
  Sense strand starting at position 1023 of SEQ ID NO: 916789
ugucacaucuucuugguaa

SEQ ID NO: 1184121 - RNA, 19 nt, Artificial Sequence
  Description of Artificial Sequence: Synthetic oligonucleotide
  Antisense strand to SEQ ID NO: 1184120
uuaccaagaagaugugaca

SEQ ID NO: 1184122 - RNA, 19 nt, Artificial Sequence
  Description of Artificial Sequence: Synthetic oligonucleotide
  Sense strand starting at position 1073 of SEQ ID NO: 916789
ggaagagaauaauaugucu

SEQ ID NO: 1184123 - RNA, 19 nt, Artificial Sequence
  Description of Artificial Sequence: Synthetic oligonucleotide
  Antisense strand to SEQ ID NO: 1184122
agacauauuauucucuucc

SEQ ID NO: 1184124 - RNA, 19 nt, Artificial Sequence
  Description of Artificial Sequence: Synthetic oligonucleotide
  Sense strand starting at position 1078 of SEQ ID NO: 916789
agaauaauaugucuaagca

SEQ ID NO: 1184125 - RNA, 19 nt, Artificial Sequence
  Description of Artificial Sequence: Synthetic oligonucleotide
  Antisense strand to SEQ ID NO: 1184124
ugcuuagacauauuauucu

SEQ ID NO: 1184126 - RNA, 19 nt, Artificial Sequence
  Description of Artificial Sequence: Synthetic oligonucleotide
  Sense strand starting at position 1115 of SEQ ID NO: 916789
auuuaauucuucuaaggug

SEQ ID NO: 1184127 - RNA, 19 nt, Artificial Sequence
  Description of Artificial Sequence: Synthetic oligonucleotide
  Antisense strand to SEQ ID NO: 1184126
caccuuagaagaauuaaau

SEQ ID NO: 1184128 - RNA, 19 nt, Artificial Sequence
  Description of Artificial Sequence: Synthetic oligonucleotide
  Sense strand starting at position 1127 of SEQ ID NO: 916789
uaagguggguccuauuaug

SEQ ID NO: 1184129 - RNA, 19 nt, Artificial Sequence
  Description of Artificial Sequence: Synthetic oligonucleotide
  Antisense strand to SEQ ID NO: 1184128
cauaauaggacccaccuua

SEQ ID NO: 1184130 - RNA, 19 nt, Artificial Sequence
  Description of Artificial Sequence: Synthetic oligonucleotide
  Sense strand starting at position 1135 of SEQ ID NO: 916789
guccuauuaugauuaccau

SEQ ID NO: 1184131 - RNA, 19 nt, Artificial Sequence
  Description of Artificial Sequence: Synthetic oligonucleotide
  Antisense strand to SEQ ID NO: 1184130
augguaaucauaauaggac

SEQ ID NO: 1184132 - RNA, 19 nt, Artificial Sequence
  Description of Artificial Sequence: Synthetic oligonucleotide
  Sense strand starting at position 1153 of SEQ ID NO: 916789
uuugacaggugaggaaaua

SEQ ID NO: 1184133 - RNA, 19 nt, Artificial Sequence
  Description of Artificial Sequence: Synthetic oligonucleotide
  Antisense strand to SEQ ID NO: 1184132
uauuuccucaccugucaaa

SEQ ID NO: 1184134 - RNA, 19 nt, Artificial Sequence
  Description of Artificial Sequence: Synthetic oligonucleotide
  Sense strand starting at position 1211 of SEQ ID NO: 916789
gcuauuaaacgguaaaggu

SEQ ID NO: 1184135 - RNA, 19 nt, Artificial Sequence
  Description of Artificial Sequence: Synthetic oligonucleotide
  Antisense strand to SEQ ID NO: 1184134
accuuuaccguuuaauagc

SEQ ID NO: 1184136 - RNA, 19 nt, Artificial Sequence
  Description of Artificial Sequence: Synthetic oligonucleotide
  Sense strand starting at position 2083 of SEQ ID NO: 916789
auccgaguugcgcucaaug

SEQ ID NO: 1184137 - RNA, 19 nt, Artificial Sequence
  Description of Artificial Sequence: Synthetic oligonucleotide
  Antisense strand to SEQ ID NO: 1184136
cauugagcgcaacucggau

SEQ ID NO: 1184138 - RNA, 19 nt, Artificial Sequence
  Description of Artificial Sequence: Synthetic oligonucleotide
  Sense strand starting at position 2085 of SEQ ID NO: 916789
ccgaguugcgcucaaugga

SEQ ID NO: 1184139 - RNA, 19 nt, Artificial Sequence
  Description of Artificial Sequence: Synthetic oligonucleotide
  Antisense strand to SEQ ID NO: 1184138
uccauugagcgcaacucgg

SEQ ID NO: 1184140 - RNA, 19 nt, Artificial Sequence
  Description of Artificial Sequence: Synthetic oligonucleotide
  Sense strand starting at position 2179 of SEQ ID NO: 916789
cggcuccuccgggaaacuu

SEQ ID NO: 1184141 - RNA, 19 nt, Artificial Sequence
  Description of Artificial Sequence: Synthetic oligonucleotide
  Antisense strand to SEQ ID NO: 1184140
aaguuucccggaggagccg

SEQ ID NO: 1184142 - RNA, 19 nt, Artificial Sequence
  Description of Artificial Sequence: Synthetic oligonucleotide
  Sense strand starting at position 2492 of SEQ ID NO: 916789
gcuggucucgcgggacgau

SEQ ID NO: 1184143 - RNA, 19 nt, Artificial Sequence
  Description of Artificial Sequence: Synthetic oligonucleotide
  Antisense strand to SEQ ID NO: 1184142
aucgucccgcgagaccagc

SEQ ID NO: 1184144 - RNA, 19 nt, Artificial Sequence
  Description of Artificial Sequence: Synthetic oligonucleotide
  Sense strand starting at position 2676 of SEQ ID NO: 916789
ggccgacgugucgaggaau

SEQ ID NO: 1184145 - RNA, 19 nt, Artificial Sequence
  Description of Artificial Sequence: Synthetic oligonucleotide
  Antisense strand to SEQ ID NO: 1184144
auuccucgacacgucggcc

SEQ ID NO: 1184146 - RNA, 19 nt, Artificial Sequence
  Description of Artificial Sequence: Synthetic oligonucleotide
  Sense strand starting at position 2809 of SEQ ID NO: 916789
cgaguucucuugucccaag

SEQ ID NO: 1184147 - RNA, 19 nt, Artificial Sequence
  Description of Artificial Sequence: Synthetic oligonucleotide
  Antisense strand to SEQ ID NO: 1184146
cuugggacaagagaacucg

SEQ ID NO: 1184148 - RNA, 19 nt, Artificial Sequence
  Description of Artificial Sequence: Synthetic oligonucleotide
  Sense strand starting at position 2887 of SEQ ID NO: 916789
gggagaacguuuccugaac

SEQ ID NO: 1184149 - RNA, 19 nt, Artificial Sequence
  Description of Artificial Sequence: Synthetic oligonucleotide
  Antisense strand to SEQ ID NO: 1184148
guucaggaaacguucuccc

SEQ ID NO: 1184150 - RNA, 19 nt, Artificial Sequence
  Description of Artificial Sequence: Synthetic oligonucleotide
  Sense strand starting at position 3032 of SEQ ID NO: 916789
guagguuuccaccgucaga

SEQ ID NO: 1184151 - RNA, 19 nt, Artificial Sequence
  Description of Artificial Sequence: Synthetic oligonucleotide
  Antisense strand to SEQ ID NO: 1184150
ucugacgguggaaaccuac

SEQ ID NO: 1184152 - RNA, 19 nt, Artificial Sequence
  Description of Artificial Sequence: Synthetic oligonucleotide
  Sense strand starting at position 3079 of SEQ ID NO: 916789
augcccuuguagccauaaa

SEQ ID NO: 1184153 - RNA, 19 nt, Artificial Sequence
  Description of Artificial Sequence: Synthetic oligonucleotide
  Antisense strand to SEQ ID NO: 1184152
uuuauggcuacaagggcau

SEQ ID NO: 1184154 - RNA, 19 nt, Artificial Sequence
  Description of Artificial Sequence: Synthetic oligonucleotide
  Sense strand starting at position 3106 of SEQ ID NO: 916789
caacguggcacguauugau

SEQ ID NO: 1184155 - RNA, 19 nt, Artificial Sequence
  Description of Artificial Sequence: Synthetic oligonucleotide
  Antisense strand to SEQ ID NO: 1184154
aucaauacgugccacguug

SEQ ID NO: 1184156 - RNA, 19 nt, Artificial Sequence
  Description of Artificial Sequence: Synthetic oligonucleotide
  Sense strand starting at position 3110 of SEQ ID NO: 916789
guggcacguauugauuaaa

SEQ ID NO: 1184157 - RNA, 19 nt, Artificial Sequence
  Description of Artificial Sequence: Synthetic oligonucleotide
  Antisense strand to SEQ ID NO: 1184156
uuuaaucaauacgugccac

SEQ ID NO: 1184158 - RNA, 19 nt, Artificial Sequence
  Description of Artificial Sequence: Synthetic oligonucleotide
  Sense strand starting at position 3658 of SEQ ID NO: 916789
gcgagaaucauuugagccu

SEQ ID NO: 1184159 - RNA, 19 nt, Artificial Sequence
  Description of Artificial Sequence: Synthetic oligonucleotide
  Antisense strand to SEQ ID NO: 1184158
aggcucaaaugauucucgc

SEQ ID NO: 1184160 - RNA, 19 nt, Artificial Sequence
  Description of Artificial Sequence: Synthetic oligonucleotide
  Sense strand starting at position 25 of SEQ ID NO: 916790
auguguagaucccuauauc

SEQ ID NO: 1184161 - RNA, 19 nt, Artificial Sequence
  Description of Artificial Sequence: Synthetic oligonucleotide
  Antisense strand to SEQ ID NO: 1184160
gauauagggaucuacacau

SEQ ID NO: 1184162 - RNA, 19 nt, Artificial Sequence
  Description of Artificial Sequence: Synthetic oligonucleotide
  Sense strand starting at position 28 of SEQ ID NO: 916790
uguagaucccuauauccau

SEQ ID NO: 1184163 - RNA, 19 nt, Artificial Sequence
  Description of Artificial Sequence: Synthetic oligonucleotide
  Antisense strand to SEQ ID NO: 1184162
auggauauagggaucuaca

SEQ ID NO: 1184164 - RNA, 19 nt, Artificial Sequence
  Description of Artificial Sequence: Synthetic oligonucleotide
  Sense strand starting at position 64 of SEQ ID NO: 916790
ggacacuucuagcucucua

SEQ ID NO: 1184165 - RNA, 19 nt, Artificial Sequence
  Description of Artificial Sequence: Synthetic oligonucleotide
  Antisense strand to SEQ ID NO: 1184164
uagagagcuagaagugucc

SEQ ID NO: 1184166 - RNA, 19 nt, Artificial Sequence
  Description of Artificial Sequence: Synthetic oligonucleotide
  Sense strand starting at position 107 of SEQ ID NO: 916790
ccaccaguuugccuucuau

SEQ ID NO: 1184167 - RNA, 19 nt, Artificial Sequence
  Description of Artificial Sequence: Synthetic oligonucleotide
  Antisense strand to SEQ ID NO: 1184166
auagaaggcaaacuggugg

SEQ ID NO: 1184168 - RNA, 19 nt, Artificial Sequence
  Description of Artificial Sequence: Synthetic oligonucleotide
  Sense strand starting at position 480 of SEQ ID NO: 916790
acaguaguuucucuuuagu

SEQ ID NO: 1184169 - RNA, 19 nt, Artificial Sequence
  Description of Artificial Sequence: Synthetic oligonucleotide
  Antisense strand to SEQ ID NO: 1184168
acuaaagagaaacuacugu

SEQ ID NO: 1184170 - RNA, 19 nt, Artificial Sequence
  Description of Artificial Sequence: Synthetic oligonucleotide
  Sense strand starting at position 517 of SEQ ID NO: 916790
aauguuacaucugugagau

SEQ ID NO: 1184171 - RNA, 19 nt, Artificial Sequence
  Description of Artificial Sequence: Synthetic oligonucleotide
  Antisense strand to SEQ ID NO: 1184170
aucucacagauguaacauu

SEQ ID NO: 1184172 - RNA, 19 nt, Artificial Sequence
  Description of Artificial Sequence: Synthetic oligonucleotide
  Sense strand starting at position 518 of SEQ ID NO: 916790
auguuacaucugugagauu

SEQ ID NO: 1184173 - RNA, 19 nt, Artificial Sequence
  Description of Artificial Sequence: Synthetic oligonucleotide
  Antisense strand to SEQ ID NO: 1184172
aaucucacagauguaacau

SEQ ID NO: 1184174 - RNA, 19 nt, Artificial Sequence
  Description of Artificial Sequence: Synthetic oligonucleotide
  Sense strand starting at position 574 of SEQ ID NO: 916790
uucucuguugcauaguauu

SEQ ID NO: 1184175 - RNA, 19 nt, Artificial Sequence
  Description of Artificial Sequence: Synthetic oligonucleotide
  Antisense strand to SEQ ID NO: 1184174
aauacuaugcaacagagaa

SEQ ID NO: 1184176 - RNA, 19 nt, Artificial Sequence
  Description of Artificial Sequence: Synthetic oligonucleotide
  Sense strand starting at position 627 of SEQ ID NO: 916790
cauuuagaguguuuccagu

SEQ ID NO: 1184177 - RNA, 19 nt, Artificial Sequence
  Description of Artificial Sequence: Synthetic oligonucleotide
  Antisense strand to SEQ ID NO: 1184176
acuggaaacacucuaaaug

SEQ ID NO: 1184178 - RNA, 19 nt, Artificial Sequence
  Description of Artificial Sequence: Synthetic oligonucleotide
  Sense strand starting at position 629 of SEQ ID NO: 916790
uuuagaguguuuccaguuu

SEQ ID NO: 1184179 - RNA, 19 nt, Artificial Sequence
  Description of Artificial Sequence: Synthetic oligonucleotide
  Antisense strand to SEQ ID NO: 1184178
aaacuggaaacacucuaaa

SEQ ID NO: 1184180 - RNA, 19 nt, Artificial Sequence
  Description of Artificial Sequence: Synthetic oligonucleotide
  Sense strand starting at position 671 of SEQ ID NO: 916790
ugaaucuucuugucuaugu

SEQ ID NO: 1184181 - RNA, 19 nt, Artificial Sequence
  Description of Artificial Sequence: Synthetic oligonucleotide
  Antisense strand to SEQ ID NO: 1184180
acauagacaagaagauuca

SEQ ID NO: 1184182 - RNA, 19 nt, Artificial Sequence
  Description of Artificial Sequence: Synthetic oligonucleotide
  Sense strand starting at position 1037 of SEQ ID NO: 916790
uguuucuugcucuagguca

SEQ ID NO: 1184183 - RNA, 19 nt, Artificial Sequence
  Description of Artificial Sequence: Synthetic oligonucleotide
  Antisense strand to SEQ ID NO: 1184182
ugaccuagagcaagaaaca

SEQ ID NO: 1184184 - RNA, 19 nt, Artificial Sequence
  Description of Artificial Sequence: Synthetic oligonucleotide
  Sense strand starting at position 1039 of SEQ ID NO: 916790
uuucuugcucuaggucaaa

SEQ ID NO: 1184185 - RNA, 19 nt, Artificial Sequence
  Description of Artificial Sequence: Synthetic oligonucleotide
  Antisense strand to SEQ ID NO: 1184184
uuugaccuagagcaagaaa

SEQ ID NO: 1184186 - RNA, 19 nt, Artificial Sequence
  Description of Artificial Sequence: Synthetic oligonucleotide
  Sense strand starting at position 1051 of SEQ ID NO: 916790
ggucaaagguucucaaacu

SEQ ID NO: 1184187 - RNA, 19 nt, Artificial Sequence
  Description of Artificial Sequence: Synthetic oligonucleotide
  Antisense strand to SEQ ID NO: 1184186
aguuugagaaccuuugacc

SEQ ID NO: 1184188 - RNA, 19 nt, Artificial Sequence
  Description of Artificial Sequence: Synthetic oligonucleotide
  Sense strand starting at position 1080 of SEQ ID NO: 916790
ggccaauagcaucagcauu

SEQ ID NO: 1184189 - RNA, 19 nt, Artificial Sequence
  Description of Artificial Sequence: Synthetic oligonucleotide
  Antisense strand to SEQ ID NO: 1184188
aaugcugaugcuauuggcc

SEQ ID NO: 1184190 - RNA, 19 nt, Artificial Sequence
  Description of Artificial Sequence: Synthetic oligonucleotide
  Sense strand starting at position 1101 of SEQ ID NO: 916790
cugcgaacucguuagaaau

SEQ ID NO: 1184191 - RNA, 19 nt, Artificial Sequence
  Description of Artificial Sequence: Synthetic oligonucleotide
  Antisense strand to SEQ ID NO: 1184190
auuucuaacgaguucgcag

SEQ ID NO: 1184192 - RNA, 19 nt, Artificial Sequence
  Description of Artificial Sequence: Synthetic oligonucleotide
  Sense strand starting at position 1119 of SEQ ID NO: 916790
uacagauucuggccaggca

SEQ ID NO: 1184193 - RNA, 19 nt, Artificial Sequence
  Description of Artificial Sequence: Synthetic oligonucleotide
  Antisense strand to SEQ ID NO: 1184192
ugccuggccagaaucugua

SEQ ID NO: 1184194 - RNA, 19 nt, Artificial Sequence
  Description of Artificial Sequence: Synthetic oligonucleotide
  Sense strand starting at position 1562 of SEQ ID NO: 916790
acagguaggagaugucaua

SEQ ID NO: 1184195 - RNA, 19 nt, Artificial Sequence
  Description of Artificial Sequence: Synthetic oligonucleotide
  Antisense strand to SEQ ID NO: 1184194
uaugacaucuccuaccugu

SEQ ID NO: 1184196 - RNA, 19 nt, Artificial Sequence
  Description of Artificial Sequence: Synthetic oligonucleotide
  Sense strand starting at position 1780 of SEQ ID NO: 916790
aaacuuuccgcugggcaga

SEQ ID NO: 1184197 - RNA, 19 nt, Artificial Sequence
  Description of Artificial Sequence: Synthetic oligonucleotide
  Antisense strand to SEQ ID NO: 1184196
ucugcccagcggaaaguuu

SEQ ID NO: 1184198 - RNA, 19 nt, Artificial Sequence
  Description of Artificial Sequence: Synthetic oligonucleotide
  Sense strand starting at position 2170 of SEQ ID NO: 916790
cgugcuuuccagccguaga

SEQ ID NO: 1184199 - RNA, 19 nt, Artificial Sequence
  Description of Artificial Sequence: Synthetic oligonucleotide
  Antisense strand to SEQ ID NO: 1184198
ucuacggcuggaaagcacg

SEQ ID NO: 1184200 - RNA, 19 nt, Artificial Sequence
  Description of Artificial Sequence: Synthetic oligonucleotide
  Sense strand starting at position 2173 of SEQ ID NO: 916790
gcuuuccagccguagaauu

SEQ ID NO: 1184201 - RNA, 19 nt, Artificial Sequence
  Description of Artificial Sequence: Synthetic oligonucleotide
  Antisense strand to SEQ ID NO: 1184200
aauucuacggcuggaaagc

SEQ ID NO: 1184202 - RNA, 19 nt, Artificial Sequence
  Description of Artificial Sequence: Synthetic oligonucleotide
  Sense strand starting at position 2185 of SEQ ID NO: 916790
uagaauuugcaucguaggu

SEQ ID NO: 1184203 - RNA, 19 nt, Artificial Sequence
  Description of Artificial Sequence: Synthetic oligonucleotide
  Antisense strand to SEQ ID NO: 1184202
accuacgaugcaaauucua

SEQ ID NO: 1184204 - RNA, 19 nt, Artificial Sequence
  Description of Artificial Sequence: Synthetic oligonucleotide
  Sense strand starting at position 2207 of SEQ ID NO: 916790
ggaagauccgggugucucu

SEQ ID NO: 1184205 - RNA, 19 nt, Artificial Sequence
  Description of Artificial Sequence: Synthetic oligonucleotide
  Antisense strand to SEQ ID NO: 1184204
agagacacccggaucuucc

SEQ ID NO: 1184206 - RNA, 19 nt, Artificial Sequence
  Description of Artificial Sequence: Synthetic oligonucleotide
  Sense strand starting at position 2431 of SEQ ID NO: 916790
agcgcugucaccuuggcaa

SEQ ID NO: 1184207 - RNA, 19 nt, Artificial Sequence
  Description of Artificial Sequence: Synthetic oligonucleotide
  Antisense strand to SEQ ID NO: 1184206
uugccaaggugacagcgcu

SEQ ID NO: 1184208 - RNA, 19 nt, Artificial Sequence
  Description of Artificial Sequence: Synthetic oligonucleotide
  Sense strand starting at position 2540 of SEQ ID NO: 916790
agcuuaugagaucaugugu

SEQ ID NO: 1184209 - RNA, 19 nt, Artificial Sequence
  Description of Artificial Sequence: Synthetic oligonucleotide
  Antisense strand to SEQ ID NO: 1184208
acacaugaucucauaagcu

SEQ ID NO: 1184210 - RNA, 19 nt, Artificial Sequence
  Description of Artificial Sequence: Synthetic oligonucleotide
  Sense strand starting at position 2546 of SEQ ID NO: 916790
ugagaucaugugugcgaca

SEQ ID NO: 1184211 - RNA, 19 nt, Artificial Sequence
  Description of Artificial Sequence: Synthetic oligonucleotide
  Antisense strand to SEQ ID NO: 1184210
ugucgcacacaugaucuca

SEQ ID NO: 1184212 - RNA, 19 nt, Artificial Sequence
  Description of Artificial Sequence: Synthetic oligonucleotide
  Sense strand starting at position 2586 of SEQ ID NO: 916790
ucacauacgugacugcaau

SEQ ID NO: 1184213 - RNA, 19 nt, Artificial Sequence
  Description of Artificial Sequence: Synthetic oligonucleotide
  Antisense strand to SEQ ID NO: 1184212
auugcagucacguauguga

SEQ ID NO: 1184214 - RNA, 19 nt, Artificial Sequence
  Description of Artificial Sequence: Synthetic oligonucleotide
  Sense strand starting at position 2954 of SEQ ID NO: 916790
ggaggaauugcugguguug

SEQ ID NO: 1184215 - RNA, 19 nt, Artificial Sequence
  Description of Artificial Sequence: Synthetic oligonucleotide
  Antisense strand to SEQ ID NO: 1184214
caacaccagcaauuccucc

SEQ ID NO: 1184216 - RNA, 19 nt, Artificial Sequence
  Description of Artificial Sequence: Synthetic oligonucleotide
  Sense strand starting at position 3003 of SEQ ID NO: 916790
aggaguaauuaacaagaga

SEQ ID NO: 1184217 - RNA, 19 nt, Artificial Sequence
  Description of Artificial Sequence: Synthetic oligonucleotide
  Antisense strand to SEQ ID NO: 1184216
ucucuuguuaauuacuccu

SEQ ID NO: 1184218 - RNA, 19 nt, Artificial Sequence
  Description of Artificial Sequence: Synthetic oligonucleotide
  Sense strand starting at position 3053 of SEQ ID NO: 916790
gacacauaugcggaaucca

SEQ ID NO: 1184219 - RNA, 19 nt, Artificial Sequence
  Description of Artificial Sequence: Synthetic oligonucleotide
  Antisense strand to SEQ ID NO: 1184218
uggauuccgcauauguguc

SEQ ID NO: 1184220 - RNA, 19 nt, Artificial Sequence
  Description of Artificial Sequence: Synthetic oligonucleotide
  Sense strand starting at position 3077 of SEQ ID NO: 916790
cugagaauauuagcagagu

SEQ ID NO: 1184221 - RNA, 19 nt, Artificial Sequence
  Description of Artificial Sequence: Synthetic oligonucleotide
  Antisense strand to SEQ ID NO: 1184220
acucugcuaauauucucag

SEQ ID NO: 1184222 - RNA, 19 nt, Artificial Sequence
  Description of Artificial Sequence: Synthetic oligonucleotide
  Sense strand starting at position 3090 of SEQ ID NO: 916790
cagaguggcguagaaacuu

SEQ ID NO: 1184223 - RNA, 19 nt, Artificial Sequence
  Description of Artificial Sequence: Synthetic oligonucleotide
  Antisense strand to SEQ ID NO: 1184222
aaguuucuacgccacucug

SEQ ID NO: 1184224 - RNA, 19 nt, Artificial Sequence
  Description of Artificial Sequence: Synthetic oligonucleotide
  Sense strand starting at position 3096 of SEQ ID NO: 916790
ggcguagaaacuugaguca

SEQ ID NO: 1184225 - RNA, 19 nt, Artificial Sequence
  Description of Artificial Sequence: Synthetic oligonucleotide
  Antisense strand to SEQ ID NO: 1184224
ugacucaaguuucuacgcc

SEQ ID NO: 1184226 - RNA, 19 nt, Artificial Sequence
  Description of Artificial Sequence: Synthetic oligonucleotide
  Sense strand starting at position 3099 of SEQ ID NO: 916790
guagaaacuugagucauuc

SEQ ID NO: 1184227 - RNA, 19 nt, Artificial Sequence
  Description of Artificial Sequence: Synthetic oligonucleotide
  Antisense strand to SEQ ID NO: 1184226
gaaugacucaaguuucuac

SEQ ID NO: 1184228 - RNA, 19 nt, Artificial Sequence
  Description of Artificial Sequence: Synthetic oligonucleotide
  Sense strand starting at position 3353 of SEQ ID NO: 916790
cagaguggugccugugaca

SEQ ID NO: 1184229 - RNA, 19 nt, Artificial Sequence
  Description of Artificial Sequence: Synthetic oligonucleotide
  Antisense strand to SEQ ID NO: 1184228
ugucacaggcaccacucug

SEQ ID NO: 1184230 - RNA, 19 nt, Artificial Sequence
  Description of Artificial Sequence: Synthetic oligonucleotide
  Sense strand starting at position 3491 of SEQ ID NO: 916790
gggcuugucuuucccagga

SEQ ID NO: 1184231 - RNA, 19 nt, Artificial Sequence
  Description of Artificial Sequence: Synthetic oligonucleotide
  Antisense strand to SEQ ID NO: 1184230
uccugggaaagacaagccc

SEQ ID NO: 1184232 - RNA, 19 nt, Artificial Sequence
  Description of Artificial Sequence: Synthetic oligonucleotide
  Sense strand starting at position 3495 of SEQ ID NO: 916790
uugucuuucccaggaaugu

SEQ ID NO: 1184233 - RNA, 19 nt, Artificial Sequence
  Description of Artificial Sequence: Synthetic oligonucleotide
  Antisense strand to SEQ ID NO: 1184232
acauuccugggaaagacaa

SEQ ID NO: 1184234 - RNA, 19 nt, Artificial Sequence
  Description of Artificial Sequence: Synthetic oligonucleotide
  Sense strand starting at position 3496 of SEQ ID NO: 916790
ugucuuucccaggaaugua

SEQ ID NO: 1184235 - RNA, 19 nt, Artificial Sequence
  Description of Artificial Sequence: Synthetic oligonucleotide
  Antisense strand to SEQ ID NO: 1184234
uacauuccugggaaagaca

SEQ ID NO: 1184236 - RNA, 19 nt, Artificial Sequence
  Description of Artificial Sequence: Synthetic oligonucleotide
  Sense strand starting at position 3524 of SEQ ID NO: 916790
uuccuugugauagguguau

SEQ ID NO: 1184237 - RNA, 19 nt, Artificial Sequence
  Description of Artificial Sequence: Synthetic oligonucleotide
  Antisense strand to SEQ ID NO: 1184236
auacaccuaucacaaggaa

SEQ ID NO: 1184238 - RNA, 19 nt, Artificial Sequence
  Description of Artificial Sequence: Synthetic oligonucleotide
  Sense strand starting at position 3528 of SEQ ID NO: 916790
uugugauagguguauccau

SEQ ID NO: 1184239 - RNA, 19 nt, Artificial Sequence
  Description of Artificial Sequence: Synthetic oligonucleotide
  Antisense strand to SEQ ID NO: 1184238
auggauacaccuaucacaa

SEQ ID NO: 1184240 - RNA, 19 nt, Artificial Sequence
  Description of Artificial Sequence: Synthetic oligonucleotide
  Sense strand starting at position 152 of SEQ ID NO: 916791
caggauugggauugcuaga

SEQ ID NO: 1184241 - RNA, 19 nt, Artificial Sequence
  Description of Artificial Sequence: Synthetic oligonucleotide
  Antisense strand to SEQ ID NO: 1184240
ucuagcaaucccaauccug

SEQ ID NO: 1184242 - RNA, 19 nt, Artificial Sequence
  Description of Artificial Sequence: Synthetic oligonucleotide
  Sense strand starting at position 390 of SEQ ID NO: 916791
aucacuagagcucaguuau

SEQ ID NO: 1184243 - RNA, 19 nt, Artificial Sequence
  Description of Artificial Sequence: Synthetic oligonucleotide
  Antisense strand to SEQ ID NO: 1184242
auaacugagcucuagugau

SEQ ID NO: 1184244 - RNA, 19 nt, Artificial Sequence
  Description of Artificial Sequence: Synthetic oligonucleotide
  Sense strand starting at position 412 of SEQ ID NO: 916791
uugaaauaugcaugggcaa

SEQ ID NO: 1184245 - RNA, 19 nt, Artificial Sequence
  Description of Artificial Sequence: Synthetic oligonucleotide
  Antisense strand to SEQ ID NO: 1184244
uugcccaugcauauuucaa

SEQ ID NO: 1184246 - RNA, 19 nt, Artificial Sequence
  Description of Artificial Sequence: Synthetic oligonucleotide
  Sense strand starting at position 468 of SEQ ID NO: 916791
aauagauguugacugagca

SEQ ID NO: 1184247 - RNA, 19 nt, Artificial Sequence
  Description of Artificial Sequence: Synthetic oligonucleotide
  Antisense strand to SEQ ID NO: 1184246
ugcucagucaacaucuauu

SEQ ID NO: 1184248 - RNA, 19 nt, Artificial Sequence
  Description of Artificial Sequence: Synthetic oligonucleotide
  Sense strand starting at position 515 of SEQ ID NO: 916791
agagacagucauggaugua

SEQ ID NO: 1184249 - RNA, 19 nt, Artificial Sequence
  Description of Artificial Sequence: Synthetic oligonucleotide
  Antisense strand to SEQ ID NO: 1184248
uacauccaugacugucucu

SEQ ID NO: 1184250 - RNA, 19 nt, Artificial Sequence
  Description of Artificial Sequence: Synthetic oligonucleotide
  Sense strand starting at position 518 of SEQ ID NO: 916791
gacagucauggauguaaca

SEQ ID NO: 1184251 - RNA, 19 nt, Artificial Sequence
  Description of Artificial Sequence: Synthetic oligonucleotide
  Antisense strand to SEQ ID NO: 1184250
uguuacauccaugacuguc

SEQ ID NO: 1184252 - RNA, 19 nt, Artificial Sequence
  Description of Artificial Sequence: Synthetic oligonucleotide
  Sense strand starting at position 562 of SEQ ID NO: 916791
cacauucucguaggagaca

SEQ ID NO: 1184253 - RNA, 19 nt, Artificial Sequence
  Description of Artificial Sequence: Synthetic oligonucleotide
  Antisense strand to SEQ ID NO: 1184252
ugucuccuacgagaaugug

SEQ ID NO: 1184254 - RNA, 19 nt, Artificial Sequence
  Description of Artificial Sequence: Synthetic oligonucleotide
  Sense strand starting at position 593 of SEQ ID NO: 916791
agugaagacccgugauaga

SEQ ID NO: 1184255 - RNA, 19 nt, Artificial Sequence
  Description of Artificial Sequence: Synthetic oligonucleotide
  Antisense strand to SEQ ID NO: 1184254
ucuaucacgggucuucacu

SEQ ID NO: 1184256 - RNA, 19 nt, Artificial Sequence
  Description of Artificial Sequence: Synthetic oligonucleotide
  Sense strand starting at position 650 of SEQ ID NO: 916791
gguguugucacauagagaa

SEQ ID NO: 1184257 - RNA, 19 nt, Artificial Sequence
  Description of Artificial Sequence: Synthetic oligonucleotide
  Antisense strand to SEQ ID NO: 1184256
uucucuaugugacaacacc

SEQ ID NO: 1184258 - RNA, 19 nt, Artificial Sequence
  Description of Artificial Sequence: Synthetic oligonucleotide
  Sense strand starting at position 789 of SEQ ID NO: 916791
gaguguucuaagcagagac

SEQ ID NO: 1184259 - RNA, 19 nt, Artificial Sequence
  Description of Artificial Sequence: Synthetic oligonucleotide
  Antisense strand to SEQ ID NO: 1184258
gucucugcuuagaacacuc

SEQ ID NO: 1184260 - RNA, 19 nt, Artificial Sequence
  Description of Artificial Sequence: Synthetic oligonucleotide
  Sense strand starting at position 791 of SEQ ID NO: 916791
guguucuaagcagagacaa

SEQ ID NO: 1184261 - RNA, 19 nt, Artificial Sequence
  Description of Artificial Sequence: Synthetic oligonucleotide
  Antisense strand to SEQ ID NO: 1184260
uugucucugcuuagaacac

SEQ ID NO: 1184262 - RNA, 19 nt, Artificial Sequence
  Description of Artificial Sequence: Synthetic oligonucleotide
  Sense strand starting at position 930 of SEQ ID NO: 916791
aggcauuggaagggucaga

SEQ ID NO: 1184263 - RNA, 19 nt, Artificial Sequence
  Description of Artificial Sequence: Synthetic oligonucleotide
  Antisense strand to SEQ ID NO: 1184262
ucugacccuuccaaugccu

SEQ ID NO: 1184264 - RNA, 19 nt, Artificial Sequence
  Description of Artificial Sequence: Synthetic oligonucleotide
  Sense strand starting at position 941 of SEQ ID NO: 916791
gggucagaggauugcauga

SEQ ID NO: 1184265 - RNA, 19 nt, Artificial Sequence
  Description of Artificial Sequence: Synthetic oligonucleotide
  Antisense strand to SEQ ID NO: 1184264
ucaugcaauccucugaccc

SEQ ID NO: 1184266 - RNA, 19 nt, Artificial Sequence
  Description of Artificial Sequence: Synthetic oligonucleotide
  Sense strand starting at position 1135 of SEQ ID NO: 916791
gugcgcuccaugguuugaa

SEQ ID NO: 1184267 - RNA, 19 nt, Artificial Sequence
  Description of Artificial Sequence: Synthetic oligonucleotide
  Antisense strand to SEQ ID NO: 1184266
uucaaaccauggagcgcac

SEQ ID NO: 1184268 - RNA, 19 nt, Artificial Sequence
  Description of Artificial Sequence: Synthetic oligonucleotide
  Sense strand starting at position 1162 of SEQ ID NO: 916791
ccaaauuccauguguggga

SEQ ID NO: 1184269 - RNA, 19 nt, Artificial Sequence
  Description of Artificial Sequence: Synthetic oligonucleotide
  Antisense strand to SEQ ID NO: 1184268
ucccacacauggaauuugg

SEQ ID NO: 1184270 - RNA, 19 nt, Artificial Sequence
  Description of Artificial Sequence: Synthetic oligonucleotide
  Sense strand starting at position 1163 of SEQ ID NO: 916791
caaauuccaugugugggaa

SEQ ID NO: 1184271 - RNA, 19 nt, Artificial Sequence
  Description of Artificial Sequence: Synthetic oligonucleotide
  Antisense strand to SEQ ID NO: 1184270
uucccacacauggaauuug

SEQ ID NO: 1184272 - RNA, 19 nt, Artificial Sequence
  Description of Artificial Sequence: Synthetic oligonucleotide
  Sense strand starting at position 1166 of SEQ ID NO: 916791
auuccaugugugggaaacu

SEQ ID NO: 1184273 - RNA, 19 nt, Artificial Sequence
  Description of Artificial Sequence: Synthetic oligonucleotide
  Antisense strand to SEQ ID NO: 1184272
aguuucccacacauggaau

SEQ ID NO: 1184274 - RNA, 19 nt, Artificial Sequence
  Description of Artificial Sequence: Synthetic oligonucleotide
  Sense strand starting at position 1488 of SEQ ID NO: 916791
gccuccauagcuuaagaaa

SEQ ID NO: 1184275 - RNA, 19 nt, Artificial Sequence
  Description of Artificial Sequence: Synthetic oligonucleotide
  Antisense strand to SEQ ID NO: 1184274
uuucuuaagcuauggaggc

SEQ ID NO: 1184276 - RNA, 19 nt, Artificial Sequence
  Description of Artificial Sequence: Synthetic oligonucleotide
  Sense strand starting at position 1579 of SEQ ID NO: 916791
gggaguuagauucggauga

SEQ ID NO: 1184277 - RNA, 19 nt, Artificial Sequence
  Description of Artificial Sequence: Synthetic oligonucleotide
  Antisense strand to SEQ ID NO: 1184276
ucauccgaaucuaacuccc

SEQ ID NO: 1184278 - RNA, 19 nt, Artificial Sequence
  Description of Artificial Sequence: Synthetic oligonucleotide
  Sense strand starting at position 1583 of SEQ ID NO: 916791
guuagauucggaugaagaa

SEQ ID NO: 1184279 - RNA, 19 nt, Artificial Sequence
  Description of Artificial Sequence: Synthetic oligonucleotide
  Antisense strand to SEQ ID NO: 1184278
uucuucauccgaaucuaac

SEQ ID NO: 1184280 - RNA, 19 nt, Artificial Sequence
  Description of Artificial Sequence: Synthetic oligonucleotide
  Sense strand starting at position 1765 of SEQ ID NO: 916791
gcagauaguggaugagaca

SEQ ID NO: 1184281 - RNA, 19 nt, Artificial Sequence
  Description of Artificial Sequence: Synthetic oligonucleotide
  Antisense strand to SEQ ID NO: 1184280
ugucucauccacuaucugc

SEQ ID NO: 1184282 - RNA, 19 nt, Artificial Sequence
  Description of Artificial Sequence: Synthetic oligonucleotide
  Sense strand starting at position 1804 of SEQ ID NO: 916791
uggucaugugaagaaguga

SEQ ID NO: 1184283 - RNA, 19 nt, Artificial Sequence
  Description of Artificial Sequence: Synthetic oligonucleotide
  Antisense strand to SEQ ID NO: 1184282
ucacuucuucacaugacca

SEQ ID NO: 1184284 - RNA, 19 nt, Artificial Sequence
  Description of Artificial Sequence: Synthetic oligonucleotide
  Sense strand starting at position 1930 of SEQ ID NO: 916791
cccagauggucuguggaca

SEQ ID NO: 1184285 - RNA, 19 nt, Artificial Sequence
  Description of Artificial Sequence: Synthetic oligonucleotide
  Antisense strand to SEQ ID NO: 1184284
uguccacagaccaucuggg

SEQ ID NO: 1184286 - RNA, 19 nt, Artificial Sequence
  Description of Artificial Sequence: Synthetic oligonucleotide
  Sense strand starting at position 2092 of SEQ ID NO: 916791
uguuuagagacuugguaga

SEQ ID NO: 1184287 - RNA, 19 nt, Artificial Sequence
  Description of Artificial Sequence: Synthetic oligonucleotide
  Antisense strand to SEQ ID NO: 1184286
ucuaccaagucucuaaaca

SEQ ID NO: 1184288 - RNA, 19 nt, Artificial Sequence
  Description of Artificial Sequence: Synthetic oligonucleotide
  Sense strand starting at position 2094 of SEQ ID NO: 916791
uuuagagacuugguagagu

SEQ ID NO: 1184289 - RNA, 19 nt, Artificial Sequence
  Description of Artificial Sequence: Synthetic oligonucleotide
  Antisense strand to SEQ ID NO: 1184288
acucuaccaagucucuaaa

SEQ ID NO: 1184290 - RNA, 19 nt, Artificial Sequence
  Description of Artificial Sequence: Synthetic oligonucleotide
  Sense strand starting at position 2507 of SEQ ID NO: 916791
gcggaacuucuggaaccuu

SEQ ID NO: 1184291 - RNA, 19 nt, Artificial Sequence
  Description of Artificial Sequence: Synthetic oligonucleotide
  Antisense strand to SEQ ID NO: 1184290
aagguuccagaaguuccgc

SEQ ID NO: 1184292 - RNA, 19 nt, Artificial Sequence
  Description of Artificial Sequence: Synthetic oligonucleotide
  Sense strand starting at position 2556 of SEQ ID NO: 916791
gaauuaagaguccagcuuu

SEQ ID NO: 1184293 - RNA, 19 nt, Artificial Sequence
  Description of Artificial Sequence: Synthetic oligonucleotide
  Antisense strand to SEQ ID NO: 1184292
aaagcuggacucuuaauuc

SEQ ID NO: 1184294 - RNA, 19 nt, Artificial Sequence
  Description of Artificial Sequence: Synthetic oligonucleotide
  Sense strand starting at position 2717 of SEQ ID NO: 916791
gggucaugcaccuagagag

SEQ ID NO: 1184295 - RNA, 19 nt, Artificial Sequence
  Description of Artificial Sequence: Synthetic oligonucleotide
  Antisense strand to SEQ ID NO: 1184294
cucucuaggugcaugaccc

SEQ ID NO: 1184296 - RNA, 19 nt, Artificial Sequence
  Description of Artificial Sequence: Synthetic oligonucleotide
  Sense strand starting at position 2814 of SEQ ID NO: 916791
cggagcugccaauaauaaa

SEQ ID NO: 1184297 - RNA, 19 nt, Artificial Sequence
  Description of Artificial Sequence: Synthetic oligonucleotide
  Antisense strand to SEQ ID NO: 1184296
uuuauuauuggcagcuccg

SEQ ID NO: 1184298 - RNA, 19 nt, Artificial Sequence
  Description of Artificial Sequence: Synthetic oligonucleotide
  Sense strand starting at position 3303 of SEQ ID NO: 916791
caauauuucgagugcucag

SEQ ID NO: 1184299 - RNA, 19 nt, Artificial Sequence
  Description of Artificial Sequence: Synthetic oligonucleotide
  Antisense strand to SEQ ID NO: 1184298
cugagcacucgaaauauug

SEQ ID NO: 1184300 - RNA, 19 nt, Artificial Sequence
  Description of Artificial Sequence: Synthetic oligonucleotide
  Sense strand starting at position 3306 of SEQ ID NO: 916791
uauuucgagugcucagagu

SEQ ID NO: 1184301 - RNA, 19 nt, Artificial Sequence
  Description of Artificial Sequence: Synthetic oligonucleotide
  Antisense strand to SEQ ID NO: 1184300
acucugagcacucgaaaua

SEQ ID NO: 1184302 - RNA, 19 nt, Artificial Sequence
  Description of Artificial Sequence: Synthetic oligonucleotide
  Sense strand starting at position 3585 of SEQ ID NO: 916791
gugauugauaauggagcaa

SEQ ID NO: 1184303 - RNA, 19 nt, Artificial Sequence
  Description of Artificial Sequence: Synthetic oligonucleotide
  Antisense strand to SEQ ID NO: 1184302
uugcuccauuaucaaucac

SEQ ID NO: 1184304 - RNA, 19 nt, Artificial Sequence
  Description of Artificial Sequence: Synthetic oligonucleotide
  Sense strand starting at position 3760 of SEQ ID NO: 916791
ggaugggauggguguacua

SEQ ID NO: 1184305 - RNA, 19 nt, Artificial Sequence
  Description of Artificial Sequence: Synthetic oligonucleotide
  Antisense strand to SEQ ID NO: 1184304
uaguacacccaucccaucc

SEQ ID NO: 1184306 - RNA, 19 nt, Artificial Sequence
  Description of Artificial Sequence: Synthetic oligonucleotide
  Sense strand starting at position 3834 of SEQ ID NO: 916791
gcagcaauagcucagagaa

SEQ ID NO: 1184307 - RNA, 19 nt, Artificial Sequence
  Description of Artificial Sequence: Synthetic oligonucleotide
  Antisense strand to SEQ ID NO: 1184306
uucucugagcuauugcugc

SEQ ID NO: 1184308 - RNA, 19 nt, Artificial Sequence
  Description of Artificial Sequence: Synthetic oligonucleotide
  Sense strand starting at position 3882 of SEQ ID NO: 916791
guuagauuauggguucuga

SEQ ID NO: 1184309 - RNA, 19 nt, Artificial Sequence
  Description of Artificial Sequence: Synthetic oligonucleotide
  Antisense strand to SEQ ID NO: 1184308
ucagaacccauaaucuaac

SEQ ID NO: 1184310 - RNA, 19 nt, Artificial Sequence
  Description of Artificial Sequence: Synthetic oligonucleotide
  Sense strand starting at position 3899 of SEQ ID NO: 916791
gaggucaaauugccuaaau

SEQ ID NO: 1184311 - RNA, 19 nt, Artificial Sequence
  Description of Artificial Sequence: Synthetic oligonucleotide
  Antisense strand to SEQ ID NO: 1184310
auuuaggcaauuugaccuc

SEQ ID NO: 1184312 - RNA, 19 nt, Artificial Sequence
  Description of Artificial Sequence: Synthetic oligonucleotide
  Sense strand starting at position 3900 of SEQ ID NO: 916791
aggucaaauugccuaaaua

SEQ ID NO: 1184313 - RNA, 19 nt, Artificial Sequence
  Description of Artificial Sequence: Synthetic oligonucleotide
  Antisense strand to SEQ ID NO: 1184312
uauuuaggcaauuugaccu

SEQ ID NO: 1184314 - RNA, 19 nt, Artificial Sequence
  Description of Artificial Sequence: Synthetic oligonucleotide
  Sense strand starting at position 3901 of SEQ ID NO: 916791
ggucaaauugccuaaauac

SEQ ID NO: 1184315 - RNA, 19 nt, Artificial Sequence
  Description of Artificial Sequence: Synthetic oligonucleotide
  Antisense strand to SEQ ID NO: 1184314
guauuuaggcaauuugacc

SEQ ID NO: 1184316 - RNA, 19 nt, Artificial Sequence
  Description of Artificial Sequence: Synthetic oligonucleotide
  Sense strand starting at position 3924 of SEQ ID NO: 916791
gggagcucuccuuaaaugu

SEQ ID NO: 1184317 - RNA, 19 nt, Artificial Sequence
  Description of Artificial Sequence: Synthetic oligonucleotide
  Antisense strand to SEQ ID NO: 1184316
acauuuaaggagagcuccc

SEQ ID NO: 1184318 - RNA, 19 nt, Artificial Sequence
  Description of Artificial Sequence: Synthetic oligonucleotide
  Sense strand starting at position 3933 of SEQ ID NO: 916791
ccuuaaaugugaccuugga

SEQ ID NO: 1184319 - RNA, 19 nt, Artificial Sequence
  Description of Artificial Sequence: Synthetic oligonucleotide
  Antisense strand to SEQ ID NO: 1184318
uccaaggucacauuuaagg

SEQ ID NO: 1184320 - RNA, 19 nt, Artificial Sequence
  Description of Artificial Sequence: Synthetic oligonucleotide
  Sense strand starting at position 363 of SEQ ID NO: 916792
aaauuagaggguugcauac

SEQ ID NO: 1184321 - RNA, 19 nt, Artificial Sequence
  Description of Artificial Sequence: Synthetic oligonucleotide
  Antisense strand to SEQ ID NO: 1184320
guaugcaacccucuaauuu

SEQ ID NO: 1184322 - RNA, 19 nt, Artificial Sequence
  Description of Artificial Sequence: Synthetic oligonucleotide
  Sense strand starting at position 399 of SEQ ID NO: 916792
auguuaaaucucugagacc

SEQ ID NO: 1184323 - RNA, 19 nt, Artificial Sequence
  Description of Artificial Sequence: Synthetic oligonucleotide
  Antisense strand to SEQ ID NO: 1184322
ggucucagagauuuaacau

SEQ ID NO: 1184324 - RNA, 19 nt, Artificial Sequence
  Description of Artificial Sequence: Synthetic oligonucleotide
  Sense strand starting at position 405 of SEQ ID NO: 916792
aaucucugagaccggaauu

SEQ ID NO: 1184325 - RNA, 19 nt, Artificial Sequence
  Description of Artificial Sequence: Synthetic oligonucleotide
  Antisense strand to SEQ ID NO: 1184324
aauuccggucucagagauu

SEQ ID NO: 1184326 - RNA, 19 nt, Artificial Sequence
  Description of Artificial Sequence: Synthetic oligonucleotide
  Sense strand starting at position 415 of SEQ ID NO: 916792
accggaauuucagagagug

SEQ ID NO: 1184327 - RNA, 19 nt, Artificial Sequence
  Description of Artificial Sequence: Synthetic oligonucleotide
  Antisense strand to SEQ ID NO: 1184326
cacucucugaaauuccggu

SEQ ID NO: 1184328 - RNA, 19 nt, Artificial Sequence
  Description of Artificial Sequence: Synthetic oligonucleotide
  Sense strand starting at position 644 of SEQ ID NO: 916792
auaguaggcugcccauaua

SEQ ID NO: 1184329 - RNA, 19 nt, Artificial Sequence
  Description of Artificial Sequence: Synthetic oligonucleotide
  Antisense strand to SEQ ID NO: 1184328
uauaugggcagccuacuau

SEQ ID NO: 1184330 - RNA, 19 nt, Artificial Sequence
  Description of Artificial Sequence: Synthetic oligonucleotide
  Sense strand starting at position 647 of SEQ ID NO: 916792
guaggcugcccauauacuu

SEQ ID NO: 1184331 - RNA, 19 nt, Artificial Sequence
  Description of Artificial Sequence: Synthetic oligonucleotide
  Antisense strand to SEQ ID NO: 1184330
aaguauaugggcagccuac

SEQ ID NO: 1184332 - RNA, 19 nt, Artificial Sequence
  Description of Artificial Sequence: Synthetic oligonucleotide
  Sense strand starting at position 768 of SEQ ID NO: 916792
ugcauugagcaugguuagu

SEQ ID NO: 1184333 - RNA, 19 nt, Artificial Sequence
  Description of Artificial Sequence: Synthetic oligonucleotide
  Antisense strand to SEQ ID NO: 1184332
acuaaccaugcucaaugca

SEQ ID NO: 1184334 - RNA, 19 nt, Artificial Sequence
  Description of Artificial Sequence: Synthetic oligonucleotide
  Sense strand starting at position 773 of SEQ ID NO: 916792
ugagcaugguuagugcaau

SEQ ID NO: 1184335 - RNA, 19 nt, Artificial Sequence
  Description of Artificial Sequence: Synthetic oligonucleotide
  Antisense strand to SEQ ID NO: 1184334
auugcacuaaccaugcuca

SEQ ID NO: 1184336 - RNA, 19 nt, Artificial Sequence
  Description of Artificial Sequence: Synthetic oligonucleotide
  Sense strand starting at position 821 of SEQ ID NO: 916792
aucgcuauucgccaauaca

SEQ ID NO: 1184337 - RNA, 19 nt, Artificial Sequence
  Description of Artificial Sequence: Synthetic oligonucleotide
  Antisense strand to SEQ ID NO: 1184336
uguauuggcgaauagcgau

SEQ ID NO: 1184338 - RNA, 19 nt, Artificial Sequence
  Description of Artificial Sequence: Synthetic oligonucleotide
  Sense strand starting at position 824 of SEQ ID NO: 916792
gcuauucgccaauacaaau

SEQ ID NO: 1184339 - RNA, 19 nt, Artificial Sequence
  Description of Artificial Sequence: Synthetic oligonucleotide
  Antisense strand to SEQ ID NO: 1184338
auuuguauuggcgaauagc

SEQ ID NO: 1184340 - RNA, 19 nt, Artificial Sequence
  Description of Artificial Sequence: Synthetic oligonucleotide
  Sense strand starting at position 859 of SEQ ID NO: 916792
auaacaaaugugugaucag

SEQ ID NO: 1184341 - RNA, 19 nt, Artificial Sequence
  Description of Artificial Sequence: Synthetic oligonucleotide
  Antisense strand to SEQ ID NO: 1184340
cugaucacacauuuguuau

SEQ ID NO: 1184342 - RNA, 19 nt, Artificial Sequence
  Description of Artificial Sequence: Synthetic oligonucleotide
  Sense strand starting at position 862 of SEQ ID NO: 916792
acaaaugugugaucagaga

SEQ ID NO: 1184343 - RNA, 19 nt, Artificial Sequence
  Description of Artificial Sequence: Synthetic oligonucleotide
  Antisense strand to SEQ ID NO: 1184342
ucucugaucacacauuugu

SEQ ID NO: 1184344 - RNA, 19 nt, Artificial Sequence
  Description of Artificial Sequence: Synthetic oligonucleotide
  Sense strand starting at position 953 of SEQ ID NO: 916792
gggcaaguaguguaauauu

SEQ ID NO: 1184345 - RNA, 19 nt, Artificial Sequence
  Description of Artificial Sequence: Synthetic oligonucleotide
  Antisense strand to SEQ ID NO: 1184344
aauauuacacuacuugccc

SEQ ID NO: 1184346 - RNA, 19 nt, Artificial Sequence
  Description of Artificial Sequence: Synthetic oligonucleotide
  Sense strand starting at position 962 of SEQ ID NO: 916792
guguaauauuuacaucaug

SEQ ID NO: 1184347 - RNA, 19 nt, Artificial Sequence
  Description of Artificial Sequence: Synthetic oligonucleotide
  Antisense strand to SEQ ID NO: 1184346
caugauguaaauauuacac

SEQ ID NO: 1184348 - RNA, 19 nt, Artificial Sequence
  Description of Artificial Sequence: Synthetic oligonucleotide
  Sense strand starting at position 1108 of SEQ ID NO: 916792
cguggaaucgaauacagua

SEQ ID NO: 1184349 - RNA, 19 nt, Artificial Sequence
  Description of Artificial Sequence: Synthetic oligonucleotide
  Antisense strand to SEQ ID NO: 1184348
uacuguauucgauuccacg

SEQ ID NO: 1184350 - RNA, 19 nt, Artificial Sequence
  Description of Artificial Sequence: Synthetic oligonucleotide
  Sense strand starting at position 1158 of SEQ ID NO: 916792
cgcggucgcuccauagaau

SEQ ID NO: 1184351 - RNA, 19 nt, Artificial Sequence
  Description of Artificial Sequence: Synthetic oligonucleotide
  Antisense strand to SEQ ID NO: 1184350
auucuauggagcgaccgcg

SEQ ID NO: 1184352 - RNA, 19 nt, Artificial Sequence
  Description of Artificial Sequence: Synthetic oligonucleotide
  Sense strand starting at position 1159 of SEQ ID NO: 916792
gcggucgcuccauagaauu

SEQ ID NO: 1184353 - RNA, 19 nt, Artificial Sequence
  Description of Artificial Sequence: Synthetic oligonucleotide
  Antisense strand to SEQ ID NO: 1184352
aauucuauggagcgaccgc

SEQ ID NO: 1184354 - RNA, 19 nt, Artificial Sequence
  Description of Artificial Sequence: Synthetic oligonucleotide
  Sense strand starting at position 2326 of SEQ ID NO: 916792
acucgaaaccgcgagauua

SEQ ID NO: 1184355 - RNA, 19 nt, Artificial Sequence
  Description of Artificial Sequence: Synthetic oligonucleotide
  Antisense strand to SEQ ID NO: 1184354
uaaucucgcgguuucgagu

SEQ ID NO: 1184356 - RNA, 19 nt, Artificial Sequence
  Description of Artificial Sequence: Synthetic oligonucleotide
  Sense strand starting at position 2328 of SEQ ID NO: 916792
ucgaaaccgcgagauuagu

SEQ ID NO: 1184357 - RNA, 19 nt, Artificial Sequence
  Description of Artificial Sequence: Synthetic oligonucleotide
  Antisense strand to SEQ ID NO: 1184356
acuaaucucgcgguuucga

SEQ ID NO: 1184358 - RNA, 19 nt, Artificial Sequence
  Description of Artificial Sequence: Synthetic oligonucleotide
  Sense strand starting at position 2576 of SEQ ID NO: 916792
gucuuuauccgggacugga

SEQ ID NO: 1184359 - RNA, 19 nt, Artificial Sequence
  Description of Artificial Sequence: Synthetic oligonucleotide
  Antisense strand to SEQ ID NO: 1184358
uccagucccggauaaagac

SEQ ID NO: 1184360 - RNA, 19 nt, Artificial Sequence
  Description of Artificial Sequence: Synthetic oligonucleotide
  Sense strand starting at position 2611 of SEQ ID NO: 916792
uguauauugagaggcaaau

SEQ ID NO: 1184361 - RNA, 19 nt, Artificial Sequence
  Description of Artificial Sequence: Synthetic oligonucleotide
  Antisense strand to SEQ ID NO: 1184360
auuugccucucaauauaca

SEQ ID NO: 1184362 - RNA, 19 nt, Artificial Sequence
  Description of Artificial Sequence: Synthetic oligonucleotide
  Sense strand starting at position 2641 of SEQ ID NO: 916792
ugauaaauuuccuggcuga

SEQ ID NO: 1184363 - RNA, 19 nt, Artificial Sequence
  Description of Artificial Sequence: Synthetic oligonucleotide
  Antisense strand to SEQ ID NO: 1184362
ucagccaggaaauuuauca

SEQ ID NO: 1184364 - RNA, 19 nt, Artificial Sequence
  Description of Artificial Sequence: Synthetic oligonucleotide
  Sense strand starting at position 2715 of SEQ ID NO: 916792
cggcguaaaccuuggacaa

SEQ ID NO: 1184365 - RNA, 19 nt, Artificial Sequence
  Description of Artificial Sequence: Synthetic oligonucleotide
  Antisense strand to SEQ ID NO: 1184364
uuguccaagguuuacgccg

SEQ ID NO: 1184366 - RNA, 19 nt, Artificial Sequence
  Description of Artificial Sequence: Synthetic oligonucleotide
  Sense strand starting at position 2716 of SEQ ID NO: 916792
ggcguaaaccuuggacaag

SEQ ID NO: 1184367 - RNA, 19 nt, Artificial Sequence
  Description of Artificial Sequence: Synthetic oligonucleotide
  Antisense strand to SEQ ID NO: 1184366
cuuguccaagguuuacgcc

SEQ ID NO: 1184368 - RNA, 19 nt, Artificial Sequence
  Description of Artificial Sequence: Synthetic oligonucleotide
  Sense strand starting at position 2781 of SEQ ID NO: 916792
aguacaguccggagucguu

SEQ ID NO: 1184369 - RNA, 19 nt, Artificial Sequence
  Description of Artificial Sequence: Synthetic oligonucleotide
  Antisense strand to SEQ ID NO: 1184368
aacgacuccggacuguacu

SEQ ID NO: 1184370 - RNA, 19 nt, Artificial Sequence
  Description of Artificial Sequence: Synthetic oligonucleotide
  Sense strand starting at position 2880 of SEQ ID NO: 916792
aggcuaagaauaugaaugu

SEQ ID NO: 1184371 - RNA, 19 nt, Artificial Sequence
  Description of Artificial Sequence: Synthetic oligonucleotide
  Antisense strand to SEQ ID NO: 1184370
acauucauauucuuagccu

SEQ ID NO: 1184372 - RNA, 19 nt, Artificial Sequence
  Description of Artificial Sequence: Synthetic oligonucleotide
  Sense strand starting at position 2955 of SEQ ID NO: 916792
ccagguuuacauggaagau

SEQ ID NO: 1184373 - RNA, 19 nt, Artificial Sequence
  Description of Artificial Sequence: Synthetic oligonucleotide
  Antisense strand to SEQ ID NO: 1184372
aucuuccauguaaaccugg

SEQ ID NO: 1184374 - RNA, 19 nt, Artificial Sequence
  Description of Artificial Sequence: Synthetic oligonucleotide
  Sense strand starting at position 3008 of SEQ ID NO: 916792
aggugugagguacgguaau

SEQ ID NO: 1184375 - RNA, 19 nt, Artificial Sequence
  Description of Artificial Sequence: Synthetic oligonucleotide
  Antisense strand to SEQ ID NO: 1184374
auuaccguaccucacaccu

SEQ ID NO: 1184376 - RNA, 19 nt, Artificial Sequence
  Description of Artificial Sequence: Synthetic oligonucleotide
  Sense strand starting at position 3020 of SEQ ID NO: 916792
cgguaaugugcucaccagu

SEQ ID NO: 1184377 - RNA, 19 nt, Artificial Sequence
  Description of Artificial Sequence: Synthetic oligonucleotide
  Antisense strand to SEQ ID NO: 1184376
acuggugagcacauuaccg

SEQ ID NO: 1184378 - RNA, 19 nt, Artificial Sequence
  Description of Artificial Sequence: Synthetic oligonucleotide
  Sense strand starting at position 3169 of SEQ ID NO: 916792
gcgucucgagaguccuuua

SEQ ID NO: 1184379 - RNA, 19 nt, Artificial Sequence
  Description of Artificial Sequence: Synthetic oligonucleotide
  Antisense strand to SEQ ID NO: 1184378
uaaaggacucucgagacgc

SEQ ID NO: 1184380 - RNA, 19 nt, Artificial Sequence
  Description of Artificial Sequence: Synthetic oligonucleotide
  Sense strand starting at position 3249 of SEQ ID NO: 916792
gguuccacucccuauguga

SEQ ID NO: 1184381 - RNA, 19 nt, Artificial Sequence
  Description of Artificial Sequence: Synthetic oligonucleotide
  Antisense strand to SEQ ID NO: 1184380
ucacauagggaguggaacc

SEQ ID NO: 1184382 - RNA, 19 nt, Artificial Sequence
  Description of Artificial Sequence: Synthetic oligonucleotide
  Sense strand starting at position 3262 of SEQ ID NO: 916792
augugaaccucugcaguaa

SEQ ID NO: 1184383 - RNA, 19 nt, Artificial Sequence
  Description of Artificial Sequence: Synthetic oligonucleotide
  Antisense strand to SEQ ID NO: 1184382
uuacugcagagguucacau

SEQ ID NO: 1184384 - RNA, 19 nt, Artificial Sequence
  Description of Artificial Sequence: Synthetic oligonucleotide
  Sense strand starting at position 3298 of SEQ ID NO: 916792
uuuaucugcugagcuguaa

SEQ ID NO: 1184385 - RNA, 19 nt, Artificial Sequence
  Description of Artificial Sequence: Synthetic oligonucleotide
  Antisense strand to SEQ ID NO: 1184384
uuacagcucagcagauaaa

SEQ ID NO: 1184386 - RNA, 19 nt, Artificial Sequence
  Description of Artificial Sequence: Synthetic oligonucleotide
  Sense strand starting at position 3441 of SEQ ID NO: 916792
aauguuaggucagugagag

SEQ ID NO: 1184387 - RNA, 19 nt, Artificial Sequence
  Description of Artificial Sequence: Synthetic oligonucleotide
  Antisense strand to SEQ ID NO: 1184386
cucucacugaccuaacauu

SEQ ID NO: 1184388 - RNA, 19 nt, Artificial Sequence
  Description of Artificial Sequence: Synthetic oligonucleotide
  Sense strand starting at position 3442 of SEQ ID NO: 916792
auguuaggucagugagagu

SEQ ID NO: 1184389 - RNA, 19 nt, Artificial Sequence
  Description of Artificial Sequence: Synthetic oligonucleotide
  Antisense strand to SEQ ID NO: 1184388
acucucacugaccuaacau

SEQ ID NO: 1184390 - RNA, 19 nt, Artificial Sequence
  Description of Artificial Sequence: Synthetic oligonucleotide
  Sense strand starting at position 3559 of SEQ ID NO: 916792
agaacuaaauuguugcuau

SEQ ID NO: 1184391 - RNA, 19 nt, Artificial Sequence
  Description of Artificial Sequence: Synthetic oligonucleotide
  Antisense strand to SEQ ID NO: 1184390
auagcaacaauuuaguucu

SEQ ID NO: 1184392 - RNA, 19 nt, Artificial Sequence
  Description of Artificial Sequence: Synthetic oligonucleotide
  Sense strand starting at position 3648 of SEQ ID NO: 916792
uugugaucaagggaagcuu

SEQ ID NO: 1184393 - RNA, 19 nt, Artificial Sequence
  Description of Artificial Sequence: Synthetic oligonucleotide
  Antisense strand to SEQ ID NO: 1184392
aagcuucccuugaucacaa

SEQ ID NO: 1184394 - RNA, 19 nt, Artificial Sequence
  Description of Artificial Sequence: Synthetic oligonucleotide
  Sense strand starting at position 3792 of SEQ ID NO: 916792
ggaauccaauucgugguaa

SEQ ID NO: 1184395 - RNA, 19 nt, Artificial Sequence
  Description of Artificial Sequence: Synthetic oligonucleotide
  Antisense strand to SEQ ID NO: 1184394
uuaccacgaauuggauucc

SEQ ID NO: 1184396 - RNA, 19 nt, Artificial Sequence
  Description of Artificial Sequence: Synthetic oligonucleotide
  Sense strand starting at position 3794 of SEQ ID NO: 916792
aauccaauucgugguaacu

SEQ ID NO: 1184397 - RNA, 19 nt, Artificial Sequence
  Description of Artificial Sequence: Synthetic oligonucleotide
  Antisense strand to SEQ ID NO: 1184396
aguuaccacgaauuggauu

SEQ ID NO: 1184398 - RNA, 19 nt, Artificial Sequence
  Description of Artificial Sequence: Synthetic oligonucleotide
  Sense strand starting at position 3828 of SEQ ID NO: 916792
guggguuguacuggugaaa

SEQ ID NO: 1184399 - RNA, 19 nt, Artificial Sequence
  Description of Artificial Sequence: Synthetic oligonucleotide
  Antisense strand to SEQ ID NO: 1184398
uuucaccaguacaacccac

SEQ ID NO: 1184400 - RNA, 19 nt, Artificial Sequence
  Description of Artificial Sequence: Synthetic oligonucleotide
  Sense strand starting at position 138 of SEQ ID NO: 916793
agagaucaggccugugcuu

SEQ ID NO: 1184401 - RNA, 19 nt, Artificial Sequence
  Description of Artificial Sequence: Synthetic oligonucleotide
  Antisense strand to SEQ ID NO: 1184400
aagcacaggccugaucucu

SEQ ID NO: 1184402 - RNA, 19 nt, Artificial Sequence
  Description of Artificial Sequence: Synthetic oligonucleotide
  Sense strand starting at position 153 of SEQ ID NO: 916793
gcuuacuucccauaacggu

SEQ ID NO: 1184403 - RNA, 19 nt, Artificial Sequence
  Description of Artificial Sequence: Synthetic oligonucleotide
  Antisense strand to SEQ ID NO: 1184402
accguuaugggaaguaagc

SEQ ID NO: 1184404 - RNA, 19 nt, Artificial Sequence
  Description of Artificial Sequence: Synthetic oligonucleotide
  Sense strand starting at position 160 of SEQ ID NO: 916793
ucccauaacggucauauaa

SEQ ID NO: 1184405 - RNA, 19 nt, Artificial Sequence
  Description of Artificial Sequence: Synthetic oligonucleotide
  Antisense strand to SEQ ID NO: 1184404
uuauaugaccguuauggga

SEQ ID NO: 1184406 - RNA, 19 nt, Artificial Sequence
  Description of Artificial Sequence: Synthetic oligonucleotide
  Sense strand starting at position 183 of SEQ ID NO: 916793
uccagaaaugauuagcuuu

SEQ ID NO: 1184407 - RNA, 19 nt, Artificial Sequence
  Description of Artificial Sequence: Synthetic oligonucleotide
  Antisense strand to SEQ ID NO: 1184406
aaagcuaaucauuucugga

SEQ ID NO: 1184408 - RNA, 19 nt, Artificial Sequence
  Description of Artificial Sequence: Synthetic oligonucleotide
  Sense strand starting at position 185 of SEQ ID NO: 916793
cagaaaugauuagcuuugu

SEQ ID NO: 1184409 - RNA, 19 nt, Artificial Sequence
  Description of Artificial Sequence: Synthetic oligonucleotide
  Antisense strand to SEQ ID NO: 1184408
acaaagcuaaucauuucug

SEQ ID NO: 1184410 - RNA, 19 nt, Artificial Sequence
  Description of Artificial Sequence: Synthetic oligonucleotide
  Sense strand starting at position 186 of SEQ ID NO: 916793
agaaaugauuagcuuuguu

SEQ ID NO: 1184411 - RNA, 19 nt, Artificial Sequence
  Description of Artificial Sequence: Synthetic oligonucleotide
  Antisense strand to SEQ ID NO: 1184410
aacaaagcuaaucauuucu

SEQ ID NO: 1184412 - RNA, 19 nt, Artificial Sequence
  Description of Artificial Sequence: Synthetic oligonucleotide
  Sense strand starting at position 190 of SEQ ID NO: 916793
augauuagcuuuguuaaca

SEQ ID NO: 1184413 - RNA, 19 nt, Artificial Sequence
  Description of Artificial Sequence: Synthetic oligonucleotide
  Antisense strand to SEQ ID NO: 1184412
uguuaacaaagcuaaucau

SEQ ID NO: 1184414 - RNA, 19 nt, Artificial Sequence
  Description of Artificial Sequence: Synthetic oligonucleotide
  Sense strand starting at position 191 of SEQ ID NO: 916793
ugauuagcuuuguuaacaa

SEQ ID NO: 1184415 - RNA, 19 nt, Artificial Sequence
  Description of Artificial Sequence: Synthetic oligonucleotide
  Antisense strand to SEQ ID NO: 1184414
uuguuaacaaagcuaauca

SEQ ID NO: 1184416 - RNA, 19 nt, Artificial Sequence
  Description of Artificial Sequence: Synthetic oligonucleotide
  Sense strand starting at position 391 of SEQ ID NO: 916793
uggcauuaguuaccaugaa

SEQ ID NO: 1184417 - RNA, 19 nt, Artificial Sequence
  Description of Artificial Sequence: Synthetic oligonucleotide
  Antisense strand to SEQ ID NO: 1184416
uucaugguaacuaaugcca

SEQ ID NO: 1184418 - RNA, 19 nt, Artificial Sequence
  Description of Artificial Sequence: Synthetic oligonucleotide
  Sense strand starting at position 395 of SEQ ID NO: 916793
auuaguuaccaugaagcca

SEQ ID NO: 1184419 - RNA, 19 nt, Artificial Sequence
  Description of Artificial Sequence: Synthetic oligonucleotide
  Antisense strand to SEQ ID NO: 1184418
uggcuucaugguaacuaau

SEQ ID NO: 1184420 - RNA, 19 nt, Artificial Sequence
  Description of Artificial Sequence: Synthetic oligonucleotide
  Sense strand starting at position 410 of SEQ ID NO: 916793
gccagaaagucaguacuuu

SEQ ID NO: 1184421 - RNA, 19 nt, Artificial Sequence
  Description of Artificial Sequence: Synthetic oligonucleotide
  Antisense strand to SEQ ID NO: 1184420
aaaguacugacuuucuggc

SEQ ID NO: 1184422 - RNA, 19 nt, Artificial Sequence
  Description of Artificial Sequence: Synthetic oligonucleotide
  Sense strand starting at position 451 of SEQ ID NO: 916793
agauacauauggcauauaa

SEQ ID NO: 1184423 - RNA, 19 nt, Artificial Sequence
  Description of Artificial Sequence: Synthetic oligonucleotide
  Antisense strand to SEQ ID NO: 1184422
uuauaugccauauguaucu

SEQ ID NO: 1184424 - RNA, 19 nt, Artificial Sequence
  Description of Artificial Sequence: Synthetic oligonucleotide
  Sense strand starting at position 477 of SEQ ID NO: 916793
auguauuacguagauacuu

SEQ ID NO: 1184425 - RNA, 19 nt, Artificial Sequence
  Description of Artificial Sequence: Synthetic oligonucleotide
  Antisense strand to SEQ ID NO: 1184424
aaguaucuacguaauacau

SEQ ID NO: 1184426 - RNA, 19 nt, Artificial Sequence
  Description of Artificial Sequence: Synthetic oligonucleotide
  Sense strand starting at position 566 of SEQ ID NO: 916793
uuuccaacaucuguacgua

SEQ ID NO: 1184427 - RNA, 19 nt, Artificial Sequence
  Description of Artificial Sequence: Synthetic oligonucleotide
  Antisense strand to SEQ ID NO: 1184426
uacguacagauguuggaaa

SEQ ID NO: 1184428 - RNA, 19 nt, Artificial Sequence
  Description of Artificial Sequence: Synthetic oligonucleotide
  Sense strand starting at position 567 of SEQ ID NO: 916793
uuccaacaucuguacguaa

SEQ ID NO: 1184429 - RNA, 19 nt, Artificial Sequence
  Description of Artificial Sequence: Synthetic oligonucleotide
  Antisense strand to SEQ ID NO: 1184428
uuacguacagauguuggaa

SEQ ID NO: 1184430 - RNA, 19 nt, Artificial Sequence
  Description of Artificial Sequence: Synthetic oligonucleotide
  Sense strand starting at position 569 of SEQ ID NO: 916793
ccaacaucuguacguaauc

SEQ ID NO: 1184431 - RNA, 19 nt, Artificial Sequence
  Description of Artificial Sequence: Synthetic oligonucleotide
  Antisense strand to SEQ ID NO: 1184430
gauuacguacagauguugg

SEQ ID NO: 1184432 - RNA, 19 nt, Artificial Sequence
  Description of Artificial Sequence: Synthetic oligonucleotide
  Sense strand starting at position 1030 of SEQ ID NO: 916793
uucucauuugcuugugacu

SEQ ID NO: 1184433 - RNA, 19 nt, Artificial Sequence
  Description of Artificial Sequence: Synthetic oligonucleotide
  Antisense strand to SEQ ID NO: 1184432
agucacaagcaaaugagaa

SEQ ID NO: 1184434 - RNA, 19 nt, Artificial Sequence
  Description of Artificial Sequence: Synthetic oligonucleotide
  Sense strand starting at position 1033 of SEQ ID NO: 916793
ucauuugcuugugacuuaa

SEQ ID NO: 1184435 - RNA, 19 nt, Artificial Sequence
  Description of Artificial Sequence: Synthetic oligonucleotide
  Antisense strand to SEQ ID NO: 1184434
uuaagucacaagcaaauga

SEQ ID NO: 1184436 - RNA, 19 nt, Artificial Sequence
  Description of Artificial Sequence: Synthetic oligonucleotide
  Sense strand starting at position 1035 of SEQ ID NO: 916793
auuugcuugugacuuaauc

SEQ ID NO: 1184437 - RNA, 19 nt, Artificial Sequence
  Description of Artificial Sequence: Synthetic oligonucleotide
  Antisense strand to SEQ ID NO: 1184436
gauuaagucacaagcaaau

SEQ ID NO: 1184438 - RNA, 19 nt, Artificial Sequence
  Description of Artificial Sequence: Synthetic oligonucleotide
  Sense strand starting at position 1060 of SEQ ID NO: 916793
gcagaauacucuuuguaaa

SEQ ID NO: 1184439 - RNA, 19 nt, Artificial Sequence
  Description of Artificial Sequence: Synthetic oligonucleotide
  Antisense strand to SEQ ID NO: 1184438
uuuacaaagaguauucugc

SEQ ID NO: 1184440 - RNA, 19 nt, Artificial Sequence
  Description of Artificial Sequence: Synthetic oligonucleotide
  Sense strand starting at position 1107 of SEQ ID NO: 916793
augaauguauaucacugaa

SEQ ID NO: 1184441 - RNA, 19 nt, Artificial Sequence
  Description of Artificial Sequence: Synthetic oligonucleotide
  Antisense strand to SEQ ID NO: 1184440
uucagugauauacauucau

SEQ ID NO: 1184442 - RNA, 19 nt, Artificial Sequence
  Description of Artificial Sequence: Synthetic oligonucleotide
  Sense strand starting at position 1136 of SEQ ID NO: 916793
aacaguugucagcaagcaa

SEQ ID NO: 1184443 - RNA, 19 nt, Artificial Sequence
  Description of Artificial Sequence: Synthetic oligonucleotide
  Antisense strand to SEQ ID NO: 1184442
uugcuugcugacaacuguu

SEQ ID NO: 1184444 - RNA, 19 nt, Artificial Sequence
  Description of Artificial Sequence: Synthetic oligonucleotide
  Sense strand starting at position 2248 of SEQ ID NO: 916793
aaauuagaggguugcauac

SEQ ID NO: 1184445 - RNA, 19 nt, Artificial Sequence
  Description of Artificial Sequence: Synthetic oligonucleotide
  Antisense strand to SEQ ID NO: 1184444
guaugcaacccucuaauuu

SEQ ID NO: 1184446 - RNA, 19 nt, Artificial Sequence
  Description of Artificial Sequence: Synthetic oligonucleotide
  Sense strand starting at position 2284 of SEQ ID NO: 916793
auguuaaaucucugagacc

SEQ ID NO: 1184447 - RNA, 19 nt, Artificial Sequence
  Description of Artificial Sequence: Synthetic oligonucleotide
  Antisense strand to SEQ ID NO: 1184446
ggucucagagauuuaacau

SEQ ID NO: 1184448 - RNA, 19 nt, Artificial Sequence
  Description of Artificial Sequence: Synthetic oligonucleotide
  Sense strand starting at position 2290 of SEQ ID NO: 916793
aaucucugagaccggaauu

SEQ ID NO: 1184449 - RNA, 19 nt, Artificial Sequence
  Description of Artificial Sequence: Synthetic oligonucleotide
  Antisense strand to SEQ ID NO: 1184448
aauuccggucucagagauu

SEQ ID NO: 1184450 - RNA, 19 nt, Artificial Sequence
  Description of Artificial Sequence: Synthetic oligonucleotide
  Sense strand starting at position 2300 of SEQ ID NO: 916793
accggaauuucagagagug

SEQ ID NO: 1184451 - RNA, 19 nt, Artificial Sequence
  Description of Artificial Sequence: Synthetic oligonucleotide
  Antisense strand to SEQ ID NO: 1184450
cacucucugaaauuccggu

SEQ ID NO: 1184452 - RNA, 19 nt, Artificial Sequence
  Description of Artificial Sequence: Synthetic oligonucleotide
  Sense strand starting at position 2529 of SEQ ID NO: 916793
auaguaggcugcccauaua

SEQ ID NO: 1184453 - RNA, 19 nt, Artificial Sequence
  Description of Artificial Sequence: Synthetic oligonucleotide
  Antisense strand to SEQ ID NO: 1184452
uauaugggcagccuacuau

SEQ ID NO: 1184454 - RNA, 19 nt, Artificial Sequence
  Description of Artificial Sequence: Synthetic oligonucleotide
  Sense strand starting at position 2532 of SEQ ID NO: 916793
guaggcugcccauauacuu

SEQ ID NO: 1184455 - RNA, 19 nt, Artificial Sequence
  Description of Artificial Sequence: Synthetic oligonucleotide
  Antisense strand to SEQ ID NO: 1184454
aaguauaugggcagccuac

SEQ ID NO: 1184456 - RNA, 19 nt, Artificial Sequence
  Description of Artificial Sequence: Synthetic oligonucleotide
  Sense strand starting at position 2653 of SEQ ID NO: 916793
ugcauugagcaugguuagu

SEQ ID NO: 1184457 - RNA, 19 nt, Artificial Sequence
  Description of Artificial Sequence: Synthetic oligonucleotide
  Antisense strand to SEQ ID NO: 1184456
acuaaccaugcucaaugca

SEQ ID NO: 1184458 - RNA, 19 nt, Artificial Sequence
  Description of Artificial Sequence: Synthetic oligonucleotide
  Sense strand starting at position 2658 of SEQ ID NO: 916793
ugagcaugguuagugcaau

SEQ ID NO: 1184459 - RNA, 19 nt, Artificial Sequence
  Description of Artificial Sequence: Synthetic oligonucleotide
  Antisense strand to SEQ ID NO: 1184458
auugcacuaaccaugcuca

SEQ ID NO: 1184460 - RNA, 19 nt, Artificial Sequence
  Description of Artificial Sequence: Synthetic oligonucleotide
  Sense strand starting at position 2706 of SEQ ID NO: 916793
aucgcuauucgccaauaca

SEQ ID NO: 1184461 - RNA, 19 nt, Artificial Sequence
  Description of Artificial Sequence: Synthetic oligonucleotide
  Antisense strand to SEQ ID NO: 1184460
uguauuggcgaauagcgau

SEQ ID NO: 1184462 - RNA, 19 nt, Artificial Sequence
  Description of Artificial Sequence: Synthetic oligonucleotide
  Sense strand starting at position 2709 of SEQ ID NO: 916793
gcuauucgccaauacaaau

SEQ ID NO: 1184463 - RNA, 19 nt, Artificial Sequence
  Description of Artificial Sequence: Synthetic oligonucleotide
  Antisense strand to SEQ ID NO: 1184462
auuuguauuggcgaauagc

SEQ ID NO: 1184464 - RNA, 19 nt, Artificial Sequence
  Description of Artificial Sequence: Synthetic oligonucleotide
  Sense strand starting at position 2744 of SEQ ID NO: 916793
auaacaaaugugugaucag

SEQ ID NO: 1184465 - RNA, 19 nt, Artificial Sequence
  Description of Artificial Sequence: Synthetic oligonucleotide
  Antisense strand to SEQ ID NO: 1184464
cugaucacacauuuguuau

SEQ ID NO: 1184466 - RNA, 19 nt, Artificial Sequence
  Description of Artificial Sequence: Synthetic oligonucleotide
  Sense strand starting at position 2745 of SEQ ID NO: 916793
uaacaaaugugugaucaga

SEQ ID NO: 1184467 - RNA, 19 nt, Artificial Sequence
  Description of Artificial Sequence: Synthetic oligonucleotide
  Antisense strand to SEQ ID NO: 1184466
ucugaucacacauuuguua

SEQ ID NO: 1184468 - RNA, 19 nt, Artificial Sequence
  Description of Artificial Sequence: Synthetic oligonucleotide
  Sense strand starting at position 2747 of SEQ ID NO: 916793
acaaaugugugaucagaga

SEQ ID NO: 1184469 - RNA, 19 nt, Artificial Sequence
  Description of Artificial Sequence: Synthetic oligonucleotide
  Antisense strand to SEQ ID NO: 1184468
ucucugaucacacauuugu

SEQ ID NO: 1184470 - RNA, 19 nt, Artificial Sequence
  Description of Artificial Sequence: Synthetic oligonucleotide
  Sense strand starting at position 2838 of SEQ ID NO: 916793
gggcaaguaguguaauauu

SEQ ID NO: 1184471 - RNA, 19 nt, Artificial Sequence
  Description of Artificial Sequence: Synthetic oligonucleotide
  Antisense strand to SEQ ID NO: 1184470
aauauuacacuacuugccc

SEQ ID NO: 1184472 - RNA, 19 nt, Artificial Sequence
  Description of Artificial Sequence: Synthetic oligonucleotide
  Sense strand starting at position 2847 of SEQ ID NO: 916793
guguaauauuuacaucaug

SEQ ID NO: 1184473 - RNA, 19 nt, Artificial Sequence
  Description of Artificial Sequence: Synthetic oligonucleotide
  Antisense strand to SEQ ID NO: 1184472
caugauguaaauauuacac

SEQ ID NO: 1184474 - RNA, 19 nt, Artificial Sequence
  Description of Artificial Sequence: Synthetic oligonucleotide
  Sense strand starting at position 2993 of SEQ ID NO: 916793
cguggaaucgaauacagua

SEQ ID NO: 1184475 - RNA, 19 nt, Artificial Sequence
  Description of Artificial Sequence: Synthetic oligonucleotide
  Antisense strand to SEQ ID NO: 1184474
uacuguauucgauuccacg

SEQ ID NO: 1184476 - RNA, 19 nt, Artificial Sequence
  Description of Artificial Sequence: Synthetic oligonucleotide
  Sense strand starting at position 3043 of SEQ ID NO: 916793
cgcggucgcuccauagaau

SEQ ID NO: 1184477 - RNA, 19 nt, Artificial Sequence
  Description of Artificial Sequence: Synthetic oligonucleotide
  Antisense strand to SEQ ID NO: 1184476
auucuauggagcgaccgcg

SEQ ID NO: 1184478 - RNA, 19 nt, Artificial Sequence
  Description of Artificial Sequence: Synthetic oligonucleotide
  Sense strand starting at position 3044 of SEQ ID NO: 916793
gcggucgcuccauagaauu

SEQ ID NO: 1184479 - RNA, 19 nt, Artificial Sequence
  Description of Artificial Sequence: Synthetic oligonucleotide
  Antisense strand to SEQ ID NO: 1184478
aauucuauggagcgaccgc

SEQ ID NO: 1184480 - RNA, 19 nt, Artificial Sequence
  Description of Artificial Sequence: Synthetic oligonucleotide
  Sense strand starting at position 130 of SEQ ID NO: 916794
ugcaaauuucucugugauc

SEQ ID NO: 1184481 - RNA, 19 nt, Artificial Sequence
  Description of Artificial Sequence: Synthetic oligonucleotide
  Antisense strand to SEQ ID NO: 1184480
gaucacagagaaauuugca

SEQ ID NO: 1184482 - RNA, 19 nt, Artificial Sequence
  Description of Artificial Sequence: Synthetic oligonucleotide
  Sense strand starting at position 131 of SEQ ID NO: 916794
gcaaauuucucugugaucu

SEQ ID NO: 1184483 - RNA, 19 nt, Artificial Sequence
  Description of Artificial Sequence: Synthetic oligonucleotide
  Antisense strand to SEQ ID NO: 1184482
agaucacagagaaauuugc

SEQ ID NO: 1184484 - RNA, 19 nt, Artificial Sequence
  Description of Artificial Sequence: Synthetic oligonucleotide
  Sense strand starting at position 145 of SEQ ID NO: 916794
gaucuuaugccucagcuga

SEQ ID NO: 1184485 - RNA, 19 nt, Artificial Sequence
  Description of Artificial Sequence: Synthetic oligonucleotide
  Antisense strand to SEQ ID NO: 1184484
ucagcugaggcauaagauc

SEQ ID NO: 1184486 - RNA, 19 nt, Artificial Sequence
  Description of Artificial Sequence: Synthetic oligonucleotide
  Sense strand starting at position 243 of SEQ ID NO: 916794
auugacagcuuucuaagua

SEQ ID NO: 1184487 - RNA, 19 nt, Artificial Sequence
  Description of Artificial Sequence: Synthetic oligonucleotide
  Antisense strand to SEQ ID NO: 1184486
uacuuagaaagcugucaau

SEQ ID NO: 1184488 - RNA, 19 nt, Artificial Sequence
  Description of Artificial Sequence: Synthetic oligonucleotide
  Sense strand starting at position 325 of SEQ ID NO: 916794
guaggaauaauugguccua

SEQ ID NO: 1184489 - RNA, 19 nt, Artificial Sequence
  Description of Artificial Sequence: Synthetic oligonucleotide
  Antisense strand to SEQ ID NO: 1184488
uaggaccaauuauuccuac

SEQ ID NO: 1184490 - RNA, 19 nt, Artificial Sequence
  Description of Artificial Sequence: Synthetic oligonucleotide
  Sense strand starting at position 326 of SEQ ID NO: 916794
uaggaauaauugguccuau

SEQ ID NO: 1184491 - RNA, 19 nt, Artificial Sequence
  Description of Artificial Sequence: Synthetic oligonucleotide
  Antisense strand to SEQ ID NO: 1184490
auaggaccaauuauuccua

SEQ ID NO: 1184492 - RNA, 19 nt, Artificial Sequence
  Description of Artificial Sequence: Synthetic oligonucleotide
  Sense strand starting at position 327 of SEQ ID NO: 916794
aggaauaauugguccuauu

SEQ ID NO: 1184493 - RNA, 19 nt, Artificial Sequence
  Description of Artificial Sequence: Synthetic oligonucleotide
  Antisense strand to SEQ ID NO: 1184492
aauaggaccaauuauuccu

SEQ ID NO: 1184494 - RNA, 19 nt, Artificial Sequence
  Description of Artificial Sequence: Synthetic oligonucleotide
  Sense strand starting at position 373 of SEQ ID NO: 916794
ggucaagaugcuugcccaa

SEQ ID NO: 1184495 - RNA, 19 nt, Artificial Sequence
  Description of Artificial Sequence: Synthetic oligonucleotide
  Antisense strand to SEQ ID NO: 1184494
uugggcaagcaucuugacc

SEQ ID NO: 1184496 - RNA, 19 nt, Artificial Sequence
  Description of Artificial Sequence: Synthetic oligonucleotide
  Sense strand starting at position 477 of SEQ ID NO: 916794
accuguauuuguucuucuu

SEQ ID NO: 1184497 - RNA, 19 nt, Artificial Sequence
  Description of Artificial Sequence: Synthetic oligonucleotide
  Antisense strand to SEQ ID NO: 1184496
aagaagaacaaauacaggu

SEQ ID NO: 1184498 - RNA, 19 nt, Artificial Sequence
  Description of Artificial Sequence: Synthetic oligonucleotide
  Sense strand starting at position 918 of SEQ ID NO: 916794
uucucaucccaaggguuua

SEQ ID NO: 1184499 - RNA, 19 nt, Artificial Sequence
  Description of Artificial Sequence: Synthetic oligonucleotide
  Antisense strand to SEQ ID NO: 1184498
uaaacccuugggaugagaa

SEQ ID NO: 1184500 - RNA, 19 nt, Artificial Sequence
  Description of Artificial Sequence: Synthetic oligonucleotide
  Sense strand starting at position 1017 of SEQ ID NO: 916794
ugucauaaugguggugaaa

SEQ ID NO: 1184501 - RNA, 19 nt, Artificial Sequence
  Description of Artificial Sequence: Synthetic oligonucleotide
  Antisense strand to SEQ ID NO: 1184500
uuucaccaccauuaugaca

SEQ ID NO: 1184502 - RNA, 19 nt, Artificial Sequence
  Description of Artificial Sequence: Synthetic oligonucleotide
  Sense strand starting at position 1047 of SEQ ID NO: 916794
ggcaauuauuuacagaaug

SEQ ID NO: 1184503 - RNA, 19 nt, Artificial Sequence
  Description of Artificial Sequence: Synthetic oligonucleotide
  Antisense strand to SEQ ID NO: 1184502
cauucuguaaauaauugcc

SEQ ID NO: 1184504 - RNA, 19 nt, Artificial Sequence
  Description of Artificial Sequence: Synthetic oligonucleotide
  Sense strand starting at position 1084 of SEQ ID NO: 916794
agaugacaccugugucuau

SEQ ID NO: 1184505 - RNA, 19 nt, Artificial Sequence
  Description of Artificial Sequence: Synthetic oligonucleotide
  Antisense strand to SEQ ID NO: 1184504
auagacacaggugucaucu

SEQ ID NO: 1184506 - RNA, 19 nt, Artificial Sequence
  Description of Artificial Sequence: Synthetic oligonucleotide
  Sense strand starting at position 1085 of SEQ ID NO: 916794
gaugacaccugugucuauu

SEQ ID NO: 1184507 - RNA, 19 nt, Artificial Sequence
  Description of Artificial Sequence: Synthetic oligonucleotide
  Antisense strand to SEQ ID NO: 1184506
aauagacacaggugucauc

SEQ ID NO: 1184508 - RNA, 19 nt, Artificial Sequence
  Description of Artificial Sequence: Synthetic oligonucleotide
  Sense strand starting at position 1091 of SEQ ID NO: 916794
accugugucuauuuaggca

SEQ ID NO: 1184509 - RNA, 19 nt, Artificial Sequence
  Description of Artificial Sequence: Synthetic oligonucleotide
  Antisense strand to SEQ ID NO: 1184508
ugccuaaauagacacaggu

SEQ ID NO: 1184510 - RNA, 19 nt, Artificial Sequence
  Description of Artificial Sequence: Synthetic oligonucleotide
  Sense strand starting at position 1095 of SEQ ID NO: 916794
gugucuauuuaggcaccaa

SEQ ID NO: 1184511 - RNA, 19 nt, Artificial Sequence
  Description of Artificial Sequence: Synthetic oligonucleotide
  Antisense strand to SEQ ID NO: 1184510
uuggugccuaaauagacac

SEQ ID NO: 1184512 - RNA, 19 nt, Artificial Sequence
  Description of Artificial Sequence: Synthetic oligonucleotide
  Sense strand starting at position 1150 of SEQ ID NO: 916794
cuuuccuauguguacugau

SEQ ID NO: 1184513 - RNA, 19 nt, Artificial Sequence
  Description of Artificial Sequence: Synthetic oligonucleotide
  Antisense strand to SEQ ID NO: 1184512
aucaguacacauaggaaag

SEQ ID NO: 1184514 - RNA, 19 nt, Artificial Sequence
  Description of Artificial Sequence: Synthetic oligonucleotide
  Sense strand starting at position 1356 of SEQ ID NO: 916794
agugaaaucugaguccaga

SEQ ID NO: 1184515 - RNA, 19 nt, Artificial Sequence
  Description of Artificial Sequence: Synthetic oligonucleotide
  Antisense strand to SEQ ID NO: 1184514
ucuggacucagauuucacu

SEQ ID NO: 1184516 - RNA, 19 nt, Artificial Sequence
  Description of Artificial Sequence: Synthetic oligonucleotide
  Sense strand starting at position 1392 of SEQ ID NO: 916794
cacugcuaucgggagauca

SEQ ID NO: 1184517 - RNA, 19 nt, Artificial Sequence
  Description of Artificial Sequence: Synthetic oligonucleotide
  Antisense strand to SEQ ID NO: 1184516
ugaucucccgauagcagug

SEQ ID NO: 1184518 - RNA, 19 nt, Artificial Sequence
  Description of Artificial Sequence: Synthetic oligonucleotide
  Sense strand starting at position 1470 of SEQ ID NO: 916794
gcccgaggucccugcauuu

SEQ ID NO: 1184519 - RNA, 19 nt, Artificial Sequence
  Description of Artificial Sequence: Synthetic oligonucleotide
  Antisense strand to SEQ ID NO: 1184518
aaaugcagggaccucgggc

SEQ ID NO: 1184520 - RNA, 19 nt, Artificial Sequence
  Description of Artificial Sequence: Synthetic oligonucleotide
  Sense strand starting at position 2210 of SEQ ID NO: 916794
guuugagauccaggcggaa

SEQ ID NO: 1184521 - RNA, 19 nt, Artificial Sequence
  Description of Artificial Sequence: Synthetic oligonucleotide
  Antisense strand to SEQ ID NO: 1184520
uuccgccuggaucucaaac

SEQ ID NO: 1184522 - RNA, 19 nt, Artificial Sequence
  Description of Artificial Sequence: Synthetic oligonucleotide
  Sense strand starting at position 2212 of SEQ ID NO: 916794
uugagauccaggcggaaga

SEQ ID NO: 1184523 - RNA, 19 nt, Artificial Sequence
  Description of Artificial Sequence: Synthetic oligonucleotide
  Antisense strand to SEQ ID NO: 1184522
ucuuccgccuggaucucaa

SEQ ID NO: 1184524 - RNA, 19 nt, Artificial Sequence
  Description of Artificial Sequence: Synthetic oligonucleotide
  Sense strand starting at position 2545 of SEQ ID NO: 916794
cucccuuucgcccaaugaa

SEQ ID NO: 1184525 - RNA, 19 nt, Artificial Sequence
  Description of Artificial Sequence: Synthetic oligonucleotide
  Antisense strand to SEQ ID NO: 1184524
uucauugggcgaaagggag

SEQ ID NO: 1184526 - RNA, 19 nt, Artificial Sequence
  Description of Artificial Sequence: Synthetic oligonucleotide
  Sense strand starting at position 2578 of SEQ ID NO: 916794
aagaucugacuuugagagu

SEQ ID NO: 1184527 - RNA, 19 nt, Artificial Sequence
  Description of Artificial Sequence: Synthetic oligonucleotide
  Antisense strand to SEQ ID NO: 1184526
acucucaaagucagaucuu

SEQ ID NO: 1184528 - RNA, 19 nt, Artificial Sequence
  Description of Artificial Sequence: Synthetic oligonucleotide
  Sense strand starting at position 2591 of SEQ ID NO: 916794
gagaguuuggagcguucuu

SEQ ID NO: 1184529 - RNA, 19 nt, Artificial Sequence
  Description of Artificial Sequence: Synthetic oligonucleotide
  Antisense strand to SEQ ID NO: 1184528
aagaacgcuccaaacucuc

SEQ ID NO: 1184530 - RNA, 19 nt, Artificial Sequence
  Description of Artificial Sequence: Synthetic oligonucleotide
  Sense strand starting at position 2601 of SEQ ID NO: 916794
agcguucuugggagguuga

SEQ ID NO: 1184531 - RNA, 19 nt, Artificial Sequence
  Description of Artificial Sequence: Synthetic oligonucleotide
  Antisense strand to SEQ ID NO: 1184530
ucaaccucccaagaacgcu

SEQ ID NO: 1184532 - RNA, 19 nt, Artificial Sequence
  Description of Artificial Sequence: Synthetic oligonucleotide
  Sense strand starting at position 2602 of SEQ ID NO: 916794
gcguucuugggagguugaa

SEQ ID NO: 1184533 - RNA, 19 nt, Artificial Sequence
  Description of Artificial Sequence: Synthetic oligonucleotide
  Antisense strand to SEQ ID NO: 1184532
uucaaccucccaagaacgc

SEQ ID NO: 1184534 - RNA, 19 nt, Artificial Sequence
  Description of Artificial Sequence: Synthetic oligonucleotide
  Sense strand starting at position 2662 of SEQ ID NO: 916794
ccuccaaaccucugggaaa

SEQ ID NO: 1184535 - RNA, 19 nt, Artificial Sequence
  Description of Artificial Sequence: Synthetic oligonucleotide
  Antisense strand to SEQ ID NO: 1184534
uuucccagagguuuggagg

SEQ ID NO: 1184536 - RNA, 19 nt, Artificial Sequence
  Description of Artificial Sequence: Synthetic oligonucleotide
  Sense strand starting at position 2729 of SEQ ID NO: 916794
gccggagugcaguugugua

SEQ ID NO: 1184537 - RNA, 19 nt, Artificial Sequence
  Description of Artificial Sequence: Synthetic oligonucleotide
  Antisense strand to SEQ ID NO: 1184536
uacacaacugcacuccggc

SEQ ID NO: 1184538 - RNA, 19 nt, Artificial Sequence
  Description of Artificial Sequence: Synthetic oligonucleotide
  Sense strand starting at position 3027 of SEQ ID NO: 916794
cuguacgagccuuauuauu

SEQ ID NO: 1184539 - RNA, 19 nt, Artificial Sequence
  Description of Artificial Sequence: Synthetic oligonucleotide
  Antisense strand to SEQ ID NO: 1184538
aauaauaaggcucguacag

SEQ ID NO: 1184540 - RNA, 19 nt, Artificial Sequence
  Description of Artificial Sequence: Synthetic oligonucleotide
  Sense strand starting at position 3029 of SEQ ID NO: 916794
guacgagccuuauuauuua

SEQ ID NO: 1184541 - RNA, 19 nt, Artificial Sequence
  Description of Artificial Sequence: Synthetic oligonucleotide
  Antisense strand to SEQ ID NO: 1184540
uaaauaauaaggcucguac

SEQ ID NO: 1184542 - RNA, 19 nt, Artificial Sequence
  Description of Artificial Sequence: Synthetic oligonucleotide
  Sense strand starting at position 3137 of SEQ ID NO: 916794
uagucaaaggccuggugua

SEQ ID NO: 1184543 - RNA, 19 nt, Artificial Sequence
  Description of Artificial Sequence: Synthetic oligonucleotide
  Antisense strand to SEQ ID NO: 1184542
uacaccaggccuuugacua

SEQ ID NO: 1184544 - RNA, 19 nt, Artificial Sequence
  Description of Artificial Sequence: Synthetic oligonucleotide
  Sense strand starting at position 3665 of SEQ ID NO: 916794
gugagcuguggcuacacaa

SEQ ID NO: 1184545 - RNA, 19 nt, Artificial Sequence
  Description of Artificial Sequence: Synthetic oligonucleotide
  Antisense strand to SEQ ID NO: 1184544
uuguguagccacagcucac

SEQ ID NO: 1184546 - RNA, 19 nt, Artificial Sequence
  Description of Artificial Sequence: Synthetic oligonucleotide
  Sense strand starting at position 3798 of SEQ ID NO: 916794
acagcuugugaguacaaga

SEQ ID NO: 1184547 - RNA, 19 nt, Artificial Sequence
  Description of Artificial Sequence: Synthetic oligonucleotide
  Antisense strand to SEQ ID NO: 1184546
ucuuguacucacaagcugu

SEQ ID NO: 1184548 - RNA, 19 nt, Artificial Sequence
  Description of Artificial Sequence: Synthetic oligonucleotide
  Sense strand starting at position 3809 of SEQ ID NO: 916794
guacaagagccaggagauu

SEQ ID NO: 1184549 - RNA, 19 nt, Artificial Sequence
  Description of Artificial Sequence: Synthetic oligonucleotide
  Antisense strand to SEQ ID NO: 1184548
aaucuccuggcucuuguac

SEQ ID NO: 1184550 - RNA, 19 nt, Artificial Sequence
  Description of Artificial Sequence: Synthetic oligonucleotide
  Sense strand starting at position 3828 of SEQ ID NO: 916794
caaacuugagacugucuga

SEQ ID NO: 1184551 - RNA, 19 nt, Artificial Sequence
  Description of Artificial Sequence: Synthetic oligonucleotide
  Antisense strand to SEQ ID NO: 1184550
ucagacagucucaaguuug

SEQ ID NO: 1184552 - RNA, 19 nt, Artificial Sequence
  Description of Artificial Sequence: Synthetic oligonucleotide
  Sense strand starting at position 3835 of SEQ ID NO: 916794
gagacugucugauuccaag

SEQ ID NO: 1184553 - RNA, 19 nt, Artificial Sequence
  Description of Artificial Sequence: Synthetic oligonucleotide
  Antisense strand to SEQ ID NO: 1184552
cuuggaaucagacagucuc

SEQ ID NO: 1184554 - RNA, 19 nt, Artificial Sequence
  Description of Artificial Sequence: Synthetic oligonucleotide
  Sense strand starting at position 3854 of SEQ ID NO: 916794
gccugugccguuuccauua

SEQ ID NO: 1184555 - RNA, 19 nt, Artificial Sequence
  Description of Artificial Sequence: Synthetic oligonucleotide
  Antisense strand to SEQ ID NO: 1184554
uaauggaaacggcacaggc

SEQ ID NO: 1184556 - RNA, 19 nt, Artificial Sequence
  Description of Artificial Sequence: Synthetic oligonucleotide
  Sense strand starting at position 3859 of SEQ ID NO: 916794
ugccguuuccauuacugaa

SEQ ID NO: 1184557 - RNA, 19 nt, Artificial Sequence
  Description of Artificial Sequence: Synthetic oligonucleotide
  Antisense strand to SEQ ID NO: 1184556
uucaguaauggaaacggca

SEQ ID NO: 1184558 - RNA, 19 nt, Artificial Sequence
  Description of Artificial Sequence: Synthetic oligonucleotide
  Sense strand starting at position 3936 of SEQ ID NO: 916794
gcccauuauuucccacagu

SEQ ID NO: 1184559 - RNA, 19 nt, Artificial Sequence
  Description of Artificial Sequence: Synthetic oligonucleotide
  Antisense strand to SEQ ID NO: 1184558
acugugggaaauaaugggc

SEQ ID NO: 1184560 - RNA, 19 nt, Artificial Sequence
  Description of Artificial Sequence: Synthetic oligonucleotide
  Sense strand starting at position 151 of SEQ ID NO: 916795
guuucuacauucuagagag

SEQ ID NO: 1184561 - RNA, 19 nt, Artificial Sequence
  Description of Artificial Sequence: Synthetic oligonucleotide
  Antisense strand to SEQ ID NO: 1184560
cucucuagaauguagaaac

SEQ ID NO: 1184562 - RNA, 19 nt, Artificial Sequence
  Description of Artificial Sequence: Synthetic oligonucleotide
  Sense strand starting at position 900 of SEQ ID NO: 916795
gcagaauucuuaccugagg

SEQ ID NO: 1184563 - RNA, 19 nt, Artificial Sequence
  Description of Artificial Sequence: Synthetic oligonucleotide
  Antisense strand to SEQ ID NO: 1184562
ccucagguaagaauucugc

SEQ ID NO: 1184564 - RNA, 19 nt, Artificial Sequence
  Description of Artificial Sequence: Synthetic oligonucleotide
  Sense strand starting at position 901 of SEQ ID NO: 916795
cagaauucuuaccugaggu

SEQ ID NO: 1184565 - RNA, 19 nt, Artificial Sequence
  Description of Artificial Sequence: Synthetic oligonucleotide
  Antisense strand to SEQ ID NO: 1184564
accucagguaagaauucug

SEQ ID NO: 1184566 - RNA, 19 nt, Artificial Sequence
  Description of Artificial Sequence: Synthetic oligonucleotide
  Sense strand starting at position 946 of SEQ ID NO: 916795
guuccucugucuccaaaca

SEQ ID NO: 1184567 - RNA, 19 nt, Artificial Sequence
  Description of Artificial Sequence: Synthetic oligonucleotide
  Antisense strand to SEQ ID NO: 1184566
uguuuggagacagaggaac

SEQ ID NO: 1184568 - RNA, 19 nt, Artificial Sequence
  Description of Artificial Sequence: Synthetic oligonucleotide
  Sense strand starting at position 958 of SEQ ID NO: 916795
ccaaacaggcuguguaauu

SEQ ID NO: 1184569 - RNA, 19 nt, Artificial Sequence
  Description of Artificial Sequence: Synthetic oligonucleotide
  Antisense strand to SEQ ID NO: 1184568
aauuacacagccuguuugg

SEQ ID NO: 1184570 - RNA, 19 nt, Artificial Sequence
  Description of Artificial Sequence: Synthetic oligonucleotide
  Sense strand starting at position 990 of SEQ ID NO: 916795
ggcacauaggucugugaaa

SEQ ID NO: 1184571 - RNA, 19 nt, Artificial Sequence
  Description of Artificial Sequence: Synthetic oligonucleotide
  Antisense strand to SEQ ID NO: 1184570
uuucacagaccuaugugcc

SEQ ID NO: 1184572 - RNA, 19 nt, Artificial Sequence
  Description of Artificial Sequence: Synthetic oligonucleotide
  Sense strand starting at position 1052 of SEQ ID NO: 916795
cugguuagugcuggcuaca

SEQ ID NO: 1184573 - RNA, 19 nt, Artificial Sequence
  Description of Artificial Sequence: Synthetic oligonucleotide
  Antisense strand to SEQ ID NO: 1184572
uguagccagcacuaaccag

SEQ ID NO: 1184574 - RNA, 19 nt, Artificial Sequence
  Description of Artificial Sequence: Synthetic oligonucleotide
  Sense strand starting at position 1089 of SEQ ID NO: 916795
acaguaaagucacaggaga

SEQ ID NO: 1184575 - RNA, 19 nt, Artificial Sequence
  Description of Artificial Sequence: Synthetic oligonucleotide
  Antisense strand to SEQ ID NO: 1184574
ucuccugugacuuuacugu

SEQ ID NO: 1184576 - RNA, 19 nt, Artificial Sequence
  Description of Artificial Sequence: Synthetic oligonucleotide
  Sense strand starting at position 1170 of SEQ ID NO: 916795
cucugcagcagugagaaau

SEQ ID NO: 1184577 - RNA, 19 nt, Artificial Sequence
  Description of Artificial Sequence: Synthetic oligonucleotide
  Antisense strand to SEQ ID NO: 1184576
auuucucacugcugcagag

SEQ ID NO: 1184578 - RNA, 19 nt, Artificial Sequence
  Description of Artificial Sequence: Synthetic oligonucleotide
  Sense strand starting at position 1176 of SEQ ID NO: 916795
agcagugagaaaugugaau

SEQ ID NO: 1184579 - RNA, 19 nt, Artificial Sequence
  Description of Artificial Sequence: Synthetic oligonucleotide
  Antisense strand to SEQ ID NO: 1184578
auucacauuucucacugcu

SEQ ID NO: 1184580 - RNA, 19 nt, Artificial Sequence
  Description of Artificial Sequence: Synthetic oligonucleotide
  Sense strand starting at position 1231 of SEQ ID NO: 916795
cccauauccuaggcgauca

SEQ ID NO: 1184581 - RNA, 19 nt, Artificial Sequence
  Description of Artificial Sequence: Synthetic oligonucleotide
  Antisense strand to SEQ ID NO: 1184580
ugaucgccuaggauauggg

SEQ ID NO: 1184582 - RNA, 19 nt, Artificial Sequence
  Description of Artificial Sequence: Synthetic oligonucleotide
  Sense strand starting at position 1428 of SEQ ID NO: 916795
agcggauaggcagggauua

SEQ ID NO: 1184583 - RNA, 19 nt, Artificial Sequence
  Description of Artificial Sequence: Synthetic oligonucleotide
  Antisense strand to SEQ ID NO: 1184582
uaaucccugccuauccgcu

SEQ ID NO: 1184584 - RNA, 19 nt, Artificial Sequence
  Description of Artificial Sequence: Synthetic oligonucleotide
  Sense strand starting at position 1784 of SEQ ID NO: 916795
auagcaauccuucgcuaac

SEQ ID NO: 1184585 - RNA, 19 nt, Artificial Sequence
  Description of Artificial Sequence: Synthetic oligonucleotide
  Antisense strand to SEQ ID NO: 1184584
guuagcgaaggauugcuau

SEQ ID NO: 1184586 - RNA, 19 nt, Artificial Sequence
  Description of Artificial Sequence: Synthetic oligonucleotide
  Sense strand starting at position 1787 of SEQ ID NO: 916795
gcaauccuucgcuaacacu

SEQ ID NO: 1184587 - RNA, 19 nt, Artificial Sequence
  Description of Artificial Sequence: Synthetic oligonucleotide
  Antisense strand to SEQ ID NO: 1184586
aguguuagcgaaggauugc

SEQ ID NO: 1184588 - RNA, 19 nt, Artificial Sequence
  Description of Artificial Sequence: Synthetic oligonucleotide
  Sense strand starting at position 2105 of SEQ ID NO: 916795
agccaauggaucugaggau

SEQ ID NO: 1184589 - RNA, 19 nt, Artificial Sequence
  Description of Artificial Sequence: Synthetic oligonucleotide
  Antisense strand to SEQ ID NO: 1184588
auccucagauccauuggcu

SEQ ID NO: 1184590 - RNA, 19 nt, Artificial Sequence
  Description of Artificial Sequence: Synthetic oligonucleotide
  Sense strand starting at position 2207 of SEQ ID NO: 916795
uugcauuuguauuaggaag

SEQ ID NO: 1184591 - RNA, 19 nt, Artificial Sequence
  Description of Artificial Sequence: Synthetic oligonucleotide
  Antisense strand to SEQ ID NO: 1184590
cuuccuaauacaaaugcaa

SEQ ID NO: 1184592 - RNA, 19 nt, Artificial Sequence
  Description of Artificial Sequence: Synthetic oligonucleotide
  Sense strand starting at position 2248 of SEQ ID NO: 916795
augaaaugaucuggagugu

SEQ ID NO: 1184593 - RNA, 19 nt, Artificial Sequence
  Description of Artificial Sequence: Synthetic oligonucleotide
  Antisense strand to SEQ ID NO: 1184592
acacuccagaucauuucau

SEQ ID NO: 1184594 - RNA, 19 nt, Artificial Sequence
  Description of Artificial Sequence: Synthetic oligonucleotide
  Sense strand starting at position 2259 of SEQ ID NO: 916795
uggagugucuaccaauaag

SEQ ID NO: 1184595 - RNA, 19 nt, Artificial Sequence
  Description of Artificial Sequence: Synthetic oligonucleotide
  Antisense strand to SEQ ID NO: 1184594
cuuauugguagacacucca

SEQ ID NO: 1184596 - RNA, 19 nt, Artificial Sequence
  Description of Artificial Sequence: Synthetic oligonucleotide
  Sense strand starting at position 2262 of SEQ ID NO: 916795
agugucuaccaauaagugu

SEQ ID NO: 1184597 - RNA, 19 nt, Artificial Sequence
  Description of Artificial Sequence: Synthetic oligonucleotide
  Antisense strand to SEQ ID NO: 1184596
acacuuauugguagacacu

SEQ ID NO: 1184598 - RNA, 19 nt, Artificial Sequence
  Description of Artificial Sequence: Synthetic oligonucleotide
  Sense strand starting at position 2360 of SEQ ID NO: 916795
gcaggaccugcuuagacua

SEQ ID NO: 1184599 - RNA, 19 nt, Artificial Sequence
  Description of Artificial Sequence: Synthetic oligonucleotide
  Antisense strand to SEQ ID NO: 1184598
uagucuaagcagguccugc

SEQ ID NO: 1184600 - RNA, 19 nt, Artificial Sequence
  Description of Artificial Sequence: Synthetic oligonucleotide
  Sense strand starting at position 2605 of SEQ ID NO: 916795
uggccugaugucugacuuu

SEQ ID NO: 1184601 - RNA, 19 nt, Artificial Sequence
  Description of Artificial Sequence: Synthetic oligonucleotide
  Antisense strand to SEQ ID NO: 1184600
aaagucagacaucaggcca

SEQ ID NO: 1184602 - RNA, 19 nt, Artificial Sequence
  Description of Artificial Sequence: Synthetic oligonucleotide
  Sense strand starting at position 3239 of SEQ ID NO: 916795
gucacuguuuggccagaca

SEQ ID NO: 1184603 - RNA, 19 nt, Artificial Sequence
  Description of Artificial Sequence: Synthetic oligonucleotide
  Antisense strand to SEQ ID NO: 1184602
ugucuggccaaacagugac

SEQ ID NO: 1184604 - RNA, 19 nt, Artificial Sequence
  Description of Artificial Sequence: Synthetic oligonucleotide
  Sense strand starting at position 3293 of SEQ ID NO: 916795
guguuuguucugcggccua

SEQ ID NO: 1184605 - RNA, 19 nt, Artificial Sequence
  Description of Artificial Sequence: Synthetic oligonucleotide
  Antisense strand to SEQ ID NO: 1184604
uaggccgcagaacaaacac

SEQ ID NO: 1184606 - RNA, 19 nt, Artificial Sequence
  Description of Artificial Sequence: Synthetic oligonucleotide
  Sense strand starting at position 3312 of SEQ ID NO: 916795
ggcucagcuuccuggauga

SEQ ID NO: 1184607 - RNA, 19 nt, Artificial Sequence
  Description of Artificial Sequence: Synthetic oligonucleotide
  Antisense strand to SEQ ID NO: 1184606
ucauccaggaagcugagcc

SEQ ID NO: 1184608 - RNA, 19 nt, Artificial Sequence
  Description of Artificial Sequence: Synthetic oligonucleotide
  Sense strand starting at position 3314 of SEQ ID NO: 916795
cucagcuuccuggaugaau

SEQ ID NO: 1184609 - RNA, 19 nt, Artificial Sequence
  Description of Artificial Sequence: Synthetic oligonucleotide
  Antisense strand to SEQ ID NO: 1184608
auucauccaggaagcugag

SEQ ID NO: 1184610 - RNA, 19 nt, Artificial Sequence
  Description of Artificial Sequence: Synthetic oligonucleotide
  Sense strand starting at position 3341 of SEQ ID NO: 916795
gguccaguuccauguuaac

SEQ ID NO: 1184611 - RNA, 19 nt, Artificial Sequence
  Description of Artificial Sequence: Synthetic oligonucleotide
  Antisense strand to SEQ ID NO: 1184610
guuaacauggaacuggacc

SEQ ID NO: 1184612 - RNA, 19 nt, Artificial Sequence
  Description of Artificial Sequence: Synthetic oligonucleotide
  Sense strand starting at position 3351 of SEQ ID NO: 916795
cauguuaacgcccacugaa

SEQ ID NO: 1184613 - RNA, 19 nt, Artificial Sequence
  Description of Artificial Sequence: Synthetic oligonucleotide
  Antisense strand to SEQ ID NO: 1184612
uucagugggcguuaacaug

SEQ ID NO: 1184614 - RNA, 19 nt, Artificial Sequence
  Description of Artificial Sequence: Synthetic oligonucleotide
  Sense strand starting at position 3376 of SEQ ID NO: 916795
gcacuaaugugugucaccu

SEQ ID NO: 1184615 - RNA, 19 nt, Artificial Sequence
  Description of Artificial Sequence: Synthetic oligonucleotide
  Antisense strand to SEQ ID NO: 1184614
aggugacacacauuagugc

SEQ ID NO: 1184616 - RNA, 19 nt, Artificial Sequence
  Description of Artificial Sequence: Synthetic oligonucleotide
  Sense strand starting at position 3380 of SEQ ID NO: 916795
uaaugugugucaccugguu

SEQ ID NO: 1184617 - RNA, 19 nt, Artificial Sequence
  Description of Artificial Sequence: Synthetic oligonucleotide
  Antisense strand to SEQ ID NO: 1184616
aaccaggugacacacauua

SEQ ID NO: 1184618 - RNA, 19 nt, Artificial Sequence
  Description of Artificial Sequence: Synthetic oligonucleotide
  Sense strand starting at position 3382 of SEQ ID NO: 916795
augugugucaccugguuaa

SEQ ID NO: 1184619 - RNA, 19 nt, Artificial Sequence
  Description of Artificial Sequence: Synthetic oligonucleotide
  Antisense strand to SEQ ID NO: 1184618
uuaaccaggugacacacau

SEQ ID NO: 1184620 - RNA, 19 nt, Artificial Sequence
  Description of Artificial Sequence: Synthetic oligonucleotide
  Sense strand starting at position 3385 of SEQ ID NO: 916795
ugugucaccugguuaaagu

SEQ ID NO: 1184621 - RNA, 19 nt, Artificial Sequence
  Description of Artificial Sequence: Synthetic oligonucleotide
  Antisense strand to SEQ ID NO: 1184620
acuuuaaccaggugacaca

SEQ ID NO: 1184622 - RNA, 19 nt, Artificial Sequence
  Description of Artificial Sequence: Synthetic oligonucleotide
  Sense strand starting at position 3872 of SEQ ID NO: 916795
accacugauuguccaggaa

SEQ ID NO: 1184623 - RNA, 19 nt, Artificial Sequence
  Description of Artificial Sequence: Synthetic oligonucleotide
  Antisense strand to SEQ ID NO: 1184622
uuccuggacaaucaguggu

SEQ ID NO: 1184624 - RNA, 19 nt, Artificial Sequence
  Description of Artificial Sequence: Synthetic oligonucleotide
  Sense strand starting at position 3875 of SEQ ID NO: 916795
acugauuguccaggaauca

SEQ ID NO: 1184625 - RNA, 19 nt, Artificial Sequence
  Description of Artificial Sequence: Synthetic oligonucleotide
  Antisense strand to SEQ ID NO: 1184624
ugauuccuggacaaucagu

SEQ ID NO: 1184626 - RNA, 19 nt, Artificial Sequence
  Description of Artificial Sequence: Synthetic oligonucleotide
  Sense strand starting at position 3914 of SEQ ID NO: 916795
ccuggagauuugugauuga

SEQ ID NO: 1184627 - RNA, 19 nt, Artificial Sequence
  Description of Artificial Sequence: Synthetic oligonucleotide
  Antisense strand to SEQ ID NO: 1184626
ucaaucacaaaucuccagg

SEQ ID NO: 1184628 - RNA, 19 nt, Artificial Sequence
  Description of Artificial Sequence: Synthetic oligonucleotide
  Sense strand starting at position 3954 of SEQ ID NO: 916795
aauugagaguagucccuuu

SEQ ID NO: 1184629 - RNA, 19 nt, Artificial Sequence
  Description of Artificial Sequence: Synthetic oligonucleotide
  Antisense strand to SEQ ID NO: 1184628
aaagggacuacucucaauu

SEQ ID NO: 1184630 - RNA, 19 nt, Artificial Sequence
  Description of Artificial Sequence: Synthetic oligonucleotide
  Sense strand starting at position 75 of SEQ ID NO: 916796
agacgagggucuuacuauc

SEQ ID NO: 1184631 - RNA, 19 nt, Artificial Sequence
  Description of Artificial Sequence: Synthetic oligonucleotide
  Antisense strand to SEQ ID NO: 1184630
gauaguaagacccucgucu

SEQ ID NO: 1184632 - RNA, 19 nt, Artificial Sequence
  Description of Artificial Sequence: Synthetic oligonucleotide
  Sense strand starting at position 312 of SEQ ID NO: 916796
cugcuaaugugacugaaau

SEQ ID NO: 1184633 - RNA, 19 nt, Artificial Sequence
  Description of Artificial Sequence: Synthetic oligonucleotide
  Antisense strand to SEQ ID NO: 1184632
auuucagucacauuagcag

SEQ ID NO: 1184634 - RNA, 19 nt, Artificial Sequence
  Description of Artificial Sequence: Synthetic oligonucleotide
  Sense strand starting at position 313 of SEQ ID NO: 916796
ugcuaaugugacugaaaua

SEQ ID NO: 1184635 - RNA, 19 nt, Artificial Sequence
  Description of Artificial Sequence: Synthetic oligonucleotide
  Antisense strand to SEQ ID NO: 1184634
uauuucagucacauuagca

SEQ ID NO: 1184636 - RNA, 19 nt, Artificial Sequence
  Description of Artificial Sequence: Synthetic oligonucleotide
  Sense strand starting at position 340 of SEQ ID NO: 916796
agcagagauuaguacaaac

SEQ ID NO: 1184637 - RNA, 19 nt, Artificial Sequence
  Description of Artificial Sequence: Synthetic oligonucleotide
  Antisense strand to SEQ ID NO: 1184636
guuuguacuaaucucugcu

SEQ ID NO: 1184638 - RNA, 19 nt, Artificial Sequence
  Description of Artificial Sequence: Synthetic oligonucleotide
  Sense strand starting at position 350 of SEQ ID NO: 916796
aguacaaacuucgaaauaa

SEQ ID NO: 1184639 - RNA, 19 nt, Artificial Sequence
  Description of Artificial Sequence: Synthetic oligonucleotide
  Antisense strand to SEQ ID NO: 1184638
uuauuucgaaguuuguacu

SEQ ID NO: 1184640 - RNA, 19 nt, Artificial Sequence
  Description of Artificial Sequence: Synthetic oligonucleotide
  Sense strand starting at position 524 of SEQ ID NO: 916796
augguaagcccucaauuaa

SEQ ID NO: 1184641 - RNA, 19 nt, Artificial Sequence
  Description of Artificial Sequence: Synthetic oligonucleotide
  Antisense strand to SEQ ID NO: 1184640
uuaauugagggcuuaccau

SEQ ID NO: 1184642 - RNA, 19 nt, Artificial Sequence
  Description of Artificial Sequence: Synthetic oligonucleotide
  Sense strand starting at position 561 of SEQ ID NO: 916796
uggucauaauauugacaga

SEQ ID NO: 1184643 - RNA, 19 nt, Artificial Sequence
  Description of Artificial Sequence: Synthetic oligonucleotide
  Antisense strand to SEQ ID NO: 1184642
ucugucaauauuaugacca

SEQ ID NO: 1184644 - RNA, 19 nt, Artificial Sequence
  Description of Artificial Sequence: Synthetic oligonucleotide
  Sense strand starting at position 671 of SEQ ID NO: 916796
gacgccagauauccuaaga

SEQ ID NO: 1184645 - RNA, 19 nt, Artificial Sequence
  Description of Artificial Sequence: Synthetic oligonucleotide
  Antisense strand to SEQ ID NO: 1184644
ucuuaggauaucuggcguc

SEQ ID NO: 1184646 - RNA, 19 nt, Artificial Sequence
  Description of Artificial Sequence: Synthetic oligonucleotide
  Sense strand starting at position 870 of SEQ ID NO: 916796
ugacuuccucuucgacaga

SEQ ID NO: 1184647 - RNA, 19 nt, Artificial Sequence
  Description of Artificial Sequence: Synthetic oligonucleotide
  Antisense strand to SEQ ID NO: 1184646
ucugucgaagaggaaguca

SEQ ID NO: 1184648 - RNA, 19 nt, Artificial Sequence
  Description of Artificial Sequence: Synthetic oligonucleotide
  Sense strand starting at position 901 of SEQ ID NO: 916796
ggaccagguuauuaaauaa

SEQ ID NO: 1184649 - RNA, 19 nt, Artificial Sequence
  Description of Artificial Sequence: Synthetic oligonucleotide
  Antisense strand to SEQ ID NO: 1184648
uuauuuaauaaccuggucc

SEQ ID NO: 1184650 - RNA, 19 nt, Artificial Sequence
  Description of Artificial Sequence: Synthetic oligonucleotide
  Sense strand starting at position 921 of SEQ ID NO: 916796
agaucugaguuugaaaggu

SEQ ID NO: 1184651 - RNA, 19 nt, Artificial Sequence
  Description of Artificial Sequence: Synthetic oligonucleotide
  Antisense strand to SEQ ID NO: 1184650
accuuucaaacucagaucu

SEQ ID NO: 1184652 - RNA, 19 nt, Artificial Sequence
  Description of Artificial Sequence: Synthetic oligonucleotide
  Sense strand starting at position 1034 of SEQ ID NO: 916796
acugaugagucacacaaac

SEQ ID NO: 1184653 - RNA, 19 nt, Artificial Sequence
  Description of Artificial Sequence: Synthetic oligonucleotide
  Antisense strand to SEQ ID NO: 1184652
guuugugugacucaucagu

SEQ ID NO: 1184654 - RNA, 19 nt, Artificial Sequence
  Description of Artificial Sequence: Synthetic oligonucleotide
  Sense strand starting at position 1076 of SEQ ID NO: 916796
ccaaauacuagcuggguga

SEQ ID NO: 1184655 - RNA, 19 nt, Artificial Sequence
  Description of Artificial Sequence: Synthetic oligonucleotide
  Antisense strand to SEQ ID NO: 1184654
ucacccagcuaguauuugg

SEQ ID NO: 1184656 - RNA, 19 nt, Artificial Sequence
  Description of Artificial Sequence: Synthetic oligonucleotide
  Sense strand starting at position 1170 of SEQ ID NO: 916796
guaaaugauccacguaaac

SEQ ID NO: 1184657 - RNA, 19 nt, Artificial Sequence
  Description of Artificial Sequence: Synthetic oligonucleotide
  Antisense strand to SEQ ID NO: 1184656
guuuacguggaucauuuac

SEQ ID NO: 1184658 - RNA, 19 nt, Artificial Sequence
  Description of Artificial Sequence: Synthetic oligonucleotide
  Sense strand starting at position 1192 of SEQ ID NO: 916796
gcagcacagcgcucauuaa

SEQ ID NO: 1184659 - RNA, 19 nt, Artificial Sequence
  Description of Artificial Sequence: Synthetic oligonucleotide
  Antisense strand to SEQ ID NO: 1184658
uuaaugagcgcugugcugc

SEQ ID NO: 1184660 - RNA, 19 nt, Artificial Sequence
  Description of Artificial Sequence: Synthetic oligonucleotide
  Sense strand starting at position 1196 of SEQ ID NO: 916796
cacagcgcucauuaaugua

SEQ ID NO: 1184661 - RNA, 19 nt, Artificial Sequence
  Description of Artificial Sequence: Synthetic oligonucleotide
  Antisense strand to SEQ ID NO: 1184660
uacauuaaugagcgcugug

SEQ ID NO: 1184662 - RNA, 19 nt, Artificial Sequence
  Description of Artificial Sequence: Synthetic oligonucleotide
  Sense strand starting at position 1987 of SEQ ID NO: 916796
ccggauggacuguauauau

SEQ ID NO: 1184663 - RNA, 19 nt, Artificial Sequence
  Description of Artificial Sequence: Synthetic oligonucleotide
  Antisense strand to SEQ ID NO: 1184662
auauauacaguccauccgg

SEQ ID NO: 1184664 - RNA, 19 nt, Artificial Sequence
  Description of Artificial Sequence: Synthetic oligonucleotide
  Sense strand starting at position 2019 of SEQ ID NO: 916796
ugagguauucugggaaaug

SEQ ID NO: 1184665 - RNA, 19 nt, Artificial Sequence
  Description of Artificial Sequence: Synthetic oligonucleotide
  Antisense strand to SEQ ID NO: 1184664
cauuucccagaauaccuca

SEQ ID NO: 1184666 - RNA, 19 nt, Artificial Sequence
  Description of Artificial Sequence: Synthetic oligonucleotide
  Sense strand starting at position 2020 of SEQ ID NO: 916796
gagguauucugggaaaugu

SEQ ID NO: 1184667 - RNA, 19 nt, Artificial Sequence
  Description of Artificial Sequence: Synthetic oligonucleotide
  Antisense strand to SEQ ID NO: 1184666
acauuucccagaauaccuc

SEQ ID NO: 1184668 - RNA, 19 nt, Artificial Sequence
  Description of Artificial Sequence: Synthetic oligonucleotide
  Sense strand starting at position 2252 of SEQ ID NO: 916796
guagccaaacauuggaaua

SEQ ID NO: 1184669 - RNA, 19 nt, Artificial Sequence
  Description of Artificial Sequence: Synthetic oligonucleotide
  Antisense strand to SEQ ID NO: 1184668
uauuccaauguuuggcuac

SEQ ID NO: 1184670 - RNA, 19 nt, Artificial Sequence
  Description of Artificial Sequence: Synthetic oligonucleotide
  Sense strand starting at position 2263 of SEQ ID NO: 916796
uuggaauaccuguggaacu

SEQ ID NO: 1184671 - RNA, 19 nt, Artificial Sequence
  Description of Artificial Sequence: Synthetic oligonucleotide
  Antisense strand to SEQ ID NO: 1184670
aguuccacagguauuccaa

SEQ ID NO: 1184672 - RNA, 19 nt, Artificial Sequence
  Description of Artificial Sequence: Synthetic oligonucleotide
  Sense strand starting at position 2284 of SEQ ID NO: 916796
uuuauagacucguuugauu

SEQ ID NO: 1184673 - RNA, 19 nt, Artificial Sequence
  Description of Artificial Sequence: Synthetic oligonucleotide
  Antisense strand to SEQ ID NO: 1184672
aaucaaacgagucuauaaa

SEQ ID NO: 1184674 - RNA, 19 nt, Artificial Sequence
  Description of Artificial Sequence: Synthetic oligonucleotide
  Sense strand starting at position 2287 of SEQ ID NO: 916796
auagacucguuugauuuau

SEQ ID NO: 1184675 - RNA, 19 nt, Artificial Sequence
  Description of Artificial Sequence: Synthetic oligonucleotide
  Antisense strand to SEQ ID NO: 1184674
auaaaucaaacgagucuau

SEQ ID NO: 1184676 - RNA, 19 nt, Artificial Sequence
  Description of Artificial Sequence: Synthetic oligonucleotide
  Sense strand starting at position 2602 of SEQ ID NO: 916796
gccaauuuaugguucuuau

SEQ ID NO: 1184677 - RNA, 19 nt, Artificial Sequence
  Description of Artificial Sequence: Synthetic oligonucleotide
  Antisense strand to SEQ ID NO: 1184676
auaagaaccauaaauuggc

SEQ ID NO: 1184678 - RNA, 19 nt, Artificial Sequence
  Description of Artificial Sequence: Synthetic oligonucleotide
  Sense strand starting at position 2646 of SEQ ID NO: 916796
uggccuuuagucuaucuca

SEQ ID NO: 1184679 - RNA, 19 nt, Artificial Sequence
  Description of Artificial Sequence: Synthetic oligonucleotide
  Antisense strand to SEQ ID NO: 1184678
ugagauagacuaaaggcca

SEQ ID NO: 1184680 - RNA, 19 nt, Artificial Sequence
  Description of Artificial Sequence: Synthetic oligonucleotide
  Sense strand starting at position 2832 of SEQ ID NO: 916796
aguguuucaugcguguaau

SEQ ID NO: 1184681 - RNA, 19 nt, Artificial Sequence
  Description of Artificial Sequence: Synthetic oligonucleotide
  Antisense strand to SEQ ID NO: 1184680
auuacacgcaugaaacacu

SEQ ID NO: 1184682 - RNA, 19 nt, Artificial Sequence
  Description of Artificial Sequence: Synthetic oligonucleotide
  Sense strand starting at position 2833 of SEQ ID NO: 916796
guguuucaugcguguaauc

SEQ ID NO: 1184683 - RNA, 19 nt, Artificial Sequence
  Description of Artificial Sequence: Synthetic oligonucleotide
  Antisense strand to SEQ ID NO: 1184682
gauuacacgcaugaaacac

SEQ ID NO: 1184684 - RNA, 19 nt, Artificial Sequence
  Description of Artificial Sequence: Synthetic oligonucleotide
  Sense strand starting at position 3111 of SEQ ID NO: 916796
uuagcugggcucugaauaa

SEQ ID NO: 1184685 - RNA, 19 nt, Artificial Sequence
  Description of Artificial Sequence: Synthetic oligonucleotide
  Antisense strand to SEQ ID NO: 1184684
uuauucagagcccagcuaa

SEQ ID NO: 1184686 - RNA, 19 nt, Artificial Sequence
  Description of Artificial Sequence: Synthetic oligonucleotide
  Sense strand starting at position 3269 of SEQ ID NO: 916796
ggagguugcagugagauac

SEQ ID NO: 1184687 - RNA, 19 nt, Artificial Sequence
  Description of Artificial Sequence: Synthetic oligonucleotide
  Antisense strand to SEQ ID NO: 1184686
guaucucacugcaaccucc

SEQ ID NO: 1184688 - RNA, 19 nt, Artificial Sequence
  Description of Artificial Sequence: Synthetic oligonucleotide
  Sense strand starting at position 3279 of SEQ ID NO: 916796
gugagauacgaucgugcca

SEQ ID NO: 1184689 - RNA, 19 nt, Artificial Sequence
  Description of Artificial Sequence: Synthetic oligonucleotide
  Antisense strand to SEQ ID NO: 1184688
uggcacgaucguaucucac

SEQ ID NO: 1184690 - RNA, 19 nt, Artificial Sequence
  Description of Artificial Sequence: Synthetic oligonucleotide
  Sense strand starting at position 3297 of SEQ ID NO: 916796
agugcacuccaguaugagu

SEQ ID NO: 1184691 - RNA, 19 nt, Artificial Sequence
  Description of Artificial Sequence: Synthetic oligonucleotide
  Antisense strand to SEQ ID NO: 1184690
acucauacuggagugcacu

SEQ ID NO: 1184692 - RNA, 19 nt, Artificial Sequence
  Description of Artificial Sequence: Synthetic oligonucleotide
  Sense strand starting at position 3324 of SEQ ID NO: 916796
gggagacccugucuaaacu

SEQ ID NO: 1184693 - RNA, 19 nt, Artificial Sequence
  Description of Artificial Sequence: Synthetic oligonucleotide
  Antisense strand to SEQ ID NO: 1184692
aguuuagacagggucuccc

SEQ ID NO: 1184694 - RNA, 19 nt, Artificial Sequence
  Description of Artificial Sequence: Synthetic oligonucleotide
  Sense strand starting at position 3467 of SEQ ID NO: 916796
gaugauuucucagaagguc

SEQ ID NO: 1184695 - RNA, 19 nt, Artificial Sequence
  Description of Artificial Sequence: Synthetic oligonucleotide
  Antisense strand to SEQ ID NO: 1184694
gaccuucugagaaaucauc

SEQ ID NO: 1184696 - RNA, 19 nt, Artificial Sequence
  Description of Artificial Sequence: Synthetic oligonucleotide
  Sense strand starting at position 3504 of SEQ ID NO: 916796
aggcgugguuggguagaaa

SEQ ID NO: 1184697 - RNA, 19 nt, Artificial Sequence
  Description of Artificial Sequence: Synthetic oligonucleotide
  Antisense strand to SEQ ID NO: 1184696
uuucuacccaaccacgccu

SEQ ID NO: 1184698 - RNA, 19 nt, Artificial Sequence
  Description of Artificial Sequence: Synthetic oligonucleotide
  Sense strand starting at position 3505 of SEQ ID NO: 916796
ggcgugguuggguagaaau

SEQ ID NO: 1184699 - RNA, 19 nt, Artificial Sequence
  Description of Artificial Sequence: Synthetic oligonucleotide
  Antisense strand to SEQ ID NO: 1184698
auuucuacccaaccacgcc

SEQ ID NO: 1184700 - RNA, 19 nt, Artificial Sequence
  Description of Artificial Sequence: Synthetic oligonucleotide
  Sense strand starting at position 3654 of SEQ ID NO: 916796
gacuaagugugccuguagu

SEQ ID NO: 1184701 - RNA, 19 nt, Artificial Sequence
  Description of Artificial Sequence: Synthetic oligonucleotide
  Antisense strand to SEQ ID NO: 1184700
acuacaggcacacuuaguc

SEQ ID NO: 1184702 - RNA, 19 nt, Artificial Sequence
  Description of Artificial Sequence: Synthetic oligonucleotide
  Sense strand starting at position 3722 of SEQ ID NO: 916796
augaauccagccuggguaa

SEQ ID NO: 1184703 - RNA, 19 nt, Artificial Sequence
  Description of Artificial Sequence: Synthetic oligonucleotide
  Antisense strand to SEQ ID NO: 1184702
uuacccaggcuggauucau

SEQ ID NO: 1184704 - RNA, 19 nt, Artificial Sequence
  Description of Artificial Sequence: Synthetic oligonucleotide
  Sense strand starting at position 3838 of SEQ ID NO: 916796
ugauguucuuaccuaugag

SEQ ID NO: 1184705 - RNA, 19 nt, Artificial Sequence
  Description of Artificial Sequence: Synthetic oligonucleotide
  Antisense strand to SEQ ID NO: 1184704
cucauagguaagaacauca

SEQ ID NO: 1184706 - RNA, 19 nt, Artificial Sequence
  Description of Artificial Sequence: Synthetic oligonucleotide
  Sense strand starting at position 3841 of SEQ ID NO: 916796
uguucuuaccuaugagaca

SEQ ID NO: 1184707 - RNA, 19 nt, Artificial Sequence
  Description of Artificial Sequence: Synthetic oligonucleotide
  Antisense strand to SEQ ID NO: 1184706
ugucucauagguaagaaca

SEQ ID NO: 1184708 - RNA, 19 nt, Artificial Sequence
  Description of Artificial Sequence: Synthetic oligonucleotide
  Sense strand starting at position 3842 of SEQ ID NO: 916796
guucuuaccuaugagacaa

SEQ ID NO: 1184709 - RNA, 19 nt, Artificial Sequence
  Description of Artificial Sequence: Synthetic oligonucleotide
  Antisense strand to SEQ ID NO: 1184708
uugucucauagguaagaac

SEQ ID NO: 1184710 - RNA, 19 nt, Artificial Sequence
  Description of Artificial Sequence: Synthetic oligonucleotide
  Sense strand starting at position 24 of SEQ ID NO: 916797
gaaucagucucugcccaga

SEQ ID NO: 1184711 - RNA, 19 nt, Artificial Sequence
  Description of Artificial Sequence: Synthetic oligonucleotide
  Antisense strand to SEQ ID NO: 1184710
ucugggcagagacugauuc

SEQ ID NO: 1184712 - RNA, 19 nt, Artificial Sequence
  Description of Artificial Sequence: Synthetic oligonucleotide
  Sense strand starting at position 26 of SEQ ID NO: 916797
aucagucucugcccagaaa

SEQ ID NO: 1184713 - RNA, 19 nt, Artificial Sequence
  Description of Artificial Sequence: Synthetic oligonucleotide
  Antisense strand to SEQ ID NO: 1184712
uuucugggcagagacugau

SEQ ID NO: 1184714 - RNA, 19 nt, Artificial Sequence
  Description of Artificial Sequence: Synthetic oligonucleotide
  Sense strand starting at position 27 of SEQ ID NO: 916797
ucagucucugcccagaaau

SEQ ID NO: 1184715 - RNA, 19 nt, Artificial Sequence
  Description of Artificial Sequence: Synthetic oligonucleotide
  Antisense strand to SEQ ID NO: 1184714
auuucugggcagagacuga

SEQ ID NO: 1184716 - RNA, 19 nt, Artificial Sequence
  Description of Artificial Sequence: Synthetic oligonucleotide
  Sense strand starting at position 29 of SEQ ID NO: 916797
agucucugcccagaaaucu

SEQ ID NO: 1184717 - RNA, 19 nt, Artificial Sequence
  Description of Artificial Sequence: Synthetic oligonucleotide
  Antisense strand to SEQ ID NO: 1184716
agauuucugggcagagacu

SEQ ID NO: 1184718 - RNA, 19 nt, Artificial Sequence
  Description of Artificial Sequence: Synthetic oligonucleotide
  Sense strand starting at position 122 of SEQ ID NO: 916797
ccaaauccucaauggugua

SEQ ID NO: 1184719 - RNA, 19 nt, Artificial Sequence
  Description of Artificial Sequence: Synthetic oligonucleotide
  Antisense strand to SEQ ID NO: 1184718
uacaccauugaggauuugg

SEQ ID NO: 1184720 - RNA, 19 nt, Artificial Sequence
  Description of Artificial Sequence: Synthetic oligonucleotide
  Sense strand starting at position 388 of SEQ ID NO: 916797
gauagcuaguuccuuaaug

SEQ ID NO: 1184721 - RNA, 19 nt, Artificial Sequence
  Description of Artificial Sequence: Synthetic oligonucleotide
  Antisense strand to SEQ ID NO: 1184720
cauuaaggaacuagcuauc

SEQ ID NO: 1184722 - RNA, 19 nt, Artificial Sequence
  Description of Artificial Sequence: Synthetic oligonucleotide
  Sense strand starting at position 398 of SEQ ID NO: 916797
uccuuaaugggccacaaau

SEQ ID NO: 1184723 - RNA, 19 nt, Artificial Sequence
  Description of Artificial Sequence: Synthetic oligonucleotide
  Antisense strand to SEQ ID NO: 1184722
auuuguggcccauuaagga

SEQ ID NO: 1184724 - RNA, 19 nt, Artificial Sequence
  Description of Artificial Sequence: Synthetic oligonucleotide
  Sense strand starting at position 749 of SEQ ID NO: 916797
cuuguaauaugguuacuua

SEQ ID NO: 1184725 - RNA, 19 nt, Artificial Sequence
  Description of Artificial Sequence: Synthetic oligonucleotide
  Antisense strand to SEQ ID NO: 1184724
uaaguaaccauauuacaag

SEQ ID NO: 1184726 - RNA, 19 nt, Artificial Sequence
  Description of Artificial Sequence: Synthetic oligonucleotide
  Sense strand starting at position 750 of SEQ ID NO: 916797
uuguaauaugguuacuuac

SEQ ID NO: 1184727 - RNA, 19 nt, Artificial Sequence
  Description of Artificial Sequence: Synthetic oligonucleotide
  Antisense strand to SEQ ID NO: 1184726
guaaguaaccauauuacaa

SEQ ID NO: 1184728 - RNA, 19 nt, Artificial Sequence
  Description of Artificial Sequence: Synthetic oligonucleotide
  Sense strand starting at position 752 of SEQ ID NO: 916797
guaauaugguuacuuacaa

SEQ ID NO: 1184729 - RNA, 19 nt, Artificial Sequence
  Description of Artificial Sequence: Synthetic oligonucleotide
  Antisense strand to SEQ ID NO: 1184728
uuguaaguaaccauauuac

SEQ ID NO: 1184730 - RNA, 19 nt, Artificial Sequence
  Description of Artificial Sequence: Synthetic oligonucleotide
  Sense strand starting at position 954 of SEQ ID NO: 916797
uggagacagcguuaaucua

SEQ ID NO: 1184731 - RNA, 19 nt, Artificial Sequence
  Description of Artificial Sequence: Synthetic oligonucleotide
  Antisense strand to SEQ ID NO: 1184730
uagauuaacgcugucucca

SEQ ID NO: 1184732 - RNA, 19 nt, Artificial Sequence
  Description of Artificial Sequence: Synthetic oligonucleotide
  Sense strand starting at position 1005 of SEQ ID NO: 916797
acaccucugcacugagauu

SEQ ID NO: 1184733 - RNA, 19 nt, Artificial Sequence
  Description of Artificial Sequence: Synthetic oligonucleotide
  Antisense strand to SEQ ID NO: 1184732
aaucucagugcagaggugu

SEQ ID NO: 1184734 - RNA, 19 nt, Artificial Sequence
  Description of Artificial Sequence: Synthetic oligonucleotide
  Sense strand starting at position 1011 of SEQ ID NO: 916797
cugcacugagauuaacgaa

SEQ ID NO: 1184735 - RNA, 19 nt, Artificial Sequence
  Description of Artificial Sequence: Synthetic oligonucleotide
  Antisense strand to SEQ ID NO: 1184734
uucguuaaucucagugcag

SEQ ID NO: 1184736 - RNA, 19 nt, Artificial Sequence
  Description of Artificial Sequence: Synthetic oligonucleotide
  Sense strand starting at position 1027 of SEQ ID NO: 916797
gaaaccaucuaggucugaa

SEQ ID NO: 1184737 - RNA, 19 nt, Artificial Sequence
  Description of Artificial Sequence: Synthetic oligonucleotide
  Antisense strand to SEQ ID NO: 1184736
uucagaccuagaugguuuc

SEQ ID NO: 1184738 - RNA, 19 nt, Artificial Sequence
  Description of Artificial Sequence: Synthetic oligonucleotide
  Sense strand starting at position 1030 of SEQ ID NO: 916797
accaucuaggucugaaagu

SEQ ID NO: 1184739 - RNA, 19 nt, Artificial Sequence
  Description of Artificial Sequence: Synthetic oligonucleotide
  Antisense strand to SEQ ID NO: 1184738
acuuucagaccuagauggu

SEQ ID NO: 1184740 - RNA, 19 nt, Artificial Sequence
  Description of Artificial Sequence: Synthetic oligonucleotide
  Sense strand starting at position 1039 of SEQ ID NO: 916797
gucugaaaguuaucaucac

SEQ ID NO: 1184741 - RNA, 19 nt, Artificial Sequence
  Description of Artificial Sequence: Synthetic oligonucleotide
  Antisense strand to SEQ ID NO: 1184740
gugaugauaacuuucagac

SEQ ID NO: 1184742 - RNA, 19 nt, Artificial Sequence
  Description of Artificial Sequence: Synthetic oligonucleotide
  Sense strand starting at position 1078 of SEQ ID NO: 916797
guuugaguucggcaaauga

SEQ ID NO: 1184743 - RNA, 19 nt, Artificial Sequence
  Description of Artificial Sequence: Synthetic oligonucleotide
  Antisense strand to SEQ ID NO: 1184742
ucauuugccgaacucaaac

SEQ ID NO: 1184744 - RNA, 19 nt, Artificial Sequence
  Description of Artificial Sequence: Synthetic oligonucleotide
  Sense strand starting at position 1144 of SEQ ID NO: 916797
cagugaucggguugagaau

SEQ ID NO: 1184745 - RNA, 19 nt, Artificial Sequence
  Description of Artificial Sequence: Synthetic oligonucleotide
  Antisense strand to SEQ ID NO: 1184744
auucucaacccgaucacug

SEQ ID NO: 1184746 - RNA, 19 nt, Artificial Sequence
  Description of Artificial Sequence: Synthetic oligonucleotide
  Sense strand starting at position 1153 of SEQ ID NO: 916797
gguugagaaucaucucuca

SEQ ID NO: 1184747 - RNA, 19 nt, Artificial Sequence
  Description of Artificial Sequence: Synthetic oligonucleotide
  Antisense strand to SEQ ID NO: 1184746
ugagagaugauucucaacc

SEQ ID NO: 1184748 - RNA, 19 nt, Artificial Sequence
  Description of Artificial Sequence: Synthetic oligonucleotide
  Sense strand starting at position 1380 of SEQ ID NO: 916797
cccugagaguucuuuaacc

SEQ ID NO: 1184749 - RNA, 19 nt, Artificial Sequence
  Description of Artificial Sequence: Synthetic oligonucleotide
  Antisense strand to SEQ ID NO: 1184748
gguuaaagaacucucaggg

SEQ ID NO: 1184750 - RNA, 19 nt, Artificial Sequence
  Description of Artificial Sequence: Synthetic oligonucleotide
  Sense strand starting at position 1757 of SEQ ID NO: 916797
cgagaugacgacuagguaa

SEQ ID NO: 1184751 - RNA, 19 nt, Artificial Sequence
  Description of Artificial Sequence: Synthetic oligonucleotide
  Antisense strand to SEQ ID NO: 1184750
uuaccuagucgucaucucg

SEQ ID NO: 1184752 - RNA, 19 nt, Artificial Sequence
  Description of Artificial Sequence: Synthetic oligonucleotide
  Sense strand starting at position 2242 of SEQ ID NO: 916797
uuggguguuugaaauggga

SEQ ID NO: 1184753 - RNA, 19 nt, Artificial Sequence
  Description of Artificial Sequence: Synthetic oligonucleotide
  Antisense strand to SEQ ID NO: 1184752
ucccauuucaaacacccaa

SEQ ID NO: 1184754 - RNA, 19 nt, Artificial Sequence
  Description of Artificial Sequence: Synthetic oligonucleotide
  Sense strand starting at position 2244 of SEQ ID NO: 916797
ggguguuugaaaugggaga

SEQ ID NO: 1184755 - RNA, 19 nt, Artificial Sequence
  Description of Artificial Sequence: Synthetic oligonucleotide
  Antisense strand to SEQ ID NO: 1184754
ucucccauuucaaacaccc

SEQ ID NO: 1184756 - RNA, 19 nt, Artificial Sequence
  Description of Artificial Sequence: Synthetic oligonucleotide
  Sense strand starting at position 2245 of SEQ ID NO: 916797
gguguuugaaaugggagau

SEQ ID NO: 1184757 - RNA, 19 nt, Artificial Sequence
  Description of Artificial Sequence: Synthetic oligonucleotide
  Antisense strand to SEQ ID NO: 1184756
aucucccauuucaaacacc

SEQ ID NO: 1184758 - RNA, 19 nt, Artificial Sequence
  Description of Artificial Sequence: Synthetic oligonucleotide
  Sense strand starting at position 2246 of SEQ ID NO: 916797
guguuugaaaugggagaua

SEQ ID NO: 1184759 - RNA, 19 nt, Artificial Sequence
  Description of Artificial Sequence: Synthetic oligonucleotide
  Antisense strand to SEQ ID NO: 1184758
uaucucccauuucaaacac

SEQ ID NO: 1184760 - RNA, 19 nt, Artificial Sequence
  Description of Artificial Sequence: Synthetic oligonucleotide
  Sense strand starting at position 2259 of SEQ ID NO: 916797
gagauagcgucccugagga

SEQ ID NO: 1184761 - RNA, 19 nt, Artificial Sequence
  Description of Artificial Sequence: Synthetic oligonucleotide
  Antisense strand to SEQ ID NO: 1184760
uccucagggacgcuaucuc

SEQ ID NO: 1184762 - RNA, 19 nt, Artificial Sequence
  Description of Artificial Sequence: Synthetic oligonucleotide
  Sense strand starting at position 2653 of SEQ ID NO: 916797
agaaacugagguuguaaau

SEQ ID NO: 1184763 - RNA, 19 nt, Artificial Sequence
  Description of Artificial Sequence: Synthetic oligonucleotide
  Antisense strand to SEQ ID NO: 1184762
auuuacaaccucaguuucu

SEQ ID NO: 1184764 - RNA, 19 nt, Artificial Sequence
  Description of Artificial Sequence: Synthetic oligonucleotide
  Sense strand starting at position 2660 of SEQ ID NO: 916797
gagguuguaaauuaaggua

SEQ ID NO: 1184765 - RNA, 19 nt, Artificial Sequence
  Description of Artificial Sequence: Synthetic oligonucleotide
  Antisense strand to SEQ ID NO: 1184764
uaccuuaauuuacaaccuc

SEQ ID NO: 1184766 - RNA, 19 nt, Artificial Sequence
  Description of Artificial Sequence: Synthetic oligonucleotide
  Sense strand starting at position 2665 of SEQ ID NO: 916797
uguaaauuaagguaucgau

SEQ ID NO: 1184767 - RNA, 19 nt, Artificial Sequence
  Description of Artificial Sequence: Synthetic oligonucleotide
  Antisense strand to SEQ ID NO: 1184766
aucgauaccuuaauuuaca

SEQ ID NO: 1184768 - RNA, 19 nt, Artificial Sequence
  Description of Artificial Sequence: Synthetic oligonucleotide
  Sense strand starting at position 3094 of SEQ ID NO: 916797
accuaagacuguucuguua

SEQ ID NO: 1184769 - RNA, 19 nt, Artificial Sequence
  Description of Artificial Sequence: Synthetic oligonucleotide
  Antisense strand to SEQ ID NO: 1184768
uaacagaacagucuuaggu

SEQ ID NO: 1184770 - RNA, 19 nt, Artificial Sequence
  Description of Artificial Sequence: Synthetic oligonucleotide
  Sense strand starting at position 3140 of SEQ ID NO: 916797
caaguugugcuauauuaga

SEQ ID NO: 1184771 - RNA, 19 nt, Artificial Sequence
  Description of Artificial Sequence: Synthetic oligonucleotide
  Antisense strand to SEQ ID NO: 1184770
ucuaauauagcacaacuug

SEQ ID NO: 1184772 - RNA, 19 nt, Artificial Sequence
  Description of Artificial Sequence: Synthetic oligonucleotide
  Sense strand starting at position 3215 of SEQ ID NO: 916797
aaugcaucagaguauguau

SEQ ID NO: 1184773 - RNA, 19 nt, Artificial Sequence
  Description of Artificial Sequence: Synthetic oligonucleotide
  Antisense strand to SEQ ID NO: 1184772
auacauacucugaugcauu

SEQ ID NO: 1184774 - RNA, 19 nt, Artificial Sequence
  Description of Artificial Sequence: Synthetic oligonucleotide
  Sense strand starting at position 3217 of SEQ ID NO: 916797
ugcaucagaguauguauuu

SEQ ID NO: 1184775 - RNA, 19 nt, Artificial Sequence
  Description of Artificial Sequence: Synthetic oligonucleotide
  Antisense strand to SEQ ID NO: 1184774
aaauacauacucugaugca

SEQ ID NO: 1184776 - RNA, 19 nt, Artificial Sequence
  Description of Artificial Sequence: Synthetic oligonucleotide
  Sense strand starting at position 3226 of SEQ ID NO: 916797
guauguauuucucuugcuu

SEQ ID NO: 1184777 - RNA, 19 nt, Artificial Sequence
  Description of Artificial Sequence: Synthetic oligonucleotide
  Antisense strand to SEQ ID NO: 1184776
aagcaagagaaauacauac

SEQ ID NO: 1184778 - RNA, 19 nt, Artificial Sequence
  Description of Artificial Sequence: Synthetic oligonucleotide
  Sense strand starting at position 3244 of SEQ ID NO: 916797
ucaagugcugcucagauaa

SEQ ID NO: 1184779 - RNA, 19 nt, Artificial Sequence
  Description of Artificial Sequence: Synthetic oligonucleotide
  Antisense strand to SEQ ID NO: 1184778
uuaucugagcagcacuuga

SEQ ID NO: 1184780 - RNA, 19 nt, Artificial Sequence
  Description of Artificial Sequence: Synthetic oligonucleotide
  Sense strand starting at position 3436 of SEQ ID NO: 916797
augguugucccucauuaga

SEQ ID NO: 1184781 - RNA, 19 nt, Artificial Sequence
  Description of Artificial Sequence: Synthetic oligonucleotide
  Antisense strand to SEQ ID NO: 1184780
ucuaaugagggacaaccau

SEQ ID NO: 1184782 - RNA, 19 nt, Artificial Sequence
  Description of Artificial Sequence: Synthetic oligonucleotide
  Sense strand starting at position 3438 of SEQ ID NO: 916797
gguugucccucauuagaaa

SEQ ID NO: 1184783 - RNA, 19 nt, Artificial Sequence
  Description of Artificial Sequence: Synthetic oligonucleotide
  Antisense strand to SEQ ID NO: 1184782
uuucuaaugagggacaacc

SEQ ID NO: 1184784 - RNA, 19 nt, Artificial Sequence
  Description of Artificial Sequence: Synthetic oligonucleotide
  Sense strand starting at position 3465 of SEQ ID NO: 916797
caggucuaccuccagaguu

SEQ ID NO: 1184785 - RNA, 19 nt, Artificial Sequence
  Description of Artificial Sequence: Synthetic oligonucleotide
  Antisense strand to SEQ ID NO: 1184784
aacucuggagguagaccug

SEQ ID NO: 1184786 - RNA, 19 nt, Artificial Sequence
  Description of Artificial Sequence: Synthetic oligonucleotide
  Sense strand starting at position 3467 of SEQ ID NO: 916797
ggucuaccuccagaguuaa

SEQ ID NO: 1184787 - RNA, 19 nt, Artificial Sequence
  Description of Artificial Sequence: Synthetic oligonucleotide
  Antisense strand to SEQ ID NO: 1184786
uuaacucuggagguagacc

SEQ ID NO: 1184788 - RNA, 19 nt, Artificial Sequence
  Description of Artificial Sequence: Synthetic oligonucleotide
  Sense strand starting at position 3631 of SEQ ID NO: 916797
acaugaauggugggaaugu

SEQ ID NO: 1184789 - RNA, 19 nt, Artificial Sequence
  Description of Artificial Sequence: Synthetic oligonucleotide
  Antisense strand to SEQ ID NO: 1184788
acauucccaccauucaugu

SEQ ID NO: 1184790 - RNA, 19 nt, Artificial Sequence
  Description of Artificial Sequence: Synthetic oligonucleotide
  Sense strand starting at position 59 of SEQ ID NO: 916798
gaaucagucucugcccaga

SEQ ID NO: 1184791 - RNA, 19 nt, Artificial Sequence
  Description of Artificial Sequence: Synthetic oligonucleotide
  Antisense strand to SEQ ID NO: 1184790
ucugggcagagacugauuc

SEQ ID NO: 1184792 - RNA, 19 nt, Artificial Sequence
  Description of Artificial Sequence: Synthetic oligonucleotide
  Sense strand starting at position 61 of SEQ ID NO: 916798
aucagucucugcccagaaa

SEQ ID NO: 1184793 - RNA, 19 nt, Artificial Sequence
  Description of Artificial Sequence: Synthetic oligonucleotide
  Antisense strand to SEQ ID NO: 1184792
uuucugggcagagacugau

SEQ ID NO: 1184794 - RNA, 19 nt, Artificial Sequence
  Description of Artificial Sequence: Synthetic oligonucleotide
  Sense strand starting at position 62 of SEQ ID NO: 916798
ucagucucugcccagaaau

SEQ ID NO: 1184795 - RNA, 19 nt, Artificial Sequence
  Description of Artificial Sequence: Synthetic oligonucleotide
  Antisense strand to SEQ ID NO: 1184794
auuucugggcagagacuga

SEQ ID NO: 1184796 - RNA, 19 nt, Artificial Sequence
  Description of Artificial Sequence: Synthetic oligonucleotide
  Sense strand starting at position 64 of SEQ ID NO: 916798
agucucugcccagaaaucu

SEQ ID NO: 1184797 - RNA, 19 nt, Artificial Sequence
  Description of Artificial Sequence: Synthetic oligonucleotide
  Antisense strand to SEQ ID NO: 1184796
agauuucugggcagagacu

SEQ ID NO: 1184798 - RNA, 19 nt, Artificial Sequence
  Description of Artificial Sequence: Synthetic oligonucleotide
  Sense strand starting at position 157 of SEQ ID NO: 916798
ccaaauccucaauggugua

SEQ ID NO: 1184799 - RNA, 19 nt, Artificial Sequence
  Description of Artificial Sequence: Synthetic oligonucleotide
  Antisense strand to SEQ ID NO: 1184798
uacaccauugaggauuugg

SEQ ID NO: 1184800 - RNA, 19 nt, Artificial Sequence
  Description of Artificial Sequence: Synthetic oligonucleotide
  Sense strand starting at position 423 of SEQ ID NO: 916798
gauagcuaguuccuuaaug

SEQ ID NO: 1184801 - RNA, 19 nt, Artificial Sequence
  Description of Artificial Sequence: Synthetic oligonucleotide
  Antisense strand to SEQ ID NO: 1184800
cauuaaggaacuagcuauc

SEQ ID NO: 1184802 - RNA, 19 nt, Artificial Sequence
  Description of Artificial Sequence: Synthetic oligonucleotide
  Sense strand starting at position 433 of SEQ ID NO: 916798
uccuuaaugggccacaaau

SEQ ID NO: 1184803 - RNA, 19 nt, Artificial Sequence
  Description of Artificial Sequence: Synthetic oligonucleotide
  Antisense strand to SEQ ID NO: 1184802
auuuguggcccauuaagga

SEQ ID NO: 1184804 - RNA, 19 nt, Artificial Sequence
  Description of Artificial Sequence: Synthetic oligonucleotide
  Sense strand starting at position 784 of SEQ ID NO: 916798
cuuguaauaugguuacuua

SEQ ID NO: 1184805 - RNA, 19 nt, Artificial Sequence
  Description of Artificial Sequence: Synthetic oligonucleotide
  Antisense strand to SEQ ID NO: 1184804
uaaguaaccauauuacaag

SEQ ID NO: 1184806 - RNA, 19 nt, Artificial Sequence
  Description of Artificial Sequence: Synthetic oligonucleotide
  Sense strand starting at position 785 of SEQ ID NO: 916798
uuguaauaugguuacuuac

SEQ ID NO: 1184807 - RNA, 19 nt, Artificial Sequence
  Description of Artificial Sequence: Synthetic oligonucleotide
  Antisense strand to SEQ ID NO: 1184806
guaaguaaccauauuacaa

SEQ ID NO: 1184808 - RNA, 19 nt, Artificial Sequence
  Description of Artificial Sequence: Synthetic oligonucleotide
  Sense strand starting at position 787 of SEQ ID NO: 916798
guaauaugguuacuuacaa

SEQ ID NO: 1184809 - RNA, 19 nt, Artificial Sequence
  Description of Artificial Sequence: Synthetic oligonucleotide
  Antisense strand to SEQ ID NO: 1184808
uuguaaguaaccauauuac

SEQ ID NO: 1184810 - RNA, 19 nt, Artificial Sequence
  Description of Artificial Sequence: Synthetic oligonucleotide
  Sense strand starting at position 989 of SEQ ID NO: 916798
uggagacagcguuaaucua

SEQ ID NO: 1184811 - RNA, 19 nt, Artificial Sequence
  Description of Artificial Sequence: Synthetic oligonucleotide
  Antisense strand to SEQ ID NO: 1184810
uagauuaacgcugucucca

SEQ ID NO: 1184812 - RNA, 19 nt, Artificial Sequence
  Description of Artificial Sequence: Synthetic oligonucleotide
  Sense strand starting at position 1040 of SEQ ID NO: 916798
acaccucugcacugagauu

SEQ ID NO: 1184813 - RNA, 19 nt, Artificial Sequence
  Description of Artificial Sequence: Synthetic oligonucleotide
  Antisense strand to SEQ ID NO: 1184812
aaucucagugcagaggugu

SEQ ID NO: 1184814 - RNA, 19 nt, Artificial Sequence
  Description of Artificial Sequence: Synthetic oligonucleotide
  Sense strand starting at position 1046 of SEQ ID NO: 916798
cugcacugagauuaacgaa

SEQ ID NO: 1184815 - RNA, 19 nt, Artificial Sequence
  Description of Artificial Sequence: Synthetic oligonucleotide
  Antisense strand to SEQ ID NO: 1184814
uucguuaaucucagugcag

SEQ ID NO: 1184816 - RNA, 19 nt, Artificial Sequence
  Description of Artificial Sequence: Synthetic oligonucleotide
  Sense strand starting at position 1062 of SEQ ID NO: 916798
gaaaccaucuaggucugaa

SEQ ID NO: 1184817 - RNA, 19 nt, Artificial Sequence
  Description of Artificial Sequence: Synthetic oligonucleotide
  Antisense strand to SEQ ID NO: 1184816
uucagaccuagaugguuuc

SEQ ID NO: 1184818 - RNA, 19 nt, Artificial Sequence
  Description of Artificial Sequence: Synthetic oligonucleotide
  Sense strand starting at position 1065 of SEQ ID NO: 916798
accaucuaggucugaaagu

SEQ ID NO: 1184819 - RNA, 19 nt, Artificial Sequence
  Description of Artificial Sequence: Synthetic oligonucleotide
  Antisense strand to SEQ ID NO: 1184818
acuuucagaccuagauggu

SEQ ID NO: 1184820 - RNA, 19 nt, Artificial Sequence
  Description of Artificial Sequence: Synthetic oligonucleotide
  Sense strand starting at position 1074 of SEQ ID NO: 916798
gucugaaaguuaucaucac

SEQ ID NO: 1184821 - RNA, 19 nt, Artificial Sequence
  Description of Artificial Sequence: Synthetic oligonucleotide
  Antisense strand to SEQ ID NO: 1184820
gugaugauaacuuucagac

SEQ ID NO: 1184822 - RNA, 19 nt, Artificial Sequence
  Description of Artificial Sequence: Synthetic oligonucleotide
  Sense strand starting at position 1113 of SEQ ID NO: 916798
guuugaguucggcaaauga

SEQ ID NO: 1184823 - RNA, 19 nt, Artificial Sequence
  Description of Artificial Sequence: Synthetic oligonucleotide
  Antisense strand to SEQ ID NO: 1184822
ucauuugccgaacucaaac

SEQ ID NO: 1184824 - RNA, 19 nt, Artificial Sequence
  Description of Artificial Sequence: Synthetic oligonucleotide
  Sense strand starting at position 1179 of SEQ ID NO: 916798
cagugaucggguugagaau

SEQ ID NO: 1184825 - RNA, 19 nt, Artificial Sequence
  Description of Artificial Sequence: Synthetic oligonucleotide
  Antisense strand to SEQ ID NO: 1184824
auucucaacccgaucacug

SEQ ID NO: 1184826 - RNA, 19 nt, Artificial Sequence
  Description of Artificial Sequence: Synthetic oligonucleotide
  Sense strand starting at position 1188 of SEQ ID NO: 916798
gguugagaaucaucucuca

SEQ ID NO: 1184827 - RNA, 19 nt, Artificial Sequence
  Description of Artificial Sequence: Synthetic oligonucleotide
  Antisense strand to SEQ ID NO: 1184826
ugagagaugauucucaacc

SEQ ID NO: 1184828 - RNA, 19 nt, Artificial Sequence
  Description of Artificial Sequence: Synthetic oligonucleotide
  Sense strand starting at position 1415 of SEQ ID NO: 916798
cccugagaguucuuuaacc

SEQ ID NO: 1184829 - RNA, 19 nt, Artificial Sequence
  Description of Artificial Sequence: Synthetic oligonucleotide
  Antisense strand to SEQ ID NO: 1184828
gguuaaagaacucucaggg

SEQ ID NO: 1184830 - RNA, 19 nt, Artificial Sequence
  Description of Artificial Sequence: Synthetic oligonucleotide
  Sense strand starting at position 1792 of SEQ ID NO: 916798
cgagaugacgacuagguaa

SEQ ID NO: 1184831 - RNA, 19 nt, Artificial Sequence
  Description of Artificial Sequence: Synthetic oligonucleotide
  Antisense strand to SEQ ID NO: 1184830
uuaccuagucgucaucucg

SEQ ID NO: 1184832 - RNA, 19 nt, Artificial Sequence
  Description of Artificial Sequence: Synthetic oligonucleotide
  Sense strand starting at position 2277 of SEQ ID NO: 916798
uuggguguuugaaauggga

SEQ ID NO: 1184833 - RNA, 19 nt, Artificial Sequence
  Description of Artificial Sequence: Synthetic oligonucleotide
  Antisense strand to SEQ ID NO: 1184832
ucccauuucaaacacccaa

SEQ ID NO: 1184834 - RNA, 19 nt, Artificial Sequence
  Description of Artificial Sequence: Synthetic oligonucleotide
  Sense strand starting at position 2279 of SEQ ID NO: 916798
ggguguuugaaaugggaga

SEQ ID NO: 1184835 - RNA, 19 nt, Artificial Sequence
  Description of Artificial Sequence: Synthetic oligonucleotide
  Antisense strand to SEQ ID NO: 1184834
ucucccauuucaaacaccc

SEQ ID NO: 1184836 - RNA, 19 nt, Artificial Sequence
  Description of Artificial Sequence: Synthetic oligonucleotide
  Sense strand starting at position 2280 of SEQ ID NO: 916798
gguguuugaaaugggagau

SEQ ID NO: 1184837 - RNA, 19 nt, Artificial Sequence
  Description of Artificial Sequence: Synthetic oligonucleotide
  Antisense strand to SEQ ID NO: 1184836
aucucccauuucaaacacc

SEQ ID NO: 1184838 - RNA, 19 nt, Artificial Sequence
  Description of Artificial Sequence: Synthetic oligonucleotide
  Sense strand starting at position 2281 of SEQ ID NO: 916798
guguuugaaaugggagaua

SEQ ID NO: 1184839 - RNA, 19 nt, Artificial Sequence
  Description of Artificial Sequence: Synthetic oligonucleotide
  Antisense strand to SEQ ID NO: 1184838
uaucucccauuucaaacac

SEQ ID NO: 1184840 - RNA, 19 nt, Artificial Sequence
  Description of Artificial Sequence: Synthetic oligonucleotide
  Sense strand starting at position 2294 of SEQ ID NO: 916798
gagauagcgucccugagga

SEQ ID NO: 1184841 - RNA, 19 nt, Artificial Sequence
  Description of Artificial Sequence: Synthetic oligonucleotide
  Antisense strand to SEQ ID NO: 1184840
uccucagggacgcuaucuc

SEQ ID NO: 1184842 - RNA, 19 nt, Artificial Sequence
  Description of Artificial Sequence: Synthetic oligonucleotide
  Sense strand starting at position 2688 of SEQ ID NO: 916798
agaaacugagguuguaaau

SEQ ID NO: 1184843 - RNA, 19 nt, Artificial Sequence
  Description of Artificial Sequence: Synthetic oligonucleotide
  Antisense strand to SEQ ID NO: 1184842
auuuacaaccucaguuucu

SEQ ID NO: 1184844 - RNA, 19 nt, Artificial Sequence
  Description of Artificial Sequence: Synthetic oligonucleotide
  Sense strand starting at position 2695 of SEQ ID NO: 916798
gagguuguaaauuaaggua

SEQ ID NO: 1184845 - RNA, 19 nt, Artificial Sequence
  Description of Artificial Sequence: Synthetic oligonucleotide
  Antisense strand to SEQ ID NO: 1184844
uaccuuaauuuacaaccuc

SEQ ID NO: 1184846 - RNA, 19 nt, Artificial Sequence
  Description of Artificial Sequence: Synthetic oligonucleotide
  Sense strand starting at position 2700 of SEQ ID NO: 916798
uguaaauuaagguaucgau

SEQ ID NO: 1184847 - RNA, 19 nt, Artificial Sequence
  Description of Artificial Sequence: Synthetic oligonucleotide
  Antisense strand to SEQ ID NO: 1184846
aucgauaccuuaauuuaca

SEQ ID NO: 1184848 - RNA, 19 nt, Artificial Sequence
  Description of Artificial Sequence: Synthetic oligonucleotide
  Sense strand starting at position 3129 of SEQ ID NO: 916798
accuaagacuguucuguua

SEQ ID NO: 1184849 - RNA, 19 nt, Artificial Sequence
  Description of Artificial Sequence: Synthetic oligonucleotide
  Antisense strand to SEQ ID NO: 1184848
uaacagaacagucuuaggu

SEQ ID NO: 1184850 - RNA, 19 nt, Artificial Sequence
  Description of Artificial Sequence: Synthetic oligonucleotide
  Sense strand starting at position 3175 of SEQ ID NO: 916798
caaguugugcuauauuaga

SEQ ID NO: 1184851 - RNA, 19 nt, Artificial Sequence
  Description of Artificial Sequence: Synthetic oligonucleotide
  Antisense strand to SEQ ID NO: 1184850
ucuaauauagcacaacuug

SEQ ID NO: 1184852 - RNA, 19 nt, Artificial Sequence
  Description of Artificial Sequence: Synthetic oligonucleotide
  Sense strand starting at position 3250 of SEQ ID NO: 916798
aaugcaucagaguauguau

SEQ ID NO: 1184853 - RNA, 19 nt, Artificial Sequence
  Description of Artificial Sequence: Synthetic oligonucleotide
  Antisense strand to SEQ ID NO: 1184852
auacauacucugaugcauu

SEQ ID NO: 1184854 - RNA, 19 nt, Artificial Sequence
  Description of Artificial Sequence: Synthetic oligonucleotide
  Sense strand starting at position 3252 of SEQ ID NO: 916798
ugcaucagaguauguauuu

SEQ ID NO: 1184855 - RNA, 19 nt, Artificial Sequence
  Description of Artificial Sequence: Synthetic oligonucleotide
  Antisense strand to SEQ ID NO: 1184854
aaauacauacucugaugca

SEQ ID NO: 1184856 - RNA, 19 nt, Artificial Sequence
  Description of Artificial Sequence: Synthetic oligonucleotide
  Sense strand starting at position 3261 of SEQ ID NO: 916798
guauguauuucucuugcuu

SEQ ID NO: 1184857 - RNA, 19 nt, Artificial Sequence
  Description of Artificial Sequence: Synthetic oligonucleotide
  Antisense strand to SEQ ID NO: 1184856
aagcaagagaaauacauac

SEQ ID NO: 1184858 - RNA, 19 nt, Artificial Sequence
  Description of Artificial Sequence: Synthetic oligonucleotide
  Sense strand starting at position 3279 of SEQ ID NO: 916798
ucaagugcugcucagauaa

SEQ ID NO: 1184859 - RNA, 19 nt, Artificial Sequence
  Description of Artificial Sequence: Synthetic oligonucleotide
  Antisense strand to SEQ ID NO: 1184858
uuaucugagcagcacuuga

SEQ ID NO: 1184860 - RNA, 19 nt, Artificial Sequence
  Description of Artificial Sequence: Synthetic oligonucleotide
  Sense strand starting at position 3471 of SEQ ID NO: 916798
augguugucccucauuaga

SEQ ID NO: 1184861 - RNA, 19 nt, Artificial Sequence
  Description of Artificial Sequence: Synthetic oligonucleotide
  Antisense strand to SEQ ID NO: 1184860
ucuaaugagggacaaccau

SEQ ID NO: 1184862 - RNA, 19 nt, Artificial Sequence
  Description of Artificial Sequence: Synthetic oligonucleotide
  Sense strand starting at position 3473 of SEQ ID NO: 916798
gguugucccucauuagaaa

SEQ ID NO: 1184863 - RNA, 19 nt, Artificial Sequence
  Description of Artificial Sequence: Synthetic oligonucleotide
  Antisense strand to SEQ ID NO: 1184862
uuucuaaugagggacaacc

SEQ ID NO: 1184864 - RNA, 19 nt, Artificial Sequence
  Description of Artificial Sequence: Synthetic oligonucleotide
  Sense strand starting at position 3500 of SEQ ID NO: 916798
caggucuaccuccagaguu

SEQ ID NO: 1184865 - RNA, 19 nt, Artificial Sequence
  Description of Artificial Sequence: Synthetic oligonucleotide
  Antisense strand to SEQ ID NO: 1184864
aacucuggagguagaccug

SEQ ID NO: 1184866 - RNA, 19 nt, Artificial Sequence
  Description of Artificial Sequence: Synthetic oligonucleotide
  Sense strand starting at position 3502 of SEQ ID NO: 916798
ggucuaccuccagaguuaa

SEQ ID NO: 1184867 - RNA, 19 nt, Artificial Sequence
  Description of Artificial Sequence: Synthetic oligonucleotide
  Antisense strand to SEQ ID NO: 1184866
uuaacucuggagguagacc

SEQ ID NO: 1184868 - RNA, 19 nt, Artificial Sequence
  Description of Artificial Sequence: Synthetic oligonucleotide
  Sense strand starting at position 3666 of SEQ ID NO: 916798
acaugaauggugggaaugu

SEQ ID NO: 1184869 - RNA, 19 nt, Artificial Sequence
  Description of Artificial Sequence: Synthetic oligonucleotide
  Antisense strand to SEQ ID NO: 1184868
acauucccaccauucaugu

SEQ ID NO: 1184870 - RNA, 19 nt, Artificial Sequence
  Description of Artificial Sequence: Synthetic oligonucleotide
  Sense strand starting at position 393 of SEQ ID NO: 916799
gauuauuuguagcaacaga

SEQ ID NO: 1184871 - RNA, 19 nt, Artificial Sequence
  Description of Artificial Sequence: Synthetic oligonucleotide
  Antisense strand to SEQ ID NO: 1184870
ucuguugcuacaaauaauc

SEQ ID NO: 1184872 - RNA, 19 nt, Artificial Sequence
  Description of Artificial Sequence: Synthetic oligonucleotide
  Sense strand starting at position 559 of SEQ ID NO: 916799
guuggaguucaguggugga

SEQ ID NO: 1184873 - RNA, 19 nt, Artificial Sequence
  Description of Artificial Sequence: Synthetic oligonucleotide
  Antisense strand to SEQ ID NO: 1184872
uccaccacugaacuccaac

SEQ ID NO: 1184874 - RNA, 19 nt, Artificial Sequence
  Description of Artificial Sequence: Synthetic oligonucleotide
  Sense strand starting at position 813 of SEQ ID NO: 916799
gcuacagucagagguuuga

SEQ ID NO: 1184875 - RNA, 19 nt, Artificial Sequence
  Description of Artificial Sequence: Synthetic oligonucleotide
  Antisense strand to SEQ ID NO: 1184874
ucaaaccucugacuguagc

SEQ ID NO: 1184876 - RNA, 19 nt, Artificial Sequence
  Description of Artificial Sequence: Synthetic oligonucleotide
  Sense strand starting at position 1060 of SEQ ID NO: 916799
aauuuagaguacugagagu

SEQ ID NO: 1184877 - RNA, 19 nt, Artificial Sequence
  Description of Artificial Sequence: Synthetic oligonucleotide
  Antisense strand to SEQ ID NO: 1184876
acucucaguacucuaaauu

SEQ ID NO: 1184878 - RNA, 19 nt, Artificial Sequence
  Description of Artificial Sequence: Synthetic oligonucleotide
  Sense strand starting at position 1150 of SEQ ID NO: 916799
ggcuuaacauugcaucacu

SEQ ID NO: 1184879 - RNA, 19 nt, Artificial Sequence
  Description of Artificial Sequence: Synthetic oligonucleotide
  Antisense strand to SEQ ID NO: 1184878
agugaugcaauguuaagcc

SEQ ID NO: 1184880 - RNA, 19 nt, Artificial Sequence
  Description of Artificial Sequence: Synthetic oligonucleotide
  Sense strand starting at position 1243 of SEQ ID NO: 916799
gcccuauugucagacucua

SEQ ID NO: 1184881 - RNA, 19 nt, Artificial Sequence
  Description of Artificial Sequence: Synthetic oligonucleotide
  Antisense strand to SEQ ID NO: 1184880
uagagucugacaauagggc

SEQ ID NO: 1184882 - RNA, 19 nt, Artificial Sequence
  Description of Artificial Sequence: Synthetic oligonucleotide
  Sense strand starting at position 1498 of SEQ ID NO: 916799
gugugugaacccugccaga

SEQ ID NO: 1184883 - RNA, 19 nt, Artificial Sequence
  Description of Artificial Sequence: Synthetic oligonucleotide
  Antisense strand to SEQ ID NO: 1184882
ucuggcaggguucacacac

SEQ ID NO: 1184884 - RNA, 19 nt, Artificial Sequence
  Description of Artificial Sequence: Synthetic oligonucleotide
  Sense strand starting at position 1544 of SEQ ID NO: 916799
augugaagaaugugagauu

SEQ ID NO: 1184885 - RNA, 19 nt, Artificial Sequence
  Description of Artificial Sequence: Synthetic oligonucleotide
  Antisense strand to SEQ ID NO: 1184884
aaucucacauucuucacau

SEQ ID NO: 1184886 - RNA, 19 nt, Artificial Sequence
  Description of Artificial Sequence: Synthetic oligonucleotide
  Sense strand starting at position 1547 of SEQ ID NO: 916799
ugaagaaugugagauuccu

SEQ ID NO: 1184887 - RNA, 19 nt, Artificial Sequence
  Description of Artificial Sequence: Synthetic oligonucleotide
  Antisense strand to SEQ ID NO: 1184886
aggaaucucacauucuuca

SEQ ID NO: 1184888 - RNA, 19 nt, Artificial Sequence
  Description of Artificial Sequence: Synthetic oligonucleotide
  Sense strand starting at position 1737 of SEQ ID NO: 916799
cgucaaucauugcccauuu

SEQ ID NO: 1184889 - RNA, 19 nt, Artificial Sequence
  Description of Artificial Sequence: Synthetic oligonucleotide
  Antisense strand to SEQ ID NO: 1184888
aaaugggcaaugauugacg

SEQ ID NO: 1184890 - RNA, 19 nt, Artificial Sequence
  Description of Artificial Sequence: Synthetic oligonucleotide
  Sense strand starting at position 2258 of SEQ ID NO: 916799
ggcggaagcucgucaccaa

SEQ ID NO: 1184891 - RNA, 19 nt, Artificial Sequence
  Description of Artificial Sequence: Synthetic oligonucleotide
  Antisense strand to SEQ ID NO: 1184890
uuggugacgagcuuccgcc

SEQ ID NO: 1184892 - RNA, 19 nt, Artificial Sequence
  Description of Artificial Sequence: Synthetic oligonucleotide
  Sense strand starting at position 2259 of SEQ ID NO: 916799
gcggaagcucgucaccaaa

SEQ ID NO: 1184893 - RNA, 19 nt, Artificial Sequence
  Description of Artificial Sequence: Synthetic oligonucleotide
  Antisense strand to SEQ ID NO: 1184892
uuuggugacgagcuuccgc

SEQ ID NO: 1184894 - RNA, 19 nt, Artificial Sequence
  Description of Artificial Sequence: Synthetic oligonucleotide
  Sense strand starting at position 2368 of SEQ ID NO: 916799
caggaagucuagucuagag

SEQ ID NO: 1184895 - RNA, 19 nt, Artificial Sequence
  Description of Artificial Sequence: Synthetic oligonucleotide
  Antisense strand to SEQ ID NO: 1184894
cucuagacuagacuuccug

SEQ ID NO: 1184896 - RNA, 19 nt, Artificial Sequence
  Description of Artificial Sequence: Synthetic oligonucleotide
  Sense strand starting at position 2370 of SEQ ID NO: 916799
ggaagucuagucuagaguc

SEQ ID NO: 1184897 - RNA, 19 nt, Artificial Sequence
  Description of Artificial Sequence: Synthetic oligonucleotide
  Antisense strand to SEQ ID NO: 1184896
gacucuagacuagacuucc

SEQ ID NO: 1184898 - RNA, 19 nt, Artificial Sequence
  Description of Artificial Sequence: Synthetic oligonucleotide
  Sense strand starting at position 2372 of SEQ ID NO: 916799
aagucuagucuagagucua

SEQ ID NO: 1184899 - RNA, 19 nt, Artificial Sequence
  Description of Artificial Sequence: Synthetic oligonucleotide
  Antisense strand to SEQ ID NO: 1184898
uagacucuagacuagacuu

SEQ ID NO: 1184900 - RNA, 19 nt, Artificial Sequence
  Description of Artificial Sequence: Synthetic oligonucleotide
  Sense strand starting at position 2426 of SEQ ID NO: 916799
gggagaacucuauguucuu

SEQ ID NO: 1184901 - RNA, 19 nt, Artificial Sequence
  Description of Artificial Sequence: Synthetic oligonucleotide
  Antisense strand to SEQ ID NO: 1184900
aagaacauagaguucuccc

SEQ ID NO: 1184902 - RNA, 19 nt, Artificial Sequence
  Description of Artificial Sequence: Synthetic oligonucleotide
  Sense strand starting at position 2427 of SEQ ID NO: 916799
ggagaacucuauguucuuc

SEQ ID NO: 1184903 - RNA, 19 nt, Artificial Sequence
  Description of Artificial Sequence: Synthetic oligonucleotide
  Antisense strand to SEQ ID NO: 1184902
gaagaacauagaguucucc

SEQ ID NO: 1184904 - RNA, 19 nt, Artificial Sequence
  Description of Artificial Sequence: Synthetic oligonucleotide
  Sense strand starting at position 2498 of SEQ ID NO: 916799
ggugacuugugucuuagag

SEQ ID NO: 1184905 - RNA, 19 nt, Artificial Sequence
  Description of Artificial Sequence: Synthetic oligonucleotide
  Antisense strand to SEQ ID NO: 1184904
cucuaagacacaagucacc

SEQ ID NO: 1184906 - RNA, 19 nt, Artificial Sequence
  Description of Artificial Sequence: Synthetic oligonucleotide
  Sense strand starting at position 2502 of SEQ ID NO: 916799
acuugugucuuagagcuga

SEQ ID NO: 1184907 - RNA, 19 nt, Artificial Sequence
  Description of Artificial Sequence: Synthetic oligonucleotide
  Antisense strand to SEQ ID NO: 1184906
ucagcucuaagacacaagu

SEQ ID NO: 1184908 - RNA, 19 nt, Artificial Sequence
  Description of Artificial Sequence: Synthetic oligonucleotide
  Sense strand starting at position 2506 of SEQ ID NO: 916799
gugucuuagagcugacgca

SEQ ID NO: 1184909 - RNA, 19 nt, Artificial Sequence
  Description of Artificial Sequence: Synthetic oligonucleotide
  Antisense strand to SEQ ID NO: 1184908
ugcgucagcucuaagacac

SEQ ID NO: 1184910 - RNA, 19 nt, Artificial Sequence
  Description of Artificial Sequence: Synthetic oligonucleotide
  Sense strand starting at position 2637 of SEQ ID NO: 916799
ugacuccugucaugggaau

SEQ ID NO: 1184911 - RNA, 19 nt, Artificial Sequence
  Description of Artificial Sequence: Synthetic oligonucleotide
  Antisense strand to SEQ ID NO: 1184910
auucccaugacaggaguca

SEQ ID NO: 1184912 - RNA, 19 nt, Artificial Sequence
  Description of Artificial Sequence: Synthetic oligonucleotide
  Sense strand starting at position 2643 of SEQ ID NO: 916799
cugucaugggaauggauau

SEQ ID NO: 1184913 - RNA, 19 nt, Artificial Sequence
  Description of Artificial Sequence: Synthetic oligonucleotide
  Antisense strand to SEQ ID NO: 1184912
auauccauucccaugacag

SEQ ID NO: 1184914 - RNA, 19 nt, Artificial Sequence
  Description of Artificial Sequence: Synthetic oligonucleotide
  Sense strand starting at position 2644 of SEQ ID NO: 916799
ugucaugggaauggauauu

SEQ ID NO: 1184915 - RNA, 19 nt, Artificial Sequence
  Description of Artificial Sequence: Synthetic oligonucleotide
  Antisense strand to SEQ ID NO: 1184914
aauauccauucccaugaca

SEQ ID NO: 1184916 - RNA, 19 nt, Artificial Sequence
  Description of Artificial Sequence: Synthetic oligonucleotide
  Sense strand starting at position 2650 of SEQ ID NO: 916799
gggaauggauauugcaguu

SEQ ID NO: 1184917 - RNA, 19 nt, Artificial Sequence
  Description of Artificial Sequence: Synthetic oligonucleotide
  Antisense strand to SEQ ID NO: 1184916
aacugcaauauccauuccc

SEQ ID NO: 1184918 - RNA, 19 nt, Artificial Sequence
  Description of Artificial Sequence: Synthetic oligonucleotide
  Sense strand starting at position 2695 of SEQ ID NO: 916799
gagggagucugaccgcaaa

SEQ ID NO: 1184919 - RNA, 19 nt, Artificial Sequence
  Description of Artificial Sequence: Synthetic oligonucleotide
  Antisense strand to SEQ ID NO: 1184918
uuugcggucagacucccuc

SEQ ID NO: 1184920 - RNA, 19 nt, Artificial Sequence
  Description of Artificial Sequence: Synthetic oligonucleotide
  Sense strand starting at position 2797 of SEQ ID NO: 916799
uguggaguucccugaaaca

SEQ ID NO: 1184921 - RNA, 19 nt, Artificial Sequence
  Description of Artificial Sequence: Synthetic oligonucleotide
  Antisense strand to SEQ ID NO: 1184920
uguuucagggaacuccaca

SEQ ID NO: 1184922 - RNA, 19 nt, Artificial Sequence
  Description of Artificial Sequence: Synthetic oligonucleotide
  Sense strand starting at position 2861 of SEQ ID NO: 916799
ggguuugauuuccuuagcu

SEQ ID NO: 1184923 - RNA, 19 nt, Artificial Sequence
  Description of Artificial Sequence: Synthetic oligonucleotide
  Antisense strand to SEQ ID NO: 1184922
agcuaaggaaaucaaaccc

SEQ ID NO: 1184924 - RNA, 19 nt, Artificial Sequence
  Description of Artificial Sequence: Synthetic oligonucleotide
  Sense strand starting at position 2899 of SEQ ID NO: 916799
ggaugugggcgguagagaa

SEQ ID NO: 1184925 - RNA, 19 nt, Artificial Sequence
  Description of Artificial Sequence: Synthetic oligonucleotide
  Antisense strand to SEQ ID NO: 1184924
uucucuaccgcccacaucc

SEQ ID NO: 1184926 - RNA, 19 nt, Artificial Sequence
  Description of Artificial Sequence: Synthetic oligonucleotide
  Sense strand starting at position 2952 of SEQ ID NO: 916799
agagcuccgugagcagaua

SEQ ID NO: 1184927 - RNA, 19 nt, Artificial Sequence
  Description of Artificial Sequence: Synthetic oligonucleotide
  Antisense strand to SEQ ID NO: 1184926
uaucugcucacggagcucu

SEQ ID NO: 1184928 - RNA, 19 nt, Artificial Sequence
  Description of Artificial Sequence: Synthetic oligonucleotide
  Sense strand starting at position 3012 of SEQ ID NO: 916799
uuccuagacuaaucuggua

SEQ ID NO: 1184929 - RNA, 19 nt, Artificial Sequence
  Description of Artificial Sequence: Synthetic oligonucleotide
  Antisense strand to SEQ ID NO: 1184928
uaccagauuagucuaggaa

SEQ ID NO: 1184930 - RNA, 19 nt, Artificial Sequence
  Description of Artificial Sequence: Synthetic oligonucleotide
  Sense strand starting at position 3015 of SEQ ID NO: 916799
cuagacuaaucugguauua

SEQ ID NO: 1184931 - RNA, 19 nt, Artificial Sequence
  Description of Artificial Sequence: Synthetic oligonucleotide
  Antisense strand to SEQ ID NO: 1184930
uaauaccagauuagucuag

SEQ ID NO: 1184932 - RNA, 19 nt, Artificial Sequence
  Description of Artificial Sequence: Synthetic oligonucleotide
  Sense strand starting at position 3017 of SEQ ID NO: 916799
agacuaaucugguauuaaa

SEQ ID NO: 1184933 - RNA, 19 nt, Artificial Sequence
  Description of Artificial Sequence: Synthetic oligonucleotide
  Antisense strand to SEQ ID NO: 1184932
uuuaauaccagauuagucu

SEQ ID NO: 1184934 - RNA, 19 nt, Artificial Sequence
  Description of Artificial Sequence: Synthetic oligonucleotide
  Sense strand starting at position 3027 of SEQ ID NO: 916799
gguauuaaauaguauggua

SEQ ID NO: 1184935 - RNA, 19 nt, Artificial Sequence
  Description of Artificial Sequence: Synthetic oligonucleotide
  Antisense strand to SEQ ID NO: 1184934
uaccauacuauuuaauacc

SEQ ID NO: 1184936 - RNA, 19 nt, Artificial Sequence
  Description of Artificial Sequence: Synthetic oligonucleotide
  Sense strand starting at position 3041 of SEQ ID NO: 916799
ugguauuuauuguggacau

SEQ ID NO: 1184937 - RNA, 19 nt, Artificial Sequence
  Description of Artificial Sequence: Synthetic oligonucleotide
  Antisense strand to SEQ ID NO: 1184936
auguccacaauaaauacca

SEQ ID NO: 1184938 - RNA, 19 nt, Artificial Sequence
  Description of Artificial Sequence: Synthetic oligonucleotide
  Sense strand starting at position 3042 of SEQ ID NO: 916799
gguauuuauuguggacauu

SEQ ID NO: 1184939 - RNA, 19 nt, Artificial Sequence
  Description of Artificial Sequence: Synthetic oligonucleotide
  Antisense strand to SEQ ID NO: 1184938
aauguccacaauaaauacc

SEQ ID NO: 1184940 - RNA, 19 nt, Artificial Sequence
  Description of Artificial Sequence: Synthetic oligonucleotide
  Sense strand starting at position 3052 of SEQ ID NO: 916799
guggacauuggcuaagcaa

SEQ ID NO: 1184941 - RNA, 19 nt, Artificial Sequence
  Description of Artificial Sequence: Synthetic oligonucleotide
  Antisense strand to SEQ ID NO: 1184940
uugcuuagccaauguccac

SEQ ID NO: 1184942 - RNA, 19 nt, Artificial Sequence
  Description of Artificial Sequence: Synthetic oligonucleotide
  Sense strand starting at position 3218 of SEQ ID NO: 916799
gcgggacucugagauaagu

SEQ ID NO: 1184943 - RNA, 19 nt, Artificial Sequence
  Description of Artificial Sequence: Synthetic oligonucleotide
  Antisense strand to SEQ ID NO: 1184942
acuuaucucagagucccgc

SEQ ID NO: 1184944 - RNA, 19 nt, Artificial Sequence
  Description of Artificial Sequence: Synthetic oligonucleotide
  Sense strand starting at position 3227 of SEQ ID NO: 916799
ugagauaaguaagauaaga

SEQ ID NO: 1184945 - RNA, 19 nt, Artificial Sequence
  Description of Artificial Sequence: Synthetic oligonucleotide
  Antisense strand to SEQ ID NO: 1184944
ucuuaucuuacuuaucuca

SEQ ID NO: 1184946 - RNA, 19 nt, Artificial Sequence
  Description of Artificial Sequence: Synthetic oligonucleotide
  Sense strand starting at position 3963 of SEQ ID NO: 916799
uggguagugcauuaaagau

SEQ ID NO: 1184947 - RNA, 19 nt, Artificial Sequence
  Description of Artificial Sequence: Synthetic oligonucleotide
  Antisense strand to SEQ ID NO: 1184946
aucuuuaaugcacuaccca

SEQ ID NO: 1184948 - RNA, 19 nt, Artificial Sequence
  Description of Artificial Sequence: Synthetic oligonucleotide
  Sense strand starting at position 3969 of SEQ ID NO: 916799
gugcauuaaagaugagaac

SEQ ID NO: 1184949 - RNA, 19 nt, Artificial Sequence
  Description of Artificial Sequence: Synthetic oligonucleotide
  Antisense strand to SEQ ID NO: 1184948
guucucaucuuuaaugcac

SEQ ID NO: 1184950 - RNA, 19 nt, Artificial Sequence
  Description of Artificial Sequence: Synthetic oligonucleotide
  Sense strand starting at position 163 of SEQ ID NO: 916800
gauuauuuguagcaacaga

SEQ ID NO: 1184951 - RNA, 19 nt, Artificial Sequence
  Description of Artificial Sequence: Synthetic oligonucleotide
  Antisense strand to SEQ ID NO: 1184950
ucuguugcuacaaauaauc

SEQ ID NO: 1184952 - RNA, 19 nt, Artificial Sequence
  Description of Artificial Sequence: Synthetic oligonucleotide
  Sense strand starting at position 329 of SEQ ID NO: 916800
guuggaguucaguggugga

SEQ ID NO: 1184953 - RNA, 19 nt, Artificial Sequence
  Description of Artificial Sequence: Synthetic oligonucleotide
  Antisense strand to SEQ ID NO: 1184952
uccaccacugaacuccaac

SEQ ID NO: 1184954 - RNA, 19 nt, Artificial Sequence
  Description of Artificial Sequence: Synthetic oligonucleotide
  Sense strand starting at position 583 of SEQ ID NO: 916800
gcuacagucagagguuuga

SEQ ID NO: 1184955 - RNA, 19 nt, Artificial Sequence
  Description of Artificial Sequence: Synthetic oligonucleotide
  Antisense strand to SEQ ID NO: 1184954
ucaaaccucugacuguagc

SEQ ID NO: 1184956 - RNA, 19 nt, Artificial Sequence
  Description of Artificial Sequence: Synthetic oligonucleotide
  Sense strand starting at position 830 of SEQ ID NO: 916800
aauuuagaguacugagagu

SEQ ID NO: 1184957 - RNA, 19 nt, Artificial Sequence
  Description of Artificial Sequence: Synthetic oligonucleotide
  Antisense strand to SEQ ID NO: 1184956
acucucaguacucuaaauu

SEQ ID NO: 1184958 - RNA, 19 nt, Artificial Sequence
  Description of Artificial Sequence: Synthetic oligonucleotide
  Sense strand starting at position 1268 of SEQ ID NO: 916800
gugugugaacccugccaga

SEQ ID NO: 1184959 - RNA, 19 nt, Artificial Sequence
  Description of Artificial Sequence: Synthetic oligonucleotide
  Antisense strand to SEQ ID NO: 1184958
ucuggcaggguucacacac

SEQ ID NO: 1184960 - RNA, 19 nt, Artificial Sequence
  Description of Artificial Sequence: Synthetic oligonucleotide
  Sense strand starting at position 1314 of SEQ ID NO: 916800
augugaagaaugugagauu

SEQ ID NO: 1184961 - RNA, 19 nt, Artificial Sequence
  Description of Artificial Sequence: Synthetic oligonucleotide
  Antisense strand to SEQ ID NO: 1184960
aaucucacauucuucacau

SEQ ID NO: 1184962 - RNA, 19 nt, Artificial Sequence
  Description of Artificial Sequence: Synthetic oligonucleotide
  Sense strand starting at position 1317 of SEQ ID NO: 916800
ugaagaaugugagauuccu

SEQ ID NO: 1184963 - RNA, 19 nt, Artificial Sequence
  Description of Artificial Sequence: Synthetic oligonucleotide
  Antisense strand to SEQ ID NO: 1184962
aggaaucucacauucuuca

SEQ ID NO: 1184964 - RNA, 19 nt, Artificial Sequence
  Description of Artificial Sequence: Synthetic oligonucleotide
  Sense strand starting at position 1507 of SEQ ID NO: 916800
cgucaaucauugcccauuu

SEQ ID NO: 1184965 - RNA, 19 nt, Artificial Sequence
  Description of Artificial Sequence: Synthetic oligonucleotide
  Antisense strand to SEQ ID NO: 1184964
aaaugggcaaugauugacg

SEQ ID NO: 1184966 - RNA, 19 nt, Artificial Sequence
  Description of Artificial Sequence: Synthetic oligonucleotide
  Sense strand starting at position 2028 of SEQ ID NO: 916800
ggcggaagcucgucaccaa

SEQ ID NO: 1184967 - RNA, 19 nt, Artificial Sequence
  Description of Artificial Sequence: Synthetic oligonucleotide
  Antisense strand to SEQ ID NO: 1184966
uuggugacgagcuuccgcc

SEQ ID NO: 1184968 - RNA, 19 nt, Artificial Sequence
  Description of Artificial Sequence: Synthetic oligonucleotide
  Sense strand starting at position 2029 of SEQ ID NO: 916800
gcggaagcucgucaccaaa

SEQ ID NO: 1184969 - RNA, 19 nt, Artificial Sequence
  Description of Artificial Sequence: Synthetic oligonucleotide
  Antisense strand to SEQ ID NO: 1184968
uuuggugacgagcuuccgc

SEQ ID NO: 1184970 - RNA, 19 nt, Artificial Sequence
  Description of Artificial Sequence: Synthetic oligonucleotide
  Sense strand starting at position 2138 of SEQ ID NO: 916800
caggaagucuagucuagag

SEQ ID NO: 1184971 - RNA, 19 nt, Artificial Sequence
  Description of Artificial Sequence: Synthetic oligonucleotide
  Antisense strand to SEQ ID NO: 1184970
cucuagacuagacuuccug

SEQ ID NO: 1184972 - RNA, 19 nt, Artificial Sequence
  Description of Artificial Sequence: Synthetic oligonucleotide
  Sense strand starting at position 2140 of SEQ ID NO: 916800
ggaagucuagucuagaguc

SEQ ID NO: 1184973 - RNA, 19 nt, Artificial Sequence
  Description of Artificial Sequence: Synthetic oligonucleotide
  Antisense strand to SEQ ID NO: 1184972
gacucuagacuagacuucc

SEQ ID NO: 1184974 - RNA, 19 nt, Artificial Sequence
  Description of Artificial Sequence: Synthetic oligonucleotide
  Sense strand starting at position 2142 of SEQ ID NO: 916800
aagucuagucuagagucua

SEQ ID NO: 1184975 - RNA, 19 nt, Artificial Sequence
  Description of Artificial Sequence: Synthetic oligonucleotide
  Antisense strand to SEQ ID NO: 1184974
uagacucuagacuagacuu

SEQ ID NO: 1184976 - RNA, 19 nt, Artificial Sequence
  Description of Artificial Sequence: Synthetic oligonucleotide
  Sense strand starting at position 2196 of SEQ ID NO: 916800
gggagaacucuauguucuu

SEQ ID NO: 1184977 - RNA, 19 nt, Artificial Sequence
  Description of Artificial Sequence: Synthetic oligonucleotide
  Antisense strand to SEQ ID NO: 1184976
aagaacauagaguucuccc

SEQ ID NO: 1184978 - RNA, 19 nt, Artificial Sequence
  Description of Artificial Sequence: Synthetic oligonucleotide
  Sense strand starting at position 2197 of SEQ ID NO: 916800
ggagaacucuauguucuuc

SEQ ID NO: 1184979 - RNA, 19 nt, Artificial Sequence
  Description of Artificial Sequence: Synthetic oligonucleotide
  Antisense strand to SEQ ID NO: 1184978
gaagaacauagaguucucc

SEQ ID NO: 1184980 - RNA, 19 nt, Artificial Sequence
  Description of Artificial Sequence: Synthetic oligonucleotide
  Sense strand starting at position 2268 of SEQ ID NO: 916800
ggugacuugugucuuagag

SEQ ID NO: 1184981 - RNA, 19 nt, Artificial Sequence
  Description of Artificial Sequence: Synthetic oligonucleotide
  Antisense strand to SEQ ID NO: 1184980
cucuaagacacaagucacc

SEQ ID NO: 1184982 - RNA, 19 nt, Artificial Sequence
  Description of Artificial Sequence: Synthetic oligonucleotide
  Sense strand starting at position 2276 of SEQ ID NO: 916800
gugucuuagagcugacgca

SEQ ID NO: 1184983 - RNA, 19 nt, Artificial Sequence
  Description of Artificial Sequence: Synthetic oligonucleotide
  Antisense strand to SEQ ID NO: 1184982
ugcgucagcucuaagacac

SEQ ID NO: 1184984 - RNA, 19 nt, Artificial Sequence
  Description of Artificial Sequence: Synthetic oligonucleotide
  Sense strand starting at position 2407 of SEQ ID NO: 916800
ugacuccugucaugggaau

SEQ ID NO: 1184985 - RNA, 19 nt, Artificial Sequence
  Description of Artificial Sequence: Synthetic oligonucleotide
  Antisense strand to SEQ ID NO: 1184984
auucccaugacaggaguca

SEQ ID NO: 1184986 - RNA, 19 nt, Artificial Sequence
  Description of Artificial Sequence: Synthetic oligonucleotide
  Sense strand starting at position 2413 of SEQ ID NO: 916800
cugucaugggaauggauau

SEQ ID NO: 1184987 - RNA, 19 nt, Artificial Sequence
  Description of Artificial Sequence: Synthetic oligonucleotide
  Antisense strand to SEQ ID NO: 1184986
auauccauucccaugacag

SEQ ID NO: 1184988 - RNA, 19 nt, Artificial Sequence
  Description of Artificial Sequence: Synthetic oligonucleotide
  Sense strand starting at position 2414 of SEQ ID NO: 916800
ugucaugggaauggauauu

SEQ ID NO: 1184989 - RNA, 19 nt, Artificial Sequence
  Description of Artificial Sequence: Synthetic oligonucleotide
  Antisense strand to SEQ ID NO: 1184988
aauauccauucccaugaca

SEQ ID NO: 1184990 - RNA, 19 nt, Artificial Sequence
  Description of Artificial Sequence: Synthetic oligonucleotide
  Sense strand starting at position 2420 of SEQ ID NO: 916800
gggaauggauauugcaguu

SEQ ID NO: 1184991 - RNA, 19 nt, Artificial Sequence
  Description of Artificial Sequence: Synthetic oligonucleotide
  Antisense strand to SEQ ID NO: 1184990
aacugcaauauccauuccc

SEQ ID NO: 1184992 - RNA, 19 nt, Artificial Sequence
  Description of Artificial Sequence: Synthetic oligonucleotide
  Sense strand starting at position 2465 of SEQ ID NO: 916800
gagggagucugaccgcaaa

SEQ ID NO: 1184993 - RNA, 19 nt, Artificial Sequence
  Description of Artificial Sequence: Synthetic oligonucleotide
  Antisense strand to SEQ ID NO: 1184992
uuugcggucagacucccuc

SEQ ID NO: 1184994 - RNA, 19 nt, Artificial Sequence
  Description of Artificial Sequence: Synthetic oligonucleotide
  Sense strand starting at position 2567 of SEQ ID NO: 916800
uguggaguucccugaaaca

SEQ ID NO: 1184995 - RNA, 19 nt, Artificial Sequence
  Description of Artificial Sequence: Synthetic oligonucleotide
  Antisense strand to SEQ ID NO: 1184994
uguuucagggaacuccaca

SEQ ID NO: 1184996 - RNA, 19 nt, Artificial Sequence
  Description of Artificial Sequence: Synthetic oligonucleotide
  Sense strand starting at position 2631 of SEQ ID NO: 916800
ggguuugauuuccuuagcu

SEQ ID NO: 1184997 - RNA, 19 nt, Artificial Sequence
  Description of Artificial Sequence: Synthetic oligonucleotide
  Antisense strand to SEQ ID NO: 1184996
agcuaaggaaaucaaaccc

SEQ ID NO: 1184998 - RNA, 19 nt, Artificial Sequence
  Description of Artificial Sequence: Synthetic oligonucleotide
  Sense strand starting at position 2669 of SEQ ID NO: 916800
ggaugugggcgguagagaa

SEQ ID NO: 1184999 - RNA, 19 nt, Artificial Sequence
  Description of Artificial Sequence: Synthetic oligonucleotide
  Antisense strand to SEQ ID NO: 1184998
uucucuaccgcccacaucc

SEQ ID NO: 1185000 - RNA, 19 nt, Artificial Sequence
  Description of Artificial Sequence: Synthetic oligonucleotide
  Sense strand starting at position 2722 of SEQ ID NO: 916800
agagcuccgugagcagaua

SEQ ID NO: 1185001 - RNA, 19 nt, Artificial Sequence
  Description of Artificial Sequence: Synthetic oligonucleotide
  Antisense strand to SEQ ID NO: 1185000
uaucugcucacggagcucu

SEQ ID NO: 1185002 - RNA, 19 nt, Artificial Sequence
  Description of Artificial Sequence: Synthetic oligonucleotide
  Sense strand starting at position 2782 of SEQ ID NO: 916800
uuccuagacuaaucuggua

SEQ ID NO: 1185003 - RNA, 19 nt, Artificial Sequence
  Description of Artificial Sequence: Synthetic oligonucleotide
  Antisense strand to SEQ ID NO: 1185002
uaccagauuagucuaggaa

SEQ ID NO: 1185004 - RNA, 19 nt, Artificial Sequence
  Description of Artificial Sequence: Synthetic oligonucleotide
  Sense strand starting at position 2785 of SEQ ID NO: 916800
cuagacuaaucugguauua

SEQ ID NO: 1185005 - RNA, 19 nt, Artificial Sequence
  Description of Artificial Sequence: Synthetic oligonucleotide
  Antisense strand to SEQ ID NO: 1185004
uaauaccagauuagucuag

SEQ ID NO: 1185006 - RNA, 19 nt, Artificial Sequence
  Description of Artificial Sequence: Synthetic oligonucleotide
  Sense strand starting at position 2787 of SEQ ID NO: 916800
agacuaaucugguauuaaa

SEQ ID NO: 1185007 - RNA, 19 nt, Artificial Sequence
  Description of Artificial Sequence: Synthetic oligonucleotide
  Antisense strand to SEQ ID NO: 1185006
uuuaauaccagauuagucu

SEQ ID NO: 1185008 - RNA, 19 nt, Artificial Sequence
  Description of Artificial Sequence: Synthetic oligonucleotide
  Sense strand starting at position 2797 of SEQ ID NO: 916800
gguauuaaauaguauggua

SEQ ID NO: 1185009 - RNA, 19 nt, Artificial Sequence
  Description of Artificial Sequence: Synthetic oligonucleotide
  Antisense strand to SEQ ID NO: 1185008
uaccauacuauuuaauacc

SEQ ID NO: 1185010 - RNA, 19 nt, Artificial Sequence
  Description of Artificial Sequence: Synthetic oligonucleotide
  Sense strand starting at position 2811 of SEQ ID NO: 916800
ugguauuuauuguggacau

SEQ ID NO: 1185011 - RNA, 19 nt, Artificial Sequence
  Description of Artificial Sequence: Synthetic oligonucleotide
  Antisense strand to SEQ ID NO: 1185010
auguccacaauaaauacca

SEQ ID NO: 1185012 - RNA, 19 nt, Artificial Sequence
  Description of Artificial Sequence: Synthetic oligonucleotide
  Sense strand starting at position 2812 of SEQ ID NO: 916800
gguauuuauuguggacauu

SEQ ID NO: 1185013 - RNA, 19 nt, Artificial Sequence
  Description of Artificial Sequence: Synthetic oligonucleotide
  Antisense strand to SEQ ID NO: 1185012
aauguccacaauaaauacc

SEQ ID NO: 1185014 - RNA, 19 nt, Artificial Sequence
  Description of Artificial Sequence: Synthetic oligonucleotide
  Sense strand starting at position 2822 of SEQ ID NO: 916800
guggacauuggcuaagcaa

SEQ ID NO: 1185015 - RNA, 19 nt, Artificial Sequence
  Description of Artificial Sequence: Synthetic oligonucleotide
  Antisense strand to SEQ ID NO: 1185014
uugcuuagccaauguccac

SEQ ID NO: 1185016 - RNA, 19 nt, Artificial Sequence
  Description of Artificial Sequence: Synthetic oligonucleotide
  Sense strand starting at position 2988 of SEQ ID NO: 916800
gcgggacucugagauaagu

SEQ ID NO: 1185017 - RNA, 19 nt, Artificial Sequence
  Description of Artificial Sequence: Synthetic oligonucleotide
  Antisense strand to SEQ ID NO: 1185016
acuuaucucagagucccgc

SEQ ID NO: 1185018 - RNA, 19 nt, Artificial Sequence
  Description of Artificial Sequence: Synthetic oligonucleotide
  Sense strand starting at position 2997 of SEQ ID NO: 916800
ugagauaaguaagauaaga

SEQ ID NO: 1185019 - RNA, 19 nt, Artificial Sequence
  Description of Artificial Sequence: Synthetic oligonucleotide
  Antisense strand to SEQ ID NO: 1185018
ucuuaucuuacuuaucuca

SEQ ID NO: 1185020 - RNA, 19 nt, Artificial Sequence
  Description of Artificial Sequence: Synthetic oligonucleotide
  Sense strand starting at position 3733 of SEQ ID NO: 916800
uggguagugcauuaaagau

SEQ ID NO: 1185021 - RNA, 19 nt, Artificial Sequence
  Description of Artificial Sequence: Synthetic oligonucleotide
  Antisense strand to SEQ ID NO: 1185020
aucuuuaaugcacuaccca

SEQ ID NO: 1185022 - RNA, 19 nt, Artificial Sequence
  Description of Artificial Sequence: Synthetic oligonucleotide
  Sense strand starting at position 3739 of SEQ ID NO: 916800
gugcauuaaagaugagaac

SEQ ID NO: 1185023 - RNA, 19 nt, Artificial Sequence
  Description of Artificial Sequence: Synthetic oligonucleotide
  Antisense strand to SEQ ID NO: 1185022
guucucaucuuuaaugcac

SEQ ID NO: 1185024 - RNA, 19 nt, Artificial Sequence
  Description of Artificial Sequence: Synthetic oligonucleotide
  Sense strand starting at position 3774 of SEQ ID NO: 916800
agauaacgguuagagcaau

SEQ ID NO: 1185025 - RNA, 19 nt, Artificial Sequence
  Description of Artificial Sequence: Synthetic oligonucleotide
  Antisense strand to SEQ ID NO: 1185024
auugcucuaaccguuaucu

SEQ ID NO: 1185026 - RNA, 19 nt, Artificial Sequence
  Description of Artificial Sequence: Synthetic oligonucleotide
  Sense strand starting at position 3856 of SEQ ID NO: 916800
uuucucguaagauggaauu

SEQ ID NO: 1185027 - RNA, 19 nt, Artificial Sequence
  Description of Artificial Sequence: Synthetic oligonucleotide
  Antisense strand to SEQ ID NO: 1185026
aauuccaucuuacgagaaa

SEQ ID NO: 1185028 - RNA, 19 nt, Artificial Sequence
  Description of Artificial Sequence: Synthetic oligonucleotide
  Sense strand starting at position 3919 of SEQ ID NO: 916800
ucguuauauugcccaggca

SEQ ID NO: 1185029 - RNA, 19 nt, Artificial Sequence
  Description of Artificial Sequence: Synthetic oligonucleotide
  Antisense strand to SEQ ID NO: 1185028
ugccugggcaauauaacga

SEQ ID NO: 1185030 - RNA, 19 nt, Artificial Sequence
  Description of Artificial Sequence: Synthetic oligonucleotide
  Sense strand starting at position 125 of SEQ ID NO: 916801
gauuauuuguagcaacaga

SEQ ID NO: 1185031 - RNA, 19 nt, Artificial Sequence
  Description of Artificial Sequence: Synthetic oligonucleotide
  Antisense strand to SEQ ID NO: 1185030
ucuguugcuacaaauaauc

SEQ ID NO: 1185032 - RNA, 19 nt, Artificial Sequence
  Description of Artificial Sequence: Synthetic oligonucleotide
  Sense strand starting at position 291 of SEQ ID NO: 916801
guuggaguucaguggugga

SEQ ID NO: 1185033 - RNA, 19 nt, Artificial Sequence
  Description of Artificial Sequence: Synthetic oligonucleotide
  Antisense strand to SEQ ID NO: 1185032
uccaccacugaacuccaac

SEQ ID NO: 1185034 - RNA, 19 nt, Artificial Sequence
  Description of Artificial Sequence: Synthetic oligonucleotide
  Sense strand starting at position 545 of SEQ ID NO: 916801
gcuacagucagagguuuga

SEQ ID NO: 1185035 - RNA, 19 nt, Artificial Sequence
  Description of Artificial Sequence: Synthetic oligonucleotide
  Antisense strand to SEQ ID NO: 1185034
ucaaaccucugacuguagc

SEQ ID NO: 1185036 - RNA, 19 nt, Artificial Sequence
  Description of Artificial Sequence: Synthetic oligonucleotide
  Sense strand starting at position 792 of SEQ ID NO: 916801
aauuuagaguacugagagu

SEQ ID NO: 1185037 - RNA, 19 nt, Artificial Sequence
  Description of Artificial Sequence: Synthetic oligonucleotide
  Antisense strand to SEQ ID NO: 1185036
acucucaguacucuaaauu

SEQ ID NO: 1185038 - RNA, 19 nt, Artificial Sequence
  Description of Artificial Sequence: Synthetic oligonucleotide
  Sense strand starting at position 1230 of SEQ ID NO: 916801
gugugugaacccugccaga

SEQ ID NO: 1185039 - RNA, 19 nt, Artificial Sequence
  Description of Artificial Sequence: Synthetic oligonucleotide
  Antisense strand to SEQ ID NO: 1185038
ucuggcaggguucacacac

SEQ ID NO: 1185040 - RNA, 19 nt, Artificial Sequence
  Description of Artificial Sequence: Synthetic oligonucleotide
  Sense strand starting at position 1276 of SEQ ID NO: 916801
augugaagaaugugagauu

SEQ ID NO: 1185041 - RNA, 19 nt, Artificial Sequence
  Description of Artificial Sequence: Synthetic oligonucleotide
  Antisense strand to SEQ ID NO: 1185040
aaucucacauucuucacau

SEQ ID NO: 1185042 - RNA, 19 nt, Artificial Sequence
  Description of Artificial Sequence: Synthetic oligonucleotide
  Sense strand starting at position 1279 of SEQ ID NO: 916801
ugaagaaugugagauuccu

SEQ ID NO: 1185043 - RNA, 19 nt, Artificial Sequence
  Description of Artificial Sequence: Synthetic oligonucleotide
  Antisense strand to SEQ ID NO: 1185042
aggaaucucacauucuuca

SEQ ID NO: 1185044 - RNA, 19 nt, Artificial Sequence
  Description of Artificial Sequence: Synthetic oligonucleotide
  Sense strand starting at position 1469 of SEQ ID NO: 916801
cgucaaucauugcccauuu

SEQ ID NO: 1185045 - RNA, 19 nt, Artificial Sequence
  Description of Artificial Sequence: Synthetic oligonucleotide
  Antisense strand to SEQ ID NO: 1185044
aaaugggcaaugauugacg

SEQ ID NO: 1185046 - RNA, 19 nt, Artificial Sequence
  Description of Artificial Sequence: Synthetic oligonucleotide
  Sense strand starting at position 1990 of SEQ ID NO: 916801
ggcggaagcucgucaccaa

SEQ ID NO: 1185047 - RNA, 19 nt, Artificial Sequence
  Description of Artificial Sequence: Synthetic oligonucleotide
  Antisense strand to SEQ ID NO: 1185046
uuggugacgagcuuccgcc

SEQ ID NO: 1185048 - RNA, 19 nt, Artificial Sequence
  Description of Artificial Sequence: Synthetic oligonucleotide
  Sense strand starting at position 1991 of SEQ ID NO: 916801
gcggaagcucgucaccaaa

SEQ ID NO: 1185049 - RNA, 19 nt, Artificial Sequence
  Description of Artificial Sequence: Synthetic oligonucleotide
  Antisense strand to SEQ ID NO: 1185048
uuuggugacgagcuuccgc

SEQ ID NO: 1185050 - RNA, 19 nt, Artificial Sequence
  Description of Artificial Sequence: Synthetic oligonucleotide
  Sense strand starting at position 2100 of SEQ ID NO: 916801
caggaagucuagucuagag

SEQ ID NO: 1185051 - RNA, 19 nt, Artificial Sequence
  Description of Artificial Sequence: Synthetic oligonucleotide
  Antisense strand to SEQ ID NO: 1185050
cucuagacuagacuuccug

SEQ ID NO: 1185052 - RNA, 19 nt, Artificial Sequence
  Description of Artificial Sequence: Synthetic oligonucleotide
  Sense strand starting at position 2102 of SEQ ID NO: 916801
ggaagucuagucuagaguc

SEQ ID NO: 1185053 - RNA, 19 nt, Artificial Sequence
  Description of Artificial Sequence: Synthetic oligonucleotide
  Antisense strand to SEQ ID NO: 1185052
gacucuagacuagacuucc

SEQ ID NO: 1185054 - RNA, 19 nt, Artificial Sequence
  Description of Artificial Sequence: Synthetic oligonucleotide
  Sense strand starting at position 2104 of SEQ ID NO: 916801
aagucuagucuagagucua

SEQ ID NO: 1185055 - RNA, 19 nt, Artificial Sequence
  Description of Artificial Sequence: Synthetic oligonucleotide
  Antisense strand to SEQ ID NO: 1185054
uagacucuagacuagacuu

SEQ ID NO: 1185056 - RNA, 19 nt, Artificial Sequence
  Description of Artificial Sequence: Synthetic oligonucleotide
  Sense strand starting at position 2158 of SEQ ID NO: 916801
gggagaacucuauguucuu

SEQ ID NO: 1185057 - RNA, 19 nt, Artificial Sequence
  Description of Artificial Sequence: Synthetic oligonucleotide
  Antisense strand to SEQ ID NO: 1185056
aagaacauagaguucuccc

SEQ ID NO: 1185058 - RNA, 19 nt, Artificial Sequence
  Description of Artificial Sequence: Synthetic oligonucleotide
  Sense strand starting at position 2159 of SEQ ID NO: 916801
ggagaacucuauguucuuc

SEQ ID NO: 1185059 - RNA, 19 nt, Artificial Sequence
  Description of Artificial Sequence: Synthetic oligonucleotide
  Antisense strand to SEQ ID NO: 1185058
gaagaacauagaguucucc

SEQ ID NO: 1185060 - RNA, 19 nt, Artificial Sequence
  Description of Artificial Sequence: Synthetic oligonucleotide
  Sense strand starting at position 2230 of SEQ ID NO: 916801
ggugacuugugucuuagag

SEQ ID NO: 1185061 - RNA, 19 nt, Artificial Sequence
  Description of Artificial Sequence: Synthetic oligonucleotide
  Antisense strand to SEQ ID NO: 1185060
cucuaagacacaagucacc

SEQ ID NO: 1185062 - RNA, 19 nt, Artificial Sequence
  Description of Artificial Sequence: Synthetic oligonucleotide
  Sense strand starting at position 2238 of SEQ ID NO: 916801
gugucuuagagcugacgca

SEQ ID NO: 1185063 - RNA, 19 nt, Artificial Sequence
  Description of Artificial Sequence: Synthetic oligonucleotide
  Antisense strand to SEQ ID NO: 1185062
ugcgucagcucuaagacac

SEQ ID NO: 1185064 - RNA, 19 nt, Artificial Sequence
  Description of Artificial Sequence: Synthetic oligonucleotide
  Sense strand starting at position 2369 of SEQ ID NO: 916801
ugacuccugucaugggaau

SEQ ID NO: 1185065 - RNA, 19 nt, Artificial Sequence
  Description of Artificial Sequence: Synthetic oligonucleotide
  Antisense strand to SEQ ID NO: 1185064
auucccaugacaggaguca

SEQ ID NO: 1185066 - RNA, 19 nt, Artificial Sequence
  Description of Artificial Sequence: Synthetic oligonucleotide
  Sense strand starting at position 2375 of SEQ ID NO: 916801
cugucaugggaauggauau

SEQ ID NO: 1185067 - RNA, 19 nt, Artificial Sequence
  Description of Artificial Sequence: Synthetic oligonucleotide
  Antisense strand to SEQ ID NO: 1185066
auauccauucccaugacag

SEQ ID NO: 1185068 - RNA, 19 nt, Artificial Sequence
  Description of Artificial Sequence: Synthetic oligonucleotide
  Sense strand starting at position 2376 of SEQ ID NO: 916801
ugucaugggaauggauauu

SEQ ID NO: 1185069 - RNA, 19 nt, Artificial Sequence
  Description of Artificial Sequence: Synthetic oligonucleotide
  Antisense strand to SEQ ID NO: 1185068
aauauccauucccaugaca

SEQ ID NO: 1185070 - RNA, 19 nt, Artificial Sequence
  Description of Artificial Sequence: Synthetic oligonucleotide
  Sense strand starting at position 2382 of SEQ ID NO: 916801
gggaauggauauugcaguu

SEQ ID NO: 1185071 - RNA, 19 nt, Artificial Sequence
  Description of Artificial Sequence: Synthetic oligonucleotide
  Antisense strand to SEQ ID NO: 1185070
aacugcaauauccauuccc

SEQ ID NO: 1185072 - RNA, 19 nt, Artificial Sequence
  Description of Artificial Sequence: Synthetic oligonucleotide
  Sense strand starting at position 2427 of SEQ ID NO: 916801
gagggagucugaccgcaaa

SEQ ID NO: 1185073 - RNA, 19 nt, Artificial Sequence
  Description of Artificial Sequence: Synthetic oligonucleotide
  Antisense strand to SEQ ID NO: 1185072
uuugcggucagacucccuc

SEQ ID NO: 1185074 - RNA, 19 nt, Artificial Sequence
  Description of Artificial Sequence: Synthetic oligonucleotide
  Sense strand starting at position 2529 of SEQ ID NO: 916801
uguggaguucccugaaaca

SEQ ID NO: 1185075 - RNA, 19 nt, Artificial Sequence
  Description of Artificial Sequence: Synthetic oligonucleotide
  Antisense strand to SEQ ID NO: 1185074
uguuucagggaacuccaca

SEQ ID NO: 1185076 - RNA, 19 nt, Artificial Sequence
  Description of Artificial Sequence: Synthetic oligonucleotide
  Sense strand starting at position 2593 of SEQ ID NO: 916801
ggguuugauuuccuuagcu

SEQ ID NO: 1185077 - RNA, 19 nt, Artificial Sequence
  Description of Artificial Sequence: Synthetic oligonucleotide
  Antisense strand to SEQ ID NO: 1185076
agcuaaggaaaucaaaccc

SEQ ID NO: 1185078 - RNA, 19 nt, Artificial Sequence
  Description of Artificial Sequence: Synthetic oligonucleotide
  Sense strand starting at position 2631 of SEQ ID NO: 916801
ggaugugggcgguagagaa

SEQ ID NO: 1185079 - RNA, 19 nt, Artificial Sequence
  Description of Artificial Sequence: Synthetic oligonucleotide
  Antisense strand to SEQ ID NO: 1185078
uucucuaccgcccacaucc

SEQ ID NO: 1185080 - RNA, 19 nt, Artificial Sequence
  Description of Artificial Sequence: Synthetic oligonucleotide
  Sense strand starting at position 2684 of SEQ ID NO: 916801
agagcuccgugagcagaua

SEQ ID NO: 1185081 - RNA, 19 nt, Artificial Sequence
  Description of Artificial Sequence: Synthetic oligonucleotide
  Antisense strand to SEQ ID NO: 1185080
uaucugcucacggagcucu

SEQ ID NO: 1185082 - RNA, 19 nt, Artificial Sequence
  Description of Artificial Sequence: Synthetic oligonucleotide
  Sense strand starting at position 2744 of SEQ ID NO: 916801
uuccuagacuaaucuggua

SEQ ID NO: 1185083 - RNA, 19 nt, Artificial Sequence
  Description of Artificial Sequence: Synthetic oligonucleotide
  Antisense strand to SEQ ID NO: 1185082
uaccagauuagucuaggaa

SEQ ID NO: 1185084 - RNA, 19 nt, Artificial Sequence
  Description of Artificial Sequence: Synthetic oligonucleotide
  Sense strand starting at position 2747 of SEQ ID NO: 916801
cuagacuaaucugguauua

SEQ ID NO: 1185085 - RNA, 19 nt, Artificial Sequence
  Description of Artificial Sequence: Synthetic oligonucleotide
  Antisense strand to SEQ ID NO: 1185084
uaauaccagauuagucuag

SEQ ID NO: 1185086 - RNA, 19 nt, Artificial Sequence
  Description of Artificial Sequence: Synthetic oligonucleotide
  Sense strand starting at position 2749 of SEQ ID NO: 916801
agacuaaucugguauuaaa

SEQ ID NO: 1185087 - RNA, 19 nt, Artificial Sequence
  Description of Artificial Sequence: Synthetic oligonucleotide
  Antisense strand to SEQ ID NO: 1185086
uuuaauaccagauuagucu

SEQ ID NO: 1185088 - RNA, 19 nt, Artificial Sequence
  Description of Artificial Sequence: Synthetic oligonucleotide
  Sense strand starting at position 2759 of SEQ ID NO: 916801
gguauuaaauaguauggua

SEQ ID NO: 1185089 - RNA, 19 nt, Artificial Sequence
  Description of Artificial Sequence: Synthetic oligonucleotide
  Antisense strand to SEQ ID NO: 1185088
uaccauacuauuuaauacc

SEQ ID NO: 1185090 - RNA, 19 nt, Artificial Sequence
  Description of Artificial Sequence: Synthetic oligonucleotide
  Sense strand starting at position 2773 of SEQ ID NO: 916801
ugguauuuauuguggacau

SEQ ID NO: 1185091 - RNA, 19 nt, Artificial Sequence
  Description of Artificial Sequence: Synthetic oligonucleotide
  Antisense strand to SEQ ID NO: 1185090
auguccacaauaaauacca

SEQ ID NO: 1185092 - RNA, 19 nt, Artificial Sequence
  Description of Artificial Sequence: Synthetic oligonucleotide
  Sense strand starting at position 2774 of SEQ ID NO: 916801
gguauuuauuguggacauu

SEQ ID NO: 1185093 - RNA, 19 nt, Artificial Sequence
  Description of Artificial Sequence: Synthetic oligonucleotide
  Antisense strand to SEQ ID NO: 1185092
aauguccacaauaaauacc

SEQ ID NO: 1185094 - RNA, 19 nt, Artificial Sequence
  Description of Artificial Sequence: Synthetic oligonucleotide
  Sense strand starting at position 2784 of SEQ ID NO: 916801
guggacauuggcuaagcaa

SEQ ID NO: 1185095 - RNA, 19 nt, Artificial Sequence
  Description of Artificial Sequence: Synthetic oligonucleotide
  Antisense strand to SEQ ID NO: 1185094
uugcuuagccaauguccac

SEQ ID NO: 1185096 - RNA, 19 nt, Artificial Sequence
  Description of Artificial Sequence: Synthetic oligonucleotide
  Sense strand starting at position 2950 of SEQ ID NO: 916801
gcgggacucugagauaagu

SEQ ID NO: 1185097 - RNA, 19 nt, Artificial Sequence
  Description of Artificial Sequence: Synthetic oligonucleotide
  Antisense strand to SEQ ID NO: 1185096
acuuaucucagagucccgc

SEQ ID NO: 1185098 - RNA, 19 nt, Artificial Sequence
  Description of Artificial Sequence: Synthetic oligonucleotide
  Sense strand starting at position 2959 of SEQ ID NO: 916801
ugagauaaguaagauaaga

SEQ ID NO: 1185099 - RNA, 19 nt, Artificial Sequence
  Description of Artificial Sequence: Synthetic oligonucleotide
  Antisense strand to SEQ ID NO: 1185098
ucuuaucuuacuuaucuca

SEQ ID NO: 1185100 - RNA, 19 nt, Artificial Sequence
  Description of Artificial Sequence: Synthetic oligonucleotide
  Sense strand starting at position 3695 of SEQ ID NO: 916801
uggguagugcauuaaagau

SEQ ID NO: 1185101 - RNA, 19 nt, Artificial Sequence
  Description of Artificial Sequence: Synthetic oligonucleotide
  Antisense strand to SEQ ID NO: 1185100
aucuuuaaugcacuaccca

SEQ ID NO: 1185102 - RNA, 19 nt, Artificial Sequence
  Description of Artificial Sequence: Synthetic oligonucleotide
  Sense strand starting at position 3701 of SEQ ID NO: 916801
gugcauuaaagaugagaac

SEQ ID NO: 1185103 - RNA, 19 nt, Artificial Sequence
  Description of Artificial Sequence: Synthetic oligonucleotide
  Antisense strand to SEQ ID NO: 1185102
guucucaucuuuaaugcac

SEQ ID NO: 1185104 - RNA, 19 nt, Artificial Sequence
  Description of Artificial Sequence: Synthetic oligonucleotide
  Sense strand starting at position 3736 of SEQ ID NO: 916801
agauaacgguuagagcaau

SEQ ID NO: 1185105 - RNA, 19 nt, Artificial Sequence
  Description of Artificial Sequence: Synthetic oligonucleotide
  Antisense strand to SEQ ID NO: 1185104
auugcucuaaccguuaucu

SEQ ID NO: 1185106 - RNA, 19 nt, Artificial Sequence
  Description of Artificial Sequence: Synthetic oligonucleotide
  Sense strand starting at position 3818 of SEQ ID NO: 916801
uuucucguaagauggaauu

SEQ ID NO: 1185107 - RNA, 19 nt, Artificial Sequence
  Description of Artificial Sequence: Synthetic oligonucleotide
  Antisense strand to SEQ ID NO: 1185106
aauuccaucuuacgagaaa

SEQ ID NO: 1185108 - RNA, 19 nt, Artificial Sequence
  Description of Artificial Sequence: Synthetic oligonucleotide
  Sense strand starting at position 3881 of SEQ ID NO: 916801
ucguuauauugcccaggca

SEQ ID NO: 1185109 - RNA, 19 nt, Artificial Sequence
  Description of Artificial Sequence: Synthetic oligonucleotide
  Antisense strand to SEQ ID NO: 1185108
ugccugggcaauauaacga

SEQ ID NO: 1185110 - RNA, 19 nt, Artificial Sequence
  Description of Artificial Sequence: Synthetic oligonucleotide
  Sense strand starting at position 12 of SEQ ID NO: 916802
aggacauuguugguagcua

SEQ ID NO: 1185111 - RNA, 19 nt, Artificial Sequence
  Description of Artificial Sequence: Synthetic oligonucleotide
  Antisense strand to SEQ ID NO: 1185110
uagcuaccaacaauguccu

SEQ ID NO: 1185112 - RNA, 19 nt, Artificial Sequence
  Description of Artificial Sequence: Synthetic oligonucleotide
  Sense strand starting at position 16 of SEQ ID NO: 916802
cauuguugguagcuauaag

SEQ ID NO: 1185113 - RNA, 19 nt, Artificial Sequence
  Description of Artificial Sequence: Synthetic oligonucleotide
  Antisense strand to SEQ ID NO: 1185112
cuuauagcuaccaacaaug

SEQ ID NO: 1185114 - RNA, 19 nt, Artificial Sequence
  Description of Artificial Sequence: Synthetic oligonucleotide
  Sense strand starting at position 492 of SEQ ID NO: 916802
gagcucuguccauagccua

SEQ ID NO: 1185115 - RNA, 19 nt, Artificial Sequence
  Description of Artificial Sequence: Synthetic oligonucleotide
  Antisense strand to SEQ ID NO: 1185114
uaggcuauggacagagcuc

SEQ ID NO: 1185116 - RNA, 19 nt, Artificial Sequence
  Description of Artificial Sequence: Synthetic oligonucleotide
  Sense strand starting at position 511 of SEQ ID NO: 916802
cggguucuuccugauguag

SEQ ID NO: 1185117 - RNA, 19 nt, Artificial Sequence
  Description of Artificial Sequence: Synthetic oligonucleotide
  Antisense strand to SEQ ID NO: 1185116
cuacaucaggaagaacccg

SEQ ID NO: 1185118 - RNA, 19 nt, Artificial Sequence
  Description of Artificial Sequence: Synthetic oligonucleotide
  Sense strand starting at position 868 of SEQ ID NO: 916802
uagggauccugucuacuug

SEQ ID NO: 1185119 - RNA, 19 nt, Artificial Sequence
  Description of Artificial Sequence: Synthetic oligonucleotide
  Antisense strand to SEQ ID NO: 1185118
caaguagacaggaucccua

SEQ ID NO: 1185120 - RNA, 19 nt, Artificial Sequence
  Description of Artificial Sequence: Synthetic oligonucleotide
  Sense strand starting at position 1022 of SEQ ID NO: 916802
ucacccuagcaagguaaua

SEQ ID NO: 1185121 - RNA, 19 nt, Artificial Sequence
  Description of Artificial Sequence: Synthetic oligonucleotide
  Antisense strand to SEQ ID NO: 1185120
uauuaccuugcuaggguga

SEQ ID NO: 1185122 - RNA, 19 nt, Artificial Sequence
  Description of Artificial Sequence: Synthetic oligonucleotide
  Sense strand starting at position 1077 of SEQ ID NO: 916802
gugaauaucuucuugucuc

SEQ ID NO: 1185123 - RNA, 19 nt, Artificial Sequence
  Description of Artificial Sequence: Synthetic oligonucleotide
  Antisense strand to SEQ ID NO: 1185122
gagacaagaagauauucac

SEQ ID NO: 1185124 - RNA, 19 nt, Artificial Sequence
  Description of Artificial Sequence: Synthetic oligonucleotide
  Sense strand starting at position 1106 of SEQ ID NO: 916802
gccaauauuguggauauag

SEQ ID NO: 1185125 - RNA, 19 nt, Artificial Sequence
  Description of Artificial Sequence: Synthetic oligonucleotide
  Antisense strand to SEQ ID NO: 1185124
cuauauccacaauauuggc

SEQ ID NO: 1185126 - RNA, 19 nt, Artificial Sequence
  Description of Artificial Sequence: Synthetic oligonucleotide
  Sense strand starting at position 1115 of SEQ ID NO: 916802
guggauauagggugucuau

SEQ ID NO: 1185127 - RNA, 19 nt, Artificial Sequence
  Description of Artificial Sequence: Synthetic oligonucleotide
  Antisense strand to SEQ ID NO: 1185126
auagacacccuauauccac

SEQ ID NO: 1185128 - RNA, 19 nt, Artificial Sequence
  Description of Artificial Sequence: Synthetic oligonucleotide
  Sense strand starting at position 1118 of SEQ ID NO: 916802
gauauagggugucuauauc

SEQ ID NO: 1185129 - RNA, 19 nt, Artificial Sequence
  Description of Artificial Sequence: Synthetic oligonucleotide
  Antisense strand to SEQ ID NO: 1185128
gauauagacacccuauauc

SEQ ID NO: 1185130 - RNA, 19 nt, Artificial Sequence
  Description of Artificial Sequence: Synthetic oligonucleotide
  Sense strand starting at position 1126 of SEQ ID NO: 916802
gugucuauaucagucagau

SEQ ID NO: 1185131 - RNA, 19 nt, Artificial Sequence
  Description of Artificial Sequence: Synthetic oligonucleotide
  Antisense strand to SEQ ID NO: 1185130
aucugacugauauagacac

SEQ ID NO: 1185132 - RNA, 19 nt, Artificial Sequence
  Description of Artificial Sequence: Synthetic oligonucleotide
  Sense strand starting at position 1138 of SEQ ID NO: 916802
gucagauggugucugacuu

SEQ ID NO: 1185133 - RNA, 19 nt, Artificial Sequence
  Description of Artificial Sequence: Synthetic oligonucleotide
  Antisense strand to SEQ ID NO: 1185132
aagucagacaccaucugac

SEQ ID NO: 1185134 - RNA, 19 nt, Artificial Sequence
  Description of Artificial Sequence: Synthetic oligonucleotide
  Sense strand starting at position 1157 of SEQ ID NO: 916802
caguuuagggcacgauuau

SEQ ID NO: 1185135 - RNA, 19 nt, Artificial Sequence
  Description of Artificial Sequence: Synthetic oligonucleotide
  Antisense strand to SEQ ID NO: 1185134
auaaucgugcccuaaacug

SEQ ID NO: 1185136 - RNA, 19 nt, Artificial Sequence
  Description of Artificial Sequence: Synthetic oligonucleotide
  Sense strand starting at position 1158 of SEQ ID NO: 916802
aguuuagggcacgauuauu

SEQ ID NO: 1185137 - RNA, 19 nt, Artificial Sequence
  Description of Artificial Sequence: Synthetic oligonucleotide
  Antisense strand to SEQ ID NO: 1185136
aauaaucgugcccuaaacu

SEQ ID NO: 1185138 - RNA, 19 nt, Artificial Sequence
  Description of Artificial Sequence: Synthetic oligonucleotide
  Sense strand starting at position 1168 of SEQ ID NO: 916802
acgauuauuggcuguugaa

SEQ ID NO: 1185139 - RNA, 19 nt, Artificial Sequence
  Description of Artificial Sequence: Synthetic oligonucleotide
  Antisense strand to SEQ ID NO: 1185138
uucaacagccaauaaucgu

SEQ ID NO: 1185140 - RNA, 19 nt, Artificial Sequence
  Description of Artificial Sequence: Synthetic oligonucleotide
  Sense strand starting at position 1178 of SEQ ID NO: 916802
gcuguugaaugacuuccua

SEQ ID NO: 1185141 - RNA, 19 nt, Artificial Sequence
  Description of Artificial Sequence: Synthetic oligonucleotide
  Antisense strand to SEQ ID NO: 1185140
uaggaagucauucaacagc

SEQ ID NO: 1185142 - RNA, 19 nt, Artificial Sequence
  Description of Artificial Sequence: Synthetic oligonucleotide
  Sense strand starting at position 1483 of SEQ ID NO: 916802
aaucgaaugcucgaaacuc

SEQ ID NO: 1185143 - RNA, 19 nt, Artificial Sequence
  Description of Artificial Sequence: Synthetic oligonucleotide
  Antisense strand to SEQ ID NO: 1185142
gaguuucgagcauucgauu

SEQ ID NO: 1185144 - RNA, 19 nt, Artificial Sequence
  Description of Artificial Sequence: Synthetic oligonucleotide
  Sense strand starting at position 1514 of SEQ ID NO: 916802
cuuguauuggaagaggcuu

SEQ ID NO: 1185145 - RNA, 19 nt, Artificial Sequence
  Description of Artificial Sequence: Synthetic oligonucleotide
  Antisense strand to SEQ ID NO: 1185144
aagccucuuccaauacaag

SEQ ID NO: 1185146 - RNA, 19 nt, Artificial Sequence
  Description of Artificial Sequence: Synthetic oligonucleotide
  Sense strand starting at position 1532 of SEQ ID NO: 916802
ucggauucuuugucggaag

SEQ ID NO: 1185147 - RNA, 19 nt, Artificial Sequence
  Description of Artificial Sequence: Synthetic oligonucleotide
  Antisense strand to SEQ ID NO: 1185146
cuuccgacaaagaauccga

SEQ ID NO: 1185148 - RNA, 19 nt, Artificial Sequence
  Description of Artificial Sequence: Synthetic oligonucleotide
  Sense strand starting at position 1534 of SEQ ID NO: 916802
ggauucuuugucggaagca

SEQ ID NO: 1185149 - RNA, 19 nt, Artificial Sequence
  Description of Artificial Sequence: Synthetic oligonucleotide
  Antisense strand to SEQ ID NO: 1185148
ugcuuccgacaaagaaucc

SEQ ID NO: 1185150 - RNA, 19 nt, Artificial Sequence
  Description of Artificial Sequence: Synthetic oligonucleotide
  Sense strand starting at position 1586 of SEQ ID NO: 916802
gcgggaugcaucugaauga

SEQ ID NO: 1185151 - RNA, 19 nt, Artificial Sequence
  Description of Artificial Sequence: Synthetic oligonucleotide
  Antisense strand to SEQ ID NO: 1185150
ucauucagaugcaucccgc

SEQ ID NO: 1185152 - RNA, 19 nt, Artificial Sequence
  Description of Artificial Sequence: Synthetic oligonucleotide
  Sense strand starting at position 1590 of SEQ ID NO: 916802
gaugcaucugaaugaauga

SEQ ID NO: 1185153 - RNA, 19 nt, Artificial Sequence
  Description of Artificial Sequence: Synthetic oligonucleotide
  Antisense strand to SEQ ID NO: 1185152
ucauucauucagaugcauc

SEQ ID NO: 1185154 - RNA, 19 nt, Artificial Sequence
  Description of Artificial Sequence: Synthetic oligonucleotide
  Sense strand starting at position 1680 of SEQ ID NO: 916802
gcuugcgaugguucaaguu

SEQ ID NO: 1185155 - RNA, 19 nt, Artificial Sequence
  Description of Artificial Sequence: Synthetic oligonucleotide
  Antisense strand to SEQ ID NO: 1185154
aacuugaaccaucgcaagc

SEQ ID NO: 1185156 - RNA, 19 nt, Artificial Sequence
  Description of Artificial Sequence: Synthetic oligonucleotide
  Sense strand starting at position 3435 of SEQ ID NO: 916802
gcauaacuugauugguaga

SEQ ID NO: 1185157 - RNA, 19 nt, Artificial Sequence
  Description of Artificial Sequence: Synthetic oligonucleotide
  Antisense strand to SEQ ID NO: 1185156
ucuaccaaucaaguuaugc

SEQ ID NO: 1185158 - RNA, 19 nt, Artificial Sequence
  Description of Artificial Sequence: Synthetic oligonucleotide
  Sense strand starting at position 3437 of SEQ ID NO: 916802
auaacuugauugguagaau

SEQ ID NO: 1185159 - RNA, 19 nt, Artificial Sequence
  Description of Artificial Sequence: Synthetic oligonucleotide
  Antisense strand to SEQ ID NO: 1185158
auucuaccaaucaaguuau

SEQ ID NO: 1185160 - RNA, 19 nt, Artificial Sequence
  Description of Artificial Sequence: Synthetic oligonucleotide
  Sense strand starting at position 3498 of SEQ ID NO: 916802
gugagaauuucugggagaa

SEQ ID NO: 1185161 - RNA, 19 nt, Artificial Sequence
  Description of Artificial Sequence: Synthetic oligonucleotide
  Antisense strand to SEQ ID NO: 1185160
uucucccagaaauucucac

SEQ ID NO: 1185162 - RNA, 19 nt, Artificial Sequence
  Description of Artificial Sequence: Synthetic oligonucleotide
  Sense strand starting at position 3536 of SEQ ID NO: 916802
gggaaaucuuacccaaagc

SEQ ID NO: 1185163 - RNA, 19 nt, Artificial Sequence
  Description of Artificial Sequence: Synthetic oligonucleotide
  Antisense strand to SEQ ID NO: 1185162
gcuuuggguaagauuuccc

SEQ ID NO: 1185164 - RNA, 19 nt, Artificial Sequence
  Description of Artificial Sequence: Synthetic oligonucleotide
  Sense strand starting at position 3557 of SEQ ID NO: 916802
uaauaaguuugucuagaag

SEQ ID NO: 1185165 - RNA, 19 nt, Artificial Sequence
  Description of Artificial Sequence: Synthetic oligonucleotide
  Antisense strand to SEQ ID NO: 1185164
cuucuagacaaacuuauua

SEQ ID NO: 1185166 - RNA, 19 nt, Artificial Sequence
  Description of Artificial Sequence: Synthetic oligonucleotide
  Sense strand starting at position 3580 of SEQ ID NO: 916802
gguugagugcuuaguugug

SEQ ID NO: 1185167 - RNA, 19 nt, Artificial Sequence
  Description of Artificial Sequence: Synthetic oligonucleotide
  Antisense strand to SEQ ID NO: 1185166
cacaacuaagcacucaacc

SEQ ID NO: 1185168 - RNA, 19 nt, Artificial Sequence
  Description of Artificial Sequence: Synthetic oligonucleotide
  Sense strand starting at position 3587 of SEQ ID NO: 916802
ugcuuaguuguguagaaag

SEQ ID NO: 1185169 - RNA, 19 nt, Artificial Sequence
  Description of Artificial Sequence: Synthetic oligonucleotide
  Antisense strand to SEQ ID NO: 1185168
cuuucuacacaacuaagca

SEQ ID NO: 1185170 - RNA, 19 nt, Artificial Sequence
  Description of Artificial Sequence: Synthetic oligonucleotide
  Sense strand starting at position 3597 of SEQ ID NO: 916802
uguagaaagggugguuaca

SEQ ID NO: 1185171 - RNA, 19 nt, Artificial Sequence
  Description of Artificial Sequence: Synthetic oligonucleotide
  Antisense strand to SEQ ID NO: 1185170
uguaaccacccuuucuaca

SEQ ID NO: 1185172 - RNA, 19 nt, Artificial Sequence
  Description of Artificial Sequence: Synthetic oligonucleotide
  Sense strand starting at position 3650 of SEQ ID NO: 916802
uuguccugacaugguuaua

SEQ ID NO: 1185173 - RNA, 19 nt, Artificial Sequence
  Description of Artificial Sequence: Synthetic oligonucleotide
  Antisense strand to SEQ ID NO: 1185172
uauaaccaugucaggacaa

SEQ ID NO: 1185174 - RNA, 19 nt, Artificial Sequence
  Description of Artificial Sequence: Synthetic oligonucleotide
  Sense strand starting at position 3691 of SEQ ID NO: 916802
aaagcucaaguguguaaau

SEQ ID NO: 1185175 - RNA, 19 nt, Artificial Sequence
  Description of Artificial Sequence: Synthetic oligonucleotide
  Antisense strand to SEQ ID NO: 1185174
auuuacacacuugagcuuu

SEQ ID NO: 1185176 - RNA, 19 nt, Artificial Sequence
  Description of Artificial Sequence: Synthetic oligonucleotide
  Sense strand starting at position 3692 of SEQ ID NO: 916802
aagcucaaguguguaaaua

SEQ ID NO: 1185177 - RNA, 19 nt, Artificial Sequence
  Description of Artificial Sequence: Synthetic oligonucleotide
  Antisense strand to SEQ ID NO: 1185176
uauuuacacacuugagcuu

SEQ ID NO: 1185178 - RNA, 19 nt, Artificial Sequence
  Description of Artificial Sequence: Synthetic oligonucleotide
  Sense strand starting at position 3693 of SEQ ID NO: 916802
agcucaaguguguaaauaa

SEQ ID NO: 1185179 - RNA, 19 nt, Artificial Sequence
  Description of Artificial Sequence: Synthetic oligonucleotide
  Antisense strand to SEQ ID NO: 1185178
uuauuuacacacuugagcu

SEQ ID NO: 1185180 - RNA, 19 nt, Artificial Sequence
  Description of Artificial Sequence: Synthetic oligonucleotide
  Sense strand starting at position 3799 of SEQ ID NO: 916802
agggaauuguacgugaccu

SEQ ID NO: 1185181 - RNA, 19 nt, Artificial Sequence
  Description of Artificial Sequence: Synthetic oligonucleotide
  Antisense strand to SEQ ID NO: 1185180
aggucacguacaauucccu

SEQ ID NO: 1185182 - RNA, 19 nt, Artificial Sequence
  Description of Artificial Sequence: Synthetic oligonucleotide
  Sense strand starting at position 3800 of SEQ ID NO: 916802
gggaauuguacgugaccug

SEQ ID NO: 1185183 - RNA, 19 nt, Artificial Sequence
  Description of Artificial Sequence: Synthetic oligonucleotide
  Antisense strand to SEQ ID NO: 1185182
caggucacguacaauuccc

SEQ ID NO: 1185184 - RNA, 19 nt, Artificial Sequence
  Description of Artificial Sequence: Synthetic oligonucleotide
  Sense strand starting at position 3869 of SEQ ID NO: 916802
cgggaugucugggcaauca

SEQ ID NO: 1185185 - RNA, 19 nt, Artificial Sequence
  Description of Artificial Sequence: Synthetic oligonucleotide
  Antisense strand to SEQ ID NO: 1185184
ugauugcccagacaucccg

SEQ ID NO: 1185186 - RNA, 19 nt, Artificial Sequence
  Description of Artificial Sequence: Synthetic oligonucleotide
  Sense strand starting at position 3878 of SEQ ID NO: 916802
ugggcaaucaugugacuac

SEQ ID NO: 1185187 - RNA, 19 nt, Artificial Sequence
  Description of Artificial Sequence: Synthetic oligonucleotide
  Antisense strand to SEQ ID NO: 1185186
guagucacaugauugccca

SEQ ID NO: 1185188 - RNA, 19 nt, Artificial Sequence
  Description of Artificial Sequence: Synthetic oligonucleotide
  Sense strand starting at position 3895 of SEQ ID NO: 916802
accagacuucugugacuug

SEQ ID NO: 1185189 - RNA, 19 nt, Artificial Sequence
  Description of Artificial Sequence: Synthetic oligonucleotide
  Antisense strand to SEQ ID NO: 1185188
caagucacagaagucuggu

SEQ ID NO: 1185190 - RNA, 19 nt, Artificial Sequence
  Description of Artificial Sequence: Synthetic oligonucleotide
  Sense strand starting at position 59 of SEQ ID NO: 916803
caaggauguggccauguuu

SEQ ID NO: 1185191 - RNA, 19 nt, Artificial Sequence
  Description of Artificial Sequence: Synthetic oligonucleotide
  Antisense strand to SEQ ID NO: 1185190
aaacauggccacauccuug

SEQ ID NO: 1185192 - RNA, 19 nt, Artificial Sequence
  Description of Artificial Sequence: Synthetic oligonucleotide
  Sense strand starting at position 72 of SEQ ID NO: 916803
auguuuaaccauugugaca

SEQ ID NO: 1185193 - RNA, 19 nt, Artificial Sequence
  Description of Artificial Sequence: Synthetic oligonucleotide
  Antisense strand to SEQ ID NO: 1185192
ugucacaaugguuaaacau

SEQ ID NO: 1185194 - RNA, 19 nt, Artificial Sequence
  Description of Artificial Sequence: Synthetic oligonucleotide
  Sense strand starting at position 607 of SEQ ID NO: 916803
gcgccugaccucuauuuag

SEQ ID NO: 1185195 - RNA, 19 nt, Artificial Sequence
  Description of Artificial Sequence: Synthetic oligonucleotide
  Antisense strand to SEQ ID NO: 1185194
cuaaauagaggucaggcgc

SEQ ID NO: 1185196 - RNA, 19 nt, Artificial Sequence
  Description of Artificial Sequence: Synthetic oligonucleotide
  Sense strand starting at position 951 of SEQ ID NO: 916803
gaguuacguaaaugagauu

SEQ ID NO: 1185197 - RNA, 19 nt, Artificial Sequence
  Description of Artificial Sequence: Synthetic oligonucleotide
  Antisense strand to SEQ ID NO: 1185196
aaucucauuuacguaacuc

SEQ ID NO: 1185198 - RNA, 19 nt, Artificial Sequence
  Description of Artificial Sequence: Synthetic oligonucleotide
  Sense strand starting at position 952 of SEQ ID NO: 916803
aguuacguaaaugagauua

SEQ ID NO: 1185199 - RNA, 19 nt, Artificial Sequence
  Description of Artificial Sequence: Synthetic oligonucleotide
  Antisense strand to SEQ ID NO: 1185198
uaaucucauuuacguaacu

SEQ ID NO: 1185200 - RNA, 19 nt, Artificial Sequence
  Description of Artificial Sequence: Synthetic oligonucleotide
  Sense strand starting at position 1002 of SEQ ID NO: 916803
auauaagacuuguucuuga

SEQ ID NO: 1185201 - RNA, 19 nt, Artificial Sequence
  Description of Artificial Sequence: Synthetic oligonucleotide
  Antisense strand to SEQ ID NO: 1185200
ucaagaacaagucuuauau

SEQ ID NO: 1185202 - RNA, 19 nt, Artificial Sequence
  Description of Artificial Sequence: Synthetic oligonucleotide
  Sense strand starting at position 1007 of SEQ ID NO: 916803
agacuuguucuugagcaua

SEQ ID NO: 1185203 - RNA, 19 nt, Artificial Sequence
  Description of Artificial Sequence: Synthetic oligonucleotide
  Antisense strand to SEQ ID NO: 1185202
uaugcucaagaacaagucu

SEQ ID NO: 1185204 - RNA, 19 nt, Artificial Sequence
  Description of Artificial Sequence: Synthetic oligonucleotide
  Sense strand starting at position 1256 of SEQ ID NO: 916803
cuaaauuagguuuaagcuu

SEQ ID NO: 1185205 - RNA, 19 nt, Artificial Sequence
  Description of Artificial Sequence: Synthetic oligonucleotide
  Antisense strand to SEQ ID NO: 1185204
aagcuuaaaccuaauuuag

SEQ ID NO: 1185206 - RNA, 19 nt, Artificial Sequence
  Description of Artificial Sequence: Synthetic oligonucleotide
  Sense strand starting at position 1374 of SEQ ID NO: 916803
gcaacaagucagugagaug

SEQ ID NO: 1185207 - RNA, 19 nt, Artificial Sequence
  Description of Artificial Sequence: Synthetic oligonucleotide
  Antisense strand to SEQ ID NO: 1185206
caucucacugacuuguugc

SEQ ID NO: 1185208 - RNA, 19 nt, Artificial Sequence
  Description of Artificial Sequence: Synthetic oligonucleotide
  Sense strand starting at position 2061 of SEQ ID NO: 916803
gugacuuccuucucaggau

SEQ ID NO: 1185209 - RNA, 19 nt, Artificial Sequence
  Description of Artificial Sequence: Synthetic oligonucleotide
  Antisense strand to SEQ ID NO: 1185208
auccugagaaggaagucac

SEQ ID NO: 1185210 - RNA, 19 nt, Artificial Sequence
  Description of Artificial Sequence: Synthetic oligonucleotide
  Sense strand starting at position 2276 of SEQ ID NO: 916803
aucucugaccuuugugaca

SEQ ID NO: 1185211 - RNA, 19 nt, Artificial Sequence
  Description of Artificial Sequence: Synthetic oligonucleotide
  Antisense strand to SEQ ID NO: 1185210
ugucacaaaggucagagau

SEQ ID NO: 1185212 - RNA, 19 nt, Artificial Sequence
  Description of Artificial Sequence: Synthetic oligonucleotide
  Sense strand starting at position 2305 of SEQ ID NO: 916803
ugaccuuugugaguauaau

SEQ ID NO: 1185213 - RNA, 19 nt, Artificial Sequence
  Description of Artificial Sequence: Synthetic oligonucleotide
  Antisense strand to SEQ ID NO: 1185212
auuauacucacaaagguca

SEQ ID NO: 1185214 - RNA, 19 nt, Artificial Sequence
  Description of Artificial Sequence: Synthetic oligonucleotide
  Sense strand starting at position 2306 of SEQ ID NO: 916803
gaccuuugugaguauaaua

SEQ ID NO: 1185215 - RNA, 19 nt, Artificial Sequence
  Description of Artificial Sequence: Synthetic oligonucleotide
  Antisense strand to SEQ ID NO: 1185214
uauuauacucacaaagguc

SEQ ID NO: 1185216 - RNA, 19 nt, Artificial Sequence
  Description of Artificial Sequence: Synthetic oligonucleotide
  Sense strand starting at position 2317 of SEQ ID NO: 916803
guauaauaaccaugugaga

SEQ ID NO: 1185217 - RNA, 19 nt, Artificial Sequence
  Description of Artificial Sequence: Synthetic oligonucleotide
  Antisense strand to SEQ ID NO: 1185216
ucucacaugguuauuauac

SEQ ID NO: 1185218 - RNA, 19 nt, Artificial Sequence
  Description of Artificial Sequence: Synthetic oligonucleotide
  Sense strand starting at position 2328 of SEQ ID NO: 916803
augugagaaaguuacuguu

SEQ ID NO: 1185219 - RNA, 19 nt, Artificial Sequence
  Description of Artificial Sequence: Synthetic oligonucleotide
  Antisense strand to SEQ ID NO: 1185218
aacaguaacuuucucacau

SEQ ID NO: 1185220 - RNA, 19 nt, Artificial Sequence
  Description of Artificial Sequence: Synthetic oligonucleotide
  Sense strand starting at position 2486 of SEQ ID NO: 916803
ugaaucuaucucugagucu

SEQ ID NO: 1185221 - RNA, 19 nt, Artificial Sequence
  Description of Artificial Sequence: Synthetic oligonucleotide
  Antisense strand to SEQ ID NO: 1185220
agacucagagauagauuca

SEQ ID NO: 1185222 - RNA, 19 nt, Artificial Sequence
  Description of Artificial Sequence: Synthetic oligonucleotide
  Sense strand starting at position 2498 of SEQ ID NO: 916803
ugagucuuucuuugacaug

SEQ ID NO: 1185223 - RNA, 19 nt, Artificial Sequence
  Description of Artificial Sequence: Synthetic oligonucleotide
  Antisense strand to SEQ ID NO: 1185222
caugucaaagaaagacuca

SEQ ID NO: 1185224 - RNA, 19 nt, Artificial Sequence
  Description of Artificial Sequence: Synthetic oligonucleotide
  Sense strand starting at position 2764 of SEQ ID NO: 916803
uugacugagcuuuggaauc

SEQ ID NO: 1185225 - RNA, 19 nt, Artificial Sequence
  Description of Artificial Sequence: Synthetic oligonucleotide
  Antisense strand to SEQ ID NO: 1185224
gauuccaaagcucagucaa

SEQ ID NO: 1185226 - RNA, 19 nt, Artificial Sequence
  Description of Artificial Sequence: Synthetic oligonucleotide
  Sense strand starting at position 2871 of SEQ ID NO: 916803
uguguauacugauuucugu

SEQ ID NO: 1185227 - RNA, 19 nt, Artificial Sequence
  Description of Artificial Sequence: Synthetic oligonucleotide
  Antisense strand to SEQ ID NO: 1185226
acagaaaucaguauacaca

SEQ ID NO: 1185228 - RNA, 19 nt, Artificial Sequence
  Description of Artificial Sequence: Synthetic oligonucleotide
  Sense strand starting at position 2878 of SEQ ID NO: 916803
acugauuucuguguccuau

SEQ ID NO: 1185229 - RNA, 19 nt, Artificial Sequence
  Description of Artificial Sequence: Synthetic oligonucleotide
  Antisense strand to SEQ ID NO: 1185228
auaggacacagaaaucagu

SEQ ID NO: 1185230 - RNA, 19 nt, Artificial Sequence
  Description of Artificial Sequence: Synthetic oligonucleotide
  Sense strand starting at position 2889 of SEQ ID NO: 916803
uguccuaucccagagauuc

SEQ ID NO: 1185231 - RNA, 19 nt, Artificial Sequence
  Description of Artificial Sequence: Synthetic oligonucleotide
  Antisense strand to SEQ ID NO: 1185230
gaaucucugggauaggaca

SEQ ID NO: 1185232 - RNA, 19 nt, Artificial Sequence
  Description of Artificial Sequence: Synthetic oligonucleotide
  Sense strand starting at position 2908 of SEQ ID NO: 916803
ugauguaacuagucuugag

SEQ ID NO: 1185233 - RNA, 19 nt, Artificial Sequence
  Description of Artificial Sequence: Synthetic oligonucleotide
  Antisense strand to SEQ ID NO: 1185232
cucaagacuaguuacauca

SEQ ID NO: 1185234 - RNA, 19 nt, Artificial Sequence
  Description of Artificial Sequence: Synthetic oligonucleotide
  Sense strand starting at position 2912 of SEQ ID NO: 916803
guaacuagucuugagugaa

SEQ ID NO: 1185235 - RNA, 19 nt, Artificial Sequence
  Description of Artificial Sequence: Synthetic oligonucleotide
  Antisense strand to SEQ ID NO: 1185234
uucacucaagacuaguuac

SEQ ID NO: 1185236 - RNA, 19 nt, Artificial Sequence
  Description of Artificial Sequence: Synthetic oligonucleotide
  Sense strand starting at position 3038 of SEQ ID NO: 916803
aggucauaucauuagcaca

SEQ ID NO: 1185237 - RNA, 19 nt, Artificial Sequence
  Description of Artificial Sequence: Synthetic oligonucleotide
  Antisense strand to SEQ ID NO: 1185236
ugugcuaaugauaugaccu

SEQ ID NO: 1185238 - RNA, 19 nt, Artificial Sequence
  Description of Artificial Sequence: Synthetic oligonucleotide
  Sense strand starting at position 3104 of SEQ ID NO: 916803
guagucaaaucauuaagug

SEQ ID NO: 1185239 - RNA, 19 nt, Artificial Sequence
  Description of Artificial Sequence: Synthetic oligonucleotide
  Antisense strand to SEQ ID NO: 1185238
cacuuaaugauuugacuac

SEQ ID NO: 1185240 - RNA, 19 nt, Artificial Sequence
  Description of Artificial Sequence: Synthetic oligonucleotide
  Sense strand starting at position 3111 of SEQ ID NO: 916803
aaucauuaaguguacguca

SEQ ID NO: 1185241 - RNA, 19 nt, Artificial Sequence
  Description of Artificial Sequence: Synthetic oligonucleotide
  Antisense strand to SEQ ID NO: 1185240
ugacguacacuuaaugauu

SEQ ID NO: 1185242 - RNA, 19 nt, Artificial Sequence
  Description of Artificial Sequence: Synthetic oligonucleotide
  Sense strand starting at position 3142 of SEQ ID NO: 916803
augaaaugauucuuugguu

SEQ ID NO: 1185243 - RNA, 19 nt, Artificial Sequence
  Description of Artificial Sequence: Synthetic oligonucleotide
  Antisense strand to SEQ ID NO: 1185242
aaccaaagaaucauuucau

SEQ ID NO: 1185244 - RNA, 19 nt, Artificial Sequence
  Description of Artificial Sequence: Synthetic oligonucleotide
  Sense strand starting at position 3143 of SEQ ID NO: 916803
ugaaaugauucuuugguug

SEQ ID NO: 1185245 - RNA, 19 nt, Artificial Sequence
  Description of Artificial Sequence: Synthetic oligonucleotide
  Antisense strand to SEQ ID NO: 1185244
caaccaaagaaucauuuca

SEQ ID NO: 1185246 - RNA, 19 nt, Artificial Sequence
  Description of Artificial Sequence: Synthetic oligonucleotide
  Sense strand starting at position 3271 of SEQ ID NO: 916803
uucugacagaguugauuga

SEQ ID NO: 1185247 - RNA, 19 nt, Artificial Sequence
  Description of Artificial Sequence: Synthetic oligonucleotide
  Antisense strand to SEQ ID NO: 1185246
ucaaucaacucugucagaa

SEQ ID NO: 1185248 - RNA, 19 nt, Artificial Sequence
  Description of Artificial Sequence: Synthetic oligonucleotide
  Sense strand starting at position 3392 of SEQ ID NO: 916803
ucagaaguagcuuagugaa

SEQ ID NO: 1185249 - RNA, 19 nt, Artificial Sequence
  Description of Artificial Sequence: Synthetic oligonucleotide
  Antisense strand to SEQ ID NO: 1185248
uucacuaagcuacuucuga

SEQ ID NO: 1185250 - RNA, 19 nt, Artificial Sequence
  Description of Artificial Sequence: Synthetic oligonucleotide
  Sense strand starting at position 3394 of SEQ ID NO: 916803
agaaguagcuuagugaaua

SEQ ID NO: 1185251 - RNA, 19 nt, Artificial Sequence
  Description of Artificial Sequence: Synthetic oligonucleotide
  Antisense strand to SEQ ID NO: 1185250
uauucacuaagcuacuucu

SEQ ID NO: 1185252 - RNA, 19 nt, Artificial Sequence
  Description of Artificial Sequence: Synthetic oligonucleotide
  Sense strand starting at position 3550 of SEQ ID NO: 916803
aguucuuuccuagauuccu

SEQ ID NO: 1185253 - RNA, 19 nt, Artificial Sequence
  Description of Artificial Sequence: Synthetic oligonucleotide
  Antisense strand to SEQ ID NO: 1185252
aggaaucuaggaaagaacu

SEQ ID NO: 1185254 - RNA, 19 nt, Artificial Sequence
  Description of Artificial Sequence: Synthetic oligonucleotide
  Sense strand starting at position 3591 of SEQ ID NO: 916803
ggcaguuaucuuuaaaugg

SEQ ID NO: 1185255 - RNA, 19 nt, Artificial Sequence
  Description of Artificial Sequence: Synthetic oligonucleotide
  Antisense strand to SEQ ID NO: 1185254
ccauuuaaagauaacugcc

SEQ ID NO: 1185256 - RNA, 19 nt, Artificial Sequence
  Description of Artificial Sequence: Synthetic oligonucleotide
  Sense strand starting at position 3719 of SEQ ID NO: 916803
agacaaaccucuuuaugug

SEQ ID NO: 1185257 - RNA, 19 nt, Artificial Sequence
  Description of Artificial Sequence: Synthetic oligonucleotide
  Antisense strand to SEQ ID NO: 1185256
cacauaaagagguuugucu

SEQ ID NO: 1185258 - RNA, 19 nt, Artificial Sequence
  Description of Artificial Sequence: Synthetic oligonucleotide
  Sense strand starting at position 3753 of SEQ ID NO: 916803
uuguaauggucaguggaaa

SEQ ID NO: 1185259 - RNA, 19 nt, Artificial Sequence
  Description of Artificial Sequence: Synthetic oligonucleotide
  Antisense strand to SEQ ID NO: 1185258
uuuccacugaccauuacaa

SEQ ID NO: 1185260 - RNA, 19 nt, Artificial Sequence
  Description of Artificial Sequence: Synthetic oligonucleotide
  Sense strand starting at position 3754 of SEQ ID NO: 916803
uguaauggucaguggaaau

SEQ ID NO: 1185261 - RNA, 19 nt, Artificial Sequence
  Description of Artificial Sequence: Synthetic oligonucleotide
  Antisense strand to SEQ ID NO: 1185260
auuuccacugaccauuaca

SEQ ID NO: 1185262 - RNA, 19 nt, Artificial Sequence
  Description of Artificial Sequence: Synthetic oligonucleotide
  Sense strand starting at position 3873 of SEQ ID NO: 916803
aguuaaagagucugacagu

SEQ ID NO: 1185263 - RNA, 19 nt, Artificial Sequence
  Description of Artificial Sequence: Synthetic oligonucleotide
  Antisense strand to SEQ ID NO: 1185262
acugucagacucuuuaacu

SEQ ID NO: 1185264 - RNA, 19 nt, Artificial Sequence
  Description of Artificial Sequence: Synthetic oligonucleotide
  Sense strand starting at position 3909 of SEQ ID NO: 916803
aaggaaguauuagcuaagu

SEQ ID NO: 1185265 - RNA, 19 nt, Artificial Sequence
  Description of Artificial Sequence: Synthetic oligonucleotide
  Antisense strand to SEQ ID NO: 1185264
acuuagcuaauacuuccuu

SEQ ID NO: 1185266 - RNA, 19 nt, Artificial Sequence
  Description of Artificial Sequence: Synthetic oligonucleotide
  Sense strand starting at position 3911 of SEQ ID NO: 916803
ggaaguauuagcuaaguaa

SEQ ID NO: 1185267 - RNA, 19 nt, Artificial Sequence
  Description of Artificial Sequence: Synthetic oligonucleotide
  Antisense strand to SEQ ID NO: 1185266
uuacuuagcuaauacuucc

SEQ ID NO: 1185268 - RNA, 19 nt, Artificial Sequence
  Description of Artificial Sequence: Synthetic oligonucleotide
  Sense strand starting at position 3966 of SEQ ID NO: 916803
uggagauacuauguuaagu

SEQ ID NO: 1185269 - RNA, 19 nt, Artificial Sequence
  Description of Artificial Sequence: Synthetic oligonucleotide
  Antisense strand to SEQ ID NO: 1185268
acuuaacauaguaucucca

SEQ ID NO: 1185270 - RNA, 19 nt, Artificial Sequence
  Description of Artificial Sequence: Synthetic oligonucleotide
  Sense strand starting at position 72 of SEQ ID NO: 916804
aagucuucccagugaggaa

SEQ ID NO: 1185271 - RNA, 19 nt, Artificial Sequence
  Description of Artificial Sequence: Synthetic oligonucleotide
  Antisense strand to SEQ ID NO: 1185270
uuccucacugggaagacuu

SEQ ID NO: 1185272 - RNA, 19 nt, Artificial Sequence
  Description of Artificial Sequence: Synthetic oligonucleotide
  Sense strand starting at position 73 of SEQ ID NO: 916804
agucuucccagugaggaau

SEQ ID NO: 1185273 - RNA, 19 nt, Artificial Sequence
  Description of Artificial Sequence: Synthetic oligonucleotide
  Antisense strand to SEQ ID NO: 1185272
auuccucacugggaagacu

SEQ ID NO: 1185274 - RNA, 19 nt, Artificial Sequence
  Description of Artificial Sequence: Synthetic oligonucleotide
  Sense strand starting at position 283 of SEQ ID NO: 916804
augagugaacccugcuuau

SEQ ID NO: 1185275 - RNA, 19 nt, Artificial Sequence
  Description of Artificial Sequence: Synthetic oligonucleotide
  Antisense strand to SEQ ID NO: 1185274
auaagcaggguucacucau

SEQ ID NO: 1185276 - RNA, 19 nt, Artificial Sequence
  Description of Artificial Sequence: Synthetic oligonucleotide
  Sense strand starting at position 286 of SEQ ID NO: 916804
agugaacccugcuuauauu

SEQ ID NO: 1185277 - RNA, 19 nt, Artificial Sequence
  Description of Artificial Sequence: Synthetic oligonucleotide
  Antisense strand to SEQ ID NO: 1185276
aauauaagcaggguucacu

SEQ ID NO: 1185278 - RNA, 19 nt, Artificial Sequence
  Description of Artificial Sequence: Synthetic oligonucleotide
  Sense strand starting at position 646 of SEQ ID NO: 916804
cggucuacccuggaacaaa

SEQ ID NO: 1185279 - RNA, 19 nt, Artificial Sequence
  Description of Artificial Sequence: Synthetic oligonucleotide
  Antisense strand to SEQ ID NO: 1185278
uuuguuccaggguagaccg

SEQ ID NO: 1185280 - RNA, 19 nt, Artificial Sequence
  Description of Artificial Sequence: Synthetic oligonucleotide
  Sense strand starting at position 670 of SEQ ID NO: 916804
agcugaagccuggaaucuu

SEQ ID NO: 1185281 - RNA, 19 nt, Artificial Sequence
  Description of Artificial Sequence: Synthetic oligonucleotide
  Antisense strand to SEQ ID NO: 1185280
aagauuccaggcuucagcu

SEQ ID NO: 1185282 - RNA, 19 nt, Artificial Sequence
  Description of Artificial Sequence: Synthetic oligonucleotide
  Sense strand starting at position 967 of SEQ ID NO: 916804
uuacucagcuguuccuaga

SEQ ID NO: 1185283 - RNA, 19 nt, Artificial Sequence
  Description of Artificial Sequence: Synthetic oligonucleotide
  Antisense strand to SEQ ID NO: 1185282
ucuaggaacagcugaguaa

SEQ ID NO: 1185284 - RNA, 19 nt, Artificial Sequence
  Description of Artificial Sequence: Synthetic oligonucleotide
  Sense strand starting at position 1013 of SEQ ID NO: 916804
ugcaaaucuuacccagugu

SEQ ID NO: 1185285 - RNA, 19 nt, Artificial Sequence
  Description of Artificial Sequence: Synthetic oligonucleotide
  Antisense strand to SEQ ID NO: 1185284
acacuggguaagauuugca

SEQ ID NO: 1185286 - RNA, 19 nt, Artificial Sequence
  Description of Artificial Sequence: Synthetic oligonucleotide
  Sense strand starting at position 1150 of SEQ ID NO: 916804
aggguuaacucucucagag

SEQ ID NO: 1185287 - RNA, 19 nt, Artificial Sequence
  Description of Artificial Sequence: Synthetic oligonucleotide
  Antisense strand to SEQ ID NO: 1185286
cucugagagaguuaacccu

SEQ ID NO: 1185288 - RNA, 19 nt, Artificial Sequence
  Description of Artificial Sequence: Synthetic oligonucleotide
  Sense strand starting at position 1227 of SEQ ID NO: 916804
ccacaaucuugaucgcauu

SEQ ID NO: 1185289 - RNA, 19 nt, Artificial Sequence
  Description of Artificial Sequence: Synthetic oligonucleotide
  Antisense strand to SEQ ID NO: 1185288
aaugcgaucaagauugugg

SEQ ID NO: 1185290 - RNA, 19 nt, Artificial Sequence
  Description of Artificial Sequence: Synthetic oligonucleotide
  Sense strand starting at position 1354 of SEQ ID NO: 916804
agcauagucguuccucgau

SEQ ID NO: 1185291 - RNA, 19 nt, Artificial Sequence
  Description of Artificial Sequence: Synthetic oligonucleotide
  Antisense strand to SEQ ID NO: 1185290
aucgaggaacgacuaugcu

SEQ ID NO: 1185292 - RNA, 19 nt, Artificial Sequence
  Description of Artificial Sequence: Synthetic oligonucleotide
  Sense strand starting at position 1592 of SEQ ID NO: 916804
agcggaggugccugaaaga

SEQ ID NO: 1185293 - RNA, 19 nt, Artificial Sequence
  Description of Artificial Sequence: Synthetic oligonucleotide
  Antisense strand to SEQ ID NO: 1185292
ucuuucaggcaccuccgcu

SEQ ID NO: 1185294 - RNA, 19 nt, Artificial Sequence
  Description of Artificial Sequence: Synthetic oligonucleotide
  Sense strand starting at position 2059 of SEQ ID NO: 916804
gccucccacccgugauuua

SEQ ID NO: 1185295 - RNA, 19 nt, Artificial Sequence
  Description of Artificial Sequence: Synthetic oligonucleotide
  Antisense strand to SEQ ID NO: 1185294
uaaaucacgggugggaggc

SEQ ID NO: 1185296 - RNA, 19 nt, Artificial Sequence
  Description of Artificial Sequence: Synthetic oligonucleotide
  Sense strand starting at position 2251 of SEQ ID NO: 916804
uaaguaauuggaugguuaa

SEQ ID NO: 1185297 - RNA, 19 nt, Artificial Sequence
  Description of Artificial Sequence: Synthetic oligonucleotide
  Antisense strand to SEQ ID NO: 1185296
uuaaccauccaauuacuua

SEQ ID NO: 1185298 - RNA, 19 nt, Artificial Sequence
  Description of Artificial Sequence: Synthetic oligonucleotide
  Sense strand starting at position 2252 of SEQ ID NO: 916804
aaguaauuggaugguuaaa

SEQ ID NO: 1185299 - RNA, 19 nt, Artificial Sequence
  Description of Artificial Sequence: Synthetic oligonucleotide
  Antisense strand to SEQ ID NO: 1185298
uuuaaccauccaauuacuu

SEQ ID NO: 1185300 - RNA, 19 nt, Artificial Sequence
  Description of Artificial Sequence: Synthetic oligonucleotide
  Sense strand starting at position 2303 of SEQ ID NO: 916804
acgggacuucucgacauca

SEQ ID NO: 1185301 - RNA, 19 nt, Artificial Sequence
  Description of Artificial Sequence: Synthetic oligonucleotide
  Antisense strand to SEQ ID NO: 1185300
ugaugucgagaagucccgu

SEQ ID NO: 1185302 - RNA, 19 nt, Artificial Sequence
  Description of Artificial Sequence: Synthetic oligonucleotide
  Sense strand starting at position 2506 of SEQ ID NO: 916804
cucaaaguuucgcccagau

SEQ ID NO: 1185303 - RNA, 19 nt, Artificial Sequence
  Description of Artificial Sequence: Synthetic oligonucleotide
  Antisense strand to SEQ ID NO: 1185302
aucugggcgaaacuuugag

SEQ ID NO: 1185304 - RNA, 19 nt, Artificial Sequence
  Description of Artificial Sequence: Synthetic oligonucleotide
  Sense strand starting at position 2508 of SEQ ID NO: 916804
caaaguuucgcccagauga

SEQ ID NO: 1185305 - RNA, 19 nt, Artificial Sequence
  Description of Artificial Sequence: Synthetic oligonucleotide
  Antisense strand to SEQ ID NO: 1185304
ucaucugggcgaaacuuug

SEQ ID NO: 1185306 - RNA, 19 nt, Artificial Sequence
  Description of Artificial Sequence: Synthetic oligonucleotide
  Sense strand starting at position 2557 of SEQ ID NO: 916804
ugaccuguaccuggaguuu

SEQ ID NO: 1185307 - RNA, 19 nt, Artificial Sequence
  Description of Artificial Sequence: Synthetic oligonucleotide
  Antisense strand to SEQ ID NO: 1185306
aaacuccagguacagguca

SEQ ID NO: 1185308 - RNA, 19 nt, Artificial Sequence
  Description of Artificial Sequence: Synthetic oligonucleotide
  Sense strand starting at position 2630 of SEQ ID NO: 916804
caggguggcuuaguugaau

SEQ ID NO: 1185309 - RNA, 19 nt, Artificial Sequence
  Description of Artificial Sequence: Synthetic oligonucleotide
  Antisense strand to SEQ ID NO: 1185308
auucaacuaagccacccug

SEQ ID NO: 1185310 - RNA, 19 nt, Artificial Sequence
  Description of Artificial Sequence: Synthetic oligonucleotide
  Sense strand starting at position 2644 of SEQ ID NO: 916804
ugaauaagcacuugauggu

SEQ ID NO: 1185311 - RNA, 19 nt, Artificial Sequence
  Description of Artificial Sequence: Synthetic oligonucleotide
  Antisense strand to SEQ ID NO: 1185310
accaucaagugcuuauuca

SEQ ID NO: 1185312 - RNA, 19 nt, Artificial Sequence
  Description of Artificial Sequence: Synthetic oligonucleotide
  Sense strand starting at position 2645 of SEQ ID NO: 916804
gaauaagcacuugaugguu

SEQ ID NO: 1185313 - RNA, 19 nt, Artificial Sequence
  Description of Artificial Sequence: Synthetic oligonucleotide
  Antisense strand to SEQ ID NO: 1185312
aaccaucaagugcuuauuc

SEQ ID NO: 1185314 - RNA, 19 nt, Artificial Sequence
  Description of Artificial Sequence: Synthetic oligonucleotide
  Sense strand starting at position 2865 of SEQ ID NO: 916804
uggacagagugauaaagga

SEQ ID NO: 1185315 - RNA, 19 nt, Artificial Sequence
  Description of Artificial Sequence: Synthetic oligonucleotide
  Antisense strand to SEQ ID NO: 1185314
uccuuuaucacucugucca

SEQ ID NO: 1185316 - RNA, 19 nt, Artificial Sequence
  Description of Artificial Sequence: Synthetic oligonucleotide
  Sense strand starting at position 2932 of SEQ ID NO: 916804
gugguuugaguagaaugaa

SEQ ID NO: 1185317 - RNA, 19 nt, Artificial Sequence
  Description of Artificial Sequence: Synthetic oligonucleotide
  Antisense strand to SEQ ID NO: 1185316
uucauucuacucaaaccac

SEQ ID NO: 1185318 - RNA, 19 nt, Artificial Sequence
  Description of Artificial Sequence: Synthetic oligonucleotide
  Sense strand starting at position 2974 of SEQ ID NO: 916804
accauugagccuuggccaa

SEQ ID NO: 1185319 - RNA, 19 nt, Artificial Sequence
  Description of Artificial Sequence: Synthetic oligonucleotide
  Antisense strand to SEQ ID NO: 1185318
uuggccaaggcucaauggu

SEQ ID NO: 1185320 - RNA, 19 nt, Artificial Sequence
  Description of Artificial Sequence: Synthetic oligonucleotide
  Sense strand starting at position 3019 of SEQ ID NO: 916804
ggcuuucugaagugaauuc

SEQ ID NO: 1185321 - RNA, 19 nt, Artificial Sequence
  Description of Artificial Sequence: Synthetic oligonucleotide
  Antisense strand to SEQ ID NO: 1185320
gaauucacuucagaaagcc

SEQ ID NO: 1185322 - RNA, 19 nt, Artificial Sequence
  Description of Artificial Sequence: Synthetic oligonucleotide
  Sense strand starting at position 3106 of SEQ ID NO: 916804
cccagugcuccauaucuca

SEQ ID NO: 1185323 - RNA, 19 nt, Artificial Sequence
  Description of Artificial Sequence: Synthetic oligonucleotide
  Antisense strand to SEQ ID NO: 1185322
ugagauauggagcacuggg

SEQ ID NO: 1185324 - RNA, 19 nt, Artificial Sequence
  Description of Artificial Sequence: Synthetic oligonucleotide
  Sense strand starting at position 3135 of SEQ ID NO: 916804
uccuccuaacuuugggaaa

SEQ ID NO: 1185325 - RNA, 19 nt, Artificial Sequence
  Description of Artificial Sequence: Synthetic oligonucleotide
  Antisense strand to SEQ ID NO: 1185324
uuucccaaaguuaggagga

SEQ ID NO: 1185326 - RNA, 19 nt, Artificial Sequence
  Description of Artificial Sequence: Synthetic oligonucleotide
  Sense strand starting at position 3190 of SEQ ID NO: 916804
agaccaagaucugcuuaga

SEQ ID NO: 1185327 - RNA, 19 nt, Artificial Sequence
  Description of Artificial Sequence: Synthetic oligonucleotide
  Antisense strand to SEQ ID NO: 1185326
ucuaagcagaucuuggucu

SEQ ID NO: 1185328 - RNA, 19 nt, Artificial Sequence
  Description of Artificial Sequence: Synthetic oligonucleotide
  Sense strand starting at position 3193 of SEQ ID NO: 916804
ccaagaucugcuuagaacu

SEQ ID NO: 1185329 - RNA, 19 nt, Artificial Sequence
  Description of Artificial Sequence: Synthetic oligonucleotide
  Antisense strand to SEQ ID NO: 1185328
aguucuaagcagaucuugg

SEQ ID NO: 1185330 - RNA, 19 nt, Artificial Sequence
  Description of Artificial Sequence: Synthetic oligonucleotide
  Sense strand starting at position 3206 of SEQ ID NO: 916804
agaacuucucugcaaagug

SEQ ID NO: 1185331 - RNA, 19 nt, Artificial Sequence
  Description of Artificial Sequence: Synthetic oligonucleotide
  Antisense strand to SEQ ID NO: 1185330
cacuuugcagagaaguucu

SEQ ID NO: 1185332 - RNA, 19 nt, Artificial Sequence
  Description of Artificial Sequence: Synthetic oligonucleotide
  Sense strand starting at position 3241 of SEQ ID NO: 916804
auuggagacucauaucuaa

SEQ ID NO: 1185333 - RNA, 19 nt, Artificial Sequence
  Description of Artificial Sequence: Synthetic oligonucleotide
  Antisense strand to SEQ ID NO: 1185332
uuagauaugagucuccaau

SEQ ID NO: 1185334 - RNA, 19 nt, Artificial Sequence
  Description of Artificial Sequence: Synthetic oligonucleotide
  Sense strand starting at position 3281 of SEQ ID NO: 916804
aggguuaacuacuacauuu

SEQ ID NO: 1185335 - RNA, 19 nt, Artificial Sequence
  Description of Artificial Sequence: Synthetic oligonucleotide
  Antisense strand to SEQ ID NO: 1185334
aaauguaguaguuaacccu

SEQ ID NO: 1185336 - RNA, 19 nt, Artificial Sequence
  Description of Artificial Sequence: Synthetic oligonucleotide
  Sense strand starting at position 3315 of SEQ ID NO: 916804
ccaugagacccaggaguua

SEQ ID NO: 1185337 - RNA, 19 nt, Artificial Sequence
  Description of Artificial Sequence: Synthetic oligonucleotide
  Antisense strand to SEQ ID NO: 1185336
uaacuccugggucucaugg

SEQ ID NO: 1185338 - RNA, 19 nt, Artificial Sequence
  Description of Artificial Sequence: Synthetic oligonucleotide
  Sense strand starting at position 3808 of SEQ ID NO: 916804
caaggugcacacgaauaua

SEQ ID NO: 1185339 - RNA, 19 nt, Artificial Sequence
  Description of Artificial Sequence: Synthetic oligonucleotide
  Antisense strand to SEQ ID NO: 1185338
uauauucgugugcaccuug

SEQ ID NO: 1185340 - RNA, 19 nt, Artificial Sequence
  Description of Artificial Sequence: Synthetic oligonucleotide
  Sense strand starting at position 3818 of SEQ ID NO: 916804
acgaauauacccugcuaau

SEQ ID NO: 1185341 - RNA, 19 nt, Artificial Sequence
  Description of Artificial Sequence: Synthetic oligonucleotide
  Antisense strand to SEQ ID NO: 1185340
auuagcaggguauauucgu

SEQ ID NO: 1185342 - RNA, 19 nt, Artificial Sequence
  Description of Artificial Sequence: Synthetic oligonucleotide
  Sense strand starting at position 3946 of SEQ ID NO: 916804
ggugguaguaauugucauc

SEQ ID NO: 1185343 - RNA, 19 nt, Artificial Sequence
  Description of Artificial Sequence: Synthetic oligonucleotide
  Antisense strand to SEQ ID NO: 1185342
gaugacaauuacuaccacc

SEQ ID NO: 1185344 - RNA, 19 nt, Artificial Sequence
  Description of Artificial Sequence: Synthetic oligonucleotide
  Sense strand starting at position 3952 of SEQ ID NO: 916804
aguaauugucaucaugaug

SEQ ID NO: 1185345 - RNA, 19 nt, Artificial Sequence
  Description of Artificial Sequence: Synthetic oligonucleotide
  Antisense strand to SEQ ID NO: 1185344
caucaugaugacaauuacu

SEQ ID NO: 1185346 - RNA, 19 nt, Artificial Sequence
  Description of Artificial Sequence: Synthetic oligonucleotide
  Sense strand starting at position 3955 of SEQ ID NO: 916804
aauugucaucaugauggua

SEQ ID NO: 1185347 - RNA, 19 nt, Artificial Sequence
  Description of Artificial Sequence: Synthetic oligonucleotide
  Antisense strand to SEQ ID NO: 1185346
uaccaucaugaugacaauu

SEQ ID NO: 1185348 - RNA, 19 nt, Artificial Sequence
  Description of Artificial Sequence: Synthetic oligonucleotide
  Sense strand starting at position 3963 of SEQ ID NO: 916804
ucaugaugguaaucauagu

SEQ ID NO: 1185349 - RNA, 19 nt, Artificial Sequence
  Description of Artificial Sequence: Synthetic oligonucleotide
  Antisense strand to SEQ ID NO: 1185348
acuaugauuaccaucauga

SEQ ID NO: 1185350 - RNA, 19 nt, Artificial Sequence
  Description of Artificial Sequence: Synthetic oligonucleotide
  Sense strand starting at position 402 of SEQ ID NO: 916805
cucuaugguguaugaagua

SEQ ID NO: 1185351 - RNA, 19 nt, Artificial Sequence
  Description of Artificial Sequence: Synthetic oligonucleotide
  Antisense strand to SEQ ID NO: 1185350
uacuucauacaccauagag

SEQ ID NO: 1185352 - RNA, 19 nt, Artificial Sequence
  Description of Artificial Sequence: Synthetic oligonucleotide
  Sense strand starting at position 451 of SEQ ID NO: 916805
cacgcuuugcgugucacua

SEQ ID NO: 1185353 - RNA, 19 nt, Artificial Sequence
  Description of Artificial Sequence: Synthetic oligonucleotide
  Antisense strand to SEQ ID NO: 1185352
uagugacacgcaaagcgug

SEQ ID NO: 1185354 - RNA, 19 nt, Artificial Sequence
  Description of Artificial Sequence: Synthetic oligonucleotide
  Sense strand starting at position 452 of SEQ ID NO: 916805
acgcuuugcgugucacuau

SEQ ID NO: 1185355 - RNA, 19 nt, Artificial Sequence
  Description of Artificial Sequence: Synthetic oligonucleotide
  Antisense strand to SEQ ID NO: 1185354
auagugacacgcaaagcgu

SEQ ID NO: 1185356 - RNA, 19 nt, Artificial Sequence
  Description of Artificial Sequence: Synthetic oligonucleotide
  Sense strand starting at position 491 of SEQ ID NO: 916805
cgacauggucuaagcggua

SEQ ID NO: 1185357 - RNA, 19 nt, Artificial Sequence
  Description of Artificial Sequence: Synthetic oligonucleotide
  Antisense strand to SEQ ID NO: 1185356
uaccgcuuagaccaugucg

SEQ ID NO: 1185358 - RNA, 19 nt, Artificial Sequence
  Description of Artificial Sequence: Synthetic oligonucleotide
  Sense strand starting at position 1222 of SEQ ID NO: 916805
gguucuaucguucucuguu

SEQ ID NO: 1185359 - RNA, 19 nt, Artificial Sequence
  Description of Artificial Sequence: Synthetic oligonucleotide
  Antisense strand to SEQ ID NO: 1185358
aacagagaacgauagaacc

SEQ ID NO: 1185360 - RNA, 19 nt, Artificial Sequence
  Description of Artificial Sequence: Synthetic oligonucleotide
  Sense strand starting at position 1229 of SEQ ID NO: 916805
ucguucucuguucuguuaa

SEQ ID NO: 1185361 - RNA, 19 nt, Artificial Sequence
  Description of Artificial Sequence: Synthetic oligonucleotide
  Antisense strand to SEQ ID NO: 1185360
uuaacagaacagagaacga

SEQ ID NO: 1185362 - RNA, 19 nt, Artificial Sequence
  Description of Artificial Sequence: Synthetic oligonucleotide
  Sense strand starting at position 1231 of SEQ ID NO: 916805
guucucuguucuguuaaau

SEQ ID NO: 1185363 - RNA, 19 nt, Artificial Sequence
  Description of Artificial Sequence: Synthetic oligonucleotide
  Antisense strand to SEQ ID NO: 1185362
auuuaacagaacagagaac

SEQ ID NO: 1185364 - RNA, 19 nt, Artificial Sequence
  Description of Artificial Sequence: Synthetic oligonucleotide
  Sense strand starting at position 1241 of SEQ ID NO: 916805
cuguuaaauccuggcucca

SEQ ID NO: 1185365 - RNA, 19 nt, Artificial Sequence
  Description of Artificial Sequence: Synthetic oligonucleotide
  Antisense strand to SEQ ID NO: 1185364
uggagccaggauuuaacag

SEQ ID NO: 1185366 - RNA, 19 nt, Artificial Sequence
  Description of Artificial Sequence: Synthetic oligonucleotide
  Sense strand starting at position 1312 of SEQ ID NO: 916805
ccaaauguuucuccuaagu

SEQ ID NO: 1185367 - RNA, 19 nt, Artificial Sequence
  Description of Artificial Sequence: Synthetic oligonucleotide
  Antisense strand to SEQ ID NO: 1185366
acuuaggagaaacauuugg

SEQ ID NO: 1185368 - RNA, 19 nt, Artificial Sequence
  Description of Artificial Sequence: Synthetic oligonucleotide
  Sense strand starting at position 1414 of SEQ ID NO: 916805
ucacaagcagcagauaauu

SEQ ID NO: 1185369 - RNA, 19 nt, Artificial Sequence
  Description of Artificial Sequence: Synthetic oligonucleotide
  Antisense strand to SEQ ID NO: 1185368
aauuaucugcugcuuguga

SEQ ID NO: 1185370 - RNA, 19 nt, Artificial Sequence
  Description of Artificial Sequence: Synthetic oligonucleotide
  Sense strand starting at position 1454 of SEQ ID NO: 916805
ggaugaagcuuauuaguag

SEQ ID NO: 1185371 - RNA, 19 nt, Artificial Sequence
  Description of Artificial Sequence: Synthetic oligonucleotide
  Antisense strand to SEQ ID NO: 1185370
cuacuaauaagcuucaucc

SEQ ID NO: 1185372 - RNA, 19 nt, Artificial Sequence
  Description of Artificial Sequence: Synthetic oligonucleotide
  Sense strand starting at position 1529 of SEQ ID NO: 916805
guaugaaagauuggucgua

SEQ ID NO: 1185373 - RNA, 19 nt, Artificial Sequence
  Description of Artificial Sequence: Synthetic oligonucleotide
  Antisense strand to SEQ ID NO: 1185372
uacgaccaaucuuucauac

SEQ ID NO: 1185374 - RNA, 19 nt, Artificial Sequence
  Description of Artificial Sequence: Synthetic oligonucleotide
  Sense strand starting at position 1530 of SEQ ID NO: 916805
uaugaaagauuggucguaa

SEQ ID NO: 1185375 - RNA, 19 nt, Artificial Sequence
  Description of Artificial Sequence: Synthetic oligonucleotide
  Antisense strand to SEQ ID NO: 1185374
uuacgaccaaucuuucaua

SEQ ID NO: 1185376 - RNA, 19 nt, Artificial Sequence
  Description of Artificial Sequence: Synthetic oligonucleotide
  Sense strand starting at position 1531 of SEQ ID NO: 916805
augaaagauuggucguaac

SEQ ID NO: 1185377 - RNA, 19 nt, Artificial Sequence
  Description of Artificial Sequence: Synthetic oligonucleotide
  Antisense strand to SEQ ID NO: 1185376
guuacgaccaaucuuucau

SEQ ID NO: 1185378 - RNA, 19 nt, Artificial Sequence
  Description of Artificial Sequence: Synthetic oligonucleotide
  Sense strand starting at position 1637 of SEQ ID NO: 916805
accgcuagcucucucacaa

SEQ ID NO: 1185379 - RNA, 19 nt, Artificial Sequence
  Description of Artificial Sequence: Synthetic oligonucleotide
  Antisense strand to SEQ ID NO: 1185378
uugugagagagcuagcggu

SEQ ID NO: 1185380 - RNA, 19 nt, Artificial Sequence
  Description of Artificial Sequence: Synthetic oligonucleotide
  Sense strand starting at position 1698 of SEQ ID NO: 916805
ccaguaguucaggagguau

SEQ ID NO: 1185381 - RNA, 19 nt, Artificial Sequence
  Description of Artificial Sequence: Synthetic oligonucleotide
  Antisense strand to SEQ ID NO: 1185380
auaccuccugaacuacugg

SEQ ID NO: 1185382 - RNA, 19 nt, Artificial Sequence
  Description of Artificial Sequence: Synthetic oligonucleotide
  Sense strand starting at position 2050 of SEQ ID NO: 916805
acccaaugggcguaacagu

SEQ ID NO: 1185383 - RNA, 19 nt, Artificial Sequence
  Description of Artificial Sequence: Synthetic oligonucleotide
  Antisense strand to SEQ ID NO: 1185382
acuguuacgcccauugggu

SEQ ID NO: 1185384 - RNA, 19 nt, Artificial Sequence
  Description of Artificial Sequence: Synthetic oligonucleotide
  Sense strand starting at position 2091 of SEQ ID NO: 916805
aggguagguugaguuaguu

SEQ ID NO: 1185385 - RNA, 19 nt, Artificial Sequence
  Description of Artificial Sequence: Synthetic oligonucleotide
  Antisense strand to SEQ ID NO: 1185384
aacuaacucaaccuacccu

SEQ ID NO: 1185386 - RNA, 19 nt, Artificial Sequence
  Description of Artificial Sequence: Synthetic oligonucleotide
  Sense strand starting at position 2095 of SEQ ID NO: 916805
uagguugaguuaguucuuu

SEQ ID NO: 1185387 - RNA, 19 nt, Artificial Sequence
  Description of Artificial Sequence: Synthetic oligonucleotide
  Antisense strand to SEQ ID NO: 1185386
aaagaacuaacucaaccua

SEQ ID NO: 1185388 - RNA, 19 nt, Artificial Sequence
  Description of Artificial Sequence: Synthetic oligonucleotide
  Sense strand starting at position 2099 of SEQ ID NO: 916805
uugaguuaguucuuucgga

SEQ ID NO: 1185389 - RNA, 19 nt, Artificial Sequence
  Description of Artificial Sequence: Synthetic oligonucleotide
  Antisense strand to SEQ ID NO: 1185388
uccgaaagaacuaacucaa

SEQ ID NO: 1185390 - RNA, 19 nt, Artificial Sequence
  Description of Artificial Sequence: Synthetic oligonucleotide
  Sense strand starting at position 2100 of SEQ ID NO: 916805
ugaguuaguucuuucggaa

SEQ ID NO: 1185391 - RNA, 19 nt, Artificial Sequence
  Description of Artificial Sequence: Synthetic oligonucleotide
  Antisense strand to SEQ ID NO: 1185390
uuccgaaagaacuaacuca

SEQ ID NO: 1185392 - RNA, 19 nt, Artificial Sequence
  Description of Artificial Sequence: Synthetic oligonucleotide
  Sense strand starting at position 2167 of SEQ ID NO: 916805
ugaggacgcuguguuauuu

SEQ ID NO: 1185393 - RNA, 19 nt, Artificial Sequence
  Description of Artificial Sequence: Synthetic oligonucleotide
  Antisense strand to SEQ ID NO: 1185392
aaauaacacagcguccuca

SEQ ID NO: 1185394 - RNA, 19 nt, Artificial Sequence
  Description of Artificial Sequence: Synthetic oligonucleotide
  Sense strand starting at position 2171 of SEQ ID NO: 916805
gacgcuguguuauuuaaac

SEQ ID NO: 1185395 - RNA, 19 nt, Artificial Sequence
  Description of Artificial Sequence: Synthetic oligonucleotide
  Antisense strand to SEQ ID NO: 1185394
guuuaaauaacacagcguc

SEQ ID NO: 1185396 - RNA, 19 nt, Artificial Sequence
  Description of Artificial Sequence: Synthetic oligonucleotide
  Sense strand starting at position 2173 of SEQ ID NO: 916805
cgcuguguuauuuaaacgu

SEQ ID NO: 1185397 - RNA, 19 nt, Artificial Sequence
  Description of Artificial Sequence: Synthetic oligonucleotide
  Antisense strand to SEQ ID NO: 1185396
acguuuaaauaacacagcg

SEQ ID NO: 1185398 - RNA, 19 nt, Artificial Sequence
  Description of Artificial Sequence: Synthetic oligonucleotide
  Sense strand starting at position 2177 of SEQ ID NO: 916805
guguuauuuaaacgucagc

SEQ ID NO: 1185399 - RNA, 19 nt, Artificial Sequence
  Description of Artificial Sequence: Synthetic oligonucleotide
  Antisense strand to SEQ ID NO: 1185398
gcugacguuuaaauaacac

SEQ ID NO: 1185400 - RNA, 19 nt, Artificial Sequence
  Description of Artificial Sequence: Synthetic oligonucleotide
  Sense strand starting at position 2277 of SEQ ID NO: 916805
guugcaguucccuggagaa

SEQ ID NO: 1185401 - RNA, 19 nt, Artificial Sequence
  Description of Artificial Sequence: Synthetic oligonucleotide
  Antisense strand to SEQ ID NO: 1185400
uucuccagggaacugcaac

SEQ ID NO: 1185402 - RNA, 19 nt, Artificial Sequence
  Description of Artificial Sequence: Synthetic oligonucleotide
  Sense strand starting at position 2279 of SEQ ID NO: 916805
ugcaguucccuggagaagu

SEQ ID NO: 1185403 - RNA, 19 nt, Artificial Sequence
  Description of Artificial Sequence: Synthetic oligonucleotide
  Antisense strand to SEQ ID NO: 1185402
acuucuccagggaacugca

SEQ ID NO: 1185404 - RNA, 19 nt, Artificial Sequence
  Description of Artificial Sequence: Synthetic oligonucleotide
  Sense strand starting at position 2757 of SEQ ID NO: 916805
gcugcagggugauucgauu

SEQ ID NO: 1185405 - RNA, 19 nt, Artificial Sequence
  Description of Artificial Sequence: Synthetic oligonucleotide
  Antisense strand to SEQ ID NO: 1185404
aaucgaaucacccugcagc

SEQ ID NO: 1185406 - RNA, 19 nt, Artificial Sequence
  Description of Artificial Sequence: Synthetic oligonucleotide
  Sense strand starting at position 2962 of SEQ ID NO: 916805
agagauuccuggcuacaau

SEQ ID NO: 1185407 - RNA, 19 nt, Artificial Sequence
  Description of Artificial Sequence: Synthetic oligonucleotide
  Antisense strand to SEQ ID NO: 1185406
auuguagccaggaaucucu

SEQ ID NO: 1185408 - RNA, 19 nt, Artificial Sequence
  Description of Artificial Sequence: Synthetic oligonucleotide
  Sense strand starting at position 3098 of SEQ ID NO: 916805
ugaccuaugcagugauucu

SEQ ID NO: 1185409 - RNA, 19 nt, Artificial Sequence
  Description of Artificial Sequence: Synthetic oligonucleotide
  Antisense strand to SEQ ID NO: 1185408
agaaucacugcauagguca

SEQ ID NO: 1185410 - RNA, 19 nt, Artificial Sequence
  Description of Artificial Sequence: Synthetic oligonucleotide
  Sense strand starting at position 3167 of SEQ ID NO: 916805
uagggaaaguaugacauuu

SEQ ID NO: 1185411 - RNA, 19 nt, Artificial Sequence
  Description of Artificial Sequence: Synthetic oligonucleotide
  Antisense strand to SEQ ID NO: 1185410
aaaugucauacuuucccua

SEQ ID NO: 1185412 - RNA, 19 nt, Artificial Sequence
  Description of Artificial Sequence: Synthetic oligonucleotide
  Sense strand starting at position 3176 of SEQ ID NO: 916805
uaugacauuugguguuaag

SEQ ID NO: 1185413 - RNA, 19 nt, Artificial Sequence
  Description of Artificial Sequence: Synthetic oligonucleotide
  Antisense strand to SEQ ID NO: 1185412
cuuaacaccaaaugucaua

SEQ ID NO: 1185414 - RNA, 19 nt, Artificial Sequence
  Description of Artificial Sequence: Synthetic oligonucleotide
  Sense strand starting at position 3179 of SEQ ID NO: 916805
gacauuugguguuaagaua

SEQ ID NO: 1185415 - RNA, 19 nt, Artificial Sequence
  Description of Artificial Sequence: Synthetic oligonucleotide
  Antisense strand to SEQ ID NO: 1185414
uaucuuaacaccaaauguc

SEQ ID NO: 1185416 - RNA, 19 nt, Artificial Sequence
  Description of Artificial Sequence: Synthetic oligonucleotide
  Sense strand starting at position 3357 of SEQ ID NO: 916805
uuuguaugugauuguuaca

SEQ ID NO: 1185417 - RNA, 19 nt, Artificial Sequence
  Description of Artificial Sequence: Synthetic oligonucleotide
  Antisense strand to SEQ ID NO: 1185416
uguaacaaucacauacaaa

SEQ ID NO: 1185418 - RNA, 19 nt, Artificial Sequence
  Description of Artificial Sequence: Synthetic oligonucleotide
  Sense strand starting at position 3390 of SEQ ID NO: 916805
gugguuucccuuuauuaua

SEQ ID NO: 1185419 - RNA, 19 nt, Artificial Sequence
  Description of Artificial Sequence: Synthetic oligonucleotide
  Antisense strand to SEQ ID NO: 1185418
uauaauaaagggaaaccac

SEQ ID NO: 1185420 - RNA, 19 nt, Artificial Sequence
  Description of Artificial Sequence: Synthetic oligonucleotide
  Sense strand starting at position 3392 of SEQ ID NO: 916805
gguuucccuuuauuauauu

SEQ ID NO: 1185421 - RNA, 19 nt, Artificial Sequence
  Description of Artificial Sequence: Synthetic oligonucleotide
  Antisense strand to SEQ ID NO: 1185420
aauauaauaaagggaaacc

SEQ ID NO: 1185422 - RNA, 19 nt, Artificial Sequence
  Description of Artificial Sequence: Synthetic oligonucleotide
  Sense strand starting at position 3464 of SEQ ID NO: 916805
cuucuaaguaguuguagua

SEQ ID NO: 1185423 - RNA, 19 nt, Artificial Sequence
  Description of Artificial Sequence: Synthetic oligonucleotide
  Antisense strand to SEQ ID NO: 1185422
uacuacaacuacuuagaag

SEQ ID NO: 1185424 - RNA, 19 nt, Artificial Sequence
  Description of Artificial Sequence: Synthetic oligonucleotide
  Sense strand starting at position 3477 of SEQ ID NO: 916805
guaguauugucaccaccca

SEQ ID NO: 1185425 - RNA, 19 nt, Artificial Sequence
  Description of Artificial Sequence: Synthetic oligonucleotide
  Antisense strand to SEQ ID NO: 1185424
uggguggugacaauacuac

SEQ ID NO: 1185426 - RNA, 19 nt, Artificial Sequence
  Description of Artificial Sequence: Synthetic oligonucleotide
  Sense strand starting at position 3591 of SEQ ID NO: 916805
uuauaagcucuuugaggga

SEQ ID NO: 1185427 - RNA, 19 nt, Artificial Sequence
  Description of Artificial Sequence: Synthetic oligonucleotide
  Antisense strand to SEQ ID NO: 1185426
ucccucaaagagcuuauaa

SEQ ID NO: 1185428 - RNA, 19 nt, Artificial Sequence
  Description of Artificial Sequence: Synthetic oligonucleotide
  Sense strand starting at position 3595 of SEQ ID NO: 916805
aagcucuuugagggaaauu

SEQ ID NO: 1185429 - RNA, 19 nt, Artificial Sequence
  Description of Artificial Sequence: Synthetic oligonucleotide
  Antisense strand to SEQ ID NO: 1185428
aauuucccucaaagagcuu

SEQ ID NO: 1185430 - RNA, 19 nt, Artificial Sequence
  Description of Artificial Sequence: Synthetic oligonucleotide
  Sense strand starting at position 23 of SEQ ID NO: 916806
ucuagugggaaauguucua

SEQ ID NO: 1185431 - RNA, 19 nt, Artificial Sequence
  Description of Artificial Sequence: Synthetic oligonucleotide
  Antisense strand to SEQ ID NO: 1185430
uagaacauuucccacuaga

SEQ ID NO: 1185432 - RNA, 19 nt, Artificial Sequence
  Description of Artificial Sequence: Synthetic oligonucleotide
  Sense strand starting at position 42 of SEQ ID NO: 916806
uagaacaggcuauguauua

SEQ ID NO: 1185433 - RNA, 19 nt, Artificial Sequence
  Description of Artificial Sequence: Synthetic oligonucleotide
  Antisense strand to SEQ ID NO: 1185432
uaauacauagccuguucua

SEQ ID NO: 1185434 - RNA, 19 nt, Artificial Sequence
  Description of Artificial Sequence: Synthetic oligonucleotide
  Sense strand starting at position 43 of SEQ ID NO: 916806
agaacaggcuauguauuau

SEQ ID NO: 1185435 - RNA, 19 nt, Artificial Sequence
  Description of Artificial Sequence: Synthetic oligonucleotide
  Antisense strand to SEQ ID NO: 1185434
auaauacauagccuguucu

SEQ ID NO: 1185436 - RNA, 19 nt, Artificial Sequence
  Description of Artificial Sequence: Synthetic oligonucleotide
  Sense strand starting at position 492 of SEQ ID NO: 916806
aucagaaauucuccgguau

SEQ ID NO: 1185437 - RNA, 19 nt, Artificial Sequence
  Description of Artificial Sequence: Synthetic oligonucleotide
  Antisense strand to SEQ ID NO: 1185436
auaccggagaauuucugau

SEQ ID NO: 1185438 - RNA, 19 nt, Artificial Sequence
  Description of Artificial Sequence: Synthetic oligonucleotide
  Sense strand starting at position 493 of SEQ ID NO: 916806
ucagaaauucuccgguaug

SEQ ID NO: 1185439 - RNA, 19 nt, Artificial Sequence
  Description of Artificial Sequence: Synthetic oligonucleotide
  Antisense strand to SEQ ID NO: 1185438
cauaccggagaauuucuga

SEQ ID NO: 1185440 - RNA, 19 nt, Artificial Sequence
  Description of Artificial Sequence: Synthetic oligonucleotide
  Sense strand starting at position 496 of SEQ ID NO: 916806
gaaauucuccgguaugcag

SEQ ID NO: 1185441 - RNA, 19 nt, Artificial Sequence
  Description of Artificial Sequence: Synthetic oligonucleotide
  Antisense strand to SEQ ID NO: 1185440
cugcauaccggagaauuuc

SEQ ID NO: 1185442 - RNA, 19 nt, Artificial Sequence
  Description of Artificial Sequence: Synthetic oligonucleotide
  Sense strand starting at position 498 of SEQ ID NO: 916806
aauucuccgguaugcagaa

SEQ ID NO: 1185443 - RNA, 19 nt, Artificial Sequence
  Description of Artificial Sequence: Synthetic oligonucleotide
  Antisense strand to SEQ ID NO: 1185442
uucugcauaccggagaauu

SEQ ID NO: 1185444 - RNA, 19 nt, Artificial Sequence
  Description of Artificial Sequence: Synthetic oligonucleotide
  Sense strand starting at position 669 of SEQ ID NO: 916806
cgagaaccuucuccuucuu

SEQ ID NO: 1185445 - RNA, 19 nt, Artificial Sequence
  Description of Artificial Sequence: Synthetic oligonucleotide
  Antisense strand to SEQ ID NO: 1185444
aagaaggagaagguucucg

SEQ ID NO: 1185446 - RNA, 19 nt, Artificial Sequence
  Description of Artificial Sequence: Synthetic oligonucleotide
  Sense strand starting at position 722 of SEQ ID NO: 916806
acaguaagagaaugccaau

SEQ ID NO: 1185447 - RNA, 19 nt, Artificial Sequence
  Description of Artificial Sequence: Synthetic oligonucleotide
  Antisense strand to SEQ ID NO: 1185446
auuggcauucucuuacugu

SEQ ID NO: 1185448 - RNA, 19 nt, Artificial Sequence
  Description of Artificial Sequence: Synthetic oligonucleotide
  Sense strand starting at position 1348 of SEQ ID NO: 916806
gcagaauguguccacaggu

SEQ ID NO: 1185449 - RNA, 19 nt, Artificial Sequence
  Description of Artificial Sequence: Synthetic oligonucleotide
  Antisense strand to SEQ ID NO: 1185448
accuguggacacauucugc

SEQ ID NO: 1185450 - RNA, 19 nt, Artificial Sequence
  Description of Artificial Sequence: Synthetic oligonucleotide
  Sense strand starting at position 1828 of SEQ ID NO: 916806
cucaguuagccuuggacau

SEQ ID NO: 1185451 - RNA, 19 nt, Artificial Sequence
  Description of Artificial Sequence: Synthetic oligonucleotide
  Antisense strand to SEQ ID NO: 1185450
auguccaaggcuaacugag

SEQ ID NO: 1185452 - RNA, 19 nt, Artificial Sequence
  Description of Artificial Sequence: Synthetic oligonucleotide
  Sense strand starting at position 1938 of SEQ ID NO: 916806
cgauucuuaccuugcaaga

SEQ ID NO: 1185453 - RNA, 19 nt, Artificial Sequence
  Description of Artificial Sequence: Synthetic oligonucleotide
  Antisense strand to SEQ ID NO: 1185452
ucuugcaagguaagaaucg

SEQ ID NO: 1185454 - RNA, 19 nt, Artificial Sequence
  Description of Artificial Sequence: Synthetic oligonucleotide
  Sense strand starting at position 1991 of SEQ ID NO: 916806
auaagcaaucaugggaagu

SEQ ID NO: 1185455 - RNA, 19 nt, Artificial Sequence
  Description of Artificial Sequence: Synthetic oligonucleotide
  Antisense strand to SEQ ID NO: 1185454
acuucccaugauugcuuau

SEQ ID NO: 1185456 - RNA, 19 nt, Artificial Sequence
  Description of Artificial Sequence: Synthetic oligonucleotide
  Sense strand starting at position 2623 of SEQ ID NO: 916806
ugcagugaacucuaaucuu

SEQ ID NO: 1185457 - RNA, 19 nt, Artificial Sequence
  Description of Artificial Sequence: Synthetic oligonucleotide
  Antisense strand to SEQ ID NO: 1185456
aagauuagaguucacugca

SEQ ID NO: 1185458 - RNA, 19 nt, Artificial Sequence
  Description of Artificial Sequence: Synthetic oligonucleotide
  Sense strand starting at position 2634 of SEQ ID NO: 916806
cuaaucuugucacuugaga

SEQ ID NO: 1185459 - RNA, 19 nt, Artificial Sequence
  Description of Artificial Sequence: Synthetic oligonucleotide
  Antisense strand to SEQ ID NO: 1185458
ucucaagugacaagauuag

SEQ ID NO: 1185460 - RNA, 19 nt, Artificial Sequence
  Description of Artificial Sequence: Synthetic oligonucleotide
  Sense strand starting at position 2642 of SEQ ID NO: 916806
gucacuugagauuagguca

SEQ ID NO: 1185461 - RNA, 19 nt, Artificial Sequence
  Description of Artificial Sequence: Synthetic oligonucleotide
  Antisense strand to SEQ ID NO: 1185460
ugaccuaaucucaagugac

SEQ ID NO: 1185462 - RNA, 19 nt, Artificial Sequence
  Description of Artificial Sequence: Synthetic oligonucleotide
  Sense strand starting at position 2647 of SEQ ID NO: 916806
uugagauuaggucaguggu

SEQ ID NO: 1185463 - RNA, 19 nt, Artificial Sequence
  Description of Artificial Sequence: Synthetic oligonucleotide
  Antisense strand to SEQ ID NO: 1185462
accacugaccuaaucucaa

SEQ ID NO: 1185464 - RNA, 19 nt, Artificial Sequence
  Description of Artificial Sequence: Synthetic oligonucleotide
  Sense strand starting at position 2889 of SEQ ID NO: 916806
ugguaaaugcuacauaagu

SEQ ID NO: 1185465 - RNA, 19 nt, Artificial Sequence
  Description of Artificial Sequence: Synthetic oligonucleotide
  Antisense strand to SEQ ID NO: 1185464
acuuauguagcauuuacca

SEQ ID NO: 1185466 - RNA, 19 nt, Artificial Sequence
  Description of Artificial Sequence: Synthetic oligonucleotide
  Sense strand starting at position 3248 of SEQ ID NO: 916806
uuguuauugucaccaucac

SEQ ID NO: 1185467 - RNA, 19 nt, Artificial Sequence
  Description of Artificial Sequence: Synthetic oligonucleotide
  Antisense strand to SEQ ID NO: 1185466
gugauggugacaauaacaa

SEQ ID NO: 1185468 - RNA, 19 nt, Artificial Sequence
  Description of Artificial Sequence: Synthetic oligonucleotide
  Sense strand starting at position 3289 of SEQ ID NO: 916806
acauccuaguuguugucaa

SEQ ID NO: 1185469 - RNA, 19 nt, Artificial Sequence
  Description of Artificial Sequence: Synthetic oligonucleotide
  Antisense strand to SEQ ID NO: 1185468
uugacaacaacuaggaugu

SEQ ID NO: 1185470 - RNA, 19 nt, Artificial Sequence
  Description of Artificial Sequence: Synthetic oligonucleotide
  Sense strand starting at position 3297 of SEQ ID NO: 916806
guuguugucaaguauucug

SEQ ID NO: 1185471 - RNA, 19 nt, Artificial Sequence
  Description of Artificial Sequence: Synthetic oligonucleotide
  Antisense strand to SEQ ID NO: 1185470
cagaauacuugacaacaac

SEQ ID NO: 1185472 - RNA, 19 nt, Artificial Sequence
  Description of Artificial Sequence: Synthetic oligonucleotide
  Sense strand starting at position 3318 of SEQ ID NO: 916806
aaaguuuaugcaugggaga

SEQ ID NO: 1185473 - RNA, 19 nt, Artificial Sequence
  Description of Artificial Sequence: Synthetic oligonucleotide
  Antisense strand to SEQ ID NO: 1185472
ucucccaugcauaaacuuu

SEQ ID NO: 1185474 - RNA, 19 nt, Artificial Sequence
  Description of Artificial Sequence: Synthetic oligonucleotide
  Sense strand starting at position 3319 of SEQ ID NO: 916806
aaguuuaugcaugggagau

SEQ ID NO: 1185475 - RNA, 19 nt, Artificial Sequence
  Description of Artificial Sequence: Synthetic oligonucleotide
  Antisense strand to SEQ ID NO: 1185474
aucucccaugcauaaacuu

SEQ ID NO: 1185476 - RNA, 19 nt, Artificial Sequence
  Description of Artificial Sequence: Synthetic oligonucleotide
  Sense strand starting at position 3320 of SEQ ID NO: 916806
aguuuaugcaugggagaua

SEQ ID NO: 1185477 - RNA, 19 nt, Artificial Sequence
  Description of Artificial Sequence: Synthetic oligonucleotide
  Antisense strand to SEQ ID NO: 1185476
uaucucccaugcauaaacu

SEQ ID NO: 1185478 - RNA, 19 nt, Artificial Sequence
  Description of Artificial Sequence: Synthetic oligonucleotide
  Sense strand starting at position 3342 of SEQ ID NO: 916806
ggcaauauugcauacaaug

SEQ ID NO: 1185479 - RNA, 19 nt, Artificial Sequence
  Description of Artificial Sequence: Synthetic oligonucleotide
  Antisense strand to SEQ ID NO: 1185478
cauuguaugcaauauugcc

SEQ ID NO: 1185480 - RNA, 19 nt, Artificial Sequence
  Description of Artificial Sequence: Synthetic oligonucleotide
  Sense strand starting at position 3387 of SEQ ID NO: 916806
cccaacaaccugugaauga

SEQ ID NO: 1185481 - RNA, 19 nt, Artificial Sequence
  Description of Artificial Sequence: Synthetic oligonucleotide
  Antisense strand to SEQ ID NO: 1185480
ucauucacagguuguuggg

SEQ ID NO: 1185482 - RNA, 19 nt, Artificial Sequence
  Description of Artificial Sequence: Synthetic oligonucleotide
  Sense strand starting at position 3391 of SEQ ID NO: 916806
acaaccugugaaugauacu

SEQ ID NO: 1185483 - RNA, 19 nt, Artificial Sequence
  Description of Artificial Sequence: Synthetic oligonucleotide
  Antisense strand to SEQ ID NO: 1185482
aguaucauucacagguugu

SEQ ID NO: 1185484 - RNA, 19 nt, Artificial Sequence
  Description of Artificial Sequence: Synthetic oligonucleotide
  Sense strand starting at position 3400 of SEQ ID NO: 916806
gaaugauacuauuaugagg

SEQ ID NO: 1185485 - RNA, 19 nt, Artificial Sequence
  Description of Artificial Sequence: Synthetic oligonucleotide
  Antisense strand to SEQ ID NO: 1185484
ccucauaauaguaucauuc

SEQ ID NO: 1185486 - RNA, 19 nt, Artificial Sequence
  Description of Artificial Sequence: Synthetic oligonucleotide
  Sense strand starting at position 3403 of SEQ ID NO: 916806
ugauacuauuaugaggaaa

SEQ ID NO: 1185487 - RNA, 19 nt, Artificial Sequence
  Description of Artificial Sequence: Synthetic oligonucleotide
  Antisense strand to SEQ ID NO: 1185486
uuuccucauaauaguauca

SEQ ID NO: 1185488 - RNA, 19 nt, Artificial Sequence
  Description of Artificial Sequence: Synthetic oligonucleotide
  Sense strand starting at position 3445 of SEQ ID NO: 916806
acuugcucacagcauagau

SEQ ID NO: 1185489 - RNA, 19 nt, Artificial Sequence
  Description of Artificial Sequence: Synthetic oligonucleotide
  Antisense strand to SEQ ID NO: 1185488
aucuaugcugugagcaagu

SEQ ID NO: 1185490 - RNA, 19 nt, Artificial Sequence
  Description of Artificial Sequence: Synthetic oligonucleotide
  Sense strand starting at position 3488 of SEQ ID NO: 916806
accauuaggcugcaagauu

SEQ ID NO: 1185491 - RNA, 19 nt, Artificial Sequence
  Description of Artificial Sequence: Synthetic oligonucleotide
  Antisense strand to SEQ ID NO: 1185490
aaucuugcagccuaauggu

SEQ ID NO: 1185492 - RNA, 19 nt, Artificial Sequence
  Description of Artificial Sequence: Synthetic oligonucleotide
  Sense strand starting at position 3519 of SEQ ID NO: 916806
aaugaagaugcaugagagu

SEQ ID NO: 1185493 - RNA, 19 nt, Artificial Sequence
  Description of Artificial Sequence: Synthetic oligonucleotide
  Antisense strand to SEQ ID NO: 1185492
acucucaugcaucuucauu

SEQ ID NO: 1185494 - RNA, 19 nt, Artificial Sequence
  Description of Artificial Sequence: Synthetic oligonucleotide
  Sense strand starting at position 3603 of SEQ ID NO: 916806
augugauaguucuuuacug

SEQ ID NO: 1185495 - RNA, 19 nt, Artificial Sequence
  Description of Artificial Sequence: Synthetic oligonucleotide
  Antisense strand to SEQ ID NO: 1185494
caguaaagaacuaucacau

SEQ ID NO: 1185496 - RNA, 19 nt, Artificial Sequence
  Description of Artificial Sequence: Synthetic oligonucleotide
  Sense strand starting at position 3605 of SEQ ID NO: 916806
gugauaguucuuuacugcu

SEQ ID NO: 1185497 - RNA, 19 nt, Artificial Sequence
  Description of Artificial Sequence: Synthetic oligonucleotide
  Antisense strand to SEQ ID NO: 1185496
agcaguaaagaacuaucac

SEQ ID NO: 1185498 - RNA, 19 nt, Artificial Sequence
  Description of Artificial Sequence: Synthetic oligonucleotide
  Sense strand starting at position 3694 of SEQ ID NO: 916806
cguuucuuucugguugcua

SEQ ID NO: 1185499 - RNA, 19 nt, Artificial Sequence
  Description of Artificial Sequence: Synthetic oligonucleotide
  Antisense strand to SEQ ID NO: 1185498
uagcaaccagaaagaaacg

SEQ ID NO: 1185500 - RNA, 19 nt, Artificial Sequence
  Description of Artificial Sequence: Synthetic oligonucleotide
  Sense strand starting at position 3792 of SEQ ID NO: 916806
gguucugauucacugagga

SEQ ID NO: 1185501 - RNA, 19 nt, Artificial Sequence
  Description of Artificial Sequence: Synthetic oligonucleotide
  Antisense strand to SEQ ID NO: 1185500
uccucagugaaucagaacc

SEQ ID NO: 1185502 - RNA, 19 nt, Artificial Sequence
  Description of Artificial Sequence: Synthetic oligonucleotide
  Sense strand starting at position 3816 of SEQ ID NO: 916806
auacaaugaucagaugaac

SEQ ID NO: 1185503 - RNA, 19 nt, Artificial Sequence
  Description of Artificial Sequence: Synthetic oligonucleotide
  Antisense strand to SEQ ID NO: 1185502
guucaucugaucauuguau

SEQ ID NO: 1185504 - RNA, 19 nt, Artificial Sequence
  Description of Artificial Sequence: Synthetic oligonucleotide
  Sense strand starting at position 3854 of SEQ ID NO: 916806
augggaaugucagcagcuu

SEQ ID NO: 1185505 - RNA, 19 nt, Artificial Sequence
  Description of Artificial Sequence: Synthetic oligonucleotide
  Antisense strand to SEQ ID NO: 1185504
aagcugcugacauucccau

SEQ ID NO: 1185506 - RNA, 19 nt, Artificial Sequence
  Description of Artificial Sequence: Synthetic oligonucleotide
  Sense strand starting at position 3855 of SEQ ID NO: 916806
ugggaaugucagcagcuuu

SEQ ID NO: 1185507 - RNA, 19 nt, Artificial Sequence
  Description of Artificial Sequence: Synthetic oligonucleotide
  Antisense strand to SEQ ID NO: 1185506
aaagcugcugacauuccca

SEQ ID NO: 1185508 - RNA, 19 nt, Artificial Sequence
  Description of Artificial Sequence: Synthetic oligonucleotide
  Sense strand starting at position 3868 of SEQ ID NO: 916806
agcuuuauuuguuuagcuu

SEQ ID NO: 1185509 - RNA, 19 nt, Artificial Sequence
  Description of Artificial Sequence: Synthetic oligonucleotide
  Antisense strand to SEQ ID NO: 1185508
aagcuaaacaaauaaagcu

SEQ ID NO: 1185510 - RNA, 19 nt, Artificial Sequence
  Description of Artificial Sequence: Synthetic oligonucleotide
  Sense strand starting at position 3 of SEQ ID NO: 916807
agaaguuuaugggagacaa

SEQ ID NO: 1185511 - RNA, 19 nt, Artificial Sequence
  Description of Artificial Sequence: Synthetic oligonucleotide
  Antisense strand to SEQ ID NO: 1185510
uugucucccauaaacuucu

SEQ ID NO: 1185512 - RNA, 19 nt, Artificial Sequence
  Description of Artificial Sequence: Synthetic oligonucleotide
  Sense strand starting at position 252 of SEQ ID NO: 916807
uucggauaaucauccaaua

SEQ ID NO: 1185513 - RNA, 19 nt, Artificial Sequence
  Description of Artificial Sequence: Synthetic oligonucleotide
  Antisense strand to SEQ ID NO: 1185512
uauuggaugauuauccgaa

SEQ ID NO: 1185514 - RNA, 19 nt, Artificial Sequence
  Description of Artificial Sequence: Synthetic oligonucleotide
  Sense strand starting at position 577 of SEQ ID NO: 916807
aaaggaauguuccaaguaa

SEQ ID NO: 1185515 - RNA, 19 nt, Artificial Sequence
  Description of Artificial Sequence: Synthetic oligonucleotide
  Antisense strand to SEQ ID NO: 1185514
uuacuuggaacauuccuuu

SEQ ID NO: 1185516 - RNA, 19 nt, Artificial Sequence
  Description of Artificial Sequence: Synthetic oligonucleotide
  Sense strand starting at position 588 of SEQ ID NO: 916807
ccaaguaaguuggucaaga

SEQ ID NO: 1185517 - RNA, 19 nt, Artificial Sequence
  Description of Artificial Sequence: Synthetic oligonucleotide
  Antisense strand to SEQ ID NO: 1185516
ucuugaccaacuuacuugg

SEQ ID NO: 1185518 - RNA, 19 nt, Artificial Sequence
  Description of Artificial Sequence: Synthetic oligonucleotide
  Sense strand starting at position 589 of SEQ ID NO: 916807
caaguaaguuggucaagag

SEQ ID NO: 1185519 - RNA, 19 nt, Artificial Sequence
  Description of Artificial Sequence: Synthetic oligonucleotide
  Antisense strand to SEQ ID NO: 1185518
cucuugaccaacuuacuug

SEQ ID NO: 1185520 - RNA, 19 nt, Artificial Sequence
  Description of Artificial Sequence: Synthetic oligonucleotide
  Sense strand starting at position 592 of SEQ ID NO: 916807
guaaguuggucaagaggag

SEQ ID NO: 1185521 - RNA, 19 nt, Artificial Sequence
  Description of Artificial Sequence: Synthetic oligonucleotide
  Antisense strand to SEQ ID NO: 1185520
cuccucuugaccaacuuac

SEQ ID NO: 1185522 - RNA, 19 nt, Artificial Sequence
  Description of Artificial Sequence: Synthetic oligonucleotide
  Sense strand starting at position 675 of SEQ ID NO: 916807
acaaucuaggcguguuuau

SEQ ID NO: 1185523 - RNA, 19 nt, Artificial Sequence
  Description of Artificial Sequence: Synthetic oligonucleotide
  Antisense strand to SEQ ID NO: 1185522
auaaacacgccuagauugu

SEQ ID NO: 1185524 - RNA, 19 nt, Artificial Sequence
  Description of Artificial Sequence: Synthetic oligonucleotide
  Sense strand starting at position 682 of SEQ ID NO: 916807
aggcguguuuauccggauu

SEQ ID NO: 1185525 - RNA, 19 nt, Artificial Sequence
  Description of Artificial Sequence: Synthetic oligonucleotide
  Antisense strand to SEQ ID NO: 1185524
aauccggauaaacacgccu

SEQ ID NO: 1185526 - RNA, 19 nt, Artificial Sequence
  Description of Artificial Sequence: Synthetic oligonucleotide
  Sense strand starting at position 685 of SEQ ID NO: 916807
cguguuuauccggauuguu

SEQ ID NO: 1185527 - RNA, 19 nt, Artificial Sequence
  Description of Artificial Sequence: Synthetic oligonucleotide
  Antisense strand to SEQ ID NO: 1185526
aacaauccggauaaacacg

SEQ ID NO: 1185528 - RNA, 19 nt, Artificial Sequence
  Description of Artificial Sequence: Synthetic oligonucleotide
  Sense strand starting at position 688 of SEQ ID NO: 916807
guuuauccggauuguuaca

SEQ ID NO: 1185529 - RNA, 19 nt, Artificial Sequence
  Description of Artificial Sequence: Synthetic oligonucleotide
  Antisense strand to SEQ ID NO: 1185528
uguaacaauccggauaaac

SEQ ID NO: 1185530 - RNA, 19 nt, Artificial Sequence
  Description of Artificial Sequence: Synthetic oligonucleotide
  Sense strand starting at position 704 of SEQ ID NO: 916807
acacaauuccuuuggguuu

SEQ ID NO: 1185531 - RNA, 19 nt, Artificial Sequence
  Description of Artificial Sequence: Synthetic oligonucleotide
  Antisense strand to SEQ ID NO: 1185530
aaacccaaaggaauugugu

SEQ ID NO: 1185532 - RNA, 19 nt, Artificial Sequence
  Description of Artificial Sequence: Synthetic oligonucleotide
  Sense strand starting at position 734 of SEQ ID NO: 916807
accuucuaagugugggaaa

SEQ ID NO: 1185533 - RNA, 19 nt, Artificial Sequence
  Description of Artificial Sequence: Synthetic oligonucleotide
  Antisense strand to SEQ ID NO: 1185532
uuucccacacuuagaaggu

SEQ ID NO: 1185534 - RNA, 19 nt, Artificial Sequence
  Description of Artificial Sequence: Synthetic oligonucleotide
  Sense strand starting at position 865 of SEQ ID NO: 916807
uuaaguuucuuggcugaca

SEQ ID NO: 1185535 - RNA, 19 nt, Artificial Sequence
  Description of Artificial Sequence: Synthetic oligonucleotide
  Antisense strand to SEQ ID NO: 1185534
ugucagccaagaaacuuaa

SEQ ID NO: 1185536 - RNA, 19 nt, Artificial Sequence
  Description of Artificial Sequence: Synthetic oligonucleotide
  Sense strand starting at position 906 of SEQ ID NO: 916807
gcuuccuuacaaugaguca

SEQ ID NO: 1185537 - RNA, 19 nt, Artificial Sequence
  Description of Artificial Sequence: Synthetic oligonucleotide
  Antisense strand to SEQ ID NO: 1185536
ugacucauuguaaggaagc

SEQ ID NO: 1185538 - RNA, 19 nt, Artificial Sequence
  Description of Artificial Sequence: Synthetic oligonucleotide
  Sense strand starting at position 918 of SEQ ID NO: 916807
ugagucauuccugaccuca

SEQ ID NO: 1185539 - RNA, 19 nt, Artificial Sequence
  Description of Artificial Sequence: Synthetic oligonucleotide
  Antisense strand to SEQ ID NO: 1185538
ugaggucaggaaugacuca

SEQ ID NO: 1185540 - RNA, 19 nt, Artificial Sequence
  Description of Artificial Sequence: Synthetic oligonucleotide
  Sense strand starting at position 920 of SEQ ID NO: 916807
agucauuccugaccucaga

SEQ ID NO: 1185541 - RNA, 19 nt, Artificial Sequence
  Description of Artificial Sequence: Synthetic oligonucleotide
  Antisense strand to SEQ ID NO: 1185540
ucugaggucaggaaugacu

SEQ ID NO: 1185542 - RNA, 19 nt, Artificial Sequence
  Description of Artificial Sequence: Synthetic oligonucleotide
  Sense strand starting at position 1343 of SEQ ID NO: 916807
cccguuuaucugcaacaga

SEQ ID NO: 1185543 - RNA, 19 nt, Artificial Sequence
  Description of Artificial Sequence: Synthetic oligonucleotide
  Antisense strand to SEQ ID NO: 1185542
ucuguugcagauaaacggg

SEQ ID NO: 1185544 - RNA, 19 nt, Artificial Sequence
  Description of Artificial Sequence: Synthetic oligonucleotide
  Sense strand starting at position 1362 of SEQ ID NO: 916807
agggaccuaucucaggaaa

SEQ ID NO: 1185545 - RNA, 19 nt, Artificial Sequence
  Description of Artificial Sequence: Synthetic oligonucleotide
  Antisense strand to SEQ ID NO: 1185544
uuuccugagauaggucccu

SEQ ID NO: 1185546 - RNA, 19 nt, Artificial Sequence
  Description of Artificial Sequence: Synthetic oligonucleotide
  Sense strand starting at position 1364 of SEQ ID NO: 916807
ggaccuaucucaggaaauu

SEQ ID NO: 1185547 - RNA, 19 nt, Artificial Sequence
  Description of Artificial Sequence: Synthetic oligonucleotide
  Antisense strand to SEQ ID NO: 1185546
aauuuccugagauaggucc

SEQ ID NO: 1185548 - RNA, 19 nt, Artificial Sequence
  Description of Artificial Sequence: Synthetic oligonucleotide
  Sense strand starting at position 1373 of SEQ ID NO: 916807
ucaggaaauuguuaacuaa

SEQ ID NO: 1185549 - RNA, 19 nt, Artificial Sequence
  Description of Artificial Sequence: Synthetic oligonucleotide
  Antisense strand to SEQ ID NO: 1185548
uuaguuaacaauuuccuga

SEQ ID NO: 1185550 - RNA, 19 nt, Artificial Sequence
  Description of Artificial Sequence: Synthetic oligonucleotide
  Sense strand starting at position 1419 of SEQ ID NO: 916807
ucaguagccggugugagua

SEQ ID NO: 1185551 - RNA, 19 nt, Artificial Sequence
  Description of Artificial Sequence: Synthetic oligonucleotide
  Antisense strand to SEQ ID NO: 1185550
uacucacaccggcuacuga

SEQ ID NO: 1185552 - RNA, 19 nt, Artificial Sequence
  Description of Artificial Sequence: Synthetic oligonucleotide
  Sense strand starting at position 1510 of SEQ ID NO: 916807
ugcacuuacgaugaucuua

SEQ ID NO: 1185553 - RNA, 19 nt, Artificial Sequence
  Description of Artificial Sequence: Synthetic oligonucleotide
  Antisense strand to SEQ ID NO: 1185552
uaagaucaucguaagugca

SEQ ID NO: 1185554 - RNA, 19 nt, Artificial Sequence
  Description of Artificial Sequence: Synthetic oligonucleotide
  Sense strand starting at position 1515 of SEQ ID NO: 916807
uuacgaugaucuuaaggaa

SEQ ID NO: 1185555 - RNA, 19 nt, Artificial Sequence
  Description of Artificial Sequence: Synthetic oligonucleotide
  Antisense strand to SEQ ID NO: 1185554
uuccuuaagaucaucguaa

SEQ ID NO: 1185556 - RNA, 19 nt, Artificial Sequence
  Description of Artificial Sequence: Synthetic oligonucleotide
  Sense strand starting at position 1602 of SEQ ID NO: 916807
ggguuuaaagacgauguca

SEQ ID NO: 1185557 - RNA, 19 nt, Artificial Sequence
  Description of Artificial Sequence: Synthetic oligonucleotide
  Antisense strand to SEQ ID NO: 1185556
ugacaucgucuuuaaaccc

SEQ ID NO: 1185558 - RNA, 19 nt, Artificial Sequence
  Description of Artificial Sequence: Synthetic oligonucleotide
  Sense strand starting at position 1604 of SEQ ID NO: 916807
guuuaaagacgaugucacu

SEQ ID NO: 1185559 - RNA, 19 nt, Artificial Sequence
  Description of Artificial Sequence: Synthetic oligonucleotide
  Antisense strand to SEQ ID NO: 1185558
agugacaucgucuuuaaac

SEQ ID NO: 1185560 - RNA, 19 nt, Artificial Sequence
  Description of Artificial Sequence: Synthetic oligonucleotide
  Sense strand starting at position 1923 of SEQ ID NO: 916807
uuauaaugcgaacaaagua

SEQ ID NO: 1185561 - RNA, 19 nt, Artificial Sequence
  Description of Artificial Sequence: Synthetic oligonucleotide
  Antisense strand to SEQ ID NO: 1185560
uacuuuguucgcauuauaa

SEQ ID NO: 1185562 - RNA, 19 nt, Artificial Sequence
  Description of Artificial Sequence: Synthetic oligonucleotide
  Sense strand starting at position 1957 of SEQ ID NO: 916807
cggauagcgcuccugucua

SEQ ID NO: 1185563 - RNA, 19 nt, Artificial Sequence
  Description of Artificial Sequence: Synthetic oligonucleotide
  Antisense strand to SEQ ID NO: 1185562
uagacaggagcgcuauccg

SEQ ID NO: 1185564 - RNA, 19 nt, Artificial Sequence
  Description of Artificial Sequence: Synthetic oligonucleotide
  Sense strand starting at position 1959 of SEQ ID NO: 916807
gauagcgcuccugucuauu

SEQ ID NO: 1185565 - RNA, 19 nt, Artificial Sequence
  Description of Artificial Sequence: Synthetic oligonucleotide
  Antisense strand to SEQ ID NO: 1185564
aauagacaggagcgcuauc

SEQ ID NO: 1185566 - RNA, 19 nt, Artificial Sequence
  Description of Artificial Sequence: Synthetic oligonucleotide
  Sense strand starting at position 2015 of SEQ ID NO: 916807
acaggcaaccauuggauaa

SEQ ID NO: 1185567 - RNA, 19 nt, Artificial Sequence
  Description of Artificial Sequence: Synthetic oligonucleotide
  Antisense strand to SEQ ID NO: 1185566
uuauccaaugguugccugu

SEQ ID NO: 1185568 - RNA, 19 nt, Artificial Sequence
  Description of Artificial Sequence: Synthetic oligonucleotide
  Sense strand starting at position 2017 of SEQ ID NO: 916807
aggcaaccauuggauaaua

SEQ ID NO: 1185569 - RNA, 19 nt, Artificial Sequence
  Description of Artificial Sequence: Synthetic oligonucleotide
  Antisense strand to SEQ ID NO: 1185568
uauuauccaaugguugccu

SEQ ID NO: 1185570 - RNA, 19 nt, Artificial Sequence
  Description of Artificial Sequence: Synthetic oligonucleotide
  Sense strand starting at position 2028 of SEQ ID NO: 916807
ggauaauaucgcugccacu

SEQ ID NO: 1185571 - RNA, 19 nt, Artificial Sequence
  Description of Artificial Sequence: Synthetic oligonucleotide
  Antisense strand to SEQ ID NO: 1185570
aguggcagcgauauuaucc

SEQ ID NO: 1185572 - RNA, 19 nt, Artificial Sequence
  Description of Artificial Sequence: Synthetic oligonucleotide
  Sense strand starting at position 2253 of SEQ ID NO: 916807
gaaacagaaugguuucucu

SEQ ID NO: 1185573 - RNA, 19 nt, Artificial Sequence
  Description of Artificial Sequence: Synthetic oligonucleotide
  Antisense strand to SEQ ID NO: 1185572
agagaaaccauucuguuuc

SEQ ID NO: 1185574 - RNA, 19 nt, Artificial Sequence
  Description of Artificial Sequence: Synthetic oligonucleotide
  Sense strand starting at position 2470 of SEQ ID NO: 916807
ucaucauguucuccaggau

SEQ ID NO: 1185575 - RNA, 19 nt, Artificial Sequence
  Description of Artificial Sequence: Synthetic oligonucleotide
  Antisense strand to SEQ ID NO: 1185574
auccuggagaacaugauga

SEQ ID NO: 1185576 - RNA, 19 nt, Artificial Sequence
  Description of Artificial Sequence: Synthetic oligonucleotide
  Sense strand starting at position 2473 of SEQ ID NO: 916807
ucauguucuccaggauggu

SEQ ID NO: 1185577 - RNA, 19 nt, Artificial Sequence
  Description of Artificial Sequence: Synthetic oligonucleotide
  Antisense strand to SEQ ID NO: 1185576
accauccuggagaacauga

SEQ ID NO: 1185578 - RNA, 19 nt, Artificial Sequence
  Description of Artificial Sequence: Synthetic oligonucleotide
  Sense strand starting at position 2573 of SEQ ID NO: 916807
ucagaauggucucucgucu

SEQ ID NO: 1185579 - RNA, 19 nt, Artificial Sequence
  Description of Artificial Sequence: Synthetic oligonucleotide
  Antisense strand to SEQ ID NO: 1185578
agacgagagaccauucuga

SEQ ID NO: 1185580 - RNA, 19 nt, Artificial Sequence
  Description of Artificial Sequence: Synthetic oligonucleotide
  Sense strand starting at position 2853 of SEQ ID NO: 916807
ugagcucugcagugagcua

SEQ ID NO: 1185581 - RNA, 19 nt, Artificial Sequence
  Description of Artificial Sequence: Synthetic oligonucleotide
  Antisense strand to SEQ ID NO: 1185580
uagcucacugcagagcuca

SEQ ID NO: 1185582 - RNA, 19 nt, Artificial Sequence
  Description of Artificial Sequence: Synthetic oligonucleotide
  Sense strand starting at position 2982 of SEQ ID NO: 916807
uuccguuuccuacagagua

SEQ ID NO: 1185583 - RNA, 19 nt, Artificial Sequence
  Description of Artificial Sequence: Synthetic oligonucleotide
  Antisense strand to SEQ ID NO: 1185582
uacucuguaggaaacggaa

SEQ ID NO: 1185584 - RNA, 19 nt, Artificial Sequence
  Description of Artificial Sequence: Synthetic oligonucleotide
  Sense strand starting at position 3091 of SEQ ID NO: 916807
cuugcuuucuacccagaug

SEQ ID NO: 1185585 - RNA, 19 nt, Artificial Sequence
  Description of Artificial Sequence: Synthetic oligonucleotide
  Antisense strand to SEQ ID NO: 1185584
caucuggguagaaagcaag

SEQ ID NO: 1185586 - RNA, 19 nt, Artificial Sequence
  Description of Artificial Sequence: Synthetic oligonucleotide
  Sense strand starting at position 3288 of SEQ ID NO: 916807
uagaguguaguggagcaau

SEQ ID NO: 1185587 - RNA, 19 nt, Artificial Sequence
  Description of Artificial Sequence: Synthetic oligonucleotide
  Antisense strand to SEQ ID NO: 1185586
auugcuccacuacacucua

SEQ ID NO: 1185588 - RNA, 19 nt, Artificial Sequence
  Description of Artificial Sequence: Synthetic oligonucleotide
  Sense strand starting at position 3570 of SEQ ID NO: 916807
acugaaaccuauggaauua

SEQ ID NO: 1185589 - RNA, 19 nt, Artificial Sequence
  Description of Artificial Sequence: Synthetic oligonucleotide
  Antisense strand to SEQ ID NO: 1185588
uaauuccauagguuucagu

SEQ ID NO: 1185590 - RNA, 19 nt, Artificial Sequence
  Description of Artificial Sequence: Synthetic oligonucleotide
  Sense strand starting at position 125 of SEQ ID NO: 916808
gcgcaagugguauaaucau

SEQ ID NO: 1185591 - RNA, 19 nt, Artificial Sequence
  Description of Artificial Sequence: Synthetic oligonucleotide
  Antisense strand to SEQ ID NO: 1185590
augauuauaccacuugcgc

SEQ ID NO: 1185592 - RNA, 19 nt, Artificial Sequence
  Description of Artificial Sequence: Synthetic oligonucleotide
  Sense strand starting at position 568 of SEQ ID NO: 916808
gguauuauauaccuaccuu

SEQ ID NO: 1185593 - RNA, 19 nt, Artificial Sequence
  Description of Artificial Sequence: Synthetic oligonucleotide
  Antisense strand to SEQ ID NO: 1185592
aagguagguauauaauacc

SEQ ID NO: 1185594 - RNA, 19 nt, Artificial Sequence
  Description of Artificial Sequence: Synthetic oligonucleotide
  Sense strand starting at position 616 of SEQ ID NO: 916808
uuacauguuuacgucaauu

SEQ ID NO: 1185595 - RNA, 19 nt, Artificial Sequence
  Description of Artificial Sequence: Synthetic oligonucleotide
  Antisense strand to SEQ ID NO: 1185594
aauugacguaaacauguaa

SEQ ID NO: 1185596 - RNA, 19 nt, Artificial Sequence
  Description of Artificial Sequence: Synthetic oligonucleotide
  Sense strand starting at position 618 of SEQ ID NO: 916808
acauguuuacgucaauuaa

SEQ ID NO: 1185597 - RNA, 19 nt, Artificial Sequence
  Description of Artificial Sequence: Synthetic oligonucleotide
  Antisense strand to SEQ ID NO: 1185596
uuaauugacguaaacaugu

SEQ ID NO: 1185598 - RNA, 19 nt, Artificial Sequence
  Description of Artificial Sequence: Synthetic oligonucleotide
  Sense strand starting at position 742 of SEQ ID NO: 916808
auuaacaucccacgugagu

SEQ ID NO: 1185599 - RNA, 19 nt, Artificial Sequence
  Description of Artificial Sequence: Synthetic oligonucleotide
  Antisense strand to SEQ ID NO: 1185598
acucacgugggauguuaau

SEQ ID NO: 1185600 - RNA, 19 nt, Artificial Sequence
  Description of Artificial Sequence: Synthetic oligonucleotide
  Sense strand starting at position 778 of SEQ ID NO: 916808
ggaccagacugacauucua

SEQ ID NO: 1185601 - RNA, 19 nt, Artificial Sequence
  Description of Artificial Sequence: Synthetic oligonucleotide
  Antisense strand to SEQ ID NO: 1185600
uagaaugucagucuggucc

SEQ ID NO: 1185602 - RNA, 19 nt, Artificial Sequence
  Description of Artificial Sequence: Synthetic oligonucleotide
  Sense strand starting at position 895 of SEQ ID NO: 916808
acguucuuauugcuccaaa

SEQ ID NO: 1185603 - RNA, 19 nt, Artificial Sequence
  Description of Artificial Sequence: Synthetic oligonucleotide
  Antisense strand to SEQ ID NO: 1185602
uuuggagcaauaagaacgu

SEQ ID NO: 1185604 - RNA, 19 nt, Artificial Sequence
  Description of Artificial Sequence: Synthetic oligonucleotide
  Sense strand starting at position 896 of SEQ ID NO: 916808
cguucuuauugcuccaaac

SEQ ID NO: 1185605 - RNA, 19 nt, Artificial Sequence
  Description of Artificial Sequence: Synthetic oligonucleotide
  Antisense strand to SEQ ID NO: 1185604
guuuggagcaauaagaacg

SEQ ID NO: 1185606 - RNA, 19 nt, Artificial Sequence
  Description of Artificial Sequence: Synthetic oligonucleotide
  Sense strand starting at position 941 of SEQ ID NO: 916808
gccuccauucucgaaacgu

SEQ ID NO: 1185607 - RNA, 19 nt, Artificial Sequence
  Description of Artificial Sequence: Synthetic oligonucleotide
  Antisense strand to SEQ ID NO: 1185606
acguuucgagaauggaggc

SEQ ID NO: 1185608 - RNA, 19 nt, Artificial Sequence
  Description of Artificial Sequence: Synthetic oligonucleotide
  Sense strand starting at position 945 of SEQ ID NO: 916808
ccauucucgaaacguugaa

SEQ ID NO: 1185609 - RNA, 19 nt, Artificial Sequence
  Description of Artificial Sequence: Synthetic oligonucleotide
  Antisense strand to SEQ ID NO: 1185608
uucaacguuucgagaaugg

SEQ ID NO: 1185610 - RNA, 19 nt, Artificial Sequence
  Description of Artificial Sequence: Synthetic oligonucleotide
  Sense strand starting at position 949 of SEQ ID NO: 916808
ucucgaaacguugaagaca

SEQ ID NO: 1185611 - RNA, 19 nt, Artificial Sequence
  Description of Artificial Sequence: Synthetic oligonucleotide
  Antisense strand to SEQ ID NO: 1185610
ugucuucaacguuucgaga

SEQ ID NO: 1185612 - RNA, 19 nt, Artificial Sequence
  Description of Artificial Sequence: Synthetic oligonucleotide
  Sense strand starting at position 1013 of SEQ ID NO: 916808
gcacaagaauugucaaauu

SEQ ID NO: 1185613 - RNA, 19 nt, Artificial Sequence
  Description of Artificial Sequence: Synthetic oligonucleotide
  Antisense strand to SEQ ID NO: 1185612
aauuugacaauucuugugc

SEQ ID NO: 1185614 - RNA, 19 nt, Artificial Sequence
  Description of Artificial Sequence: Synthetic oligonucleotide
  Sense strand starting at position 1023 of SEQ ID NO: 916808
ugucaaauuuaccaaguuu

SEQ ID NO: 1185615 - RNA, 19 nt, Artificial Sequence
  Description of Artificial Sequence: Synthetic oligonucleotide
  Antisense strand to SEQ ID NO: 1185614
aaacuugguaaauuugaca

SEQ ID NO: 1185616 - RNA, 19 nt, Artificial Sequence
  Description of Artificial Sequence: Synthetic oligonucleotide
  Sense strand starting at position 1095 of SEQ ID NO: 916808
ggcugugcacucuaucaca

SEQ ID NO: 1185617 - RNA, 19 nt, Artificial Sequence
  Description of Artificial Sequence: Synthetic oligonucleotide
  Antisense strand to SEQ ID NO: 1185616
ugugauagagugcacagcc

SEQ ID NO: 1185618 - RNA, 19 nt, Artificial Sequence
  Description of Artificial Sequence: Synthetic oligonucleotide
  Sense strand starting at position 1180 of SEQ ID NO: 916808
ccuuaaauacguggaaauu

SEQ ID NO: 1185619 - RNA, 19 nt, Artificial Sequence
  Description of Artificial Sequence: Synthetic oligonucleotide
  Antisense strand to SEQ ID NO: 1185618
aauuuccacguauuuaagg

SEQ ID NO: 1185620 - RNA, 19 nt, Artificial Sequence
  Description of Artificial Sequence: Synthetic oligonucleotide
  Sense strand starting at position 1190 of SEQ ID NO: 916808
guggaaauugccugagagg

SEQ ID NO: 1185621 - RNA, 19 nt, Artificial Sequence
  Description of Artificial Sequence: Synthetic oligonucleotide
  Antisense strand to SEQ ID NO: 1185620
ccucucaggcaauuuccac

SEQ ID NO: 1185622 - RNA, 19 nt, Artificial Sequence
  Description of Artificial Sequence: Synthetic oligonucleotide
  Sense strand starting at position 1243 of SEQ ID NO: 916808
gggcgaaggcuuuaagaua

SEQ ID NO: 1185623 - RNA, 19 nt, Artificial Sequence
  Description of Artificial Sequence: Synthetic oligonucleotide
  Antisense strand to SEQ ID NO: 1185622
uaucuuaaagccuucgccc

SEQ ID NO: 1185624 - RNA, 19 nt, Artificial Sequence
  Description of Artificial Sequence: Synthetic oligonucleotide
  Sense strand starting at position 1586 of SEQ ID NO: 916808
ucuccuguuucuccgcaaa

SEQ ID NO: 1185625 - RNA, 19 nt, Artificial Sequence
  Description of Artificial Sequence: Synthetic oligonucleotide
  Antisense strand to SEQ ID NO: 1185624
uuugcggagaaacaggaga

SEQ ID NO: 1185626 - RNA, 19 nt, Artificial Sequence
  Description of Artificial Sequence: Synthetic oligonucleotide
  Sense strand starting at position 1988 of SEQ ID NO: 916808
gguuaugugucucccagca

SEQ ID NO: 1185627 - RNA, 19 nt, Artificial Sequence
  Description of Artificial Sequence: Synthetic oligonucleotide
  Antisense strand to SEQ ID NO: 1185626
ugcugggagacacauaacc

SEQ ID NO: 1185628 - RNA, 19 nt, Artificial Sequence
  Description of Artificial Sequence: Synthetic oligonucleotide
  Sense strand starting at position 2066 of SEQ ID NO: 916808
gacgcuaggcgugaaaguu

SEQ ID NO: 1185629 - RNA, 19 nt, Artificial Sequence
  Description of Artificial Sequence: Synthetic oligonucleotide
  Antisense strand to SEQ ID NO: 1185628
aacuuucacgccuagcguc

SEQ ID NO: 1185630 - RNA, 19 nt, Artificial Sequence
  Description of Artificial Sequence: Synthetic oligonucleotide
  Sense strand starting at position 2101 of SEQ ID NO: 916808
caaggcgcacucguuauua

SEQ ID NO: 1185631 - RNA, 19 nt, Artificial Sequence
  Description of Artificial Sequence: Synthetic oligonucleotide
  Antisense strand to SEQ ID NO: 1185630
uaauaacgagugcgccuug

SEQ ID NO: 1185632 - RNA, 19 nt, Artificial Sequence
  Description of Artificial Sequence: Synthetic oligonucleotide
  Sense strand starting at position 2103 of SEQ ID NO: 916808
aggcgcacucguuauuaga

SEQ ID NO: 1185633 - RNA, 19 nt, Artificial Sequence
  Description of Artificial Sequence: Synthetic oligonucleotide
  Antisense strand to SEQ ID NO: 1185632
ucuaauaacgagugcgccu

SEQ ID NO: 1185634 - RNA, 19 nt, Artificial Sequence
  Description of Artificial Sequence: Synthetic oligonucleotide
  Sense strand starting at position 2110 of SEQ ID NO: 916808
cucguuauuagaggccaga

SEQ ID NO: 1185635 - RNA, 19 nt, Artificial Sequence
  Description of Artificial Sequence: Synthetic oligonucleotide
  Antisense strand to SEQ ID NO: 1185634
ucuggccucuaauaacgag

SEQ ID NO: 1185636 - RNA, 19 nt, Artificial Sequence
  Description of Artificial Sequence: Synthetic oligonucleotide
  Sense strand starting at position 2133 of SEQ ID NO: 916808
gacagaugcuuggugggaa

SEQ ID NO: 1185637 - RNA, 19 nt, Artificial Sequence
  Description of Artificial Sequence: Synthetic oligonucleotide
  Antisense strand to SEQ ID NO: 1185636
uucccaccaagcaucuguc

SEQ ID NO: 1185638 - RNA, 19 nt, Artificial Sequence
  Description of Artificial Sequence: Synthetic oligonucleotide
  Sense strand starting at position 2249 of SEQ ID NO: 916808
ggcucauuucucugacagu

SEQ ID NO: 1185639 - RNA, 19 nt, Artificial Sequence
  Description of Artificial Sequence: Synthetic oligonucleotide
  Antisense strand to SEQ ID NO: 1185638
acugucagagaaaugagcc

SEQ ID NO: 1185640 - RNA, 19 nt, Artificial Sequence
  Description of Artificial Sequence: Synthetic oligonucleotide
  Sense strand starting at position 2250 of SEQ ID NO: 916808
gcucauuucucugacaguc

SEQ ID NO: 1185641 - RNA, 19 nt, Artificial Sequence
  Description of Artificial Sequence: Synthetic oligonucleotide
  Antisense strand to SEQ ID NO: 1185640
gacugucagagaaaugagc

SEQ ID NO: 1185642 - RNA, 19 nt, Artificial Sequence
  Description of Artificial Sequence: Synthetic oligonucleotide
  Sense strand starting at position 2432 of SEQ ID NO: 916808
ugguaagcgucuuuauaaa

SEQ ID NO: 1185643 - RNA, 19 nt, Artificial Sequence
  Description of Artificial Sequence: Synthetic oligonucleotide
  Antisense strand to SEQ ID NO: 1185642
uuuauaaagacgcuuacca

SEQ ID NO: 1185644 - RNA, 19 nt, Artificial Sequence
  Description of Artificial Sequence: Synthetic oligonucleotide
  Sense strand starting at position 2458 of SEQ ID NO: 916808
ucauuuaacuuugagcaag

SEQ ID NO: 1185645 - RNA, 19 nt, Artificial Sequence
  Description of Artificial Sequence: Synthetic oligonucleotide
  Antisense strand to SEQ ID NO: 1185644
cuugcucaaaguuaaauga

SEQ ID NO: 1185646 - RNA, 19 nt, Artificial Sequence
  Description of Artificial Sequence: Synthetic oligonucleotide
  Sense strand starting at position 2704 of SEQ ID NO: 916808
gaagaacugacgugcagua

SEQ ID NO: 1185647 - RNA, 19 nt, Artificial Sequence
  Description of Artificial Sequence: Synthetic oligonucleotide
  Antisense strand to SEQ ID NO: 1185646
uacugcacgucaguucuuc

SEQ ID NO: 1185648 - RNA, 19 nt, Artificial Sequence
  Description of Artificial Sequence: Synthetic oligonucleotide
  Sense strand starting at position 2739 of SEQ ID NO: 916808
uguacuaugcuguauguca

SEQ ID NO: 1185649 - RNA, 19 nt, Artificial Sequence
  Description of Artificial Sequence: Synthetic oligonucleotide
  Antisense strand to SEQ ID NO: 1185648
ugacauacagcauaguaca

SEQ ID NO: 1185650 - RNA, 19 nt, Artificial Sequence
  Description of Artificial Sequence: Synthetic oligonucleotide
  Sense strand starting at position 2746 of SEQ ID NO: 916808
ugcuguaugucaccuaaca

SEQ ID NO: 1185651 - RNA, 19 nt, Artificial Sequence
  Description of Artificial Sequence: Synthetic oligonucleotide
  Antisense strand to SEQ ID NO: 1185650
uguuaggugacauacagca

SEQ ID NO: 1185652 - RNA, 19 nt, Artificial Sequence
  Description of Artificial Sequence: Synthetic oligonucleotide
  Sense strand starting at position 2772 of SEQ ID NO: 916808
ggaggaauagccuggacua

SEQ ID NO: 1185653 - RNA, 19 nt, Artificial Sequence
  Description of Artificial Sequence: Synthetic oligonucleotide
  Antisense strand to SEQ ID NO: 1185652
uaguccaggcuauuccucc

SEQ ID NO: 1185654 - RNA, 19 nt, Artificial Sequence
  Description of Artificial Sequence: Synthetic oligonucleotide
  Sense strand starting at position 3047 of SEQ ID NO: 916808
uugaaagauuauguguaag

SEQ ID NO: 1185655 - RNA, 19 nt, Artificial Sequence
  Description of Artificial Sequence: Synthetic oligonucleotide
  Antisense strand to SEQ ID NO: 1185654
cuuacacauaaucuuucaa

SEQ ID NO: 1185656 - RNA, 19 nt, Artificial Sequence
  Description of Artificial Sequence: Synthetic oligonucleotide
  Sense strand starting at position 3049 of SEQ ID NO: 916808
gaaagauuauguguaagcu

SEQ ID NO: 1185657 - RNA, 19 nt, Artificial Sequence
  Description of Artificial Sequence: Synthetic oligonucleotide
  Antisense strand to SEQ ID NO: 1185656
agcuuacacauaaucuuuc

SEQ ID NO: 1185658 - RNA, 19 nt, Artificial Sequence
  Description of Artificial Sequence: Synthetic oligonucleotide
  Sense strand starting at position 3053 of SEQ ID NO: 916808
gauuauguguaagcuccau

SEQ ID NO: 1185659 - RNA, 19 nt, Artificial Sequence
  Description of Artificial Sequence: Synthetic oligonucleotide
  Antisense strand to SEQ ID NO: 1185658
auggagcuuacacauaauc

SEQ ID NO: 1185660 - RNA, 19 nt, Artificial Sequence
  Description of Artificial Sequence: Synthetic oligonucleotide
  Sense strand starting at position 3079 of SEQ ID NO: 916808
ugaagagccaucggaaaga

SEQ ID NO: 1185661 - RNA, 19 nt, Artificial Sequence
  Description of Artificial Sequence: Synthetic oligonucleotide
  Antisense strand to SEQ ID NO: 1185660
ucuuuccgauggcucuuca

SEQ ID NO: 1185662 - RNA, 19 nt, Artificial Sequence
  Description of Artificial Sequence: Synthetic oligonucleotide
  Sense strand starting at position 3449 of SEQ ID NO: 916808
ccacccaguugucuccaaa

SEQ ID NO: 1185663 - RNA, 19 nt, Artificial Sequence
  Description of Artificial Sequence: Synthetic oligonucleotide
  Antisense strand to SEQ ID NO: 1185662
uuuggagacaacugggugg

SEQ ID NO: 1185664 - RNA, 19 nt, Artificial Sequence
  Description of Artificial Sequence: Synthetic oligonucleotide
  Sense strand starting at position 3452 of SEQ ID NO: 916808
cccaguugucuccaaaguu

SEQ ID NO: 1185665 - RNA, 19 nt, Artificial Sequence
  Description of Artificial Sequence: Synthetic oligonucleotide
  Antisense strand to SEQ ID NO: 1185664
aacuuuggagacaacuggg

SEQ ID NO: 1185666 - RNA, 19 nt, Artificial Sequence
  Description of Artificial Sequence: Synthetic oligonucleotide
  Sense strand starting at position 3553 of SEQ ID NO: 916808
acucuagaguuugaacaca

SEQ ID NO: 1185667 - RNA, 19 nt, Artificial Sequence
  Description of Artificial Sequence: Synthetic oligonucleotide
  Antisense strand to SEQ ID NO: 1185666
uguguucaaacucuagagu

SEQ ID NO: 1185668 - RNA, 19 nt, Artificial Sequence
  Description of Artificial Sequence: Synthetic oligonucleotide
  Sense strand starting at position 3876 of SEQ ID NO: 916808
ccauguuggcugggacagu

SEQ ID NO: 1185669 - RNA, 19 nt, Artificial Sequence
  Description of Artificial Sequence: Synthetic oligonucleotide
  Antisense strand to SEQ ID NO: 1185668
acugucccagccaacaugg

SEQ ID NO: 1185670 - RNA, 19 nt, Artificial Sequence
  Description of Artificial Sequence: Synthetic oligonucleotide
  Sense strand starting at position 533 of SEQ ID NO: 916809
gcauuccaaucguuaggaa

SEQ ID NO: 1185671 - RNA, 19 nt, Artificial Sequence
  Description of Artificial Sequence: Synthetic oligonucleotide
  Antisense strand to SEQ ID NO: 1185670
uuccuaacgauuggaaugc

SEQ ID NO: 1185672 - RNA, 19 nt, Artificial Sequence
  Description of Artificial Sequence: Synthetic oligonucleotide
  Sense strand starting at position 567 of SEQ ID NO: 916809
cuaucacuauguuuaagag

SEQ ID NO: 1185673 - RNA, 19 nt, Artificial Sequence
  Description of Artificial Sequence: Synthetic oligonucleotide
  Antisense strand to SEQ ID NO: 1185672
cucuuaaacauagugauag

SEQ ID NO: 1185674 - RNA, 19 nt, Artificial Sequence
  Description of Artificial Sequence: Synthetic oligonucleotide
  Sense strand starting at position 583 of SEQ ID NO: 916809
gagucauaauuauuaucga

SEQ ID NO: 1185675 - RNA, 19 nt, Artificial Sequence
  Description of Artificial Sequence: Synthetic oligonucleotide
  Antisense strand to SEQ ID NO: 1185674
ucgauaauaauuaugacuc

SEQ ID NO: 1185676 - RNA, 19 nt, Artificial Sequence
  Description of Artificial Sequence: Synthetic oligonucleotide
  Sense strand starting at position 689 of SEQ ID NO: 916809
uaauguggauccgucagaa

SEQ ID NO: 1185677 - RNA, 19 nt, Artificial Sequence
  Description of Artificial Sequence: Synthetic oligonucleotide
  Antisense strand to SEQ ID NO: 1185676
uucugacggauccacauua

SEQ ID NO: 1185678 - RNA, 19 nt, Artificial Sequence
  Description of Artificial Sequence: Synthetic oligonucleotide
  Sense strand starting at position 697 of SEQ ID NO: 916809
auccgucagaauuggguau

SEQ ID NO: 1185679 - RNA, 19 nt, Artificial Sequence
  Description of Artificial Sequence: Synthetic oligonucleotide
  Antisense strand to SEQ ID NO: 1185678
auacccaauucugacggau

SEQ ID NO: 1185680 - RNA, 19 nt, Artificial Sequence
  Description of Artificial Sequence: Synthetic oligonucleotide
  Sense strand starting at position 701 of SEQ ID NO: 916809
gucagaauuggguaucuua

SEQ ID NO: 1185681 - RNA, 19 nt, Artificial Sequence
  Description of Artificial Sequence: Synthetic oligonucleotide
  Antisense strand to SEQ ID NO: 1185680
uaagauacccaauucugac

SEQ ID NO: 1185682 - RNA, 19 nt, Artificial Sequence
  Description of Artificial Sequence: Synthetic oligonucleotide
  Sense strand starting at position 704 of SEQ ID NO: 916809
agaauuggguaucuuauac

SEQ ID NO: 1185683 - RNA, 19 nt, Artificial Sequence
  Description of Artificial Sequence: Synthetic oligonucleotide
  Antisense strand to SEQ ID NO: 1185682
guauaagauacccaauucu

SEQ ID NO: 1185684 - RNA, 19 nt, Artificial Sequence
  Description of Artificial Sequence: Synthetic oligonucleotide
  Sense strand starting at position 746 of SEQ ID NO: 916809
uagauaauuuacgaacugu

SEQ ID NO: 1185685 - RNA, 19 nt, Artificial Sequence
  Description of Artificial Sequence: Synthetic oligonucleotide
  Antisense strand to SEQ ID NO: 1185684
acaguucguaaauuaucua

SEQ ID NO: 1185686 - RNA, 19 nt, Artificial Sequence
  Description of Artificial Sequence: Synthetic oligonucleotide
  Sense strand starting at position 1215 of SEQ ID NO: 916809
ucagucagaauugguaguu

SEQ ID NO: 1185687 - RNA, 19 nt, Artificial Sequence
  Description of Artificial Sequence: Synthetic oligonucleotide
  Antisense strand to SEQ ID NO: 1185686
aacuaccaauucugacuga

SEQ ID NO: 1185688 - RNA, 19 nt, Artificial Sequence
  Description of Artificial Sequence: Synthetic oligonucleotide
  Sense strand starting at position 1220 of SEQ ID NO: 916809
cagaauugguaguuccaca

SEQ ID NO: 1185689 - RNA, 19 nt, Artificial Sequence
  Description of Artificial Sequence: Synthetic oligonucleotide
  Antisense strand to SEQ ID NO: 1185688
uguggaacuaccaauucug

SEQ ID NO: 1185690 - RNA, 19 nt, Artificial Sequence
  Description of Artificial Sequence: Synthetic oligonucleotide
  Sense strand starting at position 1225 of SEQ ID NO: 916809
uugguaguuccacaaccuu

SEQ ID NO: 1185691 - RNA, 19 nt, Artificial Sequence
  Description of Artificial Sequence: Synthetic oligonucleotide
  Antisense strand to SEQ ID NO: 1185690
aagguuguggaacuaccaa

SEQ ID NO: 1185692 - RNA, 19 nt, Artificial Sequence
  Description of Artificial Sequence: Synthetic oligonucleotide
  Sense strand starting at position 1278 of SEQ ID NO: 916809
uuccuagcucguuaauaca

SEQ ID NO: 1185693 - RNA, 19 nt, Artificial Sequence
  Description of Artificial Sequence: Synthetic oligonucleotide
  Antisense strand to SEQ ID NO: 1185692
uguauuaacgagcuaggaa

SEQ ID NO: 1185694 - RNA, 19 nt, Artificial Sequence
  Description of Artificial Sequence: Synthetic oligonucleotide
  Sense strand starting at position 1303 of SEQ ID NO: 916809
uaagguuuacacggacgaa

SEQ ID NO: 1185695 - RNA, 19 nt, Artificial Sequence
  Description of Artificial Sequence: Synthetic oligonucleotide
  Antisense strand to SEQ ID NO: 1185694
uucguccguguaaaccuua

SEQ ID NO: 1185696 - RNA, 19 nt, Artificial Sequence
  Description of Artificial Sequence: Synthetic oligonucleotide
  Sense strand starting at position 1529 of SEQ ID NO: 916809
aucacuagccagggugaau

SEQ ID NO: 1185697 - RNA, 19 nt, Artificial Sequence
  Description of Artificial Sequence: Synthetic oligonucleotide
  Antisense strand to SEQ ID NO: 1185696
auucacccuggcuagugau

SEQ ID NO: 1185698 - RNA, 19 nt, Artificial Sequence
  Description of Artificial Sequence: Synthetic oligonucleotide
  Sense strand starting at position 1815 of SEQ ID NO: 916809
aacucagauucgguaccua

SEQ ID NO: 1185699 - RNA, 19 nt, Artificial Sequence
  Description of Artificial Sequence: Synthetic oligonucleotide
  Antisense strand to SEQ ID NO: 1185698
uagguaccgaaucugaguu

SEQ ID NO: 1185700 - RNA, 19 nt, Artificial Sequence
  Description of Artificial Sequence: Synthetic oligonucleotide
  Sense strand starting at position 1906 of SEQ ID NO: 916809
gaagcuucgccucagacua

SEQ ID NO: 1185701 - RNA, 19 nt, Artificial Sequence
  Description of Artificial Sequence: Synthetic oligonucleotide
  Antisense strand to SEQ ID NO: 1185700
uagucugaggcgaagcuuc

SEQ ID NO: 1185702 - RNA, 19 nt, Artificial Sequence
  Description of Artificial Sequence: Synthetic oligonucleotide
  Sense strand starting at position 1980 of SEQ ID NO: 916809
cacagcuugcugggagaaa

SEQ ID NO: 1185703 - RNA, 19 nt, Artificial Sequence
  Description of Artificial Sequence: Synthetic oligonucleotide
  Antisense strand to SEQ ID NO: 1185702
uuucucccagcaagcugug

SEQ ID NO: 1185704 - RNA, 19 nt, Artificial Sequence
  Description of Artificial Sequence: Synthetic oligonucleotide
  Sense strand starting at position 2156 of SEQ ID NO: 916809
gcaacuuccuauuucgagu

SEQ ID NO: 1185705 - RNA, 19 nt, Artificial Sequence
  Description of Artificial Sequence: Synthetic oligonucleotide
  Antisense strand to SEQ ID NO: 1185704
acucgaaauaggaaguugc

SEQ ID NO: 1185706 - RNA, 19 nt, Artificial Sequence
  Description of Artificial Sequence: Synthetic oligonucleotide
  Sense strand starting at position 2172 of SEQ ID NO: 916809
agucuaaaguaaucuuggu

SEQ ID NO: 1185707 - RNA, 19 nt, Artificial Sequence
  Description of Artificial Sequence: Synthetic oligonucleotide
  Antisense strand to SEQ ID NO: 1185706
accaagauuacuuuagacu

SEQ ID NO: 1185708 - RNA, 19 nt, Artificial Sequence
  Description of Artificial Sequence: Synthetic oligonucleotide
  Sense strand starting at position 2223 of SEQ ID NO: 916809
guguucucccgccaauuua

SEQ ID NO: 1185709 - RNA, 19 nt, Artificial Sequence
  Description of Artificial Sequence: Synthetic oligonucleotide
  Antisense strand to SEQ ID NO: 1185708
uaaauuggcgggagaacac

SEQ ID NO: 1185710 - RNA, 19 nt, Artificial Sequence
  Description of Artificial Sequence: Synthetic oligonucleotide
  Sense strand starting at position 2234 of SEQ ID NO: 916809
ccaauuuaagccuguggca

SEQ ID NO: 1185711 - RNA, 19 nt, Artificial Sequence
  Description of Artificial Sequence: Synthetic oligonucleotide
  Antisense strand to SEQ ID NO: 1185710
ugccacaggcuuaaauugg

SEQ ID NO: 1185712 - RNA, 19 nt, Artificial Sequence
  Description of Artificial Sequence: Synthetic oligonucleotide
  Sense strand starting at position 2376 of SEQ ID NO: 916809
guggguucaggacgaagua

SEQ ID NO: 1185713 - RNA, 19 nt, Artificial Sequence
  Description of Artificial Sequence: Synthetic oligonucleotide
  Antisense strand to SEQ ID NO: 1185712
uacuucguccugaacccac

SEQ ID NO: 1185714 - RNA, 19 nt, Artificial Sequence
  Description of Artificial Sequence: Synthetic oligonucleotide
  Sense strand starting at position 2471 of SEQ ID NO: 916809
cggcgauguccagcggaga

SEQ ID NO: 1185715 - RNA, 19 nt, Artificial Sequence
  Description of Artificial Sequence: Synthetic oligonucleotide
  Antisense strand to SEQ ID NO: 1185714
ucuccgcuggacaucgccg

SEQ ID NO: 1185716 - RNA, 19 nt, Artificial Sequence
  Description of Artificial Sequence: Synthetic oligonucleotide
  Sense strand starting at position 2486 of SEQ ID NO: 916809
gagagcguuuaaguaugga

SEQ ID NO: 1185717 - RNA, 19 nt, Artificial Sequence
  Description of Artificial Sequence: Synthetic oligonucleotide
  Antisense strand to SEQ ID NO: 1185716
uccauacuuaaacgcucuc

SEQ ID NO: 1185718 - RNA, 19 nt, Artificial Sequence
  Description of Artificial Sequence: Synthetic oligonucleotide
  Sense strand starting at position 2548 of SEQ ID NO: 916809
cgcgaaucuguucugcauu

SEQ ID NO: 1185719 - RNA, 19 nt, Artificial Sequence
  Description of Artificial Sequence: Synthetic oligonucleotide
  Antisense strand to SEQ ID NO: 1185718
aaugcagaacagauucgcg

SEQ ID NO: 1185720 - RNA, 19 nt, Artificial Sequence
  Description of Artificial Sequence: Synthetic oligonucleotide
  Sense strand starting at position 2570 of SEQ ID NO: 916809
ccgccagagugaucucaaa

SEQ ID NO: 1185721 - RNA, 19 nt, Artificial Sequence
  Description of Artificial Sequence: Synthetic oligonucleotide
  Antisense strand to SEQ ID NO: 1185720
uuugagaucacucuggcgg

SEQ ID NO: 1185722 - RNA, 19 nt, Artificial Sequence
  Description of Artificial Sequence: Synthetic oligonucleotide
  Sense strand starting at position 2653 of SEQ ID NO: 916809
caaucuugaggucgagguu

SEQ ID NO: 1185723 - RNA, 19 nt, Artificial Sequence
  Description of Artificial Sequence: Synthetic oligonucleotide
  Antisense strand to SEQ ID NO: 1185722
aaccucgaccucaagauug

SEQ ID NO: 1185724 - RNA, 19 nt, Artificial Sequence
  Description of Artificial Sequence: Synthetic oligonucleotide
  Sense strand starting at position 2936 of SEQ ID NO: 916809
uuguaauuauuugugcagu

SEQ ID NO: 1185725 - RNA, 19 nt, Artificial Sequence
  Description of Artificial Sequence: Synthetic oligonucleotide
  Antisense strand to SEQ ID NO: 1185724
acugcacaaauaauuacaa

SEQ ID NO: 1185726 - RNA, 19 nt, Artificial Sequence
  Description of Artificial Sequence: Synthetic oligonucleotide
  Sense strand starting at position 3086 of SEQ ID NO: 916809
uagaaaggugucuggcaca

SEQ ID NO: 1185727 - RNA, 19 nt, Artificial Sequence
  Description of Artificial Sequence: Synthetic oligonucleotide
  Antisense strand to SEQ ID NO: 1185726
ugugccagacaccuuucua

SEQ ID NO: 1185728 - RNA, 19 nt, Artificial Sequence
  Description of Artificial Sequence: Synthetic oligonucleotide
  Sense strand starting at position 3296 of SEQ ID NO: 916809
guuucuguucccuugcuua

SEQ ID NO: 1185729 - RNA, 19 nt, Artificial Sequence
  Description of Artificial Sequence: Synthetic oligonucleotide
  Antisense strand to SEQ ID NO: 1185728
uaagcaagggaacagaaac

SEQ ID NO: 1185730 - RNA, 19 nt, Artificial Sequence
  Description of Artificial Sequence: Synthetic oligonucleotide
  Sense strand starting at position 3419 of SEQ ID NO: 916809
aagcauuguucugugaaca

SEQ ID NO: 1185731 - RNA, 19 nt, Artificial Sequence
  Description of Artificial Sequence: Synthetic oligonucleotide
  Antisense strand to SEQ ID NO: 1185730
uguucacagaacaaugcuu

SEQ ID NO: 1185732 - RNA, 19 nt, Artificial Sequence
  Description of Artificial Sequence: Synthetic oligonucleotide
  Sense strand starting at position 3581 of SEQ ID NO: 916809
cuaaauuagucccuuggua

SEQ ID NO: 1185733 - RNA, 19 nt, Artificial Sequence
  Description of Artificial Sequence: Synthetic oligonucleotide
  Antisense strand to SEQ ID NO: 1185732
uaccaagggacuaauuuag

SEQ ID NO: 1185734 - RNA, 19 nt, Artificial Sequence
  Description of Artificial Sequence: Synthetic oligonucleotide
  Sense strand starting at position 3596 of SEQ ID NO: 916809
gguauugguauccauggga

SEQ ID NO: 1185735 - RNA, 19 nt, Artificial Sequence
  Description of Artificial Sequence: Synthetic oligonucleotide
  Antisense strand to SEQ ID NO: 1185734
ucccauggauaccaauacc

SEQ ID NO: 1185736 - RNA, 19 nt, Artificial Sequence
  Description of Artificial Sequence: Synthetic oligonucleotide
  Sense strand starting at position 3691 of SEQ ID NO: 916809
gcauguagccuaggaacau

SEQ ID NO: 1185737 - RNA, 19 nt, Artificial Sequence
  Description of Artificial Sequence: Synthetic oligonucleotide
  Antisense strand to SEQ ID NO: 1185736
auguuccuaggcuacaugc

SEQ ID NO: 1185738 - RNA, 19 nt, Artificial Sequence
  Description of Artificial Sequence: Synthetic oligonucleotide
  Sense strand starting at position 3702 of SEQ ID NO: 916809
aggaacaucugccuguaua

SEQ ID NO: 1185739 - RNA, 19 nt, Artificial Sequence
  Description of Artificial Sequence: Synthetic oligonucleotide
  Antisense strand to SEQ ID NO: 1185738
uauacaggcagauguuccu

SEQ ID NO: 1185740 - RNA, 19 nt, Artificial Sequence
  Description of Artificial Sequence: Synthetic oligonucleotide
  Sense strand starting at position 3703 of SEQ ID NO: 916809
ggaacaucugccuguauac

SEQ ID NO: 1185741 - RNA, 19 nt, Artificial Sequence
  Description of Artificial Sequence: Synthetic oligonucleotide
  Antisense strand to SEQ ID NO: 1185740
guauacaggcagauguucc

SEQ ID NO: 1185742 - RNA, 19 nt, Artificial Sequence
  Description of Artificial Sequence: Synthetic oligonucleotide
  Sense strand starting at position 3777 of SEQ ID NO: 916809
guaggugcaaucuagggau

SEQ ID NO: 1185743 - RNA, 19 nt, Artificial Sequence
  Description of Artificial Sequence: Synthetic oligonucleotide
  Antisense strand to SEQ ID NO: 1185742
aucccuagauugcaccuac

SEQ ID NO: 1185744 - RNA, 19 nt, Artificial Sequence
  Description of Artificial Sequence: Synthetic oligonucleotide
  Sense strand starting at position 3783 of SEQ ID NO: 916809
gcaaucuagggauguggaa

SEQ ID NO: 1185745 - RNA, 19 nt, Artificial Sequence
  Description of Artificial Sequence: Synthetic oligonucleotide
  Antisense strand to SEQ ID NO: 1185744
uuccacaucccuagauugc

SEQ ID NO: 1185746 - RNA, 19 nt, Artificial Sequence
  Description of Artificial Sequence: Synthetic oligonucleotide
  Sense strand starting at position 3795 of SEQ ID NO: 916809
uguggaacacauggauauu

SEQ ID NO: 1185747 - RNA, 19 nt, Artificial Sequence
  Description of Artificial Sequence: Synthetic oligonucleotide
  Antisense strand to SEQ ID NO: 1185746
aauauccauguguuccaca

SEQ ID NO: 1185748 - RNA, 19 nt, Artificial Sequence
  Description of Artificial Sequence: Synthetic oligonucleotide
  Sense strand starting at position 3814 of SEQ ID NO: 916809
gacggcaaacuguauauau

SEQ ID NO: 1185749 - RNA, 19 nt, Artificial Sequence
  Description of Artificial Sequence: Synthetic oligonucleotide
  Antisense strand to SEQ ID NO: 1185748
auauauacaguuugccguc

SEQ ID NO: 1185750 - RNA, 19 nt, Artificial Sequence
  Description of Artificial Sequence: Synthetic oligonucleotide
  Sense strand starting at position 10 of SEQ ID NO: 916810
aggcaugaguucuuaacca

SEQ ID NO: 1185751 - RNA, 19 nt, Artificial Sequence
  Description of Artificial Sequence: Synthetic oligonucleotide
  Antisense strand to SEQ ID NO: 1185750
ugguuaagaacucaugccu

SEQ ID NO: 1185752 - RNA, 19 nt, Artificial Sequence
  Description of Artificial Sequence: Synthetic oligonucleotide
  Sense strand starting at position 15 of SEQ ID NO: 916810
ugaguucuuaaccagaggu

SEQ ID NO: 1185753 - RNA, 19 nt, Artificial Sequence
  Description of Artificial Sequence: Synthetic oligonucleotide
  Antisense strand to SEQ ID NO: 1185752
accucugguuaagaacuca

SEQ ID NO: 1185754 - RNA, 19 nt, Artificial Sequence
  Description of Artificial Sequence: Synthetic oligonucleotide
  Sense strand starting at position 149 of SEQ ID NO: 916810
agauaucugugaccuccaa

SEQ ID NO: 1185755 - RNA, 19 nt, Artificial Sequence
  Description of Artificial Sequence: Synthetic oligonucleotide
  Antisense strand to SEQ ID NO: 1185754
uuggaggucacagauaucu

SEQ ID NO: 1185756 - RNA, 19 nt, Artificial Sequence
  Description of Artificial Sequence: Synthetic oligonucleotide
  Sense strand starting at position 249 of SEQ ID NO: 916810
gccuaauguucucuuagac

SEQ ID NO: 1185757 - RNA, 19 nt, Artificial Sequence
  Description of Artificial Sequence: Synthetic oligonucleotide
  Antisense strand to SEQ ID NO: 1185756
gucuaagagaacauuaggc

SEQ ID NO: 1185758 - RNA, 19 nt, Artificial Sequence
  Description of Artificial Sequence: Synthetic oligonucleotide
  Sense strand starting at position 256 of SEQ ID NO: 916810
guucucuuagacuguaaca

SEQ ID NO: 1185759 - RNA, 19 nt, Artificial Sequence
  Description of Artificial Sequence: Synthetic oligonucleotide
  Antisense strand to SEQ ID NO: 1185758
uguuacagucuaagagaac

SEQ ID NO: 1185760 - RNA, 19 nt, Artificial Sequence
  Description of Artificial Sequence: Synthetic oligonucleotide
  Sense strand starting at position 285 of SEQ ID NO: 916810
gucagaggacuuuacguaa

SEQ ID NO: 1185761 - RNA, 19 nt, Artificial Sequence
  Description of Artificial Sequence: Synthetic oligonucleotide
  Antisense strand to SEQ ID NO: 1185760
uuacguaaaguccucugac

SEQ ID NO: 1185762 - RNA, 19 nt, Artificial Sequence
  Description of Artificial Sequence: Synthetic oligonucleotide
  Sense strand starting at position 585 of SEQ ID NO: 916810
aguggagaugauugcucaa

SEQ ID NO: 1185763 - RNA, 19 nt, Artificial Sequence
  Description of Artificial Sequence: Synthetic oligonucleotide
  Antisense strand to SEQ ID NO: 1185762
uugagcaaucaucuccacu

SEQ ID NO: 1185764 - RNA, 19 nt, Artificial Sequence
  Description of Artificial Sequence: Synthetic oligonucleotide
  Sense strand starting at position 587 of SEQ ID NO: 916810
uggagaugauugcucaauu

SEQ ID NO: 1185765 - RNA, 19 nt, Artificial Sequence
  Description of Artificial Sequence: Synthetic oligonucleotide
  Antisense strand to SEQ ID NO: 1185764
aauugagcaaucaucucca

SEQ ID NO: 1185766 - RNA, 19 nt, Artificial Sequence
  Description of Artificial Sequence: Synthetic oligonucleotide
  Sense strand starting at position 630 of SEQ ID NO: 916810
ucaagagaccgcugauaua

SEQ ID NO: 1185767 - RNA, 19 nt, Artificial Sequence
  Description of Artificial Sequence: Synthetic oligonucleotide
  Antisense strand to SEQ ID NO: 1185766
uauaucagcggucucuuga

SEQ ID NO: 1185768 - RNA, 19 nt, Artificial Sequence
  Description of Artificial Sequence: Synthetic oligonucleotide
  Sense strand starting at position 640 of SEQ ID NO: 916810
gcugauauagucuaugcau

SEQ ID NO: 1185769 - RNA, 19 nt, Artificial Sequence
  Description of Artificial Sequence: Synthetic oligonucleotide
  Antisense strand to SEQ ID NO: 1185768
augcauagacuauaucagc

SEQ ID NO: 1185770 - RNA, 19 nt, Artificial Sequence
  Description of Artificial Sequence: Synthetic oligonucleotide
  Sense strand starting at position 859 of SEQ ID NO: 916810
cgagcuuuaaaggaucacu

SEQ ID NO: 1185771 - RNA, 19 nt, Artificial Sequence
  Description of Artificial Sequence: Synthetic oligonucleotide
  Antisense strand to SEQ ID NO: 1185770
agugauccuuuaaagcucg

SEQ ID NO: 1185772 - RNA, 19 nt, Artificial Sequence
  Description of Artificial Sequence: Synthetic oligonucleotide
  Sense strand starting at position 1138 of SEQ ID NO: 916810
gcccacccgagauaugaaa

SEQ ID NO: 1185773 - RNA, 19 nt, Artificial Sequence
  Description of Artificial Sequence: Synthetic oligonucleotide
  Antisense strand to SEQ ID NO: 1185772
uuucauaucucgggugggc

SEQ ID NO: 1185774 - RNA, 19 nt, Artificial Sequence
  Description of Artificial Sequence: Synthetic oligonucleotide
  Sense strand starting at position 1194 of SEQ ID NO: 916810
ccaaauauugcagguguga

SEQ ID NO: 1185775 - RNA, 19 nt, Artificial Sequence
  Description of Artificial Sequence: Synthetic oligonucleotide
  Antisense strand to SEQ ID NO: 1185774
ucacaccugcaauauuugg

SEQ ID NO: 1185776 - RNA, 19 nt, Artificial Sequence
  Description of Artificial Sequence: Synthetic oligonucleotide
  Sense strand starting at position 1229 of SEQ ID NO: 916810
ggagauggugugugaggaa

SEQ ID NO: 1185777 - RNA, 19 nt, Artificial Sequence
  Description of Artificial Sequence: Synthetic oligonucleotide
  Antisense strand to SEQ ID NO: 1185776
uuccucacacaccaucucc

SEQ ID NO: 1185778 - RNA, 19 nt, Artificial Sequence
  Description of Artificial Sequence: Synthetic oligonucleotide
  Sense strand starting at position 1352 of SEQ ID NO: 916810
cgagaccgaucuucugaga

SEQ ID NO: 1185779 - RNA, 19 nt, Artificial Sequence
  Description of Artificial Sequence: Synthetic oligonucleotide
  Antisense strand to SEQ ID NO: 1185778
ucucagaagaucggucucg

SEQ ID NO: 1185780 - RNA, 19 nt, Artificial Sequence
  Description of Artificial Sequence: Synthetic oligonucleotide
  Sense strand starting at position 1443 of SEQ ID NO: 916810
agugucugguaccuauuua

SEQ ID NO: 1185781 - RNA, 19 nt, Artificial Sequence
  Description of Artificial Sequence: Synthetic oligonucleotide
  Antisense strand to SEQ ID NO: 1185780
uaaauagguaccagacacu

SEQ ID NO: 1185782 - RNA, 19 nt, Artificial Sequence
  Description of Artificial Sequence: Synthetic oligonucleotide
  Sense strand starting at position 1450 of SEQ ID NO: 916810
gguaccuauuuagacagaa

SEQ ID NO: 1185783 - RNA, 19 nt, Artificial Sequence
  Description of Artificial Sequence: Synthetic oligonucleotide
  Antisense strand to SEQ ID NO: 1185782
uucugucuaaauagguacc

SEQ ID NO: 1185784 - RNA, 19 nt, Artificial Sequence
  Description of Artificial Sequence: Synthetic oligonucleotide
  Sense strand starting at position 1717 of SEQ ID NO: 916810
caguaaagccgugaggaga

SEQ ID NO: 1185785 - RNA, 19 nt, Artificial Sequence
  Description of Artificial Sequence: Synthetic oligonucleotide
  Antisense strand to SEQ ID NO: 1185784
ucuccucacggcuuuacug

SEQ ID NO: 1185786 - RNA, 19 nt, Artificial Sequence
  Description of Artificial Sequence: Synthetic oligonucleotide
  Sense strand starting at position 2003 of SEQ ID NO: 916810
cgccuuaggcguagagaug

SEQ ID NO: 1185787 - RNA, 19 nt, Artificial Sequence
  Description of Artificial Sequence: Synthetic oligonucleotide
  Antisense strand to SEQ ID NO: 1185786
caucucuacgccuaaggcg

SEQ ID NO: 1185788 - RNA, 19 nt, Artificial Sequence
  Description of Artificial Sequence: Synthetic oligonucleotide
  Sense strand starting at position 2075 of SEQ ID NO: 916810
cccauuggucaauagcuga

SEQ ID NO: 1185789 - RNA, 19 nt, Artificial Sequence
  Description of Artificial Sequence: Synthetic oligonucleotide
  Antisense strand to SEQ ID NO: 1185788
ucagcuauugaccaauggg

SEQ ID NO: 1185790 - RNA, 19 nt, Artificial Sequence
  Description of Artificial Sequence: Synthetic oligonucleotide
  Sense strand starting at position 2726 of SEQ ID NO: 916810
ccacgcuugagagaaguaa

SEQ ID NO: 1185791 - RNA, 19 nt, Artificial Sequence
  Description of Artificial Sequence: Synthetic oligonucleotide
  Antisense strand to SEQ ID NO: 1185790
uuacuucucucaagcgugg

SEQ ID NO: 1185792 - RNA, 19 nt, Artificial Sequence
  Description of Artificial Sequence: Synthetic oligonucleotide
  Sense strand starting at position 2749 of SEQ ID NO: 916810
gaugcagacuguuuacaug

SEQ ID NO: 1185793 - RNA, 19 nt, Artificial Sequence
  Description of Artificial Sequence: Synthetic oligonucleotide
  Antisense strand to SEQ ID NO: 1185792
cauguaaacagucugcauc

SEQ ID NO: 1185794 - RNA, 19 nt, Artificial Sequence
  Description of Artificial Sequence: Synthetic oligonucleotide
  Sense strand starting at position 2847 of SEQ ID NO: 916810
cuuagugguucuuugauga

SEQ ID NO: 1185795 - RNA, 19 nt, Artificial Sequence
  Description of Artificial Sequence: Synthetic oligonucleotide
  Antisense strand to SEQ ID NO: 1185794
ucaucaaagaaccacuaag

SEQ ID NO: 1185796 - RNA, 19 nt, Artificial Sequence
  Description of Artificial Sequence: Synthetic oligonucleotide
  Sense strand starting at position 2854 of SEQ ID NO: 916810
guucuuugaugauuccaug

SEQ ID NO: 1185797 - RNA, 19 nt, Artificial Sequence
  Description of Artificial Sequence: Synthetic oligonucleotide
  Antisense strand to SEQ ID NO: 1185796
cauggaaucaucaaagaac

SEQ ID NO: 1185798 - RNA, 19 nt, Artificial Sequence
  Description of Artificial Sequence: Synthetic oligonucleotide
  Sense strand starting at position 2868 of SEQ ID NO: 916810
ccaugacuuucgccuggaa

SEQ ID NO: 1185799 - RNA, 19 nt, Artificial Sequence
  Description of Artificial Sequence: Synthetic oligonucleotide
  Antisense strand to SEQ ID NO: 1185798
uuccaggcgaaagucaugg

SEQ ID NO: 1185800 - RNA, 19 nt, Artificial Sequence
  Description of Artificial Sequence: Synthetic oligonucleotide
  Sense strand starting at position 2870 of SEQ ID NO: 916810
augacuuucgccuggaauu

SEQ ID NO: 1185801 - RNA, 19 nt, Artificial Sequence
  Description of Artificial Sequence: Synthetic oligonucleotide
  Antisense strand to SEQ ID NO: 1185800
aauuccaggcgaaagucau

SEQ ID NO: 1185802 - RNA, 19 nt, Artificial Sequence
  Description of Artificial Sequence: Synthetic oligonucleotide
  Sense strand starting at position 2872 of SEQ ID NO: 916810
gacuuucgccuggaauucu

SEQ ID NO: 1185803 - RNA, 19 nt, Artificial Sequence
  Description of Artificial Sequence: Synthetic oligonucleotide
  Antisense strand to SEQ ID NO: 1185802
agaauuccaggcgaaaguc

SEQ ID NO: 1185804 - RNA, 19 nt, Artificial Sequence
  Description of Artificial Sequence: Synthetic oligonucleotide
  Sense strand starting at position 2880 of SEQ ID NO: 916810
ccuggaauucuggguguac

SEQ ID NO: 1185805 - RNA, 19 nt, Artificial Sequence
  Description of Artificial Sequence: Synthetic oligonucleotide
  Antisense strand to SEQ ID NO: 1185804
guacacccagaauuccagg

SEQ ID NO: 1185806 - RNA, 19 nt, Artificial Sequence
  Description of Artificial Sequence: Synthetic oligonucleotide
  Sense strand starting at position 2884 of SEQ ID NO: 916810
gaauucuggguguacguga

SEQ ID NO: 1185807 - RNA, 19 nt, Artificial Sequence
  Description of Artificial Sequence: Synthetic oligonucleotide
  Antisense strand to SEQ ID NO: 1185806
ucacguacacccagaauuc

SEQ ID NO: 1185808 - RNA, 19 nt, Artificial Sequence
  Description of Artificial Sequence: Synthetic oligonucleotide
  Sense strand starting at position 3002 of SEQ ID NO: 916810
acaguugacguguaaagau

SEQ ID NO: 1185809 - RNA, 19 nt, Artificial Sequence
  Description of Artificial Sequence: Synthetic oligonucleotide
  Antisense strand to SEQ ID NO: 1185808
aucuuuacacgucaacugu

SEQ ID NO: 1185810 - RNA, 19 nt, Artificial Sequence
  Description of Artificial Sequence: Synthetic oligonucleotide
  Sense strand starting at position 3009 of SEQ ID NO: 916810
acguguaaagaucagagca

SEQ ID NO: 1185811 - RNA, 19 nt, Artificial Sequence
  Description of Artificial Sequence: Synthetic oligonucleotide
  Antisense strand to SEQ ID NO: 1185810
ugcucugaucuuuacacgu

SEQ ID NO: 1185812 - RNA, 19 nt, Artificial Sequence
  Description of Artificial Sequence: Synthetic oligonucleotide
  Sense strand starting at position 3031 of SEQ ID NO: 916810
augacuaugucucugaaau

SEQ ID NO: 1185813 - RNA, 19 nt, Artificial Sequence
  Description of Artificial Sequence: Synthetic oligonucleotide
  Antisense strand to SEQ ID NO: 1185812
auuucagagacauagucau

SEQ ID NO: 1185814 - RNA, 19 nt, Artificial Sequence
  Description of Artificial Sequence: Synthetic oligonucleotide
  Sense strand starting at position 3032 of SEQ ID NO: 916810
ugacuaugucucugaaaug

SEQ ID NO: 1185815 - RNA, 19 nt, Artificial Sequence
  Description of Artificial Sequence: Synthetic oligonucleotide
  Antisense strand to SEQ ID NO: 1185814
cauuucagagacauaguca

SEQ ID NO: 1185816 - RNA, 19 nt, Artificial Sequence
  Description of Artificial Sequence: Synthetic oligonucleotide
  Sense strand starting at position 3054 of SEQ ID NO: 916810
ugaggacucuucuugucuu

SEQ ID NO: 1185817 - RNA, 19 nt, Artificial Sequence
  Description of Artificial Sequence: Synthetic oligonucleotide
  Antisense strand to SEQ ID NO: 1185816
aagacaagaagaguccuca

SEQ ID NO: 1185818 - RNA, 19 nt, Artificial Sequence
  Description of Artificial Sequence: Synthetic oligonucleotide
  Sense strand starting at position 3109 of SEQ ID NO: 916810
gcgugauggguaaguucuu

SEQ ID NO: 1185819 - RNA, 19 nt, Artificial Sequence
  Description of Artificial Sequence: Synthetic oligonucleotide
  Antisense strand to SEQ ID NO: 1185818
aagaacuuacccaucacgc

SEQ ID NO: 1185820 - RNA, 19 nt, Artificial Sequence
  Description of Artificial Sequence: Synthetic oligonucleotide
  Sense strand starting at position 3755 of SEQ ID NO: 916810
augagauaugcuggguuag

SEQ ID NO: 1185821 - RNA, 19 nt, Artificial Sequence
  Description of Artificial Sequence: Synthetic oligonucleotide
  Antisense strand to SEQ ID NO: 1185820
cuaacccagcauaucucau

SEQ ID NO: 1185822 - RNA, 19 nt, Artificial Sequence
  Description of Artificial Sequence: Synthetic oligonucleotide
  Sense strand starting at position 3756 of SEQ ID NO: 916810
ugagauaugcuggguuaga

SEQ ID NO: 1185823 - RNA, 19 nt, Artificial Sequence
  Description of Artificial Sequence: Synthetic oligonucleotide
  Antisense strand to SEQ ID NO: 1185822
ucuaacccagcauaucuca

SEQ ID NO: 1185824 - RNA, 19 nt, Artificial Sequence
  Description of Artificial Sequence: Synthetic oligonucleotide
  Sense strand starting at position 3757 of SEQ ID NO: 916810
gagauaugcuggguuagaa

SEQ ID NO: 1185825 - RNA, 19 nt, Artificial Sequence
  Description of Artificial Sequence: Synthetic oligonucleotide
  Antisense strand to SEQ ID NO: 1185824
uucuaacccagcauaucuc

SEQ ID NO: 1185826 - RNA, 19 nt, Artificial Sequence
  Description of Artificial Sequence: Synthetic oligonucleotide
  Sense strand starting at position 3852 of SEQ ID NO: 916810
gauauuaugguauacuagu

SEQ ID NO: 1185827 - RNA, 19 nt, Artificial Sequence
  Description of Artificial Sequence: Synthetic oligonucleotide
  Antisense strand to SEQ ID NO: 1185826
acuaguauaccauaauauc

SEQ ID NO: 1185828 - RNA, 19 nt, Artificial Sequence
  Description of Artificial Sequence: Synthetic oligonucleotide
  Sense strand starting at position 3858 of SEQ ID NO: 916810
augguauacuaguucuaag

SEQ ID NO: 1185829 - RNA, 19 nt, Artificial Sequence
  Description of Artificial Sequence: Synthetic oligonucleotide
  Antisense strand to SEQ ID NO: 1185828
cuuagaacuaguauaccau

SEQ ID NO: 1185830 - RNA, 19 nt, Artificial Sequence
  Description of Artificial Sequence: Synthetic oligonucleotide
  Sense strand starting at position 299 of SEQ ID NO: 916811
gagagaaugugcuccaucu

SEQ ID NO: 1185831 - RNA, 19 nt, Artificial Sequence
  Description of Artificial Sequence: Synthetic oligonucleotide
  Antisense strand to SEQ ID NO: 1185830
agauggagcacauucucuc

SEQ ID NO: 1185832 - RNA, 19 nt, Artificial Sequence
  Description of Artificial Sequence: Synthetic oligonucleotide
  Sense strand starting at position 301 of SEQ ID NO: 916811
gagaaugugcuccaucucu

SEQ ID NO: 1185833 - RNA, 19 nt, Artificial Sequence
  Description of Artificial Sequence: Synthetic oligonucleotide
  Antisense strand to SEQ ID NO: 1185832
agagauggagcacauucuc

SEQ ID NO: 1185834 - RNA, 19 nt, Artificial Sequence
  Description of Artificial Sequence: Synthetic oligonucleotide
  Sense strand starting at position 521 of SEQ ID NO: 916811
ggcugcuucccuugaacaa

SEQ ID NO: 1185835 - RNA, 19 nt, Artificial Sequence
  Description of Artificial Sequence: Synthetic oligonucleotide
  Antisense strand to SEQ ID NO: 1185834
uuguucaagggaagcagcc

SEQ ID NO: 1185836 - RNA, 19 nt, Artificial Sequence
  Description of Artificial Sequence: Synthetic oligonucleotide
  Sense strand starting at position 537 of SEQ ID NO: 916811
caaaguuaucagcaggucu

SEQ ID NO: 1185837 - RNA, 19 nt, Artificial Sequence
  Description of Artificial Sequence: Synthetic oligonucleotide
  Antisense strand to SEQ ID NO: 1185836
agaccugcugauaacuuug

SEQ ID NO: 1185838 - RNA, 19 nt, Artificial Sequence
  Description of Artificial Sequence: Synthetic oligonucleotide
  Sense strand starting at position 539 of SEQ ID NO: 916811
aaguuaucagcaggucuca

SEQ ID NO: 1185839 - RNA, 19 nt, Artificial Sequence
  Description of Artificial Sequence: Synthetic oligonucleotide
  Antisense strand to SEQ ID NO: 1185838
ugagaccugcugauaacuu

SEQ ID NO: 1185840 - RNA, 19 nt, Artificial Sequence
  Description of Artificial Sequence: Synthetic oligonucleotide
  Sense strand starting at position 627 of SEQ ID NO: 916811
ggaguuaccagcuauggga

SEQ ID NO: 1185841 - RNA, 19 nt, Artificial Sequence
  Description of Artificial Sequence: Synthetic oligonucleotide
  Antisense strand to SEQ ID NO: 1185840
ucccauagcugguaacucc

SEQ ID NO: 1185842 - RNA, 19 nt, Artificial Sequence
  Description of Artificial Sequence: Synthetic oligonucleotide
  Sense strand starting at position 629 of SEQ ID NO: 916811
aguuaccagcuaugggaua

SEQ ID NO: 1185843 - RNA, 19 nt, Artificial Sequence
  Description of Artificial Sequence: Synthetic oligonucleotide
  Antisense strand to SEQ ID NO: 1185842
uaucccauagcugguaacu

SEQ ID NO: 1185844 - RNA, 19 nt, Artificial Sequence
  Description of Artificial Sequence: Synthetic oligonucleotide
  Sense strand starting at position 733 of SEQ ID NO: 916811
ugcugagauccuggauuau

SEQ ID NO: 1185845 - RNA, 19 nt, Artificial Sequence
  Description of Artificial Sequence: Synthetic oligonucleotide
  Antisense strand to SEQ ID NO: 1185844
auaauccaggaucucagca

SEQ ID NO: 1185846 - RNA, 19 nt, Artificial Sequence
  Description of Artificial Sequence: Synthetic oligonucleotide
  Sense strand starting at position 794 of SEQ ID NO: 916811
auguuaugacuagaugcua

SEQ ID NO: 1185847 - RNA, 19 nt, Artificial Sequence
  Description of Artificial Sequence: Synthetic oligonucleotide
  Antisense strand to SEQ ID NO: 1185846
uagcaucuagucauaacau

SEQ ID NO: 1185848 - RNA, 19 nt, Artificial Sequence
  Description of Artificial Sequence: Synthetic oligonucleotide
  Sense strand starting at position 854 of SEQ ID NO: 916811
agaaauuguugcucccaau

SEQ ID NO: 1185849 - RNA, 19 nt, Artificial Sequence
  Description of Artificial Sequence: Synthetic oligonucleotide
  Antisense strand to SEQ ID NO: 1185848
auugggagcaacaauuucu

SEQ ID NO: 1185850 - RNA, 19 nt, Artificial Sequence
  Description of Artificial Sequence: Synthetic oligonucleotide
  Sense strand starting at position 864 of SEQ ID NO: 916811
gcucccaaucugcagauaa

SEQ ID NO: 1185851 - RNA, 19 nt, Artificial Sequence
  Description of Artificial Sequence: Synthetic oligonucleotide
  Antisense strand to SEQ ID NO: 1185850
uuaucugcagauugggagc

SEQ ID NO: 1185852 - RNA, 19 nt, Artificial Sequence
  Description of Artificial Sequence: Synthetic oligonucleotide
  Sense strand starting at position 996 of SEQ ID NO: 916811
caccaucgcggucaauauu

SEQ ID NO: 1185853 - RNA, 19 nt, Artificial Sequence
  Description of Artificial Sequence: Synthetic oligonucleotide
  Antisense strand to SEQ ID NO: 1185852
aauauugaccgcgauggug

SEQ ID NO: 1185854 - RNA, 19 nt, Artificial Sequence
  Description of Artificial Sequence: Synthetic oligonucleotide
  Sense strand starting at position 1068 of SEQ ID NO: 916811
ucucuugcgaaugaguuua

SEQ ID NO: 1185855 - RNA, 19 nt, Artificial Sequence
  Description of Artificial Sequence: Synthetic oligonucleotide
  Antisense strand to SEQ ID NO: 1185854
uaaacucauucgcaagaga

SEQ ID NO: 1185856 - RNA, 19 nt, Artificial Sequence
  Description of Artificial Sequence: Synthetic oligonucleotide
  Sense strand starting at position 1097 of SEQ ID NO: 916811
uggacgugugguuaagagu

SEQ ID NO: 1185857 - RNA, 19 nt, Artificial Sequence
  Description of Artificial Sequence: Synthetic oligonucleotide
  Antisense strand to SEQ ID NO: 1185856
acucuuaaccacacgucca

SEQ ID NO: 1185858 - RNA, 19 nt, Artificial Sequence
  Description of Artificial Sequence: Synthetic oligonucleotide
  Sense strand starting at position 1103 of SEQ ID NO: 916811
ugugguuaagagugggagu

SEQ ID NO: 1185859 - RNA, 19 nt, Artificial Sequence
  Description of Artificial Sequence: Synthetic oligonucleotide
  Antisense strand to SEQ ID NO: 1185858
acucccacucuuaaccaca

SEQ ID NO: 1185860 - RNA, 19 nt, Artificial Sequence
  Description of Artificial Sequence: Synthetic oligonucleotide
  Sense strand starting at position 1104 of SEQ ID NO: 916811
gugguuaagagugggaguu

SEQ ID NO: 1185861 - RNA, 19 nt, Artificial Sequence
  Description of Artificial Sequence: Synthetic oligonucleotide
  Antisense strand to SEQ ID NO: 1185860
aacucccacucuuaaccac

SEQ ID NO: 1185862 - RNA, 19 nt, Artificial Sequence
  Description of Artificial Sequence: Synthetic oligonucleotide
  Sense strand starting at position 1117 of SEQ ID NO: 916811
ggaguucuggaaugggauc

SEQ ID NO: 1185863 - RNA, 19 nt, Artificial Sequence
  Description of Artificial Sequence: Synthetic oligonucleotide
  Antisense strand to SEQ ID NO: 1185862
gaucccauuccagaacucc

SEQ ID NO: 1185864 - RNA, 19 nt, Artificial Sequence
  Description of Artificial Sequence: Synthetic oligonucleotide
  Sense strand starting at position 1156 of SEQ ID NO: 916811
caggaaguguuaucuugag

SEQ ID NO: 1185865 - RNA, 19 nt, Artificial Sequence
  Description of Artificial Sequence: Synthetic oligonucleotide
  Antisense strand to SEQ ID NO: 1185864
cucaagauaacacuuccug

SEQ ID NO: 1185866 - RNA, 19 nt, Artificial Sequence
  Description of Artificial Sequence: Synthetic oligonucleotide
  Sense strand starting at position 1160 of SEQ ID NO: 916811
aaguguuaucuugagcaag

SEQ ID NO: 1185867 - RNA, 19 nt, Artificial Sequence
  Description of Artificial Sequence: Synthetic oligonucleotide
  Antisense strand to SEQ ID NO: 1185866
cuugcucaagauaacacuu

SEQ ID NO: 1185868 - RNA, 19 nt, Artificial Sequence
  Description of Artificial Sequence: Synthetic oligonucleotide
  Sense strand starting at position 1162 of SEQ ID NO: 916811
guguuaucuugagcaagaa

SEQ ID NO: 1185869 - RNA, 19 nt, Artificial Sequence
  Description of Artificial Sequence: Synthetic oligonucleotide
  Antisense strand to SEQ ID NO: 1185868
uucuugcucaagauaacac

SEQ ID NO: 1185870 - RNA, 19 nt, Artificial Sequence
  Description of Artificial Sequence: Synthetic oligonucleotide
  Sense strand starting at position 1163 of SEQ ID NO: 916811
uguuaucuugagcaagaaa

SEQ ID NO: 1185871 - RNA, 19 nt, Artificial Sequence
  Description of Artificial Sequence: Synthetic oligonucleotide
  Antisense strand to SEQ ID NO: 1185870
uuucuugcucaagauaaca

SEQ ID NO: 1185872 - RNA, 19 nt, Artificial Sequence
  Description of Artificial Sequence: Synthetic oligonucleotide
  Sense strand starting at position 1197 of SEQ ID NO: 916811
cucaguuuccuccaguaaa

SEQ ID NO: 1185873 - RNA, 19 nt, Artificial Sequence
  Description of Artificial Sequence: Synthetic oligonucleotide
  Antisense strand to SEQ ID NO: 1185872
uuuacuggaggaaacugag

SEQ ID NO: 1185874 - RNA, 19 nt, Artificial Sequence
  Description of Artificial Sequence: Synthetic oligonucleotide
  Sense strand starting at position 1247 of SEQ ID NO: 916811
ggucguggcgaggauucaa

SEQ ID NO: 1185875 - RNA, 19 nt, Artificial Sequence
  Description of Artificial Sequence: Synthetic oligonucleotide
  Antisense strand to SEQ ID NO: 1185874
uugaauccucgccacgacc

SEQ ID NO: 1185876 - RNA, 19 nt, Artificial Sequence
  Description of Artificial Sequence: Synthetic oligonucleotide
  Sense strand starting at position 1357 of SEQ ID NO: 916811
gcuuuaucgccgccgagga

SEQ ID NO: 1185877 - RNA, 19 nt, Artificial Sequence
  Description of Artificial Sequence: Synthetic oligonucleotide
  Antisense strand to SEQ ID NO: 1185876
uccucggcggcgauaaagc

SEQ ID NO: 1185878 - RNA, 19 nt, Artificial Sequence
  Description of Artificial Sequence: Synthetic oligonucleotide
  Sense strand starting at position 1760 of SEQ ID NO: 916811
cgccaucuugcgcuucuaa

SEQ ID NO: 1185879 - RNA, 19 nt, Artificial Sequence
  Description of Artificial Sequence: Synthetic oligonucleotide
  Antisense strand to SEQ ID NO: 1185878
uuagaagcgcaagauggcg

SEQ ID NO: 1185880 - RNA, 19 nt, Artificial Sequence
  Description of Artificial Sequence: Synthetic oligonucleotide
  Sense strand starting at position 1761 of SEQ ID NO: 916811
gccaucuugcgcuucuaau

SEQ ID NO: 1185881 - RNA, 19 nt, Artificial Sequence
  Description of Artificial Sequence: Synthetic oligonucleotide
  Antisense strand to SEQ ID NO: 1185880
auuagaagcgcaagauggc

SEQ ID NO: 1185882 - RNA, 19 nt, Artificial Sequence
  Description of Artificial Sequence: Synthetic oligonucleotide
  Sense strand starting at position 1981 of SEQ ID NO: 916811
gcaugcguuccgucacaac

SEQ ID NO: 1185883 - RNA, 19 nt, Artificial Sequence
  Description of Artificial Sequence: Synthetic oligonucleotide
  Antisense strand to SEQ ID NO: 1185882
guugugacggaacgcaugc

SEQ ID NO: 1185884 - RNA, 19 nt, Artificial Sequence
  Description of Artificial Sequence: Synthetic oligonucleotide
  Sense strand starting at position 2046 of SEQ ID NO: 916811
gaagucauggagcgagagu

SEQ ID NO: 1185885 - RNA, 19 nt, Artificial Sequence
  Description of Artificial Sequence: Synthetic oligonucleotide
  Antisense strand to SEQ ID NO: 1185884
acucucgcuccaugacuuc

SEQ ID NO: 1185886 - RNA, 19 nt, Artificial Sequence
  Description of Artificial Sequence: Synthetic oligonucleotide
  Sense strand starting at position 2059 of SEQ ID NO: 916811
gagagugaugucuguagug

SEQ ID NO: 1185887 - RNA, 19 nt, Artificial Sequence
  Description of Artificial Sequence: Synthetic oligonucleotide
  Antisense strand to SEQ ID NO: 1185886
cacuacagacaucacucuc

SEQ ID NO: 1185888 - RNA, 19 nt, Artificial Sequence
  Description of Artificial Sequence: Synthetic oligonucleotide
  Sense strand starting at position 2061 of SEQ ID NO: 916811
gagugaugucuguagugaa

SEQ ID NO: 1185889 - RNA, 19 nt, Artificial Sequence
  Description of Artificial Sequence: Synthetic oligonucleotide
  Antisense strand to SEQ ID NO: 1185888
uucacuacagacaucacuc

SEQ ID NO: 1185890 - RNA, 19 nt, Artificial Sequence
  Description of Artificial Sequence: Synthetic oligonucleotide
  Sense strand starting at position 2065 of SEQ ID NO: 916811
gaugucuguagugaagaau

SEQ ID NO: 1185891 - RNA, 19 nt, Artificial Sequence
  Description of Artificial Sequence: Synthetic oligonucleotide
  Antisense strand to SEQ ID NO: 1185890
auucuucacuacagacauc

SEQ ID NO: 1185892 - RNA, 19 nt, Artificial Sequence
  Description of Artificial Sequence: Synthetic oligonucleotide
  Sense strand starting at position 3566 of SEQ ID NO: 916811
cgacuucgugcgucccaau

SEQ ID NO: 1185893 - RNA, 19 nt, Artificial Sequence
  Description of Artificial Sequence: Synthetic oligonucleotide
  Antisense strand to SEQ ID NO: 1185892
auugggacgcacgaagucg

SEQ ID NO: 1185894 - RNA, 19 nt, Artificial Sequence
  Description of Artificial Sequence: Synthetic oligonucleotide
  Sense strand starting at position 3567 of SEQ ID NO: 916811
gacuucgugcgucccaauu

SEQ ID NO: 1185895 - RNA, 19 nt, Artificial Sequence
  Description of Artificial Sequence: Synthetic oligonucleotide
  Antisense strand to SEQ ID NO: 1185894
aauugggacgcacgaaguc

SEQ ID NO: 1185896 - RNA, 19 nt, Artificial Sequence
  Description of Artificial Sequence: Synthetic oligonucleotide
  Sense strand starting at position 3617 of SEQ ID NO: 916811
ccuguugggacuugucuuu

SEQ ID NO: 1185897 - RNA, 19 nt, Artificial Sequence
  Description of Artificial Sequence: Synthetic oligonucleotide
  Antisense strand to SEQ ID NO: 1185896
aaagacaagucccaacagg

SEQ ID NO: 1185898 - RNA, 19 nt, Artificial Sequence
  Description of Artificial Sequence: Synthetic oligonucleotide
  Sense strand starting at position 3624 of SEQ ID NO: 916811
ggacuugucuuucugaguc

SEQ ID NO: 1185899 - RNA, 19 nt, Artificial Sequence
  Description of Artificial Sequence: Synthetic oligonucleotide
  Antisense strand to SEQ ID NO: 1185898
gacucagaaagacaagucc

SEQ ID NO: 1185900 - RNA, 19 nt, Artificial Sequence
  Description of Artificial Sequence: Synthetic oligonucleotide
  Sense strand starting at position 3634 of SEQ ID NO: 916811
uucugaguccagggacaga

SEQ ID NO: 1185901 - RNA, 19 nt, Artificial Sequence
  Description of Artificial Sequence: Synthetic oligonucleotide
  Antisense strand to SEQ ID NO: 1185900
ucugucccuggacucagaa

SEQ ID NO: 1185902 - RNA, 19 nt, Artificial Sequence
  Description of Artificial Sequence: Synthetic oligonucleotide
  Sense strand starting at position 3698 of SEQ ID NO: 916811
gccagaugaccuugggcua

SEQ ID NO: 1185903 - RNA, 19 nt, Artificial Sequence
  Description of Artificial Sequence: Synthetic oligonucleotide
  Antisense strand to SEQ ID NO: 1185902
uagcccaaggucaucuggc

SEQ ID NO: 1185904 - RNA, 19 nt, Artificial Sequence
  Description of Artificial Sequence: Synthetic oligonucleotide
  Sense strand starting at position 3766 of SEQ ID NO: 916811
ucagcugucccuuacaaag

SEQ ID NO: 1185905 - RNA, 19 nt, Artificial Sequence
  Description of Artificial Sequence: Synthetic oligonucleotide
  Antisense strand to SEQ ID NO: 1185904
cuuuguaagggacagcuga

SEQ ID NO: 1185906 - RNA, 19 nt, Artificial Sequence
  Description of Artificial Sequence: Synthetic oligonucleotide
  Sense strand starting at position 3849 of SEQ ID NO: 916811
cuguuacugcuuuaggagu

SEQ ID NO: 1185907 - RNA, 19 nt, Artificial Sequence
  Description of Artificial Sequence: Synthetic oligonucleotide
  Antisense strand to SEQ ID NO: 1185906
acuccuaaagcaguaacag

SEQ ID NO: 1185908 - RNA, 19 nt, Artificial Sequence
  Description of Artificial Sequence: Synthetic oligonucleotide
  Sense strand starting at position 3889 of SEQ ID NO: 916811
aaccaacaugcguaauguu

SEQ ID NO: 1185909 - RNA, 19 nt, Artificial Sequence
  Description of Artificial Sequence: Synthetic oligonucleotide
  Antisense strand to SEQ ID NO: 1185908
aacauuacgcauguugguu

SEQ ID NO: 1185910 - RNA, 19 nt, Artificial Sequence
  Description of Artificial Sequence: Synthetic oligonucleotide
  Sense strand starting at position 570 of SEQ ID NO: 916812
aggugaagcagucggagua

SEQ ID NO: 1185911 - RNA, 19 nt, Artificial Sequence
  Description of Artificial Sequence: Synthetic oligonucleotide
  Antisense strand to SEQ ID NO: 1185910
uacuccgacugcuucaccu

SEQ ID NO: 1185912 - RNA, 19 nt, Artificial Sequence
  Description of Artificial Sequence: Synthetic oligonucleotide
  Sense strand starting at position 618 of SEQ ID NO: 916812
ugugaucaauuaccuguaa

SEQ ID NO: 1185913 - RNA, 19 nt, Artificial Sequence
  Description of Artificial Sequence: Synthetic oligonucleotide
  Antisense strand to SEQ ID NO: 1185912
uuacagguaauugaucaca

SEQ ID NO: 1185914 - RNA, 19 nt, Artificial Sequence
  Description of Artificial Sequence: Synthetic oligonucleotide
  Sense strand starting at position 619 of SEQ ID NO: 916812
gugaucaauuaccuguaaa

SEQ ID NO: 1185915 - RNA, 19 nt, Artificial Sequence
  Description of Artificial Sequence: Synthetic oligonucleotide
  Antisense strand to SEQ ID NO: 1185914
uuuacagguaauugaucac

SEQ ID NO: 1185916 - RNA, 19 nt, Artificial Sequence
  Description of Artificial Sequence: Synthetic oligonucleotide
  Sense strand starting at position 956 of SEQ ID NO: 916812
cagccagaaucuuacguuu

SEQ ID NO: 1185917 - RNA, 19 nt, Artificial Sequence
  Description of Artificial Sequence: Synthetic oligonucleotide
  Antisense strand to SEQ ID NO: 1185916
aaacguaagauucuggcug

SEQ ID NO: 1185918 - RNA, 19 nt, Artificial Sequence
  Description of Artificial Sequence: Synthetic oligonucleotide
  Sense strand starting at position 1376 of SEQ ID NO: 916812
aggcaagagaauugugaac

SEQ ID NO: 1185919 - RNA, 19 nt, Artificial Sequence
  Description of Artificial Sequence: Synthetic oligonucleotide
  Antisense strand to SEQ ID NO: 1185918
guucacaauucucuugccu

SEQ ID NO: 1185920 - RNA, 19 nt, Artificial Sequence
  Description of Artificial Sequence: Synthetic oligonucleotide
  Sense strand starting at position 1830 of SEQ ID NO: 916812
ggaaaucacuaagaaagag

SEQ ID NO: 1185921 - RNA, 19 nt, Artificial Sequence
  Description of Artificial Sequence: Synthetic oligonucleotide
  Antisense strand to SEQ ID NO: 1185920
cucuuucuuagugauuucc

SEQ ID NO: 1185922 - RNA, 19 nt, Artificial Sequence
  Description of Artificial Sequence: Synthetic oligonucleotide
  Sense strand starting at position 1931 of SEQ ID NO: 916812
agaggucauucggacuaau

SEQ ID NO: 1185923 - RNA, 19 nt, Artificial Sequence
  Description of Artificial Sequence: Synthetic oligonucleotide
  Antisense strand to SEQ ID NO: 1185922
auuaguccgaaugaccucu

SEQ ID NO: 1185924 - RNA, 19 nt, Artificial Sequence
  Description of Artificial Sequence: Synthetic oligonucleotide
  Sense strand starting at position 2122 of SEQ ID NO: 916812
ccugccaugucucagacaa

SEQ ID NO: 1185925 - RNA, 19 nt, Artificial Sequence
  Description of Artificial Sequence: Synthetic oligonucleotide
  Antisense strand to SEQ ID NO: 1185924
uugucugagacauggcagg

SEQ ID NO: 1185926 - RNA, 19 nt, Artificial Sequence
  Description of Artificial Sequence: Synthetic oligonucleotide
  Sense strand starting at position 2124 of SEQ ID NO: 916812
ugccaugucucagacaaag

SEQ ID NO: 1185927 - RNA, 19 nt, Artificial Sequence
  Description of Artificial Sequence: Synthetic oligonucleotide
  Antisense strand to SEQ ID NO: 1185926
cuuugucugagacauggca

SEQ ID NO: 1185928 - RNA, 19 nt, Artificial Sequence
  Description of Artificial Sequence: Synthetic oligonucleotide
  Sense strand starting at position 2152 of SEQ ID NO: 916812
gagaaauagucuuggaucc

SEQ ID NO: 1185929 - RNA, 19 nt, Artificial Sequence
  Description of Artificial Sequence: Synthetic oligonucleotide
  Antisense strand to SEQ ID NO: 1185928
ggauccaagacuauuucuc

SEQ ID NO: 1185930 - RNA, 19 nt, Artificial Sequence
  Description of Artificial Sequence: Synthetic oligonucleotide
  Sense strand starting at position 2154 of SEQ ID NO: 916812
gaaauagucuuggauccca

SEQ ID NO: 1185931 - RNA, 19 nt, Artificial Sequence
  Description of Artificial Sequence: Synthetic oligonucleotide
  Antisense strand to SEQ ID NO: 1185930
ugggauccaagacuauuuc

SEQ ID NO: 1185932 - RNA, 19 nt, Artificial Sequence
  Description of Artificial Sequence: Synthetic oligonucleotide
  Sense strand starting at position 2272 of SEQ ID NO: 916812
uguggaagcagagauguua

SEQ ID NO: 1185933 - RNA, 19 nt, Artificial Sequence
  Description of Artificial Sequence: Synthetic oligonucleotide
  Antisense strand to SEQ ID NO: 1185932
uaacaucucugcuuccaca

SEQ ID NO: 1185934 - RNA, 19 nt, Artificial Sequence
  Description of Artificial Sequence: Synthetic oligonucleotide
  Sense strand starting at position 2339 of SEQ ID NO: 916812
gauccucucgacuaugcau

SEQ ID NO: 1185935 - RNA, 19 nt, Artificial Sequence
  Description of Artificial Sequence: Synthetic oligonucleotide
  Antisense strand to SEQ ID NO: 1185934
augcauagucgagaggauc

SEQ ID NO: 1185936 - RNA, 19 nt, Artificial Sequence
  Description of Artificial Sequence: Synthetic oligonucleotide
  Sense strand starting at position 2409 of SEQ ID NO: 916812
gaggccagaugccuguaau

SEQ ID NO: 1185937 - RNA, 19 nt, Artificial Sequence
  Description of Artificial Sequence: Synthetic oligonucleotide
  Antisense strand to SEQ ID NO: 1185936
auuacaggcaucuggccuc

SEQ ID NO: 1185938 - RNA, 19 nt, Artificial Sequence
  Description of Artificial Sequence: Synthetic oligonucleotide
  Sense strand starting at position 2410 of SEQ ID NO: 916812
aggccagaugccuguaauc

SEQ ID NO: 1185939 - RNA, 19 nt, Artificial Sequence
  Description of Artificial Sequence: Synthetic oligonucleotide
  Antisense strand to SEQ ID NO: 1185938
gauuacaggcaucuggccu

SEQ ID NO: 1185940 - RNA, 19 nt, Artificial Sequence
  Description of Artificial Sequence: Synthetic oligonucleotide
  Sense strand starting at position 2826 of SEQ ID NO: 916812
cuugcucuugugggaaaca

SEQ ID NO: 1185941 - RNA, 19 nt, Artificial Sequence
  Description of Artificial Sequence: Synthetic oligonucleotide
  Antisense strand to SEQ ID NO: 1185940
uguuucccacaagagcaag

SEQ ID NO: 1185942 - RNA, 19 nt, Artificial Sequence
  Description of Artificial Sequence: Synthetic oligonucleotide
  Sense strand starting at position 2844 of SEQ ID NO: 916812
agggauuacuaacaaguuu

SEQ ID NO: 1185943 - RNA, 19 nt, Artificial Sequence
  Description of Artificial Sequence: Synthetic oligonucleotide
  Antisense strand to SEQ ID NO: 1185942
aaacuuguuaguaaucccu

SEQ ID NO: 1185944 - RNA, 19 nt, Artificial Sequence
  Description of Artificial Sequence: Synthetic oligonucleotide
  Sense strand starting at position 2884 of SEQ ID NO: 916812
acggcagauuugugauuua

SEQ ID NO: 1185945 - RNA, 19 nt, Artificial Sequence
  Description of Artificial Sequence: Synthetic oligonucleotide
  Antisense strand to SEQ ID NO: 1185944
uaaaucacaaaucugccgu

SEQ ID NO: 1185946 - RNA, 19 nt, Artificial Sequence
  Description of Artificial Sequence: Synthetic oligonucleotide
  Sense strand starting at position 3299 of SEQ ID NO: 916812
gauguauuauaacugcaug

SEQ ID NO: 1185947 - RNA, 19 nt, Artificial Sequence
  Description of Artificial Sequence: Synthetic oligonucleotide
  Antisense strand to SEQ ID NO: 1185946
caugcaguuauaauacauc

SEQ ID NO: 1185948 - RNA, 19 nt, Artificial Sequence
  Description of Artificial Sequence: Synthetic oligonucleotide
  Sense strand starting at position 3348 of SEQ ID NO: 916812
caagauacuuagggagcua

SEQ ID NO: 1185949 - RNA, 19 nt, Artificial Sequence
  Description of Artificial Sequence: Synthetic oligonucleotide
  Antisense strand to SEQ ID NO: 1185948
uagcucccuaaguaucuug

SEQ ID NO: 1185950 - RNA, 19 nt, Artificial Sequence
  Description of Artificial Sequence: Synthetic oligonucleotide
  Sense strand starting at position 3396 of SEQ ID NO: 916812
ucagaauggaagcgagaau

SEQ ID NO: 1185951 - RNA, 19 nt, Artificial Sequence
  Description of Artificial Sequence: Synthetic oligonucleotide
  Antisense strand to SEQ ID NO: 1185950
auucucgcuuccauucuga

SEQ ID NO: 1185952 - RNA, 19 nt, Artificial Sequence
  Description of Artificial Sequence: Synthetic oligonucleotide
  Sense strand starting at position 3411 of SEQ ID NO: 916812
gaauaugaagcacgucaga

SEQ ID NO: 1185953 - RNA, 19 nt, Artificial Sequence
  Description of Artificial Sequence: Synthetic oligonucleotide
  Antisense strand to SEQ ID NO: 1185952
ucugacgugcuucauauuc

SEQ ID NO: 1185954 - RNA, 19 nt, Artificial Sequence
  Description of Artificial Sequence: Synthetic oligonucleotide
  Sense strand starting at position 3436 of SEQ ID NO: 916812
guaugagcugaugaauggu

SEQ ID NO: 1185955 - RNA, 19 nt, Artificial Sequence
  Description of Artificial Sequence: Synthetic oligonucleotide
  Antisense strand to SEQ ID NO: 1185954
accauucaucagcucauac

SEQ ID NO: 1185956 - RNA, 19 nt, Artificial Sequence
  Description of Artificial Sequence: Synthetic oligonucleotide
  Sense strand starting at position 3442 of SEQ ID NO: 916812
gcugaugaaugguuagagu

SEQ ID NO: 1185957 - RNA, 19 nt, Artificial Sequence
  Description of Artificial Sequence: Synthetic oligonucleotide
  Antisense strand to SEQ ID NO: 1185956
acucuaaccauucaucagc

SEQ ID NO: 1185958 - RNA, 19 nt, Artificial Sequence
  Description of Artificial Sequence: Synthetic oligonucleotide
  Sense strand starting at position 3503 of SEQ ID NO: 916812
ccuaaaggaugaguucuau

SEQ ID NO: 1185959 - RNA, 19 nt, Artificial Sequence
  Description of Artificial Sequence: Synthetic oligonucleotide
  Antisense strand to SEQ ID NO: 1185958
auagaacucauccuuuagg

SEQ ID NO: 1185960 - RNA, 19 nt, Artificial Sequence
  Description of Artificial Sequence: Synthetic oligonucleotide
  Sense strand starting at position 3507 of SEQ ID NO: 916812
aaggaugaguucuauggag

SEQ ID NO: 1185961 - RNA, 19 nt, Artificial Sequence
  Description of Artificial Sequence: Synthetic oligonucleotide
  Antisense strand to SEQ ID NO: 1185960
cuccauagaacucauccuu

SEQ ID NO: 1185962 - RNA, 19 nt, Artificial Sequence
  Description of Artificial Sequence: Synthetic oligonucleotide
  Sense strand starting at position 3509 of SEQ ID NO: 916812
ggaugaguucuauggaguu

SEQ ID NO: 1185963 - RNA, 19 nt, Artificial Sequence
  Description of Artificial Sequence: Synthetic oligonucleotide
  Antisense strand to SEQ ID NO: 1185962
aacuccauagaacucaucc

SEQ ID NO: 1185964 - RNA, 19 nt, Artificial Sequence
  Description of Artificial Sequence: Synthetic oligonucleotide
  Sense strand starting at position 3797 of SEQ ID NO: 916812
guccauuuguucucagacu

SEQ ID NO: 1185965 - RNA, 19 nt, Artificial Sequence
  Description of Artificial Sequence: Synthetic oligonucleotide
  Antisense strand to SEQ ID NO: 1185964
agucugagaacaaauggac

SEQ ID NO: 1185966 - RNA, 19 nt, Artificial Sequence
  Description of Artificial Sequence: Synthetic oligonucleotide
  Sense strand starting at position 3798 of SEQ ID NO: 916812
uccauuuguucucagacug

SEQ ID NO: 1185967 - RNA, 19 nt, Artificial Sequence
  Description of Artificial Sequence: Synthetic oligonucleotide
  Antisense strand to SEQ ID NO: 1185966
cagucugagaacaaaugga

SEQ ID NO: 1185968 - RNA, 19 nt, Artificial Sequence
  Description of Artificial Sequence: Synthetic oligonucleotide
  Sense strand starting at position 3803 of SEQ ID NO: 916812
uuguucucagacugugaua

SEQ ID NO: 1185969 - RNA, 19 nt, Artificial Sequence
  Description of Artificial Sequence: Synthetic oligonucleotide
  Antisense strand to SEQ ID NO: 1185968
uaucacagucugagaacaa

SEQ ID NO: 1185970 - RNA, 19 nt, Artificial Sequence
  Description of Artificial Sequence: Synthetic oligonucleotide
  Sense strand starting at position 3805 of SEQ ID NO: 916812
guucucagacugugauaaa

SEQ ID NO: 1185971 - RNA, 19 nt, Artificial Sequence
  Description of Artificial Sequence: Synthetic oligonucleotide
  Antisense strand to SEQ ID NO: 1185970
uuuaucacagucugagaac

SEQ ID NO: 1185972 - RNA, 19 nt, Artificial Sequence
  Description of Artificial Sequence: Synthetic oligonucleotide
  Sense strand starting at position 3823 of SEQ ID NO: 916812
aauuaagugucaguguuuc

SEQ ID NO: 1185973 - RNA, 19 nt, Artificial Sequence
  Description of Artificial Sequence: Synthetic oligonucleotide
  Antisense strand to SEQ ID NO: 1185972
gaaacacugacacuuaauu

SEQ ID NO: 1185974 - RNA, 19 nt, Artificial Sequence
  Description of Artificial Sequence: Synthetic oligonucleotide
  Sense strand starting at position 3829 of SEQ ID NO: 916812
gugucaguguuucaugaug

SEQ ID NO: 1185975 - RNA, 19 nt, Artificial Sequence
  Description of Artificial Sequence: Synthetic oligonucleotide
  Antisense strand to SEQ ID NO: 1185974
caucaugaaacacugacac

SEQ ID NO: 1185976 - RNA, 19 nt, Artificial Sequence
  Description of Artificial Sequence: Synthetic oligonucleotide
  Sense strand starting at position 3831 of SEQ ID NO: 916812
gucaguguuucaugauguc

SEQ ID NO: 1185977 - RNA, 19 nt, Artificial Sequence
  Description of Artificial Sequence: Synthetic oligonucleotide
  Antisense strand to SEQ ID NO: 1185976
gacaucaugaaacacugac

SEQ ID NO: 1185978 - RNA, 19 nt, Artificial Sequence
  Description of Artificial Sequence: Synthetic oligonucleotide
  Sense strand starting at position 79 of SEQ ID NO: 916813
gucuuuaaagcaugaguau

SEQ ID NO: 1185979 - RNA, 19 nt, Artificial Sequence
  Description of Artificial Sequence: Synthetic oligonucleotide
  Antisense strand to SEQ ID NO: 1185978
auacucaugcuuuaaagac

SEQ ID NO: 1185980 - RNA, 19 nt, Artificial Sequence
  Description of Artificial Sequence: Synthetic oligonucleotide
  Sense strand starting at position 88 of SEQ ID NO: 916813
gcaugaguauacuuacagu

SEQ ID NO: 1185981 - RNA, 19 nt, Artificial Sequence
  Description of Artificial Sequence: Synthetic oligonucleotide
  Antisense strand to SEQ ID NO: 1185980
acuguaaguauacucaugc

SEQ ID NO: 1185982 - RNA, 19 nt, Artificial Sequence
  Description of Artificial Sequence: Synthetic oligonucleotide
  Sense strand starting at position 94 of SEQ ID NO: 916813
guauacuuacaguaagcaa

SEQ ID NO: 1185983 - RNA, 19 nt, Artificial Sequence
  Description of Artificial Sequence: Synthetic oligonucleotide
  Antisense strand to SEQ ID NO: 1185982
uugcuuacuguaaguauac

SEQ ID NO: 1185984 - RNA, 19 nt, Artificial Sequence
  Description of Artificial Sequence: Synthetic oligonucleotide
  Sense strand starting at position 172 of SEQ ID NO: 916813
ucacuaucugaaugugaaa

SEQ ID NO: 1185985 - RNA, 19 nt, Artificial Sequence
  Description of Artificial Sequence: Synthetic oligonucleotide
  Antisense strand to SEQ ID NO: 1185984
uuucacauucagauaguga

SEQ ID NO: 1185986 - RNA, 19 nt, Artificial Sequence
  Description of Artificial Sequence: Synthetic oligonucleotide
  Sense strand starting at position 358 of SEQ ID NO: 916813
ucauuucucuugcuuaguu

SEQ ID NO: 1185987 - RNA, 19 nt, Artificial Sequence
  Description of Artificial Sequence: Synthetic oligonucleotide
  Antisense strand to SEQ ID NO: 1185986
aacuaagcaagagaaauga

SEQ ID NO: 1185988 - RNA, 19 nt, Artificial Sequence
  Description of Artificial Sequence: Synthetic oligonucleotide
  Sense strand starting at position 469 of SEQ ID NO: 916813
agagaaagcaauuguuuag

SEQ ID NO: 1185989 - RNA, 19 nt, Artificial Sequence
  Description of Artificial Sequence: Synthetic oligonucleotide
  Antisense strand to SEQ ID NO: 1185988
cuaaacaauugcuuucucu

SEQ ID NO: 1185990 - RNA, 19 nt, Artificial Sequence
  Description of Artificial Sequence: Synthetic oligonucleotide
  Sense strand starting at position 593 of SEQ ID NO: 916813
gguggugauauguagaaau

SEQ ID NO: 1185991 - RNA, 19 nt, Artificial Sequence
  Description of Artificial Sequence: Synthetic oligonucleotide
  Antisense strand to SEQ ID NO: 1185990
auuucuacauaucaccacc

SEQ ID NO: 1185992 - RNA, 19 nt, Artificial Sequence
  Description of Artificial Sequence: Synthetic oligonucleotide
  Sense strand starting at position 812 of SEQ ID NO: 916813
acaacagucagcugguaga

SEQ ID NO: 1185993 - RNA, 19 nt, Artificial Sequence
  Description of Artificial Sequence: Synthetic oligonucleotide
  Antisense strand to SEQ ID NO: 1185992
ucuaccagcugacuguugu

SEQ ID NO: 1185994 - RNA, 19 nt, Artificial Sequence
  Description of Artificial Sequence: Synthetic oligonucleotide
  Sense strand starting at position 826 of SEQ ID NO: 916813
guagacacuguauguaaua

SEQ ID NO: 1185995 - RNA, 19 nt, Artificial Sequence
  Description of Artificial Sequence: Synthetic oligonucleotide
  Antisense strand to SEQ ID NO: 1185994
uauuacauacagugucuac

SEQ ID NO: 1185996 - RNA, 19 nt, Artificial Sequence
  Description of Artificial Sequence: Synthetic oligonucleotide
  Sense strand starting at position 850 of SEQ ID NO: 916813
cggaaauauauuggaagua

SEQ ID NO: 1185997 - RNA, 19 nt, Artificial Sequence
  Description of Artificial Sequence: Synthetic oligonucleotide
  Antisense strand to SEQ ID NO: 1185996
uacuuccaauauauuuccg

SEQ ID NO: 1185998 - RNA, 19 nt, Artificial Sequence
  Description of Artificial Sequence: Synthetic oligonucleotide
  Sense strand starting at position 851 of SEQ ID NO: 916813
ggaaauauauuggaaguau

SEQ ID NO: 1185999 - RNA, 19 nt, Artificial Sequence
  Description of Artificial Sequence: Synthetic oligonucleotide
  Antisense strand to SEQ ID NO: 1185998
auacuuccaauauauuucc

SEQ ID NO: 1186000 - RNA, 19 nt, Artificial Sequence
  Description of Artificial Sequence: Synthetic oligonucleotide
  Sense strand starting at position 886 of SEQ ID NO: 916813
ugaauccgugaaugucuaa

SEQ ID NO: 1186001 - RNA, 19 nt, Artificial Sequence
  Description of Artificial Sequence: Synthetic oligonucleotide
  Antisense strand to SEQ ID NO: 1186000
uuagacauucacggauuca

SEQ ID NO: 1186002 - RNA, 19 nt, Artificial Sequence
  Description of Artificial Sequence: Synthetic oligonucleotide
  Sense strand starting at position 889 of SEQ ID NO: 916813
auccgugaaugucuaaauc

SEQ ID NO: 1186003 - RNA, 19 nt, Artificial Sequence
  Description of Artificial Sequence: Synthetic oligonucleotide
  Antisense strand to SEQ ID NO: 1186002
gauuuagacauucacggau

SEQ ID NO: 1186004 - RNA, 19 nt, Artificial Sequence
  Description of Artificial Sequence: Synthetic oligonucleotide
  Sense strand starting at position 973 of SEQ ID NO: 916813
gccagccaucuguaggaaa

SEQ ID NO: 1186005 - RNA, 19 nt, Artificial Sequence
  Description of Artificial Sequence: Synthetic oligonucleotide
  Antisense strand to SEQ ID NO: 1186004
uuuccuacagauggcuggc

SEQ ID NO: 1186006 - RNA, 19 nt, Artificial Sequence
  Description of Artificial Sequence: Synthetic oligonucleotide
  Sense strand starting at position 975 of SEQ ID NO: 916813
cagccaucuguaggaaauc

SEQ ID NO: 1186007 - RNA, 19 nt, Artificial Sequence
  Description of Artificial Sequence: Synthetic oligonucleotide
  Antisense strand to SEQ ID NO: 1186006
gauuuccuacagauggcug

SEQ ID NO: 1186008 - RNA, 19 nt, Artificial Sequence
  Description of Artificial Sequence: Synthetic oligonucleotide
  Sense strand starting at position 1030 of SEQ ID NO: 916813
gcgacugauuaggcuaaau

SEQ ID NO: 1186009 - RNA, 19 nt, Artificial Sequence
  Description of Artificial Sequence: Synthetic oligonucleotide
  Antisense strand to SEQ ID NO: 1186008
auuuagccuaaucagucgc

SEQ ID NO: 1186010 - RNA, 19 nt, Artificial Sequence
  Description of Artificial Sequence: Synthetic oligonucleotide
  Sense strand starting at position 1105 of SEQ ID NO: 916813
guggaugaguaguuugaag

SEQ ID NO: 1186011 - RNA, 19 nt, Artificial Sequence
  Description of Artificial Sequence: Synthetic oligonucleotide
  Antisense strand to SEQ ID NO: 1186010
cuucaaacuacucauccac

SEQ ID NO: 1186012 - RNA, 19 nt, Artificial Sequence
  Description of Artificial Sequence: Synthetic oligonucleotide
  Sense strand starting at position 1107 of SEQ ID NO: 916813
ggaugaguaguuugaaguu

SEQ ID NO: 1186013 - RNA, 19 nt, Artificial Sequence
  Description of Artificial Sequence: Synthetic oligonucleotide
  Antisense strand to SEQ ID NO: 1186012
aacuucaaacuacucaucc

SEQ ID NO: 1186014 - RNA, 19 nt, Artificial Sequence
  Description of Artificial Sequence: Synthetic oligonucleotide
  Sense strand starting at position 1122 of SEQ ID NO: 916813
aguucagaucaaggaguga

SEQ ID NO: 1186015 - RNA, 19 nt, Artificial Sequence
  Description of Artificial Sequence: Synthetic oligonucleotide
  Antisense strand to SEQ ID NO: 1186014
ucacuccuugaucugaacu

SEQ ID NO: 1186016 - RNA, 19 nt, Artificial Sequence
  Description of Artificial Sequence: Synthetic oligonucleotide
  Sense strand starting at position 1190 of SEQ ID NO: 916813
gaggucacggcguaguaaa

SEQ ID NO: 1186017 - RNA, 19 nt, Artificial Sequence
  Description of Artificial Sequence: Synthetic oligonucleotide
  Antisense strand to SEQ ID NO: 1186016
uuuacuacgccgugaccuc

SEQ ID NO: 1186018 - RNA, 19 nt, Artificial Sequence
  Description of Artificial Sequence: Synthetic oligonucleotide
  Sense strand starting at position 1198 of SEQ ID NO: 916813
ggcguaguaaaguuugguu

SEQ ID NO: 1186019 - RNA, 19 nt, Artificial Sequence
  Description of Artificial Sequence: Synthetic oligonucleotide
  Antisense strand to SEQ ID NO: 1186018
aaccaaacuuuacuacgcc

SEQ ID NO: 1186020 - RNA, 19 nt, Artificial Sequence
  Description of Artificial Sequence: Synthetic oligonucleotide
  Sense strand starting at position 1240 of SEQ ID NO: 916813
cgaccaaagucucccaaga

SEQ ID NO: 1186021 - RNA, 19 nt, Artificial Sequence
  Description of Artificial Sequence: Synthetic oligonucleotide
  Antisense strand to SEQ ID NO: 1186020
ucuugggagacuuuggucg

SEQ ID NO: 1186022 - RNA, 19 nt, Artificial Sequence
  Description of Artificial Sequence: Synthetic oligonucleotide
  Sense strand starting at position 1715 of SEQ ID NO: 916813
gcgggucgaccaguguuua

SEQ ID NO: 1186023 - RNA, 19 nt, Artificial Sequence
  Description of Artificial Sequence: Synthetic oligonucleotide
  Antisense strand to SEQ ID NO: 1186022
uaaacacuggucgacccgc

SEQ ID NO: 1186024 - RNA, 19 nt, Artificial Sequence
  Description of Artificial Sequence: Synthetic oligonucleotide
  Sense strand starting at position 2101 of SEQ ID NO: 916813
cccugagugcauguucgua

SEQ ID NO: 1186025 - RNA, 19 nt, Artificial Sequence
  Description of Artificial Sequence: Synthetic oligonucleotide
  Antisense strand to SEQ ID NO: 1186024
uacgaacaugcacucaggg

SEQ ID NO: 1186026 - RNA, 19 nt, Artificial Sequence
  Description of Artificial Sequence: Synthetic oligonucleotide
  Sense strand starting at position 2159 of SEQ ID NO: 916813
guuugagaccgagaagcgu

SEQ ID NO: 1186027 - RNA, 19 nt, Artificial Sequence
  Description of Artificial Sequence: Synthetic oligonucleotide
  Antisense strand to SEQ ID NO: 1186026
acgcuucucggucucaaac

SEQ ID NO: 1186028 - RNA, 19 nt, Artificial Sequence
  Description of Artificial Sequence: Synthetic oligonucleotide
  Sense strand starting at position 2413 of SEQ ID NO: 916813
gcuccuuaucuuuauggua

SEQ ID NO: 1186029 - RNA, 19 nt, Artificial Sequence
  Description of Artificial Sequence: Synthetic oligonucleotide
  Antisense strand to SEQ ID NO: 1186028
uaccauaaagauaaggagc

SEQ ID NO: 1186030 - RNA, 19 nt, Artificial Sequence
  Description of Artificial Sequence: Synthetic oligonucleotide
  Sense strand starting at position 2421 of SEQ ID NO: 916813
ucuuuaugguaaucugaua

SEQ ID NO: 1186031 - RNA, 19 nt, Artificial Sequence
  Description of Artificial Sequence: Synthetic oligonucleotide
  Antisense strand to SEQ ID NO: 1186030
uaucagauuaccauaaaga

SEQ ID NO: 1186032 - RNA, 19 nt, Artificial Sequence
  Description of Artificial Sequence: Synthetic oligonucleotide
  Sense strand starting at position 2454 of SEQ ID NO: 916813
cgcauguuugcgguggauu

SEQ ID NO: 1186033 - RNA, 19 nt, Artificial Sequence
  Description of Artificial Sequence: Synthetic oligonucleotide
  Antisense strand to SEQ ID NO: 1186032
aauccaccgcaaacaugcg

SEQ ID NO: 1186034 - RNA, 19 nt, Artificial Sequence
  Description of Artificial Sequence: Synthetic oligonucleotide
  Sense strand starting at position 2517 of SEQ ID NO: 916813
gagugaagagucggcaauu

SEQ ID NO: 1186035 - RNA, 19 nt, Artificial Sequence
  Description of Artificial Sequence: Synthetic oligonucleotide
  Antisense strand to SEQ ID NO: 1186034
aauugccgacucuucacuc

SEQ ID NO: 1186036 - RNA, 19 nt, Artificial Sequence
  Description of Artificial Sequence: Synthetic oligonucleotide
  Sense strand starting at position 2752 of SEQ ID NO: 916813
gcuugagcgacguauuaag

SEQ ID NO: 1186037 - RNA, 19 nt, Artificial Sequence
  Description of Artificial Sequence: Synthetic oligonucleotide
  Antisense strand to SEQ ID NO: 1186036
cuuaauacgucgcucaagc

SEQ ID NO: 1186038 - RNA, 19 nt, Artificial Sequence
  Description of Artificial Sequence: Synthetic oligonucleotide
  Sense strand starting at position 2987 of SEQ ID NO: 916813
cgcguugugguuagauagu

SEQ ID NO: 1186039 - RNA, 19 nt, Artificial Sequence
  Description of Artificial Sequence: Synthetic oligonucleotide
  Antisense strand to SEQ ID NO: 1186038
acuaucuaaccacaacgcg

SEQ ID NO: 1186040 - RNA, 19 nt, Artificial Sequence
  Description of Artificial Sequence: Synthetic oligonucleotide
  Sense strand starting at position 2989 of SEQ ID NO: 916813
cguugugguuagauaguga

SEQ ID NO: 1186041 - RNA, 19 nt, Artificial Sequence
  Description of Artificial Sequence: Synthetic oligonucleotide
  Antisense strand to SEQ ID NO: 1186040
ucacuaucuaaccacaacg

SEQ ID NO: 1186042 - RNA, 19 nt, Artificial Sequence
  Description of Artificial Sequence: Synthetic oligonucleotide
  Sense strand starting at position 3550 of SEQ ID NO: 916813
uugggacagugucuuauca

SEQ ID NO: 1186043 - RNA, 19 nt, Artificial Sequence
  Description of Artificial Sequence: Synthetic oligonucleotide
  Antisense strand to SEQ ID NO: 1186042
ugauaagacacugucccaa

SEQ ID NO: 1186044 - RNA, 19 nt, Artificial Sequence
  Description of Artificial Sequence: Synthetic oligonucleotide
  Sense strand starting at position 3720 of SEQ ID NO: 916813
augagcuagaggcguuaaa

SEQ ID NO: 1186045 - RNA, 19 nt, Artificial Sequence
  Description of Artificial Sequence: Synthetic oligonucleotide
  Antisense strand to SEQ ID NO: 1186044
uuuaacgccucuagcucau

SEQ ID NO: 1186046 - RNA, 19 nt, Artificial Sequence
  Description of Artificial Sequence: Synthetic oligonucleotide
  Sense strand starting at position 3742 of SEQ ID NO: 916813
cuuucuucugauggaacaa

SEQ ID NO: 1186047 - RNA, 19 nt, Artificial Sequence
  Description of Artificial Sequence: Synthetic oligonucleotide
  Antisense strand to SEQ ID NO: 1186046
uuguuccaucagaagaaag

SEQ ID NO: 1186048 - RNA, 19 nt, Artificial Sequence
  Description of Artificial Sequence: Synthetic oligonucleotide
  Sense strand starting at position 3775 of SEQ ID NO: 916813
aggaccuuucccugucaaa

SEQ ID NO: 1186049 - RNA, 19 nt, Artificial Sequence
  Description of Artificial Sequence: Synthetic oligonucleotide
  Antisense strand to SEQ ID NO: 1186048
uuugacagggaaagguccu

SEQ ID NO: 1186050 - RNA, 19 nt, Artificial Sequence
  Description of Artificial Sequence: Synthetic oligonucleotide
  Sense strand starting at position 3847 of SEQ ID NO: 916813
aaggaugauuguuaagaga

SEQ ID NO: 1186051 - RNA, 19 nt, Artificial Sequence
  Description of Artificial Sequence: Synthetic oligonucleotide
  Antisense strand to SEQ ID NO: 1186050
ucucuuaacaaucauccuu

SEQ ID NO: 1186052 - RNA, 19 nt, Artificial Sequence
  Description of Artificial Sequence: Synthetic oligonucleotide
  Sense strand starting at position 3850 of SEQ ID NO: 916813
gaugauuguuaagagaaau

SEQ ID NO: 1186053 - RNA, 19 nt, Artificial Sequence
  Description of Artificial Sequence: Synthetic oligonucleotide
  Antisense strand to SEQ ID NO: 1186052
auuucucuuaacaaucauc

SEQ ID NO: 1186054 - RNA, 19 nt, Artificial Sequence
  Description of Artificial Sequence: Synthetic oligonucleotide
  Sense strand starting at position 3924 of SEQ ID NO: 916813
agaauaaggguguagcuuu

SEQ ID NO: 1186055 - RNA, 19 nt, Artificial Sequence
  Description of Artificial Sequence: Synthetic oligonucleotide
  Antisense strand to SEQ ID NO: 1186054
aaagcuacacccuuauucu

SEQ ID NO: 1186056 - RNA, 19 nt, Artificial Sequence
  Description of Artificial Sequence: Synthetic oligonucleotide
  Sense strand starting at position 3947 of SEQ ID NO: 916813
uguauacaaucucuaggau

SEQ ID NO: 1186057 - RNA, 19 nt, Artificial Sequence
  Description of Artificial Sequence: Synthetic oligonucleotide
  Antisense strand to SEQ ID NO: 1186056
auccuagagauuguauaca

SEQ ID NO: 1186058 - RNA, 19 nt, Artificial Sequence
  Description of Artificial Sequence: Synthetic oligonucleotide
  Sense strand starting at position 77 of SEQ ID NO: 916814
gcuugaacugccugaguga

SEQ ID NO: 1186059 - RNA, 19 nt, Artificial Sequence
  Description of Artificial Sequence: Synthetic oligonucleotide
  Antisense strand to SEQ ID NO: 1186058
ucacucaggcaguucaagc

SEQ ID NO: 1186060 - RNA, 19 nt, Artificial Sequence
  Description of Artificial Sequence: Synthetic oligonucleotide
  Sense strand starting at position 78 of SEQ ID NO: 916814
cuugaacugccugagugau

SEQ ID NO: 1186061 - RNA, 19 nt, Artificial Sequence
  Description of Artificial Sequence: Synthetic oligonucleotide
  Antisense strand to SEQ ID NO: 1186060
aucacucaggcaguucaag

SEQ ID NO: 1186062 - RNA, 19 nt, Artificial Sequence
  Description of Artificial Sequence: Synthetic oligonucleotide
  Sense strand starting at position 80 of SEQ ID NO: 916814
ugaacugccugagugauag

SEQ ID NO: 1186063 - RNA, 19 nt, Artificial Sequence
  Description of Artificial Sequence: Synthetic oligonucleotide
  Antisense strand to SEQ ID NO: 1186062
cuaucacucaggcaguuca

SEQ ID NO: 1186064 - RNA, 19 nt, Artificial Sequence
  Description of Artificial Sequence: Synthetic oligonucleotide
  Sense strand starting at position 180 of SEQ ID NO: 916814
guaugaguaggccacagaa

SEQ ID NO: 1186065 - RNA, 19 nt, Artificial Sequence
  Description of Artificial Sequence: Synthetic oligonucleotide
  Antisense strand to SEQ ID NO: 1186064
uucuguggccuacucauac

SEQ ID NO: 1186066 - RNA, 19 nt, Artificial Sequence
  Description of Artificial Sequence: Synthetic oligonucleotide
  Sense strand starting at position 206 of SEQ ID NO: 916814
gcucccucaguguaacaga

SEQ ID NO: 1186067 - RNA, 19 nt, Artificial Sequence
  Description of Artificial Sequence: Synthetic oligonucleotide
  Antisense strand to SEQ ID NO: 1186066
ucuguuacacugagggagc

SEQ ID NO: 1186068 - RNA, 19 nt, Artificial Sequence
  Description of Artificial Sequence: Synthetic oligonucleotide
  Sense strand starting at position 332 of SEQ ID NO: 916814
aggcuuuggcgggacaaga

SEQ ID NO: 1186069 - RNA, 19 nt, Artificial Sequence
  Description of Artificial Sequence: Synthetic oligonucleotide
  Antisense strand to SEQ ID NO: 1186068
ucuugucccgccaaagccu

SEQ ID NO: 1186070 - RNA, 19 nt, Artificial Sequence
  Description of Artificial Sequence: Synthetic oligonucleotide
  Sense strand starting at position 369 of SEQ ID NO: 916814
gacacaacguggcuaagau

SEQ ID NO: 1186071 - RNA, 19 nt, Artificial Sequence
  Description of Artificial Sequence: Synthetic oligonucleotide
  Antisense strand to SEQ ID NO: 1186070
aucuuagccacguuguguc

SEQ ID NO: 1186072 - RNA, 19 nt, Artificial Sequence
  Description of Artificial Sequence: Synthetic oligonucleotide
  Sense strand starting at position 516 of SEQ ID NO: 916814
ucauucgcucugugaauga

SEQ ID NO: 1186073 - RNA, 19 nt, Artificial Sequence
  Description of Artificial Sequence: Synthetic oligonucleotide
  Antisense strand to SEQ ID NO: 1186072
ucauucacagagcgaauga

SEQ ID NO: 1186074 - RNA, 19 nt, Artificial Sequence
  Description of Artificial Sequence: Synthetic oligonucleotide
  Sense strand starting at position 559 of SEQ ID NO: 916814
aggaaccauucuuaagaaa

SEQ ID NO: 1186075 - RNA, 19 nt, Artificial Sequence
  Description of Artificial Sequence: Synthetic oligonucleotide
  Antisense strand to SEQ ID NO: 1186074
uuucuuaagaaugguuccu

SEQ ID NO: 1186076 - RNA, 19 nt, Artificial Sequence
  Description of Artificial Sequence: Synthetic oligonucleotide
  Sense strand starting at position 611 of SEQ ID NO: 916814
cguccauuagagugacaau

SEQ ID NO: 1186077 - RNA, 19 nt, Artificial Sequence
  Description of Artificial Sequence: Synthetic oligonucleotide
  Antisense strand to SEQ ID NO: 1186076
auugucacucuaauggacg

SEQ ID NO: 1186078 - RNA, 19 nt, Artificial Sequence
  Description of Artificial Sequence: Synthetic oligonucleotide
  Sense strand starting at position 650 of SEQ ID NO: 916814
ucugcaucuggcuagaacu

SEQ ID NO: 1186079 - RNA, 19 nt, Artificial Sequence
  Description of Artificial Sequence: Synthetic oligonucleotide
  Antisense strand to SEQ ID NO: 1186078
aguucuagccagaugcaga

SEQ ID NO: 1186080 - RNA, 19 nt, Artificial Sequence
  Description of Artificial Sequence: Synthetic oligonucleotide
  Sense strand starting at position 652 of SEQ ID NO: 916814
ugcaucuggcuagaacuuu

SEQ ID NO: 1186081 - RNA, 19 nt, Artificial Sequence
  Description of Artificial Sequence: Synthetic oligonucleotide
  Antisense strand to SEQ ID NO: 1186080
aaaguucuagccagaugca

SEQ ID NO: 1186082 - RNA, 19 nt, Artificial Sequence
  Description of Artificial Sequence: Synthetic oligonucleotide
  Sense strand starting at position 658 of SEQ ID NO: 916814
uggcuagaacuuugauaag

SEQ ID NO: 1186083 - RNA, 19 nt, Artificial Sequence
  Description of Artificial Sequence: Synthetic oligonucleotide
  Antisense strand to SEQ ID NO: 1186082
cuuaucaaaguucuagcca

SEQ ID NO: 1186084 - RNA, 19 nt, Artificial Sequence
  Description of Artificial Sequence: Synthetic oligonucleotide
  Sense strand starting at position 757 of SEQ ID NO: 916814
augugauacucugcaaucu

SEQ ID NO: 1186085 - RNA, 19 nt, Artificial Sequence
  Description of Artificial Sequence: Synthetic oligonucleotide
  Antisense strand to SEQ ID NO: 1186084
agauugcagaguaucacau

SEQ ID NO: 1186086 - RNA, 19 nt, Artificial Sequence
  Description of Artificial Sequence: Synthetic oligonucleotide
  Sense strand starting at position 867 of SEQ ID NO: 916814
aucugucucccugguugaa

SEQ ID NO: 1186087 - RNA, 19 nt, Artificial Sequence
  Description of Artificial Sequence: Synthetic oligonucleotide
  Antisense strand to SEQ ID NO: 1186086
uucaaccagggagacagau

SEQ ID NO: 1186088 - RNA, 19 nt, Artificial Sequence
  Description of Artificial Sequence: Synthetic oligonucleotide
  Sense strand starting at position 869 of SEQ ID NO: 916814
cugucucccugguugaaag

SEQ ID NO: 1186089 - RNA, 19 nt, Artificial Sequence
  Description of Artificial Sequence: Synthetic oligonucleotide
  Antisense strand to SEQ ID NO: 1186088
cuuucaaccagggagacag

SEQ ID NO: 1186090 - RNA, 19 nt, Artificial Sequence
  Description of Artificial Sequence: Synthetic oligonucleotide
  Sense strand starting at position 887 of SEQ ID NO: 916814
gggcaaugguaugcaaagu

SEQ ID NO: 1186091 - RNA, 19 nt, Artificial Sequence
  Description of Artificial Sequence: Synthetic oligonucleotide
  Antisense strand to SEQ ID NO: 1186090
acuuugcauaccauugccc

SEQ ID NO: 1186092 - RNA, 19 nt, Artificial Sequence
  Description of Artificial Sequence: Synthetic oligonucleotide
  Sense strand starting at position 888 of SEQ ID NO: 916814
ggcaaugguaugcaaaguu

SEQ ID NO: 1186093 - RNA, 19 nt, Artificial Sequence
  Description of Artificial Sequence: Synthetic oligonucleotide
  Antisense strand to SEQ ID NO: 1186092
aacuuugcauaccauugcc

SEQ ID NO: 1186094 - RNA, 19 nt, Artificial Sequence
  Description of Artificial Sequence: Synthetic oligonucleotide
  Sense strand starting at position 992 of SEQ ID NO: 916814
ggcuuauaguuuccagacu

SEQ ID NO: 1186095 - RNA, 19 nt, Artificial Sequence
  Description of Artificial Sequence: Synthetic oligonucleotide
  Antisense strand to SEQ ID NO: 1186094
agucuggaaacuauaagcc

SEQ ID NO: 1186096 - RNA, 19 nt, Artificial Sequence
  Description of Artificial Sequence: Synthetic oligonucleotide
  Sense strand starting at position 1046 of SEQ ID NO: 916814
gcgcauucugccucuggga

SEQ ID NO: 1186097 - RNA, 19 nt, Artificial Sequence
  Description of Artificial Sequence: Synthetic oligonucleotide
  Antisense strand to SEQ ID NO: 1186096
ucccagaggcagaaugcgc

SEQ ID NO: 1186098 - RNA, 19 nt, Artificial Sequence
  Description of Artificial Sequence: Synthetic oligonucleotide
  Sense strand starting at position 1140 of SEQ ID NO: 916814
gugggucucacagaagguu

SEQ ID NO: 1186099 - RNA, 19 nt, Artificial Sequence
  Description of Artificial Sequence: Synthetic oligonucleotide
  Antisense strand to SEQ ID NO: 1186098
aaccuucugugagacccac

SEQ ID NO: 1186100 - RNA, 19 nt, Artificial Sequence
  Description of Artificial Sequence: Synthetic oligonucleotide
  Sense strand starting at position 2326 of SEQ ID NO: 916814
augguuggucacugugagu

SEQ ID NO: 1186101 - RNA, 19 nt, Artificial Sequence
  Description of Artificial Sequence: Synthetic oligonucleotide
  Antisense strand to SEQ ID NO: 1186100
acucacagugaccaaccau

SEQ ID NO: 1186102 - RNA, 19 nt, Artificial Sequence
  Description of Artificial Sequence: Synthetic oligonucleotide
  Sense strand starting at position 2506 of SEQ ID NO: 916814
aggcaauucuguucuccca

SEQ ID NO: 1186103 - RNA, 19 nt, Artificial Sequence
  Description of Artificial Sequence: Synthetic oligonucleotide
  Antisense strand to SEQ ID NO: 1186102
ugggagaacagaauugccu

SEQ ID NO: 1186104 - RNA, 19 nt, Artificial Sequence
  Description of Artificial Sequence: Synthetic oligonucleotide
  Sense strand starting at position 2604 of SEQ ID NO: 916814
ucauuugcguccuugcauu

SEQ ID NO: 1186105 - RNA, 19 nt, Artificial Sequence
  Description of Artificial Sequence: Synthetic oligonucleotide
  Antisense strand to SEQ ID NO: 1186104
aaugcaaggacgcaaauga

SEQ ID NO: 1186106 - RNA, 19 nt, Artificial Sequence
  Description of Artificial Sequence: Synthetic oligonucleotide
  Sense strand starting at position 2677 of SEQ ID NO: 916814
cgcguccugagcucuagaa

SEQ ID NO: 1186107 - RNA, 19 nt, Artificial Sequence
  Description of Artificial Sequence: Synthetic oligonucleotide
  Antisense strand to SEQ ID NO: 1186106
uucuagagcucaggacgcg

SEQ ID NO: 1186108 - RNA, 19 nt, Artificial Sequence
  Description of Artificial Sequence: Synthetic oligonucleotide
  Sense strand starting at position 2708 of SEQ ID NO: 916814
gggaaugccugcucacagu

SEQ ID NO: 1186109 - RNA, 19 nt, Artificial Sequence
  Description of Artificial Sequence: Synthetic oligonucleotide
  Antisense strand to SEQ ID NO: 1186108
acugugagcaggcauuccc

SEQ ID NO: 1186110 - RNA, 19 nt, Artificial Sequence
  Description of Artificial Sequence: Synthetic oligonucleotide
  Sense strand starting at position 2714 of SEQ ID NO: 916814
gccugcucacaguaaauau

SEQ ID NO: 1186111 - RNA, 19 nt, Artificial Sequence
  Description of Artificial Sequence: Synthetic oligonucleotide
  Antisense strand to SEQ ID NO: 1186110
auauuuacugugagcaggc

SEQ ID NO: 1186112 - RNA, 19 nt, Artificial Sequence
  Description of Artificial Sequence: Synthetic oligonucleotide
  Sense strand starting at position 2780 of SEQ ID NO: 916814
gagugcuuugcacacaaug

SEQ ID NO: 1186113 - RNA, 19 nt, Artificial Sequence
  Description of Artificial Sequence: Synthetic oligonucleotide
  Antisense strand to SEQ ID NO: 1186112
cauugugugcaaagcacuc

SEQ ID NO: 1186114 - RNA, 19 nt, Artificial Sequence
  Description of Artificial Sequence: Synthetic oligonucleotide
  Sense strand starting at position 2868 of SEQ ID NO: 916814
gcggguggacuucauggau

SEQ ID NO: 1186115 - RNA, 19 nt, Artificial Sequence
  Description of Artificial Sequence: Synthetic oligonucleotide
  Antisense strand to SEQ ID NO: 1186114
auccaugaaguccacccgc

SEQ ID NO: 1186116 - RNA, 19 nt, Artificial Sequence
  Description of Artificial Sequence: Synthetic oligonucleotide
  Sense strand starting at position 3250 of SEQ ID NO: 916814
aggauaauugcaggcaagu

SEQ ID NO: 1186117 - RNA, 19 nt, Artificial Sequence
  Description of Artificial Sequence: Synthetic oligonucleotide
  Antisense strand to SEQ ID NO: 1186116
acuugccugcaauuauccu

SEQ ID NO: 1186118 - RNA, 19 nt, Artificial Sequence
  Description of Artificial Sequence: Synthetic oligonucleotide
  Sense strand starting at position 3261 of SEQ ID NO: 916814
aggcaagugcuccaagaaa

SEQ ID NO: 1186119 - RNA, 19 nt, Artificial Sequence
  Description of Artificial Sequence: Synthetic oligonucleotide
  Antisense strand to SEQ ID NO: 1186118
uuucuuggagcacuugccu

SEQ ID NO: 1186120 - RNA, 19 nt, Artificial Sequence
  Description of Artificial Sequence: Synthetic oligonucleotide
  Sense strand starting at position 3621 of SEQ ID NO: 916814
cccuuagaugggugagugu

SEQ ID NO: 1186121 - RNA, 19 nt, Artificial Sequence
  Description of Artificial Sequence: Synthetic oligonucleotide
  Antisense strand to SEQ ID NO: 1186120
acacucacccaucuaaggg

SEQ ID NO: 1186122 - RNA, 19 nt, Artificial Sequence
  Description of Artificial Sequence: Synthetic oligonucleotide
  Sense strand starting at position 3630 of SEQ ID NO: 916814
gggugaguguaucccugaa

SEQ ID NO: 1186123 - RNA, 19 nt, Artificial Sequence
  Description of Artificial Sequence: Synthetic oligonucleotide
  Antisense strand to SEQ ID NO: 1186122
uucagggauacacucaccc

SEQ ID NO: 1186124 - RNA, 19 nt, Artificial Sequence
  Description of Artificial Sequence: Synthetic oligonucleotide
  Sense strand starting at position 3740 of SEQ ID NO: 916814
ugaaguuacugagaagaga

SEQ ID NO: 1186125 - RNA, 19 nt, Artificial Sequence
  Description of Artificial Sequence: Synthetic oligonucleotide
  Antisense strand to SEQ ID NO: 1186124
ucucuucucaguaacuuca

SEQ ID NO: 1186126 - RNA, 19 nt, Artificial Sequence
  Description of Artificial Sequence: Synthetic oligonucleotide
  Sense strand starting at position 3753 of SEQ ID NO: 916814
aagagacuccuggguuaca

SEQ ID NO: 1186127 - RNA, 19 nt, Artificial Sequence
  Description of Artificial Sequence: Synthetic oligonucleotide
  Antisense strand to SEQ ID NO: 1186126
uguaacccaggagucucuu

SEQ ID NO: 1186128 - RNA, 19 nt, Artificial Sequence
  Description of Artificial Sequence: Synthetic oligonucleotide
  Sense strand starting at position 3821 of SEQ ID NO: 916814
ccuugagugcuccgaggga

SEQ ID NO: 1186129 - RNA, 19 nt, Artificial Sequence
  Description of Artificial Sequence: Synthetic oligonucleotide
  Antisense strand to SEQ ID NO: 1186128
ucccucggagcacucaagg

SEQ ID NO: 1186130 - RNA, 19 nt, Artificial Sequence
  Description of Artificial Sequence: Synthetic oligonucleotide
  Sense strand starting at position 3903 of SEQ ID NO: 916814
caacaugucuucgccugaa

SEQ ID NO: 1186131 - RNA, 19 nt, Artificial Sequence
  Description of Artificial Sequence: Synthetic oligonucleotide
  Antisense strand to SEQ ID NO: 1186130
uucaggcgaagacauguug

SEQ ID NO: 1186132 - RNA, 19 nt, Artificial Sequence
  Description of Artificial Sequence: Synthetic oligonucleotide
  Sense strand starting at position 3906 of SEQ ID NO: 916814
caugucuucgccugaacca

SEQ ID NO: 1186133 - RNA, 19 nt, Artificial Sequence
  Description of Artificial Sequence: Synthetic oligonucleotide
  Antisense strand to SEQ ID NO: 1186132
ugguucaggcgaagacaug

SEQ ID NO: 1186134 - RNA, 19 nt, Artificial Sequence
  Description of Artificial Sequence: Synthetic oligonucleotide
  Sense strand starting at position 3907 of SEQ ID NO: 916814
augucuucgccugaaccaa

SEQ ID NO: 1186135 - RNA, 19 nt, Artificial Sequence
  Description of Artificial Sequence: Synthetic oligonucleotide
  Antisense strand to SEQ ID NO: 1186134
uugguucaggcgaagacau

SEQ ID NO: 1186136 - RNA, 19 nt, Artificial Sequence
  Description of Artificial Sequence: Synthetic oligonucleotide
  Sense strand starting at position 3943 of SEQ ID NO: 916814
cuauguucucguuagacag

SEQ ID NO: 1186137 - RNA, 19 nt, Artificial Sequence
  Description of Artificial Sequence: Synthetic oligonucleotide
  Antisense strand to SEQ ID NO: 1186136
cugucuaacgagaacauag

SEQ ID NO: 1186138 - RNA, 19 nt, Artificial Sequence
  Description of Artificial Sequence: Synthetic oligonucleotide
  Sense strand starting at position 159 of SEQ ID NO: 916815
uguaaugugcuauaaagcu

SEQ ID NO: 1186139 - RNA, 19 nt, Artificial Sequence
  Description of Artificial Sequence: Synthetic oligonucleotide
  Antisense strand to SEQ ID NO: 1186138
agcuuuauagcacauuaca

SEQ ID NO: 1186140 - RNA, 19 nt, Artificial Sequence
  Description of Artificial Sequence: Synthetic oligonucleotide
  Sense strand starting at position 230 of SEQ ID NO: 916815
ugguaauguuauccagcca

SEQ ID NO: 1186141 - RNA, 19 nt, Artificial Sequence
  Description of Artificial Sequence: Synthetic oligonucleotide
  Antisense strand to SEQ ID NO: 1186140
uggcuggauaacauuacca

SEQ ID NO: 1186142 - RNA, 19 nt, Artificial Sequence
  Description of Artificial Sequence: Synthetic oligonucleotide
  Sense strand starting at position 321 of SEQ ID NO: 916815
uucuaaugcacguggagaa

SEQ ID NO: 1186143 - RNA, 19 nt, Artificial Sequence
  Description of Artificial Sequence: Synthetic oligonucleotide
  Antisense strand to SEQ ID NO: 1186142
uucuccacgugcauuagaa

SEQ ID NO: 1186144 - RNA, 19 nt, Artificial Sequence
  Description of Artificial Sequence: Synthetic oligonucleotide
  Sense strand starting at position 322 of SEQ ID NO: 916815
ucuaaugcacguggagaaa

SEQ ID NO: 1186145 - RNA, 19 nt, Artificial Sequence
  Description of Artificial Sequence: Synthetic oligonucleotide
  Antisense strand to SEQ ID NO: 1186144
uuucuccacgugcauuaga

SEQ ID NO: 1186146 - RNA, 19 nt, Artificial Sequence
  Description of Artificial Sequence: Synthetic oligonucleotide
  Sense strand starting at position 387 of SEQ ID NO: 916815
cgaaaucuccauuggaaag

SEQ ID NO: 1186147 - RNA, 19 nt, Artificial Sequence
  Description of Artificial Sequence: Synthetic oligonucleotide
  Antisense strand to SEQ ID NO: 1186146
cuuuccaauggagauuucg

SEQ ID NO: 1186148 - RNA, 19 nt, Artificial Sequence
  Description of Artificial Sequence: Synthetic oligonucleotide
  Sense strand starting at position 628 of SEQ ID NO: 916815
ugacuuuagccagaugcaa

SEQ ID NO: 1186149 - RNA, 19 nt, Artificial Sequence
  Description of Artificial Sequence: Synthetic oligonucleotide
  Antisense strand to SEQ ID NO: 1186148
uugcaucuggcuaaaguca

SEQ ID NO: 1186150 - RNA, 19 nt, Artificial Sequence
  Description of Artificial Sequence: Synthetic oligonucleotide
  Sense strand starting at position 704 of SEQ ID NO: 916815
gaugcagaaccuuggaauc

SEQ ID NO: 1186151 - RNA, 19 nt, Artificial Sequence
  Description of Artificial Sequence: Synthetic oligonucleotide
  Antisense strand to SEQ ID NO: 1186150
gauuccaagguucugcauc

SEQ ID NO: 1186152 - RNA, 19 nt, Artificial Sequence
  Description of Artificial Sequence: Synthetic oligonucleotide
  Sense strand starting at position 791 of SEQ ID NO: 916815
ggaguagucggauggaaug

SEQ ID NO: 1186153 - RNA, 19 nt, Artificial Sequence
  Description of Artificial Sequence: Synthetic oligonucleotide
  Antisense strand to SEQ ID NO: 1186152
cauuccauccgacuacucc

SEQ ID NO: 1186154 - RNA, 19 nt, Artificial Sequence
  Description of Artificial Sequence: Synthetic oligonucleotide
  Sense strand starting at position 801 of SEQ ID NO: 916815
gauggaaugcaugguuuga

SEQ ID NO: 1186155 - RNA, 19 nt, Artificial Sequence
  Description of Artificial Sequence: Synthetic oligonucleotide
  Antisense strand to SEQ ID NO: 1186154
ucaaaccaugcauuccauc

SEQ ID NO: 1186156 - RNA, 19 nt, Artificial Sequence
  Description of Artificial Sequence: Synthetic oligonucleotide
  Sense strand starting at position 805 of SEQ ID NO: 916815
gaaugcaugguuugaagaa

SEQ ID NO: 1186157 - RNA, 19 nt, Artificial Sequence
  Description of Artificial Sequence: Synthetic oligonucleotide
  Antisense strand to SEQ ID NO: 1186156
uucuucaaaccaugcauuc

SEQ ID NO: 1186158 - RNA, 19 nt, Artificial Sequence
  Description of Artificial Sequence: Synthetic oligonucleotide
  Sense strand starting at position 913 of SEQ ID NO: 916815
uggaaaguuagccaagucu

SEQ ID NO: 1186159 - RNA, 19 nt, Artificial Sequence
  Description of Artificial Sequence: Synthetic oligonucleotide
  Antisense strand to SEQ ID NO: 1186158
agacuuggcuaacuuucca

SEQ ID NO: 1186160 - RNA, 19 nt, Artificial Sequence
  Description of Artificial Sequence: Synthetic oligonucleotide
  Sense strand starting at position 1310 of SEQ ID NO: 916815
aacgcauccgaguaaagga

SEQ ID NO: 1186161 - RNA, 19 nt, Artificial Sequence
  Description of Artificial Sequence: Synthetic oligonucleotide
  Antisense strand to SEQ ID NO: 1186160
uccuuuacucggaugcguu

SEQ ID NO: 1186162 - RNA, 19 nt, Artificial Sequence
  Description of Artificial Sequence: Synthetic oligonucleotide
  Sense strand starting at position 1638 of SEQ ID NO: 916815
gguccucaguucucuuaag

SEQ ID NO: 1186163 - RNA, 19 nt, Artificial Sequence
  Description of Artificial Sequence: Synthetic oligonucleotide
  Antisense strand to SEQ ID NO: 1186162
cuuaagagaacugaggacc

SEQ ID NO: 1186164 - RNA, 19 nt, Artificial Sequence
  Description of Artificial Sequence: Synthetic oligonucleotide
  Sense strand starting at position 1639 of SEQ ID NO: 916815
guccucaguucucuuaaga

SEQ ID NO: 1186165 - RNA, 19 nt, Artificial Sequence
  Description of Artificial Sequence: Synthetic oligonucleotide
  Antisense strand to SEQ ID NO: 1186164
ucuuaagagaacugaggac

SEQ ID NO: 1186166 - RNA, 19 nt, Artificial Sequence
  Description of Artificial Sequence: Synthetic oligonucleotide
  Sense strand starting at position 2026 of SEQ ID NO: 916815
cgaguccuugcauaauuga

SEQ ID NO: 1186167 - RNA, 19 nt, Artificial Sequence
  Description of Artificial Sequence: Synthetic oligonucleotide
  Antisense strand to SEQ ID NO: 1186166
ucaauuaugcaaggacucg

SEQ ID NO: 1186168 - RNA, 19 nt, Artificial Sequence
  Description of Artificial Sequence: Synthetic oligonucleotide
  Sense strand starting at position 2029 of SEQ ID NO: 916815
guccuugcauaauugauga

SEQ ID NO: 1186169 - RNA, 19 nt, Artificial Sequence
  Description of Artificial Sequence: Synthetic oligonucleotide
  Antisense strand to SEQ ID NO: 1186168
ucaucaauuaugcaaggac

SEQ ID NO: 1186170 - RNA, 19 nt, Artificial Sequence
  Description of Artificial Sequence: Synthetic oligonucleotide
  Sense strand starting at position 2784 of SEQ ID NO: 916815
ucuguccaucuguaaagua

SEQ ID NO: 1186171 - RNA, 19 nt, Artificial Sequence
  Description of Artificial Sequence: Synthetic oligonucleotide
  Antisense strand to SEQ ID NO: 1186170
uacuuuacagauggacaga

SEQ ID NO: 1186172 - RNA, 19 nt, Artificial Sequence
  Description of Artificial Sequence: Synthetic oligonucleotide
  Sense strand starting at position 2796 of SEQ ID NO: 916815
uaaaguaggcaugagcauu

SEQ ID NO: 1186173 - RNA, 19 nt, Artificial Sequence
  Description of Artificial Sequence: Synthetic oligonucleotide
  Antisense strand to SEQ ID NO: 1186172
aaugcucaugccuacuuua

SEQ ID NO: 1186174 - RNA, 19 nt, Artificial Sequence
  Description of Artificial Sequence: Synthetic oligonucleotide
  Sense strand starting at position 2844 of SEQ ID NO: 916815
cuagguaaugagugccaga

SEQ ID NO: 1186175 - RNA, 19 nt, Artificial Sequence
  Description of Artificial Sequence: Synthetic oligonucleotide
  Antisense strand to SEQ ID NO: 1186174
ucuggcacucauuaccuag

SEQ ID NO: 1186176 - RNA, 19 nt, Artificial Sequence
  Description of Artificial Sequence: Synthetic oligonucleotide
  Sense strand starting at position 2880 of SEQ ID NO: 916815
gugucucuccucuacuuaa

SEQ ID NO: 1186177 - RNA, 19 nt, Artificial Sequence
  Description of Artificial Sequence: Synthetic oligonucleotide
  Antisense strand to SEQ ID NO: 1186176
uuaaguagaggagagacac

SEQ ID NO: 1186178 - RNA, 19 nt, Artificial Sequence
  Description of Artificial Sequence: Synthetic oligonucleotide
  Sense strand starting at position 3064 of SEQ ID NO: 916815
augguaugcuuaucacaua

SEQ ID NO: 1186179 - RNA, 19 nt, Artificial Sequence
  Description of Artificial Sequence: Synthetic oligonucleotide
  Antisense strand to SEQ ID NO: 1186178
uaugugauaagcauaccau

SEQ ID NO: 1186180 - RNA, 19 nt, Artificial Sequence
  Description of Artificial Sequence: Synthetic oligonucleotide
  Sense strand starting at position 3124 of SEQ ID NO: 916815
uauauuugcguguguuuag

SEQ ID NO: 1186181 - RNA, 19 nt, Artificial Sequence
  Description of Artificial Sequence: Synthetic oligonucleotide
  Antisense strand to SEQ ID NO: 1186180
cuaaacacacgcaaauaua

SEQ ID NO: 1186182 - RNA, 19 nt, Artificial Sequence
  Description of Artificial Sequence: Synthetic oligonucleotide
  Sense strand starting at position 3125 of SEQ ID NO: 916815
auauuugcguguguuuaga

SEQ ID NO: 1186183 - RNA, 19 nt, Artificial Sequence
  Description of Artificial Sequence: Synthetic oligonucleotide
  Antisense strand to SEQ ID NO: 1186182
ucuaaacacacgcaaauau

SEQ ID NO: 1186184 - RNA, 19 nt, Artificial Sequence
  Description of Artificial Sequence: Synthetic oligonucleotide
  Sense strand starting at position 3127 of SEQ ID NO: 916815
auuugcguguguuuagauu

SEQ ID NO: 1186185 - RNA, 19 nt, Artificial Sequence
  Description of Artificial Sequence: Synthetic oligonucleotide
  Antisense strand to SEQ ID NO: 1186184
aaucuaaacacacgcaaau

SEQ ID NO: 1186186 - RNA, 19 nt, Artificial Sequence
  Description of Artificial Sequence: Synthetic oligonucleotide
  Sense strand starting at position 3131 of SEQ ID NO: 916815
gcguguguuuagauuguac

SEQ ID NO: 1186187 - RNA, 19 nt, Artificial Sequence
  Description of Artificial Sequence: Synthetic oligonucleotide
  Antisense strand to SEQ ID NO: 1186186
guacaaucuaaacacacgc

SEQ ID NO: 1186188 - RNA, 19 nt, Artificial Sequence
  Description of Artificial Sequence: Synthetic oligonucleotide
  Sense strand starting at position 3156 of SEQ ID NO: 916815
gaguuaugugugcacucau

SEQ ID NO: 1186189 - RNA, 19 nt, Artificial Sequence
  Description of Artificial Sequence: Synthetic oligonucleotide
  Antisense strand to SEQ ID NO: 1186188
augagugcacacauaacuc

SEQ ID NO: 1186190 - RNA, 19 nt, Artificial Sequence
  Description of Artificial Sequence: Synthetic oligonucleotide
  Sense strand starting at position 3225 of SEQ ID NO: 916815
cuccgugugcuucuuugua

SEQ ID NO: 1186191 - RNA, 19 nt, Artificial Sequence
  Description of Artificial Sequence: Synthetic oligonucleotide
  Antisense strand to SEQ ID NO: 1186190
uacaaagaagcacacggag

SEQ ID NO: 1186192 - RNA, 19 nt, Artificial Sequence
  Description of Artificial Sequence: Synthetic oligonucleotide
  Sense strand starting at position 3310 of SEQ ID NO: 916815
uguacauugguuugcauuu

SEQ ID NO: 1186193 - RNA, 19 nt, Artificial Sequence
  Description of Artificial Sequence: Synthetic oligonucleotide
  Antisense strand to SEQ ID NO: 1186192
aaaugcaaaccaauguaca

SEQ ID NO: 1186194 - RNA, 19 nt, Artificial Sequence
  Description of Artificial Sequence: Synthetic oligonucleotide
  Sense strand starting at position 3408 of SEQ ID NO: 916815
ugagauuauucagucguug

SEQ ID NO: 1186195 - RNA, 19 nt, Artificial Sequence
  Description of Artificial Sequence: Synthetic oligonucleotide
  Antisense strand to SEQ ID NO: 1186194
caacgacugaauaaucuca

SEQ ID NO: 1186196 - RNA, 19 nt, Artificial Sequence
  Description of Artificial Sequence: Synthetic oligonucleotide
  Sense strand starting at position 3517 of SEQ ID NO: 916815
gguuauuuccaauguuugu

SEQ ID NO: 1186197 - RNA, 19 nt, Artificial Sequence
  Description of Artificial Sequence: Synthetic oligonucleotide
  Antisense strand to SEQ ID NO: 1186196
acaaacauuggaaauaacc

SEQ ID NO: 1186198 - RNA, 19 nt, Artificial Sequence
  Description of Artificial Sequence: Synthetic oligonucleotide
  Sense strand starting at position 3551 of SEQ ID NO: 916815
cuguuaugagcuuucgugu

SEQ ID NO: 1186199 - RNA, 19 nt, Artificial Sequence
  Description of Artificial Sequence: Synthetic oligonucleotide
  Antisense strand to SEQ ID NO: 1186198
acacgaaagcucauaacag

SEQ ID NO: 1186200 - RNA, 19 nt, Artificial Sequence
  Description of Artificial Sequence: Synthetic oligonucleotide
  Sense strand starting at position 3571 of SEQ ID NO: 916815
caggucuuuguauggauau

SEQ ID NO: 1186201 - RNA, 19 nt, Artificial Sequence
  Description of Artificial Sequence: Synthetic oligonucleotide
  Antisense strand to SEQ ID NO: 1186200
auauccauacaaagaccug

SEQ ID NO: 1186202 - RNA, 19 nt, Artificial Sequence
  Description of Artificial Sequence: Synthetic oligonucleotide
  Sense strand starting at position 3600 of SEQ ID NO: 916815
guuucucguggguauaaau

SEQ ID NO: 1186203 - RNA, 19 nt, Artificial Sequence
  Description of Artificial Sequence: Synthetic oligonucleotide
  Antisense strand to SEQ ID NO: 1186202
auuuauacccacgagaaac

SEQ ID NO: 1186204 - RNA, 19 nt, Artificial Sequence
  Description of Artificial Sequence: Synthetic oligonucleotide
  Sense strand starting at position 3696 of SEQ ID NO: 916815
gugguugugccuuuccauu

SEQ ID NO: 1186205 - RNA, 19 nt, Artificial Sequence
  Description of Artificial Sequence: Synthetic oligonucleotide
  Antisense strand to SEQ ID NO: 1186204
aauggaaaggcacaaccac

SEQ ID NO: 1186206 - RNA, 19 nt, Artificial Sequence
  Description of Artificial Sequence: Synthetic oligonucleotide
  Sense strand starting at position 3794 of SEQ ID NO: 916815
uuugaauagauguguaguu

SEQ ID NO: 1186207 - RNA, 19 nt, Artificial Sequence
  Description of Artificial Sequence: Synthetic oligonucleotide
  Antisense strand to SEQ ID NO: 1186206
aacuacacaucuauucaaa

SEQ ID NO: 1186208 - RNA, 19 nt, Artificial Sequence
  Description of Artificial Sequence: Synthetic oligonucleotide
  Sense strand starting at position 3795 of SEQ ID NO: 916815
uugaauagauguguaguuu

SEQ ID NO: 1186209 - RNA, 19 nt, Artificial Sequence
  Description of Artificial Sequence: Synthetic oligonucleotide
  Antisense strand to SEQ ID NO: 1186208
aaacuacacaucuauucaa

SEQ ID NO: 1186210 - RNA, 19 nt, Artificial Sequence
  Description of Artificial Sequence: Synthetic oligonucleotide
  Sense strand starting at position 3823 of SEQ ID NO: 916815
gugggucugucguccauuu

SEQ ID NO: 1186211 - RNA, 19 nt, Artificial Sequence
  Description of Artificial Sequence: Synthetic oligonucleotide
  Antisense strand to SEQ ID NO: 1186210
aaauggacgacagacccac

SEQ ID NO: 1186212 - RNA, 19 nt, Artificial Sequence
  Description of Artificial Sequence: Synthetic oligonucleotide
  Sense strand starting at position 3825 of SEQ ID NO: 916815
gggucugucguccauuuca

SEQ ID NO: 1186213 - RNA, 19 nt, Artificial Sequence
  Description of Artificial Sequence: Synthetic oligonucleotide
  Antisense strand to SEQ ID NO: 1186212
ugaaauggacgacagaccc

SEQ ID NO: 1186214 - RNA, 19 nt, Artificial Sequence
  Description of Artificial Sequence: Synthetic oligonucleotide
  Sense strand starting at position 3846 of SEQ ID NO: 916815
agugacuaaagauguugaa

SEQ ID NO: 1186215 - RNA, 19 nt, Artificial Sequence
  Description of Artificial Sequence: Synthetic oligonucleotide
  Antisense strand to SEQ ID NO: 1186214
uucaacaucuuuagucacu

SEQ ID NO: 1186216 - RNA, 19 nt, Artificial Sequence
  Description of Artificial Sequence: Synthetic oligonucleotide
  Sense strand starting at position 3874 of SEQ ID NO: 916815
auggacuugucaucuguaa

SEQ ID NO: 1186217 - RNA, 19 nt, Artificial Sequence
  Description of Artificial Sequence: Synthetic oligonucleotide
  Antisense strand to SEQ ID NO: 1186216
uuacagaugacaaguccau

SEQ ID NO: 1186218 - RNA, 19 nt, Artificial Sequence
  Description of Artificial Sequence: Synthetic oligonucleotide
  Sense strand starting at position 43 of SEQ ID NO: 916816
ccauucuccuuguucugua

SEQ ID NO: 1186219 - RNA, 19 nt, Artificial Sequence
  Description of Artificial Sequence: Synthetic oligonucleotide
  Antisense strand to SEQ ID NO: 1186218
uacagaacaaggagaaugg

SEQ ID NO: 1186220 - RNA, 19 nt, Artificial Sequence
  Description of Artificial Sequence: Synthetic oligonucleotide
  Sense strand starting at position 251 of SEQ ID NO: 916816
gucuuauacuuugcuggca

SEQ ID NO: 1186221 - RNA, 19 nt, Artificial Sequence
  Description of Artificial Sequence: Synthetic oligonucleotide
  Antisense strand to SEQ ID NO: 1186220
ugccagcaaaguauaagac

SEQ ID NO: 1186222 - RNA, 19 nt, Artificial Sequence
  Description of Artificial Sequence: Synthetic oligonucleotide
  Sense strand starting at position 264 of SEQ ID NO: 916816
cuggcaucuugcuccagaa

SEQ ID NO: 1186223 - RNA, 19 nt, Artificial Sequence
  Description of Artificial Sequence: Synthetic oligonucleotide
  Antisense strand to SEQ ID NO: 1186222
uucuggagcaagaugccag

SEQ ID NO: 1186224 - RNA, 19 nt, Artificial Sequence
  Description of Artificial Sequence: Synthetic oligonucleotide
  Sense strand starting at position 384 of SEQ ID NO: 916816
gggcaaugcugcuccaaca

SEQ ID NO: 1186225 - RNA, 19 nt, Artificial Sequence
  Description of Artificial Sequence: Synthetic oligonucleotide
  Antisense strand to SEQ ID NO: 1186224
uguuggagcagcauugccc

SEQ ID NO: 1186226 - RNA, 19 nt, Artificial Sequence
  Description of Artificial Sequence: Synthetic oligonucleotide
  Sense strand starting at position 494 of SEQ ID NO: 916816
gugagcucuaccugggaca

SEQ ID NO: 1186227 - RNA, 19 nt, Artificial Sequence
  Description of Artificial Sequence: Synthetic oligonucleotide
  Antisense strand to SEQ ID NO: 1186226
ugucccagguagagcucac

SEQ ID NO: 1186228 - RNA, 19 nt, Artificial Sequence
  Description of Artificial Sequence: Synthetic oligonucleotide
  Sense strand starting at position 633 of SEQ ID NO: 916816
agggauugagggugcagau

SEQ ID NO: 1186229 - RNA, 19 nt, Artificial Sequence
  Description of Artificial Sequence: Synthetic oligonucleotide
  Antisense strand to SEQ ID NO: 1186228
aucugcacccucaaucccu

SEQ ID NO: 1186230 - RNA, 19 nt, Artificial Sequence
  Description of Artificial Sequence: Synthetic oligonucleotide
  Sense strand starting at position 666 of SEQ ID NO: 916816
agacgagcuuguccgaguu

SEQ ID NO: 1186231 - RNA, 19 nt, Artificial Sequence
  Description of Artificial Sequence: Synthetic oligonucleotide
  Antisense strand to SEQ ID NO: 1186230
aacucggacaagcucgucu

SEQ ID NO: 1186232 - RNA, 19 nt, Artificial Sequence
  Description of Artificial Sequence: Synthetic oligonucleotide
  Sense strand starting at position 669 of SEQ ID NO: 916816
cgagcuuguccgaguugag

SEQ ID NO: 1186233 - RNA, 19 nt, Artificial Sequence
  Description of Artificial Sequence: Synthetic oligonucleotide
  Antisense strand to SEQ ID NO: 1186232
cucaacucggacaagcucg

SEQ ID NO: 1186234 - RNA, 19 nt, Artificial Sequence
  Description of Artificial Sequence: Synthetic oligonucleotide
  Sense strand starting at position 672 of SEQ ID NO: 916816
gcuuguccgaguugagguu

SEQ ID NO: 1186235 - RNA, 19 nt, Artificial Sequence
  Description of Artificial Sequence: Synthetic oligonucleotide
  Antisense strand to SEQ ID NO: 1186234
aaccucaacucggacaagc

SEQ ID NO: 1186236 - RNA, 19 nt, Artificial Sequence
  Description of Artificial Sequence: Synthetic oligonucleotide
  Sense strand starting at position 678 of SEQ ID NO: 916816
ccgaguugagguugauguu

SEQ ID NO: 1186237 - RNA, 19 nt, Artificial Sequence
  Description of Artificial Sequence: Synthetic oligonucleotide
  Antisense strand to SEQ ID NO: 1186236
aacaucaaccucaacucgg

SEQ ID NO: 1186238 - RNA, 19 nt, Artificial Sequence
  Description of Artificial Sequence: Synthetic oligonucleotide
  Sense strand starting at position 737 of SEQ ID NO: 916816
ccgaauugccaguacauca

SEQ ID NO: 1186239 - RNA, 19 nt, Artificial Sequence
  Description of Artificial Sequence: Synthetic oligonucleotide
  Antisense strand to SEQ ID NO: 1186238
ugauguacuggcaauucgg

SEQ ID NO: 1186240 - RNA, 19 nt, Artificial Sequence
  Description of Artificial Sequence: Synthetic oligonucleotide
  Sense strand starting at position 847 of SEQ ID NO: 916816
gguguuguugcagaagaac

SEQ ID NO: 1186241 - RNA, 19 nt, Artificial Sequence
  Description of Artificial Sequence: Synthetic oligonucleotide
  Antisense strand to SEQ ID NO: 1186240
guucuucugcaacaacacc

SEQ ID NO: 1186242 - RNA, 19 nt, Artificial Sequence
  Description of Artificial Sequence: Synthetic oligonucleotide
  Sense strand starting at position 867 of SEQ ID NO: 916816
cgaagagcucucgguagga

SEQ ID NO: 1186243 - RNA, 19 nt, Artificial Sequence
  Description of Artificial Sequence: Synthetic oligonucleotide
  Antisense strand to SEQ ID NO: 1186242
uccuaccgagagcucuucg

SEQ ID NO: 1186244 - RNA, 19 nt, Artificial Sequence
  Description of Artificial Sequence: Synthetic oligonucleotide
  Sense strand starting at position 1886 of SEQ ID NO: 916816
gagucagagccgggaguuu

SEQ ID NO: 1186245 - RNA, 19 nt, Artificial Sequence
  Description of Artificial Sequence: Synthetic oligonucleotide
  Antisense strand to SEQ ID NO: 1186244
aaacucccggcucugacuc

SEQ ID NO: 1186246 - RNA, 19 nt, Artificial Sequence
  Description of Artificial Sequence: Synthetic oligonucleotide
  Sense strand starting at position 2029 of SEQ ID NO: 916816
gggcaaagaucugaacaag

SEQ ID NO: 1186247 - RNA, 19 nt, Artificial Sequence
  Description of Artificial Sequence: Synthetic oligonucleotide
  Antisense strand to SEQ ID NO: 1186246
cuuguucagaucuuugccc

SEQ ID NO: 1186248 - RNA, 19 nt, Artificial Sequence
  Description of Artificial Sequence: Synthetic oligonucleotide
  Sense strand starting at position 2050 of SEQ ID NO: 916816
gaaggauccugagcccaca

SEQ ID NO: 1186249 - RNA, 19 nt, Artificial Sequence
  Description of Artificial Sequence: Synthetic oligonucleotide
  Antisense strand to SEQ ID NO: 1186248
ugugggcucaggauccuuc

SEQ ID NO: 1186250 - RNA, 19 nt, Artificial Sequence
  Description of Artificial Sequence: Synthetic oligonucleotide
  Sense strand starting at position 2302 of SEQ ID NO: 916816
gggagucccaagugugcuu

SEQ ID NO: 1186251 - RNA, 19 nt, Artificial Sequence
  Description of Artificial Sequence: Synthetic oligonucleotide
  Antisense strand to SEQ ID NO: 1186250
aagcacacuugggacuccc

SEQ ID NO: 1186252 - RNA, 19 nt, Artificial Sequence
  Description of Artificial Sequence: Synthetic oligonucleotide
  Sense strand starting at position 2404 of SEQ ID NO: 916816
agaagaggucucugcaggu

SEQ ID NO: 1186253 - RNA, 19 nt, Artificial Sequence
  Description of Artificial Sequence: Synthetic oligonucleotide
  Antisense strand to SEQ ID NO: 1186252
accugcagagaccucuucu

SEQ ID NO: 1186254 - RNA, 19 nt, Artificial Sequence
  Description of Artificial Sequence: Synthetic oligonucleotide
  Sense strand starting at position 2647 of SEQ ID NO: 916816
cacagaguugcaggaaugu

SEQ ID NO: 1186255 - RNA, 19 nt, Artificial Sequence
  Description of Artificial Sequence: Synthetic oligonucleotide
  Antisense strand to SEQ ID NO: 1186254
acauuccugcaacucugug

SEQ ID NO: 1186256 - RNA, 19 nt, Artificial Sequence
  Description of Artificial Sequence: Synthetic oligonucleotide
  Sense strand starting at position 2827 of SEQ ID NO: 916816
ggaggagaaauucguugau

SEQ ID NO: 1186257 - RNA, 19 nt, Artificial Sequence
  Description of Artificial Sequence: Synthetic oligonucleotide
  Antisense strand to SEQ ID NO: 1186256
aucaacgaauuucuccucc

SEQ ID NO: 1186258 - RNA, 19 nt, Artificial Sequence
  Description of Artificial Sequence: Synthetic oligonucleotide
  Sense strand starting at position 2830 of SEQ ID NO: 916816
ggagaaauucguugauggg

SEQ ID NO: 1186259 - RNA, 19 nt, Artificial Sequence
  Description of Artificial Sequence: Synthetic oligonucleotide
  Antisense strand to SEQ ID NO: 1186258
cccaucaacgaauuucucc

SEQ ID NO: 1186260 - RNA, 19 nt, Artificial Sequence
  Description of Artificial Sequence: Synthetic oligonucleotide
  Sense strand starting at position 2836 of SEQ ID NO: 916816
auucguugaugggcuauau

SEQ ID NO: 1186261 - RNA, 19 nt, Artificial Sequence
  Description of Artificial Sequence: Synthetic oligonucleotide
  Antisense strand to SEQ ID NO: 1186260
auauagcccaucaacgaau

SEQ ID NO: 1186262 - RNA, 19 nt, Artificial Sequence
  Description of Artificial Sequence: Synthetic oligonucleotide
  Sense strand starting at position 3122 of SEQ ID NO: 916816
cagccugagcauugauaca

SEQ ID NO: 1186263 - RNA, 19 nt, Artificial Sequence
  Description of Artificial Sequence: Synthetic oligonucleotide
  Antisense strand to SEQ ID NO: 1186262
uguaucaaugcucaggcug

SEQ ID NO: 1186264 - RNA, 19 nt, Artificial Sequence
  Description of Artificial Sequence: Synthetic oligonucleotide
  Sense strand starting at position 3150 of SEQ ID NO: 916816
aggagauaggccugcaaua

SEQ ID NO: 1186265 - RNA, 19 nt, Artificial Sequence
  Description of Artificial Sequence: Synthetic oligonucleotide
  Antisense strand to SEQ ID NO: 1186264
uauugcaggccuaucuccu

SEQ ID NO: 1186266 - RNA, 19 nt, Artificial Sequence
  Description of Artificial Sequence: Synthetic oligonucleotide
  Sense strand starting at position 3152 of SEQ ID NO: 916816
gagauaggccugcaauaca

SEQ ID NO: 1186267 - RNA, 19 nt, Artificial Sequence
  Description of Artificial Sequence: Synthetic oligonucleotide
  Antisense strand to SEQ ID NO: 1186266
uguauugcaggccuaucuc

SEQ ID NO: 1186268 - RNA, 19 nt, Artificial Sequence
  Description of Artificial Sequence: Synthetic oligonucleotide
  Sense strand starting at position 3174 of SEQ ID NO: 916816
agauaagguuucuauuugu

SEQ ID NO: 1186269 - RNA, 19 nt, Artificial Sequence
  Description of Artificial Sequence: Synthetic oligonucleotide
  Antisense strand to SEQ ID NO: 1186268
acaaauagaaaccuuaucu

SEQ ID NO: 1186270 - RNA, 19 nt, Artificial Sequence
  Description of Artificial Sequence: Synthetic oligonucleotide
  Sense strand starting at position 3180 of SEQ ID NO: 916816
gguuucuauuuguacacuu

SEQ ID NO: 1186271 - RNA, 19 nt, Artificial Sequence
  Description of Artificial Sequence: Synthetic oligonucleotide
  Antisense strand to SEQ ID NO: 1186270
aaguguacaaauagaaacc

SEQ ID NO: 1186272 - RNA, 19 nt, Artificial Sequence
  Description of Artificial Sequence: Synthetic oligonucleotide
  Sense strand starting at position 3232 of SEQ ID NO: 916816
aagugcagaucucagauuu

SEQ ID NO: 1186273 - RNA, 19 nt, Artificial Sequence
  Description of Artificial Sequence: Synthetic oligonucleotide
  Antisense strand to SEQ ID NO: 1186272
aaaucugagaucugcacuu

SEQ ID NO: 1186274 - RNA, 19 nt, Artificial Sequence
  Description of Artificial Sequence: Synthetic oligonucleotide
  Sense strand starting at position 3243 of SEQ ID NO: 916816
ucagauuucucagagauaa

SEQ ID NO: 1186275 - RNA, 19 nt, Artificial Sequence
  Description of Artificial Sequence: Synthetic oligonucleotide
  Antisense strand to SEQ ID NO: 1186274
uuaucucugagaaaucuga

SEQ ID NO: 1186276 - RNA, 19 nt, Artificial Sequence
  Description of Artificial Sequence: Synthetic oligonucleotide
  Sense strand starting at position 3331 of SEQ ID NO: 916816
aggugucaucucugcugaa

SEQ ID NO: 1186277 - RNA, 19 nt, Artificial Sequence
  Description of Artificial Sequence: Synthetic oligonucleotide
  Antisense strand to SEQ ID NO: 1186276
uucagcagagaugacaccu

SEQ ID NO: 1186278 - RNA, 19 nt, Artificial Sequence
  Description of Artificial Sequence: Synthetic oligonucleotide
  Sense strand starting at position 3332 of SEQ ID NO: 916816
ggugucaucucugcugaau

SEQ ID NO: 1186279 - RNA, 19 nt, Artificial Sequence
  Description of Artificial Sequence: Synthetic oligonucleotide
  Antisense strand to SEQ ID NO: 1186278
auucagcagagaugacacc

SEQ ID NO: 1186280 - RNA, 19 nt, Artificial Sequence
  Description of Artificial Sequence: Synthetic oligonucleotide
  Sense strand starting at position 3335 of SEQ ID NO: 916816
gucaucucugcugaaucuu

SEQ ID NO: 1186281 - RNA, 19 nt, Artificial Sequence
  Description of Artificial Sequence: Synthetic oligonucleotide
  Antisense strand to SEQ ID NO: 1186280
aagauucagcagagaugac

SEQ ID NO: 1186282 - RNA, 19 nt, Artificial Sequence
  Description of Artificial Sequence: Synthetic oligonucleotide
  Sense strand starting at position 3448 of SEQ ID NO: 916816
ucuugcgacuucuuaaagu

SEQ ID NO: 1186283 - RNA, 19 nt, Artificial Sequence
  Description of Artificial Sequence: Synthetic oligonucleotide
  Antisense strand to SEQ ID NO: 1186282
acuuuaagaagucgcaaga

SEQ ID NO: 1186284 - RNA, 19 nt, Artificial Sequence
  Description of Artificial Sequence: Synthetic oligonucleotide
  Sense strand starting at position 3464 of SEQ ID NO: 916816
agugaaagccggugucaac

SEQ ID NO: 1186285 - RNA, 19 nt, Artificial Sequence
  Description of Artificial Sequence: Synthetic oligonucleotide
  Antisense strand to SEQ ID NO: 1186284
guugacaccggcuuucacu

SEQ ID NO: 1186286 - RNA, 19 nt, Artificial Sequence
  Description of Artificial Sequence: Synthetic oligonucleotide
  Sense strand starting at position 3471 of SEQ ID NO: 916816
gccggugucaaccaggauu

SEQ ID NO: 1186287 - RNA, 19 nt, Artificial Sequence
  Description of Artificial Sequence: Synthetic oligonucleotide
  Antisense strand to SEQ ID NO: 1186286
aauccugguugacaccggc

SEQ ID NO: 1186288 - RNA, 19 nt, Artificial Sequence
  Description of Artificial Sequence: Synthetic oligonucleotide
  Sense strand starting at position 3513 of SEQ ID NO: 916816
cuugauacugcucaugaua

SEQ ID NO: 1186289 - RNA, 19 nt, Artificial Sequence
  Description of Artificial Sequence: Synthetic oligonucleotide
  Antisense strand to SEQ ID NO: 1186288
uaucaugagcaguaucaag

SEQ ID NO: 1186290 - RNA, 19 nt, Artificial Sequence
  Description of Artificial Sequence: Synthetic oligonucleotide
  Sense strand starting at position 3743 of SEQ ID NO: 916816
ggugcaccuggaugugaaa

SEQ ID NO: 1186291 - RNA, 19 nt, Artificial Sequence
  Description of Artificial Sequence: Synthetic oligonucleotide
  Antisense strand to SEQ ID NO: 1186290
uuucacauccaggugcacc

SEQ ID NO: 1186292 - RNA, 19 nt, Artificial Sequence
  Description of Artificial Sequence: Synthetic oligonucleotide
  Sense strand starting at position 3823 of SEQ ID NO: 916816
ggguuaucuccuuggcucu

SEQ ID NO: 1186293 - RNA, 19 nt, Artificial Sequence
  Description of Artificial Sequence: Synthetic oligonucleotide
  Antisense strand to SEQ ID NO: 1186292
agagccaaggagauaaccc

SEQ ID NO: 1186294 - RNA, 19 nt, Artificial Sequence
  Description of Artificial Sequence: Synthetic oligonucleotide
  Sense strand starting at position 3829 of SEQ ID NO: 916816
ucuccuuggcucugugaaa

SEQ ID NO: 1186295 - RNA, 19 nt, Artificial Sequence
  Description of Artificial Sequence: Synthetic oligonucleotide
  Antisense strand to SEQ ID NO: 1186294
uuucacagagccaaggaga

SEQ ID NO: 1186296 - RNA, 19 nt, Artificial Sequence
  Description of Artificial Sequence: Synthetic oligonucleotide
  Sense strand starting at position 3912 of SEQ ID NO: 916816
ugagccagguccuuacauu

SEQ ID NO: 1186297 - RNA, 19 nt, Artificial Sequence
  Description of Artificial Sequence: Synthetic oligonucleotide
  Antisense strand to SEQ ID NO: 1186296
aauguaaggaccuggcuca

SEQ ID NO: 1186298 - RNA, 19 nt, Artificial Sequence
  Description of Artificial Sequence: Synthetic oligonucleotide
  Sense strand starting at position 268 of SEQ ID NO: 916817
gagucagagccgggaguuu

SEQ ID NO: 1186299 - RNA, 19 nt, Artificial Sequence
  Description of Artificial Sequence: Synthetic oligonucleotide
  Antisense strand to SEQ ID NO: 1186298
aaacucccggcucugacuc

SEQ ID NO: 1186300 - RNA, 19 nt, Artificial Sequence
  Description of Artificial Sequence: Synthetic oligonucleotide
  Sense strand starting at position 411 of SEQ ID NO: 916817
gggcaaagaucugaacaag

SEQ ID NO: 1186301 - RNA, 19 nt, Artificial Sequence
  Description of Artificial Sequence: Synthetic oligonucleotide
  Antisense strand to SEQ ID NO: 1186300
cuuguucagaucuuugccc

SEQ ID NO: 1186302 - RNA, 19 nt, Artificial Sequence
  Description of Artificial Sequence: Synthetic oligonucleotide
  Sense strand starting at position 432 of SEQ ID NO: 916817
gaaggauccugagcccaca

SEQ ID NO: 1186303 - RNA, 19 nt, Artificial Sequence
  Description of Artificial Sequence: Synthetic oligonucleotide
  Antisense strand to SEQ ID NO: 1186302
ugugggcucaggauccuuc

SEQ ID NO: 1186304 - RNA, 19 nt, Artificial Sequence
  Description of Artificial Sequence: Synthetic oligonucleotide
  Sense strand starting at position 786 of SEQ ID NO: 916817
agaagaggucucugcaggu

SEQ ID NO: 1186305 - RNA, 19 nt, Artificial Sequence
  Description of Artificial Sequence: Synthetic oligonucleotide
  Antisense strand to SEQ ID NO: 1186304
accugcagagaccucuucu

SEQ ID NO: 1186306 - RNA, 19 nt, Artificial Sequence
  Description of Artificial Sequence: Synthetic oligonucleotide
  Sense strand starting at position 1029 of SEQ ID NO: 916817
cacagaguugcaggaaugu

SEQ ID NO: 1186307 - RNA, 19 nt, Artificial Sequence
  Description of Artificial Sequence: Synthetic oligonucleotide
  Antisense strand to SEQ ID NO: 1186306
acauuccugcaacucugug

SEQ ID NO: 1186308 - RNA, 19 nt, Artificial Sequence
  Description of Artificial Sequence: Synthetic oligonucleotide
  Sense strand starting at position 1209 of SEQ ID NO: 916817
ggaggagaaauucguugau

SEQ ID NO: 1186309 - RNA, 19 nt, Artificial Sequence
  Description of Artificial Sequence: Synthetic oligonucleotide
  Antisense strand to SEQ ID NO: 1186308
aucaacgaauuucuccucc

SEQ ID NO: 1186310 - RNA, 19 nt, Artificial Sequence
  Description of Artificial Sequence: Synthetic oligonucleotide
  Sense strand starting at position 1212 of SEQ ID NO: 916817
ggagaaauucguugauggg

SEQ ID NO: 1186311 - RNA, 19 nt, Artificial Sequence
  Description of Artificial Sequence: Synthetic oligonucleotide
  Antisense strand to SEQ ID NO: 1186310
cccaucaacgaauuucucc

SEQ ID NO: 1186312 - RNA, 19 nt, Artificial Sequence
  Description of Artificial Sequence: Synthetic oligonucleotide
  Sense strand starting at position 1218 of SEQ ID NO: 916817
auucguugaugggcuauau

SEQ ID NO: 1186313 - RNA, 19 nt, Artificial Sequence
  Description of Artificial Sequence: Synthetic oligonucleotide
  Antisense strand to SEQ ID NO: 1186312
auauagcccaucaacgaau

SEQ ID NO: 1186314 - RNA, 19 nt, Artificial Sequence
  Description of Artificial Sequence: Synthetic oligonucleotide
  Sense strand starting at position 1504 of SEQ ID NO: 916817
cagccugagcauugauaca

SEQ ID NO: 1186315 - RNA, 19 nt, Artificial Sequence
  Description of Artificial Sequence: Synthetic oligonucleotide
  Antisense strand to SEQ ID NO: 1186314
uguaucaaugcucaggcug

SEQ ID NO: 1186316 - RNA, 19 nt, Artificial Sequence
  Description of Artificial Sequence: Synthetic oligonucleotide
  Sense strand starting at position 1532 of SEQ ID NO: 916817
aggagauaggccugcaaua

SEQ ID NO: 1186317 - RNA, 19 nt, Artificial Sequence
  Description of Artificial Sequence: Synthetic oligonucleotide
  Antisense strand to SEQ ID NO: 1186316
uauugcaggccuaucuccu

SEQ ID NO: 1186318 - RNA, 19 nt, Artificial Sequence
  Description of Artificial Sequence: Synthetic oligonucleotide
  Sense strand starting at position 1534 of SEQ ID NO: 916817
gagauaggccugcaauaca

SEQ ID NO: 1186319 - RNA, 19 nt, Artificial Sequence
  Description of Artificial Sequence: Synthetic oligonucleotide
  Antisense strand to SEQ ID NO: 1186318
uguauugcaggccuaucuc

SEQ ID NO: 1186320 - RNA, 19 nt, Artificial Sequence
  Description of Artificial Sequence: Synthetic oligonucleotide
  Sense strand starting at position 1556 of SEQ ID NO: 916817
agauaagguuucuauuugu

SEQ ID NO: 1186321 - RNA, 19 nt, Artificial Sequence
  Description of Artificial Sequence: Synthetic oligonucleotide
  Antisense strand to SEQ ID NO: 1186320
acaaauagaaaccuuaucu

SEQ ID NO: 1186322 - RNA, 19 nt, Artificial Sequence
  Description of Artificial Sequence: Synthetic oligonucleotide
  Sense strand starting at position 1614 of SEQ ID NO: 916817
aagugcagaucucagauuu

SEQ ID NO: 1186323 - RNA, 19 nt, Artificial Sequence
  Description of Artificial Sequence: Synthetic oligonucleotide
  Antisense strand to SEQ ID NO: 1186322
aaaucugagaucugcacuu

SEQ ID NO: 1186324 - RNA, 19 nt, Artificial Sequence
  Description of Artificial Sequence: Synthetic oligonucleotide
  Sense strand starting at position 1625 of SEQ ID NO: 916817
ucagauuucucagagauaa

SEQ ID NO: 1186325 - RNA, 19 nt, Artificial Sequence
  Description of Artificial Sequence: Synthetic oligonucleotide
  Antisense strand to SEQ ID NO: 1186324
uuaucucugagaaaucuga

SEQ ID NO: 1186326 - RNA, 19 nt, Artificial Sequence
  Description of Artificial Sequence: Synthetic oligonucleotide
  Sense strand starting at position 1713 of SEQ ID NO: 916817
aggugucaucucugcugaa

SEQ ID NO: 1186327 - RNA, 19 nt, Artificial Sequence
  Description of Artificial Sequence: Synthetic oligonucleotide
  Antisense strand to SEQ ID NO: 1186326
uucagcagagaugacaccu

SEQ ID NO: 1186328 - RNA, 19 nt, Artificial Sequence
  Description of Artificial Sequence: Synthetic oligonucleotide
  Sense strand starting at position 1717 of SEQ ID NO: 916817
gucaucucugcugaaucuu

SEQ ID NO: 1186329 - RNA, 19 nt, Artificial Sequence
  Description of Artificial Sequence: Synthetic oligonucleotide
  Antisense strand to SEQ ID NO: 1186328
aagauucagcagagaugac

SEQ ID NO: 1186330 - RNA, 19 nt, Artificial Sequence
  Description of Artificial Sequence: Synthetic oligonucleotide
  Sense strand starting at position 1853 of SEQ ID NO: 916817
gccggugucaaccaggauu

SEQ ID NO: 1186331 - RNA, 19 nt, Artificial Sequence
  Description of Artificial Sequence: Synthetic oligonucleotide
  Antisense strand to SEQ ID NO: 1186330
aauccugguugacaccggc

SEQ ID NO: 1186332 - RNA, 19 nt, Artificial Sequence
  Description of Artificial Sequence: Synthetic oligonucleotide
  Sense strand starting at position 1895 of SEQ ID NO: 916817
cuugauacugcucaugaua

SEQ ID NO: 1186333 - RNA, 19 nt, Artificial Sequence
  Description of Artificial Sequence: Synthetic oligonucleotide
  Antisense strand to SEQ ID NO: 1186332
uaucaugagcaguaucaag

SEQ ID NO: 1186334 - RNA, 19 nt, Artificial Sequence
  Description of Artificial Sequence: Synthetic oligonucleotide
  Sense strand starting at position 2125 of SEQ ID NO: 916817
ggugcaccuggaugugaaa

SEQ ID NO: 1186335 - RNA, 19 nt, Artificial Sequence
  Description of Artificial Sequence: Synthetic oligonucleotide
  Antisense strand to SEQ ID NO: 1186334
uuucacauccaggugcacc

SEQ ID NO: 1186336 - RNA, 19 nt, Artificial Sequence
  Description of Artificial Sequence: Synthetic oligonucleotide
  Sense strand starting at position 2211 of SEQ ID NO: 916817
ucuccuuggcucugugaaa

SEQ ID NO: 1186337 - RNA, 19 nt, Artificial Sequence
  Description of Artificial Sequence: Synthetic oligonucleotide
  Antisense strand to SEQ ID NO: 1186336
uuucacagagccaaggaga

SEQ ID NO: 1186338 - RNA, 19 nt, Artificial Sequence
  Description of Artificial Sequence: Synthetic oligonucleotide
  Sense strand starting at position 2294 of SEQ ID NO: 916817
ugagccagguccuuacauu

SEQ ID NO: 1186339 - RNA, 19 nt, Artificial Sequence
  Description of Artificial Sequence: Synthetic oligonucleotide
  Antisense strand to SEQ ID NO: 1186338
aauguaaggaccuggcuca

SEQ ID NO: 1186340 - RNA, 19 nt, Artificial Sequence
  Description of Artificial Sequence: Synthetic oligonucleotide
  Sense strand starting at position 2403 of SEQ ID NO: 916817
ccagcucaugccugaaauc

SEQ ID NO: 1186341 - RNA, 19 nt, Artificial Sequence
  Description of Artificial Sequence: Synthetic oligonucleotide
  Antisense strand to SEQ ID NO: 1186340
gauuucaggcaugagcugg

SEQ ID NO: 1186342 - RNA, 19 nt, Artificial Sequence
  Description of Artificial Sequence: Synthetic oligonucleotide
  Sense strand starting at position 2460 of SEQ ID NO: 916817
uaucaagggcucugugaga

SEQ ID NO: 1186343 - RNA, 19 nt, Artificial Sequence
  Description of Artificial Sequence: Synthetic oligonucleotide
  Antisense strand to SEQ ID NO: 1186342
ucucacagagcccuugaua

SEQ ID NO: 1186344 - RNA, 19 nt, Artificial Sequence
  Description of Artificial Sequence: Synthetic oligonucleotide
  Sense strand starting at position 2537 of SEQ ID NO: 916817
cggguaugggaguggcaau

SEQ ID NO: 1186345 - RNA, 19 nt, Artificial Sequence
  Description of Artificial Sequence: Synthetic oligonucleotide
  Antisense strand to SEQ ID NO: 1186344
auugccacucccauacccg

SEQ ID NO: 1186346 - RNA, 19 nt, Artificial Sequence
  Description of Artificial Sequence: Synthetic oligonucleotide
  Sense strand starting at position 2637 of SEQ ID NO: 916817
cuggacuuuggucagaagu

SEQ ID NO: 1186347 - RNA, 19 nt, Artificial Sequence
  Description of Artificial Sequence: Synthetic oligonucleotide
  Antisense strand to SEQ ID NO: 1186346
acuucugaccaaaguccag

SEQ ID NO: 1186348 - RNA, 19 nt, Artificial Sequence
  Description of Artificial Sequence: Synthetic oligonucleotide
  Sense strand starting at position 2798 of SEQ ID NO: 916817
uuguauaucugucuauauc

SEQ ID NO: 1186349 - RNA, 19 nt, Artificial Sequence
  Description of Artificial Sequence: Synthetic oligonucleotide
  Antisense strand to SEQ ID NO: 1186348
gauauagacagauauacaa

SEQ ID NO: 1186350 - RNA, 19 nt, Artificial Sequence
  Description of Artificial Sequence: Synthetic oligonucleotide
  Sense strand starting at position 2885 of SEQ ID NO: 916817
gagaccaugcuauagguau

SEQ ID NO: 1186351 - RNA, 19 nt, Artificial Sequence
  Description of Artificial Sequence: Synthetic oligonucleotide
  Antisense strand to SEQ ID NO: 1186350
auaccuauagcauggucuc

SEQ ID NO: 1186352 - RNA, 19 nt, Artificial Sequence
  Description of Artificial Sequence: Synthetic oligonucleotide
  Sense strand starting at position 2896 of SEQ ID NO: 916817
auagguauguuucuacaac

SEQ ID NO: 1186353 - RNA, 19 nt, Artificial Sequence
  Description of Artificial Sequence: Synthetic oligonucleotide
  Antisense strand to SEQ ID NO: 1186352
guuguagaaacauaccuau

SEQ ID NO: 1186354 - RNA, 19 nt, Artificial Sequence
  Description of Artificial Sequence: Synthetic oligonucleotide
  Sense strand starting at position 3154 of SEQ ID NO: 916817
cggugaucuuaccugagaa

SEQ ID NO: 1186355 - RNA, 19 nt, Artificial Sequence
  Description of Artificial Sequence: Synthetic oligonucleotide
  Antisense strand to SEQ ID NO: 1186354
uucucagguaagaucaccg

SEQ ID NO: 1186356 - RNA, 19 nt, Artificial Sequence
  Description of Artificial Sequence: Synthetic oligonucleotide
  Sense strand starting at position 3155 of SEQ ID NO: 916817
ggugaucuuaccugagaaa

SEQ ID NO: 1186357 - RNA, 19 nt, Artificial Sequence
  Description of Artificial Sequence: Synthetic oligonucleotide
  Antisense strand to SEQ ID NO: 1186356
uuucucagguaagaucacc

SEQ ID NO: 1186358 - RNA, 19 nt, Artificial Sequence
  Description of Artificial Sequence: Synthetic oligonucleotide
  Sense strand starting at position 3301 of SEQ ID NO: 916817
cacagucacccaggaguua

SEQ ID NO: 1186359 - RNA, 19 nt, Artificial Sequence
  Description of Artificial Sequence: Synthetic oligonucleotide
  Antisense strand to SEQ ID NO: 1186358
uaacuccugggugacugug

SEQ ID NO: 1186360 - RNA, 19 nt, Artificial Sequence
  Description of Artificial Sequence: Synthetic oligonucleotide
  Sense strand starting at position 3371 of SEQ ID NO: 916817
cuucucugacuuugagaga

SEQ ID NO: 1186361 - RNA, 19 nt, Artificial Sequence
  Description of Artificial Sequence: Synthetic oligonucleotide
  Antisense strand to SEQ ID NO: 1186360
ucucucaaagucagagaag

SEQ ID NO: 1186362 - RNA, 19 nt, Artificial Sequence
  Description of Artificial Sequence: Synthetic oligonucleotide
  Sense strand starting at position 3412 of SEQ ID NO: 916817
agucaagagcuuuguagac

SEQ ID NO: 1186363 - RNA, 19 nt, Artificial Sequence
  Description of Artificial Sequence: Synthetic oligonucleotide
  Antisense strand to SEQ ID NO: 1186362
gucuacaaagcucuugacu

SEQ ID NO: 1186364 - RNA, 19 nt, Artificial Sequence
  Description of Artificial Sequence: Synthetic oligonucleotide
  Sense strand starting at position 3424 of SEQ ID NO: 916817
uguagacucugucuuggaa

SEQ ID NO: 1186365 - RNA, 19 nt, Artificial Sequence
  Description of Artificial Sequence: Synthetic oligonucleotide
  Antisense strand to SEQ ID NO: 1186364
uuccaagacagagucuaca

SEQ ID NO: 1186366 - RNA, 19 nt, Artificial Sequence
  Description of Artificial Sequence: Synthetic oligonucleotide
  Sense strand starting at position 3617 of SEQ ID NO: 916817
gaggguuaugagugcaaag

SEQ ID NO: 1186367 - RNA, 19 nt, Artificial Sequence
  Description of Artificial Sequence: Synthetic oligonucleotide
  Antisense strand to SEQ ID NO: 1186366
cuuugcacucauaacccuc

SEQ ID NO: 1186368 - RNA, 19 nt, Artificial Sequence
  Description of Artificial Sequence: Synthetic oligonucleotide
  Sense strand starting at position 3620 of SEQ ID NO: 916817
gguuaugagugcaaagggu

SEQ ID NO: 1186369 - RNA, 19 nt, Artificial Sequence
  Description of Artificial Sequence: Synthetic oligonucleotide
  Antisense strand to SEQ ID NO: 1186368
acccuuugcacucauaacc

SEQ ID NO: 1186370 - RNA, 19 nt, Artificial Sequence
  Description of Artificial Sequence: Synthetic oligonucleotide
  Sense strand starting at position 3828 of SEQ ID NO: 916817
agagaccaggcguauucau

SEQ ID NO: 1186371 - RNA, 19 nt, Artificial Sequence
  Description of Artificial Sequence: Synthetic oligonucleotide
  Antisense strand to SEQ ID NO: 1186370
augaauacgccuggucucu

SEQ ID NO: 1186372 - RNA, 19 nt, Artificial Sequence
  Description of Artificial Sequence: Synthetic oligonucleotide
  Sense strand starting at position 3912 of SEQ ID NO: 916817
gcgucuuuccuaguuuauc

SEQ ID NO: 1186373 - RNA, 19 nt, Artificial Sequence
  Description of Artificial Sequence: Synthetic oligonucleotide
  Antisense strand to SEQ ID NO: 1186372
gauaaacuaggaaagacgc

SEQ ID NO: 1186374 - RNA, 19 nt, Artificial Sequence
  Description of Artificial Sequence: Synthetic oligonucleotide
  Sense strand starting at position 3920 of SEQ ID NO: 916817
ccuaguuuaucuuugacag

SEQ ID NO: 1186375 - RNA, 19 nt, Artificial Sequence
  Description of Artificial Sequence: Synthetic oligonucleotide
  Antisense strand to SEQ ID NO: 1186374
cugucaaagauaaacuagg

SEQ ID NO: 1186376 - RNA, 19 nt, Artificial Sequence
  Description of Artificial Sequence: Synthetic oligonucleotide
  Sense strand starting at position 3921 of SEQ ID NO: 916817
cuaguuuaucuuugacaga

SEQ ID NO: 1186377 - RNA, 19 nt, Artificial Sequence
  Description of Artificial Sequence: Synthetic oligonucleotide
  Antisense strand to SEQ ID NO: 1186376
ucugucaaagauaaacuag

SEQ ID NO: 1186378 - RNA, 19 nt, Artificial Sequence
  Description of Artificial Sequence: Synthetic oligonucleotide
  Sense strand starting at position 89 of SEQ ID NO: 916818
uuugcacuccuugaaggua

SEQ ID NO: 1186379 - RNA, 19 nt, Artificial Sequence
  Description of Artificial Sequence: Synthetic oligonucleotide
  Antisense strand to SEQ ID NO: 1186378
uaccuucaaggagugcaaa

SEQ ID NO: 1186380 - RNA, 19 nt, Artificial Sequence
  Description of Artificial Sequence: Synthetic oligonucleotide
  Sense strand starting at position 157 of SEQ ID NO: 916818
ggcuuauaugccugucucu

SEQ ID NO: 1186381 - RNA, 19 nt, Artificial Sequence
  Description of Artificial Sequence: Synthetic oligonucleotide
  Antisense strand to SEQ ID NO: 1186380
agagacaggcauauaagcc

SEQ ID NO: 1186382 - RNA, 19 nt, Artificial Sequence
  Description of Artificial Sequence: Synthetic oligonucleotide
  Sense strand starting at position 169 of SEQ ID NO: 916818
ugucucugcuaucuuauuu

SEQ ID NO: 1186383 - RNA, 19 nt, Artificial Sequence
  Description of Artificial Sequence: Synthetic oligonucleotide
  Antisense strand to SEQ ID NO: 1186382
aaauaagauagcagagaca

SEQ ID NO: 1186384 - RNA, 19 nt, Artificial Sequence
  Description of Artificial Sequence: Synthetic oligonucleotide
  Sense strand starting at position 292 of SEQ ID NO: 916818
gcagguguucccaaggugu

SEQ ID NO: 1186385 - RNA, 19 nt, Artificial Sequence
  Description of Artificial Sequence: Synthetic oligonucleotide
  Antisense strand to SEQ ID NO: 1186384
acaccuugggaacaccugc

SEQ ID NO: 1186386 - RNA, 19 nt, Artificial Sequence
  Description of Artificial Sequence: Synthetic oligonucleotide
  Sense strand starting at position 309 of SEQ ID NO: 916818
guggcauggcugagugaau

SEQ ID NO: 1186387 - RNA, 19 nt, Artificial Sequence
  Description of Artificial Sequence: Synthetic oligonucleotide
  Antisense strand to SEQ ID NO: 1186386
auucacucagccaugccac

SEQ ID NO: 1186388 - RNA, 19 nt, Artificial Sequence
  Description of Artificial Sequence: Synthetic oligonucleotide
  Sense strand starting at position 310 of SEQ ID NO: 916818
uggcauggcugagugaaua

SEQ ID NO: 1186389 - RNA, 19 nt, Artificial Sequence
  Description of Artificial Sequence: Synthetic oligonucleotide
  Antisense strand to SEQ ID NO: 1186388
uauucacucagccaugcca

SEQ ID NO: 1186390 - RNA, 19 nt, Artificial Sequence
  Description of Artificial Sequence: Synthetic oligonucleotide
  Sense strand starting at position 558 of SEQ ID NO: 916818
ccauucuccuuguucugua

SEQ ID NO: 1186391 - RNA, 19 nt, Artificial Sequence
  Description of Artificial Sequence: Synthetic oligonucleotide
  Antisense strand to SEQ ID NO: 1186390
uacagaacaaggagaaugg

SEQ ID NO: 1186392 - RNA, 19 nt, Artificial Sequence
  Description of Artificial Sequence: Synthetic oligonucleotide
  Sense strand starting at position 766 of SEQ ID NO: 916818
gucuuauacuuugcuggca

SEQ ID NO: 1186393 - RNA, 19 nt, Artificial Sequence
  Description of Artificial Sequence: Synthetic oligonucleotide
  Antisense strand to SEQ ID NO: 1186392
ugccagcaaaguauaagac

SEQ ID NO: 1186394 - RNA, 19 nt, Artificial Sequence
  Description of Artificial Sequence: Synthetic oligonucleotide
  Sense strand starting at position 779 of SEQ ID NO: 916818
cuggcaucuugcuccagaa

SEQ ID NO: 1186395 - RNA, 19 nt, Artificial Sequence
  Description of Artificial Sequence: Synthetic oligonucleotide
  Antisense strand to SEQ ID NO: 1186394
uucuggagcaagaugccag

SEQ ID NO: 1186396 - RNA, 19 nt, Artificial Sequence
  Description of Artificial Sequence: Synthetic oligonucleotide
  Sense strand starting at position 899 of SEQ ID NO: 916818
gggcaaugcugcuccaaca

SEQ ID NO: 1186397 - RNA, 19 nt, Artificial Sequence
  Description of Artificial Sequence: Synthetic oligonucleotide
  Antisense strand to SEQ ID NO: 1186396
uguuggagcagcauugccc

SEQ ID NO: 1186398 - RNA, 19 nt, Artificial Sequence
  Description of Artificial Sequence: Synthetic oligonucleotide
  Sense strand starting at position 1009 of SEQ ID NO: 916818
gugagcucuaccugggaca

SEQ ID NO: 1186399 - RNA, 19 nt, Artificial Sequence
  Description of Artificial Sequence: Synthetic oligonucleotide
  Antisense strand to SEQ ID NO: 1186398
ugucccagguagagcucac

SEQ ID NO: 1186400 - RNA, 19 nt, Artificial Sequence
  Description of Artificial Sequence: Synthetic oligonucleotide
  Sense strand starting at position 1148 of SEQ ID NO: 916818
agggauugagggugcagau

SEQ ID NO: 1186401 - RNA, 19 nt, Artificial Sequence
  Description of Artificial Sequence: Synthetic oligonucleotide
  Antisense strand to SEQ ID NO: 1186400
aucugcacccucaaucccu

SEQ ID NO: 1186402 - RNA, 19 nt, Artificial Sequence
  Description of Artificial Sequence: Synthetic oligonucleotide
  Sense strand starting at position 1181 of SEQ ID NO: 916818
agacgagcuuguccgaguu

SEQ ID NO: 1186403 - RNA, 19 nt, Artificial Sequence
  Description of Artificial Sequence: Synthetic oligonucleotide
  Antisense strand to SEQ ID NO: 1186402
aacucggacaagcucgucu

SEQ ID NO: 1186404 - RNA, 19 nt, Artificial Sequence
  Description of Artificial Sequence: Synthetic oligonucleotide
  Sense strand starting at position 1184 of SEQ ID NO: 916818
cgagcuuguccgaguugag

SEQ ID NO: 1186405 - RNA, 19 nt, Artificial Sequence
  Description of Artificial Sequence: Synthetic oligonucleotide
  Antisense strand to SEQ ID NO: 1186404
cucaacucggacaagcucg

SEQ ID NO: 1186406 - RNA, 19 nt, Artificial Sequence
  Description of Artificial Sequence: Synthetic oligonucleotide
  Sense strand starting at position 1187 of SEQ ID NO: 916818
gcuuguccgaguugagguu

SEQ ID NO: 1186407 - RNA, 19 nt, Artificial Sequence
  Description of Artificial Sequence: Synthetic oligonucleotide
  Antisense strand to SEQ ID NO: 1186406
aaccucaacucggacaagc

SEQ ID NO: 1186408 - RNA, 19 nt, Artificial Sequence
  Description of Artificial Sequence: Synthetic oligonucleotide
  Sense strand starting at position 1193 of SEQ ID NO: 916818
ccgaguugagguugauguu

SEQ ID NO: 1186409 - RNA, 19 nt, Artificial Sequence
  Description of Artificial Sequence: Synthetic oligonucleotide
  Antisense strand to SEQ ID NO: 1186408
aacaucaaccucaacucgg

SEQ ID NO: 1186410 - RNA, 19 nt, Artificial Sequence
  Description of Artificial Sequence: Synthetic oligonucleotide
  Sense strand starting at position 1252 of SEQ ID NO: 916818
ccgaauugccaguacauca

SEQ ID NO: 1186411 - RNA, 19 nt, Artificial Sequence
  Description of Artificial Sequence: Synthetic oligonucleotide
  Antisense strand to SEQ ID NO: 1186410
ugauguacuggcaauucgg

SEQ ID NO: 1186412 - RNA, 19 nt, Artificial Sequence
  Description of Artificial Sequence: Synthetic oligonucleotide
  Sense strand starting at position 1362 of SEQ ID NO: 916818
gguguuguugcagaagaac

SEQ ID NO: 1186413 - RNA, 19 nt, Artificial Sequence
  Description of Artificial Sequence: Synthetic oligonucleotide
  Antisense strand to SEQ ID NO: 1186412
guucuucugcaacaacacc

SEQ ID NO: 1186414 - RNA, 19 nt, Artificial Sequence
  Description of Artificial Sequence: Synthetic oligonucleotide
  Sense strand starting at position 1382 of SEQ ID NO: 916818
cgaagagcucucgguagga

SEQ ID NO: 1186415 - RNA, 19 nt, Artificial Sequence
  Description of Artificial Sequence: Synthetic oligonucleotide
  Antisense strand to SEQ ID NO: 1186414
uccuaccgagagcucuucg

SEQ ID NO: 1186416 - RNA, 19 nt, Artificial Sequence
  Description of Artificial Sequence: Synthetic oligonucleotide
  Sense strand starting at position 2401 of SEQ ID NO: 916818
gagucagagccgggaguuu

SEQ ID NO: 1186417 - RNA, 19 nt, Artificial Sequence
  Description of Artificial Sequence: Synthetic oligonucleotide
  Antisense strand to SEQ ID NO: 1186416
aaacucccggcucugacuc

SEQ ID NO: 1186418 - RNA, 19 nt, Artificial Sequence
  Description of Artificial Sequence: Synthetic oligonucleotide
  Sense strand starting at position 2544 of SEQ ID NO: 916818
gggcaaagaucugaacaag

SEQ ID NO: 1186419 - RNA, 19 nt, Artificial Sequence
  Description of Artificial Sequence: Synthetic oligonucleotide
  Antisense strand to SEQ ID NO: 1186418
cuuguucagaucuuugccc

SEQ ID NO: 1186420 - RNA, 19 nt, Artificial Sequence
  Description of Artificial Sequence: Synthetic oligonucleotide
  Sense strand starting at position 2565 of SEQ ID NO: 916818
gaaggauccugagcccaca

SEQ ID NO: 1186421 - RNA, 19 nt, Artificial Sequence
  Description of Artificial Sequence: Synthetic oligonucleotide
  Antisense strand to SEQ ID NO: 1186420
ugugggcucaggauccuuc

SEQ ID NO: 1186422 - RNA, 19 nt, Artificial Sequence
  Description of Artificial Sequence: Synthetic oligonucleotide
  Sense strand starting at position 2817 of SEQ ID NO: 916818
gggagucccaagugugcuu

SEQ ID NO: 1186423 - RNA, 19 nt, Artificial Sequence
  Description of Artificial Sequence: Synthetic oligonucleotide
  Antisense strand to SEQ ID NO: 1186422
aagcacacuugggacuccc

SEQ ID NO: 1186424 - RNA, 19 nt, Artificial Sequence
  Description of Artificial Sequence: Synthetic oligonucleotide
  Sense strand starting at position 2919 of SEQ ID NO: 916818
agaagaggucucugcaggu

SEQ ID NO: 1186425 - RNA, 19 nt, Artificial Sequence
  Description of Artificial Sequence: Synthetic oligonucleotide
  Antisense strand to SEQ ID NO: 1186424
accugcagagaccucuucu

SEQ ID NO: 1186426 - RNA, 19 nt, Artificial Sequence
  Description of Artificial Sequence: Synthetic oligonucleotide
  Sense strand starting at position 3162 of SEQ ID NO: 916818
cacagaguugcaggaaugu

SEQ ID NO: 1186427 - RNA, 19 nt, Artificial Sequence
  Description of Artificial Sequence: Synthetic oligonucleotide
  Antisense strand to SEQ ID NO: 1186426
acauuccugcaacucugug

SEQ ID NO: 1186428 - RNA, 19 nt, Artificial Sequence
  Description of Artificial Sequence: Synthetic oligonucleotide
  Sense strand starting at position 3342 of SEQ ID NO: 916818
ggaggagaaauucguugau

SEQ ID NO: 1186429 - RNA, 19 nt, Artificial Sequence
  Description of Artificial Sequence: Synthetic oligonucleotide
  Antisense strand to SEQ ID NO: 1186428
aucaacgaauuucuccucc

SEQ ID NO: 1186430 - RNA, 19 nt, Artificial Sequence
  Description of Artificial Sequence: Synthetic oligonucleotide
  Sense strand starting at position 3345 of SEQ ID NO: 916818
ggagaaauucguugauggg

SEQ ID NO: 1186431 - RNA, 19 nt, Artificial Sequence
  Description of Artificial Sequence: Synthetic oligonucleotide
  Antisense strand to SEQ ID NO: 1186430
cccaucaacgaauuucucc

SEQ ID NO: 1186432 - RNA, 19 nt, Artificial Sequence
  Description of Artificial Sequence: Synthetic oligonucleotide
  Sense strand starting at position 3351 of SEQ ID NO: 916818
auucguugaugggcuauau

SEQ ID NO: 1186433 - RNA, 19 nt, Artificial Sequence
  Description of Artificial Sequence: Synthetic oligonucleotide
  Antisense strand to SEQ ID NO: 1186432
auauagcccaucaacgaau

SEQ ID NO: 1186434 - RNA, 19 nt, Artificial Sequence
  Description of Artificial Sequence: Synthetic oligonucleotide
  Sense strand starting at position 3637 of SEQ ID NO: 916818
cagccugagcauugauaca

SEQ ID NO: 1186435 - RNA, 19 nt, Artificial Sequence
  Description of Artificial Sequence: Synthetic oligonucleotide
  Antisense strand to SEQ ID NO: 1186434
uguaucaaugcucaggcug

SEQ ID NO: 1186436 - RNA, 19 nt, Artificial Sequence
  Description of Artificial Sequence: Synthetic oligonucleotide
  Sense strand starting at position 3665 of SEQ ID NO: 916818
aggagauaggccugcaaua

SEQ ID NO: 1186437 - RNA, 19 nt, Artificial Sequence
  Description of Artificial Sequence: Synthetic oligonucleotide
  Antisense strand to SEQ ID NO: 1186436
uauugcaggccuaucuccu

SEQ ID NO: 1186438 - RNA, 19 nt, Artificial Sequence
  Description of Artificial Sequence: Synthetic oligonucleotide
  Sense strand starting at position 3667 of SEQ ID NO: 916818
gagauaggccugcaauaca

SEQ ID NO: 1186439 - RNA, 19 nt, Artificial Sequence
  Description of Artificial Sequence: Synthetic oligonucleotide
  Antisense strand to SEQ ID NO: 1186438
uguauugcaggccuaucuc

SEQ ID NO: 1186440 - RNA, 19 nt, Artificial Sequence
  Description of Artificial Sequence: Synthetic oligonucleotide
  Sense strand starting at position 3689 of SEQ ID NO: 916818
agauaagguuucuauuugu

SEQ ID NO: 1186441 - RNA, 19 nt, Artificial Sequence
  Description of Artificial Sequence: Synthetic oligonucleotide
  Antisense strand to SEQ ID NO: 1186440
acaaauagaaaccuuaucu

SEQ ID NO: 1186442 - RNA, 19 nt, Artificial Sequence
  Description of Artificial Sequence: Synthetic oligonucleotide
  Sense strand starting at position 3695 of SEQ ID NO: 916818
gguuucuauuuguacacuu

SEQ ID NO: 1186443 - RNA, 19 nt, Artificial Sequence
  Description of Artificial Sequence: Synthetic oligonucleotide
  Antisense strand to SEQ ID NO: 1186442
aaguguacaaauagaaacc

SEQ ID NO: 1186444 - RNA, 19 nt, Artificial Sequence
  Description of Artificial Sequence: Synthetic oligonucleotide
  Sense strand starting at position 3747 of SEQ ID NO: 916818
aagugcagaucucagauuu

SEQ ID NO: 1186445 - RNA, 19 nt, Artificial Sequence
  Description of Artificial Sequence: Synthetic oligonucleotide
  Antisense strand to SEQ ID NO: 1186444
aaaucugagaucugcacuu

SEQ ID NO: 1186446 - RNA, 19 nt, Artificial Sequence
  Description of Artificial Sequence: Synthetic oligonucleotide
  Sense strand starting at position 3758 of SEQ ID NO: 916818
ucagauuucucagagauaa

SEQ ID NO: 1186447 - RNA, 19 nt, Artificial Sequence
  Description of Artificial Sequence: Synthetic oligonucleotide
  Antisense strand to SEQ ID NO: 1186446
uuaucucugagaaaucuga

SEQ ID NO: 1186448 - RNA, 19 nt, Artificial Sequence
  Description of Artificial Sequence: Synthetic oligonucleotide
  Sense strand starting at position 3846 of SEQ ID NO: 916818
aggugucaucucugcugaa

SEQ ID NO: 1186449 - RNA, 19 nt, Artificial Sequence
  Description of Artificial Sequence: Synthetic oligonucleotide
  Antisense strand to SEQ ID NO: 1186448
uucagcagagaugacaccu

SEQ ID NO: 1186450 - RNA, 19 nt, Artificial Sequence
  Description of Artificial Sequence: Synthetic oligonucleotide
  Sense strand starting at position 3847 of SEQ ID NO: 916818
ggugucaucucugcugaau

SEQ ID NO: 1186451 - RNA, 19 nt, Artificial Sequence
  Description of Artificial Sequence: Synthetic oligonucleotide
  Antisense strand to SEQ ID NO: 1186450
auucagcagagaugacacc

SEQ ID NO: 1186452 - RNA, 19 nt, Artificial Sequence
  Description of Artificial Sequence: Synthetic oligonucleotide
  Sense strand starting at position 3850 of SEQ ID NO: 916818
gucaucucugcugaaucuu

SEQ ID NO: 1186453 - RNA, 19 nt, Artificial Sequence
  Description of Artificial Sequence: Synthetic oligonucleotide
  Antisense strand to SEQ ID NO: 1186452
aagauucagcagagaugac

SEQ ID NO: 1186454 - RNA, 19 nt, Artificial Sequence
  Description of Artificial Sequence: Synthetic oligonucleotide
  Sense strand starting at position 3963 of SEQ ID NO: 916818
ucuugcgacuucuuaaagu

SEQ ID NO: 1186455 - RNA, 19 nt, Artificial Sequence
  Description of Artificial Sequence: Synthetic oligonucleotide
  Antisense strand to SEQ ID NO: 1186454
acuuuaagaagucgcaaga

SEQ ID NO: 1186456 - RNA, 19 nt, Artificial Sequence
  Description of Artificial Sequence: Synthetic oligonucleotide
  Sense strand starting at position 3979 of SEQ ID NO: 916818
agugaaagccggugucaac

SEQ ID NO: 1186457 - RNA, 19 nt, Artificial Sequence
  Description of Artificial Sequence: Synthetic oligonucleotide
  Antisense strand to SEQ ID NO: 1186456
guugacaccggcuuucacu

SEQ ID NO: 1186458 - RNA, 19 nt, Artificial Sequence
  Description of Artificial Sequence: Synthetic oligonucleotide
  Sense strand starting at position 154 of SEQ ID NO: 916819
cuagcuauaccucaaguga

SEQ ID NO: 1186459 - RNA, 19 nt, Artificial Sequence
  Description of Artificial Sequence: Synthetic oligonucleotide
  Antisense strand to SEQ ID NO: 1186458
ucacuugagguauagcuag

SEQ ID NO: 1186460 - RNA, 19 nt, Artificial Sequence
  Description of Artificial Sequence: Synthetic oligonucleotide
  Sense strand starting at position 369 of SEQ ID NO: 916819
aggagaauguauucuaauc

SEQ ID NO: 1186461 - RNA, 19 nt, Artificial Sequence
  Description of Artificial Sequence: Synthetic oligonucleotide
  Antisense strand to SEQ ID NO: 1186460
gauuagaauacauucuccu

SEQ ID NO: 1186462 - RNA, 19 nt, Artificial Sequence
  Description of Artificial Sequence: Synthetic oligonucleotide
  Sense strand starting at position 388 of SEQ ID NO: 916819
aggaaagucuucccugaag

SEQ ID NO: 1186463 - RNA, 19 nt, Artificial Sequence
  Description of Artificial Sequence: Synthetic oligonucleotide
  Antisense strand to SEQ ID NO: 1186462
cuucagggaagacuuuccu

SEQ ID NO: 1186464 - RNA, 19 nt, Artificial Sequence
  Description of Artificial Sequence: Synthetic oligonucleotide
  Sense strand starting at position 390 of SEQ ID NO: 916819
gaaagucuucccugaagug

SEQ ID NO: 1186465 - RNA, 19 nt, Artificial Sequence
  Description of Artificial Sequence: Synthetic oligonucleotide
  Antisense strand to SEQ ID NO: 1186464
cacuucagggaagacuuuc

SEQ ID NO: 1186466 - RNA, 19 nt, Artificial Sequence
  Description of Artificial Sequence: Synthetic oligonucleotide
  Sense strand starting at position 391 of SEQ ID NO: 916819
aaagucuucccugaaguga

SEQ ID NO: 1186467 - RNA, 19 nt, Artificial Sequence
  Description of Artificial Sequence: Synthetic oligonucleotide
  Antisense strand to SEQ ID NO: 1186466
ucacuucagggaagacuuu

SEQ ID NO: 1186468 - RNA, 19 nt, Artificial Sequence
  Description of Artificial Sequence: Synthetic oligonucleotide
  Sense strand starting at position 400 of SEQ ID NO: 916819
ccugaagugagcugaauga

SEQ ID NO: 1186469 - RNA, 19 nt, Artificial Sequence
  Description of Artificial Sequence: Synthetic oligonucleotide
  Antisense strand to SEQ ID NO: 1186468
ucauucagcucacuucagg

SEQ ID NO: 1186470 - RNA, 19 nt, Artificial Sequence
  Description of Artificial Sequence: Synthetic oligonucleotide
  Sense strand starting at position 404 of SEQ ID NO: 916819
aagugagcugaaugaugaa

SEQ ID NO: 1186471 - RNA, 19 nt, Artificial Sequence
  Description of Artificial Sequence: Synthetic oligonucleotide
  Antisense strand to SEQ ID NO: 1186470
uucaucauucagcucacuu

SEQ ID NO: 1186472 - RNA, 19 nt, Artificial Sequence
  Description of Artificial Sequence: Synthetic oligonucleotide
  Sense strand starting at position 637 of SEQ ID NO: 916819
gugagaagccacugaaaga

SEQ ID NO: 1186473 - RNA, 19 nt, Artificial Sequence
  Description of Artificial Sequence: Synthetic oligonucleotide
  Antisense strand to SEQ ID NO: 1186472
ucuuucaguggcuucucac

SEQ ID NO: 1186474 - RNA, 19 nt, Artificial Sequence
  Description of Artificial Sequence: Synthetic oligonucleotide
  Sense strand starting at position 674 of SEQ ID NO: 916819
uguuauuaggucugcauuu

SEQ ID NO: 1186475 - RNA, 19 nt, Artificial Sequence
  Description of Artificial Sequence: Synthetic oligonucleotide
  Antisense strand to SEQ ID NO: 1186474
aaaugcagaccuaauaaca

SEQ ID NO: 1186476 - RNA, 19 nt, Artificial Sequence
  Description of Artificial Sequence: Synthetic oligonucleotide
  Sense strand starting at position 880 of SEQ ID NO: 916819
augagaggcugaguaugaa

SEQ ID NO: 1186477 - RNA, 19 nt, Artificial Sequence
  Description of Artificial Sequence: Synthetic oligonucleotide
  Antisense strand to SEQ ID NO: 1186476
uucauacucagccucucau

SEQ ID NO: 1186478 - RNA, 19 nt, Artificial Sequence
  Description of Artificial Sequence: Synthetic oligonucleotide
  Sense strand starting at position 1037 of SEQ ID NO: 916819
augugaauaugaguaguua

SEQ ID NO: 1186479 - RNA, 19 nt, Artificial Sequence
  Description of Artificial Sequence: Synthetic oligonucleotide
  Antisense strand to SEQ ID NO: 1186478
uaacuacucauauucacau

SEQ ID NO: 1186480 - RNA, 19 nt, Artificial Sequence
  Description of Artificial Sequence: Synthetic oligonucleotide
  Sense strand starting at position 1038 of SEQ ID NO: 916819
ugugaauaugaguaguuau

SEQ ID NO: 1186481 - RNA, 19 nt, Artificial Sequence
  Description of Artificial Sequence: Synthetic oligonucleotide
  Antisense strand to SEQ ID NO: 1186480
auaacuacucauauucaca

SEQ ID NO: 1186482 - RNA, 19 nt, Artificial Sequence
  Description of Artificial Sequence: Synthetic oligonucleotide
  Sense strand starting at position 1051 of SEQ ID NO: 916819
aguuauucccaguaacagg

SEQ ID NO: 1186483 - RNA, 19 nt, Artificial Sequence
  Description of Artificial Sequence: Synthetic oligonucleotide
  Antisense strand to SEQ ID NO: 1186482
ccuguuacugggaauaacu

SEQ ID NO: 1186484 - RNA, 19 nt, Artificial Sequence
  Description of Artificial Sequence: Synthetic oligonucleotide
  Sense strand starting at position 1066 of SEQ ID NO: 916819
caggguugaucugucuaga

SEQ ID NO: 1186485 - RNA, 19 nt, Artificial Sequence
  Description of Artificial Sequence: Synthetic oligonucleotide
  Antisense strand to SEQ ID NO: 1186484
ucuagacagaucaacccug

SEQ ID NO: 1186486 - RNA, 19 nt, Artificial Sequence
  Description of Artificial Sequence: Synthetic oligonucleotide
  Sense strand starting at position 1069 of SEQ ID NO: 916819
gguugaucugucuagaaag

SEQ ID NO: 1186487 - RNA, 19 nt, Artificial Sequence
  Description of Artificial Sequence: Synthetic oligonucleotide
  Antisense strand to SEQ ID NO: 1186486
cuuucuagacagaucaacc

SEQ ID NO: 1186488 - RNA, 19 nt, Artificial Sequence
  Description of Artificial Sequence: Synthetic oligonucleotide
  Sense strand starting at position 1071 of SEQ ID NO: 916819
uugaucugucuagaaagua

SEQ ID NO: 1186489 - RNA, 19 nt, Artificial Sequence
  Description of Artificial Sequence: Synthetic oligonucleotide
  Antisense strand to SEQ ID NO: 1186488
uacuuucuagacagaucaa

SEQ ID NO: 1186490 - RNA, 19 nt, Artificial Sequence
  Description of Artificial Sequence: Synthetic oligonucleotide
  Sense strand starting at position 1105 of SEQ ID NO: 916819
guacaaugugccuguauuu

SEQ ID NO: 1186491 - RNA, 19 nt, Artificial Sequence
  Description of Artificial Sequence: Synthetic oligonucleotide
  Antisense strand to SEQ ID NO: 1186490
aaauacaggcacauuguac

SEQ ID NO: 1186492 - RNA, 19 nt, Artificial Sequence
  Description of Artificial Sequence: Synthetic oligonucleotide
  Sense strand starting at position 1136 of SEQ ID NO: 916819
auuuaugaaucuuagagac

SEQ ID NO: 1186493 - RNA, 19 nt, Artificial Sequence
  Description of Artificial Sequence: Synthetic oligonucleotide
  Antisense strand to SEQ ID NO: 1186492
gucucuaagauucauaaau

SEQ ID NO: 1186494 - RNA, 19 nt, Artificial Sequence
  Description of Artificial Sequence: Synthetic oligonucleotide
  Sense strand starting at position 1567 of SEQ ID NO: 916819
cugaguuugacguacuaaa

SEQ ID NO: 1186495 - RNA, 19 nt, Artificial Sequence
  Description of Artificial Sequence: Synthetic oligonucleotide
  Antisense strand to SEQ ID NO: 1186494
uuuaguacgucaaacucag

SEQ ID NO: 1186496 - RNA, 19 nt, Artificial Sequence
  Description of Artificial Sequence: Synthetic oligonucleotide
  Sense strand starting at position 1667 of SEQ ID NO: 916819
gaggguggauuugauaaua

SEQ ID NO: 1186497 - RNA, 19 nt, Artificial Sequence
  Description of Artificial Sequence: Synthetic oligonucleotide
  Antisense strand to SEQ ID NO: 1186496
uauuaucaaauccacccuc

SEQ ID NO: 1186498 - RNA, 19 nt, Artificial Sequence
  Description of Artificial Sequence: Synthetic oligonucleotide
  Sense strand starting at position 3119 of SEQ ID NO: 916819
ugcaaauucugauugagga

SEQ ID NO: 1186499 - RNA, 19 nt, Artificial Sequence
  Description of Artificial Sequence: Synthetic oligonucleotide
  Antisense strand to SEQ ID NO: 1186498
uccucaaucagaauuugca

SEQ ID NO: 1186500 - RNA, 19 nt, Artificial Sequence
  Description of Artificial Sequence: Synthetic oligonucleotide
  Sense strand starting at position 3120 of SEQ ID NO: 916819
gcaaauucugauugaggag

SEQ ID NO: 1186501 - RNA, 19 nt, Artificial Sequence
  Description of Artificial Sequence: Synthetic oligonucleotide
  Antisense strand to SEQ ID NO: 1186500
cuccucaaucagaauuugc

SEQ ID NO: 1186502 - RNA, 19 nt, Artificial Sequence
  Description of Artificial Sequence: Synthetic oligonucleotide
  Sense strand starting at position 3134 of SEQ ID NO: 916819
aggaguagggucugauaau

SEQ ID NO: 1186503 - RNA, 19 nt, Artificial Sequence
  Description of Artificial Sequence: Synthetic oligonucleotide
  Antisense strand to SEQ ID NO: 1186502
auuaucagacccuacuccu

SEQ ID NO: 1186504 - RNA, 19 nt, Artificial Sequence
  Description of Artificial Sequence: Synthetic oligonucleotide
  Sense strand starting at position 3163 of SEQ ID NO: 916819
aauacauguccagauggca

SEQ ID NO: 1186505 - RNA, 19 nt, Artificial Sequence
  Description of Artificial Sequence: Synthetic oligonucleotide
  Antisense strand to SEQ ID NO: 1186504
ugccaucuggacauguauu

SEQ ID NO: 1186506 - RNA, 19 nt, Artificial Sequence
  Description of Artificial Sequence: Synthetic oligonucleotide
  Sense strand starting at position 3227 of SEQ ID NO: 916819
aauguacuagagggcaaau

SEQ ID NO: 1186507 - RNA, 19 nt, Artificial Sequence
  Description of Artificial Sequence: Synthetic oligonucleotide
  Antisense strand to SEQ ID NO: 1186506
auuugcccucuaguacauu

SEQ ID NO: 1186508 - RNA, 19 nt, Artificial Sequence
  Description of Artificial Sequence: Synthetic oligonucleotide
  Sense strand starting at position 3239 of SEQ ID NO: 916819
ggcaaauuccuugagcuag

SEQ ID NO: 1186509 - RNA, 19 nt, Artificial Sequence
  Description of Artificial Sequence: Synthetic oligonucleotide
  Antisense strand to SEQ ID NO: 1186508
cuagcucaaggaauuugcc

SEQ ID NO: 1186510 - RNA, 19 nt, Artificial Sequence
  Description of Artificial Sequence: Synthetic oligonucleotide
  Sense strand starting at position 3247 of SEQ ID NO: 916819
ccuugagcuagaggaguua

SEQ ID NO: 1186511 - RNA, 19 nt, Artificial Sequence
  Description of Artificial Sequence: Synthetic oligonucleotide
  Antisense strand to SEQ ID NO: 1186510
uaacuccucuagcucaagg

SEQ ID NO: 1186512 - RNA, 19 nt, Artificial Sequence
  Description of Artificial Sequence: Synthetic oligonucleotide
  Sense strand starting at position 3278 of SEQ ID NO: 916819
agccuacuuguuuaaugaa

SEQ ID NO: 1186513 - RNA, 19 nt, Artificial Sequence
  Description of Artificial Sequence: Synthetic oligonucleotide
  Antisense strand to SEQ ID NO: 1186512
uucauuaaacaaguaggcu

SEQ ID NO: 1186514 - RNA, 19 nt, Artificial Sequence
  Description of Artificial Sequence: Synthetic oligonucleotide
  Sense strand starting at position 3285 of SEQ ID NO: 916819
uuguuuaaugaagguuaga

SEQ ID NO: 1186515 - RNA, 19 nt, Artificial Sequence
  Description of Artificial Sequence: Synthetic oligonucleotide
  Antisense strand to SEQ ID NO: 1186514
ucuaaccuucauuaaacaa

SEQ ID NO: 1186516 - RNA, 19 nt, Artificial Sequence
  Description of Artificial Sequence: Synthetic oligonucleotide
  Sense strand starting at position 3304 of SEQ ID NO: 916819
gagguagacugucuaugga

SEQ ID NO: 1186517 - RNA, 19 nt, Artificial Sequence
  Description of Artificial Sequence: Synthetic oligonucleotide
  Antisense strand to SEQ ID NO: 1186516
uccauagacagucuaccuc

SEQ ID NO: 1186518 - RNA, 19 nt, Artificial Sequence
  Description of Artificial Sequence: Synthetic oligonucleotide
  Sense strand starting at position 3452 of SEQ ID NO: 916819
gagugauuagacggguaac

SEQ ID NO: 1186519 - RNA, 19 nt, Artificial Sequence
  Description of Artificial Sequence: Synthetic oligonucleotide
  Antisense strand to SEQ ID NO: 1186518
guuacccgucuaaucacuc

SEQ ID NO: 1186520 - RNA, 19 nt, Artificial Sequence
  Description of Artificial Sequence: Synthetic oligonucleotide
  Sense strand starting at position 3453 of SEQ ID NO: 916819
agugauuagacggguaacu

SEQ ID NO: 1186521 - RNA, 19 nt, Artificial Sequence
  Description of Artificial Sequence: Synthetic oligonucleotide
  Antisense strand to SEQ ID NO: 1186520
aguuacccgucuaaucacu

SEQ ID NO: 1186522 - RNA, 19 nt, Artificial Sequence
  Description of Artificial Sequence: Synthetic oligonucleotide
  Sense strand starting at position 3455 of SEQ ID NO: 916819
ugauuagacggguaacuuc

SEQ ID NO: 1186523 - RNA, 19 nt, Artificial Sequence
  Description of Artificial Sequence: Synthetic oligonucleotide
  Antisense strand to SEQ ID NO: 1186522
gaaguuacccgucuaauca

SEQ ID NO: 1186524 - RNA, 19 nt, Artificial Sequence
  Description of Artificial Sequence: Synthetic oligonucleotide
  Sense strand starting at position 3555 of SEQ ID NO: 916819
gcgguuaugcauaguugga

SEQ ID NO: 1186525 - RNA, 19 nt, Artificial Sequence
  Description of Artificial Sequence: Synthetic oligonucleotide
  Antisense strand to SEQ ID NO: 1186524
uccaacuaugcauaaccgc

SEQ ID NO: 1186526 - RNA, 19 nt, Artificial Sequence
  Description of Artificial Sequence: Synthetic oligonucleotide
  Sense strand starting at position 3733 of SEQ ID NO: 916819
gaagaaugacugcgaacua

SEQ ID NO: 1186527 - RNA, 19 nt, Artificial Sequence
  Description of Artificial Sequence: Synthetic oligonucleotide
  Antisense strand to SEQ ID NO: 1186526
uaguucgcagucauucuuc

SEQ ID NO: 1186528 - RNA, 19 nt, Artificial Sequence
  Description of Artificial Sequence: Synthetic oligonucleotide
  Sense strand starting at position 3740 of SEQ ID NO: 916819
gacugcgaacuauagguuu

SEQ ID NO: 1186529 - RNA, 19 nt, Artificial Sequence
  Description of Artificial Sequence: Synthetic oligonucleotide
  Antisense strand to SEQ ID NO: 1186528
aaaccuauaguucgcaguc

SEQ ID NO: 1186530 - RNA, 19 nt, Artificial Sequence
  Description of Artificial Sequence: Synthetic oligonucleotide
  Sense strand starting at position 3754 of SEQ ID NO: 916819
gguuucuuuguggaaugau

SEQ ID NO: 1186531 - RNA, 19 nt, Artificial Sequence
  Description of Artificial Sequence: Synthetic oligonucleotide
  Antisense strand to SEQ ID NO: 1186530
aucauuccacaaagaaacc

SEQ ID NO: 1186532 - RNA, 19 nt, Artificial Sequence
  Description of Artificial Sequence: Synthetic oligonucleotide
  Sense strand starting at position 3770 of SEQ ID NO: 916819
gaugcaauggucugaaauu

SEQ ID NO: 1186533 - RNA, 19 nt, Artificial Sequence
  Description of Artificial Sequence: Synthetic oligonucleotide
  Antisense strand to SEQ ID NO: 1186532
aauuucagaccauugcauc

SEQ ID NO: 1186534 - RNA, 19 nt, Artificial Sequence
  Description of Artificial Sequence: Synthetic oligonucleotide
  Sense strand starting at position 3912 of SEQ ID NO: 916819
ugaaguuuauucuuccaga

SEQ ID NO: 1186535 - RNA, 19 nt, Artificial Sequence
  Description of Artificial Sequence: Synthetic oligonucleotide
  Antisense strand to SEQ ID NO: 1186534
ucuggaagaauaaacuuca

SEQ ID NO: 1186536 - RNA, 19 nt, Artificial Sequence
  Description of Artificial Sequence: Synthetic oligonucleotide
  Sense strand starting at position 3955 of SEQ ID NO: 916819
uuuacauagguugggaauu

SEQ ID NO: 1186537 - RNA, 19 nt, Artificial Sequence
  Description of Artificial Sequence: Synthetic oligonucleotide
  Antisense strand to SEQ ID NO: 1186536
aauucccaaccuauguaaa

SEQ ID NO: 1186538 - RNA, 19 nt, Artificial Sequence
  Description of Artificial Sequence: Synthetic oligonucleotide
  Sense strand starting at position 2 of SEQ ID NO: 916820
gacggauucuccucuacag

SEQ ID NO: 1186539 - RNA, 19 nt, Artificial Sequence
  Description of Artificial Sequence: Synthetic oligonucleotide
  Antisense strand to SEQ ID NO: 1186538
cuguagaggagaauccguc

SEQ ID NO: 1186540 - RNA, 19 nt, Artificial Sequence
  Description of Artificial Sequence: Synthetic oligonucleotide
  Sense strand starting at position 133 of SEQ ID NO: 916820
acaguuguguuauuuguua

SEQ ID NO: 1186541 - RNA, 19 nt, Artificial Sequence
  Description of Artificial Sequence: Synthetic oligonucleotide
  Antisense strand to SEQ ID NO: 1186540
uaacaaauaacacaacugu

SEQ ID NO: 1186542 - RNA, 19 nt, Artificial Sequence
  Description of Artificial Sequence: Synthetic oligonucleotide
  Sense strand starting at position 135 of SEQ ID NO: 916820
aguuguguuauuuguuaca

SEQ ID NO: 1186543 - RNA, 19 nt, Artificial Sequence
  Description of Artificial Sequence: Synthetic oligonucleotide
  Antisense strand to SEQ ID NO: 1186542
uguaacaaauaacacaacu

SEQ ID NO: 1186544 - RNA, 19 nt, Artificial Sequence
  Description of Artificial Sequence: Synthetic oligonucleotide
  Sense strand starting at position 174 of SEQ ID NO: 916820
ugcuaagugagguauuaag

SEQ ID NO: 1186545 - RNA, 19 nt, Artificial Sequence
  Description of Artificial Sequence: Synthetic oligonucleotide
  Antisense strand to SEQ ID NO: 1186544
cuuaauaccucacuuagca

SEQ ID NO: 1186546 - RNA, 19 nt, Artificial Sequence
  Description of Artificial Sequence: Synthetic oligonucleotide
  Sense strand starting at position 335 of SEQ ID NO: 916820
guacuaaggauguacagua

SEQ ID NO: 1186547 - RNA, 19 nt, Artificial Sequence
  Description of Artificial Sequence: Synthetic oligonucleotide
  Antisense strand to SEQ ID NO: 1186546
uacuguacauccuuaguac

SEQ ID NO: 1186548 - RNA, 19 nt, Artificial Sequence
  Description of Artificial Sequence: Synthetic oligonucleotide
  Sense strand starting at position 432 of SEQ ID NO: 916820
uuguacauugacuagugau

SEQ ID NO: 1186549 - RNA, 19 nt, Artificial Sequence
  Description of Artificial Sequence: Synthetic oligonucleotide
  Antisense strand to SEQ ID NO: 1186548
aucacuagucaauguacaa

SEQ ID NO: 1186550 - RNA, 19 nt, Artificial Sequence
  Description of Artificial Sequence: Synthetic oligonucleotide
  Sense strand starting at position 465 of SEQ ID NO: 916820
agaaucaagcagggaguua

SEQ ID NO: 1186551 - RNA, 19 nt, Artificial Sequence
  Description of Artificial Sequence: Synthetic oligonucleotide
  Antisense strand to SEQ ID NO: 1186550
uaacucccugcuugauucu

SEQ ID NO: 1186552 - RNA, 19 nt, Artificial Sequence
  Description of Artificial Sequence: Synthetic oligonucleotide
  Sense strand starting at position 476 of SEQ ID NO: 916820
gggaguuacugucuagauc

SEQ ID NO: 1186553 - RNA, 19 nt, Artificial Sequence
  Description of Artificial Sequence: Synthetic oligonucleotide
  Antisense strand to SEQ ID NO: 1186552
gaucuagacaguaacuccc

SEQ ID NO: 1186554 - RNA, 19 nt, Artificial Sequence
  Description of Artificial Sequence: Synthetic oligonucleotide
  Sense strand starting at position 539 of SEQ ID NO: 916820
cagacuaguuccuuuagga

SEQ ID NO: 1186555 - RNA, 19 nt, Artificial Sequence
  Description of Artificial Sequence: Synthetic oligonucleotide
  Antisense strand to SEQ ID NO: 1186554
uccuaaaggaacuagucug

SEQ ID NO: 1186556 - RNA, 19 nt, Artificial Sequence
  Description of Artificial Sequence: Synthetic oligonucleotide
  Sense strand starting at position 911 of SEQ ID NO: 916820
gaugguuaggacugcugaa

SEQ ID NO: 1186557 - RNA, 19 nt, Artificial Sequence
  Description of Artificial Sequence: Synthetic oligonucleotide
  Antisense strand to SEQ ID NO: 1186556
uucagcaguccuaaccauc

SEQ ID NO: 1186558 - RNA, 19 nt, Artificial Sequence
  Description of Artificial Sequence: Synthetic oligonucleotide
  Sense strand starting at position 1600 of SEQ ID NO: 916820
augcuuucgcucuugguga

SEQ ID NO: 1186559 - RNA, 19 nt, Artificial Sequence
  Description of Artificial Sequence: Synthetic oligonucleotide
  Antisense strand to SEQ ID NO: 1186558
ucaccaagagcgaaagcau

SEQ ID NO: 1186560 - RNA, 19 nt, Artificial Sequence
  Description of Artificial Sequence: Synthetic oligonucleotide
  Sense strand starting at position 1669 of SEQ ID NO: 916820
ugggaucccuccucaguga

SEQ ID NO: 1186561 - RNA, 19 nt, Artificial Sequence
  Description of Artificial Sequence: Synthetic oligonucleotide
  Antisense strand to SEQ ID NO: 1186560
ucacugaggagggauccca

SEQ ID NO: 1186562 - RNA, 19 nt, Artificial Sequence
  Description of Artificial Sequence: Synthetic oligonucleotide
  Sense strand starting at position 1772 of SEQ ID NO: 916820
agacguacuucucugagag

SEQ ID NO: 1186563 - RNA, 19 nt, Artificial Sequence
  Description of Artificial Sequence: Synthetic oligonucleotide
  Antisense strand to SEQ ID NO: 1186562
cucucagagaaguacgucu

SEQ ID NO: 1186564 - RNA, 19 nt, Artificial Sequence
  Description of Artificial Sequence: Synthetic oligonucleotide
  Sense strand starting at position 1813 of SEQ ID NO: 916820
uugaaccagcgauacauaa

SEQ ID NO: 1186565 - RNA, 19 nt, Artificial Sequence
  Description of Artificial Sequence: Synthetic oligonucleotide
  Antisense strand to SEQ ID NO: 1186564
uuauguaucgcugguucaa

SEQ ID NO: 1186566 - RNA, 19 nt, Artificial Sequence
  Description of Artificial Sequence: Synthetic oligonucleotide
  Sense strand starting at position 1826 of SEQ ID NO: 916820
acauaaaugagaggucugu

SEQ ID NO: 1186567 - RNA, 19 nt, Artificial Sequence
  Description of Artificial Sequence: Synthetic oligonucleotide
  Antisense strand to SEQ ID NO: 1186566
acagaccucucauuuaugu

SEQ ID NO: 1186568 - RNA, 19 nt, Artificial Sequence
  Description of Artificial Sequence: Synthetic oligonucleotide
  Sense strand starting at position 2311 of SEQ ID NO: 916820
uuuggucuccagggaucaa

SEQ ID NO: 1186569 - RNA, 19 nt, Artificial Sequence
  Description of Artificial Sequence: Synthetic oligonucleotide
  Antisense strand to SEQ ID NO: 1186568
uugaucccuggagaccaaa

SEQ ID NO: 1186570 - RNA, 19 nt, Artificial Sequence
  Description of Artificial Sequence: Synthetic oligonucleotide
  Sense strand starting at position 2331 of SEQ ID NO: 916820
aucauuugucgugagugca

SEQ ID NO: 1186571 - RNA, 19 nt, Artificial Sequence
  Description of Artificial Sequence: Synthetic oligonucleotide
  Antisense strand to SEQ ID NO: 1186570
ugcacucacgacaaaugau

SEQ ID NO: 1186572 - RNA, 19 nt, Artificial Sequence
  Description of Artificial Sequence: Synthetic oligonucleotide
  Sense strand starting at position 2339 of SEQ ID NO: 916820
ucgugagugcagguaugua

SEQ ID NO: 1186573 - RNA, 19 nt, Artificial Sequence
  Description of Artificial Sequence: Synthetic oligonucleotide
  Antisense strand to SEQ ID NO: 1186572
uacauaccugcacucacga

SEQ ID NO: 1186574 - RNA, 19 nt, Artificial Sequence
  Description of Artificial Sequence: Synthetic oligonucleotide
  Sense strand starting at position 2344 of SEQ ID NO: 916820
agugcagguauguaaauaa

SEQ ID NO: 1186575 - RNA, 19 nt, Artificial Sequence
  Description of Artificial Sequence: Synthetic oligonucleotide
  Antisense strand to SEQ ID NO: 1186574
uuauuuacauaccugcacu

SEQ ID NO: 1186576 - RNA, 19 nt, Artificial Sequence
  Description of Artificial Sequence: Synthetic oligonucleotide
  Sense strand starting at position 2474 of SEQ ID NO: 916820
ggaauucuuagguaagucu

SEQ ID NO: 1186577 - RNA, 19 nt, Artificial Sequence
  Description of Artificial Sequence: Synthetic oligonucleotide
  Antisense strand to SEQ ID NO: 1186576
agacuuaccuaagaauucc

SEQ ID NO: 1186578 - RNA, 19 nt, Artificial Sequence
  Description of Artificial Sequence: Synthetic oligonucleotide
  Sense strand starting at position 2482 of SEQ ID NO: 916820
uagguaagucuccaucaug

SEQ ID NO: 1186579 - RNA, 19 nt, Artificial Sequence
  Description of Artificial Sequence: Synthetic oligonucleotide
  Antisense strand to SEQ ID NO: 1186578
caugauggagacuuaccua

SEQ ID NO: 1186580 - RNA, 19 nt, Artificial Sequence
  Description of Artificial Sequence: Synthetic oligonucleotide
  Sense strand starting at position 2485 of SEQ ID NO: 916820
guaagucuccaucaugaga

SEQ ID NO: 1186581 - RNA, 19 nt, Artificial Sequence
  Description of Artificial Sequence: Synthetic oligonucleotide
  Antisense strand to SEQ ID NO: 1186580
ucucaugauggagacuuac

SEQ ID NO: 1186582 - RNA, 19 nt, Artificial Sequence
  Description of Artificial Sequence: Synthetic oligonucleotide
  Sense strand starting at position 2733 of SEQ ID NO: 916820
gagggaauugucugggcag

SEQ ID NO: 1186583 - RNA, 19 nt, Artificial Sequence
  Description of Artificial Sequence: Synthetic oligonucleotide
  Antisense strand to SEQ ID NO: 1186582
cugcccagacaauucccuc

SEQ ID NO: 1186584 - RNA, 19 nt, Artificial Sequence
  Description of Artificial Sequence: Synthetic oligonucleotide
  Sense strand starting at position 2735 of SEQ ID NO: 916820
gggaauugucugggcagag

SEQ ID NO: 1186585 - RNA, 19 nt, Artificial Sequence
  Description of Artificial Sequence: Synthetic oligonucleotide
  Antisense strand to SEQ ID NO: 1186584
cucugcccagacaauuccc

SEQ ID NO: 1186586 - RNA, 19 nt, Artificial Sequence
  Description of Artificial Sequence: Synthetic oligonucleotide
  Sense strand starting at position 2736 of SEQ ID NO: 916820
ggaauugucugggcagagg

SEQ ID NO: 1186587 - RNA, 19 nt, Artificial Sequence
  Description of Artificial Sequence: Synthetic oligonucleotide
  Antisense strand to SEQ ID NO: 1186586
ccucugcccagacaauucc

SEQ ID NO: 1186588 - RNA, 19 nt, Artificial Sequence
  Description of Artificial Sequence: Synthetic oligonucleotide
  Sense strand starting at position 2750 of SEQ ID NO: 916820
agaggccuugacuguaaga

SEQ ID NO: 1186589 - RNA, 19 nt, Artificial Sequence
  Description of Artificial Sequence: Synthetic oligonucleotide
  Antisense strand to SEQ ID NO: 1186588
ucuuacagucaaggccucu

SEQ ID NO: 1186590 - RNA, 19 nt, Artificial Sequence
  Description of Artificial Sequence: Synthetic oligonucleotide
  Sense strand starting at position 2867 of SEQ ID NO: 916820
gcaaauaauuuacagaaag

SEQ ID NO: 1186591 - RNA, 19 nt, Artificial Sequence
  Description of Artificial Sequence: Synthetic oligonucleotide
  Antisense strand to SEQ ID NO: 1186590
cuuucuguaaauuauuugc

SEQ ID NO: 1186592 - RNA, 19 nt, Artificial Sequence
  Description of Artificial Sequence: Synthetic oligonucleotide
  Sense strand starting at position 2996 of SEQ ID NO: 916820
gguucuuuggaucaacauc

SEQ ID NO: 1186593 - RNA, 19 nt, Artificial Sequence
  Description of Artificial Sequence: Synthetic oligonucleotide
  Antisense strand to SEQ ID NO: 1186592
gauguugauccaaagaacc

SEQ ID NO: 1186594 - RNA, 19 nt, Artificial Sequence
  Description of Artificial Sequence: Synthetic oligonucleotide
  Sense strand starting at position 3018 of SEQ ID NO: 916820
ggucaccauuccuugggau

SEQ ID NO: 1186595 - RNA, 19 nt, Artificial Sequence
  Description of Artificial Sequence: Synthetic oligonucleotide
  Antisense strand to SEQ ID NO: 1186594
aucccaaggaauggugacc

SEQ ID NO: 1186596 - RNA, 19 nt, Artificial Sequence
  Description of Artificial Sequence: Synthetic oligonucleotide
  Sense strand starting at position 3020 of SEQ ID NO: 916820
ucaccauuccuugggauga

SEQ ID NO: 1186597 - RNA, 19 nt, Artificial Sequence
  Description of Artificial Sequence: Synthetic oligonucleotide
  Antisense strand to SEQ ID NO: 1186596
ucaucccaaggaaugguga

SEQ ID NO: 1186598 - RNA, 19 nt, Artificial Sequence
  Description of Artificial Sequence: Synthetic oligonucleotide
  Sense strand starting at position 3070 of SEQ ID NO: 916820
gcgagucugacacagaaau

SEQ ID NO: 1186599 - RNA, 19 nt, Artificial Sequence
  Description of Artificial Sequence: Synthetic oligonucleotide
  Antisense strand to SEQ ID NO: 1186598
auuucugugucagacucgc

SEQ ID NO: 1186600 - RNA, 19 nt, Artificial Sequence
  Description of Artificial Sequence: Synthetic oligonucleotide
  Sense strand starting at position 3104 of SEQ ID NO: 916820
ucuagugugaagggacaaa

SEQ ID NO: 1186601 - RNA, 19 nt, Artificial Sequence
  Description of Artificial Sequence: Synthetic oligonucleotide
  Antisense strand to SEQ ID NO: 1186600
uuugucccuucacacuaga

SEQ ID NO: 1186602 - RNA, 19 nt, Artificial Sequence
  Description of Artificial Sequence: Synthetic oligonucleotide
  Sense strand starting at position 3121 of SEQ ID NO: 916820
aaggauguaucucugugau

SEQ ID NO: 1186603 - RNA, 19 nt, Artificial Sequence
  Description of Artificial Sequence: Synthetic oligonucleotide
  Antisense strand to SEQ ID NO: 1186602
aucacagagauacauccuu

SEQ ID NO: 1186604 - RNA, 19 nt, Artificial Sequence
  Description of Artificial Sequence: Synthetic oligonucleotide
  Sense strand starting at position 3164 of SEQ ID NO: 916820
cguggaaucacauaaagca

SEQ ID NO: 1186605 - RNA, 19 nt, Artificial Sequence
  Description of Artificial Sequence: Synthetic oligonucleotide
  Antisense strand to SEQ ID NO: 1186604
ugcuuuaugugauuccacg

SEQ ID NO: 1186606 - RNA, 19 nt, Artificial Sequence
  Description of Artificial Sequence: Synthetic oligonucleotide
  Sense strand starting at position 3182 of SEQ ID NO: 916820
aggugucacccugggaaag

SEQ ID NO: 1186607 - RNA, 19 nt, Artificial Sequence
  Description of Artificial Sequence: Synthetic oligonucleotide
  Antisense strand to SEQ ID NO: 1186606
cuuucccagggugacaccu

SEQ ID NO: 1186608 - RNA, 19 nt, Artificial Sequence
  Description of Artificial Sequence: Synthetic oligonucleotide
  Sense strand starting at position 3415 of SEQ ID NO: 916820
cagagaagucuuggcugaa

SEQ ID NO: 1186609 - RNA, 19 nt, Artificial Sequence
  Description of Artificial Sequence: Synthetic oligonucleotide
  Antisense strand to SEQ ID NO: 1186608
uucagccaagacuucucug

SEQ ID NO: 1186610 - RNA, 19 nt, Artificial Sequence
  Description of Artificial Sequence: Synthetic oligonucleotide
  Sense strand starting at position 3418 of SEQ ID NO: 916820
agaagucuuggcugaaaca

SEQ ID NO: 1186611 - RNA, 19 nt, Artificial Sequence
  Description of Artificial Sequence: Synthetic oligonucleotide
  Antisense strand to SEQ ID NO: 1186610
uguuucagccaagacuucu

SEQ ID NO: 1186612 - RNA, 19 nt, Artificial Sequence
  Description of Artificial Sequence: Synthetic oligonucleotide
  Sense strand starting at position 3514 of SEQ ID NO: 916820
aggaguugggucugacuua

SEQ ID NO: 1186613 - RNA, 19 nt, Artificial Sequence
  Description of Artificial Sequence: Synthetic oligonucleotide
  Antisense strand to SEQ ID NO: 1186612
uaagucagacccaacuccu

SEQ ID NO: 1186614 - RNA, 19 nt, Artificial Sequence
  Description of Artificial Sequence: Synthetic oligonucleotide
  Sense strand starting at position 3519 of SEQ ID NO: 916820
uugggucugacuuagcaua

SEQ ID NO: 1186615 - RNA, 19 nt, Artificial Sequence
  Description of Artificial Sequence: Synthetic oligonucleotide
  Antisense strand to SEQ ID NO: 1186614
uaugcuaagucagacccaa

SEQ ID NO: 1186616 - RNA, 19 nt, Artificial Sequence
  Description of Artificial Sequence: Synthetic oligonucleotide
  Sense strand starting at position 3521 of SEQ ID NO: 916820
gggucugacuuagcauaag

SEQ ID NO: 1186617 - RNA, 19 nt, Artificial Sequence
  Description of Artificial Sequence: Synthetic oligonucleotide
  Antisense strand to SEQ ID NO: 1186616
cuuaugcuaagucagaccc

SEQ ID NO: 1186618 - RNA, 19 nt, Artificial Sequence
  Description of Artificial Sequence: Synthetic oligonucleotide
  Sense strand starting at position 144 of SEQ ID NO: 916821
cagacaucccuuggucaga

SEQ ID NO: 1186619 - RNA, 19 nt, Artificial Sequence
  Description of Artificial Sequence: Synthetic oligonucleotide
  Antisense strand to SEQ ID NO: 1186618
ucugaccaagggaugucug

SEQ ID NO: 1186620 - RNA, 19 nt, Artificial Sequence
  Description of Artificial Sequence: Synthetic oligonucleotide
  Sense strand starting at position 291 of SEQ ID NO: 916821
uccgcuggaucucucgaau

SEQ ID NO: 1186621 - RNA, 19 nt, Artificial Sequence
  Description of Artificial Sequence: Synthetic oligonucleotide
  Antisense strand to SEQ ID NO: 1186620
auucgagagauccagcgga

SEQ ID NO: 1186622 - RNA, 19 nt, Artificial Sequence
  Description of Artificial Sequence: Synthetic oligonucleotide
  Sense strand starting at position 294 of SEQ ID NO: 916821
gcuggaucucucgaauaaa

SEQ ID NO: 1186623 - RNA, 19 nt, Artificial Sequence
  Description of Artificial Sequence: Synthetic oligonucleotide
  Antisense strand to SEQ ID NO: 1186622
uuuauucgagagauccagc

SEQ ID NO: 1186624 - RNA, 19 nt, Artificial Sequence
  Description of Artificial Sequence: Synthetic oligonucleotide
  Sense strand starting at position 349 of SEQ ID NO: 916821
cccaaaucggcaugaacuu

SEQ ID NO: 1186625 - RNA, 19 nt, Artificial Sequence
  Description of Artificial Sequence: Synthetic oligonucleotide
  Antisense strand to SEQ ID NO: 1186624
aaguucaugccgauuuggg

SEQ ID NO: 1186626 - RNA, 19 nt, Artificial Sequence
  Description of Artificial Sequence: Synthetic oligonucleotide
  Sense strand starting at position 845 of SEQ ID NO: 916821
augggaugccuucagguaa

SEQ ID NO: 1186627 - RNA, 19 nt, Artificial Sequence
  Description of Artificial Sequence: Synthetic oligonucleotide
  Antisense strand to SEQ ID NO: 1186626
uuaccugaaggcaucccau

SEQ ID NO: 1186628 - RNA, 19 nt, Artificial Sequence
  Description of Artificial Sequence: Synthetic oligonucleotide
  Sense strand starting at position 886 of SEQ ID NO: 916821
cggcuuuccgugaagugag

SEQ ID NO: 1186629 - RNA, 19 nt, Artificial Sequence
  Description of Artificial Sequence: Synthetic oligonucleotide
  Antisense strand to SEQ ID NO: 1186628
cucacuucacggaaagccg

SEQ ID NO: 1186630 - RNA, 19 nt, Artificial Sequence
  Description of Artificial Sequence: Synthetic oligonucleotide
  Sense strand starting at position 893 of SEQ ID NO: 916821
ccgugaagugagcauccau

SEQ ID NO: 1186631 - RNA, 19 nt, Artificial Sequence
  Description of Artificial Sequence: Synthetic oligonucleotide
  Antisense strand to SEQ ID NO: 1186630
auggaugcucacuucacgg

SEQ ID NO: 1186632 - RNA, 19 nt, Artificial Sequence
  Description of Artificial Sequence: Synthetic oligonucleotide
  Sense strand starting at position 1062 of SEQ ID NO: 916821
acaguaagugcucagucga

SEQ ID NO: 1186633 - RNA, 19 nt, Artificial Sequence
  Description of Artificial Sequence: Synthetic oligonucleotide
  Antisense strand to SEQ ID NO: 1186632
ucgacugagcacuuacugu

SEQ ID NO: 1186634 - RNA, 19 nt, Artificial Sequence
  Description of Artificial Sequence: Synthetic oligonucleotide
  Sense strand starting at position 1067 of SEQ ID NO: 916821
aagugcucagucgauauga

SEQ ID NO: 1186635 - RNA, 19 nt, Artificial Sequence
  Description of Artificial Sequence: Synthetic oligonucleotide
  Antisense strand to SEQ ID NO: 1186634
ucauaucgacugagcacuu

SEQ ID NO: 1186636 - RNA, 19 nt, Artificial Sequence
  Description of Artificial Sequence: Synthetic oligonucleotide
  Sense strand starting at position 1069 of SEQ ID NO: 916821
gugcucagucgauaugaac

SEQ ID NO: 1186637 - RNA, 19 nt, Artificial Sequence
  Description of Artificial Sequence: Synthetic oligonucleotide
  Antisense strand to SEQ ID NO: 1186636
guucauaucgacugagcac

SEQ ID NO: 1186638 - RNA, 19 nt, Artificial Sequence
  Description of Artificial Sequence: Synthetic oligonucleotide
  Sense strand starting at position 1076 of SEQ ID NO: 916821
gucgauaugaacuauuaug

SEQ ID NO: 1186639 - RNA, 19 nt, Artificial Sequence
  Description of Artificial Sequence: Synthetic oligonucleotide
  Antisense strand to SEQ ID NO: 1186638
cauaauaguucauaucgac

SEQ ID NO: 1186640 - RNA, 19 nt, Artificial Sequence
  Description of Artificial Sequence: Synthetic oligonucleotide
  Sense strand starting at position 1090 of SEQ ID NO: 916821
uuaugaaaucugggcugga

SEQ ID NO: 1186641 - RNA, 19 nt, Artificial Sequence
  Description of Artificial Sequence: Synthetic oligonucleotide
  Antisense strand to SEQ ID NO: 1186640
uccagcccagauuucauaa

SEQ ID NO: 1186642 - RNA, 19 nt, Artificial Sequence
  Description of Artificial Sequence: Synthetic oligonucleotide
  Sense strand starting at position 1212 of SEQ ID NO: 916821
acacaaacucaguguuuag

SEQ ID NO: 1186643 - RNA, 19 nt, Artificial Sequence
  Description of Artificial Sequence: Synthetic oligonucleotide
  Antisense strand to SEQ ID NO: 1186642
cuaaacacugaguuugugu

SEQ ID NO: 1186644 - RNA, 19 nt, Artificial Sequence
  Description of Artificial Sequence: Synthetic oligonucleotide
  Sense strand starting at position 1219 of SEQ ID NO: 916821
cucaguguuuaggcccaaa

SEQ ID NO: 1186645 - RNA, 19 nt, Artificial Sequence
  Description of Artificial Sequence: Synthetic oligonucleotide
  Antisense strand to SEQ ID NO: 1186644
uuugggccuaaacacugag

SEQ ID NO: 1186646 - RNA, 19 nt, Artificial Sequence
  Description of Artificial Sequence: Synthetic oligonucleotide
  Sense strand starting at position 1620 of SEQ ID NO: 916821
gagugagaccucugucuua

SEQ ID NO: 1186647 - RNA, 19 nt, Artificial Sequence
  Description of Artificial Sequence: Synthetic oligonucleotide
  Antisense strand to SEQ ID NO: 1186646
uaagacagaggucucacuc

SEQ ID NO: 1186648 - RNA, 19 nt, Artificial Sequence
  Description of Artificial Sequence: Synthetic oligonucleotide
  Sense strand starting at position 1782 of SEQ ID NO: 916821
uugacagacucuuucuaug

SEQ ID NO: 1186649 - RNA, 19 nt, Artificial Sequence
  Description of Artificial Sequence: Synthetic oligonucleotide
  Antisense strand to SEQ ID NO: 1186648
cauagaaagagucugucaa

SEQ ID NO: 1186650 - RNA, 19 nt, Artificial Sequence
  Description of Artificial Sequence: Synthetic oligonucleotide
  Sense strand starting at position 1978 of SEQ ID NO: 916821
gguggacagucuucugaau

SEQ ID NO: 1186651 - RNA, 19 nt, Artificial Sequence
  Description of Artificial Sequence: Synthetic oligonucleotide
  Antisense strand to SEQ ID NO: 1186650
auucagaagacuguccacc

SEQ ID NO: 1186652 - RNA, 19 nt, Artificial Sequence
  Description of Artificial Sequence: Synthetic oligonucleotide
  Sense strand starting at position 2020 of SEQ ID NO: 916821
gggcuuuauuccucuggca

SEQ ID NO: 1186653 - RNA, 19 nt, Artificial Sequence
  Description of Artificial Sequence: Synthetic oligonucleotide
  Antisense strand to SEQ ID NO: 1186652
ugccagaggaauaaagccc

SEQ ID NO: 1186654 - RNA, 19 nt, Artificial Sequence
  Description of Artificial Sequence: Synthetic oligonucleotide
  Sense strand starting at position 2141 of SEQ ID NO: 916821
gguggaaucuggccaagcu

SEQ ID NO: 1186655 - RNA, 19 nt, Artificial Sequence
  Description of Artificial Sequence: Synthetic oligonucleotide
  Antisense strand to SEQ ID NO: 1186654
agcuuggccagauuccacc

SEQ ID NO: 1186656 - RNA, 19 nt, Artificial Sequence
  Description of Artificial Sequence: Synthetic oligonucleotide
  Sense strand starting at position 2142 of SEQ ID NO: 916821
guggaaucuggccaagcuu

SEQ ID NO: 1186657 - RNA, 19 nt, Artificial Sequence
  Description of Artificial Sequence: Synthetic oligonucleotide
  Antisense strand to SEQ ID NO: 1186656
aagcuuggccagauuccac

SEQ ID NO: 1186658 - RNA, 19 nt, Artificial Sequence
  Description of Artificial Sequence: Synthetic oligonucleotide
  Sense strand starting at position 2231 of SEQ ID NO: 916821
guccucaguuucgugaaag

SEQ ID NO: 1186659 - RNA, 19 nt, Artificial Sequence
  Description of Artificial Sequence: Synthetic oligonucleotide
  Antisense strand to SEQ ID NO: 1186658
cuuucacgaaacugaggac

SEQ ID NO: 1186660 - RNA, 19 nt, Artificial Sequence
  Description of Artificial Sequence: Synthetic oligonucleotide
  Sense strand starting at position 2688 of SEQ ID NO: 916821
ccgauuuauugagaucaag

SEQ ID NO: 1186661 - RNA, 19 nt, Artificial Sequence
  Description of Artificial Sequence: Synthetic oligonucleotide
  Antisense strand to SEQ ID NO: 1186660
cuugaucucaauaaaucgg

SEQ ID NO: 1186662 - RNA, 19 nt, Artificial Sequence
  Description of Artificial Sequence: Synthetic oligonucleotide
  Sense strand starting at position 2831 of SEQ ID NO: 916821
uaaagucaucucuggagaa

SEQ ID NO: 1186663 - RNA, 19 nt, Artificial Sequence
  Description of Artificial Sequence: Synthetic oligonucleotide
  Antisense strand to SEQ ID NO: 1186662
uucuccagagaugacuuua

SEQ ID NO: 1186664 - RNA, 19 nt, Artificial Sequence
  Description of Artificial Sequence: Synthetic oligonucleotide
  Sense strand starting at position 2875 of SEQ ID NO: 916821
auucuuaacccuggcgaaa

SEQ ID NO: 1186665 - RNA, 19 nt, Artificial Sequence
  Description of Artificial Sequence: Synthetic oligonucleotide
  Antisense strand to SEQ ID NO: 1186664
uuucgccaggguuaagaau

SEQ ID NO: 1186666 - RNA, 19 nt, Artificial Sequence
  Description of Artificial Sequence: Synthetic oligonucleotide
  Sense strand starting at position 3303 of SEQ ID NO: 916821
gagcgaucuugauugcccu

SEQ ID NO: 1186667 - RNA, 19 nt, Artificial Sequence
  Description of Artificial Sequence: Synthetic oligonucleotide
  Antisense strand to SEQ ID NO: 1186666
agggcaaucaagaucgcuc

SEQ ID NO: 1186668 - RNA, 19 nt, Artificial Sequence
  Description of Artificial Sequence: Synthetic oligonucleotide
  Sense strand starting at position 3380 of SEQ ID NO: 916821
cucccacaauugguugaua

SEQ ID NO: 1186669 - RNA, 19 nt, Artificial Sequence
  Description of Artificial Sequence: Synthetic oligonucleotide
  Antisense strand to SEQ ID NO: 1186668
uaucaaccaauugugggag

SEQ ID NO: 1186670 - RNA, 19 nt, Artificial Sequence
  Description of Artificial Sequence: Synthetic oligonucleotide
  Sense strand starting at position 3381 of SEQ ID NO: 916821
ucccacaauugguugauau

SEQ ID NO: 1186671 - RNA, 19 nt, Artificial Sequence
  Description of Artificial Sequence: Synthetic oligonucleotide
  Antisense strand to SEQ ID NO: 1186670
auaucaaccaauuguggga

SEQ ID NO: 1186672 - RNA, 19 nt, Artificial Sequence
  Description of Artificial Sequence: Synthetic oligonucleotide
  Sense strand starting at position 3382 of SEQ ID NO: 916821
cccacaauugguugauauc

SEQ ID NO: 1186673 - RNA, 19 nt, Artificial Sequence
  Description of Artificial Sequence: Synthetic oligonucleotide
  Antisense strand to SEQ ID NO: 1186672
gauaucaaccaauuguggg

SEQ ID NO: 1186674 - RNA, 19 nt, Artificial Sequence
  Description of Artificial Sequence: Synthetic oligonucleotide
  Sense strand starting at position 3383 of SEQ ID NO: 916821
ccacaauugguugauaucu

SEQ ID NO: 1186675 - RNA, 19 nt, Artificial Sequence
  Description of Artificial Sequence: Synthetic oligonucleotide
  Antisense strand to SEQ ID NO: 1186674
agauaucaaccaauugugg

SEQ ID NO: 1186676 - RNA, 19 nt, Artificial Sequence
  Description of Artificial Sequence: Synthetic oligonucleotide
  Sense strand starting at position 3388 of SEQ ID NO: 916821
auugguugauaucuaagcu

SEQ ID NO: 1186677 - RNA, 19 nt, Artificial Sequence
  Description of Artificial Sequence: Synthetic oligonucleotide
  Antisense strand to SEQ ID NO: 1186676
agcuuagauaucaaccaau

SEQ ID NO: 1186678 - RNA, 19 nt, Artificial Sequence
  Description of Artificial Sequence: Synthetic oligonucleotide
  Sense strand starting at position 3392 of SEQ ID NO: 916821
guugauaucuaagcuugau

SEQ ID NO: 1186679 - RNA, 19 nt, Artificial Sequence
  Description of Artificial Sequence: Synthetic oligonucleotide
  Antisense strand to SEQ ID NO: 1186678
aucaagcuuagauaucaac

SEQ ID NO: 1186680 - RNA, 19 nt, Artificial Sequence
  Description of Artificial Sequence: Synthetic oligonucleotide
  Sense strand starting at position 3516 of SEQ ID NO: 916821
gcuuguguccggcagggaa

SEQ ID NO: 1186681 - RNA, 19 nt, Artificial Sequence
  Description of Artificial Sequence: Synthetic oligonucleotide
  Antisense strand to SEQ ID NO: 1186680
uucccugccggacacaagc

SEQ ID NO: 1186682 - RNA, 19 nt, Artificial Sequence
  Description of Artificial Sequence: Synthetic oligonucleotide
  Sense strand starting at position 3532 of SEQ ID NO: 916821
gaaggcaaguuugagauuu

SEQ ID NO: 1186683 - RNA, 19 nt, Artificial Sequence
  Description of Artificial Sequence: Synthetic oligonucleotide
  Antisense strand to SEQ ID NO: 1186682
aaaucucaaacuugccuuc

SEQ ID NO: 1186684 - RNA, 19 nt, Artificial Sequence
  Description of Artificial Sequence: Synthetic oligonucleotide
  Sense strand starting at position 3655 of SEQ ID NO: 916821
gcaguaaucguauaaauug

SEQ ID NO: 1186685 - RNA, 19 nt, Artificial Sequence
  Description of Artificial Sequence: Synthetic oligonucleotide
  Antisense strand to SEQ ID NO: 1186684
caauuuauacgauuacugc

SEQ ID NO: 1186686 - RNA, 19 nt, Artificial Sequence
  Description of Artificial Sequence: Synthetic oligonucleotide
  Sense strand starting at position 3662 of SEQ ID NO: 916821
ucguauaaauugcuugauu

SEQ ID NO: 1186687 - RNA, 19 nt, Artificial Sequence
  Description of Artificial Sequence: Synthetic oligonucleotide
  Antisense strand to SEQ ID NO: 1186686
aaucaagcaauuuauacga

SEQ ID NO: 1186688 - RNA, 19 nt, Artificial Sequence
  Description of Artificial Sequence: Synthetic oligonucleotide
  Sense strand starting at position 3663 of SEQ ID NO: 916821
cguauaaauugcuugauug

SEQ ID NO: 1186689 - RNA, 19 nt, Artificial Sequence
  Description of Artificial Sequence: Synthetic oligonucleotide
  Antisense strand to SEQ ID NO: 1186688
caaucaagcaauuuauacg

SEQ ID NO: 1186690 - RNA, 19 nt, Artificial Sequence
  Description of Artificial Sequence: Synthetic oligonucleotide
  Sense strand starting at position 3664 of SEQ ID NO: 916821
guauaaauugcuugauugu

SEQ ID NO: 1186691 - RNA, 19 nt, Artificial Sequence
  Description of Artificial Sequence: Synthetic oligonucleotide
  Antisense strand to SEQ ID NO: 1186690
acaaucaagcaauuuauac

SEQ ID NO: 1186692 - RNA, 19 nt, Artificial Sequence
  Description of Artificial Sequence: Synthetic oligonucleotide
  Sense strand starting at position 3794 of SEQ ID NO: 916821
ucauauuauggcgaacaag

SEQ ID NO: 1186693 - RNA, 19 nt, Artificial Sequence
  Description of Artificial Sequence: Synthetic oligonucleotide
  Antisense strand to SEQ ID NO: 1186692
cuuguucgccauaauauga

SEQ ID NO: 1186694 - RNA, 19 nt, Artificial Sequence
  Description of Artificial Sequence: Synthetic oligonucleotide
  Sense strand starting at position 3812 of SEQ ID NO: 916821
ggucucaugaauuggcuaa

SEQ ID NO: 1186695 - RNA, 19 nt, Artificial Sequence
  Description of Artificial Sequence: Synthetic oligonucleotide
  Antisense strand to SEQ ID NO: 1186694
uuagccaauucaugagacc

SEQ ID NO: 1186696 - RNA, 19 nt, Artificial Sequence
  Description of Artificial Sequence: Synthetic oligonucleotide
  Sense strand starting at position 3814 of SEQ ID NO: 916821
ucucaugaauuggcuaaau

SEQ ID NO: 1186697 - RNA, 19 nt, Artificial Sequence
  Description of Artificial Sequence: Synthetic oligonucleotide
  Antisense strand to SEQ ID NO: 1186696
auuuagccaauucaugaga

SEQ ID NO: 1186698 - RNA, 19 nt, Artificial Sequence
  Description of Artificial Sequence: Synthetic oligonucleotide
  Sense strand starting at position 455 of SEQ ID NO: 916822
gcaagaagagcguguacau

SEQ ID NO: 1186699 - RNA, 19 nt, Artificial Sequence
  Description of Artificial Sequence: Synthetic oligonucleotide
  Antisense strand to SEQ ID NO: 1186698
auguacacgcucuucuugc

SEQ ID NO: 1186700 - RNA, 19 nt, Artificial Sequence
  Description of Artificial Sequence: Synthetic oligonucleotide
  Sense strand starting at position 805 of SEQ ID NO: 916822
acuguauccggcugauauu

SEQ ID NO: 1186701 - RNA, 19 nt, Artificial Sequence
  Description of Artificial Sequence: Synthetic oligonucleotide
  Antisense strand to SEQ ID NO: 1186700
aauaucagccggauacagu

SEQ ID NO: 1186702 - RNA, 19 nt, Artificial Sequence
  Description of Artificial Sequence: Synthetic oligonucleotide
  Sense strand starting at position 884 of SEQ ID NO: 916822
ucagguaaaucucuugucu

SEQ ID NO: 1186703 - RNA, 19 nt, Artificial Sequence
  Description of Artificial Sequence: Synthetic oligonucleotide
  Antisense strand to SEQ ID NO: 1186702
agacaagagauuuaccuga

SEQ ID NO: 1186704 - RNA, 19 nt, Artificial Sequence
  Description of Artificial Sequence: Synthetic oligonucleotide
  Sense strand starting at position 954 of SEQ ID NO: 916822
acagaugagucauuaacuc

SEQ ID NO: 1186705 - RNA, 19 nt, Artificial Sequence
  Description of Artificial Sequence: Synthetic oligonucleotide
  Antisense strand to SEQ ID NO: 1186704
gaguuaaugacucaucugu

SEQ ID NO: 1186706 - RNA, 19 nt, Artificial Sequence
  Description of Artificial Sequence: Synthetic oligonucleotide
  Sense strand starting at position 1085 of SEQ ID NO: 916822
uuuggcaucugugcuauua

SEQ ID NO: 1186707 - RNA, 19 nt, Artificial Sequence
  Description of Artificial Sequence: Synthetic oligonucleotide
  Antisense strand to SEQ ID NO: 1186706
uaauagcacagaugccaaa

SEQ ID NO: 1186708 - RNA, 19 nt, Artificial Sequence
  Description of Artificial Sequence: Synthetic oligonucleotide
  Sense strand starting at position 1099 of SEQ ID NO: 916822
uauuaaccgcgaugcuaua

SEQ ID NO: 1186709 - RNA, 19 nt, Artificial Sequence
  Description of Artificial Sequence: Synthetic oligonucleotide
  Antisense strand to SEQ ID NO: 1186708
uauagcaucgcgguuaaua

SEQ ID NO: 1186710 - RNA, 19 nt, Artificial Sequence
  Description of Artificial Sequence: Synthetic oligonucleotide
  Sense strand starting at position 1129 of SEQ ID NO: 916822
auacuaguguuaucguuac

SEQ ID NO: 1186711 - RNA, 19 nt, Artificial Sequence
  Description of Artificial Sequence: Synthetic oligonucleotide
  Antisense strand to SEQ ID NO: 1186710
guaacgauaacacuaguau

SEQ ID NO: 1186712 - RNA, 19 nt, Artificial Sequence
  Description of Artificial Sequence: Synthetic oligonucleotide
  Sense strand starting at position 1133 of SEQ ID NO: 916822
uaguguuaucguuacuauu

SEQ ID NO: 1186713 - RNA, 19 nt, Artificial Sequence
  Description of Artificial Sequence: Synthetic oligonucleotide
  Antisense strand to SEQ ID NO: 1186712
aauaguaacgauaacacua

SEQ ID NO: 1186714 - RNA, 19 nt, Artificial Sequence
  Description of Artificial Sequence: Synthetic oligonucleotide
  Sense strand starting at position 1135 of SEQ ID NO: 916822
guguuaucguuacuauuau

SEQ ID NO: 1186715 - RNA, 19 nt, Artificial Sequence
  Description of Artificial Sequence: Synthetic oligonucleotide
  Antisense strand to SEQ ID NO: 1186714
auaauaguaacgauaacac

SEQ ID NO: 1186716 - RNA, 19 nt, Artificial Sequence
  Description of Artificial Sequence: Synthetic oligonucleotide
  Sense strand starting at position 1150 of SEQ ID NO: 916822
uuaugaaagcugcaugcau

SEQ ID NO: 1186717 - RNA, 19 nt, Artificial Sequence
  Description of Artificial Sequence: Synthetic oligonucleotide
  Antisense strand to SEQ ID NO: 1186716
augcaugcagcuuucauaa

SEQ ID NO: 1186718 - RNA, 19 nt, Artificial Sequence
  Description of Artificial Sequence: Synthetic oligonucleotide
  Sense strand starting at position 1152 of SEQ ID NO: 916822
augaaagcugcaugcauuu

SEQ ID NO: 1186719 - RNA, 19 nt, Artificial Sequence
  Description of Artificial Sequence: Synthetic oligonucleotide
  Antisense strand to SEQ ID NO: 1186718
aaaugcaugcagcuuucau

SEQ ID NO: 1186720 - RNA, 19 nt, Artificial Sequence
  Description of Artificial Sequence: Synthetic oligonucleotide
  Sense strand starting at position 1180 of SEQ ID NO: 916822
ugccaauuguccuuuggaa

SEQ ID NO: 1186721 - RNA, 19 nt, Artificial Sequence
  Description of Artificial Sequence: Synthetic oligonucleotide
  Antisense strand to SEQ ID NO: 1186720
uuccaaaggacaauuggca

SEQ ID NO: 1186722 - RNA, 19 nt, Artificial Sequence
  Description of Artificial Sequence: Synthetic oligonucleotide
  Sense strand starting at position 1230 of SEQ ID NO: 916822
cccagcccucuugguuaua

SEQ ID NO: 1186723 - RNA, 19 nt, Artificial Sequence
  Description of Artificial Sequence: Synthetic oligonucleotide
  Antisense strand to SEQ ID NO: 1186722
uauaaccaagagggcuggg

SEQ ID NO: 1186724 - RNA, 19 nt, Artificial Sequence
  Description of Artificial Sequence: Synthetic oligonucleotide
  Sense strand starting at position 1267 of SEQ ID NO: 916822
gcaggcaucaguuaaauga

SEQ ID NO: 1186725 - RNA, 19 nt, Artificial Sequence
  Description of Artificial Sequence: Synthetic oligonucleotide
  Antisense strand to SEQ ID NO: 1186724
ucauuuaacugaugccugc

SEQ ID NO: 1186726 - RNA, 19 nt, Artificial Sequence
  Description of Artificial Sequence: Synthetic oligonucleotide
  Sense strand starting at position 1425 of SEQ ID NO: 916822
gucucccugcuguggaaua

SEQ ID NO: 1186727 - RNA, 19 nt, Artificial Sequence
  Description of Artificial Sequence: Synthetic oligonucleotide
  Antisense strand to SEQ ID NO: 1186726
uauuccacagcagggagac

SEQ ID NO: 1186728 - RNA, 19 nt, Artificial Sequence
  Description of Artificial Sequence: Synthetic oligonucleotide
  Sense strand starting at position 1525 of SEQ ID NO: 916822
cugucacaucuaugaguug

SEQ ID NO: 1186729 - RNA, 19 nt, Artificial Sequence
  Description of Artificial Sequence: Synthetic oligonucleotide
  Antisense strand to SEQ ID NO: 1186728
caacucauagaugugacag

SEQ ID NO: 1186730 - RNA, 19 nt, Artificial Sequence
  Description of Artificial Sequence: Synthetic oligonucleotide
  Sense strand starting at position 1530 of SEQ ID NO: 916822
acaucuaugaguugaggua

SEQ ID NO: 1186731 - RNA, 19 nt, Artificial Sequence
  Description of Artificial Sequence: Synthetic oligonucleotide
  Antisense strand to SEQ ID NO: 1186730
uaccucaacucauagaugu

SEQ ID NO: 1186732 - RNA, 19 nt, Artificial Sequence
  Description of Artificial Sequence: Synthetic oligonucleotide
  Sense strand starting at position 2053 of SEQ ID NO: 916822
ggucccuccuccuuuguua

SEQ ID NO: 1186733 - RNA, 19 nt, Artificial Sequence
  Description of Artificial Sequence: Synthetic oligonucleotide
  Antisense strand to SEQ ID NO: 1186732
uaacaaaggaggagggacc

SEQ ID NO: 1186734 - RNA, 19 nt, Artificial Sequence
  Description of Artificial Sequence: Synthetic oligonucleotide
  Sense strand starting at position 2178 of SEQ ID NO: 916822
ccugucucauuugacagau

SEQ ID NO: 1186735 - RNA, 19 nt, Artificial Sequence
  Description of Artificial Sequence: Synthetic oligonucleotide
  Antisense strand to SEQ ID NO: 1186734
aucugucaaaugagacagg

SEQ ID NO: 1186736 - RNA, 19 nt, Artificial Sequence
  Description of Artificial Sequence: Synthetic oligonucleotide
  Sense strand starting at position 2219 of SEQ ID NO: 916822
gggaacuuauuuggccaaa

SEQ ID NO: 1186737 - RNA, 19 nt, Artificial Sequence
  Description of Artificial Sequence: Synthetic oligonucleotide
  Antisense strand to SEQ ID NO: 1186736
uuuggccaaauaaguuccc

SEQ ID NO: 1186738 - RNA, 19 nt, Artificial Sequence
  Description of Artificial Sequence: Synthetic oligonucleotide
  Sense strand starting at position 2231 of SEQ ID NO: 916822
ggccaaagcuucccagaca

SEQ ID NO: 1186739 - RNA, 19 nt, Artificial Sequence
  Description of Artificial Sequence: Synthetic oligonucleotide
  Antisense strand to SEQ ID NO: 1186738
ugucugggaagcuuuggcc

SEQ ID NO: 1186740 - RNA, 19 nt, Artificial Sequence
  Description of Artificial Sequence: Synthetic oligonucleotide
  Sense strand starting at position 2287 of SEQ ID NO: 916822
ccaucucuuccgggaugca

SEQ ID NO: 1186741 - RNA, 19 nt, Artificial Sequence
  Description of Artificial Sequence: Synthetic oligonucleotide
  Antisense strand to SEQ ID NO: 1186740
ugcaucccggaagagaugg

SEQ ID NO: 1186742 - RNA, 19 nt, Artificial Sequence
  Description of Artificial Sequence: Synthetic oligonucleotide
  Sense strand starting at position 2333 of SEQ ID NO: 916822
ucuagugauugucccggau

SEQ ID NO: 1186743 - RNA, 19 nt, Artificial Sequence
  Description of Artificial Sequence: Synthetic oligonucleotide
  Antisense strand to SEQ ID NO: 1186742
auccgggacaaucacuaga

SEQ ID NO: 1186744 - RNA, 19 nt, Artificial Sequence
  Description of Artificial Sequence: Synthetic oligonucleotide
  Sense strand starting at position 2339 of SEQ ID NO: 916822
gauugucccggaugcugaa

SEQ ID NO: 1186745 - RNA, 19 nt, Artificial Sequence
  Description of Artificial Sequence: Synthetic oligonucleotide
  Antisense strand to SEQ ID NO: 1186744
uucagcauccgggacaauc

SEQ ID NO: 1186746 - RNA, 19 nt, Artificial Sequence
  Description of Artificial Sequence: Synthetic oligonucleotide
  Sense strand starting at position 2723 of SEQ ID NO: 916822
uauuauuugugacauggga

SEQ ID NO: 1186747 - RNA, 19 nt, Artificial Sequence
  Description of Artificial Sequence: Synthetic oligonucleotide
  Antisense strand to SEQ ID NO: 1186746
ucccaugucacaaauaaua

SEQ ID NO: 1186748 - RNA, 19 nt, Artificial Sequence
  Description of Artificial Sequence: Synthetic oligonucleotide
  Sense strand starting at position 2813 of SEQ ID NO: 916822
auuugcuacucagaugaau

SEQ ID NO: 1186749 - RNA, 19 nt, Artificial Sequence
  Description of Artificial Sequence: Synthetic oligonucleotide
  Antisense strand to SEQ ID NO: 1186748
auucaucugaguagcaaau

SEQ ID NO: 1186750 - RNA, 19 nt, Artificial Sequence
  Description of Artificial Sequence: Synthetic oligonucleotide
  Sense strand starting at position 2879 of SEQ ID NO: 916822
gugccaaucccuggaacuu

SEQ ID NO: 1186751 - RNA, 19 nt, Artificial Sequence
  Description of Artificial Sequence: Synthetic oligonucleotide
  Antisense strand to SEQ ID NO: 1186750
aaguuccagggauuggcac

SEQ ID NO: 1186752 - RNA, 19 nt, Artificial Sequence
  Description of Artificial Sequence: Synthetic oligonucleotide
  Sense strand starting at position 2880 of SEQ ID NO: 916822
ugccaaucccuggaacuuu

SEQ ID NO: 1186753 - RNA, 19 nt, Artificial Sequence
  Description of Artificial Sequence: Synthetic oligonucleotide
  Antisense strand to SEQ ID NO: 1186752
aaaguuccagggauuggca

SEQ ID NO: 1186754 - RNA, 19 nt, Artificial Sequence
  Description of Artificial Sequence: Synthetic oligonucleotide
  Sense strand starting at position 2889 of SEQ ID NO: 916822
cuggaacuuuggccucaaa

SEQ ID NO: 1186755 - RNA, 19 nt, Artificial Sequence
  Description of Artificial Sequence: Synthetic oligonucleotide
  Antisense strand to SEQ ID NO: 1186754
uuugaggccaaaguuccag

SEQ ID NO: 1186756 - RNA, 19 nt, Artificial Sequence
  Description of Artificial Sequence: Synthetic oligonucleotide
  Sense strand starting at position 2950 of SEQ ID NO: 916822
gccauuagagagcacuuau

SEQ ID NO: 1186757 - RNA, 19 nt, Artificial Sequence
  Description of Artificial Sequence: Synthetic oligonucleotide
  Antisense strand to SEQ ID NO: 1186756
auaagugcucucuaauggc

SEQ ID NO: 1186758 - RNA, 19 nt, Artificial Sequence
  Description of Artificial Sequence: Synthetic oligonucleotide
  Sense strand starting at position 2959 of SEQ ID NO: 916822
gagcacuuauuagugcuau

SEQ ID NO: 1186759 - RNA, 19 nt, Artificial Sequence
  Description of Artificial Sequence: Synthetic oligonucleotide
  Antisense strand to SEQ ID NO: 1186758
auagcacuaauaagugcuc

SEQ ID NO: 1186760 - RNA, 19 nt, Artificial Sequence
  Description of Artificial Sequence: Synthetic oligonucleotide
  Sense strand starting at position 3109 of SEQ ID NO: 916822
agugcaaaggucuggaaau

SEQ ID NO: 1186761 - RNA, 19 nt, Artificial Sequence
  Description of Artificial Sequence: Synthetic oligonucleotide
  Antisense strand to SEQ ID NO: 1186760
auuuccagaccuuugcacu

SEQ ID NO: 1186762 - RNA, 19 nt, Artificial Sequence
  Description of Artificial Sequence: Synthetic oligonucleotide
  Sense strand starting at position 3136 of SEQ ID NO: 916822
ugauauauuccagggucag

SEQ ID NO: 1186763 - RNA, 19 nt, Artificial Sequence
  Description of Artificial Sequence: Synthetic oligonucleotide
  Antisense strand to SEQ ID NO: 1186762
cugacccuggaauauauca

SEQ ID NO: 1186764 - RNA, 19 nt, Artificial Sequence
  Description of Artificial Sequence: Synthetic oligonucleotide
  Sense strand starting at position 3137 of SEQ ID NO: 916822
gauauauuccagggucagg

SEQ ID NO: 1186765 - RNA, 19 nt, Artificial Sequence
  Description of Artificial Sequence: Synthetic oligonucleotide
  Antisense strand to SEQ ID NO: 1186764
ccugacccuggaauauauc

SEQ ID NO: 1186766 - RNA, 19 nt, Artificial Sequence
  Description of Artificial Sequence: Synthetic oligonucleotide
  Sense strand starting at position 3245 of SEQ ID NO: 916822
cagggaugccuguaccaau

SEQ ID NO: 1186767 - RNA, 19 nt, Artificial Sequence
  Description of Artificial Sequence: Synthetic oligonucleotide
  Antisense strand to SEQ ID NO: 1186766
auugguacaggcaucccug

SEQ ID NO: 1186768 - RNA, 19 nt, Artificial Sequence
  Description of Artificial Sequence: Synthetic oligonucleotide
  Sense strand starting at position 3354 of SEQ ID NO: 916822
gcaccaucucacuggguga

SEQ ID NO: 1186769 - RNA, 19 nt, Artificial Sequence
  Description of Artificial Sequence: Synthetic oligonucleotide
  Antisense strand to SEQ ID NO: 1186768
ucacccagugagauggugc

SEQ ID NO: 1186770 - RNA, 19 nt, Artificial Sequence
  Description of Artificial Sequence: Synthetic oligonucleotide
  Sense strand starting at position 3447 of SEQ ID NO: 916822
acagauguuguguguccuu

SEQ ID NO: 1186771 - RNA, 19 nt, Artificial Sequence
  Description of Artificial Sequence: Synthetic oligonucleotide
  Antisense strand to SEQ ID NO: 1186770
aaggacacacaacaucugu

SEQ ID NO: 1186772 - RNA, 19 nt, Artificial Sequence
  Description of Artificial Sequence: Synthetic oligonucleotide
  Sense strand starting at position 3537 of SEQ ID NO: 916822
ggccgugauccuuaaugug

SEQ ID NO: 1186773 - RNA, 19 nt, Artificial Sequence
  Description of Artificial Sequence: Synthetic oligonucleotide
  Antisense strand to SEQ ID NO: 1186772
cacauuaaggaucacggcc

SEQ ID NO: 1186774 - RNA, 19 nt, Artificial Sequence
  Description of Artificial Sequence: Synthetic oligonucleotide
  Sense strand starting at position 3658 of SEQ ID NO: 916822
caguuugugccuugaagug

SEQ ID NO: 1186775 - RNA, 19 nt, Artificial Sequence
  Description of Artificial Sequence: Synthetic oligonucleotide
  Antisense strand to SEQ ID NO: 1186774
cacuucaaggcacaaacug

SEQ ID NO: 1186776 - RNA, 19 nt, Artificial Sequence
  Description of Artificial Sequence: Synthetic oligonucleotide
  Sense strand starting at position 3830 of SEQ ID NO: 916822
cucagacuuugacaagaag

SEQ ID NO: 1186777 - RNA, 19 nt, Artificial Sequence
  Description of Artificial Sequence: Synthetic oligonucleotide
  Antisense strand to SEQ ID NO: 1186776
cuucuugucaaagucugag

SEQ ID NO: 1186778 - RNA, 19 nt, Artificial Sequence
  Description of Artificial Sequence: Synthetic oligonucleotide
  Sense strand starting at position 58 of SEQ ID NO: 916823
cguccuauuugucucaaca

SEQ ID NO: 1186779 - RNA, 19 nt, Artificial Sequence
  Description of Artificial Sequence: Synthetic oligonucleotide
  Antisense strand to SEQ ID NO: 1186778
uguugagacaaauaggacg

SEQ ID NO: 1186780 - RNA, 19 nt, Artificial Sequence
  Description of Artificial Sequence: Synthetic oligonucleotide
  Sense strand starting at position 248 of SEQ ID NO: 916823
cccugagcugcucaggaaa

SEQ ID NO: 1186781 - RNA, 19 nt, Artificial Sequence
  Description of Artificial Sequence: Synthetic oligonucleotide
  Antisense strand to SEQ ID NO: 1186780
uuuccugagcagcucaggg

SEQ ID NO: 1186782 - RNA, 19 nt, Artificial Sequence
  Description of Artificial Sequence: Synthetic oligonucleotide
  Sense strand starting at position 251 of SEQ ID NO: 916823
ugagcugcucaggaaagau

SEQ ID NO: 1186783 - RNA, 19 nt, Artificial Sequence
  Description of Artificial Sequence: Synthetic oligonucleotide
  Antisense strand to SEQ ID NO: 1186782
aucuuuccugagcagcuca

SEQ ID NO: 1186784 - RNA, 19 nt, Artificial Sequence
  Description of Artificial Sequence: Synthetic oligonucleotide
  Sense strand starting at position 293 of SEQ ID NO: 916823
ggaaccuugcacugagaau

SEQ ID NO: 1186785 - RNA, 19 nt, Artificial Sequence
  Description of Artificial Sequence: Synthetic oligonucleotide
  Antisense strand to SEQ ID NO: 1186784
auucucagugcaagguucc

SEQ ID NO: 1186786 - RNA, 19 nt, Artificial Sequence
  Description of Artificial Sequence: Synthetic oligonucleotide
  Sense strand starting at position 312 of SEQ ID NO: 916823
ccugaaacugguggucaga

SEQ ID NO: 1186787 - RNA, 19 nt, Artificial Sequence
  Description of Artificial Sequence: Synthetic oligonucleotide
  Antisense strand to SEQ ID NO: 1186786
ucugaccaccaguuucagg

SEQ ID NO: 1186788 - RNA, 19 nt, Artificial Sequence
  Description of Artificial Sequence: Synthetic oligonucleotide
  Sense strand starting at position 337 of SEQ ID NO: 916823
aggaucuuggaaugcuaaa

SEQ ID NO: 1186789 - RNA, 19 nt, Artificial Sequence
  Description of Artificial Sequence: Synthetic oligonucleotide
  Antisense strand to SEQ ID NO: 1186788
uuuagcauuccaagauccu

SEQ ID NO: 1186790 - RNA, 19 nt, Artificial Sequence
  Description of Artificial Sequence: Synthetic oligonucleotide
  Sense strand starting at position 441 of SEQ ID NO: 916823
gaucuaagucuggguagac

SEQ ID NO: 1186791 - RNA, 19 nt, Artificial Sequence
  Description of Artificial Sequence: Synthetic oligonucleotide
  Antisense strand to SEQ ID NO: 1186790
gucuacccagacuuagauc

SEQ ID NO: 1186792 - RNA, 19 nt, Artificial Sequence
  Description of Artificial Sequence: Synthetic oligonucleotide
  Sense strand starting at position 442 of SEQ ID NO: 916823
aucuaagucuggguagaca

SEQ ID NO: 1186793 - RNA, 19 nt, Artificial Sequence
  Description of Artificial Sequence: Synthetic oligonucleotide
  Antisense strand to SEQ ID NO: 1186792
ugucuacccagacuuagau

SEQ ID NO: 1186794 - RNA, 19 nt, Artificial Sequence
  Description of Artificial Sequence: Synthetic oligonucleotide
  Sense strand starting at position 578 of SEQ ID NO: 916823
guggguuccuuagcuggaa

SEQ ID NO: 1186795 - RNA, 19 nt, Artificial Sequence
  Description of Artificial Sequence: Synthetic oligonucleotide
  Antisense strand to SEQ ID NO: 1186794
uuccagcuaaggaacccac

SEQ ID NO: 1186796 - RNA, 19 nt, Artificial Sequence
  Description of Artificial Sequence: Synthetic oligonucleotide
  Sense strand starting at position 580 of SEQ ID NO: 916823
ggguuccuuagcuggaaua

SEQ ID NO: 1186797 - RNA, 19 nt, Artificial Sequence
  Description of Artificial Sequence: Synthetic oligonucleotide
  Antisense strand to SEQ ID NO: 1186796
uauuccagcuaaggaaccc

SEQ ID NO: 1186798 - RNA, 19 nt, Artificial Sequence
  Description of Artificial Sequence: Synthetic oligonucleotide
  Sense strand starting at position 582 of SEQ ID NO: 916823
guuccuuagcuggaauaca

SEQ ID NO: 1186799 - RNA, 19 nt, Artificial Sequence
  Description of Artificial Sequence: Synthetic oligonucleotide
  Antisense strand to SEQ ID NO: 1186798
uguauuccagcuaaggaac

SEQ ID NO: 1186800 - RNA, 19 nt, Artificial Sequence
  Description of Artificial Sequence: Synthetic oligonucleotide
  Sense strand starting at position 631 of SEQ ID NO: 916823
guuguuguggguugaagag

SEQ ID NO: 1186801 - RNA, 19 nt, Artificial Sequence
  Description of Artificial Sequence: Synthetic oligonucleotide
  Antisense strand to SEQ ID NO: 1186800
cucuucaacccacaacaac

SEQ ID NO: 1186802 - RNA, 19 nt, Artificial Sequence
  Description of Artificial Sequence: Synthetic oligonucleotide
  Sense strand starting at position 659 of SEQ ID NO: 916823
aaugcugaguccucccaga

SEQ ID NO: 1186803 - RNA, 19 nt, Artificial Sequence
  Description of Artificial Sequence: Synthetic oligonucleotide
  Antisense strand to SEQ ID NO: 1186802
ucugggaggacucagcauu

SEQ ID NO: 1186804 - RNA, 19 nt, Artificial Sequence
  Description of Artificial Sequence: Synthetic oligonucleotide
  Sense strand starting at position 673 of SEQ ID NO: 916823
ccagaagccuuuccagauu

SEQ ID NO: 1186805 - RNA, 19 nt, Artificial Sequence
  Description of Artificial Sequence: Synthetic oligonucleotide
  Antisense strand to SEQ ID NO: 1186804
aaucuggaaaggcuucugg

SEQ ID NO: 1186806 - RNA, 19 nt, Artificial Sequence
  Description of Artificial Sequence: Synthetic oligonucleotide
  Sense strand starting at position 982 of SEQ ID NO: 916823
acuaaaugccucugcagaa

SEQ ID NO: 1186807 - RNA, 19 nt, Artificial Sequence
  Description of Artificial Sequence: Synthetic oligonucleotide
  Antisense strand to SEQ ID NO: 1186806
uucugcagaggcauuuagu

SEQ ID NO: 1186808 - RNA, 19 nt, Artificial Sequence
  Description of Artificial Sequence: Synthetic oligonucleotide
  Sense strand starting at position 1129 of SEQ ID NO: 916823
cagggagucucuguagaca

SEQ ID NO: 1186809 - RNA, 19 nt, Artificial Sequence
  Description of Artificial Sequence: Synthetic oligonucleotide
  Antisense strand to SEQ ID NO: 1186808
ugucuacagagacucccug

SEQ ID NO: 1186810 - RNA, 19 nt, Artificial Sequence
  Description of Artificial Sequence: Synthetic oligonucleotide
  Sense strand starting at position 1536 of SEQ ID NO: 916823
accacaguguuaguugaga

SEQ ID NO: 1186811 - RNA, 19 nt, Artificial Sequence
  Description of Artificial Sequence: Synthetic oligonucleotide
  Antisense strand to SEQ ID NO: 1186810
ucucaacuaacacuguggu

SEQ ID NO: 1186812 - RNA, 19 nt, Artificial Sequence
  Description of Artificial Sequence: Synthetic oligonucleotide
  Sense strand starting at position 1632 of SEQ ID NO: 916823
gccugauccagaggcagua

SEQ ID NO: 1186813 - RNA, 19 nt, Artificial Sequence
  Description of Artificial Sequence: Synthetic oligonucleotide
  Antisense strand to SEQ ID NO: 1186812
uacugccucuggaucaggc

SEQ ID NO: 1186814 - RNA, 19 nt, Artificial Sequence
  Description of Artificial Sequence: Synthetic oligonucleotide
  Sense strand starting at position 1681 of SEQ ID NO: 916823
ccuacaucugguuaguuga

SEQ ID NO: 1186815 - RNA, 19 nt, Artificial Sequence
  Description of Artificial Sequence: Synthetic oligonucleotide
  Antisense strand to SEQ ID NO: 1186814
ucaacuaaccagauguagg

SEQ ID NO: 1186816 - RNA, 19 nt, Artificial Sequence
  Description of Artificial Sequence: Synthetic oligonucleotide
  Sense strand starting at position 1684 of SEQ ID NO: 916823
acaucugguuaguugaaca

SEQ ID NO: 1186817 - RNA, 19 nt, Artificial Sequence
  Description of Artificial Sequence: Synthetic oligonucleotide
  Antisense strand to SEQ ID NO: 1186816
uguucaacuaaccagaugu

SEQ ID NO: 1186818 - RNA, 19 nt, Artificial Sequence
  Description of Artificial Sequence: Synthetic oligonucleotide
  Sense strand starting at position 1984 of SEQ ID NO: 916823
aagguucucggaugauuga

SEQ ID NO: 1186819 - RNA, 19 nt, Artificial Sequence
  Description of Artificial Sequence: Synthetic oligonucleotide
  Antisense strand to SEQ ID NO: 1186818
ucaaucauccgagaaccuu

SEQ ID NO: 1186820 - RNA, 19 nt, Artificial Sequence
  Description of Artificial Sequence: Synthetic oligonucleotide
  Sense strand starting at position 1985 of SEQ ID NO: 916823
agguucucggaugauugau

SEQ ID NO: 1186821 - RNA, 19 nt, Artificial Sequence
  Description of Artificial Sequence: Synthetic oligonucleotide
  Antisense strand to SEQ ID NO: 1186820
aucaaucauccgagaaccu

SEQ ID NO: 1186822 - RNA, 19 nt, Artificial Sequence
  Description of Artificial Sequence: Synthetic oligonucleotide
  Sense strand starting at position 2281 of SEQ ID NO: 916823
gcaacagaagcccagauau

SEQ ID NO: 1186823 - RNA, 19 nt, Artificial Sequence
  Description of Artificial Sequence: Synthetic oligonucleotide
  Antisense strand to SEQ ID NO: 1186822
auaucugggcuucuguugc

SEQ ID NO: 1186824 - RNA, 19 nt, Artificial Sequence
  Description of Artificial Sequence: Synthetic oligonucleotide
  Sense strand starting at position 2397 of SEQ ID NO: 916823
guguccugaaaguaucuca

SEQ ID NO: 1186825 - RNA, 19 nt, Artificial Sequence
  Description of Artificial Sequence: Synthetic oligonucleotide
  Antisense strand to SEQ ID NO: 1186824
ugagauacuuucaggacac

SEQ ID NO: 1186826 - RNA, 19 nt, Artificial Sequence
  Description of Artificial Sequence: Synthetic oligonucleotide
  Sense strand starting at position 2806 of SEQ ID NO: 916823
uuuaauaguuugccacaga

SEQ ID NO: 1186827 - RNA, 19 nt, Artificial Sequence
  Description of Artificial Sequence: Synthetic oligonucleotide
  Antisense strand to SEQ ID NO: 1186826
ucuguggcaaacuauuaaa

SEQ ID NO: 1186828 - RNA, 19 nt, Artificial Sequence
  Description of Artificial Sequence: Synthetic oligonucleotide
  Sense strand starting at position 2827 of SEQ ID NO: 916823
agugucauuuccucagucu

SEQ ID NO: 1186829 - RNA, 19 nt, Artificial Sequence
  Description of Artificial Sequence: Synthetic oligonucleotide
  Antisense strand to SEQ ID NO: 1186828
agacugaggaaaugacacu

SEQ ID NO: 1186830 - RNA, 19 nt, Artificial Sequence
  Description of Artificial Sequence: Synthetic oligonucleotide
  Sense strand starting at position 2828 of SEQ ID NO: 916823
gugucauuuccucagucuu

SEQ ID NO: 1186831 - RNA, 19 nt, Artificial Sequence
  Description of Artificial Sequence: Synthetic oligonucleotide
  Antisense strand to SEQ ID NO: 1186830
aagacugaggaaaugacac

SEQ ID NO: 1186832 - RNA, 19 nt, Artificial Sequence
  Description of Artificial Sequence: Synthetic oligonucleotide
  Sense strand starting at position 2830 of SEQ ID NO: 916823
gucauuuccucagucuuau

SEQ ID NO: 1186833 - RNA, 19 nt, Artificial Sequence
  Description of Artificial Sequence: Synthetic oligonucleotide
  Antisense strand to SEQ ID NO: 1186832
auaagacugaggaaaugac

SEQ ID NO: 1186834 - RNA, 19 nt, Artificial Sequence
  Description of Artificial Sequence: Synthetic oligonucleotide
  Sense strand starting at position 2854 of SEQ ID NO: 916823
gugggaagaaugcaucuuu

SEQ ID NO: 1186835 - RNA, 19 nt, Artificial Sequence
  Description of Artificial Sequence: Synthetic oligonucleotide
  Antisense strand to SEQ ID NO: 1186834
aaagaugcauucuucccac

SEQ ID NO: 1186836 - RNA, 19 nt, Artificial Sequence
  Description of Artificial Sequence: Synthetic oligonucleotide
  Sense strand starting at position 3025 of SEQ ID NO: 916823
aggagaggauaagaucauu

SEQ ID NO: 1186837 - RNA, 19 nt, Artificial Sequence
  Description of Artificial Sequence: Synthetic oligonucleotide
  Antisense strand to SEQ ID NO: 1186836
aaugaucuuauccucuccu

SEQ ID NO: 1186838 - RNA, 19 nt, Artificial Sequence
  Description of Artificial Sequence: Synthetic oligonucleotide
  Sense strand starting at position 3055 of SEQ ID NO: 916823
acucaugguuucucugauu

SEQ ID NO: 1186839 - RNA, 19 nt, Artificial Sequence
  Description of Artificial Sequence: Synthetic oligonucleotide
  Antisense strand to SEQ ID NO: 1186838
aaucagagaaaccaugagu

SEQ ID NO: 1186840 - RNA, 19 nt, Artificial Sequence
  Description of Artificial Sequence: Synthetic oligonucleotide
  Sense strand starting at position 3461 of SEQ ID NO: 916823
ucagaagagucacagaaua

SEQ ID NO: 1186841 - RNA, 19 nt, Artificial Sequence
  Description of Artificial Sequence: Synthetic oligonucleotide
  Antisense strand to SEQ ID NO: 1186840
uauucugugacucuucuga

SEQ ID NO: 1186842 - RNA, 19 nt, Artificial Sequence
  Description of Artificial Sequence: Synthetic oligonucleotide
  Sense strand starting at position 3495 of SEQ ID NO: 916823
ggaagacuuuagucuugag

SEQ ID NO: 1186843 - RNA, 19 nt, Artificial Sequence
  Description of Artificial Sequence: Synthetic oligonucleotide
  Antisense strand to SEQ ID NO: 1186842
cucaagacuaaagucuucc

SEQ ID NO: 1186844 - RNA, 19 nt, Artificial Sequence
  Description of Artificial Sequence: Synthetic oligonucleotide
  Sense strand starting at position 3711 of SEQ ID NO: 916823
guggcuucucugcuuuagu

SEQ ID NO: 1186845 - RNA, 19 nt, Artificial Sequence
  Description of Artificial Sequence: Synthetic oligonucleotide
  Antisense strand to SEQ ID NO: 1186844
acuaaagcagagaagccac

SEQ ID NO: 1186846 - RNA, 19 nt, Artificial Sequence
  Description of Artificial Sequence: Synthetic oligonucleotide
  Sense strand starting at position 3716 of SEQ ID NO: 916823
uucucugcuuuagugacaa

SEQ ID NO: 1186847 - RNA, 19 nt, Artificial Sequence
  Description of Artificial Sequence: Synthetic oligonucleotide
  Antisense strand to SEQ ID NO: 1186846
uugucacuaaagcagagaa

SEQ ID NO: 1186848 - RNA, 19 nt, Artificial Sequence
  Description of Artificial Sequence: Synthetic oligonucleotide
  Sense strand starting at position 3828 of SEQ ID NO: 916823
gcgagaaugugguuacuua

SEQ ID NO: 1186849 - RNA, 19 nt, Artificial Sequence
  Description of Artificial Sequence: Synthetic oligonucleotide
  Antisense strand to SEQ ID NO: 1186848
uaaguaaccacauucucgc

SEQ ID NO: 1186850 - RNA, 19 nt, Artificial Sequence
  Description of Artificial Sequence: Synthetic oligonucleotide
  Sense strand starting at position 3829 of SEQ ID NO: 916823
cgagaaugugguuacuuag

SEQ ID NO: 1186851 - RNA, 19 nt, Artificial Sequence
  Description of Artificial Sequence: Synthetic oligonucleotide
  Antisense strand to SEQ ID NO: 1186850
cuaaguaaccacauucucg

SEQ ID NO: 1186852 - RNA, 19 nt, Artificial Sequence
  Description of Artificial Sequence: Synthetic oligonucleotide
  Sense strand starting at position 3832 of SEQ ID NO: 916823
gaaugugguuacuuaggca

SEQ ID NO: 1186853 - RNA, 19 nt, Artificial Sequence
  Description of Artificial Sequence: Synthetic oligonucleotide
  Antisense strand to SEQ ID NO: 1186852
ugccuaaguaaccacauuc

SEQ ID NO: 1186854 - RNA, 19 nt, Artificial Sequence
  Description of Artificial Sequence: Synthetic oligonucleotide
  Sense strand starting at position 3884 of SEQ ID NO: 916823
gacagcuuuggugacaaca

SEQ ID NO: 1186855 - RNA, 19 nt, Artificial Sequence
  Description of Artificial Sequence: Synthetic oligonucleotide
  Antisense strand to SEQ ID NO: 1186854
uguugucaccaaagcuguc

SEQ ID NO: 1186856 - RNA, 19 nt, Artificial Sequence
  Description of Artificial Sequence: Synthetic oligonucleotide
  Sense strand starting at position 3895 of SEQ ID NO: 916823
ugacaacauugauaaagac

SEQ ID NO: 1186857 - RNA, 19 nt, Artificial Sequence
  Description of Artificial Sequence: Synthetic oligonucleotide
  Antisense strand to SEQ ID NO: 1186856
gucuuuaucaauguuguca

SEQ ID NO: 1186858 - RNA, 19 nt, Artificial Sequence
  Description of Artificial Sequence: Synthetic oligonucleotide
  Sense strand starting at position 168 of SEQ ID NO: 916824
aagguucucggaugauuga

SEQ ID NO: 1186859 - RNA, 19 nt, Artificial Sequence
  Description of Artificial Sequence: Synthetic oligonucleotide
  Antisense strand to SEQ ID NO: 1186858
ucaaucauccgagaaccuu

SEQ ID NO: 1186860 - RNA, 19 nt, Artificial Sequence
  Description of Artificial Sequence: Synthetic oligonucleotide
  Sense strand starting at position 169 of SEQ ID NO: 916824
agguucucggaugauugau

SEQ ID NO: 1186861 - RNA, 19 nt, Artificial Sequence
  Description of Artificial Sequence: Synthetic oligonucleotide
  Antisense strand to SEQ ID NO: 1186860
aucaaucauccgagaaccu

SEQ ID NO: 1186862 - RNA, 19 nt, Artificial Sequence
  Description of Artificial Sequence: Synthetic oligonucleotide
  Sense strand starting at position 465 of SEQ ID NO: 916824
gcaacagaagcccagauau

SEQ ID NO: 1186863 - RNA, 19 nt, Artificial Sequence
  Description of Artificial Sequence: Synthetic oligonucleotide
  Antisense strand to SEQ ID NO: 1186862
auaucugggcuucuguugc

SEQ ID NO: 1186864 - RNA, 19 nt, Artificial Sequence
  Description of Artificial Sequence: Synthetic oligonucleotide
  Sense strand starting at position 581 of SEQ ID NO: 916824
guguccugaaaguaucuca

SEQ ID NO: 1186865 - RNA, 19 nt, Artificial Sequence
  Description of Artificial Sequence: Synthetic oligonucleotide
  Antisense strand to SEQ ID NO: 1186864
ugagauacuuucaggacac

SEQ ID NO: 1186866 - RNA, 19 nt, Artificial Sequence
  Description of Artificial Sequence: Synthetic oligonucleotide
  Sense strand starting at position 990 of SEQ ID NO: 916824
uuuaauaguuugccacaga

SEQ ID NO: 1186867 - RNA, 19 nt, Artificial Sequence
  Description of Artificial Sequence: Synthetic oligonucleotide
  Antisense strand to SEQ ID NO: 1186866
ucuguggcaaacuauuaaa

SEQ ID NO: 1186868 - RNA, 19 nt, Artificial Sequence
  Description of Artificial Sequence: Synthetic oligonucleotide
  Sense strand starting at position 1011 of SEQ ID NO: 916824
agugucauuuccucagucu

SEQ ID NO: 1186869 - RNA, 19 nt, Artificial Sequence
  Description of Artificial Sequence: Synthetic oligonucleotide
  Antisense strand to SEQ ID NO: 1186868
agacugaggaaaugacacu

SEQ ID NO: 1186870 - RNA, 19 nt, Artificial Sequence
  Description of Artificial Sequence: Synthetic oligonucleotide
  Sense strand starting at position 1012 of SEQ ID NO: 916824
gugucauuuccucagucuu

SEQ ID NO: 1186871 - RNA, 19 nt, Artificial Sequence
  Description of Artificial Sequence: Synthetic oligonucleotide
  Antisense strand to SEQ ID NO: 1186870
aagacugaggaaaugacac

SEQ ID NO: 1186872 - RNA, 19 nt, Artificial Sequence
  Description of Artificial Sequence: Synthetic oligonucleotide
  Sense strand starting at position 1014 of SEQ ID NO: 916824
gucauuuccucagucuuau

SEQ ID NO: 1186873 - RNA, 19 nt, Artificial Sequence
  Description of Artificial Sequence: Synthetic oligonucleotide
  Antisense strand to SEQ ID NO: 1186872
auaagacugaggaaaugac

SEQ ID NO: 1186874 - RNA, 19 nt, Artificial Sequence
  Description of Artificial Sequence: Synthetic oligonucleotide
  Sense strand starting at position 1038 of SEQ ID NO: 916824
gugggaagaaugcaucuuu

SEQ ID NO: 1186875 - RNA, 19 nt, Artificial Sequence
  Description of Artificial Sequence: Synthetic oligonucleotide
  Antisense strand to SEQ ID NO: 1186874
aaagaugcauucuucccac

SEQ ID NO: 1186876 - RNA, 19 nt, Artificial Sequence
  Description of Artificial Sequence: Synthetic oligonucleotide
  Sense strand starting at position 1209 of SEQ ID NO: 916824
aggagaggauaagaucauu

SEQ ID NO: 1186877 - RNA, 19 nt, Artificial Sequence
  Description of Artificial Sequence: Synthetic oligonucleotide
  Antisense strand to SEQ ID NO: 1186876
aaugaucuuauccucuccu

SEQ ID NO: 1186878 - RNA, 19 nt, Artificial Sequence
  Description of Artificial Sequence: Synthetic oligonucleotide
  Sense strand starting at position 1239 of SEQ ID NO: 916824
acucaugguuucucugauu

SEQ ID NO: 1186879 - RNA, 19 nt, Artificial Sequence
  Description of Artificial Sequence: Synthetic oligonucleotide
  Antisense strand to SEQ ID NO: 1186878
aaucagagaaaccaugagu

SEQ ID NO: 1186880 - RNA, 19 nt, Artificial Sequence
  Description of Artificial Sequence: Synthetic oligonucleotide
  Sense strand starting at position 1645 of SEQ ID NO: 916824
ucagaagagucacagaaua

SEQ ID NO: 1186881 - RNA, 19 nt, Artificial Sequence
  Description of Artificial Sequence: Synthetic oligonucleotide
  Antisense strand to SEQ ID NO: 1186880
uauucugugacucuucuga

SEQ ID NO: 1186882 - RNA, 19 nt, Artificial Sequence
  Description of Artificial Sequence: Synthetic oligonucleotide
  Sense strand starting at position 1679 of SEQ ID NO: 916824
ggaagacuuuagucuugag

SEQ ID NO: 1186883 - RNA, 19 nt, Artificial Sequence
  Description of Artificial Sequence: Synthetic oligonucleotide
  Antisense strand to SEQ ID NO: 1186882
cucaagacuaaagucuucc

SEQ ID NO: 1186884 - RNA, 19 nt, Artificial Sequence
  Description of Artificial Sequence: Synthetic oligonucleotide
  Sense strand starting at position 1895 of SEQ ID NO: 916824
guggcuucucugcuuuagu

SEQ ID NO: 1186885 - RNA, 19 nt, Artificial Sequence
  Description of Artificial Sequence: Synthetic oligonucleotide
  Antisense strand to SEQ ID NO: 1186884
acuaaagcagagaagccac

SEQ ID NO: 1186886 - RNA, 19 nt, Artificial Sequence
  Description of Artificial Sequence: Synthetic oligonucleotide
  Sense strand starting at position 1900 of SEQ ID NO: 916824
uucucugcuuuagugacaa

SEQ ID NO: 1186887 - RNA, 19 nt, Artificial Sequence
  Description of Artificial Sequence: Synthetic oligonucleotide
  Antisense strand to SEQ ID NO: 1186886
uugucacuaaagcagagaa

SEQ ID NO: 1186888 - RNA, 19 nt, Artificial Sequence
  Description of Artificial Sequence: Synthetic oligonucleotide
  Sense strand starting at position 2012 of SEQ ID NO: 916824
gcgagaaugugguuacuua

SEQ ID NO: 1186889 - RNA, 19 nt, Artificial Sequence
  Description of Artificial Sequence: Synthetic oligonucleotide
  Antisense strand to SEQ ID NO: 1186888
uaaguaaccacauucucgc

SEQ ID NO: 1186890 - RNA, 19 nt, Artificial Sequence
  Description of Artificial Sequence: Synthetic oligonucleotide
  Sense strand starting at position 2013 of SEQ ID NO: 916824
cgagaaugugguuacuuag

SEQ ID NO: 1186891 - RNA, 19 nt, Artificial Sequence
  Description of Artificial Sequence: Synthetic oligonucleotide
  Antisense strand to SEQ ID NO: 1186890
cuaaguaaccacauucucg

SEQ ID NO: 1186892 - RNA, 19 nt, Artificial Sequence
  Description of Artificial Sequence: Synthetic oligonucleotide
  Sense strand starting at position 2016 of SEQ ID NO: 916824
gaaugugguuacuuaggca

SEQ ID NO: 1186893 - RNA, 19 nt, Artificial Sequence
  Description of Artificial Sequence: Synthetic oligonucleotide
  Antisense strand to SEQ ID NO: 1186892
ugccuaaguaaccacauuc

SEQ ID NO: 1186894 - RNA, 19 nt, Artificial Sequence
  Description of Artificial Sequence: Synthetic oligonucleotide
  Sense strand starting at position 2068 of SEQ ID NO: 916824
gacagcuuuggugacaaca

SEQ ID NO: 1186895 - RNA, 19 nt, Artificial Sequence
  Description of Artificial Sequence: Synthetic oligonucleotide
  Antisense strand to SEQ ID NO: 1186894
uguugucaccaaagcuguc

SEQ ID NO: 1186896 - RNA, 19 nt, Artificial Sequence
  Description of Artificial Sequence: Synthetic oligonucleotide
  Sense strand starting at position 2079 of SEQ ID NO: 916824
ugacaacauugauaaagac

SEQ ID NO: 1186897 - RNA, 19 nt, Artificial Sequence
  Description of Artificial Sequence: Synthetic oligonucleotide
  Antisense strand to SEQ ID NO: 1186896
gucuuuaucaauguuguca

SEQ ID NO: 1186898 - RNA, 19 nt, Artificial Sequence
  Description of Artificial Sequence: Synthetic oligonucleotide
  Sense strand starting at position 2187 of SEQ ID NO: 916824
gggagaaguucuucgguuu

SEQ ID NO: 1186899 - RNA, 19 nt, Artificial Sequence
  Description of Artificial Sequence: Synthetic oligonucleotide
  Antisense strand to SEQ ID NO: 1186898
aaaccgaagaacuucuccc

SEQ ID NO: 1186900 - RNA, 19 nt, Artificial Sequence
  Description of Artificial Sequence: Synthetic oligonucleotide
  Sense strand starting at position 2222 of SEQ ID NO: 916824
ugagaaaggccacagcauu

SEQ ID NO: 1186901 - RNA, 19 nt, Artificial Sequence
  Description of Artificial Sequence: Synthetic oligonucleotide
  Antisense strand to SEQ ID NO: 1186900
aaugcuguggccuuucuca

SEQ ID NO: 1186902 - RNA, 19 nt, Artificial Sequence
  Description of Artificial Sequence: Synthetic oligonucleotide
  Sense strand starting at position 2319 of SEQ ID NO: 916824
cucgcuucuugcccaagau

SEQ ID NO: 1186903 - RNA, 19 nt, Artificial Sequence
  Description of Artificial Sequence: Synthetic oligonucleotide
  Antisense strand to SEQ ID NO: 1186902
aucuugggcaagaagcgag

SEQ ID NO: 1186904 - RNA, 19 nt, Artificial Sequence
  Description of Artificial Sequence: Synthetic oligonucleotide
  Sense strand starting at position 2320 of SEQ ID NO: 916824
ucgcuucuugcccaagauu

SEQ ID NO: 1186905 - RNA, 19 nt, Artificial Sequence
  Description of Artificial Sequence: Synthetic oligonucleotide
  Antisense strand to SEQ ID NO: 1186904
aaucuugggcaagaagcga

SEQ ID NO: 1186906 - RNA, 19 nt, Artificial Sequence
  Description of Artificial Sequence: Synthetic oligonucleotide
  Sense strand starting at position 2417 of SEQ ID NO: 916824
ugguguauuucuucucgca

SEQ ID NO: 1186907 - RNA, 19 nt, Artificial Sequence
  Description of Artificial Sequence: Synthetic oligonucleotide
  Antisense strand to SEQ ID NO: 1186906
ugcgagaagaaauacacca

SEQ ID NO: 1186908 - RNA, 19 nt, Artificial Sequence
  Description of Artificial Sequence: Synthetic oligonucleotide
  Sense strand starting at position 2529 of SEQ ID NO: 916824
gcaaguccugcuuaucuua

SEQ ID NO: 1186909 - RNA, 19 nt, Artificial Sequence
  Description of Artificial Sequence: Synthetic oligonucleotide
  Antisense strand to SEQ ID NO: 1186908
uaagauaagcaggacuugc

SEQ ID NO: 1186910 - RNA, 19 nt, Artificial Sequence
  Description of Artificial Sequence: Synthetic oligonucleotide
  Sense strand starting at position 2677 of SEQ ID NO: 916824
uaaacaauucgguggaaca

SEQ ID NO: 1186911 - RNA, 19 nt, Artificial Sequence
  Description of Artificial Sequence: Synthetic oligonucleotide
  Antisense strand to SEQ ID NO: 1186910
uguuccaccgaauuguuua

SEQ ID NO: 1186912 - RNA, 19 nt, Artificial Sequence
  Description of Artificial Sequence: Synthetic oligonucleotide
  Sense strand starting at position 2678 of SEQ ID NO: 916824
aaacaauucgguggaacau

SEQ ID NO: 1186913 - RNA, 19 nt, Artificial Sequence
  Description of Artificial Sequence: Synthetic oligonucleotide
  Antisense strand to SEQ ID NO: 1186912
auguuccaccgaauuguuu

SEQ ID NO: 1186914 - RNA, 19 nt, Artificial Sequence
  Description of Artificial Sequence: Synthetic oligonucleotide
  Sense strand starting at position 3350 of SEQ ID NO: 916824
gcagguguucgccaugaca

SEQ ID NO: 1186915 - RNA, 19 nt, Artificial Sequence
  Description of Artificial Sequence: Synthetic oligonucleotide
  Antisense strand to SEQ ID NO: 1186914
ugucauggcgaacaccugc

SEQ ID NO: 1186916 - RNA, 19 nt, Artificial Sequence
  Description of Artificial Sequence: Synthetic oligonucleotide
  Sense strand starting at position 3352 of SEQ ID NO: 916824
agguguucgccaugacaca

SEQ ID NO: 1186917 - RNA, 19 nt, Artificial Sequence
  Description of Artificial Sequence: Synthetic oligonucleotide
  Antisense strand to SEQ ID NO: 1186916
ugugucauggcgaacaccu

SEQ ID NO: 1186918 - RNA, 19 nt, Artificial Sequence
  Description of Artificial Sequence: Synthetic oligonucleotide
  Sense strand starting at position 3568 of SEQ ID NO: 916824
gcaggucacucucugauua

SEQ ID NO: 1186919 - RNA, 19 nt, Artificial Sequence
  Description of Artificial Sequence: Synthetic oligonucleotide
  Antisense strand to SEQ ID NO: 1186918
uaaucagagagugaccugc

SEQ ID NO: 1186920 - RNA, 19 nt, Artificial Sequence
  Description of Artificial Sequence: Synthetic oligonucleotide
  Sense strand starting at position 3578 of SEQ ID NO: 916824
cucugauuagcggagguga

SEQ ID NO: 1186921 - RNA, 19 nt, Artificial Sequence
  Description of Artificial Sequence: Synthetic oligonucleotide
  Antisense strand to SEQ ID NO: 1186920
ucaccuccgcuaaucagag

SEQ ID NO: 1186922 - RNA, 19 nt, Artificial Sequence
  Description of Artificial Sequence: Synthetic oligonucleotide
  Sense strand starting at position 3642 of SEQ ID NO: 916824
ugcagcuugugagcuaaga

SEQ ID NO: 1186923 - RNA, 19 nt, Artificial Sequence
  Description of Artificial Sequence: Synthetic oligonucleotide
  Antisense strand to SEQ ID NO: 1186922
ucuuagcucacaagcugca

SEQ ID NO: 1186924 - RNA, 19 nt, Artificial Sequence
  Description of Artificial Sequence: Synthetic oligonucleotide
  Sense strand starting at position 3656 of SEQ ID NO: 916824
uaagaauggugguuacauu

SEQ ID NO: 1186925 - RNA, 19 nt, Artificial Sequence
  Description of Artificial Sequence: Synthetic oligonucleotide
  Antisense strand to SEQ ID NO: 1186924
aauguaaccaccauucuua

SEQ ID NO: 1186926 - RNA, 19 nt, Artificial Sequence
  Description of Artificial Sequence: Synthetic oligonucleotide
  Sense strand starting at position 3712 of SEQ ID NO: 916824
cugugcgaaauucgagauu

SEQ ID NO: 1186927 - RNA, 19 nt, Artificial Sequence
  Description of Artificial Sequence: Synthetic oligonucleotide
  Antisense strand to SEQ ID NO: 1186926
aaucucgaauuucgcacag

SEQ ID NO: 1186928 - RNA, 19 nt, Artificial Sequence
  Description of Artificial Sequence: Synthetic oligonucleotide
  Sense strand starting at position 3761 of SEQ ID NO: 916824
ccacacuaauugguguaaa

SEQ ID NO: 1186929 - RNA, 19 nt, Artificial Sequence
  Description of Artificial Sequence: Synthetic oligonucleotide
  Antisense strand to SEQ ID NO: 1186928
uuuacaccaauuagugugg

SEQ ID NO: 1186930 - RNA, 19 nt, Artificial Sequence
  Description of Artificial Sequence: Synthetic oligonucleotide
  Sense strand starting at position 3810 of SEQ ID NO: 916824
gcggcagaguugaauaguu

SEQ ID NO: 1186931 - RNA, 19 nt, Artificial Sequence
  Description of Artificial Sequence: Synthetic oligonucleotide
  Antisense strand to SEQ ID NO: 1186930
aacuauucaacucugccgc

SEQ ID NO: 1186932 - RNA, 19 nt, Artificial Sequence
  Description of Artificial Sequence: Synthetic oligonucleotide
  Sense strand starting at position 3875 of SEQ ID NO: 916824
gccuguggucaaugccaga

SEQ ID NO: 1186933 - RNA, 19 nt, Artificial Sequence
  Description of Artificial Sequence: Synthetic oligonucleotide
  Antisense strand to SEQ ID NO: 1186932
ucuggcauugaccacaggc

SEQ ID NO: 1186934 - RNA, 19 nt, Artificial Sequence
  Description of Artificial Sequence: Synthetic oligonucleotide
  Sense strand starting at position 3903 of SEQ ID NO: 916824
aggugcuuugcauacauca

SEQ ID NO: 1186935 - RNA, 19 nt, Artificial Sequence
  Description of Artificial Sequence: Synthetic oligonucleotide
  Antisense strand to SEQ ID NO: 1186934
ugauguaugcaaagcaccu

SEQ ID NO: 1186936 - RNA, 19 nt, Artificial Sequence
  Description of Artificial Sequence: Synthetic oligonucleotide
  Sense strand starting at position 3976 of SEQ ID NO: 916824
gagaaugugccuugcucaa

SEQ ID NO: 1186937 - RNA, 19 nt, Artificial Sequence
  Description of Artificial Sequence: Synthetic oligonucleotide
  Antisense strand to SEQ ID NO: 1186936
uugagcaaggcacauucuc

SEQ ID NO: 1186938 - RNA, 19 nt, Artificial Sequence
  Description of Artificial Sequence: Synthetic oligonucleotide
  Sense strand starting at position 43 of SEQ ID NO: 916825
ugauauaagaaggguguga

SEQ ID NO: 1186939 - RNA, 19 nt, Artificial Sequence
  Description of Artificial Sequence: Synthetic oligonucleotide
  Antisense strand to SEQ ID NO: 1186938
ucacacccuucuuauauca

SEQ ID NO: 1186940 - RNA, 19 nt, Artificial Sequence
  Description of Artificial Sequence: Synthetic oligonucleotide
  Sense strand starting at position 274 of SEQ ID NO: 916825
gacuacgugcauuaagaaa

SEQ ID NO: 1186941 - RNA, 19 nt, Artificial Sequence
  Description of Artificial Sequence: Synthetic oligonucleotide
  Antisense strand to SEQ ID NO: 1186940
uuucuuaaugcacguaguc

SEQ ID NO: 1186942 - RNA, 19 nt, Artificial Sequence
  Description of Artificial Sequence: Synthetic oligonucleotide
  Sense strand starting at position 313 of SEQ ID NO: 916825
cucacuguccaguagggaa

SEQ ID NO: 1186943 - RNA, 19 nt, Artificial Sequence
  Description of Artificial Sequence: Synthetic oligonucleotide
  Antisense strand to SEQ ID NO: 1186942
uucccuacuggacagugag

SEQ ID NO: 1186944 - RNA, 19 nt, Artificial Sequence
  Description of Artificial Sequence: Synthetic oligonucleotide
  Sense strand starting at position 508 of SEQ ID NO: 916825
cucauuagaugagugacau

SEQ ID NO: 1186945 - RNA, 19 nt, Artificial Sequence
  Description of Artificial Sequence: Synthetic oligonucleotide
  Antisense strand to SEQ ID NO: 1186944
augucacucaucuaaugag

SEQ ID NO: 1186946 - RNA, 19 nt, Artificial Sequence
  Description of Artificial Sequence: Synthetic oligonucleotide
  Sense strand starting at position 509 of SEQ ID NO: 916825
ucauuagaugagugacaug

SEQ ID NO: 1186947 - RNA, 19 nt, Artificial Sequence
  Description of Artificial Sequence: Synthetic oligonucleotide
  Antisense strand to SEQ ID NO: 1186946
caugucacucaucuaauga

SEQ ID NO: 1186948 - RNA, 19 nt, Artificial Sequence
  Description of Artificial Sequence: Synthetic oligonucleotide
  Sense strand starting at position 640 of SEQ ID NO: 916825
agguuaagggaucaugcuu

SEQ ID NO: 1186949 - RNA, 19 nt, Artificial Sequence
  Description of Artificial Sequence: Synthetic oligonucleotide
  Antisense strand to SEQ ID NO: 1186948
aagcaugaucccuuaaccu

SEQ ID NO: 1186950 - RNA, 19 nt, Artificial Sequence
  Description of Artificial Sequence: Synthetic oligonucleotide
  Sense strand starting at position 645 of SEQ ID NO: 916825
aagggaucaugcuuauaga

SEQ ID NO: 1186951 - RNA, 19 nt, Artificial Sequence
  Description of Artificial Sequence: Synthetic oligonucleotide
  Antisense strand to SEQ ID NO: 1186950
ucuauaagcaugaucccuu

SEQ ID NO: 1186952 - RNA, 19 nt, Artificial Sequence
  Description of Artificial Sequence: Synthetic oligonucleotide
  Sense strand starting at position 658 of SEQ ID NO: 916825
uauagagaugcuuaaaguu

SEQ ID NO: 1186953 - RNA, 19 nt, Artificial Sequence
  Description of Artificial Sequence: Synthetic oligonucleotide
  Antisense strand to SEQ ID NO: 1186952
aacuuuaagcaucucuaua

SEQ ID NO: 1186954 - RNA, 19 nt, Artificial Sequence
  Description of Artificial Sequence: Synthetic oligonucleotide
  Sense strand starting at position 677 of SEQ ID NO: 916825
gcgcuuuaacuguaauuuc

SEQ ID NO: 1186955 - RNA, 19 nt, Artificial Sequence
  Description of Artificial Sequence: Synthetic oligonucleotide
  Antisense strand to SEQ ID NO: 1186954
gaaauuacaguuaaagcgc

SEQ ID NO: 1186956 - RNA, 19 nt, Artificial Sequence
  Description of Artificial Sequence: Synthetic oligonucleotide
  Sense strand starting at position 754 of SEQ ID NO: 916825
aauaaagauuuaggagaug

SEQ ID NO: 1186957 - RNA, 19 nt, Artificial Sequence
  Description of Artificial Sequence: Synthetic oligonucleotide
  Antisense strand to SEQ ID NO: 1186956
caucuccuaaaucuuuauu

SEQ ID NO: 1186958 - RNA, 19 nt, Artificial Sequence
  Description of Artificial Sequence: Synthetic oligonucleotide
  Sense strand starting at position 1044 of SEQ ID NO: 916825
cagagaucacguuagggua

SEQ ID NO: 1186959 - RNA, 19 nt, Artificial Sequence
  Description of Artificial Sequence: Synthetic oligonucleotide
  Antisense strand to SEQ ID NO: 1186958
uacccuaacgugaucucug

SEQ ID NO: 1186960 - RNA, 19 nt, Artificial Sequence
  Description of Artificial Sequence: Synthetic oligonucleotide
  Sense strand starting at position 1233 of SEQ ID NO: 916825
uggagaaauguuuacguga

SEQ ID NO: 1186961 - RNA, 19 nt, Artificial Sequence
  Description of Artificial Sequence: Synthetic oligonucleotide
  Antisense strand to SEQ ID NO: 1186960
ucacguaaacauuucucca

SEQ ID NO: 1186962 - RNA, 19 nt, Artificial Sequence
  Description of Artificial Sequence: Synthetic oligonucleotide
  Sense strand starting at position 1236 of SEQ ID NO: 916825
agaaauguuuacgugagac

SEQ ID NO: 1186963 - RNA, 19 nt, Artificial Sequence
  Description of Artificial Sequence: Synthetic oligonucleotide
  Antisense strand to SEQ ID NO: 1186962
gucucacguaaacauuucu

SEQ ID NO: 1186964 - RNA, 19 nt, Artificial Sequence
  Description of Artificial Sequence: Synthetic oligonucleotide
  Sense strand starting at position 1254 of SEQ ID NO: 916825
cgcagaaguagucaagaaa

SEQ ID NO: 1186965 - RNA, 19 nt, Artificial Sequence
  Description of Artificial Sequence: Synthetic oligonucleotide
  Antisense strand to SEQ ID NO: 1186964
uuucuugacuacuucugcg

SEQ ID NO: 1186966 - RNA, 19 nt, Artificial Sequence
  Description of Artificial Sequence: Synthetic oligonucleotide
  Sense strand starting at position 1266 of SEQ ID NO: 916825
caagaaauaucacucgggu

SEQ ID NO: 1186967 - RNA, 19 nt, Artificial Sequence
  Description of Artificial Sequence: Synthetic oligonucleotide
  Antisense strand to SEQ ID NO: 1186966
acccgagugauauuucuug

SEQ ID NO: 1186968 - RNA, 19 nt, Artificial Sequence
  Description of Artificial Sequence: Synthetic oligonucleotide
  Sense strand starting at position 1268 of SEQ ID NO: 916825
agaaauaucacucgggucu

SEQ ID NO: 1186969 - RNA, 19 nt, Artificial Sequence
  Description of Artificial Sequence: Synthetic oligonucleotide
  Antisense strand to SEQ ID NO: 1186968
agacccgagugauauuucu

SEQ ID NO: 1186970 - RNA, 19 nt, Artificial Sequence
  Description of Artificial Sequence: Synthetic oligonucleotide
  Sense strand starting at position 1941 of SEQ ID NO: 916825
agucguaauuucucaguac

SEQ ID NO: 1186971 - RNA, 19 nt, Artificial Sequence
  Description of Artificial Sequence: Synthetic oligonucleotide
  Antisense strand to SEQ ID NO: 1186970
guacugagaaauuacgacu

SEQ ID NO: 1186972 - RNA, 19 nt, Artificial Sequence
  Description of Artificial Sequence: Synthetic oligonucleotide
  Sense strand starting at position 1944 of SEQ ID NO: 916825
cguaauuucucaguacccu

SEQ ID NO: 1186973 - RNA, 19 nt, Artificial Sequence
  Description of Artificial Sequence: Synthetic oligonucleotide
  Antisense strand to SEQ ID NO: 1186972
aggguacugagaaauuacg

SEQ ID NO: 1186974 - RNA, 19 nt, Artificial Sequence
  Description of Artificial Sequence: Synthetic oligonucleotide
  Sense strand starting at position 1981 of SEQ ID NO: 916825
cgcuuucucguacucggaa

SEQ ID NO: 1186975 - RNA, 19 nt, Artificial Sequence
  Description of Artificial Sequence: Synthetic oligonucleotide
  Antisense strand to SEQ ID NO: 1186974
uuccgaguacgagaaagcg

SEQ ID NO: 1186976 - RNA, 19 nt, Artificial Sequence
  Description of Artificial Sequence: Synthetic oligonucleotide
  Sense strand starting at position 2130 of SEQ ID NO: 916825
ccuaaaucugcggaaaccu

SEQ ID NO: 1186977 - RNA, 19 nt, Artificial Sequence
  Description of Artificial Sequence: Synthetic oligonucleotide
  Antisense strand to SEQ ID NO: 1186976
agguuuccgcagauuuagg

SEQ ID NO: 1186978 - RNA, 19 nt, Artificial Sequence
  Description of Artificial Sequence: Synthetic oligonucleotide
  Sense strand starting at position 2234 of SEQ ID NO: 916825
gcuuguagagguuauugga

SEQ ID NO: 1186979 - RNA, 19 nt, Artificial Sequence
  Description of Artificial Sequence: Synthetic oligonucleotide
  Antisense strand to SEQ ID NO: 1186978
uccaauaaccucuacaagc

SEQ ID NO: 1186980 - RNA, 19 nt, Artificial Sequence
  Description of Artificial Sequence: Synthetic oligonucleotide
  Sense strand starting at position 2250 of SEQ ID NO: 916825
ggagauacuuuagucuuac

SEQ ID NO: 1186981 - RNA, 19 nt, Artificial Sequence
  Description of Artificial Sequence: Synthetic oligonucleotide
  Antisense strand to SEQ ID NO: 1186980
guaagacuaaaguaucucc

SEQ ID NO: 1186982 - RNA, 19 nt, Artificial Sequence
  Description of Artificial Sequence: Synthetic oligonucleotide
  Sense strand starting at position 2330 of SEQ ID NO: 916825
ggaaacaaguuucuuaacu

SEQ ID NO: 1186983 - RNA, 19 nt, Artificial Sequence
  Description of Artificial Sequence: Synthetic oligonucleotide
  Antisense strand to SEQ ID NO: 1186982
aguuaagaaacuuguuucc

SEQ ID NO: 1186984 - RNA, 19 nt, Artificial Sequence
  Description of Artificial Sequence: Synthetic oligonucleotide
  Sense strand starting at position 2418 of SEQ ID NO: 916825
gcaacuugaggacggauua

SEQ ID NO: 1186985 - RNA, 19 nt, Artificial Sequence
  Description of Artificial Sequence: Synthetic oligonucleotide
  Antisense strand to SEQ ID NO: 1186984
uaauccguccucaaguugc

SEQ ID NO: 1186986 - RNA, 19 nt, Artificial Sequence
  Description of Artificial Sequence: Synthetic oligonucleotide
  Sense strand starting at position 2565 of SEQ ID NO: 916825
aggaaucaccugugaccuu

SEQ ID NO: 1186987 - RNA, 19 nt, Artificial Sequence
  Description of Artificial Sequence: Synthetic oligonucleotide
  Antisense strand to SEQ ID NO: 1186986
aaggucacaggugauuccu

SEQ ID NO: 1186988 - RNA, 19 nt, Artificial Sequence
  Description of Artificial Sequence: Synthetic oligonucleotide
  Sense strand starting at position 2611 of SEQ ID NO: 916825
auugauuaaccuggaaucu

SEQ ID NO: 1186989 - RNA, 19 nt, Artificial Sequence
  Description of Artificial Sequence: Synthetic oligonucleotide
  Antisense strand to SEQ ID NO: 1186988
agauuccagguuaaucaau

SEQ ID NO: 1186990 - RNA, 19 nt, Artificial Sequence
  Description of Artificial Sequence: Synthetic oligonucleotide
  Sense strand starting at position 2628 of SEQ ID NO: 916825
cugccauacuuucuaagag

SEQ ID NO: 1186991 - RNA, 19 nt, Artificial Sequence
  Description of Artificial Sequence: Synthetic oligonucleotide
  Antisense strand to SEQ ID NO: 1186990
cucuuagaaaguauggcag

SEQ ID NO: 1186992 - RNA, 19 nt, Artificial Sequence
  Description of Artificial Sequence: Synthetic oligonucleotide
  Sense strand starting at position 2645 of SEQ ID NO: 916825
agaacauaaugggaagaaa

SEQ ID NO: 1186993 - RNA, 19 nt, Artificial Sequence
  Description of Artificial Sequence: Synthetic oligonucleotide
  Antisense strand to SEQ ID NO: 1186992
uuucuucccauuauguucu

SEQ ID NO: 1186994 - RNA, 19 nt, Artificial Sequence
  Description of Artificial Sequence: Synthetic oligonucleotide
  Sense strand starting at position 3031 of SEQ ID NO: 916825
ggauuaaacucugucucua

SEQ ID NO: 1186995 - RNA, 19 nt, Artificial Sequence
  Description of Artificial Sequence: Synthetic oligonucleotide
  Antisense strand to SEQ ID NO: 1186994
uagagacagaguuuaaucc

SEQ ID NO: 1186996 - RNA, 19 nt, Artificial Sequence
  Description of Artificial Sequence: Synthetic oligonucleotide
  Sense strand starting at position 3164 of SEQ ID NO: 916825
aucauacuccagugacaga

SEQ ID NO: 1186997 - RNA, 19 nt, Artificial Sequence
  Description of Artificial Sequence: Synthetic oligonucleotide
  Antisense strand to SEQ ID NO: 1186996
ucugucacuggaguaugau

SEQ ID NO: 1186998 - RNA, 19 nt, Artificial Sequence
  Description of Artificial Sequence: Synthetic oligonucleotide
  Sense strand starting at position 3181 of SEQ ID NO: 916825
gagaauggguucucucaca

SEQ ID NO: 1186999 - RNA, 19 nt, Artificial Sequence
  Description of Artificial Sequence: Synthetic oligonucleotide
  Antisense strand to SEQ ID NO: 1186998
ugugagagaacccauucuc

SEQ ID NO: 1187000 - RNA, 19 nt, Artificial Sequence
  Description of Artificial Sequence: Synthetic oligonucleotide
  Sense strand starting at position 3189 of SEQ ID NO: 916825
guucucucacaagaagucu

SEQ ID NO: 1187001 - RNA, 19 nt, Artificial Sequence
  Description of Artificial Sequence: Synthetic oligonucleotide
  Antisense strand to SEQ ID NO: 1187000
agacuucuugugagagaac

SEQ ID NO: 1187002 - RNA, 19 nt, Artificial Sequence
  Description of Artificial Sequence: Synthetic oligonucleotide
  Sense strand starting at position 3465 of SEQ ID NO: 916825
ugggaaucuuuauugucau

SEQ ID NO: 1187003 - RNA, 19 nt, Artificial Sequence
  Description of Artificial Sequence: Synthetic oligonucleotide
  Antisense strand to SEQ ID NO: 1187002
augacaauaaagauuccca

SEQ ID NO: 1187004 - RNA, 19 nt, Artificial Sequence
  Description of Artificial Sequence: Synthetic oligonucleotide
  Sense strand starting at position 3552 of SEQ ID NO: 916825
accucaaaguaucuaguua

SEQ ID NO: 1187005 - RNA, 19 nt, Artificial Sequence
  Description of Artificial Sequence: Synthetic oligonucleotide
  Antisense strand to SEQ ID NO: 1187004
uaacuagauacuuugaggu

SEQ ID NO: 1187006 - RNA, 19 nt, Artificial Sequence
  Description of Artificial Sequence: Synthetic oligonucleotide
  Sense strand starting at position 3588 of SEQ ID NO: 916825
cauguaugucaagggaaua

SEQ ID NO: 1187007 - RNA, 19 nt, Artificial Sequence
  Description of Artificial Sequence: Synthetic oligonucleotide
  Antisense strand to SEQ ID NO: 1187006
uauucccuugacauacaug

SEQ ID NO: 1187008 - RNA, 19 nt, Artificial Sequence
  Description of Artificial Sequence: Synthetic oligonucleotide
  Sense strand starting at position 3589 of SEQ ID NO: 916825
auguaugucaagggaauag

SEQ ID NO: 1187009 - RNA, 19 nt, Artificial Sequence
  Description of Artificial Sequence: Synthetic oligonucleotide
  Antisense strand to SEQ ID NO: 1187008
cuauucccuugacauacau

SEQ ID NO: 1187010 - RNA, 19 nt, Artificial Sequence
  Description of Artificial Sequence: Synthetic oligonucleotide
  Sense strand starting at position 3619 of SEQ ID NO: 916825
gguacaucgcgucucuaau

SEQ ID NO: 1187011 - RNA, 19 nt, Artificial Sequence
  Description of Artificial Sequence: Synthetic oligonucleotide
  Antisense strand to SEQ ID NO: 1187010
auuagagacgcgauguacc

SEQ ID NO: 1187012 - RNA, 19 nt, Artificial Sequence
  Description of Artificial Sequence: Synthetic oligonucleotide
  Sense strand starting at position 3620 of SEQ ID NO: 916825
guacaucgcgucucuaauu

SEQ ID NO: 1187013 - RNA, 19 nt, Artificial Sequence
  Description of Artificial Sequence: Synthetic oligonucleotide
  Antisense strand to SEQ ID NO: 1187012
aauuagagacgcgauguac

SEQ ID NO: 1187014 - RNA, 19 nt, Artificial Sequence
  Description of Artificial Sequence: Synthetic oligonucleotide
  Sense strand starting at position 3896 of SEQ ID NO: 916825
gugggucaacagugagaaa

SEQ ID NO: 1187015 - RNA, 19 nt, Artificial Sequence
  Description of Artificial Sequence: Synthetic oligonucleotide
  Antisense strand to SEQ ID NO: 1187014
uuucucacuguugacccac

SEQ ID NO: 1187016 - RNA, 19 nt, Artificial Sequence
  Description of Artificial Sequence: Synthetic oligonucleotide
  Sense strand starting at position 3958 of SEQ ID NO: 916825
uauaaaucagcguagaccu

SEQ ID NO: 1187017 - RNA, 19 nt, Artificial Sequence
  Description of Artificial Sequence: Synthetic oligonucleotide
  Antisense strand to SEQ ID NO: 1187016
aggucuacgcugauuuaua

SEQ ID NO: 1187018 - RNA, 19 nt, Artificial Sequence
  Description of Artificial Sequence: Synthetic oligonucleotide
  Sense strand starting at position 359 of SEQ ID NO: 916826
ugauauaagaaggguguga

SEQ ID NO: 1187019 - RNA, 19 nt, Artificial Sequence
  Description of Artificial Sequence: Synthetic oligonucleotide
  Antisense strand to SEQ ID NO: 1187018
ucacacccuucuuauauca

SEQ ID NO: 1187020 - RNA, 19 nt, Artificial Sequence
  Description of Artificial Sequence: Synthetic oligonucleotide
  Sense strand starting at position 590 of SEQ ID NO: 916826
gacuacgugcauuaagaaa

SEQ ID NO: 1187021 - RNA, 19 nt, Artificial Sequence
  Description of Artificial Sequence: Synthetic oligonucleotide
  Antisense strand to SEQ ID NO: 1187020
uuucuuaaugcacguaguc

SEQ ID NO: 1187022 - RNA, 19 nt, Artificial Sequence
  Description of Artificial Sequence: Synthetic oligonucleotide
  Sense strand starting at position 629 of SEQ ID NO: 916826
cucacuguccaguagggaa

SEQ ID NO: 1187023 - RNA, 19 nt, Artificial Sequence
  Description of Artificial Sequence: Synthetic oligonucleotide
  Antisense strand to SEQ ID NO: 1187022
uucccuacuggacagugag

SEQ ID NO: 1187024 - RNA, 19 nt, Artificial Sequence
  Description of Artificial Sequence: Synthetic oligonucleotide
  Sense strand starting at position 675 of SEQ ID NO: 916826
gacaguagagcugguacaa

SEQ ID NO: 1187025 - RNA, 19 nt, Artificial Sequence
  Description of Artificial Sequence: Synthetic oligonucleotide
  Antisense strand to SEQ ID NO: 1187024
uuguaccagcucuacuguc

SEQ ID NO: 1187026 - RNA, 19 nt, Artificial Sequence
  Description of Artificial Sequence: Synthetic oligonucleotide
  Sense strand starting at position 824 of SEQ ID NO: 916826
cucauuagaugagugacau

SEQ ID NO: 1187027 - RNA, 19 nt, Artificial Sequence
  Description of Artificial Sequence: Synthetic oligonucleotide
  Antisense strand to SEQ ID NO: 1187026
augucacucaucuaaugag

SEQ ID NO: 1187028 - RNA, 19 nt, Artificial Sequence
  Description of Artificial Sequence: Synthetic oligonucleotide
  Sense strand starting at position 825 of SEQ ID NO: 916826
ucauuagaugagugacaug

SEQ ID NO: 1187029 - RNA, 19 nt, Artificial Sequence
  Description of Artificial Sequence: Synthetic oligonucleotide
  Antisense strand to SEQ ID NO: 1187028
caugucacucaucuaauga

SEQ ID NO: 1187030 - RNA, 19 nt, Artificial Sequence
  Description of Artificial Sequence: Synthetic oligonucleotide
  Sense strand starting at position 956 of SEQ ID NO: 916826
agguuaagggaucaugcuu

SEQ ID NO: 1187031 - RNA, 19 nt, Artificial Sequence
  Description of Artificial Sequence: Synthetic oligonucleotide
  Antisense strand to SEQ ID NO: 1187030
aagcaugaucccuuaaccu

SEQ ID NO: 1187032 - RNA, 19 nt, Artificial Sequence
  Description of Artificial Sequence: Synthetic oligonucleotide
  Sense strand starting at position 961 of SEQ ID NO: 916826
aagggaucaugcuuauaga

SEQ ID NO: 1187033 - RNA, 19 nt, Artificial Sequence
  Description of Artificial Sequence: Synthetic oligonucleotide
  Antisense strand to SEQ ID NO: 1187032
ucuauaagcaugaucccuu

SEQ ID NO: 1187034 - RNA, 19 nt, Artificial Sequence
  Description of Artificial Sequence: Synthetic oligonucleotide
  Sense strand starting at position 974 of SEQ ID NO: 916826
uauagagaugcuuaaaguu

SEQ ID NO: 1187035 - RNA, 19 nt, Artificial Sequence
  Description of Artificial Sequence: Synthetic oligonucleotide
  Antisense strand to SEQ ID NO: 1187034
aacuuuaagcaucucuaua

SEQ ID NO: 1187036 - RNA, 19 nt, Artificial Sequence
  Description of Artificial Sequence: Synthetic oligonucleotide
  Sense strand starting at position 993 of SEQ ID NO: 916826
gcgcuuuaacuguaauuuc

SEQ ID NO: 1187037 - RNA, 19 nt, Artificial Sequence
  Description of Artificial Sequence: Synthetic oligonucleotide
  Antisense strand to SEQ ID NO: 1187036
gaaauuacaguuaaagcgc

SEQ ID NO: 1187038 - RNA, 19 nt, Artificial Sequence
  Description of Artificial Sequence: Synthetic oligonucleotide
  Sense strand starting at position 1070 of SEQ ID NO: 916826
aauaaagauuuaggagaug

SEQ ID NO: 1187039 - RNA, 19 nt, Artificial Sequence
  Description of Artificial Sequence: Synthetic oligonucleotide
  Antisense strand to SEQ ID NO: 1187038
caucuccuaaaucuuuauu

SEQ ID NO: 1187040 - RNA, 19 nt, Artificial Sequence
  Description of Artificial Sequence: Synthetic oligonucleotide
  Sense strand starting at position 1360 of SEQ ID NO: 916826
cagagaucacguuagggua

SEQ ID NO: 1187041 - RNA, 19 nt, Artificial Sequence
  Description of Artificial Sequence: Synthetic oligonucleotide
  Antisense strand to SEQ ID NO: 1187040
uacccuaacgugaucucug

SEQ ID NO: 1187042 - RNA, 19 nt, Artificial Sequence
  Description of Artificial Sequence: Synthetic oligonucleotide
  Sense strand starting at position 1549 of SEQ ID NO: 916826
uggagaaauguuuacguga

SEQ ID NO: 1187043 - RNA, 19 nt, Artificial Sequence
  Description of Artificial Sequence: Synthetic oligonucleotide
  Antisense strand to SEQ ID NO: 1187042
ucacguaaacauuucucca

SEQ ID NO: 1187044 - RNA, 19 nt, Artificial Sequence
  Description of Artificial Sequence: Synthetic oligonucleotide
  Sense strand starting at position 1552 of SEQ ID NO: 916826
agaaauguuuacgugagac

SEQ ID NO: 1187045 - RNA, 19 nt, Artificial Sequence
  Description of Artificial Sequence: Synthetic oligonucleotide
  Antisense strand to SEQ ID NO: 1187044
gucucacguaaacauuucu

SEQ ID NO: 1187046 - RNA, 19 nt, Artificial Sequence
  Description of Artificial Sequence: Synthetic oligonucleotide
  Sense strand starting at position 1570 of SEQ ID NO: 916826
cgcagaaguagucaagaaa

SEQ ID NO: 1187047 - RNA, 19 nt, Artificial Sequence
  Description of Artificial Sequence: Synthetic oligonucleotide
  Antisense strand to SEQ ID NO: 1187046
uuucuugacuacuucugcg

SEQ ID NO: 1187048 - RNA, 19 nt, Artificial Sequence
  Description of Artificial Sequence: Synthetic oligonucleotide
  Sense strand starting at position 1582 of SEQ ID NO: 916826
caagaaauaucacucgggu

SEQ ID NO: 1187049 - RNA, 19 nt, Artificial Sequence
  Description of Artificial Sequence: Synthetic oligonucleotide
  Antisense strand to SEQ ID NO: 1187048
acccgagugauauuucuug

SEQ ID NO: 1187050 - RNA, 19 nt, Artificial Sequence
  Description of Artificial Sequence: Synthetic oligonucleotide
  Sense strand starting at position 1584 of SEQ ID NO: 916826
agaaauaucacucgggucu

SEQ ID NO: 1187051 - RNA, 19 nt, Artificial Sequence
  Description of Artificial Sequence: Synthetic oligonucleotide
  Antisense strand to SEQ ID NO: 1187050
agacccgagugauauuucu

SEQ ID NO: 1187052 - RNA, 19 nt, Artificial Sequence
  Description of Artificial Sequence: Synthetic oligonucleotide
  Sense strand starting at position 2257 of SEQ ID NO: 916826
agucguaauuucucaguac

SEQ ID NO: 1187053 - RNA, 19 nt, Artificial Sequence
  Description of Artificial Sequence: Synthetic oligonucleotide
  Antisense strand to SEQ ID NO: 1187052
guacugagaaauuacgacu

SEQ ID NO: 1187054 - RNA, 19 nt, Artificial Sequence
  Description of Artificial Sequence: Synthetic oligonucleotide
  Sense strand starting at position 2260 of SEQ ID NO: 916826
cguaauuucucaguacccu

SEQ ID NO: 1187055 - RNA, 19 nt, Artificial Sequence
  Description of Artificial Sequence: Synthetic oligonucleotide
  Antisense strand to SEQ ID NO: 1187054
aggguacugagaaauuacg

SEQ ID NO: 1187056 - RNA, 19 nt, Artificial Sequence
  Description of Artificial Sequence: Synthetic oligonucleotide
  Sense strand starting at position 2297 of SEQ ID NO: 916826
cgcuuucucguacucggaa

SEQ ID NO: 1187057 - RNA, 19 nt, Artificial Sequence
  Description of Artificial Sequence: Synthetic oligonucleotide
  Antisense strand to SEQ ID NO: 1187056
uuccgaguacgagaaagcg

SEQ ID NO: 1187058 - RNA, 19 nt, Artificial Sequence
  Description of Artificial Sequence: Synthetic oligonucleotide
  Sense strand starting at position 2446 of SEQ ID NO: 916826
ccuaaaucugcggaaaccu

SEQ ID NO: 1187059 - RNA, 19 nt, Artificial Sequence
  Description of Artificial Sequence: Synthetic oligonucleotide
  Antisense strand to SEQ ID NO: 1187058
agguuuccgcagauuuagg

SEQ ID NO: 1187060 - RNA, 19 nt, Artificial Sequence
  Description of Artificial Sequence: Synthetic oligonucleotide
  Sense strand starting at position 2550 of SEQ ID NO: 916826
gcuuguagagguuauugga

SEQ ID NO: 1187061 - RNA, 19 nt, Artificial Sequence
  Description of Artificial Sequence: Synthetic oligonucleotide
  Antisense strand to SEQ ID NO: 1187060
uccaauaaccucuacaagc

SEQ ID NO: 1187062 - RNA, 19 nt, Artificial Sequence
  Description of Artificial Sequence: Synthetic oligonucleotide
  Sense strand starting at position 2566 of SEQ ID NO: 916826
ggagauacuuuagucuuac

SEQ ID NO: 1187063 - RNA, 19 nt, Artificial Sequence
  Description of Artificial Sequence: Synthetic oligonucleotide
  Antisense strand to SEQ ID NO: 1187062
guaagacuaaaguaucucc

SEQ ID NO: 1187064 - RNA, 19 nt, Artificial Sequence
  Description of Artificial Sequence: Synthetic oligonucleotide
  Sense strand starting at position 2646 of SEQ ID NO: 916826
ggaaacaaguuucuuaacu

SEQ ID NO: 1187065 - RNA, 19 nt, Artificial Sequence
  Description of Artificial Sequence: Synthetic oligonucleotide
  Antisense strand to SEQ ID NO: 1187064
aguuaagaaacuuguuucc

SEQ ID NO: 1187066 - RNA, 19 nt, Artificial Sequence
  Description of Artificial Sequence: Synthetic oligonucleotide
  Sense strand starting at position 2734 of SEQ ID NO: 916826
gcaacuugaggacggauua

SEQ ID NO: 1187067 - RNA, 19 nt, Artificial Sequence
  Description of Artificial Sequence: Synthetic oligonucleotide
  Antisense strand to SEQ ID NO: 1187066
uaauccguccucaaguugc

SEQ ID NO: 1187068 - RNA, 19 nt, Artificial Sequence
  Description of Artificial Sequence: Synthetic oligonucleotide
  Sense strand starting at position 2881 of SEQ ID NO: 916826
aggaaucaccugugaccuu

SEQ ID NO: 1187069 - RNA, 19 nt, Artificial Sequence
  Description of Artificial Sequence: Synthetic oligonucleotide
  Antisense strand to SEQ ID NO: 1187068
aaggucacaggugauuccu

SEQ ID NO: 1187070 - RNA, 19 nt, Artificial Sequence
  Description of Artificial Sequence: Synthetic oligonucleotide
  Sense strand starting at position 2927 of SEQ ID NO: 916826
auugauuaaccuggaaucu

SEQ ID NO: 1187071 - RNA, 19 nt, Artificial Sequence
  Description of Artificial Sequence: Synthetic oligonucleotide
  Antisense strand to SEQ ID NO: 1187070
agauuccagguuaaucaau

SEQ ID NO: 1187072 - RNA, 19 nt, Artificial Sequence
  Description of Artificial Sequence: Synthetic oligonucleotide
  Sense strand starting at position 2944 of SEQ ID NO: 916826
cugccauacuuucuaagag

SEQ ID NO: 1187073 - RNA, 19 nt, Artificial Sequence
  Description of Artificial Sequence: Synthetic oligonucleotide
  Antisense strand to SEQ ID NO: 1187072
cucuuagaaaguauggcag

SEQ ID NO: 1187074 - RNA, 19 nt, Artificial Sequence
  Description of Artificial Sequence: Synthetic oligonucleotide
  Sense strand starting at position 2961 of SEQ ID NO: 916826
agaacauaaugggaagaaa

SEQ ID NO: 1187075 - RNA, 19 nt, Artificial Sequence
  Description of Artificial Sequence: Synthetic oligonucleotide
  Antisense strand to SEQ ID NO: 1187074
uuucuucccauuauguucu

SEQ ID NO: 1187076 - RNA, 19 nt, Artificial Sequence
  Description of Artificial Sequence: Synthetic oligonucleotide
  Sense strand starting at position 3279 of SEQ ID NO: 916826
ccaaguagucaugagugua

SEQ ID NO: 1187077 - RNA, 19 nt, Artificial Sequence
  Description of Artificial Sequence: Synthetic oligonucleotide
  Antisense strand to SEQ ID NO: 1187076
uacacucaugacuacuugg

SEQ ID NO: 1187078 - RNA, 19 nt, Artificial Sequence
  Description of Artificial Sequence: Synthetic oligonucleotide
  Sense strand starting at position 3347 of SEQ ID NO: 916826
ggauuaaacucugucucua

SEQ ID NO: 1187079 - RNA, 19 nt, Artificial Sequence
  Description of Artificial Sequence: Synthetic oligonucleotide
  Antisense strand to SEQ ID NO: 1187078
uagagacagaguuuaaucc

SEQ ID NO: 1187080 - RNA, 19 nt, Artificial Sequence
  Description of Artificial Sequence: Synthetic oligonucleotide
  Sense strand starting at position 3480 of SEQ ID NO: 916826
aucauacuccagugacaga

SEQ ID NO: 1187081 - RNA, 19 nt, Artificial Sequence
  Description of Artificial Sequence: Synthetic oligonucleotide
  Antisense strand to SEQ ID NO: 1187080
ucugucacuggaguaugau

SEQ ID NO: 1187082 - RNA, 19 nt, Artificial Sequence
  Description of Artificial Sequence: Synthetic oligonucleotide
  Sense strand starting at position 3497 of SEQ ID NO: 916826
gagaauggguucucucaca

SEQ ID NO: 1187083 - RNA, 19 nt, Artificial Sequence
  Description of Artificial Sequence: Synthetic oligonucleotide
  Antisense strand to SEQ ID NO: 1187082
ugugagagaacccauucuc

SEQ ID NO: 1187084 - RNA, 19 nt, Artificial Sequence
  Description of Artificial Sequence: Synthetic oligonucleotide
  Sense strand starting at position 3505 of SEQ ID NO: 916826
guucucucacaagaagucu

SEQ ID NO: 1187085 - RNA, 19 nt, Artificial Sequence
  Description of Artificial Sequence: Synthetic oligonucleotide
  Antisense strand to SEQ ID NO: 1187084
agacuucuugugagagaac

SEQ ID NO: 1187086 - RNA, 19 nt, Artificial Sequence
  Description of Artificial Sequence: Synthetic oligonucleotide
  Sense strand starting at position 3781 of SEQ ID NO: 916826
ugggaaucuuuauugucau

SEQ ID NO: 1187087 - RNA, 19 nt, Artificial Sequence
  Description of Artificial Sequence: Synthetic oligonucleotide
  Antisense strand to SEQ ID NO: 1187086
augacaauaaagauuccca

SEQ ID NO: 1187088 - RNA, 19 nt, Artificial Sequence
  Description of Artificial Sequence: Synthetic oligonucleotide
  Sense strand starting at position 3868 of SEQ ID NO: 916826
accucaaaguaucuaguua

SEQ ID NO: 1187089 - RNA, 19 nt, Artificial Sequence
  Description of Artificial Sequence: Synthetic oligonucleotide
  Antisense strand to SEQ ID NO: 1187088
uaacuagauacuuugaggu

SEQ ID NO: 1187090 - RNA, 19 nt, Artificial Sequence
  Description of Artificial Sequence: Synthetic oligonucleotide
  Sense strand starting at position 3904 of SEQ ID NO: 916826
cauguaugucaagggaaua

SEQ ID NO: 1187091 - RNA, 19 nt, Artificial Sequence
  Description of Artificial Sequence: Synthetic oligonucleotide
  Antisense strand to SEQ ID NO: 1187090
uauucccuugacauacaug

SEQ ID NO: 1187092 - RNA, 19 nt, Artificial Sequence
  Description of Artificial Sequence: Synthetic oligonucleotide
  Sense strand starting at position 3905 of SEQ ID NO: 916826
auguaugucaagggaauag

SEQ ID NO: 1187093 - RNA, 19 nt, Artificial Sequence
  Description of Artificial Sequence: Synthetic oligonucleotide
  Antisense strand to SEQ ID NO: 1187092
cuauucccuugacauacau

SEQ ID NO: 1187094 - RNA, 19 nt, Artificial Sequence
  Description of Artificial Sequence: Synthetic oligonucleotide
  Sense strand starting at position 3935 of SEQ ID NO: 916826
gguacaucgcgucucuaau

SEQ ID NO: 1187095 - RNA, 19 nt, Artificial Sequence
  Description of Artificial Sequence: Synthetic oligonucleotide
  Antisense strand to SEQ ID NO: 1187094
auuagagacgcgauguacc

SEQ ID NO: 1187096 - RNA, 19 nt, Artificial Sequence
  Description of Artificial Sequence: Synthetic oligonucleotide
  Sense strand starting at position 3936 of SEQ ID NO: 916826
guacaucgcgucucuaauu

SEQ ID NO: 1187097 - RNA, 19 nt, Artificial Sequence
  Description of Artificial Sequence: Synthetic oligonucleotide
  Antisense strand to SEQ ID NO: 1187096
aauuagagacgcgauguac

SEQ ID NO: 1187098 - RNA, 19 nt, Artificial Sequence
  Description of Artificial Sequence: Synthetic oligonucleotide
  Sense strand starting at position 79 of SEQ ID NO: 916827
cggcucugucgagaaccuu

SEQ ID NO: 1187099 - RNA, 19 nt, Artificial Sequence
  Description of Artificial Sequence: Synthetic oligonucleotide
  Antisense strand to SEQ ID NO: 1187098
aagguucucgacagagccg

SEQ ID NO: 1187100 - RNA, 19 nt, Artificial Sequence
  Description of Artificial Sequence: Synthetic oligonucleotide
  Sense strand starting at position 85 of SEQ ID NO: 916827
ugucgagaaccuuaucaau

SEQ ID NO: 1187101 - RNA, 19 nt, Artificial Sequence
  Description of Artificial Sequence: Synthetic oligonucleotide
  Antisense strand to SEQ ID NO: 1187100
auugauaagguucucgaca

SEQ ID NO: 1187102 - RNA, 19 nt, Artificial Sequence
  Description of Artificial Sequence: Synthetic oligonucleotide
  Sense strand starting at position 87 of SEQ ID NO: 916827
ucgagaaccuuaucaauga

SEQ ID NO: 1187103 - RNA, 19 nt, Artificial Sequence
  Description of Artificial Sequence: Synthetic oligonucleotide
  Antisense strand to SEQ ID NO: 1187102
ucauugauaagguucucga

SEQ ID NO: 1187104 - RNA, 19 nt, Artificial Sequence
  Description of Artificial Sequence: Synthetic oligonucleotide
  Sense strand starting at position 88 of SEQ ID NO: 916827
cgagaaccuuaucaaugaa

SEQ ID NO: 1187105 - RNA, 19 nt, Artificial Sequence
  Description of Artificial Sequence: Synthetic oligonucleotide
  Antisense strand to SEQ ID NO: 1187104
uucauugauaagguucucg

SEQ ID NO: 1187106 - RNA, 19 nt, Artificial Sequence
  Description of Artificial Sequence: Synthetic oligonucleotide
  Sense strand starting at position 211 of SEQ ID NO: 916827
agaccuucucuugauguau

SEQ ID NO: 1187107 - RNA, 19 nt, Artificial Sequence
  Description of Artificial Sequence: Synthetic oligonucleotide
  Antisense strand to SEQ ID NO: 1187106
auacaucaagagaaggucu

SEQ ID NO: 1187108 - RNA, 19 nt, Artificial Sequence
  Description of Artificial Sequence: Synthetic oligonucleotide
  Sense strand starting at position 213 of SEQ ID NO: 916827
accuucucuugauguauuu

SEQ ID NO: 1187109 - RNA, 19 nt, Artificial Sequence
  Description of Artificial Sequence: Synthetic oligonucleotide
  Antisense strand to SEQ ID NO: 1187108
aaauacaucaagagaaggu

SEQ ID NO: 1187110 - RNA, 19 nt, Artificial Sequence
  Description of Artificial Sequence: Synthetic oligonucleotide
  Sense strand starting at position 414 of SEQ ID NO: 916827
ccggcacauuugguaaauu

SEQ ID NO: 1187111 - RNA, 19 nt, Artificial Sequence
  Description of Artificial Sequence: Synthetic oligonucleotide
  Antisense strand to SEQ ID NO: 1187110
aauuuaccaaaugugccgg

SEQ ID NO: 1187112 - RNA, 19 nt, Artificial Sequence
  Description of Artificial Sequence: Synthetic oligonucleotide
  Sense strand starting at position 415 of SEQ ID NO: 916827
cggcacauuugguaaauua

SEQ ID NO: 1187113 - RNA, 19 nt, Artificial Sequence
  Description of Artificial Sequence: Synthetic oligonucleotide
  Antisense strand to SEQ ID NO: 1187112
uaauuuaccaaaugugccg

SEQ ID NO: 1187114 - RNA, 19 nt, Artificial Sequence
  Description of Artificial Sequence: Synthetic oligonucleotide
  Sense strand starting at position 437 of SEQ ID NO: 916827
acugucuccuagcaacaga

SEQ ID NO: 1187115 - RNA, 19 nt, Artificial Sequence
  Description of Artificial Sequence: Synthetic oligonucleotide
  Antisense strand to SEQ ID NO: 1187114
ucuguugcuaggagacagu

SEQ ID NO: 1187116 - RNA, 19 nt, Artificial Sequence
  Description of Artificial Sequence: Synthetic oligonucleotide
  Sense strand starting at position 922 of SEQ ID NO: 916827
gaguuugaagaacguuuaa

SEQ ID NO: 1187117 - RNA, 19 nt, Artificial Sequence
  Description of Artificial Sequence: Synthetic oligonucleotide
  Antisense strand to SEQ ID NO: 1187116
uuaaacguucuucaaacuc

SEQ ID NO: 1187118 - RNA, 19 nt, Artificial Sequence
  Description of Artificial Sequence: Synthetic oligonucleotide
  Sense strand starting at position 1090 of SEQ ID NO: 916827
aggauuaaaucguuuggaa

SEQ ID NO: 1187119 - RNA, 19 nt, Artificial Sequence
  Description of Artificial Sequence: Synthetic oligonucleotide
  Antisense strand to SEQ ID NO: 1187118
uuccaaacgauuuaauccu

SEQ ID NO: 1187120 - RNA, 19 nt, Artificial Sequence
  Description of Artificial Sequence: Synthetic oligonucleotide
  Sense strand starting at position 1092 of SEQ ID NO: 916827
gauuaaaucguuuggaacg

SEQ ID NO: 1187121 - RNA, 19 nt, Artificial Sequence
  Description of Artificial Sequence: Synthetic oligonucleotide
  Antisense strand to SEQ ID NO: 1187120
cguuccaaacgauuuaauc

SEQ ID NO: 1187122 - RNA, 19 nt, Artificial Sequence
  Description of Artificial Sequence: Synthetic oligonucleotide
  Sense strand starting at position 1097 of SEQ ID NO: 916827
aaucguuuggaacguggaa

SEQ ID NO: 1187123 - RNA, 19 nt, Artificial Sequence
  Description of Artificial Sequence: Synthetic oligonucleotide
  Antisense strand to SEQ ID NO: 1187122
uuccacguuccaaacgauu

SEQ ID NO: 1187124 - RNA, 19 nt, Artificial Sequence
  Description of Artificial Sequence: Synthetic oligonucleotide
  Sense strand starting at position 1110 of SEQ ID NO: 916827
guggaaguccucuggguuc

SEQ ID NO: 1187125 - RNA, 19 nt, Artificial Sequence
  Description of Artificial Sequence: Synthetic oligonucleotide
  Antisense strand to SEQ ID NO: 1187124
gaacccagaggacuuccac

SEQ ID NO: 1187126 - RNA, 19 nt, Artificial Sequence
  Description of Artificial Sequence: Synthetic oligonucleotide
  Sense strand starting at position 1222 of SEQ ID NO: 916827
uuaagaaguuguccuguag

SEQ ID NO: 1187127 - RNA, 19 nt, Artificial Sequence
  Description of Artificial Sequence: Synthetic oligonucleotide
  Antisense strand to SEQ ID NO: 1187126
cuacaggacaacuucuuaa

SEQ ID NO: 1187128 - RNA, 19 nt, Artificial Sequence
  Description of Artificial Sequence: Synthetic oligonucleotide
  Sense strand starting at position 1297 of SEQ ID NO: 916827
acuguaucugcgccgugau

SEQ ID NO: 1187129 - RNA, 19 nt, Artificial Sequence
  Description of Artificial Sequence: Synthetic oligonucleotide
  Antisense strand to SEQ ID NO: 1187128
aucacggcgcagauacagu

SEQ ID NO: 1187130 - RNA, 19 nt, Artificial Sequence
  Description of Artificial Sequence: Synthetic oligonucleotide
  Sense strand starting at position 1299 of SEQ ID NO: 916827
uguaucugcgccgugauua

SEQ ID NO: 1187131 - RNA, 19 nt, Artificial Sequence
  Description of Artificial Sequence: Synthetic oligonucleotide
  Antisense strand to SEQ ID NO: 1187130
uaaucacggcgcagauaca

SEQ ID NO: 1187132 - RNA, 19 nt, Artificial Sequence
  Description of Artificial Sequence: Synthetic oligonucleotide
  Sense strand starting at position 1681 of SEQ ID NO: 916827
ucucgaggcacuugucaaa

SEQ ID NO: 1187133 - RNA, 19 nt, Artificial Sequence
  Description of Artificial Sequence: Synthetic oligonucleotide
  Antisense strand to SEQ ID NO: 1187132
uuugacaagugccucgaga

SEQ ID NO: 1187134 - RNA, 19 nt, Artificial Sequence
  Description of Artificial Sequence: Synthetic oligonucleotide
  Sense strand starting at position 2177 of SEQ ID NO: 916827
gaauaacccuuccgggaga

SEQ ID NO: 1187135 - RNA, 19 nt, Artificial Sequence
  Description of Artificial Sequence: Synthetic oligonucleotide
  Antisense strand to SEQ ID NO: 1187134
ucucccggaaggguuauuc

SEQ ID NO: 1187136 - RNA, 19 nt, Artificial Sequence
  Description of Artificial Sequence: Synthetic oligonucleotide
  Sense strand starting at position 2179 of SEQ ID NO: 916827
auaacccuuccgggagaau

SEQ ID NO: 1187137 - RNA, 19 nt, Artificial Sequence
  Description of Artificial Sequence: Synthetic oligonucleotide
  Antisense strand to SEQ ID NO: 1187136
auucucccggaaggguuau

SEQ ID NO: 1187138 - RNA, 19 nt, Artificial Sequence
  Description of Artificial Sequence: Synthetic oligonucleotide
  Sense strand starting at position 3188 of SEQ ID NO: 916827
aggaguugcaaucgaggua

SEQ ID NO: 1187139 - RNA, 19 nt, Artificial Sequence
  Description of Artificial Sequence: Synthetic oligonucleotide
  Antisense strand to SEQ ID NO: 1187138
uaccucgauugcaacuccu

SEQ ID NO: 1187140 - RNA, 19 nt, Artificial Sequence
  Description of Artificial Sequence: Synthetic oligonucleotide
  Sense strand starting at position 3189 of SEQ ID NO: 916827
ggaguugcaaucgagguau

SEQ ID NO: 1187141 - RNA, 19 nt, Artificial Sequence
  Description of Artificial Sequence: Synthetic oligonucleotide
  Antisense strand to SEQ ID NO: 1187140
auaccucgauugcaacucc

SEQ ID NO: 1187142 - RNA, 19 nt, Artificial Sequence
  Description of Artificial Sequence: Synthetic oligonucleotide
  Sense strand starting at position 3191 of SEQ ID NO: 916827
aguugcaaucgagguaucu

SEQ ID NO: 1187143 - RNA, 19 nt, Artificial Sequence
  Description of Artificial Sequence: Synthetic oligonucleotide
  Antisense strand to SEQ ID NO: 1187142
agauaccucgauugcaacu

SEQ ID NO: 1187144 - RNA, 19 nt, Artificial Sequence
  Description of Artificial Sequence: Synthetic oligonucleotide
  Sense strand starting at position 3282 of SEQ ID NO: 916827
ccacguuagcauucgcauu

SEQ ID NO: 1187145 - RNA, 19 nt, Artificial Sequence
  Description of Artificial Sequence: Synthetic oligonucleotide
  Antisense strand to SEQ ID NO: 1187144
aaugcgaaugcuaacgugg

SEQ ID NO: 1187146 - RNA, 19 nt, Artificial Sequence
  Description of Artificial Sequence: Synthetic oligonucleotide
  Sense strand starting at position 3292 of SEQ ID NO: 916827
auucgcauuccugggagga

SEQ ID NO: 1187147 - RNA, 19 nt, Artificial Sequence
  Description of Artificial Sequence: Synthetic oligonucleotide
  Antisense strand to SEQ ID NO: 1187146
uccucccaggaaugcgaau

SEQ ID NO: 1187148 - RNA, 19 nt, Artificial Sequence
  Description of Artificial Sequence: Synthetic oligonucleotide
  Sense strand starting at position 3293 of SEQ ID NO: 916827
uucgcauuccugggaggau

SEQ ID NO: 1187149 - RNA, 19 nt, Artificial Sequence
  Description of Artificial Sequence: Synthetic oligonucleotide
  Antisense strand to SEQ ID NO: 1187148
auccucccaggaaugcgaa

SEQ ID NO: 1187150 - RNA, 19 nt, Artificial Sequence
  Description of Artificial Sequence: Synthetic oligonucleotide
  Sense strand starting at position 3368 of SEQ ID NO: 916827
gggagcgcccuguaauugu

SEQ ID NO: 1187151 - RNA, 19 nt, Artificial Sequence
  Description of Artificial Sequence: Synthetic oligonucleotide
  Antisense strand to SEQ ID NO: 1187150
acaauuacagggcgcuccc

SEQ ID NO: 1187152 - RNA, 19 nt, Artificial Sequence
  Description of Artificial Sequence: Synthetic oligonucleotide
  Sense strand starting at position 3375 of SEQ ID NO: 916827
cccuguaauuguccugaac

SEQ ID NO: 1187153 - RNA, 19 nt, Artificial Sequence
  Description of Artificial Sequence: Synthetic oligonucleotide
  Antisense strand to SEQ ID NO: 1187152
guucaggacaauuacaggg

SEQ ID NO: 1187154 - RNA, 19 nt, Artificial Sequence
  Description of Artificial Sequence: Synthetic oligonucleotide
  Sense strand starting at position 3378 of SEQ ID NO: 916827
uguaauuguccugaacaca

SEQ ID NO: 1187155 - RNA, 19 nt, Artificial Sequence
  Description of Artificial Sequence: Synthetic oligonucleotide
  Antisense strand to SEQ ID NO: 1187154
uguguucaggacaauuaca

SEQ ID NO: 1187156 - RNA, 19 nt, Artificial Sequence
  Description of Artificial Sequence: Synthetic oligonucleotide
  Sense strand starting at position 3475 of SEQ ID NO: 916827
uuauuaaagguccgggagu

SEQ ID NO: 1187157 - RNA, 19 nt, Artificial Sequence
  Description of Artificial Sequence: Synthetic oligonucleotide
  Antisense strand to SEQ ID NO: 1187156
acucccggaccuuuaauaa

SEQ ID NO: 1187158 - RNA, 19 nt, Artificial Sequence
  Description of Artificial Sequence: Synthetic oligonucleotide
  Sense strand starting at position 3672 of SEQ ID NO: 916827
guaauuuggccguggguag

SEQ ID NO: 1187159 - RNA, 19 nt, Artificial Sequence
  Description of Artificial Sequence: Synthetic oligonucleotide
  Antisense strand to SEQ ID NO: 1187158
cuacccacggccaaauuac

SEQ ID NO: 1187160 - RNA, 19 nt, Artificial Sequence
  Description of Artificial Sequence: Synthetic oligonucleotide
  Sense strand starting at position 3688 of SEQ ID NO: 916827
uagguaauuggcuggagca

SEQ ID NO: 1187161 - RNA, 19 nt, Artificial Sequence
  Description of Artificial Sequence: Synthetic oligonucleotide
  Antisense strand to SEQ ID NO: 1187160
ugcuccagccaauuaccua

SEQ ID NO: 1187162 - RNA, 19 nt, Artificial Sequence
  Description of Artificial Sequence: Synthetic oligonucleotide
  Sense strand starting at position 3742 of SEQ ID NO: 916827
uucuauagggcuugaguua

SEQ ID NO: 1187163 - RNA, 19 nt, Artificial Sequence
  Description of Artificial Sequence: Synthetic oligonucleotide
  Antisense strand to SEQ ID NO: 1187162
uaacucaagcccuauagaa

SEQ ID NO: 1187164 - RNA, 19 nt, Artificial Sequence
  Description of Artificial Sequence: Synthetic oligonucleotide
  Sense strand starting at position 3743 of SEQ ID NO: 916827
ucuauagggcuugaguuau

SEQ ID NO: 1187165 - RNA, 19 nt, Artificial Sequence
  Description of Artificial Sequence: Synthetic oligonucleotide
  Antisense strand to SEQ ID NO: 1187164
auaacucaagcccuauaga

SEQ ID NO: 1187166 - RNA, 19 nt, Artificial Sequence
  Description of Artificial Sequence: Synthetic oligonucleotide
  Sense strand starting at position 3754 of SEQ ID NO: 916827
ugaguuauuagacgcugau

SEQ ID NO: 1187167 - RNA, 19 nt, Artificial Sequence
  Description of Artificial Sequence: Synthetic oligonucleotide
  Antisense strand to SEQ ID NO: 1187166
aucagcgucuaauaacuca

SEQ ID NO: 1187168 - RNA, 19 nt, Artificial Sequence
  Description of Artificial Sequence: Synthetic oligonucleotide
  Sense strand starting at position 3758 of SEQ ID NO: 916827
uuauuagacgcugaucuca

SEQ ID NO: 1187169 - RNA, 19 nt, Artificial Sequence
  Description of Artificial Sequence: Synthetic oligonucleotide
  Antisense strand to SEQ ID NO: 1187168
ugagaucagcgucuaauaa

SEQ ID NO: 1187170 - RNA, 19 nt, Artificial Sequence
  Description of Artificial Sequence: Synthetic oligonucleotide
  Sense strand starting at position 3760 of SEQ ID NO: 916827
auuagacgcugaucucaaa

SEQ ID NO: 1187171 - RNA, 19 nt, Artificial Sequence
  Description of Artificial Sequence: Synthetic oligonucleotide
  Antisense strand to SEQ ID NO: 1187170
uuugagaucagcgucuaau

SEQ ID NO: 1187172 - RNA, 19 nt, Artificial Sequence
  Description of Artificial Sequence: Synthetic oligonucleotide
  Sense strand starting at position 3917 of SEQ ID NO: 916827
gacgucucaguguguuuaa

SEQ ID NO: 1187173 - RNA, 19 nt, Artificial Sequence
  Description of Artificial Sequence: Synthetic oligonucleotide
  Antisense strand to SEQ ID NO: 1187172
uuaaacacacugagacguc

SEQ ID NO: 1187174 - RNA, 19 nt, Artificial Sequence
  Description of Artificial Sequence: Synthetic oligonucleotide
  Sense strand starting at position 3920 of SEQ ID NO: 916827
gucucaguguguuuaacau

SEQ ID NO: 1187175 - RNA, 19 nt, Artificial Sequence
  Description of Artificial Sequence: Synthetic oligonucleotide
  Antisense strand to SEQ ID NO: 1187174
auguuaaacacacugagac

SEQ ID NO: 1187176 - RNA, 19 nt, Artificial Sequence
  Description of Artificial Sequence: Synthetic oligonucleotide
  Sense strand starting at position 3924 of SEQ ID NO: 916827
caguguguuuaacauuugu

SEQ ID NO: 1187177 - RNA, 19 nt, Artificial Sequence
  Description of Artificial Sequence: Synthetic oligonucleotide
  Antisense strand to SEQ ID NO: 1187176
acaaauguuaaacacacug

SEQ ID NO: 1187178 - RNA, 19 nt, Artificial Sequence
  Description of Artificial Sequence: Synthetic oligonucleotide
  Sense strand starting at position 28 of SEQ ID NO: 916828
gugagacagugagaaucaa

SEQ ID NO: 1187179 - RNA, 19 nt, Artificial Sequence
  Description of Artificial Sequence: Synthetic oligonucleotide
  Antisense strand to SEQ ID NO: 1187178
uugauucucacugucucac

SEQ ID NO: 1187180 - RNA, 19 nt, Artificial Sequence
  Description of Artificial Sequence: Synthetic oligonucleotide
  Sense strand starting at position 64 of SEQ ID NO: 916828
ggugauuuguaagcugcca

SEQ ID NO: 1187181 - RNA, 19 nt, Artificial Sequence
  Description of Artificial Sequence: Synthetic oligonucleotide
  Antisense strand to SEQ ID NO: 1187180
uggcagcuuacaaaucacc

SEQ ID NO: 1187182 - RNA, 19 nt, Artificial Sequence
  Description of Artificial Sequence: Synthetic oligonucleotide
  Sense strand starting at position 102 of SEQ ID NO: 916828
uuaucuucgcuuuggguaa

SEQ ID NO: 1187183 - RNA, 19 nt, Artificial Sequence
  Description of Artificial Sequence: Synthetic oligonucleotide
  Antisense strand to SEQ ID NO: 1187182
uuacccaaagcgaagauaa

SEQ ID NO: 1187184 - RNA, 19 nt, Artificial Sequence
  Description of Artificial Sequence: Synthetic oligonucleotide
  Sense strand starting at position 106 of SEQ ID NO: 916828
cuucgcuuuggguaaguaa

SEQ ID NO: 1187185 - RNA, 19 nt, Artificial Sequence
  Description of Artificial Sequence: Synthetic oligonucleotide
  Antisense strand to SEQ ID NO: 1187184
uuacuuacccaaagcgaag

SEQ ID NO: 1187186 - RNA, 19 nt, Artificial Sequence
  Description of Artificial Sequence: Synthetic oligonucleotide
  Sense strand starting at position 253 of SEQ ID NO: 916828
cuggcccucagugguaauu

SEQ ID NO: 1187187 - RNA, 19 nt, Artificial Sequence
  Description of Artificial Sequence: Synthetic oligonucleotide
  Antisense strand to SEQ ID NO: 1187186
aauuaccacugagggccag

SEQ ID NO: 1187188 - RNA, 19 nt, Artificial Sequence
  Description of Artificial Sequence: Synthetic oligonucleotide
  Sense strand starting at position 622 of SEQ ID NO: 916828
aaugauagaugguuaguuu

SEQ ID NO: 1187189 - RNA, 19 nt, Artificial Sequence
  Description of Artificial Sequence: Synthetic oligonucleotide
  Antisense strand to SEQ ID NO: 1187188
aaacuaaccaucuaucauu

SEQ ID NO: 1187190 - RNA, 19 nt, Artificial Sequence
  Description of Artificial Sequence: Synthetic oligonucleotide
  Sense strand starting at position 823 of SEQ ID NO: 916828
uucuccaagaguugaguga

SEQ ID NO: 1187191 - RNA, 19 nt, Artificial Sequence
  Description of Artificial Sequence: Synthetic oligonucleotide
  Antisense strand to SEQ ID NO: 1187190
ucacucaacucuuggagaa

SEQ ID NO: 1187192 - RNA, 19 nt, Artificial Sequence
  Description of Artificial Sequence: Synthetic oligonucleotide
  Sense strand starting at position 824 of SEQ ID NO: 916828
ucuccaagaguugagugau

SEQ ID NO: 1187193 - RNA, 19 nt, Artificial Sequence
  Description of Artificial Sequence: Synthetic oligonucleotide
  Antisense strand to SEQ ID NO: 1187192
aucacucaacucuuggaga

SEQ ID NO: 1187194 - RNA, 19 nt, Artificial Sequence
  Description of Artificial Sequence: Synthetic oligonucleotide
  Sense strand starting at position 827 of SEQ ID NO: 916828
ccaagaguugagugaugaa

SEQ ID NO: 1187195 - RNA, 19 nt, Artificial Sequence
  Description of Artificial Sequence: Synthetic oligonucleotide
  Antisense strand to SEQ ID NO: 1187194
uucaucacucaacucuugg

SEQ ID NO: 1187196 - RNA, 19 nt, Artificial Sequence
  Description of Artificial Sequence: Synthetic oligonucleotide
  Sense strand starting at position 839 of SEQ ID NO: 916828
ugaugaagcucuuuaaccu

SEQ ID NO: 1187197 - RNA, 19 nt, Artificial Sequence
  Description of Artificial Sequence: Synthetic oligonucleotide
  Antisense strand to SEQ ID NO: 1187196
agguuaaagagcuucauca

SEQ ID NO: 1187198 - RNA, 19 nt, Artificial Sequence
  Description of Artificial Sequence: Synthetic oligonucleotide
  Sense strand starting at position 846 of SEQ ID NO: 916828
gcucuuuaaccugaaguuu

SEQ ID NO: 1187199 - RNA, 19 nt, Artificial Sequence
  Description of Artificial Sequence: Synthetic oligonucleotide
  Antisense strand to SEQ ID NO: 1187198
aaacuucagguuaaagagc

SEQ ID NO: 1187200 - RNA, 19 nt, Artificial Sequence
  Description of Artificial Sequence: Synthetic oligonucleotide
  Sense strand starting at position 857 of SEQ ID NO: 916828
ugaaguuuacuaugccuca

SEQ ID NO: 1187201 - RNA, 19 nt, Artificial Sequence
  Description of Artificial Sequence: Synthetic oligonucleotide
  Antisense strand to SEQ ID NO: 1187200
ugaggcauaguaaacuuca

SEQ ID NO: 1187202 - RNA, 19 nt, Artificial Sequence
  Description of Artificial Sequence: Synthetic oligonucleotide
  Sense strand starting at position 860 of SEQ ID NO: 916828
aguuuacuaugccucauuu

SEQ ID NO: 1187203 - RNA, 19 nt, Artificial Sequence
  Description of Artificial Sequence: Synthetic oligonucleotide
  Antisense strand to SEQ ID NO: 1187202
aaaugaggcauaguaaacu

SEQ ID NO: 1187204 - RNA, 19 nt, Artificial Sequence
  Description of Artificial Sequence: Synthetic oligonucleotide
  Sense strand starting at position 893 of SEQ ID NO: 916828
ggguaagucuuaucccaaa

SEQ ID NO: 1187205 - RNA, 19 nt, Artificial Sequence
  Description of Artificial Sequence: Synthetic oligonucleotide
  Antisense strand to SEQ ID NO: 1187204
uuugggauaagacuuaccc

SEQ ID NO: 1187206 - RNA, 19 nt, Artificial Sequence
  Description of Artificial Sequence: Synthetic oligonucleotide
  Sense strand starting at position 920 of SEQ ID NO: 916828
uagggaugcuaggagaaua

SEQ ID NO: 1187207 - RNA, 19 nt, Artificial Sequence
  Description of Artificial Sequence: Synthetic oligonucleotide
  Antisense strand to SEQ ID NO: 1187206
uauucuccuagcaucccua

SEQ ID NO: 1187208 - RNA, 19 nt, Artificial Sequence
  Description of Artificial Sequence: Synthetic oligonucleotide
  Sense strand starting at position 1030 of SEQ ID NO: 916828
gggagcauacugcacuaaa

SEQ ID NO: 1187209 - RNA, 19 nt, Artificial Sequence
  Description of Artificial Sequence: Synthetic oligonucleotide
  Antisense strand to SEQ ID NO: 1187208
uuuagugcaguaugcuccc

SEQ ID NO: 1187210 - RNA, 19 nt, Artificial Sequence
  Description of Artificial Sequence: Synthetic oligonucleotide
  Sense strand starting at position 1158 of SEQ ID NO: 916828
ggcccuuuggcgugaagga

SEQ ID NO: 1187211 - RNA, 19 nt, Artificial Sequence
  Description of Artificial Sequence: Synthetic oligonucleotide
  Antisense strand to SEQ ID NO: 1187210
uccuucacgccaaagggcc

SEQ ID NO: 1187212 - RNA, 19 nt, Artificial Sequence
  Description of Artificial Sequence: Synthetic oligonucleotide
  Sense strand starting at position 1194 of SEQ ID NO: 916828
ugaccaagcgguuggagau

SEQ ID NO: 1187213 - RNA, 19 nt, Artificial Sequence
  Description of Artificial Sequence: Synthetic oligonucleotide
  Antisense strand to SEQ ID NO: 1187212
aucuccaaccgcuugguca

SEQ ID NO: 1187214 - RNA, 19 nt, Artificial Sequence
  Description of Artificial Sequence: Synthetic oligonucleotide
  Sense strand starting at position 1206 of SEQ ID NO: 916828
uggagaucucuuugccgca

SEQ ID NO: 1187215 - RNA, 19 nt, Artificial Sequence
  Description of Artificial Sequence: Synthetic oligonucleotide
  Antisense strand to SEQ ID NO: 1187214
ugcggcaaagagaucucca

SEQ ID NO: 1187216 - RNA, 19 nt, Artificial Sequence
  Description of Artificial Sequence: Synthetic oligonucleotide
  Sense strand starting at position 1207 of SEQ ID NO: 916828
ggagaucucuuugccgcau

SEQ ID NO: 1187217 - RNA, 19 nt, Artificial Sequence
  Description of Artificial Sequence: Synthetic oligonucleotide
  Antisense strand to SEQ ID NO: 1187216
augcggcaaagagaucucc

SEQ ID NO: 1187218 - RNA, 19 nt, Artificial Sequence
  Description of Artificial Sequence: Synthetic oligonucleotide
  Sense strand starting at position 1208 of SEQ ID NO: 916828
gagaucucuuugccgcaua

SEQ ID NO: 1187219 - RNA, 19 nt, Artificial Sequence
  Description of Artificial Sequence: Synthetic oligonucleotide
  Antisense strand to SEQ ID NO: 1187218
uaugcggcaaagagaucuc

SEQ ID NO: 1187220 - RNA, 19 nt, Artificial Sequence
  Description of Artificial Sequence: Synthetic oligonucleotide
  Sense strand starting at position 1328 of SEQ ID NO: 916828
gggcgaaguccugaccaga

SEQ ID NO: 1187221 - RNA, 19 nt, Artificial Sequence
  Description of Artificial Sequence: Synthetic oligonucleotide
  Antisense strand to SEQ ID NO: 1187220
ucuggucaggacuucgccc

SEQ ID NO: 1187222 - RNA, 19 nt, Artificial Sequence
  Description of Artificial Sequence: Synthetic oligonucleotide
  Sense strand starting at position 1504 of SEQ ID NO: 916828
caauaugcagguuaucgau

SEQ ID NO: 1187223 - RNA, 19 nt, Artificial Sequence
  Description of Artificial Sequence: Synthetic oligonucleotide
  Antisense strand to SEQ ID NO: 1187222
aucgauaaccugcauauug

SEQ ID NO: 1187224 - RNA, 19 nt, Artificial Sequence
  Description of Artificial Sequence: Synthetic oligonucleotide
  Sense strand starting at position 1619 of SEQ ID NO: 916828
acaccuauucccuggaggu

SEQ ID NO: 1187225 - RNA, 19 nt, Artificial Sequence
  Description of Artificial Sequence: Synthetic oligonucleotide
  Antisense strand to SEQ ID NO: 1187224
accuccagggaauaggugu

SEQ ID NO: 1187226 - RNA, 19 nt, Artificial Sequence
  Description of Artificial Sequence: Synthetic oligonucleotide
  Sense strand starting at position 1654 of SEQ ID NO: 916828
uccaaagagcucugacaua

SEQ ID NO: 1187227 - RNA, 19 nt, Artificial Sequence
  Description of Artificial Sequence: Synthetic oligonucleotide
  Antisense strand to SEQ ID NO: 1187226
uaugucagagcucuuugga

SEQ ID NO: 1187228 - RNA, 19 nt, Artificial Sequence
  Description of Artificial Sequence: Synthetic oligonucleotide
  Sense strand starting at position 1941 of SEQ ID NO: 916828
ggcaaauaccucuagccau

SEQ ID NO: 1187229 - RNA, 19 nt, Artificial Sequence
  Description of Artificial Sequence: Synthetic oligonucleotide
  Antisense strand to SEQ ID NO: 1187228
auggcuagagguauuugcc

SEQ ID NO: 1187230 - RNA, 19 nt, Artificial Sequence
  Description of Artificial Sequence: Synthetic oligonucleotide
  Sense strand starting at position 2231 of SEQ ID NO: 916828
aaauuugaccgucgccaga

SEQ ID NO: 1187231 - RNA, 19 nt, Artificial Sequence
  Description of Artificial Sequence: Synthetic oligonucleotide
  Antisense strand to SEQ ID NO: 1187230
ucuggcgacggucaaauuu

SEQ ID NO: 1187232 - RNA, 19 nt, Artificial Sequence
  Description of Artificial Sequence: Synthetic oligonucleotide
  Sense strand starting at position 2251 of SEQ ID NO: 916828
guugaauggcugcgaugga

SEQ ID NO: 1187233 - RNA, 19 nt, Artificial Sequence
  Description of Artificial Sequence: Synthetic oligonucleotide
  Antisense strand to SEQ ID NO: 1187232
uccaucgcagccauucaac

SEQ ID NO: 1187234 - RNA, 19 nt, Artificial Sequence
  Description of Artificial Sequence: Synthetic oligonucleotide
  Sense strand starting at position 2433 of SEQ ID NO: 916828
ccucgaucuucccuuaaga

SEQ ID NO: 1187235 - RNA, 19 nt, Artificial Sequence
  Description of Artificial Sequence: Synthetic oligonucleotide
  Antisense strand to SEQ ID NO: 1187234
ucuuaagggaagaucgagg

SEQ ID NO: 1187236 - RNA, 19 nt, Artificial Sequence
  Description of Artificial Sequence: Synthetic oligonucleotide
  Sense strand starting at position 2463 of SEQ ID NO: 916828
ugagucucccagcaguuua

SEQ ID NO: 1187237 - RNA, 19 nt, Artificial Sequence
  Description of Artificial Sequence: Synthetic oligonucleotide
  Antisense strand to SEQ ID NO: 1187236
uaaacugcugggagacuca

SEQ ID NO: 1187238 - RNA, 19 nt, Artificial Sequence
  Description of Artificial Sequence: Synthetic oligonucleotide
  Sense strand starting at position 2688 of SEQ ID NO: 916828
gugguaucgcaugcaugua

SEQ ID NO: 1187239 - RNA, 19 nt, Artificial Sequence
  Description of Artificial Sequence: Synthetic oligonucleotide
  Antisense strand to SEQ ID NO: 1187238
uacaugcaugcgauaccac

SEQ ID NO: 1187240 - RNA, 19 nt, Artificial Sequence
  Description of Artificial Sequence: Synthetic oligonucleotide
  Sense strand starting at position 2689 of SEQ ID NO: 916828
ugguaucgcaugcauguaa

SEQ ID NO: 1187241 - RNA, 19 nt, Artificial Sequence
  Description of Artificial Sequence: Synthetic oligonucleotide
  Antisense strand to SEQ ID NO: 1187240
uuacaugcaugcgauacca

SEQ ID NO: 1187242 - RNA, 19 nt, Artificial Sequence
  Description of Artificial Sequence: Synthetic oligonucleotide
  Sense strand starting at position 2733 of SEQ ID NO: 916828
cggagaauagcauguaauc

SEQ ID NO: 1187243 - RNA, 19 nt, Artificial Sequence
  Description of Artificial Sequence: Synthetic oligonucleotide
  Antisense strand to SEQ ID NO: 1187242
gauuacaugcuauucuccg

SEQ ID NO: 1187244 - RNA, 19 nt, Artificial Sequence
  Description of Artificial Sequence: Synthetic oligonucleotide
  Sense strand starting at position 3332 of SEQ ID NO: 916828
gucacccagcaauguaauu

SEQ ID NO: 1187245 - RNA, 19 nt, Artificial Sequence
  Description of Artificial Sequence: Synthetic oligonucleotide
  Antisense strand to SEQ ID NO: 1187244
aauuacauugcugggugac

SEQ ID NO: 1187246 - RNA, 19 nt, Artificial Sequence
  Description of Artificial Sequence: Synthetic oligonucleotide
  Sense strand starting at position 3451 of SEQ ID NO: 916828
gucaguauguucccagaga

SEQ ID NO: 1187247 - RNA, 19 nt, Artificial Sequence
  Description of Artificial Sequence: Synthetic oligonucleotide
  Antisense strand to SEQ ID NO: 1187246
ucucugggaacauacugac

SEQ ID NO: 1187248 - RNA, 19 nt, Artificial Sequence
  Description of Artificial Sequence: Synthetic oligonucleotide
  Sense strand starting at position 3553 of SEQ ID NO: 916828
gugggacgaggucacuaau

SEQ ID NO: 1187249 - RNA, 19 nt, Artificial Sequence
  Description of Artificial Sequence: Synthetic oligonucleotide
  Antisense strand to SEQ ID NO: 1187248
auuagugaccucgucccac

SEQ ID NO: 1187250 - RNA, 19 nt, Artificial Sequence
  Description of Artificial Sequence: Synthetic oligonucleotide
  Sense strand starting at position 3675 of SEQ ID NO: 916828
augugaaagcacugggaaa

SEQ ID NO: 1187251 - RNA, 19 nt, Artificial Sequence
  Description of Artificial Sequence: Synthetic oligonucleotide
  Antisense strand to SEQ ID NO: 1187250
uuucccagugcuuucacau

SEQ ID NO: 1187252 - RNA, 19 nt, Artificial Sequence
  Description of Artificial Sequence: Synthetic oligonucleotide
  Sense strand starting at position 3714 of SEQ ID NO: 916828
ucacaaagucacuguguca

SEQ ID NO: 1187253 - RNA, 19 nt, Artificial Sequence
  Description of Artificial Sequence: Synthetic oligonucleotide
  Antisense strand to SEQ ID NO: 1187252
ugacacagugacuuuguga

SEQ ID NO: 1187254 - RNA, 19 nt, Artificial Sequence
  Description of Artificial Sequence: Synthetic oligonucleotide
  Sense strand starting at position 3795 of SEQ ID NO: 916828
ugccguaaucuccaacaug

SEQ ID NO: 1187255 - RNA, 19 nt, Artificial Sequence
  Description of Artificial Sequence: Synthetic oligonucleotide
  Antisense strand to SEQ ID NO: 1187254
cauguuggagauuacggca

SEQ ID NO: 1187256 - RNA, 19 nt, Artificial Sequence
  Description of Artificial Sequence: Synthetic oligonucleotide
  Sense strand starting at position 3826 of SEQ ID NO: 916828
cauaaauauguggaagugu

SEQ ID NO: 1187257 - RNA, 19 nt, Artificial Sequence
  Description of Artificial Sequence: Synthetic oligonucleotide
  Antisense strand to SEQ ID NO: 1187256
acacuuccacauauuuaug

SEQ ID NO: 1187258 - RNA, 19 nt, Artificial Sequence
  Description of Artificial Sequence: Synthetic oligonucleotide
  Sense strand starting at position 204 of SEQ ID NO: 916829
uguacagaaugauaggaaa

SEQ ID NO: 1187259 - RNA, 19 nt, Artificial Sequence
  Description of Artificial Sequence: Synthetic oligonucleotide
  Antisense strand to SEQ ID NO: 1187258
uuuccuaucauucuguaca

SEQ ID NO: 1187260 - RNA, 19 nt, Artificial Sequence
  Description of Artificial Sequence: Synthetic oligonucleotide
  Sense strand starting at position 226 of SEQ ID NO: 916829
guacaaagagcucagacuu

SEQ ID NO: 1187261 - RNA, 19 nt, Artificial Sequence
  Description of Artificial Sequence: Synthetic oligonucleotide
  Antisense strand to SEQ ID NO: 1187260
aagucugagcucuuuguac

SEQ ID NO: 1187262 - RNA, 19 nt, Artificial Sequence
  Description of Artificial Sequence: Synthetic oligonucleotide
  Sense strand starting at position 325 of SEQ ID NO: 916829
aauauaaaccaugguguga

SEQ ID NO: 1187263 - RNA, 19 nt, Artificial Sequence
  Description of Artificial Sequence: Synthetic oligonucleotide
  Antisense strand to SEQ ID NO: 1187262
ucacaccaugguuuauauu

SEQ ID NO: 1187264 - RNA, 19 nt, Artificial Sequence
  Description of Artificial Sequence: Synthetic oligonucleotide
  Sense strand starting at position 482 of SEQ ID NO: 916829
ucauuaauguguccauucu

SEQ ID NO: 1187265 - RNA, 19 nt, Artificial Sequence
  Description of Artificial Sequence: Synthetic oligonucleotide
  Antisense strand to SEQ ID NO: 1187264
agaauggacacauuaauga

SEQ ID NO: 1187266 - RNA, 19 nt, Artificial Sequence
  Description of Artificial Sequence: Synthetic oligonucleotide
  Sense strand starting at position 512 of SEQ ID NO: 916829
aggucaucccuacagucau

SEQ ID NO: 1187267 - RNA, 19 nt, Artificial Sequence
  Description of Artificial Sequence: Synthetic oligonucleotide
  Antisense strand to SEQ ID NO: 1187266
augacuguagggaugaccu

SEQ ID NO: 1187268 - RNA, 19 nt, Artificial Sequence
  Description of Artificial Sequence: Synthetic oligonucleotide
  Sense strand starting at position 531 of SEQ ID NO: 916829
gcuccagggcuaugaagaa

SEQ ID NO: 1187269 - RNA, 19 nt, Artificial Sequence
  Description of Artificial Sequence: Synthetic oligonucleotide
  Antisense strand to SEQ ID NO: 1187268
uucuucauagcccuggagc

SEQ ID NO: 1187270 - RNA, 19 nt, Artificial Sequence
  Description of Artificial Sequence: Synthetic oligonucleotide
  Sense strand starting at position 578 of SEQ ID NO: 916829
cuuucuucacguggagaga

SEQ ID NO: 1187271 - RNA, 19 nt, Artificial Sequence
  Description of Artificial Sequence: Synthetic oligonucleotide
  Antisense strand to SEQ ID NO: 1187270
ucucuccacgugaagaaag

SEQ ID NO: 1187272 - RNA, 19 nt, Artificial Sequence
  Description of Artificial Sequence: Synthetic oligonucleotide
  Sense strand starting at position 604 of SEQ ID NO: 916829
acaguuuaaugguugguca

SEQ ID NO: 1187273 - RNA, 19 nt, Artificial Sequence
  Description of Artificial Sequence: Synthetic oligonucleotide
  Antisense strand to SEQ ID NO: 1187272
ugaccaaccauuaaacugu

SEQ ID NO: 1187274 - RNA, 19 nt, Artificial Sequence
  Description of Artificial Sequence: Synthetic oligonucleotide
  Sense strand starting at position 606 of SEQ ID NO: 916829
aguuuaaugguuggucaug

SEQ ID NO: 1187275 - RNA, 19 nt, Artificial Sequence
  Description of Artificial Sequence: Synthetic oligonucleotide
  Antisense strand to SEQ ID NO: 1187274
caugaccaaccauuaaacu

SEQ ID NO: 1187276 - RNA, 19 nt, Artificial Sequence
  Description of Artificial Sequence: Synthetic oligonucleotide
  Sense strand starting at position 789 of SEQ ID NO: 916829
aucaaacgccuuuagaaau

SEQ ID NO: 1187277 - RNA, 19 nt, Artificial Sequence
  Description of Artificial Sequence: Synthetic oligonucleotide
  Antisense strand to SEQ ID NO: 1187276
auuucuaaaggcguuugau

SEQ ID NO: 1187278 - RNA, 19 nt, Artificial Sequence
  Description of Artificial Sequence: Synthetic oligonucleotide
  Sense strand starting at position 829 of SEQ ID NO: 916829
gcccauaaucgcuagacac

SEQ ID NO: 1187279 - RNA, 19 nt, Artificial Sequence
  Description of Artificial Sequence: Synthetic oligonucleotide
  Antisense strand to SEQ ID NO: 1187278
gugucuagcgauuaugggc

SEQ ID NO: 1187280 - RNA, 19 nt, Artificial Sequence
  Description of Artificial Sequence: Synthetic oligonucleotide
  Sense strand starting at position 1048 of SEQ ID NO: 916829
gucggauuaucaccgggaa

SEQ ID NO: 1187281 - RNA, 19 nt, Artificial Sequence
  Description of Artificial Sequence: Synthetic oligonucleotide
  Antisense strand to SEQ ID NO: 1187280
uucccggugauaauccgac

SEQ ID NO: 1187282 - RNA, 19 nt, Artificial Sequence
  Description of Artificial Sequence: Synthetic oligonucleotide
  Sense strand starting at position 1049 of SEQ ID NO: 916829
ucggauuaucaccgggaaa

SEQ ID NO: 1187283 - RNA, 19 nt, Artificial Sequence
  Description of Artificial Sequence: Synthetic oligonucleotide
  Antisense strand to SEQ ID NO: 1187282
uuucccggugauaauccga

SEQ ID NO: 1187284 - RNA, 19 nt, Artificial Sequence
  Description of Artificial Sequence: Synthetic oligonucleotide
  Sense strand starting at position 1050 of SEQ ID NO: 916829
cggauuaucaccgggaaau

SEQ ID NO: 1187285 - RNA, 19 nt, Artificial Sequence
  Description of Artificial Sequence: Synthetic oligonucleotide
  Antisense strand to SEQ ID NO: 1187284
auuucccggugauaauccg

SEQ ID NO: 1187286 - RNA, 19 nt, Artificial Sequence
  Description of Artificial Sequence: Synthetic oligonucleotide
  Sense strand starting at position 1051 of SEQ ID NO: 916829
ggauuaucaccgggaaauc

SEQ ID NO: 1187287 - RNA, 19 nt, Artificial Sequence
  Description of Artificial Sequence: Synthetic oligonucleotide
  Antisense strand to SEQ ID NO: 1187286
gauuucccggugauaaucc

SEQ ID NO: 1187288 - RNA, 19 nt, Artificial Sequence
  Description of Artificial Sequence: Synthetic oligonucleotide
  Sense strand starting at position 1061 of SEQ ID NO: 916829
cgggaaaucaaacgucaug

SEQ ID NO: 1187289 - RNA, 19 nt, Artificial Sequence
  Description of Artificial Sequence: Synthetic oligonucleotide
  Antisense strand to SEQ ID NO: 1187288
caugacguuugauuucccg

SEQ ID NO: 1187290 - RNA, 19 nt, Artificial Sequence
  Description of Artificial Sequence: Synthetic oligonucleotide
  Sense strand starting at position 1180 of SEQ ID NO: 916829
ggcgguucggaagaauaaa

SEQ ID NO: 1187291 - RNA, 19 nt, Artificial Sequence
  Description of Artificial Sequence: Synthetic oligonucleotide
  Antisense strand to SEQ ID NO: 1187290
uuuauucuuccgaaccgcc

SEQ ID NO: 1187292 - RNA, 19 nt, Artificial Sequence
  Description of Artificial Sequence: Synthetic oligonucleotide
  Sense strand starting at position 1332 of SEQ ID NO: 916829
ugcuuucaccgcgcggaau

SEQ ID NO: 1187293 - RNA, 19 nt, Artificial Sequence
  Description of Artificial Sequence: Synthetic oligonucleotide
  Antisense strand to SEQ ID NO: 1187292
auuccgcgcggugaaagca

SEQ ID NO: 1187294 - RNA, 19 nt, Artificial Sequence
  Description of Artificial Sequence: Synthetic oligonucleotide
  Sense strand starting at position 1630 of SEQ ID NO: 916829
gaggaaccgaccugucgau

SEQ ID NO: 1187295 - RNA, 19 nt, Artificial Sequence
  Description of Artificial Sequence: Synthetic oligonucleotide
  Antisense strand to SEQ ID NO: 1187294
aucgacaggucgguuccuc

SEQ ID NO: 1187296 - RNA, 19 nt, Artificial Sequence
  Description of Artificial Sequence: Synthetic oligonucleotide
  Sense strand starting at position 1636 of SEQ ID NO: 916829
ccgaccugucgaugaggau

SEQ ID NO: 1187297 - RNA, 19 nt, Artificial Sequence
  Description of Artificial Sequence: Synthetic oligonucleotide
  Antisense strand to SEQ ID NO: 1187296
auccucaucgacaggucgg

SEQ ID NO: 1187298 - RNA, 19 nt, Artificial Sequence
  Description of Artificial Sequence: Synthetic oligonucleotide
  Sense strand starting at position 2116 of SEQ ID NO: 916829
ucaggugugccgccacaau

SEQ ID NO: 1187299 - RNA, 19 nt, Artificial Sequence
  Description of Artificial Sequence: Synthetic oligonucleotide
  Antisense strand to SEQ ID NO: 1187298
auuguggcggcacaccuga

SEQ ID NO: 1187300 - RNA, 19 nt, Artificial Sequence
  Description of Artificial Sequence: Synthetic oligonucleotide
  Sense strand starting at position 2141 of SEQ ID NO: 916829
ugcuguauucaguggaaag

SEQ ID NO: 1187301 - RNA, 19 nt, Artificial Sequence
  Description of Artificial Sequence: Synthetic oligonucleotide
  Antisense strand to SEQ ID NO: 1187300
cuuuccacugaauacagca

SEQ ID NO: 1187302 - RNA, 19 nt, Artificial Sequence
  Description of Artificial Sequence: Synthetic oligonucleotide
  Sense strand starting at position 2798 of SEQ ID NO: 916829
guuugcccuugaguggaaa

SEQ ID NO: 1187303 - RNA, 19 nt, Artificial Sequence
  Description of Artificial Sequence: Synthetic oligonucleotide
  Antisense strand to SEQ ID NO: 1187302
uuuccacucaagggcaaac

SEQ ID NO: 1187304 - RNA, 19 nt, Artificial Sequence
  Description of Artificial Sequence: Synthetic oligonucleotide
  Sense strand starting at position 2819 of SEQ ID NO: 916829
gaugacagaucgucuccuu

SEQ ID NO: 1187305 - RNA, 19 nt, Artificial Sequence
  Description of Artificial Sequence: Synthetic oligonucleotide
  Antisense strand to SEQ ID NO: 1187304
aaggagacgaucugucauc

SEQ ID NO: 1187306 - RNA, 19 nt, Artificial Sequence
  Description of Artificial Sequence: Synthetic oligonucleotide
  Sense strand starting at position 3114 of SEQ ID NO: 916829
uuccgauuugucuguguac

SEQ ID NO: 1187307 - RNA, 19 nt, Artificial Sequence
  Description of Artificial Sequence: Synthetic oligonucleotide
  Antisense strand to SEQ ID NO: 1187306
guacacagacaaaucggaa

SEQ ID NO: 1187308 - RNA, 19 nt, Artificial Sequence
  Description of Artificial Sequence: Synthetic oligonucleotide
  Sense strand starting at position 3116 of SEQ ID NO: 916829
ccgauuugucuguguaccu

SEQ ID NO: 1187309 - RNA, 19 nt, Artificial Sequence
  Description of Artificial Sequence: Synthetic oligonucleotide
  Antisense strand to SEQ ID NO: 1187308
agguacacagacaaaucgg

SEQ ID NO: 1187310 - RNA, 19 nt, Artificial Sequence
  Description of Artificial Sequence: Synthetic oligonucleotide
  Sense strand starting at position 3259 of SEQ ID NO: 916829
gggccaaauacugguuaau

SEQ ID NO: 1187311 - RNA, 19 nt, Artificial Sequence
  Description of Artificial Sequence: Synthetic oligonucleotide
  Antisense strand to SEQ ID NO: 1187310
auuaaccaguauuuggccc

SEQ ID NO: 1187312 - RNA, 19 nt, Artificial Sequence
  Description of Artificial Sequence: Synthetic oligonucleotide
  Sense strand starting at position 3261 of SEQ ID NO: 916829
gccaaauacugguuaauac

SEQ ID NO: 1187313 - RNA, 19 nt, Artificial Sequence
  Description of Artificial Sequence: Synthetic oligonucleotide
  Antisense strand to SEQ ID NO: 1187312
guauuaaccaguauuuggc

SEQ ID NO: 1187314 - RNA, 19 nt, Artificial Sequence
  Description of Artificial Sequence: Synthetic oligonucleotide
  Sense strand starting at position 3268 of SEQ ID NO: 916829
acugguuaauaccuguaga

SEQ ID NO: 1187315 - RNA, 19 nt, Artificial Sequence
  Description of Artificial Sequence: Synthetic oligonucleotide
  Antisense strand to SEQ ID NO: 1187314
ucuacagguauuaaccagu

SEQ ID NO: 1187316 - RNA, 19 nt, Artificial Sequence
  Description of Artificial Sequence: Synthetic oligonucleotide
  Sense strand starting at position 3368 of SEQ ID NO: 916829
gaggaagauguauguguca

SEQ ID NO: 1187317 - RNA, 19 nt, Artificial Sequence
  Description of Artificial Sequence: Synthetic oligonucleotide
  Antisense strand to SEQ ID NO: 1187316
ugacacauacaucuuccuc

SEQ ID NO: 1187318 - RNA, 19 nt, Artificial Sequence
  Description of Artificial Sequence: Synthetic oligonucleotide
  Sense strand starting at position 3370 of SEQ ID NO: 916829
ggaagauguaugugucaug

SEQ ID NO: 1187319 - RNA, 19 nt, Artificial Sequence
  Description of Artificial Sequence: Synthetic oligonucleotide
  Antisense strand to SEQ ID NO: 1187318
caugacacauacaucuucc

SEQ ID NO: 1187320 - RNA, 19 nt, Artificial Sequence
  Description of Artificial Sequence: Synthetic oligonucleotide
  Sense strand starting at position 3379 of SEQ ID NO: 916829
augugucaugguuacuuga

SEQ ID NO: 1187321 - RNA, 19 nt, Artificial Sequence
  Description of Artificial Sequence: Synthetic oligonucleotide
  Antisense strand to SEQ ID NO: 1187320
ucaaguaaccaugacacau

SEQ ID NO: 1187322 - RNA, 19 nt, Artificial Sequence
  Description of Artificial Sequence: Synthetic oligonucleotide
  Sense strand starting at position 3381 of SEQ ID NO: 916829
gugucaugguuacuugaua

SEQ ID NO: 1187323 - RNA, 19 nt, Artificial Sequence
  Description of Artificial Sequence: Synthetic oligonucleotide
  Antisense strand to SEQ ID NO: 1187322
uaucaaguaaccaugacac

SEQ ID NO: 1187324 - RNA, 19 nt, Artificial Sequence
  Description of Artificial Sequence: Synthetic oligonucleotide
  Sense strand starting at position 3382 of SEQ ID NO: 916829
ugucaugguuacuugauaa

SEQ ID NO: 1187325 - RNA, 19 nt, Artificial Sequence
  Description of Artificial Sequence: Synthetic oligonucleotide
  Antisense strand to SEQ ID NO: 1187324
uuaucaaguaaccaugaca

SEQ ID NO: 1187326 - RNA, 19 nt, Artificial Sequence
  Description of Artificial Sequence: Synthetic oligonucleotide
  Sense strand starting at position 3422 of SEQ ID NO: 916829
ggcauuuacuaguuuguuu

SEQ ID NO: 1187327 - RNA, 19 nt, Artificial Sequence
  Description of Artificial Sequence: Synthetic oligonucleotide
  Antisense strand to SEQ ID NO: 1187326
aaacaaacuaguaaaugcc

SEQ ID NO: 1187328 - RNA, 19 nt, Artificial Sequence
  Description of Artificial Sequence: Synthetic oligonucleotide
  Sense strand starting at position 3504 of SEQ ID NO: 916829
aggccauuagcuugagauc

SEQ ID NO: 1187329 - RNA, 19 nt, Artificial Sequence
  Description of Artificial Sequence: Synthetic oligonucleotide
  Antisense strand to SEQ ID NO: 1187328
gaucucaagcuaauggccu

SEQ ID NO: 1187330 - RNA, 19 nt, Artificial Sequence
  Description of Artificial Sequence: Synthetic oligonucleotide
  Sense strand starting at position 3505 of SEQ ID NO: 916829
ggccauuagcuugagauca

SEQ ID NO: 1187331 - RNA, 19 nt, Artificial Sequence
  Description of Artificial Sequence: Synthetic oligonucleotide
  Antisense strand to SEQ ID NO: 1187330
ugaucucaagcuaauggcc

SEQ ID NO: 1187332 - RNA, 19 nt, Artificial Sequence
  Description of Artificial Sequence: Synthetic oligonucleotide
  Sense strand starting at position 3516 of SEQ ID NO: 916829
ugagaucaacucuguaaca

SEQ ID NO: 1187333 - RNA, 19 nt, Artificial Sequence
  Description of Artificial Sequence: Synthetic oligonucleotide
  Antisense strand to SEQ ID NO: 1187332
uguuacagaguugaucuca

SEQ ID NO: 1187334 - RNA, 19 nt, Artificial Sequence
  Description of Artificial Sequence: Synthetic oligonucleotide
  Sense strand starting at position 3624 of SEQ ID NO: 916829
aguggaacucucugaaccu

SEQ ID NO: 1187335 - RNA, 19 nt, Artificial Sequence
  Description of Artificial Sequence: Synthetic oligonucleotide
  Antisense strand to SEQ ID NO: 1187334
agguucagagaguuccacu

SEQ ID NO: 1187336 - RNA, 19 nt, Artificial Sequence
  Description of Artificial Sequence: Synthetic oligonucleotide
  Sense strand starting at position 3827 of SEQ ID NO: 916829
caggacaguucucuguaua

SEQ ID NO: 1187337 - RNA, 19 nt, Artificial Sequence
  Description of Artificial Sequence: Synthetic oligonucleotide
  Antisense strand to SEQ ID NO: 1187336
uauacagagaacuguccug

SEQ ID NO: 1187338 - RNA, 19 nt, Artificial Sequence
  Description of Artificial Sequence: Synthetic oligonucleotide
  Sense strand starting at position 56 of SEQ ID NO: 916830
gguccuccugcaugucaga

SEQ ID NO: 1187339 - RNA, 19 nt, Artificial Sequence
  Description of Artificial Sequence: Synthetic oligonucleotide
  Antisense strand to SEQ ID NO: 1187338
ucugacaugcaggaggacc

SEQ ID NO: 1187340 - RNA, 19 nt, Artificial Sequence
  Description of Artificial Sequence: Synthetic oligonucleotide
  Sense strand starting at position 133 of SEQ ID NO: 916830
acagaaucaugauggcaag

SEQ ID NO: 1187341 - RNA, 19 nt, Artificial Sequence
  Description of Artificial Sequence: Synthetic oligonucleotide
  Antisense strand to SEQ ID NO: 1187340
cuugccaucaugauucugu

SEQ ID NO: 1187342 - RNA, 19 nt, Artificial Sequence
  Description of Artificial Sequence: Synthetic oligonucleotide
  Sense strand starting at position 438 of SEQ ID NO: 916830
guggcuuaugagggaugau

SEQ ID NO: 1187343 - RNA, 19 nt, Artificial Sequence
  Description of Artificial Sequence: Synthetic oligonucleotide
  Antisense strand to SEQ ID NO: 1187342
aucaucccucauaagccac

SEQ ID NO: 1187344 - RNA, 19 nt, Artificial Sequence
  Description of Artificial Sequence: Synthetic oligonucleotide
  Sense strand starting at position 562 of SEQ ID NO: 916830
ggaggaauguccugggaug

SEQ ID NO: 1187345 - RNA, 19 nt, Artificial Sequence
  Description of Artificial Sequence: Synthetic oligonucleotide
  Antisense strand to SEQ ID NO: 1187344
caucccaggacauuccucc

SEQ ID NO: 1187346 - RNA, 19 nt, Artificial Sequence
  Description of Artificial Sequence: Synthetic oligonucleotide
  Sense strand starting at position 694 of SEQ ID NO: 916830
ugggcucucaagugccaaa

SEQ ID NO: 1187347 - RNA, 19 nt, Artificial Sequence
  Description of Artificial Sequence: Synthetic oligonucleotide
  Antisense strand to SEQ ID NO: 1187346
uuuggcacuugagagccca

SEQ ID NO: 1187348 - RNA, 19 nt, Artificial Sequence
  Description of Artificial Sequence: Synthetic oligonucleotide
  Sense strand starting at position 697 of SEQ ID NO: 916830
gcucucaagugccaaauaa

SEQ ID NO: 1187349 - RNA, 19 nt, Artificial Sequence
  Description of Artificial Sequence: Synthetic oligonucleotide
  Antisense strand to SEQ ID NO: 1187348
uuauuuggcacuugagagc

SEQ ID NO: 1187350 - RNA, 19 nt, Artificial Sequence
  Description of Artificial Sequence: Synthetic oligonucleotide
  Sense strand starting at position 1710 of SEQ ID NO: 916830
agaugugguuaagaaacaa

SEQ ID NO: 1187351 - RNA, 19 nt, Artificial Sequence
  Description of Artificial Sequence: Synthetic oligonucleotide
  Antisense strand to SEQ ID NO: 1187350
uuguuucuuaaccacaucu

SEQ ID NO: 1187352 - RNA, 19 nt, Artificial Sequence
  Description of Artificial Sequence: Synthetic oligonucleotide
  Sense strand starting at position 1827 of SEQ ID NO: 916830
acugccugccuucgaagaa

SEQ ID NO: 1187353 - RNA, 19 nt, Artificial Sequence
  Description of Artificial Sequence: Synthetic oligonucleotide
  Antisense strand to SEQ ID NO: 1187352
uucuucgaaggcaggcagu

SEQ ID NO: 1187354 - RNA, 19 nt, Artificial Sequence
  Description of Artificial Sequence: Synthetic oligonucleotide
  Sense strand starting at position 2022 of SEQ ID NO: 916830
gaacguuuaccaugucaca

SEQ ID NO: 1187355 - RNA, 19 nt, Artificial Sequence
  Description of Artificial Sequence: Synthetic oligonucleotide
  Antisense strand to SEQ ID NO: 1187354
ugugacaugguaaacguuc

SEQ ID NO: 1187356 - RNA, 19 nt, Artificial Sequence
  Description of Artificial Sequence: Synthetic oligonucleotide
  Sense strand starting at position 2245 of SEQ ID NO: 916830
aggcgaagaucacuggauu

SEQ ID NO: 1187357 - RNA, 19 nt, Artificial Sequence
  Description of Artificial Sequence: Synthetic oligonucleotide
  Antisense strand to SEQ ID NO: 1187356
aauccagugaucuucgccu

SEQ ID NO: 1187358 - RNA, 19 nt, Artificial Sequence
  Description of Artificial Sequence: Synthetic oligonucleotide
  Sense strand starting at position 2366 of SEQ ID NO: 916830
cuaauauccgugccgugua

SEQ ID NO: 1187359 - RNA, 19 nt, Artificial Sequence
  Description of Artificial Sequence: Synthetic oligonucleotide
  Antisense strand to SEQ ID NO: 1187358
uacacggcacggauauuag

SEQ ID NO: 1187360 - RNA, 19 nt, Artificial Sequence
  Description of Artificial Sequence: Synthetic oligonucleotide
  Sense strand starting at position 2376 of SEQ ID NO: 916830
ugccguguaguguucacaa

SEQ ID NO: 1187361 - RNA, 19 nt, Artificial Sequence
  Description of Artificial Sequence: Synthetic oligonucleotide
  Antisense strand to SEQ ID NO: 1187360
uugugaacacuacacggca

SEQ ID NO: 1187362 - RNA, 19 nt, Artificial Sequence
  Description of Artificial Sequence: Synthetic oligonucleotide
  Sense strand starting at position 2378 of SEQ ID NO: 916830
ccguguaguguucacaaau

SEQ ID NO: 1187363 - RNA, 19 nt, Artificial Sequence
  Description of Artificial Sequence: Synthetic oligonucleotide
  Antisense strand to SEQ ID NO: 1187362
auuugugaacacuacacgg

SEQ ID NO: 1187364 - RNA, 19 nt, Artificial Sequence
  Description of Artificial Sequence: Synthetic oligonucleotide
  Sense strand starting at position 2432 of SEQ ID NO: 916830
cugaguaaauagccugaua

SEQ ID NO: 1187365 - RNA, 19 nt, Artificial Sequence
  Description of Artificial Sequence: Synthetic oligonucleotide
  Antisense strand to SEQ ID NO: 1187364
uaucaggcuauuuacucag

SEQ ID NO: 1187366 - RNA, 19 nt, Artificial Sequence
  Description of Artificial Sequence: Synthetic oligonucleotide
  Sense strand starting at position 2434 of SEQ ID NO: 916830
gaguaaauagccugauaaa

SEQ ID NO: 1187367 - RNA, 19 nt, Artificial Sequence
  Description of Artificial Sequence: Synthetic oligonucleotide
  Antisense strand to SEQ ID NO: 1187366
uuuaucaggcuauuuacuc

SEQ ID NO: 1187368 - RNA, 19 nt, Artificial Sequence
  Description of Artificial Sequence: Synthetic oligonucleotide
  Sense strand starting at position 2457 of SEQ ID NO: 916830
aagaaauguguaugaccaa

SEQ ID NO: 1187369 - RNA, 19 nt, Artificial Sequence
  Description of Artificial Sequence: Synthetic oligonucleotide
  Antisense strand to SEQ ID NO: 1187368
uuggucauacacauuucuu

SEQ ID NO: 1187370 - RNA, 19 nt, Artificial Sequence
  Description of Artificial Sequence: Synthetic oligonucleotide
  Sense strand starting at position 2460 of SEQ ID NO: 916830
aaauguguaugaccaagga

SEQ ID NO: 1187371 - RNA, 19 nt, Artificial Sequence
  Description of Artificial Sequence: Synthetic oligonucleotide
  Antisense strand to SEQ ID NO: 1187370
uccuuggucauacacauuu

SEQ ID NO: 1187372 - RNA, 19 nt, Artificial Sequence
  Description of Artificial Sequence: Synthetic oligonucleotide
  Sense strand starting at position 2555 of SEQ ID NO: 916830
gacugacugcuccaagguu

SEQ ID NO: 1187373 - RNA, 19 nt, Artificial Sequence
  Description of Artificial Sequence: Synthetic oligonucleotide
  Antisense strand to SEQ ID NO: 1187372
aaccuuggagcagucaguc

SEQ ID NO: 1187374 - RNA, 19 nt, Artificial Sequence
  Description of Artificial Sequence: Synthetic oligonucleotide
  Sense strand starting at position 2587 of SEQ ID NO: 916830
auagaaauguucuggauua

SEQ ID NO: 1187375 - RNA, 19 nt, Artificial Sequence
  Description of Artificial Sequence: Synthetic oligonucleotide
  Antisense strand to SEQ ID NO: 1187374
uaauccagaacauuucuau

SEQ ID NO: 1187376 - RNA, 19 nt, Artificial Sequence
  Description of Artificial Sequence: Synthetic oligonucleotide
  Sense strand starting at position 2588 of SEQ ID NO: 916830
uagaaauguucuggauuag

SEQ ID NO: 1187377 - RNA, 19 nt, Artificial Sequence
  Description of Artificial Sequence: Synthetic oligonucleotide
  Antisense strand to SEQ ID NO: 1187376
cuaauccagaacauuucua

SEQ ID NO: 1187378 - RNA, 19 nt, Artificial Sequence
  Description of Artificial Sequence: Synthetic oligonucleotide
  Sense strand starting at position 2611 of SEQ ID NO: 916830
uggugaucauugcacaauu

SEQ ID NO: 1187379 - RNA, 19 nt, Artificial Sequence
  Description of Artificial Sequence: Synthetic oligonucleotide
  Antisense strand to SEQ ID NO: 1187378
aauugugcaaugaucacca

SEQ ID NO: 1187380 - RNA, 19 nt, Artificial Sequence
  Description of Artificial Sequence: Synthetic oligonucleotide
  Sense strand starting at position 2613 of SEQ ID NO: 916830
gugaucauugcacaauugu

SEQ ID NO: 1187381 - RNA, 19 nt, Artificial Sequence
  Description of Artificial Sequence: Synthetic oligonucleotide
  Antisense strand to SEQ ID NO: 1187380
acaauugugcaaugaucac

SEQ ID NO: 1187382 - RNA, 19 nt, Artificial Sequence
  Description of Artificial Sequence: Synthetic oligonucleotide
  Sense strand starting at position 2647 of SEQ ID NO: 916830
gccaaugcauuguacaauu

SEQ ID NO: 1187383 - RNA, 19 nt, Artificial Sequence
  Description of Artificial Sequence: Synthetic oligonucleotide
  Antisense strand to SEQ ID NO: 1187382
aauuguacaaugcauuggc

SEQ ID NO: 1187384 - RNA, 19 nt, Artificial Sequence
  Description of Artificial Sequence: Synthetic oligonucleotide
  Sense strand starting at position 2716 of SEQ ID NO: 916830
gagaaauggucacacuuag

SEQ ID NO: 1187385 - RNA, 19 nt, Artificial Sequence
  Description of Artificial Sequence: Synthetic oligonucleotide
  Antisense strand to SEQ ID NO: 1187384
cuaagugugaccauuucuc

SEQ ID NO: 1187386 - RNA, 19 nt, Artificial Sequence
  Description of Artificial Sequence: Synthetic oligonucleotide
  Sense strand starting at position 2723 of SEQ ID NO: 916830
ggucacacuuaggauaaga

SEQ ID NO: 1187387 - RNA, 19 nt, Artificial Sequence
  Description of Artificial Sequence: Synthetic oligonucleotide
  Antisense strand to SEQ ID NO: 1187386
ucuuauccuaagugugacc

SEQ ID NO: 1187388 - RNA, 19 nt, Artificial Sequence
  Description of Artificial Sequence: Synthetic oligonucleotide
  Sense strand starting at position 2812 of SEQ ID NO: 916830
agaagauauaugcguauga

SEQ ID NO: 1187389 - RNA, 19 nt, Artificial Sequence
  Description of Artificial Sequence: Synthetic oligonucleotide
  Antisense strand to SEQ ID NO: 1187388
ucauacgcauauaucuucu

SEQ ID NO: 1187390 - RNA, 19 nt, Artificial Sequence
  Description of Artificial Sequence: Synthetic oligonucleotide
  Sense strand starting at position 2813 of SEQ ID NO: 916830
gaagauauaugcguaugac

SEQ ID NO: 1187391 - RNA, 19 nt, Artificial Sequence
  Description of Artificial Sequence: Synthetic oligonucleotide
  Antisense strand to SEQ ID NO: 1187390
gucauacgcauauaucuuc

SEQ ID NO: 1187392 - RNA, 19 nt, Artificial Sequence
  Description of Artificial Sequence: Synthetic oligonucleotide
  Sense strand starting at position 2814 of SEQ ID NO: 916830
aagauauaugcguaugacc

SEQ ID NO: 1187393 - RNA, 19 nt, Artificial Sequence
  Description of Artificial Sequence: Synthetic oligonucleotide
  Antisense strand to SEQ ID NO: 1187392
ggucauacgcauauaucuu

SEQ ID NO: 1187394 - RNA, 19 nt, Artificial Sequence
  Description of Artificial Sequence: Synthetic oligonucleotide
  Sense strand starting at position 2816 of SEQ ID NO: 916830
gauauaugcguaugaccuu

SEQ ID NO: 1187395 - RNA, 19 nt, Artificial Sequence
  Description of Artificial Sequence: Synthetic oligonucleotide
  Antisense strand to SEQ ID NO: 1187394
aaggucauacgcauauauc

SEQ ID NO: 1187396 - RNA, 19 nt, Artificial Sequence
  Description of Artificial Sequence: Synthetic oligonucleotide
  Sense strand starting at position 2877 of SEQ ID NO: 916830
auggcuauuaggcagauga

SEQ ID NO: 1187397 - RNA, 19 nt, Artificial Sequence
  Description of Artificial Sequence: Synthetic oligonucleotide
  Antisense strand to SEQ ID NO: 1187396
ucaucugccuaauagccau

SEQ ID NO: 1187398 - RNA, 19 nt, Artificial Sequence
  Description of Artificial Sequence: Synthetic oligonucleotide
  Sense strand starting at position 3336 of SEQ ID NO: 916830
ccuuuaagauggcugggau

SEQ ID NO: 1187399 - RNA, 19 nt, Artificial Sequence
  Description of Artificial Sequence: Synthetic oligonucleotide
  Antisense strand to SEQ ID NO: 1187398
aucccagccaucuuaaagg

SEQ ID NO: 1187400 - RNA, 19 nt, Artificial Sequence
  Description of Artificial Sequence: Synthetic oligonucleotide
  Sense strand starting at position 3421 of SEQ ID NO: 916830
acgcaaugauggugggaau

SEQ ID NO: 1187401 - RNA, 19 nt, Artificial Sequence
  Description of Artificial Sequence: Synthetic oligonucleotide
  Antisense strand to SEQ ID NO: 1187400
auucccaccaucauugcgu

SEQ ID NO: 1187402 - RNA, 19 nt, Artificial Sequence
  Description of Artificial Sequence: Synthetic oligonucleotide
  Sense strand starting at position 3422 of SEQ ID NO: 916830
cgcaaugauggugggaaua

SEQ ID NO: 1187403 - RNA, 19 nt, Artificial Sequence
  Description of Artificial Sequence: Synthetic oligonucleotide
  Antisense strand to SEQ ID NO: 1187402
uauucccaccaucauugcg

SEQ ID NO: 1187404 - RNA, 19 nt, Artificial Sequence
  Description of Artificial Sequence: Synthetic oligonucleotide
  Sense strand starting at position 3424 of SEQ ID NO: 916830
caaugauggugggaauaua

SEQ ID NO: 1187405 - RNA, 19 nt, Artificial Sequence
  Description of Artificial Sequence: Synthetic oligonucleotide
  Antisense strand to SEQ ID NO: 1187404
uauauucccaccaucauug

SEQ ID NO: 1187406 - RNA, 19 nt, Artificial Sequence
  Description of Artificial Sequence: Synthetic oligonucleotide
  Sense strand starting at position 3841 of SEQ ID NO: 916830
cuagauguaucccaagaga

SEQ ID NO: 1187407 - RNA, 19 nt, Artificial Sequence
  Description of Artificial Sequence: Synthetic oligonucleotide
  Antisense strand to SEQ ID NO: 1187406
ucucuugggauacaucuag

SEQ ID NO: 1187408 - RNA, 19 nt, Artificial Sequence
  Description of Artificial Sequence: Synthetic oligonucleotide
  Sense strand starting at position 3883 of SEQ ID NO: 916830
aaacuuguccacgaauguu

SEQ ID NO: 1187409 - RNA, 19 nt, Artificial Sequence
  Description of Artificial Sequence: Synthetic oligonucleotide
  Antisense strand to SEQ ID NO: 1187408
aacauucguggacaaguuu

SEQ ID NO: 1187410 - RNA, 19 nt, Artificial Sequence
  Description of Artificial Sequence: Synthetic oligonucleotide
  Sense strand starting at position 3935 of SEQ ID NO: 916830
gagauaaccugaugucuau

SEQ ID NO: 1187411 - RNA, 19 nt, Artificial Sequence
  Description of Artificial Sequence: Synthetic oligonucleotide
  Antisense strand to SEQ ID NO: 1187410
auagacaucagguuaucuc

SEQ ID NO: 1187412 - RNA, 19 nt, Artificial Sequence
  Description of Artificial Sequence: Synthetic oligonucleotide
  Sense strand starting at position 3942 of SEQ ID NO: 916830
ccugaugucuauuaaguga

SEQ ID NO: 1187413 - RNA, 19 nt, Artificial Sequence
  Description of Artificial Sequence: Synthetic oligonucleotide
  Antisense strand to SEQ ID NO: 1187412
ucacuuaauagacaucagg

SEQ ID NO: 1187414 - RNA, 19 nt, Artificial Sequence
  Description of Artificial Sequence: Synthetic oligonucleotide
  Sense strand starting at position 3945 of SEQ ID NO: 916830
gaugucuauuaagugauaa

SEQ ID NO: 1187415 - RNA, 19 nt, Artificial Sequence
  Description of Artificial Sequence: Synthetic oligonucleotide
  Antisense strand to SEQ ID NO: 1187414
uuaucacuuaauagacauc

SEQ ID NO: 1187416 - RNA, 19 nt, Artificial Sequence
  Description of Artificial Sequence: Synthetic oligonucleotide
  Sense strand starting at position 3979 of SEQ ID NO: 916830
guggcaaguccauacaaug

SEQ ID NO: 1187417 - RNA, 19 nt, Artificial Sequence
  Description of Artificial Sequence: Synthetic oligonucleotide
  Antisense strand to SEQ ID NO: 1187416
cauuguauggacuugccac

SEQ ID NO: 1187418 - RNA, 19 nt, Artificial Sequence
  Description of Artificial Sequence: Synthetic oligonucleotide
  Sense strand starting at position 246 of SEQ ID NO: 916831
cccuuuggcucagaaggau

SEQ ID NO: 1187419 - RNA, 19 nt, Artificial Sequence
  Description of Artificial Sequence: Synthetic oligonucleotide
  Antisense strand to SEQ ID NO: 1187418
auccuucugagccaaaggg

SEQ ID NO: 1187420 - RNA, 19 nt, Artificial Sequence
  Description of Artificial Sequence: Synthetic oligonucleotide
  Sense strand starting at position 448 of SEQ ID NO: 916831
ccaggucagugaugggaaa

SEQ ID NO: 1187421 - RNA, 19 nt, Artificial Sequence
  Description of Artificial Sequence: Synthetic oligonucleotide
  Antisense strand to SEQ ID NO: 1187420
uuucccaucacugaccugg

SEQ ID NO: 1187422 - RNA, 19 nt, Artificial Sequence
  Description of Artificial Sequence: Synthetic oligonucleotide
  Sense strand starting at position 550 of SEQ ID NO: 916831
guguuagggaacugucauc

SEQ ID NO: 1187423 - RNA, 19 nt, Artificial Sequence
  Description of Artificial Sequence: Synthetic oligonucleotide
  Antisense strand to SEQ ID NO: 1187422
gaugacaguucccuaacac

SEQ ID NO: 1187424 - RNA, 19 nt, Artificial Sequence
  Description of Artificial Sequence: Synthetic oligonucleotide
  Sense strand starting at position 1258 of SEQ ID NO: 916831
gggcucaucugugcucaca

SEQ ID NO: 1187425 - RNA, 19 nt, Artificial Sequence
  Description of Artificial Sequence: Synthetic oligonucleotide
  Antisense strand to SEQ ID NO: 1187424
ugugagcacagaugagccc

SEQ ID NO: 1187426 - RNA, 19 nt, Artificial Sequence
  Description of Artificial Sequence: Synthetic oligonucleotide
  Sense strand starting at position 1277 of SEQ ID NO: 916831
gccucaguuugacuacuuu

SEQ ID NO: 1187427 - RNA, 19 nt, Artificial Sequence
  Description of Artificial Sequence: Synthetic oligonucleotide
  Antisense strand to SEQ ID NO: 1187426
aaaguagucaaacugaggc

SEQ ID NO: 1187428 - RNA, 19 nt, Artificial Sequence
  Description of Artificial Sequence: Synthetic oligonucleotide
  Sense strand starting at position 2301 of SEQ ID NO: 916831
gucccacagucugaagaua

SEQ ID NO: 1187429 - RNA, 19 nt, Artificial Sequence
  Description of Artificial Sequence: Synthetic oligonucleotide
  Antisense strand to SEQ ID NO: 1187428
uaucuucagacugugggac

SEQ ID NO: 1187430 - RNA, 19 nt, Artificial Sequence
  Description of Artificial Sequence: Synthetic oligonucleotide
  Sense strand starting at position 2582 of SEQ ID NO: 916831
ccugacuaucugcgaucau

SEQ ID NO: 1187431 - RNA, 19 nt, Artificial Sequence
  Description of Artificial Sequence: Synthetic oligonucleotide
  Antisense strand to SEQ ID NO: 1187430
augaucgcagauagucagg

SEQ ID NO: 1187432 - RNA, 19 nt, Artificial Sequence
  Description of Artificial Sequence: Synthetic oligonucleotide
  Sense strand starting at position 2583 of SEQ ID NO: 916831
cugacuaucugcgaucaug

SEQ ID NO: 1187433 - RNA, 19 nt, Artificial Sequence
  Description of Artificial Sequence: Synthetic oligonucleotide
  Antisense strand to SEQ ID NO: 1187432
caugaucgcagauagucag

SEQ ID NO: 1187434 - RNA, 19 nt, Artificial Sequence
  Description of Artificial Sequence: Synthetic oligonucleotide
  Sense strand starting at position 2655 of SEQ ID NO: 916831
cucagcuuugccuuugcua

SEQ ID NO: 1187435 - RNA, 19 nt, Artificial Sequence
  Description of Artificial Sequence: Synthetic oligonucleotide
  Antisense strand to SEQ ID NO: 1187434
uagcaaaggcaaagcugag

SEQ ID NO: 1187436 - RNA, 19 nt, Artificial Sequence
  Description of Artificial Sequence: Synthetic oligonucleotide
  Sense strand starting at position 2738 of SEQ ID NO: 916831
ggugcaucuuucuccagga

SEQ ID NO: 1187437 - RNA, 19 nt, Artificial Sequence
  Description of Artificial Sequence: Synthetic oligonucleotide
  Antisense strand to SEQ ID NO: 1187436
uccuggagaaagaugcacc

SEQ ID NO: 1187438 - RNA, 19 nt, Artificial Sequence
  Description of Artificial Sequence: Synthetic oligonucleotide
  Sense strand starting at position 2739 of SEQ ID NO: 916831
gugcaucuuucuccaggaa

SEQ ID NO: 1187439 - RNA, 19 nt, Artificial Sequence
  Description of Artificial Sequence: Synthetic oligonucleotide
  Antisense strand to SEQ ID NO: 1187438
uuccuggagaaagaugcac

SEQ ID NO: 1187440 - RNA, 19 nt, Artificial Sequence
  Description of Artificial Sequence: Synthetic oligonucleotide
  Sense strand starting at position 3066 of SEQ ID NO: 916831
gggcaaaugacuugacuuc

SEQ ID NO: 1187441 - RNA, 19 nt, Artificial Sequence
  Description of Artificial Sequence: Synthetic oligonucleotide
  Antisense strand to SEQ ID NO: 1187440
gaagucaagucauuugccc

SEQ ID NO: 1187442 - RNA, 19 nt, Artificial Sequence
  Description of Artificial Sequence: Synthetic oligonucleotide
  Sense strand starting at position 3135 of SEQ ID NO: 916831
cucuccuggcagugagaau

SEQ ID NO: 1187443 - RNA, 19 nt, Artificial Sequence
  Description of Artificial Sequence: Synthetic oligonucleotide
  Antisense strand to SEQ ID NO: 1187442
auucucacugccaggagag

SEQ ID NO: 1187444 - RNA, 19 nt, Artificial Sequence
  Description of Artificial Sequence: Synthetic oligonucleotide
  Sense strand starting at position 3136 of SEQ ID NO: 916831
ucuccuggcagugagaauu

SEQ ID NO: 1187445 - RNA, 19 nt, Artificial Sequence
  Description of Artificial Sequence: Synthetic oligonucleotide
  Antisense strand to SEQ ID NO: 1187444
aauucucacugccaggaga

SEQ ID NO: 1187446 - RNA, 19 nt, Artificial Sequence
  Description of Artificial Sequence: Synthetic oligonucleotide
  Sense strand starting at position 3159 of SEQ ID NO: 916831
gaguuaaugcauuaaagca

SEQ ID NO: 1187447 - RNA, 19 nt, Artificial Sequence
  Description of Artificial Sequence: Synthetic oligonucleotide
  Antisense strand to SEQ ID NO: 1187446
ugcuuuaaugcauuaacuc

SEQ ID NO: 1187448 - RNA, 19 nt, Artificial Sequence
  Description of Artificial Sequence: Synthetic oligonucleotide
  Sense strand starting at position 3174 of SEQ ID NO: 916831
agcaguuagcucgaggcuu

SEQ ID NO: 1187449 - RNA, 19 nt, Artificial Sequence
  Description of Artificial Sequence: Synthetic oligonucleotide
  Antisense strand to SEQ ID NO: 1187448
aagccucgagcuaacugcu

SEQ ID NO: 1187450 - RNA, 19 nt, Artificial Sequence
  Description of Artificial Sequence: Synthetic oligonucleotide
  Sense strand starting at position 3198 of SEQ ID NO: 916831
caggaagcucucuguguua

SEQ ID NO: 1187451 - RNA, 19 nt, Artificial Sequence
  Description of Artificial Sequence: Synthetic oligonucleotide
  Antisense strand to SEQ ID NO: 1187450
uaacacagagagcuuccug

SEQ ID NO: 1187452 - RNA, 19 nt, Artificial Sequence
  Description of Artificial Sequence: Synthetic oligonucleotide
  Sense strand starting at position 3200 of SEQ ID NO: 916831
ggaagcucucuguguuaaa

SEQ ID NO: 1187453 - RNA, 19 nt, Artificial Sequence
  Description of Artificial Sequence: Synthetic oligonucleotide
  Antisense strand to SEQ ID NO: 1187452
uuuaacacagagagcuucc

SEQ ID NO: 1187454 - RNA, 19 nt, Artificial Sequence
  Description of Artificial Sequence: Synthetic oligonucleotide
  Sense strand starting at position 3201 of SEQ ID NO: 916831
gaagcucucuguguuaaac

SEQ ID NO: 1187455 - RNA, 19 nt, Artificial Sequence
  Description of Artificial Sequence: Synthetic oligonucleotide
  Antisense strand to SEQ ID NO: 1187454
guuuaacacagagagcuuc

SEQ ID NO: 1187456 - RNA, 19 nt, Artificial Sequence
  Description of Artificial Sequence: Synthetic oligonucleotide
  Sense strand starting at position 3203 of SEQ ID NO: 916831
agcucucuguguuaaacaa

SEQ ID NO: 1187457 - RNA, 19 nt, Artificial Sequence
  Description of Artificial Sequence: Synthetic oligonucleotide
  Antisense strand to SEQ ID NO: 1187456
uuguuuaacacagagagcu

SEQ ID NO: 1187458 - RNA, 19 nt, Artificial Sequence
  Description of Artificial Sequence: Synthetic oligonucleotide
  Sense strand starting at position 3308 of SEQ ID NO: 916831
agcggucugcuacaggauu

SEQ ID NO: 1187459 - RNA, 19 nt, Artificial Sequence
  Description of Artificial Sequence: Synthetic oligonucleotide
  Antisense strand to SEQ ID NO: 1187458
aauccuguagcagaccgcu

SEQ ID NO: 1187460 - RNA, 19 nt, Artificial Sequence
  Description of Artificial Sequence: Synthetic oligonucleotide
  Sense strand starting at position 3320 of SEQ ID NO: 916831
caggauuccugguguccaa

SEQ ID NO: 1187461 - RNA, 19 nt, Artificial Sequence
  Description of Artificial Sequence: Synthetic oligonucleotide
  Antisense strand to SEQ ID NO: 1187460
uuggacaccaggaauccug

SEQ ID NO: 1187462 - RNA, 19 nt, Artificial Sequence
  Description of Artificial Sequence: Synthetic oligonucleotide
  Sense strand starting at position 3323 of SEQ ID NO: 916831
gauuccugguguccaauga

SEQ ID NO: 1187463 - RNA, 19 nt, Artificial Sequence
  Description of Artificial Sequence: Synthetic oligonucleotide
  Antisense strand to SEQ ID NO: 1187462
ucauuggacaccaggaauc

SEQ ID NO: 1187464 - RNA, 19 nt, Artificial Sequence
  Description of Artificial Sequence: Synthetic oligonucleotide
  Sense strand starting at position 3333 of SEQ ID NO: 916831
guccaaugaccuugaagaa

SEQ ID NO: 1187465 - RNA, 19 nt, Artificial Sequence
  Description of Artificial Sequence: Synthetic oligonucleotide
  Antisense strand to SEQ ID NO: 1187464
uucuucaaggucauuggac

SEQ ID NO: 1187466 - RNA, 19 nt, Artificial Sequence
  Description of Artificial Sequence: Synthetic oligonucleotide
  Sense strand starting at position 3467 of SEQ ID NO: 916831
ggacauaaggcacgaauaa

SEQ ID NO: 1187467 - RNA, 19 nt, Artificial Sequence
  Description of Artificial Sequence: Synthetic oligonucleotide
  Antisense strand to SEQ ID NO: 1187466
uuauucgugccuuaugucc

SEQ ID NO: 1187468 - RNA, 19 nt, Artificial Sequence
  Description of Artificial Sequence: Synthetic oligonucleotide
  Sense strand starting at position 3491 of SEQ ID NO: 916831
ugggaucagcuaugacaau

SEQ ID NO: 1187469 - RNA, 19 nt, Artificial Sequence
  Description of Artificial Sequence: Synthetic oligonucleotide
  Antisense strand to SEQ ID NO: 1187468
auugucauagcugauccca

SEQ ID NO: 1187470 - RNA, 19 nt, Artificial Sequence
  Description of Artificial Sequence: Synthetic oligonucleotide
  Sense strand starting at position 3547 of SEQ ID NO: 916831
gucuuagauccagggcuca

SEQ ID NO: 1187471 - RNA, 19 nt, Artificial Sequence
  Description of Artificial Sequence: Synthetic oligonucleotide
  Antisense strand to SEQ ID NO: 1187470
ugagcccuggaucuaagac

SEQ ID NO: 1187472 - RNA, 19 nt, Artificial Sequence
  Description of Artificial Sequence: Synthetic oligonucleotide
  Sense strand starting at position 3582 of SEQ ID NO: 916831
ggaacuaacaugugagcuu

SEQ ID NO: 1187473 - RNA, 19 nt, Artificial Sequence
  Description of Artificial Sequence: Synthetic oligonucleotide
  Antisense strand to SEQ ID NO: 1187472
aagcucacauguuaguucc

SEQ ID NO: 1187474 - RNA, 19 nt, Artificial Sequence
  Description of Artificial Sequence: Synthetic oligonucleotide
  Sense strand starting at position 3583 of SEQ ID NO: 916831
gaacuaacaugugagcuua

SEQ ID NO: 1187475 - RNA, 19 nt, Artificial Sequence
  Description of Artificial Sequence: Synthetic oligonucleotide
  Antisense strand to SEQ ID NO: 1187474
uaagcucacauguuaguuc

SEQ ID NO: 1187476 - RNA, 19 nt, Artificial Sequence
  Description of Artificial Sequence: Synthetic oligonucleotide
  Sense strand starting at position 3585 of SEQ ID NO: 916831
acuaacaugugagcuuaga

SEQ ID NO: 1187477 - RNA, 19 nt, Artificial Sequence
  Description of Artificial Sequence: Synthetic oligonucleotide
  Antisense strand to SEQ ID NO: 1187476
ucuaagcucacauguuagu

SEQ ID NO: 1187478 - RNA, 19 nt, Artificial Sequence
  Description of Artificial Sequence: Synthetic oligonucleotide
  Sense strand starting at position 3630 of SEQ ID NO: 916831
ugcuauaacgucugaggga

SEQ ID NO: 1187479 - RNA, 19 nt, Artificial Sequence
  Description of Artificial Sequence: Synthetic oligonucleotide
  Antisense strand to SEQ ID NO: 1187478
ucccucagacguuauagca

SEQ ID NO: 1187480 - RNA, 19 nt, Artificial Sequence
  Description of Artificial Sequence: Synthetic oligonucleotide
  Sense strand starting at position 3631 of SEQ ID NO: 916831
gcuauaacgucugagggaa

SEQ ID NO: 1187481 - RNA, 19 nt, Artificial Sequence
  Description of Artificial Sequence: Synthetic oligonucleotide
  Antisense strand to SEQ ID NO: 1187480
uucccucagacguuauagc

SEQ ID NO: 1187482 - RNA, 19 nt, Artificial Sequence
  Description of Artificial Sequence: Synthetic oligonucleotide
  Sense strand starting at position 3704 of SEQ ID NO: 916831
uguggugcuuuggaauaaa

SEQ ID NO: 1187483 - RNA, 19 nt, Artificial Sequence
  Description of Artificial Sequence: Synthetic oligonucleotide
  Antisense strand to SEQ ID NO: 1187482
uuuauuccaaagcaccaca

SEQ ID NO: 1187484 - RNA, 19 nt, Artificial Sequence
  Description of Artificial Sequence: Synthetic oligonucleotide
  Sense strand starting at position 3707 of SEQ ID NO: 916831
ggugcuuuggaauaaaguc

SEQ ID NO: 1187485 - RNA, 19 nt, Artificial Sequence
  Description of Artificial Sequence: Synthetic oligonucleotide
  Antisense strand to SEQ ID NO: 1187484
gacuuuauuccaaagcacc

SEQ ID NO: 1187486 - RNA, 19 nt, Artificial Sequence
  Description of Artificial Sequence: Synthetic oligonucleotide
  Sense strand starting at position 3742 of SEQ ID NO: 916831
caccuauacugguaagaga

SEQ ID NO: 1187487 - RNA, 19 nt, Artificial Sequence
  Description of Artificial Sequence: Synthetic oligonucleotide
  Antisense strand to SEQ ID NO: 1187486
ucucuuaccaguauaggug

SEQ ID NO: 1187488 - RNA, 19 nt, Artificial Sequence
  Description of Artificial Sequence: Synthetic oligonucleotide
  Sense strand starting at position 3749 of SEQ ID NO: 916831
acugguaagagaugauguu

SEQ ID NO: 1187489 - RNA, 19 nt, Artificial Sequence
  Description of Artificial Sequence: Synthetic oligonucleotide
  Antisense strand to SEQ ID NO: 1187488
aacaucaucucuuaccagu

SEQ ID NO: 1187490 - RNA, 19 nt, Artificial Sequence
  Description of Artificial Sequence: Synthetic oligonucleotide
  Sense strand starting at position 3872 of SEQ ID NO: 916831
uguggagugugggauucaa

SEQ ID NO: 1187491 - RNA, 19 nt, Artificial Sequence
  Description of Artificial Sequence: Synthetic oligonucleotide
  Antisense strand to SEQ ID NO: 1187490
uugaaucccacacuccaca

SEQ ID NO: 1187492 - RNA, 19 nt, Artificial Sequence
  Description of Artificial Sequence: Synthetic oligonucleotide
  Sense strand starting at position 3942 of SEQ ID NO: 916831
gucaaugaagucuaaacga

SEQ ID NO: 1187493 - RNA, 19 nt, Artificial Sequence
  Description of Artificial Sequence: Synthetic oligonucleotide
  Antisense strand to SEQ ID NO: 1187492
ucguuuagacuucauugac

SEQ ID NO: 1187494 - RNA, 19 nt, Artificial Sequence
  Description of Artificial Sequence: Synthetic oligonucleotide
  Sense strand starting at position 183 of SEQ ID NO: 916832
gggaguacucccugcagaa

SEQ ID NO: 1187495 - RNA, 19 nt, Artificial Sequence
  Description of Artificial Sequence: Synthetic oligonucleotide
  Antisense strand to SEQ ID NO: 1187494
uucugcagggaguacuccc

SEQ ID NO: 1187496 - RNA, 19 nt, Artificial Sequence
  Description of Artificial Sequence: Synthetic oligonucleotide
  Sense strand starting at position 185 of SEQ ID NO: 916832
gaguacucccugcagaaag

SEQ ID NO: 1187497 - RNA, 19 nt, Artificial Sequence
  Description of Artificial Sequence: Synthetic oligonucleotide
  Antisense strand to SEQ ID NO: 1187496
cuuucugcagggaguacuc

SEQ ID NO: 1187498 - RNA, 19 nt, Artificial Sequence
  Description of Artificial Sequence: Synthetic oligonucleotide
  Sense strand starting at position 240 of SEQ ID NO: 916832
gaggcagcauucucagaaa

SEQ ID NO: 1187499 - RNA, 19 nt, Artificial Sequence
  Description of Artificial Sequence: Synthetic oligonucleotide
  Antisense strand to SEQ ID NO: 1187498
uuucugagaaugcugccuc

SEQ ID NO: 1187500 - RNA, 19 nt, Artificial Sequence
  Description of Artificial Sequence: Synthetic oligonucleotide
  Sense strand starting at position 466 of SEQ ID NO: 916832
aaagguccugagugugaaa

SEQ ID NO: 1187501 - RNA, 19 nt, Artificial Sequence
  Description of Artificial Sequence: Synthetic oligonucleotide
  Antisense strand to SEQ ID NO: 1187500
uuucacacucaggaccuuu

SEQ ID NO: 1187502 - RNA, 19 nt, Artificial Sequence
  Description of Artificial Sequence: Synthetic oligonucleotide
  Sense strand starting at position 519 of SEQ ID NO: 916832
uguuacuuccuguacccau

SEQ ID NO: 1187503 - RNA, 19 nt, Artificial Sequence
  Description of Artificial Sequence: Synthetic oligonucleotide
  Antisense strand to SEQ ID NO: 1187502
auggguacaggaaguaaca

SEQ ID NO: 1187504 - RNA, 19 nt, Artificial Sequence
  Description of Artificial Sequence: Synthetic oligonucleotide
  Sense strand starting at position 1234 of SEQ ID NO: 916832
uuuagcaguccgugaggaa

SEQ ID NO: 1187505 - RNA, 19 nt, Artificial Sequence
  Description of Artificial Sequence: Synthetic oligonucleotide
  Antisense strand to SEQ ID NO: 1187504
uuccucacggacugcuaaa

SEQ ID NO: 1187506 - RNA, 19 nt, Artificial Sequence
  Description of Artificial Sequence: Synthetic oligonucleotide
  Sense strand starting at position 1249 of SEQ ID NO: 916832
ggaagagcugugugggagu

SEQ ID NO: 1187507 - RNA, 19 nt, Artificial Sequence
  Description of Artificial Sequence: Synthetic oligonucleotide
  Antisense strand to SEQ ID NO: 1187506
acucccacacagcucuucc

SEQ ID NO: 1187508 - RNA, 19 nt, Artificial Sequence
  Description of Artificial Sequence: Synthetic oligonucleotide
  Sense strand starting at position 1279 of SEQ ID NO: 916832
ggaucugcccgagaguaag

SEQ ID NO: 1187509 - RNA, 19 nt, Artificial Sequence
  Description of Artificial Sequence: Synthetic oligonucleotide
  Antisense strand to SEQ ID NO: 1187508
cuuacucucgggcagaucc

SEQ ID NO: 1187510 - RNA, 19 nt, Artificial Sequence
  Description of Artificial Sequence: Synthetic oligonucleotide
  Sense strand starting at position 1513 of SEQ ID NO: 916832
ccuaaugccacgugaaaug

SEQ ID NO: 1187511 - RNA, 19 nt, Artificial Sequence
  Description of Artificial Sequence: Synthetic oligonucleotide
  Antisense strand to SEQ ID NO: 1187510
cauuucacguggcauuagg

SEQ ID NO: 1187512 - RNA, 19 nt, Artificial Sequence
  Description of Artificial Sequence: Synthetic oligonucleotide
  Sense strand starting at position 1552 of SEQ ID NO: 916832
gcgucugaucgccagaaug

SEQ ID NO: 1187513 - RNA, 19 nt, Artificial Sequence
  Description of Artificial Sequence: Synthetic oligonucleotide
  Antisense strand to SEQ ID NO: 1187512
cauucuggcgaucagacgc

SEQ ID NO: 1187514 - RNA, 19 nt, Artificial Sequence
  Description of Artificial Sequence: Synthetic oligonucleotide
  Sense strand starting at position 1554 of SEQ ID NO: 916832
gucugaucgccagaaugag

SEQ ID NO: 1187515 - RNA, 19 nt, Artificial Sequence
  Description of Artificial Sequence: Synthetic oligonucleotide
  Antisense strand to SEQ ID NO: 1187514
cucauucuggcgaucagac

SEQ ID NO: 1187516 - RNA, 19 nt, Artificial Sequence
  Description of Artificial Sequence: Synthetic oligonucleotide
  Sense strand starting at position 1683 of SEQ ID NO: 916832
cagaguuugugacuaggaa

SEQ ID NO: 1187517 - RNA, 19 nt, Artificial Sequence
  Description of Artificial Sequence: Synthetic oligonucleotide
  Antisense strand to SEQ ID NO: 1187516
uuccuagucacaaacucug

SEQ ID NO: 1187518 - RNA, 19 nt, Artificial Sequence
  Description of Artificial Sequence: Synthetic oligonucleotide
  Sense strand starting at position 2120 of SEQ ID NO: 916832
ucucucugcuuguugucaa

SEQ ID NO: 1187519 - RNA, 19 nt, Artificial Sequence
  Description of Artificial Sequence: Synthetic oligonucleotide
  Antisense strand to SEQ ID NO: 1187518
uugacaacaagcagagaga

SEQ ID NO: 1187520 - RNA, 19 nt, Artificial Sequence
  Description of Artificial Sequence: Synthetic oligonucleotide
  Sense strand starting at position 2127 of SEQ ID NO: 916832
gcuuguugucaagacaaac

SEQ ID NO: 1187521 - RNA, 19 nt, Artificial Sequence
  Description of Artificial Sequence: Synthetic oligonucleotide
  Antisense strand to SEQ ID NO: 1187520
guuugucuugacaacaagc

SEQ ID NO: 1187522 - RNA, 19 nt, Artificial Sequence
  Description of Artificial Sequence: Synthetic oligonucleotide
  Sense strand starting at position 2162 of SEQ ID NO: 916832
cugaauaucuagcuagcau

SEQ ID NO: 1187523 - RNA, 19 nt, Artificial Sequence
  Description of Artificial Sequence: Synthetic oligonucleotide
  Antisense strand to SEQ ID NO: 1187522
augcuagcuagauauucag

SEQ ID NO: 1187524 - RNA, 19 nt, Artificial Sequence
  Description of Artificial Sequence: Synthetic oligonucleotide
  Sense strand starting at position 2169 of SEQ ID NO: 916832
ucuagcuagcauuauuaga

SEQ ID NO: 1187525 - RNA, 19 nt, Artificial Sequence
  Description of Artificial Sequence: Synthetic oligonucleotide
  Antisense strand to SEQ ID NO: 1187524
ucuaauaaugcuagcuaga

SEQ ID NO: 1187526 - RNA, 19 nt, Artificial Sequence
  Description of Artificial Sequence: Synthetic oligonucleotide
  Sense strand starting at position 2235 of SEQ ID NO: 916832
uggaaagcaccgugguuua

SEQ ID NO: 1187527 - RNA, 19 nt, Artificial Sequence
  Description of Artificial Sequence: Synthetic oligonucleotide
  Antisense strand to SEQ ID NO: 1187526
uaaaccacggugcuuucca

SEQ ID NO: 1187528 - RNA, 19 nt, Artificial Sequence
  Description of Artificial Sequence: Synthetic oligonucleotide
  Sense strand starting at position 2246 of SEQ ID NO: 916832
gugguuuagaagggucgga

SEQ ID NO: 1187529 - RNA, 19 nt, Artificial Sequence
  Description of Artificial Sequence: Synthetic oligonucleotide
  Antisense strand to SEQ ID NO: 1187528
uccgacccuucuaaaccac

SEQ ID NO: 1187530 - RNA, 19 nt, Artificial Sequence
  Description of Artificial Sequence: Synthetic oligonucleotide
  Sense strand starting at position 2318 of SEQ ID NO: 916832
ucaguuuccucccugguaa

SEQ ID NO: 1187531 - RNA, 19 nt, Artificial Sequence
  Description of Artificial Sequence: Synthetic oligonucleotide
  Antisense strand to SEQ ID NO: 1187530
uuaccagggaggaaacuga

SEQ ID NO: 1187532 - RNA, 19 nt, Artificial Sequence
  Description of Artificial Sequence: Synthetic oligonucleotide
  Sense strand starting at position 2352 of SEQ ID NO: 916832
cuguguggugaggauucaa

SEQ ID NO: 1187533 - RNA, 19 nt, Artificial Sequence
  Description of Artificial Sequence: Synthetic oligonucleotide
  Antisense strand to SEQ ID NO: 1187532
uugaauccucaccacacag

SEQ ID NO: 1187534 - RNA, 19 nt, Artificial Sequence
  Description of Artificial Sequence: Synthetic oligonucleotide
  Sense strand starting at position 2384 of SEQ ID NO: 916832
gugaacaugcgcugugaca

SEQ ID NO: 1187535 - RNA, 19 nt, Artificial Sequence
  Description of Artificial Sequence: Synthetic oligonucleotide
  Antisense strand to SEQ ID NO: 1187534
ugucacagcgcauguucac

SEQ ID NO: 1187536 - RNA, 19 nt, Artificial Sequence
  Description of Artificial Sequence: Synthetic oligonucleotide
  Sense strand starting at position 2386 of SEQ ID NO: 916832
gaacaugcgcugugacaga

SEQ ID NO: 1187537 - RNA, 19 nt, Artificial Sequence
  Description of Artificial Sequence: Synthetic oligonucleotide
  Antisense strand to SEQ ID NO: 1187536
ucugucacagcgcauguuc

SEQ ID NO: 1187538 - RNA, 19 nt, Artificial Sequence
  Description of Artificial Sequence: Synthetic oligonucleotide
  Sense strand starting at position 2467 of SEQ ID NO: 916832
ucagacaucugggagcaga

SEQ ID NO: 1187539 - RNA, 19 nt, Artificial Sequence
  Description of Artificial Sequence: Synthetic oligonucleotide
  Antisense strand to SEQ ID NO: 1187538
ucugcucccagaugucuga

SEQ ID NO: 1187540 - RNA, 19 nt, Artificial Sequence
  Description of Artificial Sequence: Synthetic oligonucleotide
  Sense strand starting at position 2580 of SEQ ID NO: 916832
ggcuauagaucuuugagac

SEQ ID NO: 1187541 - RNA, 19 nt, Artificial Sequence
  Description of Artificial Sequence: Synthetic oligonucleotide
  Antisense strand to SEQ ID NO: 1187540
gucucaaagaucuauagcc

SEQ ID NO: 1187542 - RNA, 19 nt, Artificial Sequence
  Description of Artificial Sequence: Synthetic oligonucleotide
  Sense strand starting at position 2581 of SEQ ID NO: 916832
gcuauagaucuuugagacu

SEQ ID NO: 1187543 - RNA, 19 nt, Artificial Sequence
  Description of Artificial Sequence: Synthetic oligonucleotide
  Antisense strand to SEQ ID NO: 1187542
agucucaaagaucuauagc

SEQ ID NO: 1187544 - RNA, 19 nt, Artificial Sequence
  Description of Artificial Sequence: Synthetic oligonucleotide
  Sense strand starting at position 2584 of SEQ ID NO: 916832
auagaucuuugagacugga

SEQ ID NO: 1187545 - RNA, 19 nt, Artificial Sequence
  Description of Artificial Sequence: Synthetic oligonucleotide
  Antisense strand to SEQ ID NO: 1187544
uccagucucaaagaucuau

SEQ ID NO: 1187546 - RNA, 19 nt, Artificial Sequence
  Description of Artificial Sequence: Synthetic oligonucleotide
  Sense strand starting at position 2690 of SEQ ID NO: 916832
ucagcaucagaauggguua

SEQ ID NO: 1187547 - RNA, 19 nt, Artificial Sequence
  Description of Artificial Sequence: Synthetic oligonucleotide
  Antisense strand to SEQ ID NO: 1187546
uaacccauucugaugcuga

SEQ ID NO: 1187548 - RNA, 19 nt, Artificial Sequence
  Description of Artificial Sequence: Synthetic oligonucleotide
  Sense strand starting at position 2693 of SEQ ID NO: 916832
gcaucagaauggguuagaa

SEQ ID NO: 1187549 - RNA, 19 nt, Artificial Sequence
  Description of Artificial Sequence: Synthetic oligonucleotide
  Antisense strand to SEQ ID NO: 1187548
uucuaacccauucugaugc

SEQ ID NO: 1187550 - RNA, 19 nt, Artificial Sequence
  Description of Artificial Sequence: Synthetic oligonucleotide
  Sense strand starting at position 2812 of SEQ ID NO: 916832
accucuccucagugauucu

SEQ ID NO: 1187551 - RNA, 19 nt, Artificial Sequence
  Description of Artificial Sequence: Synthetic oligonucleotide
  Antisense strand to SEQ ID NO: 1187550
agaaucacugaggagaggu

SEQ ID NO: 1187552 - RNA, 19 nt, Artificial Sequence
  Description of Artificial Sequence: Synthetic oligonucleotide
  Sense strand starting at position 2815 of SEQ ID NO: 916832
ucuccucagugauucugau

SEQ ID NO: 1187553 - RNA, 19 nt, Artificial Sequence
  Description of Artificial Sequence: Synthetic oligonucleotide
  Antisense strand to SEQ ID NO: 1187552
aucagaaucacugaggaga

SEQ ID NO: 1187554 - RNA, 19 nt, Artificial Sequence
  Description of Artificial Sequence: Synthetic oligonucleotide
  Sense strand starting at position 3089 of SEQ ID NO: 916832
caaggugagccaugaucaa

SEQ ID NO: 1187555 - RNA, 19 nt, Artificial Sequence
  Description of Artificial Sequence: Synthetic oligonucleotide
  Antisense strand to SEQ ID NO: 1187554
uugaucauggcucaccuug

SEQ ID NO: 1187556 - RNA, 19 nt, Artificial Sequence
  Description of Artificial Sequence: Synthetic oligonucleotide
  Sense strand starting at position 3524 of SEQ ID NO: 916832
accuguaacugauuaugau

SEQ ID NO: 1187557 - RNA, 19 nt, Artificial Sequence
  Description of Artificial Sequence: Synthetic oligonucleotide
  Antisense strand to SEQ ID NO: 1187556
aucauaaucaguuacaggu

SEQ ID NO: 1187558 - RNA, 19 nt, Artificial Sequence
  Description of Artificial Sequence: Synthetic oligonucleotide
  Sense strand starting at position 3525 of SEQ ID NO: 916832
ccuguaacugauuaugauc

SEQ ID NO: 1187559 - RNA, 19 nt, Artificial Sequence
  Description of Artificial Sequence: Synthetic oligonucleotide
  Antisense strand to SEQ ID NO: 1187558
gaucauaaucaguuacagg

SEQ ID NO: 1187560 - RNA, 19 nt, Artificial Sequence
  Description of Artificial Sequence: Synthetic oligonucleotide
  Sense strand starting at position 3556 of SEQ ID NO: 916832
guaacugauuaugaucaag

SEQ ID NO: 1187561 - RNA, 19 nt, Artificial Sequence
  Description of Artificial Sequence: Synthetic oligonucleotide
  Antisense strand to SEQ ID NO: 1187560
cuugaucauaaucaguuac

SEQ ID NO: 1187562 - RNA, 19 nt, Artificial Sequence
  Description of Artificial Sequence: Synthetic oligonucleotide
  Sense strand starting at position 3598 of SEQ ID NO: 916832
gccuguuaagcagugguuu

SEQ ID NO: 1187563 - RNA, 19 nt, Artificial Sequence
  Description of Artificial Sequence: Synthetic oligonucleotide
  Antisense strand to SEQ ID NO: 1187562
aaaccacugcuuaacaggc

SEQ ID NO: 1187564 - RNA, 19 nt, Artificial Sequence
  Description of Artificial Sequence: Synthetic oligonucleotide
  Sense strand starting at position 3617 of SEQ ID NO: 916832
ugcgaaucauugccuuaug

SEQ ID NO: 1187565 - RNA, 19 nt, Artificial Sequence
  Description of Artificial Sequence: Synthetic oligonucleotide
  Antisense strand to SEQ ID NO: 1187564
cauaaggcaaugauucgca

SEQ ID NO: 1187566 - RNA, 19 nt, Artificial Sequence
  Description of Artificial Sequence: Synthetic oligonucleotide
  Sense strand starting at position 3635 of SEQ ID NO: 916832
guagcaauguuacucuaug

SEQ ID NO: 1187567 - RNA, 19 nt, Artificial Sequence
  Description of Artificial Sequence: Synthetic oligonucleotide
  Antisense strand to SEQ ID NO: 1187566
cauagaguaacauugcuac

SEQ ID NO: 1187568 - RNA, 19 nt, Artificial Sequence
  Description of Artificial Sequence: Synthetic oligonucleotide
  Sense strand starting at position 3660 of SEQ ID NO: 916832
auuccauagcccuggagau

SEQ ID NO: 1187569 - RNA, 19 nt, Artificial Sequence
  Description of Artificial Sequence: Synthetic oligonucleotide
  Antisense strand to SEQ ID NO: 1187568
aucuccagggcuauggaau

SEQ ID NO: 1187570 - RNA, 19 nt, Artificial Sequence
  Description of Artificial Sequence: Synthetic oligonucleotide
  Sense strand starting at position 3661 of SEQ ID NO: 916832
uuccauagcccuggagaua

SEQ ID NO: 1187571 - RNA, 19 nt, Artificial Sequence
  Description of Artificial Sequence: Synthetic oligonucleotide
  Antisense strand to SEQ ID NO: 1187570
uaucuccagggcuauggaa

SEQ ID NO: 1187572 - RNA, 19 nt, Artificial Sequence
  Description of Artificial Sequence: Synthetic oligonucleotide
  Sense strand starting at position 3779 of SEQ ID NO: 916832
uguccagcuguaugaggaa

SEQ ID NO: 1187573 - RNA, 19 nt, Artificial Sequence
  Description of Artificial Sequence: Synthetic oligonucleotide
  Antisense strand to SEQ ID NO: 1187572
uuccucauacagcuggaca

SEQ ID NO: 1187574 - RNA, 19 nt, Artificial Sequence
  Description of Artificial Sequence: Synthetic oligonucleotide
  Sense strand starting at position 282 of SEQ ID NO: 916833
ugugguaggcacuauaacu

SEQ ID NO: 1187575 - RNA, 19 nt, Artificial Sequence
  Description of Artificial Sequence: Synthetic oligonucleotide
  Antisense strand to SEQ ID NO: 1187574
aguuauagugccuaccaca

SEQ ID NO: 1187576 - RNA, 19 nt, Artificial Sequence
  Description of Artificial Sequence: Synthetic oligonucleotide
  Sense strand starting at position 290 of SEQ ID NO: 916833
gcacuauaacugggaucuu

SEQ ID NO: 1187577 - RNA, 19 nt, Artificial Sequence
  Description of Artificial Sequence: Synthetic oligonucleotide
  Antisense strand to SEQ ID NO: 1187576
aagaucccaguuauagugc

SEQ ID NO: 1187578 - RNA, 19 nt, Artificial Sequence
  Description of Artificial Sequence: Synthetic oligonucleotide
  Sense strand starting at position 301 of SEQ ID NO: 916833
gggaucuuaucuuccucau

SEQ ID NO: 1187579 - RNA, 19 nt, Artificial Sequence
  Description of Artificial Sequence: Synthetic oligonucleotide
  Antisense strand to SEQ ID NO: 1187578
augaggaagauaagauccc

SEQ ID NO: 1187580 - RNA, 19 nt, Artificial Sequence
  Description of Artificial Sequence: Synthetic oligonucleotide
  Sense strand starting at position 312 of SEQ ID NO: 916833
uuccucauccacugugaca

SEQ ID NO: 1187581 - RNA, 19 nt, Artificial Sequence
  Description of Artificial Sequence: Synthetic oligonucleotide
  Antisense strand to SEQ ID NO: 1187580
ugucacaguggaugaggaa

SEQ ID NO: 1187582 - RNA, 19 nt, Artificial Sequence
  Description of Artificial Sequence: Synthetic oligonucleotide
  Sense strand starting at position 356 of SEQ ID NO: 916833
aucuguaugguccacagua

SEQ ID NO: 1187583 - RNA, 19 nt, Artificial Sequence
  Description of Artificial Sequence: Synthetic oligonucleotide
  Antisense strand to SEQ ID NO: 1187582
uacuguggaccauacagau

SEQ ID NO: 1187584 - RNA, 19 nt, Artificial Sequence
  Description of Artificial Sequence: Synthetic oligonucleotide
  Sense strand starting at position 643 of SEQ ID NO: 916833
uaguaucugccgugggaga

SEQ ID NO: 1187585 - RNA, 19 nt, Artificial Sequence
  Description of Artificial Sequence: Synthetic oligonucleotide
  Antisense strand to SEQ ID NO: 1187584
ucucccacggcagauacua

SEQ ID NO: 1187586 - RNA, 19 nt, Artificial Sequence
  Description of Artificial Sequence: Synthetic oligonucleotide
  Sense strand starting at position 970 of SEQ ID NO: 916833
gggaguacucccugcagaa

SEQ ID NO: 1187587 - RNA, 19 nt, Artificial Sequence
  Description of Artificial Sequence: Synthetic oligonucleotide
  Antisense strand to SEQ ID NO: 1187586
uucugcagggaguacuccc

SEQ ID NO: 1187588 - RNA, 19 nt, Artificial Sequence
  Description of Artificial Sequence: Synthetic oligonucleotide
  Sense strand starting at position 972 of SEQ ID NO: 916833
gaguacucccugcagaaag

SEQ ID NO: 1187589 - RNA, 19 nt, Artificial Sequence
  Description of Artificial Sequence: Synthetic oligonucleotide
  Antisense strand to SEQ ID NO: 1187588
cuuucugcagggaguacuc

SEQ ID NO: 1187590 - RNA, 19 nt, Artificial Sequence
  Description of Artificial Sequence: Synthetic oligonucleotide
  Sense strand starting at position 1027 of SEQ ID NO: 916833
gaggcagcauucucagaaa

SEQ ID NO: 1187591 - RNA, 19 nt, Artificial Sequence
  Description of Artificial Sequence: Synthetic oligonucleotide
  Antisense strand to SEQ ID NO: 1187590
uuucugagaaugcugccuc

SEQ ID NO: 1187592 - RNA, 19 nt, Artificial Sequence
  Description of Artificial Sequence: Synthetic oligonucleotide
  Sense strand starting at position 1253 of SEQ ID NO: 916833
aaagguccugagugugaaa

SEQ ID NO: 1187593 - RNA, 19 nt, Artificial Sequence
  Description of Artificial Sequence: Synthetic oligonucleotide
  Antisense strand to SEQ ID NO: 1187592
uuucacacucaggaccuuu

SEQ ID NO: 1187594 - RNA, 19 nt, Artificial Sequence
  Description of Artificial Sequence: Synthetic oligonucleotide
  Sense strand starting at position 1306 of SEQ ID NO: 916833
uguuacuuccuguacccau

SEQ ID NO: 1187595 - RNA, 19 nt, Artificial Sequence
  Description of Artificial Sequence: Synthetic oligonucleotide
  Antisense strand to SEQ ID NO: 1187594
auggguacaggaaguaaca

SEQ ID NO: 1187596 - RNA, 19 nt, Artificial Sequence
  Description of Artificial Sequence: Synthetic oligonucleotide
  Sense strand starting at position 2021 of SEQ ID NO: 916833
uuuagcaguccgugaggaa

SEQ ID NO: 1187597 - RNA, 19 nt, Artificial Sequence
  Description of Artificial Sequence: Synthetic oligonucleotide
  Antisense strand to SEQ ID NO: 1187596
uuccucacggacugcuaaa

SEQ ID NO: 1187598 - RNA, 19 nt, Artificial Sequence
  Description of Artificial Sequence: Synthetic oligonucleotide
  Sense strand starting at position 2036 of SEQ ID NO: 916833
ggaagagcugugugggagu

SEQ ID NO: 1187599 - RNA, 19 nt, Artificial Sequence
  Description of Artificial Sequence: Synthetic oligonucleotide
  Antisense strand to SEQ ID NO: 1187598
acucccacacagcucuucc

SEQ ID NO: 1187600 - RNA, 19 nt, Artificial Sequence
  Description of Artificial Sequence: Synthetic oligonucleotide
  Sense strand starting at position 2066 of SEQ ID NO: 916833
ggaucugcccgagaguaag

SEQ ID NO: 1187601 - RNA, 19 nt, Artificial Sequence
  Description of Artificial Sequence: Synthetic oligonucleotide
  Antisense strand to SEQ ID NO: 1187600
cuuacucucgggcagaucc

SEQ ID NO: 1187602 - RNA, 19 nt, Artificial Sequence
  Description of Artificial Sequence: Synthetic oligonucleotide
  Sense strand starting at position 2300 of SEQ ID NO: 916833
ccuaaugccacgugaaaug

SEQ ID NO: 1187603 - RNA, 19 nt, Artificial Sequence
  Description of Artificial Sequence: Synthetic oligonucleotide
  Antisense strand to SEQ ID NO: 1187602
cauuucacguggcauuagg

SEQ ID NO: 1187604 - RNA, 19 nt, Artificial Sequence
  Description of Artificial Sequence: Synthetic oligonucleotide
  Sense strand starting at position 2338 of SEQ ID NO: 916833
ggcgucugaucgccagaau

SEQ ID NO: 1187605 - RNA, 19 nt, Artificial Sequence
  Description of Artificial Sequence: Synthetic oligonucleotide
  Antisense strand to SEQ ID NO: 1187604
auucuggcgaucagacgcc

SEQ ID NO: 1187606 - RNA, 19 nt, Artificial Sequence
  Description of Artificial Sequence: Synthetic oligonucleotide
  Sense strand starting at position 2339 of SEQ ID NO: 916833
gcgucugaucgccagaaug

SEQ ID NO: 1187607 - RNA, 19 nt, Artificial Sequence
  Description of Artificial Sequence: Synthetic oligonucleotide
  Antisense strand to SEQ ID NO: 1187606
cauucuggcgaucagacgc

SEQ ID NO: 1187608 - RNA, 19 nt, Artificial Sequence
  Description of Artificial Sequence: Synthetic oligonucleotide
  Sense strand starting at position 2341 of SEQ ID NO: 916833
gucugaucgccagaaugag

SEQ ID NO: 1187609 - RNA, 19 nt, Artificial Sequence
  Description of Artificial Sequence: Synthetic oligonucleotide
  Antisense strand to SEQ ID NO: 1187608
cucauucuggcgaucagac

SEQ ID NO: 1187610 - RNA, 19 nt, Artificial Sequence
  Description of Artificial Sequence: Synthetic oligonucleotide
  Sense strand starting at position 2470 of SEQ ID NO: 916833
cagaguuugugacuaggaa

SEQ ID NO: 1187611 - RNA, 19 nt, Artificial Sequence
  Description of Artificial Sequence: Synthetic oligonucleotide
  Antisense strand to SEQ ID NO: 1187610
uuccuagucacaaacucug

SEQ ID NO: 1187612 - RNA, 19 nt, Artificial Sequence
  Description of Artificial Sequence: Synthetic oligonucleotide
  Sense strand starting at position 2474 of SEQ ID NO: 916833
guuugugacuaggaacuaa

SEQ ID NO: 1187613 - RNA, 19 nt, Artificial Sequence
  Description of Artificial Sequence: Synthetic oligonucleotide
  Antisense strand to SEQ ID NO: 1187612
uuaguuccuagucacaaac

SEQ ID NO: 1187614 - RNA, 19 nt, Artificial Sequence
  Description of Artificial Sequence: Synthetic oligonucleotide
  Sense strand starting at position 2907 of SEQ ID NO: 916833
ucucucugcuuguugucaa

SEQ ID NO: 1187615 - RNA, 19 nt, Artificial Sequence
  Description of Artificial Sequence: Synthetic oligonucleotide
  Antisense strand to SEQ ID NO: 1187614
uugacaacaagcagagaga

SEQ ID NO: 1187616 - RNA, 19 nt, Artificial Sequence
  Description of Artificial Sequence: Synthetic oligonucleotide
  Sense strand starting at position 2914 of SEQ ID NO: 916833
gcuuguugucaagacaaac

SEQ ID NO: 1187617 - RNA, 19 nt, Artificial Sequence
  Description of Artificial Sequence: Synthetic oligonucleotide
  Antisense strand to SEQ ID NO: 1187616
guuugucuugacaacaagc

SEQ ID NO: 1187618 - RNA, 19 nt, Artificial Sequence
  Description of Artificial Sequence: Synthetic oligonucleotide
  Sense strand starting at position 2949 of SEQ ID NO: 916833
cugaauaucuagcuagcau

SEQ ID NO: 1187619 - RNA, 19 nt, Artificial Sequence
  Description of Artificial Sequence: Synthetic oligonucleotide
  Antisense strand to SEQ ID NO: 1187618
augcuagcuagauauucag

SEQ ID NO: 1187620 - RNA, 19 nt, Artificial Sequence
  Description of Artificial Sequence: Synthetic oligonucleotide
  Sense strand starting at position 2956 of SEQ ID NO: 916833
ucuagcuagcauuauuaga

SEQ ID NO: 1187621 - RNA, 19 nt, Artificial Sequence
  Description of Artificial Sequence: Synthetic oligonucleotide
  Antisense strand to SEQ ID NO: 1187620
ucuaauaaugcuagcuaga

SEQ ID NO: 1187622 - RNA, 19 nt, Artificial Sequence
  Description of Artificial Sequence: Synthetic oligonucleotide
  Sense strand starting at position 3022 of SEQ ID NO: 916833
uggaaagcaccgugguuua

SEQ ID NO: 1187623 - RNA, 19 nt, Artificial Sequence
  Description of Artificial Sequence: Synthetic oligonucleotide
  Antisense strand to SEQ ID NO: 1187622
uaaaccacggugcuuucca

SEQ ID NO: 1187624 - RNA, 19 nt, Artificial Sequence
  Description of Artificial Sequence: Synthetic oligonucleotide
  Sense strand starting at position 3033 of SEQ ID NO: 916833
gugguuuagaagggucgga

SEQ ID NO: 1187625 - RNA, 19 nt, Artificial Sequence
  Description of Artificial Sequence: Synthetic oligonucleotide
  Antisense strand to SEQ ID NO: 1187624
uccgacccuucuaaaccac

SEQ ID NO: 1187626 - RNA, 19 nt, Artificial Sequence
  Description of Artificial Sequence: Synthetic oligonucleotide
  Sense strand starting at position 3105 of SEQ ID NO: 916833
ucaguuuccucccugguaa

SEQ ID NO: 1187627 - RNA, 19 nt, Artificial Sequence
  Description of Artificial Sequence: Synthetic oligonucleotide
  Antisense strand to SEQ ID NO: 1187626
uuaccagggaggaaacuga

SEQ ID NO: 1187628 - RNA, 19 nt, Artificial Sequence
  Description of Artificial Sequence: Synthetic oligonucleotide
  Sense strand starting at position 3139 of SEQ ID NO: 916833
cuguguggugaggauucaa

SEQ ID NO: 1187629 - RNA, 19 nt, Artificial Sequence
  Description of Artificial Sequence: Synthetic oligonucleotide
  Antisense strand to SEQ ID NO: 1187628
uugaauccucaccacacag

SEQ ID NO: 1187630 - RNA, 19 nt, Artificial Sequence
  Description of Artificial Sequence: Synthetic oligonucleotide
  Sense strand starting at position 3171 of SEQ ID NO: 916833
gugaacaugcgcugugaca

SEQ ID NO: 1187631 - RNA, 19 nt, Artificial Sequence
  Description of Artificial Sequence: Synthetic oligonucleotide
  Antisense strand to SEQ ID NO: 1187630
ugucacagcgcauguucac

SEQ ID NO: 1187632 - RNA, 19 nt, Artificial Sequence
  Description of Artificial Sequence: Synthetic oligonucleotide
  Sense strand starting at position 3173 of SEQ ID NO: 916833
gaacaugcgcugugacaga

SEQ ID NO: 1187633 - RNA, 19 nt, Artificial Sequence
  Description of Artificial Sequence: Synthetic oligonucleotide
  Antisense strand to SEQ ID NO: 1187632
ucugucacagcgcauguuc

SEQ ID NO: 1187634 - RNA, 19 nt, Artificial Sequence
  Description of Artificial Sequence: Synthetic oligonucleotide
  Sense strand starting at position 3254 of SEQ ID NO: 916833
ucagacaucugggagcaga

SEQ ID NO: 1187635 - RNA, 19 nt, Artificial Sequence
  Description of Artificial Sequence: Synthetic oligonucleotide
  Antisense strand to SEQ ID NO: 1187634
ucugcucccagaugucuga

SEQ ID NO: 1187636 - RNA, 19 nt, Artificial Sequence
  Description of Artificial Sequence: Synthetic oligonucleotide
  Sense strand starting at position 3367 of SEQ ID NO: 916833
ggcuauagaucuuugagac

SEQ ID NO: 1187637 - RNA, 19 nt, Artificial Sequence
  Description of Artificial Sequence: Synthetic oligonucleotide
  Antisense strand to SEQ ID NO: 1187636
gucucaaagaucuauagcc

SEQ ID NO: 1187638 - RNA, 19 nt, Artificial Sequence
  Description of Artificial Sequence: Synthetic oligonucleotide
  Sense strand starting at position 3368 of SEQ ID NO: 916833
gcuauagaucuuugagacu

SEQ ID NO: 1187639 - RNA, 19 nt, Artificial Sequence
  Description of Artificial Sequence: Synthetic oligonucleotide
  Antisense strand to SEQ ID NO: 1187638
agucucaaagaucuauagc

SEQ ID NO: 1187640 - RNA, 19 nt, Artificial Sequence
  Description of Artificial Sequence: Synthetic oligonucleotide
  Sense strand starting at position 3371 of SEQ ID NO: 916833
auagaucuuugagacugga

SEQ ID NO: 1187641 - RNA, 19 nt, Artificial Sequence
  Description of Artificial Sequence: Synthetic oligonucleotide
  Antisense strand to SEQ ID NO: 1187640
uccagucucaaagaucuau

SEQ ID NO: 1187642 - RNA, 19 nt, Artificial Sequence
  Description of Artificial Sequence: Synthetic oligonucleotide
  Sense strand starting at position 3459 of SEQ ID NO: 916833
ggaguagguucccaaaccu

SEQ ID NO: 1187643 - RNA, 19 nt, Artificial Sequence
  Description of Artificial Sequence: Synthetic oligonucleotide
  Antisense strand to SEQ ID NO: 1187642
agguuugggaaccuacucc

SEQ ID NO: 1187644 - RNA, 19 nt, Artificial Sequence
  Description of Artificial Sequence: Synthetic oligonucleotide
  Sense strand starting at position 3477 of SEQ ID NO: 916833
ucagcaucagaauggguua

SEQ ID NO: 1187645 - RNA, 19 nt, Artificial Sequence
  Description of Artificial Sequence: Synthetic oligonucleotide
  Antisense strand to SEQ ID NO: 1187644
uaacccauucugaugcuga

SEQ ID NO: 1187646 - RNA, 19 nt, Artificial Sequence
  Description of Artificial Sequence: Synthetic oligonucleotide
  Sense strand starting at position 3480 of SEQ ID NO: 916833
gcaucagaauggguuagaa

SEQ ID NO: 1187647 - RNA, 19 nt, Artificial Sequence
  Description of Artificial Sequence: Synthetic oligonucleotide
  Antisense strand to SEQ ID NO: 1187646
uucuaacccauucugaugc

SEQ ID NO: 1187648 - RNA, 19 nt, Artificial Sequence
  Description of Artificial Sequence: Synthetic oligonucleotide
  Sense strand starting at position 3599 of SEQ ID NO: 916833
accucuccucagugauucu

SEQ ID NO: 1187649 - RNA, 19 nt, Artificial Sequence
  Description of Artificial Sequence: Synthetic oligonucleotide
  Antisense strand to SEQ ID NO: 1187648
agaaucacugaggagaggu

SEQ ID NO: 1187650 - RNA, 19 nt, Artificial Sequence
  Description of Artificial Sequence: Synthetic oligonucleotide
  Sense strand starting at position 3602 of SEQ ID NO: 916833
ucuccucagugauucugau

SEQ ID NO: 1187651 - RNA, 19 nt, Artificial Sequence
  Description of Artificial Sequence: Synthetic oligonucleotide
  Antisense strand to SEQ ID NO: 1187650
aucagaaucacugaggaga

SEQ ID NO: 1187652 - RNA, 19 nt, Artificial Sequence
  Description of Artificial Sequence: Synthetic oligonucleotide
  Sense strand starting at position 3876 of SEQ ID NO: 916833
caaggugagccaugaucaa

SEQ ID NO: 1187653 - RNA, 19 nt, Artificial Sequence
  Description of Artificial Sequence: Synthetic oligonucleotide
  Antisense strand to SEQ ID NO: 1187652
uugaucauggcucaccuug

SEQ ID NO: 1187654 - RNA, 19 nt, Artificial Sequence
  Description of Artificial Sequence: Synthetic oligonucleotide
  Sense strand starting at position 41 of SEQ ID NO: 916834
aucuguaugguccacagua

SEQ ID NO: 1187655 - RNA, 19 nt, Artificial Sequence
  Description of Artificial Sequence: Synthetic oligonucleotide
  Antisense strand to SEQ ID NO: 1187654
uacuguggaccauacagau

SEQ ID NO: 1187656 - RNA, 19 nt, Artificial Sequence
  Description of Artificial Sequence: Synthetic oligonucleotide
  Sense strand starting at position 328 of SEQ ID NO: 916834
uaguaucugccgugggaga

SEQ ID NO: 1187657 - RNA, 19 nt, Artificial Sequence
  Description of Artificial Sequence: Synthetic oligonucleotide
  Antisense strand to SEQ ID NO: 1187656
ucucccacggcagauacua

SEQ ID NO: 1187658 - RNA, 19 nt, Artificial Sequence
  Description of Artificial Sequence: Synthetic oligonucleotide
  Sense strand starting at position 481 of SEQ ID NO: 916834
cucaccucuugccaggaua

SEQ ID NO: 1187659 - RNA, 19 nt, Artificial Sequence
  Description of Artificial Sequence: Synthetic oligonucleotide
  Antisense strand to SEQ ID NO: 1187658
uauccuggcaagaggugag

SEQ ID NO: 1187660 - RNA, 19 nt, Artificial Sequence
  Description of Artificial Sequence: Synthetic oligonucleotide
  Sense strand starting at position 655 of SEQ ID NO: 916834
gggaguacucccugcagaa

SEQ ID NO: 1187661 - RNA, 19 nt, Artificial Sequence
  Description of Artificial Sequence: Synthetic oligonucleotide
  Antisense strand to SEQ ID NO: 1187660
uucugcagggaguacuccc

SEQ ID NO: 1187662 - RNA, 19 nt, Artificial Sequence
  Description of Artificial Sequence: Synthetic oligonucleotide
  Sense strand starting at position 657 of SEQ ID NO: 916834
gaguacucccugcagaaag

SEQ ID NO: 1187663 - RNA, 19 nt, Artificial Sequence
  Description of Artificial Sequence: Synthetic oligonucleotide
  Antisense strand to SEQ ID NO: 1187662
cuuucugcagggaguacuc

SEQ ID NO: 1187664 - RNA, 19 nt, Artificial Sequence
  Description of Artificial Sequence: Synthetic oligonucleotide
  Sense strand starting at position 712 of SEQ ID NO: 916834
gaggcagcauucucagaaa

SEQ ID NO: 1187665 - RNA, 19 nt, Artificial Sequence
  Description of Artificial Sequence: Synthetic oligonucleotide
  Antisense strand to SEQ ID NO: 1187664
uuucugagaaugcugccuc

SEQ ID NO: 1187666 - RNA, 19 nt, Artificial Sequence
  Description of Artificial Sequence: Synthetic oligonucleotide
  Sense strand starting at position 934 of SEQ ID NO: 916834
aaagaaagguccugagugu

SEQ ID NO: 1187667 - RNA, 19 nt, Artificial Sequence
  Description of Artificial Sequence: Synthetic oligonucleotide
  Antisense strand to SEQ ID NO: 1187666
acacucaggaccuuucuuu

SEQ ID NO: 1187668 - RNA, 19 nt, Artificial Sequence
  Description of Artificial Sequence: Synthetic oligonucleotide
  Sense strand starting at position 938 of SEQ ID NO: 916834
aaagguccugagugugaaa

SEQ ID NO: 1187669 - RNA, 19 nt, Artificial Sequence
  Description of Artificial Sequence: Synthetic oligonucleotide
  Antisense strand to SEQ ID NO: 1187668
uuucacacucaggaccuuu

SEQ ID NO: 1187670 - RNA, 19 nt, Artificial Sequence
  Description of Artificial Sequence: Synthetic oligonucleotide
  Sense strand starting at position 991 of SEQ ID NO: 916834
uguuacuuccuguacccau

SEQ ID NO: 1187671 - RNA, 19 nt, Artificial Sequence
  Description of Artificial Sequence: Synthetic oligonucleotide
  Antisense strand to SEQ ID NO: 1187670
auggguacaggaaguaaca

SEQ ID NO: 1187672 - RNA, 19 nt, Artificial Sequence
  Description of Artificial Sequence: Synthetic oligonucleotide
  Sense strand starting at position 1706 of SEQ ID NO: 916834
uuuagcaguccgugaggaa

SEQ ID NO: 1187673 - RNA, 19 nt, Artificial Sequence
  Description of Artificial Sequence: Synthetic oligonucleotide
  Antisense strand to SEQ ID NO: 1187672
uuccucacggacugcuaaa

SEQ ID NO: 1187674 - RNA, 19 nt, Artificial Sequence
  Description of Artificial Sequence: Synthetic oligonucleotide
  Sense strand starting at position 1721 of SEQ ID NO: 916834
ggaagagcugugugggagu

SEQ ID NO: 1187675 - RNA, 19 nt, Artificial Sequence
  Description of Artificial Sequence: Synthetic oligonucleotide
  Antisense strand to SEQ ID NO: 1187674
acucccacacagcucuucc

SEQ ID NO: 1187676 - RNA, 19 nt, Artificial Sequence
  Description of Artificial Sequence: Synthetic oligonucleotide
  Sense strand starting at position 1751 of SEQ ID NO: 916834
ggaucugcccgagaguaag

SEQ ID NO: 1187677 - RNA, 19 nt, Artificial Sequence
  Description of Artificial Sequence: Synthetic oligonucleotide
  Antisense strand to SEQ ID NO: 1187676
cuuacucucgggcagaucc

SEQ ID NO: 1187678 - RNA, 19 nt, Artificial Sequence
  Description of Artificial Sequence: Synthetic oligonucleotide
  Sense strand starting at position 1985 of SEQ ID NO: 916834
ccuaaugccacgugaaaug

SEQ ID NO: 1187679 - RNA, 19 nt, Artificial Sequence
  Description of Artificial Sequence: Synthetic oligonucleotide
  Antisense strand to SEQ ID NO: 1187678
cauuucacguggcauuagg

SEQ ID NO: 1187680 - RNA, 19 nt, Artificial Sequence
  Description of Artificial Sequence: Synthetic oligonucleotide
  Sense strand starting at position 2023 of SEQ ID NO: 916834
ggcgucugaucgccagaau

SEQ ID NO: 1187681 - RNA, 19 nt, Artificial Sequence
  Description of Artificial Sequence: Synthetic oligonucleotide
  Antisense strand to SEQ ID NO: 1187680
auucuggcgaucagacgcc

SEQ ID NO: 1187682 - RNA, 19 nt, Artificial Sequence
  Description of Artificial Sequence: Synthetic oligonucleotide
  Sense strand starting at position 2024 of SEQ ID NO: 916834
gcgucugaucgccagaaug

SEQ ID NO: 1187683 - RNA, 19 nt, Artificial Sequence
  Description of Artificial Sequence: Synthetic oligonucleotide
  Antisense strand to SEQ ID NO: 1187682
cauucuggcgaucagacgc

SEQ ID NO: 1187684 - RNA, 19 nt, Artificial Sequence
  Description of Artificial Sequence: Synthetic oligonucleotide
  Sense strand starting at position 2026 of SEQ ID NO: 916834
gucugaucgccagaaugag

SEQ ID NO: 1187685 - RNA, 19 nt, Artificial Sequence
  Description of Artificial Sequence: Synthetic oligonucleotide
  Antisense strand to SEQ ID NO: 1187684
cucauucuggcgaucagac

SEQ ID NO: 1187686 - RNA, 19 nt, Artificial Sequence
  Description of Artificial Sequence: Synthetic oligonucleotide
  Sense strand starting at position 2155 of SEQ ID NO: 916834
cagaguuugugacuaggaa

SEQ ID NO: 1187687 - RNA, 19 nt, Artificial Sequence
  Description of Artificial Sequence: Synthetic oligonucleotide
  Antisense strand to SEQ ID NO: 1187686
uuccuagucacaaacucug

SEQ ID NO: 1187688 - RNA, 19 nt, Artificial Sequence
  Description of Artificial Sequence: Synthetic oligonucleotide
  Sense strand starting at position 2159 of SEQ ID NO: 916834
guuugugacuaggaacuaa

SEQ ID NO: 1187689 - RNA, 19 nt, Artificial Sequence
  Description of Artificial Sequence: Synthetic oligonucleotide
  Antisense strand to SEQ ID NO: 1187688
uuaguuccuagucacaaac

SEQ ID NO: 1187690 - RNA, 19 nt, Artificial Sequence
  Description of Artificial Sequence: Synthetic oligonucleotide
  Sense strand starting at position 2592 of SEQ ID NO: 916834
ucucucugcuuguugucaa

SEQ ID NO: 1187691 - RNA, 19 nt, Artificial Sequence
  Description of Artificial Sequence: Synthetic oligonucleotide
  Antisense strand to SEQ ID NO: 1187690
uugacaacaagcagagaga

SEQ ID NO: 1187692 - RNA, 19 nt, Artificial Sequence
  Description of Artificial Sequence: Synthetic oligonucleotide
  Sense strand starting at position 2599 of SEQ ID NO: 916834
gcuuguugucaagacaaac

SEQ ID NO: 1187693 - RNA, 19 nt, Artificial Sequence
  Description of Artificial Sequence: Synthetic oligonucleotide
  Antisense strand to SEQ ID NO: 1187692
guuugucuugacaacaagc

SEQ ID NO: 1187694 - RNA, 19 nt, Artificial Sequence
  Description of Artificial Sequence: Synthetic oligonucleotide
  Sense strand starting at position 2634 of SEQ ID NO: 916834
cugaauaucuagcuagcau

SEQ ID NO: 1187695 - RNA, 19 nt, Artificial Sequence
  Description of Artificial Sequence: Synthetic oligonucleotide
  Antisense strand to SEQ ID NO: 1187694
augcuagcuagauauucag

SEQ ID NO: 1187696 - RNA, 19 nt, Artificial Sequence
  Description of Artificial Sequence: Synthetic oligonucleotide
  Sense strand starting at position 2641 of SEQ ID NO: 916834
ucuagcuagcauuauuaga

SEQ ID NO: 1187697 - RNA, 19 nt, Artificial Sequence
  Description of Artificial Sequence: Synthetic oligonucleotide
  Antisense strand to SEQ ID NO: 1187696
ucuaauaaugcuagcuaga

SEQ ID NO: 1187698 - RNA, 19 nt, Artificial Sequence
  Description of Artificial Sequence: Synthetic oligonucleotide
  Sense strand starting at position 2707 of SEQ ID NO: 916834
uggaaagcaccgugguuua

SEQ ID NO: 1187699 - RNA, 19 nt, Artificial Sequence
  Description of Artificial Sequence: Synthetic oligonucleotide
  Antisense strand to SEQ ID NO: 1187698
uaaaccacggugcuuucca

SEQ ID NO: 1187700 - RNA, 19 nt, Artificial Sequence
  Description of Artificial Sequence: Synthetic oligonucleotide
  Sense strand starting at position 2718 of SEQ ID NO: 916834
gugguuuagaagggucgga

SEQ ID NO: 1187701 - RNA, 19 nt, Artificial Sequence
  Description of Artificial Sequence: Synthetic oligonucleotide
  Antisense strand to SEQ ID NO: 1187700
uccgacccuucuaaaccac

SEQ ID NO: 1187702 - RNA, 19 nt, Artificial Sequence
  Description of Artificial Sequence: Synthetic oligonucleotide
  Sense strand starting at position 2790 of SEQ ID NO: 916834
ucaguuuccucccugguaa

SEQ ID NO: 1187703 - RNA, 19 nt, Artificial Sequence
  Description of Artificial Sequence: Synthetic oligonucleotide
  Antisense strand to SEQ ID NO: 1187702
uuaccagggaggaaacuga

SEQ ID NO: 1187704 - RNA, 19 nt, Artificial Sequence
  Description of Artificial Sequence: Synthetic oligonucleotide
  Sense strand starting at position 2824 of SEQ ID NO: 916834
cuguguggugaggauucaa

SEQ ID NO: 1187705 - RNA, 19 nt, Artificial Sequence
  Description of Artificial Sequence: Synthetic oligonucleotide
  Antisense strand to SEQ ID NO: 1187704
uugaauccucaccacacag

SEQ ID NO: 1187706 - RNA, 19 nt, Artificial Sequence
  Description of Artificial Sequence: Synthetic oligonucleotide
  Sense strand starting at position 2856 of SEQ ID NO: 916834
gugaacaugcgcugugaca

SEQ ID NO: 1187707 - RNA, 19 nt, Artificial Sequence
  Description of Artificial Sequence: Synthetic oligonucleotide
  Antisense strand to SEQ ID NO: 1187706
ugucacagcgcauguucac

SEQ ID NO: 1187708 - RNA, 19 nt, Artificial Sequence
  Description of Artificial Sequence: Synthetic oligonucleotide
  Sense strand starting at position 2858 of SEQ ID NO: 916834
gaacaugcgcugugacaga

SEQ ID NO: 1187709 - RNA, 19 nt, Artificial Sequence
  Description of Artificial Sequence: Synthetic oligonucleotide
  Antisense strand to SEQ ID NO: 1187708
ucugucacagcgcauguuc

SEQ ID NO: 1187710 - RNA, 19 nt, Artificial Sequence
  Description of Artificial Sequence: Synthetic oligonucleotide
  Sense strand starting at position 2939 of SEQ ID NO: 916834
ucagacaucugggagcaga

SEQ ID NO: 1187711 - RNA, 19 nt, Artificial Sequence
  Description of Artificial Sequence: Synthetic oligonucleotide
  Antisense strand to SEQ ID NO: 1187710
ucugcucccagaugucuga

SEQ ID NO: 1187712 - RNA, 19 nt, Artificial Sequence
  Description of Artificial Sequence: Synthetic oligonucleotide
  Sense strand starting at position 3052 of SEQ ID NO: 916834
ggcuauagaucuuugagac

SEQ ID NO: 1187713 - RNA, 19 nt, Artificial Sequence
  Description of Artificial Sequence: Synthetic oligonucleotide
  Antisense strand to SEQ ID NO: 1187712
gucucaaagaucuauagcc

SEQ ID NO: 1187714 - RNA, 19 nt, Artificial Sequence
  Description of Artificial Sequence: Synthetic oligonucleotide
  Sense strand starting at position 3053 of SEQ ID NO: 916834
gcuauagaucuuugagacu

SEQ ID NO: 1187715 - RNA, 19 nt, Artificial Sequence
  Description of Artificial Sequence: Synthetic oligonucleotide
  Antisense strand to SEQ ID NO: 1187714
agucucaaagaucuauagc

SEQ ID NO: 1187716 - RNA, 19 nt, Artificial Sequence
  Description of Artificial Sequence: Synthetic oligonucleotide
  Sense strand starting at position 3056 of SEQ ID NO: 916834
auagaucuuugagacugga

SEQ ID NO: 1187717 - RNA, 19 nt, Artificial Sequence
  Description of Artificial Sequence: Synthetic oligonucleotide
  Antisense strand to SEQ ID NO: 1187716
uccagucucaaagaucuau

SEQ ID NO: 1187718 - RNA, 19 nt, Artificial Sequence
  Description of Artificial Sequence: Synthetic oligonucleotide
  Sense strand starting at position 3144 of SEQ ID NO: 916834
ggaguagguucccaaaccu

SEQ ID NO: 1187719 - RNA, 19 nt, Artificial Sequence
  Description of Artificial Sequence: Synthetic oligonucleotide
  Antisense strand to SEQ ID NO: 1187718
agguuugggaaccuacucc

SEQ ID NO: 1187720 - RNA, 19 nt, Artificial Sequence
  Description of Artificial Sequence: Synthetic oligonucleotide
  Sense strand starting at position 3162 of SEQ ID NO: 916834
ucagcaucagaauggguua

SEQ ID NO: 1187721 - RNA, 19 nt, Artificial Sequence
  Description of Artificial Sequence: Synthetic oligonucleotide
  Antisense strand to SEQ ID NO: 1187720
uaacccauucugaugcuga

SEQ ID NO: 1187722 - RNA, 19 nt, Artificial Sequence
  Description of Artificial Sequence: Synthetic oligonucleotide
  Sense strand starting at position 3165 of SEQ ID NO: 916834
gcaucagaauggguuagaa

SEQ ID NO: 1187723 - RNA, 19 nt, Artificial Sequence
  Description of Artificial Sequence: Synthetic oligonucleotide
  Antisense strand to SEQ ID NO: 1187722
uucuaacccauucugaugc

SEQ ID NO: 1187724 - RNA, 19 nt, Artificial Sequence
  Description of Artificial Sequence: Synthetic oligonucleotide
  Sense strand starting at position 3284 of SEQ ID NO: 916834
accucuccucagugauucu

SEQ ID NO: 1187725 - RNA, 19 nt, Artificial Sequence
  Description of Artificial Sequence: Synthetic oligonucleotide
  Antisense strand to SEQ ID NO: 1187724
agaaucacugaggagaggu

SEQ ID NO: 1187726 - RNA, 19 nt, Artificial Sequence
  Description of Artificial Sequence: Synthetic oligonucleotide
  Sense strand starting at position 3287 of SEQ ID NO: 916834
ucuccucagugauucugau

SEQ ID NO: 1187727 - RNA, 19 nt, Artificial Sequence
  Description of Artificial Sequence: Synthetic oligonucleotide
  Antisense strand to SEQ ID NO: 1187726
aucagaaucacugaggaga

SEQ ID NO: 1187728 - RNA, 19 nt, Artificial Sequence
  Description of Artificial Sequence: Synthetic oligonucleotide
  Sense strand starting at position 3291 of SEQ ID NO: 916834
cucagugauucugauaagc

SEQ ID NO: 1187729 - RNA, 19 nt, Artificial Sequence
  Description of Artificial Sequence: Synthetic oligonucleotide
  Antisense strand to SEQ ID NO: 1187728
gcuuaucagaaucacugag

SEQ ID NO: 1187730 - RNA, 19 nt, Artificial Sequence
  Description of Artificial Sequence: Synthetic oligonucleotide
  Sense strand starting at position 3293 of SEQ ID NO: 916834
cagugauucugauaagcca

SEQ ID NO: 1187731 - RNA, 19 nt, Artificial Sequence
  Description of Artificial Sequence: Synthetic oligonucleotide
  Antisense strand to SEQ ID NO: 1187730
uggcuuaucagaaucacug

SEQ ID NO: 1187732 - RNA, 19 nt, Artificial Sequence
  Description of Artificial Sequence: Synthetic oligonucleotide
  Sense strand starting at position 3561 of SEQ ID NO: 916834
caaggugagccaugaucaa

SEQ ID NO: 1187733 - RNA, 19 nt, Artificial Sequence
  Description of Artificial Sequence: Synthetic oligonucleotide
  Antisense strand to SEQ ID NO: 1187732
uugaucauggcucaccuug

SEQ ID NO: 1187734 - RNA, 19 nt, Artificial Sequence
  Description of Artificial Sequence: Synthetic oligonucleotide
  Sense strand starting at position 250 of SEQ ID NO: 916835
ugugguaggcacuauaacu

SEQ ID NO: 1187735 - RNA, 19 nt, Artificial Sequence
  Description of Artificial Sequence: Synthetic oligonucleotide
  Antisense strand to SEQ ID NO: 1187734
aguuauagugccuaccaca

SEQ ID NO: 1187736 - RNA, 19 nt, Artificial Sequence
  Description of Artificial Sequence: Synthetic oligonucleotide
  Sense strand starting at position 258 of SEQ ID NO: 916835
gcacuauaacugggaucuu

SEQ ID NO: 1187737 - RNA, 19 nt, Artificial Sequence
  Description of Artificial Sequence: Synthetic oligonucleotide
  Antisense strand to SEQ ID NO: 1187736
aagaucccaguuauagugc

SEQ ID NO: 1187738 - RNA, 19 nt, Artificial Sequence
  Description of Artificial Sequence: Synthetic oligonucleotide
  Sense strand starting at position 269 of SEQ ID NO: 916835
gggaucuuaucuuccucau

SEQ ID NO: 1187739 - RNA, 19 nt, Artificial Sequence
  Description of Artificial Sequence: Synthetic oligonucleotide
  Antisense strand to SEQ ID NO: 1187738
augaggaagauaagauccc

SEQ ID NO: 1187740 - RNA, 19 nt, Artificial Sequence
  Description of Artificial Sequence: Synthetic oligonucleotide
  Sense strand starting at position 280 of SEQ ID NO: 916835
uuccucauccacugugaca

SEQ ID NO: 1187741 - RNA, 19 nt, Artificial Sequence
  Description of Artificial Sequence: Synthetic oligonucleotide
  Antisense strand to SEQ ID NO: 1187740
ugucacaguggaugaggaa

SEQ ID NO: 1187742 - RNA, 19 nt, Artificial Sequence
  Description of Artificial Sequence: Synthetic oligonucleotide
  Sense strand starting at position 324 of SEQ ID NO: 916835
aucuguaugguccacagua

SEQ ID NO: 1187743 - RNA, 19 nt, Artificial Sequence
  Description of Artificial Sequence: Synthetic oligonucleotide
  Antisense strand to SEQ ID NO: 1187742
uacuguggaccauacagau

SEQ ID NO: 1187744 - RNA, 19 nt, Artificial Sequence
  Description of Artificial Sequence: Synthetic oligonucleotide
  Sense strand starting at position 611 of SEQ ID NO: 916835
uaguaucugccgugggaga

SEQ ID NO: 1187745 - RNA, 19 nt, Artificial Sequence
  Description of Artificial Sequence: Synthetic oligonucleotide
  Antisense strand to SEQ ID NO: 1187744
ucucccacggcagauacua

SEQ ID NO: 1187746 - RNA, 19 nt, Artificial Sequence
  Description of Artificial Sequence: Synthetic oligonucleotide
  Sense strand starting at position 938 of SEQ ID NO: 916835
gggaguacucccugcagaa

SEQ ID NO: 1187747 - RNA, 19 nt, Artificial Sequence
  Description of Artificial Sequence: Synthetic oligonucleotide
  Antisense strand to SEQ ID NO: 1187746
uucugcagggaguacuccc

SEQ ID NO: 1187748 - RNA, 19 nt, Artificial Sequence
  Description of Artificial Sequence: Synthetic oligonucleotide
  Sense strand starting at position 940 of SEQ ID NO: 916835
gaguacucccugcagaaag

SEQ ID NO: 1187749 - RNA, 19 nt, Artificial Sequence
  Description of Artificial Sequence: Synthetic oligonucleotide
  Antisense strand to SEQ ID NO: 1187748
cuuucugcagggaguacuc

SEQ ID NO: 1187750 - RNA, 19 nt, Artificial Sequence
  Description of Artificial Sequence: Synthetic oligonucleotide
  Sense strand starting at position 995 of SEQ ID NO: 916835
gaggcagcauucucagaaa

SEQ ID NO: 1187751 - RNA, 19 nt, Artificial Sequence
  Description of Artificial Sequence: Synthetic oligonucleotide
  Antisense strand to SEQ ID NO: 1187750
uuucugagaaugcugccuc

SEQ ID NO: 1187752 - RNA, 19 nt, Artificial Sequence
  Description of Artificial Sequence: Synthetic oligonucleotide
  Sense strand starting at position 1221 of SEQ ID NO: 916835
aaagguccugagugugaaa

SEQ ID NO: 1187753 - RNA, 19 nt, Artificial Sequence
  Description of Artificial Sequence: Synthetic oligonucleotide
  Antisense strand to SEQ ID NO: 1187752
uuucacacucaggaccuuu

SEQ ID NO: 1187754 - RNA, 19 nt, Artificial Sequence
  Description of Artificial Sequence: Synthetic oligonucleotide
  Sense strand starting at position 1274 of SEQ ID NO: 916835
uguuacuuccuguacccau

SEQ ID NO: 1187755 - RNA, 19 nt, Artificial Sequence
  Description of Artificial Sequence: Synthetic oligonucleotide
  Antisense strand to SEQ ID NO: 1187754
auggguacaggaaguaaca

SEQ ID NO: 1187756 - RNA, 19 nt, Artificial Sequence
  Description of Artificial Sequence: Synthetic oligonucleotide
  Sense strand starting at position 1989 of SEQ ID NO: 916835
uuuagcaguccgugaggaa

SEQ ID NO: 1187757 - RNA, 19 nt, Artificial Sequence
  Description of Artificial Sequence: Synthetic oligonucleotide
  Antisense strand to SEQ ID NO: 1187756
uuccucacggacugcuaaa

SEQ ID NO: 1187758 - RNA, 19 nt, Artificial Sequence
  Description of Artificial Sequence: Synthetic oligonucleotide
  Sense strand starting at position 2004 of SEQ ID NO: 916835
ggaagagcugugugggagu

SEQ ID NO: 1187759 - RNA, 19 nt, Artificial Sequence
  Description of Artificial Sequence: Synthetic oligonucleotide
  Antisense strand to SEQ ID NO: 1187758
acucccacacagcucuucc

SEQ ID NO: 1187760 - RNA, 19 nt, Artificial Sequence
  Description of Artificial Sequence: Synthetic oligonucleotide
  Sense strand starting at position 2034 of SEQ ID NO: 916835
ggaucugcccgagaguaag

SEQ ID NO: 1187761 - RNA, 19 nt, Artificial Sequence
  Description of Artificial Sequence: Synthetic oligonucleotide
  Antisense strand to SEQ ID NO: 1187760
cuuacucucgggcagaucc

SEQ ID NO: 1187762 - RNA, 19 nt, Artificial Sequence
  Description of Artificial Sequence: Synthetic oligonucleotide
  Sense strand starting at position 2268 of SEQ ID NO: 916835
ccuaaugccacgugaaaug

SEQ ID NO: 1187763 - RNA, 19 nt, Artificial Sequence
  Description of Artificial Sequence: Synthetic oligonucleotide
  Antisense strand to SEQ ID NO: 1187762
cauuucacguggcauuagg

SEQ ID NO: 1187764 - RNA, 19 nt, Artificial Sequence
  Description of Artificial Sequence: Synthetic oligonucleotide
  Sense strand starting at position 2306 of SEQ ID NO: 916835
ggcgucugaucgccagaau

SEQ ID NO: 1187765 - RNA, 19 nt, Artificial Sequence
  Description of Artificial Sequence: Synthetic oligonucleotide
  Antisense strand to SEQ ID NO: 1187764
auucuggcgaucagacgcc

SEQ ID NO: 1187766 - RNA, 19 nt, Artificial Sequence
  Description of Artificial Sequence: Synthetic oligonucleotide
  Sense strand starting at position 2307 of SEQ ID NO: 916835
gcgucugaucgccagaaug

SEQ ID NO: 1187767 - RNA, 19 nt, Artificial Sequence
  Description of Artificial Sequence: Synthetic oligonucleotide
  Antisense strand to SEQ ID NO: 1187766
cauucuggcgaucagacgc

SEQ ID NO: 1187768 - RNA, 19 nt, Artificial Sequence
  Description of Artificial Sequence: Synthetic oligonucleotide
  Sense strand starting at position 2309 of SEQ ID NO: 916835
gucugaucgccagaaugag

SEQ ID NO: 1187769 - RNA, 19 nt, Artificial Sequence
  Description of Artificial Sequence: Synthetic oligonucleotide
  Antisense strand to SEQ ID NO: 1187768
cucauucuggcgaucagac

SEQ ID NO: 1187770 - RNA, 19 nt, Artificial Sequence
  Description of Artificial Sequence: Synthetic oligonucleotide
  Sense strand starting at position 2438 of SEQ ID NO: 916835
cagaguuugugacuaggaa

SEQ ID NO: 1187771 - RNA, 19 nt, Artificial Sequence
  Description of Artificial Sequence: Synthetic oligonucleotide
  Antisense strand to SEQ ID NO: 1187770
uuccuagucacaaacucug

SEQ ID NO: 1187772 - RNA, 19 nt, Artificial Sequence
  Description of Artificial Sequence: Synthetic oligonucleotide
  Sense strand starting at position 2442 of SEQ ID NO: 916835
guuugugacuaggaacuaa

SEQ ID NO: 1187773 - RNA, 19 nt, Artificial Sequence
  Description of Artificial Sequence: Synthetic oligonucleotide
  Antisense strand to SEQ ID NO: 1187772
uuaguuccuagucacaaac

SEQ ID NO: 1187774 - RNA, 19 nt, Artificial Sequence
  Description of Artificial Sequence: Synthetic oligonucleotide
  Sense strand starting at position 2875 of SEQ ID NO: 916835
ucucucugcuuguugucaa

SEQ ID NO: 1187775 - RNA, 19 nt, Artificial Sequence
  Description of Artificial Sequence: Synthetic oligonucleotide
  Antisense strand to SEQ ID NO: 1187774
uugacaacaagcagagaga

SEQ ID NO: 1187776 - RNA, 19 nt, Artificial Sequence
  Description of Artificial Sequence: Synthetic oligonucleotide
  Sense strand starting at position 2882 of SEQ ID NO: 916835
gcuuguugucaagacaaac

SEQ ID NO: 1187777 - RNA, 19 nt, Artificial Sequence
  Description of Artificial Sequence: Synthetic oligonucleotide
  Antisense strand to SEQ ID NO: 1187776
guuugucuugacaacaagc

SEQ ID NO: 1187778 - RNA, 19 nt, Artificial Sequence
  Description of Artificial Sequence: Synthetic oligonucleotide
  Sense strand starting at position 2917 of SEQ ID NO: 916835
cugaauaucuagcuagcau

SEQ ID NO: 1187779 - RNA, 19 nt, Artificial Sequence
  Description of Artificial Sequence: Synthetic oligonucleotide
  Antisense strand to SEQ ID NO: 1187778
augcuagcuagauauucag

SEQ ID NO: 1187780 - RNA, 19 nt, Artificial Sequence
  Description of Artificial Sequence: Synthetic oligonucleotide
  Sense strand starting at position 2924 of SEQ ID NO: 916835
ucuagcuagcauuauuaga

SEQ ID NO: 1187781 - RNA, 19 nt, Artificial Sequence
  Description of Artificial Sequence: Synthetic oligonucleotide
  Antisense strand to SEQ ID NO: 1187780
ucuaauaaugcuagcuaga

SEQ ID NO: 1187782 - RNA, 19 nt, Artificial Sequence
  Description of Artificial Sequence: Synthetic oligonucleotide
  Sense strand starting at position 2990 of SEQ ID NO: 916835
uggaaagcaccgugguuua

SEQ ID NO: 1187783 - RNA, 19 nt, Artificial Sequence
  Description of Artificial Sequence: Synthetic oligonucleotide
  Antisense strand to SEQ ID NO: 1187782
uaaaccacggugcuuucca

SEQ ID NO: 1187784 - RNA, 19 nt, Artificial Sequence
  Description of Artificial Sequence: Synthetic oligonucleotide
  Sense strand starting at position 3001 of SEQ ID NO: 916835
gugguuuagaagggucgga

SEQ ID NO: 1187785 - RNA, 19 nt, Artificial Sequence
  Description of Artificial Sequence: Synthetic oligonucleotide
  Antisense strand to SEQ ID NO: 1187784
uccgacccuucuaaaccac

SEQ ID NO: 1187786 - RNA, 19 nt, Artificial Sequence
  Description of Artificial Sequence: Synthetic oligonucleotide
  Sense strand starting at position 3073 of SEQ ID NO: 916835
ucaguuuccucccugguaa

SEQ ID NO: 1187787 - RNA, 19 nt, Artificial Sequence
  Description of Artificial Sequence: Synthetic oligonucleotide
  Antisense strand to SEQ ID NO: 1187786
uuaccagggaggaaacuga

SEQ ID NO: 1187788 - RNA, 19 nt, Artificial Sequence
  Description of Artificial Sequence: Synthetic oligonucleotide
  Sense strand starting at position 3107 of SEQ ID NO: 916835
cuguguggugaggauucaa

SEQ ID NO: 1187789 - RNA, 19 nt, Artificial Sequence
  Description of Artificial Sequence: Synthetic oligonucleotide
  Antisense strand to SEQ ID NO: 1187788
uugaauccucaccacacag

SEQ ID NO: 1187790 - RNA, 19 nt, Artificial Sequence
  Description of Artificial Sequence: Synthetic oligonucleotide
  Sense strand starting at position 3139 of SEQ ID NO: 916835
gugaacaugcgcugugaca

SEQ ID NO: 1187791 - RNA, 19 nt, Artificial Sequence
  Description of Artificial Sequence: Synthetic oligonucleotide
  Antisense strand to SEQ ID NO: 1187790
ugucacagcgcauguucac

SEQ ID NO: 1187792 - RNA, 19 nt, Artificial Sequence
  Description of Artificial Sequence: Synthetic oligonucleotide
  Sense strand starting at position 3141 of SEQ ID NO: 916835
gaacaugcgcugugacaga

SEQ ID NO: 1187793 - RNA, 19 nt, Artificial Sequence
  Description of Artificial Sequence: Synthetic oligonucleotide
  Antisense strand to SEQ ID NO: 1187792
ucugucacagcgcauguuc

SEQ ID NO: 1187794 - RNA, 19 nt, Artificial Sequence
  Description of Artificial Sequence: Synthetic oligonucleotide
  Sense strand starting at position 3222 of SEQ ID NO: 916835
ucagacaucugggagcaga

SEQ ID NO: 1187795 - RNA, 19 nt, Artificial Sequence
  Description of Artificial Sequence: Synthetic oligonucleotide
  Antisense strand to SEQ ID NO: 1187794
ucugcucccagaugucuga

SEQ ID NO: 1187796 - RNA, 19 nt, Artificial Sequence
  Description of Artificial Sequence: Synthetic oligonucleotide
  Sense strand starting at position 3335 of SEQ ID NO: 916835
ggcuauagaucuuugagac

SEQ ID NO: 1187797 - RNA, 19 nt, Artificial Sequence
  Description of Artificial Sequence: Synthetic oligonucleotide
  Antisense strand to SEQ ID NO: 1187796
gucucaaagaucuauagcc

SEQ ID NO: 1187798 - RNA, 19 nt, Artificial Sequence
  Description of Artificial Sequence: Synthetic oligonucleotide
  Sense strand starting at position 3336 of SEQ ID NO: 916835
gcuauagaucuuugagacu

SEQ ID NO: 1187799 - RNA, 19 nt, Artificial Sequence
  Description of Artificial Sequence: Synthetic oligonucleotide
  Antisense strand to SEQ ID NO: 1187798
agucucaaagaucuauagc

SEQ ID NO: 1187800 - RNA, 19 nt, Artificial Sequence
  Description of Artificial Sequence: Synthetic oligonucleotide
  Sense strand starting at position 3339 of SEQ ID NO: 916835
auagaucuuugagacugga

SEQ ID NO: 1187801 - RNA, 19 nt, Artificial Sequence
  Description of Artificial Sequence: Synthetic oligonucleotide
  Antisense strand to SEQ ID NO: 1187800
uccagucucaaagaucuau

SEQ ID NO: 1187802 - RNA, 19 nt, Artificial Sequence
  Description of Artificial Sequence: Synthetic oligonucleotide
  Sense strand starting at position 3427 of SEQ ID NO: 916835
ggaguagguucccaaaccu

SEQ ID NO: 1187803 - RNA, 19 nt, Artificial Sequence
  Description of Artificial Sequence: Synthetic oligonucleotide
  Antisense strand to SEQ ID NO: 1187802
agguuugggaaccuacucc

SEQ ID NO: 1187804 - RNA, 19 nt, Artificial Sequence
  Description of Artificial Sequence: Synthetic oligonucleotide
  Sense strand starting at position 3445 of SEQ ID NO: 916835
ucagcaucagaauggguua

SEQ ID NO: 1187805 - RNA, 19 nt, Artificial Sequence
  Description of Artificial Sequence: Synthetic oligonucleotide
  Antisense strand to SEQ ID NO: 1187804
uaacccauucugaugcuga

SEQ ID NO: 1187806 - RNA, 19 nt, Artificial Sequence
  Description of Artificial Sequence: Synthetic oligonucleotide
  Sense strand starting at position 3448 of SEQ ID NO: 916835
gcaucagaauggguuagaa

SEQ ID NO: 1187807 - RNA, 19 nt, Artificial Sequence
  Description of Artificial Sequence: Synthetic oligonucleotide
  Antisense strand to SEQ ID NO: 1187806
uucuaacccauucugaugc

SEQ ID NO: 1187808 - RNA, 19 nt, Artificial Sequence
  Description of Artificial Sequence: Synthetic oligonucleotide
  Sense strand starting at position 3567 of SEQ ID NO: 916835
accucuccucagugauucu

SEQ ID NO: 1187809 - RNA, 19 nt, Artificial Sequence
  Description of Artificial Sequence: Synthetic oligonucleotide
  Antisense strand to SEQ ID NO: 1187808
agaaucacugaggagaggu

SEQ ID NO: 1187810 - RNA, 19 nt, Artificial Sequence
  Description of Artificial Sequence: Synthetic oligonucleotide
  Sense strand starting at position 3570 of SEQ ID NO: 916835
ucuccucagugauucugau

SEQ ID NO: 1187811 - RNA, 19 nt, Artificial Sequence
  Description of Artificial Sequence: Synthetic oligonucleotide
  Antisense strand to SEQ ID NO: 1187810
aucagaaucacugaggaga

SEQ ID NO: 1187812 - RNA, 19 nt, Artificial Sequence
  Description of Artificial Sequence: Synthetic oligonucleotide
  Sense strand starting at position 3844 of SEQ ID NO: 916835
caaggugagccaugaucaa

SEQ ID NO: 1187813 - RNA, 19 nt, Artificial Sequence
  Description of Artificial Sequence: Synthetic oligonucleotide
  Antisense strand to SEQ ID NO: 1187812
uugaucauggcucaccuug

SEQ ID NO: 1187814 - RNA, 19 nt, Artificial Sequence
  Description of Artificial Sequence: Synthetic oligonucleotide
  Sense strand starting at position 103 of SEQ ID NO: 916836
uugcuccgucaaugaauuu

SEQ ID NO: 1187815 - RNA, 19 nt, Artificial Sequence
  Description of Artificial Sequence: Synthetic oligonucleotide
  Antisense strand to SEQ ID NO: 1187814
aaauucauugacggagcaa

SEQ ID NO: 1187816 - RNA, 19 nt, Artificial Sequence
  Description of Artificial Sequence: Synthetic oligonucleotide
  Sense strand starting at position 172 of SEQ ID NO: 916836
ggucuaagacuguggugau

SEQ ID NO: 1187817 - RNA, 19 nt, Artificial Sequence
  Description of Artificial Sequence: Synthetic oligonucleotide
  Antisense strand to SEQ ID NO: 1187816
aucaccacagucuuagacc

SEQ ID NO: 1187818 - RNA, 19 nt, Artificial Sequence
  Description of Artificial Sequence: Synthetic oligonucleotide
  Sense strand starting at position 772 of SEQ ID NO: 916836
agaagccucaugugagaaa

SEQ ID NO: 1187819 - RNA, 19 nt, Artificial Sequence
  Description of Artificial Sequence: Synthetic oligonucleotide
  Antisense strand to SEQ ID NO: 1187818
uuucucacaugaggcuucu

SEQ ID NO: 1187820 - RNA, 19 nt, Artificial Sequence
  Description of Artificial Sequence: Synthetic oligonucleotide
  Sense strand starting at position 1111 of SEQ ID NO: 916836
cucugagucuggcccuaau

SEQ ID NO: 1187821 - RNA, 19 nt, Artificial Sequence
  Description of Artificial Sequence: Synthetic oligonucleotide
  Antisense strand to SEQ ID NO: 1187820
auuagggccagacucagag

SEQ ID NO: 1187822 - RNA, 19 nt, Artificial Sequence
  Description of Artificial Sequence: Synthetic oligonucleotide
  Sense strand starting at position 1122 of SEQ ID NO: 916836
gcccuaaugagucagguuu

SEQ ID NO: 1187823 - RNA, 19 nt, Artificial Sequence
  Description of Artificial Sequence: Synthetic oligonucleotide
  Antisense strand to SEQ ID NO: 1187822
aaaccugacucauuagggc

SEQ ID NO: 1187824 - RNA, 19 nt, Artificial Sequence
  Description of Artificial Sequence: Synthetic oligonucleotide
  Sense strand starting at position 1567 of SEQ ID NO: 916836
gaagcaagacuccguauca

SEQ ID NO: 1187825 - RNA, 19 nt, Artificial Sequence
  Description of Artificial Sequence: Synthetic oligonucleotide
  Antisense strand to SEQ ID NO: 1187824
ugauacggagucuugcuuc

SEQ ID NO: 1187826 - RNA, 19 nt, Artificial Sequence
  Description of Artificial Sequence: Synthetic oligonucleotide
  Sense strand starting at position 1644 of SEQ ID NO: 916836
gcauaaauccucuagugac

SEQ ID NO: 1187827 - RNA, 19 nt, Artificial Sequence
  Description of Artificial Sequence: Synthetic oligonucleotide
  Antisense strand to SEQ ID NO: 1187826
gucacuagaggauuuaugc

SEQ ID NO: 1187828 - RNA, 19 nt, Artificial Sequence
  Description of Artificial Sequence: Synthetic oligonucleotide
  Sense strand starting at position 1690 of SEQ ID NO: 916836
auguuuggcuuuccagauc

SEQ ID NO: 1187829 - RNA, 19 nt, Artificial Sequence
  Description of Artificial Sequence: Synthetic oligonucleotide
  Antisense strand to SEQ ID NO: 1187828
gaucuggaaagccaaacau

SEQ ID NO: 1187830 - RNA, 19 nt, Artificial Sequence
  Description of Artificial Sequence: Synthetic oligonucleotide
  Sense strand starting at position 1693 of SEQ ID NO: 916836
uuuggcuuuccagaucuga

SEQ ID NO: 1187831 - RNA, 19 nt, Artificial Sequence
  Description of Artificial Sequence: Synthetic oligonucleotide
  Antisense strand to SEQ ID NO: 1187830
ucagaucuggaaagccaaa

SEQ ID NO: 1187832 - RNA, 19 nt, Artificial Sequence
  Description of Artificial Sequence: Synthetic oligonucleotide
  Sense strand starting at position 1778 of SEQ ID NO: 916836
ccgguuucccgagaccaaa

SEQ ID NO: 1187833 - RNA, 19 nt, Artificial Sequence
  Description of Artificial Sequence: Synthetic oligonucleotide
  Antisense strand to SEQ ID NO: 1187832
uuuggucucgggaaaccgg

SEQ ID NO: 1187834 - RNA, 19 nt, Artificial Sequence
  Description of Artificial Sequence: Synthetic oligonucleotide
  Sense strand starting at position 1822 of SEQ ID NO: 916836
acgugcaucaguggaacaa

SEQ ID NO: 1187835 - RNA, 19 nt, Artificial Sequence
  Description of Artificial Sequence: Synthetic oligonucleotide
  Antisense strand to SEQ ID NO: 1187834
uuguuccacugaugcacgu

SEQ ID NO: 1187836 - RNA, 19 nt, Artificial Sequence
  Description of Artificial Sequence: Synthetic oligonucleotide
  Sense strand starting at position 1909 of SEQ ID NO: 916836
ucuagaaauccgcagcaca

SEQ ID NO: 1187837 - RNA, 19 nt, Artificial Sequence
  Description of Artificial Sequence: Synthetic oligonucleotide
  Antisense strand to SEQ ID NO: 1187836
ugugcugcggauuucuaga

SEQ ID NO: 1187838 - RNA, 19 nt, Artificial Sequence
  Description of Artificial Sequence: Synthetic oligonucleotide
  Sense strand starting at position 2006 of SEQ ID NO: 916836
ugggacauguaguccagaa

SEQ ID NO: 1187839 - RNA, 19 nt, Artificial Sequence
  Description of Artificial Sequence: Synthetic oligonucleotide
  Antisense strand to SEQ ID NO: 1187838
uucuggacuacauguccca

SEQ ID NO: 1187840 - RNA, 19 nt, Artificial Sequence
  Description of Artificial Sequence: Synthetic oligonucleotide
  Sense strand starting at position 2010 of SEQ ID NO: 916836
acauguaguccagaaagcu

SEQ ID NO: 1187841 - RNA, 19 nt, Artificial Sequence
  Description of Artificial Sequence: Synthetic oligonucleotide
  Antisense strand to SEQ ID NO: 1187840
agcuuucuggacuacaugu

SEQ ID NO: 1187842 - RNA, 19 nt, Artificial Sequence
  Description of Artificial Sequence: Synthetic oligonucleotide
  Sense strand starting at position 2026 of SEQ ID NO: 916836
gcuuaaaugaugcgagaaa

SEQ ID NO: 1187843 - RNA, 19 nt, Artificial Sequence
  Description of Artificial Sequence: Synthetic oligonucleotide
  Antisense strand to SEQ ID NO: 1187842
uuucucgcaucauuuaagc

SEQ ID NO: 1187844 - RNA, 19 nt, Artificial Sequence
  Description of Artificial Sequence: Synthetic oligonucleotide
  Sense strand starting at position 2116 of SEQ ID NO: 916836
gcucuuucuggucagaggu

SEQ ID NO: 1187845 - RNA, 19 nt, Artificial Sequence
  Description of Artificial Sequence: Synthetic oligonucleotide
  Antisense strand to SEQ ID NO: 1187844
accucugaccagaaagagc

SEQ ID NO: 1187846 - RNA, 19 nt, Artificial Sequence
  Description of Artificial Sequence: Synthetic oligonucleotide
  Sense strand starting at position 2575 of SEQ ID NO: 916836
gucuaugcuuuacccacau

SEQ ID NO: 1187847 - RNA, 19 nt, Artificial Sequence
  Description of Artificial Sequence: Synthetic oligonucleotide
  Antisense strand to SEQ ID NO: 1187846
auguggguaaagcauagac

SEQ ID NO: 1187848 - RNA, 19 nt, Artificial Sequence
  Description of Artificial Sequence: Synthetic oligonucleotide
  Sense strand starting at position 2579 of SEQ ID NO: 916836
augcuuuacccacaugaga

SEQ ID NO: 1187849 - RNA, 19 nt, Artificial Sequence
  Description of Artificial Sequence: Synthetic oligonucleotide
  Antisense strand to SEQ ID NO: 1187848
ucucauguggguaaagcau

SEQ ID NO: 1187850 - RNA, 19 nt, Artificial Sequence
  Description of Artificial Sequence: Synthetic oligonucleotide
  Sense strand starting at position 2623 of SEQ ID NO: 916836
aaaugagcacgucauuaau

SEQ ID NO: 1187851 - RNA, 19 nt, Artificial Sequence
  Description of Artificial Sequence: Synthetic oligonucleotide
  Antisense strand to SEQ ID NO: 1187850
auuaaugacgugcucauuu

SEQ ID NO: 1187852 - RNA, 19 nt, Artificial Sequence
  Description of Artificial Sequence: Synthetic oligonucleotide
  Sense strand starting at position 2625 of SEQ ID NO: 916836
augagcacgucauuaauca

SEQ ID NO: 1187853 - RNA, 19 nt, Artificial Sequence
  Description of Artificial Sequence: Synthetic oligonucleotide
  Antisense strand to SEQ ID NO: 1187852
ugauuaaugacgugcucau

SEQ ID NO: 1187854 - RNA, 19 nt, Artificial Sequence
  Description of Artificial Sequence: Synthetic oligonucleotide
  Sense strand starting at position 2626 of SEQ ID NO: 916836
ugagcacgucauuaaucau

SEQ ID NO: 1187855 - RNA, 19 nt, Artificial Sequence
  Description of Artificial Sequence: Synthetic oligonucleotide
  Antisense strand to SEQ ID NO: 1187854
augauuaaugacgugcuca

SEQ ID NO: 1187856 - RNA, 19 nt, Artificial Sequence
  Description of Artificial Sequence: Synthetic oligonucleotide
  Sense strand starting at position 2629 of SEQ ID NO: 916836
gcacgucauuaaucaugga

SEQ ID NO: 1187857 - RNA, 19 nt, Artificial Sequence
  Description of Artificial Sequence: Synthetic oligonucleotide
  Antisense strand to SEQ ID NO: 1187856
uccaugauuaaugacgugc

SEQ ID NO: 1187858 - RNA, 19 nt, Artificial Sequence
  Description of Artificial Sequence: Synthetic oligonucleotide
  Sense strand starting at position 2633 of SEQ ID NO: 916836
gucauuaaucauggaucua

SEQ ID NO: 1187859 - RNA, 19 nt, Artificial Sequence
  Description of Artificial Sequence: Synthetic oligonucleotide
  Antisense strand to SEQ ID NO: 1187858
uagauccaugauuaaugac

SEQ ID NO: 1187860 - RNA, 19 nt, Artificial Sequence
  Description of Artificial Sequence: Synthetic oligonucleotide
  Sense strand starting at position 2861 of SEQ ID NO: 916836
guaucaaguuauuugcuau

SEQ ID NO: 1187861 - RNA, 19 nt, Artificial Sequence
  Description of Artificial Sequence: Synthetic oligonucleotide
  Antisense strand to SEQ ID NO: 1187860
auagcaaauaacuugauac

SEQ ID NO: 1187862 - RNA, 19 nt, Artificial Sequence
  Description of Artificial Sequence: Synthetic oligonucleotide
  Sense strand starting at position 2899 of SEQ ID NO: 916836
ugugaagaaauguguuuau

SEQ ID NO: 1187863 - RNA, 19 nt, Artificial Sequence
  Description of Artificial Sequence: Synthetic oligonucleotide
  Antisense strand to SEQ ID NO: 1187862
auaaacacauuucuucaca

SEQ ID NO: 1187864 - RNA, 19 nt, Artificial Sequence
  Description of Artificial Sequence: Synthetic oligonucleotide
  Sense strand starting at position 2902 of SEQ ID NO: 916836
gaagaaauguguuuauaca

SEQ ID NO: 1187865 - RNA, 19 nt, Artificial Sequence
  Description of Artificial Sequence: Synthetic oligonucleotide
  Antisense strand to SEQ ID NO: 1187864
uguauaaacacauuucuuc

SEQ ID NO: 1187866 - RNA, 19 nt, Artificial Sequence
  Description of Artificial Sequence: Synthetic oligonucleotide
  Sense strand starting at position 3192 of SEQ ID NO: 916836
ucgugaucugcccacccua

SEQ ID NO: 1187867 - RNA, 19 nt, Artificial Sequence
  Description of Artificial Sequence: Synthetic oligonucleotide
  Antisense strand to SEQ ID NO: 1187866
uagggugggcagaucacga

SEQ ID NO: 1187868 - RNA, 19 nt, Artificial Sequence
  Description of Artificial Sequence: Synthetic oligonucleotide
  Sense strand starting at position 3305 of SEQ ID NO: 916836
ggacuaauguacuuaaccu

SEQ ID NO: 1187869 - RNA, 19 nt, Artificial Sequence
  Description of Artificial Sequence: Synthetic oligonucleotide
  Antisense strand to SEQ ID NO: 1187868
agguuaaguacauuagucc

SEQ ID NO: 1187870 - RNA, 19 nt, Artificial Sequence
  Description of Artificial Sequence: Synthetic oligonucleotide
  Sense strand starting at position 3418 of SEQ ID NO: 916836
uccuaauuguuccuaaugu

SEQ ID NO: 1187871 - RNA, 19 nt, Artificial Sequence
  Description of Artificial Sequence: Synthetic oligonucleotide
  Antisense strand to SEQ ID NO: 1187870
acauuaggaacaauuagga

SEQ ID NO: 1187872 - RNA, 19 nt, Artificial Sequence
  Description of Artificial Sequence: Synthetic oligonucleotide
  Sense strand starting at position 3425 of SEQ ID NO: 916836
uguuccuaauguguagaca

SEQ ID NO: 1187873 - RNA, 19 nt, Artificial Sequence
  Description of Artificial Sequence: Synthetic oligonucleotide
  Antisense strand to SEQ ID NO: 1187872
ugucuacacauuaggaaca

SEQ ID NO: 1187874 - RNA, 19 nt, Artificial Sequence
  Description of Artificial Sequence: Synthetic oligonucleotide
  Sense strand starting at position 3426 of SEQ ID NO: 916836
guuccuaauguguagacaa

SEQ ID NO: 1187875 - RNA, 19 nt, Artificial Sequence
  Description of Artificial Sequence: Synthetic oligonucleotide
  Antisense strand to SEQ ID NO: 1187874
uugucuacacauuaggaac

SEQ ID NO: 1187876 - RNA, 19 nt, Artificial Sequence
  Description of Artificial Sequence: Synthetic oligonucleotide
  Sense strand starting at position 3483 of SEQ ID NO: 916836
auguauaagugucuuugga

SEQ ID NO: 1187877 - RNA, 19 nt, Artificial Sequence
  Description of Artificial Sequence: Synthetic oligonucleotide
  Antisense strand to SEQ ID NO: 1187876
uccaaagacacuuauacau

SEQ ID NO: 1187878 - RNA, 19 nt, Artificial Sequence
  Description of Artificial Sequence: Synthetic oligonucleotide
  Sense strand starting at position 3485 of SEQ ID NO: 916836
guauaagugucuuuggaca

SEQ ID NO: 1187879 - RNA, 19 nt, Artificial Sequence
  Description of Artificial Sequence: Synthetic oligonucleotide
  Antisense strand to SEQ ID NO: 1187878
uguccaaagacacuuauac

SEQ ID NO: 1187880 - RNA, 19 nt, Artificial Sequence
  Description of Artificial Sequence: Synthetic oligonucleotide
  Sense strand starting at position 3492 of SEQ ID NO: 916836
ugucuuuggacauaaaggu

SEQ ID NO: 1187881 - RNA, 19 nt, Artificial Sequence
  Description of Artificial Sequence: Synthetic oligonucleotide
  Antisense strand to SEQ ID NO: 1187880
accuuuauguccaaagaca

SEQ ID NO: 1187882 - RNA, 19 nt, Artificial Sequence
  Description of Artificial Sequence: Synthetic oligonucleotide
  Sense strand starting at position 3586 of SEQ ID NO: 916836
gugguucccaccuguaaua

SEQ ID NO: 1187883 - RNA, 19 nt, Artificial Sequence
  Description of Artificial Sequence: Synthetic oligonucleotide
  Antisense strand to SEQ ID NO: 1187882
uauuacaggugggaaccac

SEQ ID NO: 1187884 - RNA, 19 nt, Artificial Sequence
  Description of Artificial Sequence: Synthetic oligonucleotide
  Sense strand starting at position 3902 of SEQ ID NO: 916836
agaaguaauguggaagcuu

SEQ ID NO: 1187885 - RNA, 19 nt, Artificial Sequence
  Description of Artificial Sequence: Synthetic oligonucleotide
  Antisense strand to SEQ ID NO: 1187884
aagcuuccacauuacuucu

SEQ ID NO: 1187886 - RNA, 19 nt, Artificial Sequence
  Description of Artificial Sequence: Synthetic oligonucleotide
  Sense strand starting at position 3941 of SEQ ID NO: 916836
uugguucuaucauuguauc

SEQ ID NO: 1187887 - RNA, 19 nt, Artificial Sequence
  Description of Artificial Sequence: Synthetic oligonucleotide
  Antisense strand to SEQ ID NO: 1187886
gauacaaugauagaaccaa

SEQ ID NO: 1187888 - RNA, 19 nt, Artificial Sequence
  Description of Artificial Sequence: Synthetic oligonucleotide
  Sense strand starting at position 3942 of SEQ ID NO: 916836
ugguucuaucauuguaucu

SEQ ID NO: 1187889 - RNA, 19 nt, Artificial Sequence
  Description of Artificial Sequence: Synthetic oligonucleotide
  Antisense strand to SEQ ID NO: 1187888
agauacaaugauagaacca

SEQ ID NO: 1187890 - RNA, 19 nt, Artificial Sequence
  Description of Artificial Sequence: Synthetic oligonucleotide
  Sense strand starting at position 3947 of SEQ ID NO: 916836
cuaucauuguaucuuugga

SEQ ID NO: 1187891 - RNA, 19 nt, Artificial Sequence
  Description of Artificial Sequence: Synthetic oligonucleotide
  Antisense strand to SEQ ID NO: 1187890
uccaaagauacaaugauag

SEQ ID NO: 1187892 - RNA, 19 nt, Artificial Sequence
  Description of Artificial Sequence: Synthetic oligonucleotide
  Sense strand starting at position 3954 of SEQ ID NO: 916836
uguaucuuuggagguaaua

SEQ ID NO: 1187893 - RNA, 19 nt, Artificial Sequence
  Description of Artificial Sequence: Synthetic oligonucleotide
  Antisense strand to SEQ ID NO: 1187892
uauuaccuccaaagauaca

SEQ ID NO: 1187894 - RNA, 19 nt, Artificial Sequence
  Description of Artificial Sequence: Synthetic oligonucleotide
  Sense strand starting at position 321 of SEQ ID NO: 916837
ccuacuagcuuuguagagu

SEQ ID NO: 1187895 - RNA, 19 nt, Artificial Sequence
  Description of Artificial Sequence: Synthetic oligonucleotide
  Antisense strand to SEQ ID NO: 1187894
acucuacaaagcuaguagg

SEQ ID NO: 1187896 - RNA, 19 nt, Artificial Sequence
  Description of Artificial Sequence: Synthetic oligonucleotide
  Sense strand starting at position 324 of SEQ ID NO: 916837
acuagcuuuguagaguaau

SEQ ID NO: 1187897 - RNA, 19 nt, Artificial Sequence
  Description of Artificial Sequence: Synthetic oligonucleotide
  Antisense strand to SEQ ID NO: 1187896
auuacucuacaaagcuagu

SEQ ID NO: 1187898 - RNA, 19 nt, Artificial Sequence
  Description of Artificial Sequence: Synthetic oligonucleotide
  Sense strand starting at position 327 of SEQ ID NO: 916837
agcuuuguagaguaaucca

SEQ ID NO: 1187899 - RNA, 19 nt, Artificial Sequence
  Description of Artificial Sequence: Synthetic oligonucleotide
  Antisense strand to SEQ ID NO: 1187898
uggauuacucuacaaagcu

SEQ ID NO: 1187900 - RNA, 19 nt, Artificial Sequence
  Description of Artificial Sequence: Synthetic oligonucleotide
  Sense strand starting at position 368 of SEQ ID NO: 916837
acauuagaguaagauuaga

SEQ ID NO: 1187901 - RNA, 19 nt, Artificial Sequence
  Description of Artificial Sequence: Synthetic oligonucleotide
  Antisense strand to SEQ ID NO: 1187900
ucuaaucuuacucuaaugu

SEQ ID NO: 1187902 - RNA, 19 nt, Artificial Sequence
  Description of Artificial Sequence: Synthetic oligonucleotide
  Sense strand starting at position 459 of SEQ ID NO: 916837
acugccauuccggaaacau

SEQ ID NO: 1187903 - RNA, 19 nt, Artificial Sequence
  Description of Artificial Sequence: Synthetic oligonucleotide
  Antisense strand to SEQ ID NO: 1187902
auguuuccggaauggcagu

SEQ ID NO: 1187904 - RNA, 19 nt, Artificial Sequence
  Description of Artificial Sequence: Synthetic oligonucleotide
  Sense strand starting at position 484 of SEQ ID NO: 916837
ccaaguaugcugcaaucau

SEQ ID NO: 1187905 - RNA, 19 nt, Artificial Sequence
  Description of Artificial Sequence: Synthetic oligonucleotide
  Antisense strand to SEQ ID NO: 1187904
augauugcagcauacuugg

SEQ ID NO: 1187906 - RNA, 19 nt, Artificial Sequence
  Description of Artificial Sequence: Synthetic oligonucleotide
  Sense strand starting at position 641 of SEQ ID NO: 916837
guauaaugauaguuuccaa

SEQ ID NO: 1187907 - RNA, 19 nt, Artificial Sequence
  Description of Artificial Sequence: Synthetic oligonucleotide
  Antisense strand to SEQ ID NO: 1187906
uuggaaacuaucauuauac

SEQ ID NO: 1187908 - RNA, 19 nt, Artificial Sequence
  Description of Artificial Sequence: Synthetic oligonucleotide
  Sense strand starting at position 685 of SEQ ID NO: 916837
gcagaaauccucuagucac

SEQ ID NO: 1187909 - RNA, 19 nt, Artificial Sequence
  Description of Artificial Sequence: Synthetic oligonucleotide
  Antisense strand to SEQ ID NO: 1187908
gugacuagaggauuucugc

SEQ ID NO: 1187910 - RNA, 19 nt, Artificial Sequence
  Description of Artificial Sequence: Synthetic oligonucleotide
  Sense strand starting at position 732 of SEQ ID NO: 916837
aguuaaugaugucaaugga

SEQ ID NO: 1187911 - RNA, 19 nt, Artificial Sequence
  Description of Artificial Sequence: Synthetic oligonucleotide
  Antisense strand to SEQ ID NO: 1187910
uccauugacaucauuaacu

SEQ ID NO: 1187912 - RNA, 19 nt, Artificial Sequence
  Description of Artificial Sequence: Synthetic oligonucleotide
  Sense strand starting at position 765 of SEQ ID NO: 916837
ggguucacuggugauaagu

SEQ ID NO: 1187913 - RNA, 19 nt, Artificial Sequence
  Description of Artificial Sequence: Synthetic oligonucleotide
  Antisense strand to SEQ ID NO: 1187912
acuuaucaccagugaaccc

SEQ ID NO: 1187914 - RNA, 19 nt, Artificial Sequence
  Description of Artificial Sequence: Synthetic oligonucleotide
  Sense strand starting at position 783 of SEQ ID NO: 916837
ucaugagacucugagcaaa

SEQ ID NO: 1187915 - RNA, 19 nt, Artificial Sequence
  Description of Artificial Sequence: Synthetic oligonucleotide
  Antisense strand to SEQ ID NO: 1187914
uuugcucagagucucauga

SEQ ID NO: 1187916 - RNA, 19 nt, Artificial Sequence
  Description of Artificial Sequence: Synthetic oligonucleotide
  Sense strand starting at position 808 of SEQ ID NO: 916837
guaauaagguuagaauucu

SEQ ID NO: 1187917 - RNA, 19 nt, Artificial Sequence
  Description of Artificial Sequence: Synthetic oligonucleotide
  Antisense strand to SEQ ID NO: 1187916
agaauucuaaccuuauuac

SEQ ID NO: 1187918 - RNA, 19 nt, Artificial Sequence
  Description of Artificial Sequence: Synthetic oligonucleotide
  Sense strand starting at position 814 of SEQ ID NO: 916837
agguuagaauucuuuagaa

SEQ ID NO: 1187919 - RNA, 19 nt, Artificial Sequence
  Description of Artificial Sequence: Synthetic oligonucleotide
  Antisense strand to SEQ ID NO: 1187918
uucuaaagaauucuaaccu

SEQ ID NO: 1187920 - RNA, 19 nt, Artificial Sequence
  Description of Artificial Sequence: Synthetic oligonucleotide
  Sense strand starting at position 816 of SEQ ID NO: 916837
guuagaauucuuuagaagu

SEQ ID NO: 1187921 - RNA, 19 nt, Artificial Sequence
  Description of Artificial Sequence: Synthetic oligonucleotide
  Antisense strand to SEQ ID NO: 1187920
acuucuaaagaauucuaac

SEQ ID NO: 1187922 - RNA, 19 nt, Artificial Sequence
  Description of Artificial Sequence: Synthetic oligonucleotide
  Sense strand starting at position 818 of SEQ ID NO: 916837
uagaauucuuuagaagugu

SEQ ID NO: 1187923 - RNA, 19 nt, Artificial Sequence
  Description of Artificial Sequence: Synthetic oligonucleotide
  Antisense strand to SEQ ID NO: 1187922
acacuucuaaagaauucua

SEQ ID NO: 1187924 - RNA, 19 nt, Artificial Sequence
  Description of Artificial Sequence: Synthetic oligonucleotide
  Sense strand starting at position 886 of SEQ ID NO: 916837
cuaaguacuuuguuguuua

SEQ ID NO: 1187925 - RNA, 19 nt, Artificial Sequence
  Description of Artificial Sequence: Synthetic oligonucleotide
  Antisense strand to SEQ ID NO: 1187924
uaaacaacaaaguacuuag

SEQ ID NO: 1187926 - RNA, 19 nt, Artificial Sequence
  Description of Artificial Sequence: Synthetic oligonucleotide
  Sense strand starting at position 929 of SEQ ID NO: 916837
cuguaagacugauauuauc

SEQ ID NO: 1187927 - RNA, 19 nt, Artificial Sequence
  Description of Artificial Sequence: Synthetic oligonucleotide
  Antisense strand to SEQ ID NO: 1187926
gauaauaucagucuuacag

SEQ ID NO: 1187928 - RNA, 19 nt, Artificial Sequence
  Description of Artificial Sequence: Synthetic oligonucleotide
  Sense strand starting at position 1047 of SEQ ID NO: 916837
gguuccagaagucagugua

SEQ ID NO: 1187929 - RNA, 19 nt, Artificial Sequence
  Description of Artificial Sequence: Synthetic oligonucleotide
  Antisense strand to SEQ ID NO: 1187928
uacacugacuucuggaacc

SEQ ID NO: 1187930 - RNA, 19 nt, Artificial Sequence
  Description of Artificial Sequence: Synthetic oligonucleotide
  Sense strand starting at position 1102 of SEQ ID NO: 916837
aauugaggccagcaaguuu

SEQ ID NO: 1187931 - RNA, 19 nt, Artificial Sequence
  Description of Artificial Sequence: Synthetic oligonucleotide
  Antisense strand to SEQ ID NO: 1187930
aaacuugcuggccucaauu

SEQ ID NO: 1187932 - RNA, 19 nt, Artificial Sequence
  Description of Artificial Sequence: Synthetic oligonucleotide
  Sense strand starting at position 1185 of SEQ ID NO: 916837
acauuuaagcgguagcuuu

SEQ ID NO: 1187933 - RNA, 19 nt, Artificial Sequence
  Description of Artificial Sequence: Synthetic oligonucleotide
  Antisense strand to SEQ ID NO: 1187932
aaagcuaccgcuuaaaugu

SEQ ID NO: 1187934 - RNA, 19 nt, Artificial Sequence
  Description of Artificial Sequence: Synthetic oligonucleotide
  Sense strand starting at position 1403 of SEQ ID NO: 916837
ccugaagucgguuagguua

SEQ ID NO: 1187935 - RNA, 19 nt, Artificial Sequence
  Description of Artificial Sequence: Synthetic oligonucleotide
  Antisense strand to SEQ ID NO: 1187934
uaaccuaaccgacuucagg

SEQ ID NO: 1187936 - RNA, 19 nt, Artificial Sequence
  Description of Artificial Sequence: Synthetic oligonucleotide
  Sense strand starting at position 1406 of SEQ ID NO: 916837
gaagucgguuagguuauaa

SEQ ID NO: 1187937 - RNA, 19 nt, Artificial Sequence
  Description of Artificial Sequence: Synthetic oligonucleotide
  Antisense strand to SEQ ID NO: 1187936
uuauaaccuaaccgacuuc

SEQ ID NO: 1187938 - RNA, 19 nt, Artificial Sequence
  Description of Artificial Sequence: Synthetic oligonucleotide
  Sense strand starting at position 1529 of SEQ ID NO: 916837
ccucuuucgaggcgucgaa

SEQ ID NO: 1187939 - RNA, 19 nt, Artificial Sequence
  Description of Artificial Sequence: Synthetic oligonucleotide
  Antisense strand to SEQ ID NO: 1187938
uucgacgccucgaaagagg

SEQ ID NO: 1187940 - RNA, 19 nt, Artificial Sequence
  Description of Artificial Sequence: Synthetic oligonucleotide
  Sense strand starting at position 1940 of SEQ ID NO: 916837
cuccauauuccgggagcca

SEQ ID NO: 1187941 - RNA, 19 nt, Artificial Sequence
  Description of Artificial Sequence: Synthetic oligonucleotide
  Antisense strand to SEQ ID NO: 1187940
uggcucccggaauauggag

SEQ ID NO: 1187942 - RNA, 19 nt, Artificial Sequence
  Description of Artificial Sequence: Synthetic oligonucleotide
  Sense strand starting at position 1988 of SEQ ID NO: 916837
ccgcgauuggucgacagga

SEQ ID NO: 1187943 - RNA, 19 nt, Artificial Sequence
  Description of Artificial Sequence: Synthetic oligonucleotide
  Antisense strand to SEQ ID NO: 1187942
uccugucgaccaaucgcgg

SEQ ID NO: 1187944 - RNA, 19 nt, Artificial Sequence
  Description of Artificial Sequence: Synthetic oligonucleotide
  Sense strand starting at position 2300 of SEQ ID NO: 916837
gagguauagcucuauccug

SEQ ID NO: 1187945 - RNA, 19 nt, Artificial Sequence
  Description of Artificial Sequence: Synthetic oligonucleotide
  Antisense strand to SEQ ID NO: 1187944
caggauagagcuauaccuc

SEQ ID NO: 1187946 - RNA, 19 nt, Artificial Sequence
  Description of Artificial Sequence: Synthetic oligonucleotide
  Sense strand starting at position 3264 of SEQ ID NO: 916837
ucugcaaugucguuuacag

SEQ ID NO: 1187947 - RNA, 19 nt, Artificial Sequence
  Description of Artificial Sequence: Synthetic oligonucleotide
  Antisense strand to SEQ ID NO: 1187946
cuguaaacgacauugcaga

SEQ ID NO: 1187948 - RNA, 19 nt, Artificial Sequence
  Description of Artificial Sequence: Synthetic oligonucleotide
  Sense strand starting at position 3348 of SEQ ID NO: 916837
aaagguaauugagcuucuu

SEQ ID NO: 1187949 - RNA, 19 nt, Artificial Sequence
  Description of Artificial Sequence: Synthetic oligonucleotide
  Antisense strand to SEQ ID NO: 1187948
aagaagcucaauuaccuuu

SEQ ID NO: 1187950 - RNA, 19 nt, Artificial Sequence
  Description of Artificial Sequence: Synthetic oligonucleotide
  Sense strand starting at position 3455 of SEQ ID NO: 916837
ccaaauaaagugcgaagua

SEQ ID NO: 1187951 - RNA, 19 nt, Artificial Sequence
  Description of Artificial Sequence: Synthetic oligonucleotide
  Antisense strand to SEQ ID NO: 1187950
uacuucgcacuuuauuugg

SEQ ID NO: 1187952 - RNA, 19 nt, Artificial Sequence
  Description of Artificial Sequence: Synthetic oligonucleotide
  Sense strand starting at position 3576 of SEQ ID NO: 916837
acaaauuaguucugagauu

SEQ ID NO: 1187953 - RNA, 19 nt, Artificial Sequence
  Description of Artificial Sequence: Synthetic oligonucleotide
  Antisense strand to SEQ ID NO: 1187952
aaucucagaacuaauuugu

SEQ ID NO: 1187954 - RNA, 19 nt, Artificial Sequence
  Description of Artificial Sequence: Synthetic oligonucleotide
  Sense strand starting at position 3587 of SEQ ID NO: 916837
cugagauucucgcuacagu

SEQ ID NO: 1187955 - RNA, 19 nt, Artificial Sequence
  Description of Artificial Sequence: Synthetic oligonucleotide
  Antisense strand to SEQ ID NO: 1187954
acuguagcgagaaucucag

SEQ ID NO: 1187956 - RNA, 19 nt, Artificial Sequence
  Description of Artificial Sequence: Synthetic oligonucleotide
  Sense strand starting at position 3588 of SEQ ID NO: 916837
ugagauucucgcuacagua

SEQ ID NO: 1187957 - RNA, 19 nt, Artificial Sequence
  Description of Artificial Sequence: Synthetic oligonucleotide
  Antisense strand to SEQ ID NO: 1187956
uacuguagcgagaaucuca

SEQ ID NO: 1187958 - RNA, 19 nt, Artificial Sequence
  Description of Artificial Sequence: Synthetic oligonucleotide
  Sense strand starting at position 3601 of SEQ ID NO: 916837
acaguacaucuguggaguu

SEQ ID NO: 1187959 - RNA, 19 nt, Artificial Sequence
  Description of Artificial Sequence: Synthetic oligonucleotide
  Antisense strand to SEQ ID NO: 1187958
aacuccacagauguacugu

SEQ ID NO: 1187960 - RNA, 19 nt, Artificial Sequence
  Description of Artificial Sequence: Synthetic oligonucleotide
  Sense strand starting at position 3620 of SEQ ID NO: 916837
ucagaaagguuugaugaag

SEQ ID NO: 1187961 - RNA, 19 nt, Artificial Sequence
  Description of Artificial Sequence: Synthetic oligonucleotide
  Antisense strand to SEQ ID NO: 1187960
cuucaucaaaccuuucuga

SEQ ID NO: 1187962 - RNA, 19 nt, Artificial Sequence
  Description of Artificial Sequence: Synthetic oligonucleotide
  Sense strand starting at position 3631 of SEQ ID NO: 916837
ugaugaaguuccuccagau

SEQ ID NO: 1187963 - RNA, 19 nt, Artificial Sequence
  Description of Artificial Sequence: Synthetic oligonucleotide
  Antisense strand to SEQ ID NO: 1187962
aucuggaggaacuucauca

SEQ ID NO: 1187964 - RNA, 19 nt, Artificial Sequence
  Description of Artificial Sequence: Synthetic oligonucleotide
  Sense strand starting at position 3635 of SEQ ID NO: 916837
gaaguuccuccagaucgga

SEQ ID NO: 1187965 - RNA, 19 nt, Artificial Sequence
  Description of Artificial Sequence: Synthetic oligonucleotide
  Antisense strand to SEQ ID NO: 1187964
uccgaucuggaggaacuuc

SEQ ID NO: 1187966 - RNA, 19 nt, Artificial Sequence
  Description of Artificial Sequence: Synthetic oligonucleotide
  Sense strand starting at position 3813 of SEQ ID NO: 916837
gcagaacuaguuugacuuu

SEQ ID NO: 1187967 - RNA, 19 nt, Artificial Sequence
  Description of Artificial Sequence: Synthetic oligonucleotide
  Antisense strand to SEQ ID NO: 1187966
aaagucaaacuaguucugc

SEQ ID NO: 1187968 - RNA, 19 nt, Artificial Sequence
  Description of Artificial Sequence: Synthetic oligonucleotide
  Sense strand starting at position 3838 of SEQ ID NO: 916837
gccagcuccugccucuaua

SEQ ID NO: 1187969 - RNA, 19 nt, Artificial Sequence
  Description of Artificial Sequence: Synthetic oligonucleotide
  Antisense strand to SEQ ID NO: 1187968
uauagaggcaggagcuggc

SEQ ID NO: 1187970 - RNA, 19 nt, Artificial Sequence
  Description of Artificial Sequence: Synthetic oligonucleotide
  Sense strand starting at position 3848 of SEQ ID NO: 916837
gccucuauauaugaagaca

SEQ ID NO: 1187971 - RNA, 19 nt, Artificial Sequence
  Description of Artificial Sequence: Synthetic oligonucleotide
  Antisense strand to SEQ ID NO: 1187970
ugucuucauauauagaggc

SEQ ID NO: 1187972 - RNA, 19 nt, Artificial Sequence
  Description of Artificial Sequence: Synthetic oligonucleotide
  Sense strand starting at position 3870 of SEQ ID NO: 916837
gcgccucccucaguuagau

SEQ ID NO: 1187973 - RNA, 19 nt, Artificial Sequence
  Description of Artificial Sequence: Synthetic oligonucleotide
  Antisense strand to SEQ ID NO: 1187972
aucuaacugagggaggcgc

SEQ ID NO: 1187974 - RNA, 19 nt, Artificial Sequence
  Description of Artificial Sequence: Synthetic oligonucleotide
  Sense strand starting at position 81 of SEQ ID NO: 916838
cuccauauuccgggagcca

SEQ ID NO: 1187975 - RNA, 19 nt, Artificial Sequence
  Description of Artificial Sequence: Synthetic oligonucleotide
  Antisense strand to SEQ ID NO: 1187974
uggcucccggaauauggag

SEQ ID NO: 1187976 - RNA, 19 nt, Artificial Sequence
  Description of Artificial Sequence: Synthetic oligonucleotide
  Sense strand starting at position 129 of SEQ ID NO: 916838
ccgcgauuggucgacagga

SEQ ID NO: 1187977 - RNA, 19 nt, Artificial Sequence
  Description of Artificial Sequence: Synthetic oligonucleotide
  Antisense strand to SEQ ID NO: 1187976
uccugucgaccaaucgcgg

SEQ ID NO: 1187978 - RNA, 19 nt, Artificial Sequence
  Description of Artificial Sequence: Synthetic oligonucleotide
  Sense strand starting at position 441 of SEQ ID NO: 916838
gagguauagcucuauccug

SEQ ID NO: 1187979 - RNA, 19 nt, Artificial Sequence
  Description of Artificial Sequence: Synthetic oligonucleotide
  Antisense strand to SEQ ID NO: 1187978
caggauagagcuauaccuc

SEQ ID NO: 1187980 - RNA, 19 nt, Artificial Sequence
  Description of Artificial Sequence: Synthetic oligonucleotide
  Sense strand starting at position 1489 of SEQ ID NO: 916838
aaagguaauugagcuucuu

SEQ ID NO: 1187981 - RNA, 19 nt, Artificial Sequence
  Description of Artificial Sequence: Synthetic oligonucleotide
  Antisense strand to SEQ ID NO: 1187980
aagaagcucaauuaccuuu

SEQ ID NO: 1187982 - RNA, 19 nt, Artificial Sequence
  Description of Artificial Sequence: Synthetic oligonucleotide
  Sense strand starting at position 1596 of SEQ ID NO: 916838
ccaaauaaagugcgaagua

SEQ ID NO: 1187983 - RNA, 19 nt, Artificial Sequence
  Description of Artificial Sequence: Synthetic oligonucleotide
  Antisense strand to SEQ ID NO: 1187982
uacuucgcacuuuauuugg

SEQ ID NO: 1187984 - RNA, 19 nt, Artificial Sequence
  Description of Artificial Sequence: Synthetic oligonucleotide
  Sense strand starting at position 1728 of SEQ ID NO: 916838
cugagauucucgcuacagu

SEQ ID NO: 1187985 - RNA, 19 nt, Artificial Sequence
  Description of Artificial Sequence: Synthetic oligonucleotide
  Antisense strand to SEQ ID NO: 1187984
acuguagcgagaaucucag

SEQ ID NO: 1187986 - RNA, 19 nt, Artificial Sequence
  Description of Artificial Sequence: Synthetic oligonucleotide
  Sense strand starting at position 1729 of SEQ ID NO: 916838
ugagauucucgcuacagua

SEQ ID NO: 1187987 - RNA, 19 nt, Artificial Sequence
  Description of Artificial Sequence: Synthetic oligonucleotide
  Antisense strand to SEQ ID NO: 1187986
uacuguagcgagaaucuca

SEQ ID NO: 1187988 - RNA, 19 nt, Artificial Sequence
  Description of Artificial Sequence: Synthetic oligonucleotide
  Sense strand starting at position 1742 of SEQ ID NO: 916838
acaguacaucuguggaguu

SEQ ID NO: 1187989 - RNA, 19 nt, Artificial Sequence
  Description of Artificial Sequence: Synthetic oligonucleotide
  Antisense strand to SEQ ID NO: 1187988
aacuccacagauguacugu

SEQ ID NO: 1187990 - RNA, 19 nt, Artificial Sequence
  Description of Artificial Sequence: Synthetic oligonucleotide
  Sense strand starting at position 1761 of SEQ ID NO: 916838
ucagaaagguuugaugaag

SEQ ID NO: 1187991 - RNA, 19 nt, Artificial Sequence
  Description of Artificial Sequence: Synthetic oligonucleotide
  Antisense strand to SEQ ID NO: 1187990
cuucaucaaaccuuucuga

SEQ ID NO: 1187992 - RNA, 19 nt, Artificial Sequence
  Description of Artificial Sequence: Synthetic oligonucleotide
  Sense strand starting at position 1772 of SEQ ID NO: 916838
ugaugaaguuccuccagau

SEQ ID NO: 1187993 - RNA, 19 nt, Artificial Sequence
  Description of Artificial Sequence: Synthetic oligonucleotide
  Antisense strand to SEQ ID NO: 1187992
aucuggaggaacuucauca

SEQ ID NO: 1187994 - RNA, 19 nt, Artificial Sequence
  Description of Artificial Sequence: Synthetic oligonucleotide
  Sense strand starting at position 1776 of SEQ ID NO: 916838
gaaguuccuccagaucgga

SEQ ID NO: 1187995 - RNA, 19 nt, Artificial Sequence
  Description of Artificial Sequence: Synthetic oligonucleotide
  Antisense strand to SEQ ID NO: 1187994
uccgaucuggaggaacuuc

SEQ ID NO: 1187996 - RNA, 19 nt, Artificial Sequence
  Description of Artificial Sequence: Synthetic oligonucleotide
  Sense strand starting at position 1954 of SEQ ID NO: 916838
gcagaacuaguuugacuuu

SEQ ID NO: 1187997 - RNA, 19 nt, Artificial Sequence
  Description of Artificial Sequence: Synthetic oligonucleotide
  Antisense strand to SEQ ID NO: 1187996
aaagucaaacuaguucugc

SEQ ID NO: 1187998 - RNA, 19 nt, Artificial Sequence
  Description of Artificial Sequence: Synthetic oligonucleotide
  Sense strand starting at position 2297 of SEQ ID NO: 916838
guaagaaauugcuucccuu

SEQ ID NO: 1187999 - RNA, 19 nt, Artificial Sequence
  Description of Artificial Sequence: Synthetic oligonucleotide
  Antisense strand to SEQ ID NO: 1187998
aagggaagcaauuucuuac

SEQ ID NO: 1188000 - RNA, 19 nt, Artificial Sequence
  Description of Artificial Sequence: Synthetic oligonucleotide
  Sense strand starting at position 2364 of SEQ ID NO: 916838
ggacucugcuccucugaga

SEQ ID NO: 1188001 - RNA, 19 nt, Artificial Sequence
  Description of Artificial Sequence: Synthetic oligonucleotide
  Antisense strand to SEQ ID NO: 1188000
ucucagaggagcagagucc

SEQ ID NO: 1188002 - RNA, 19 nt, Artificial Sequence
  Description of Artificial Sequence: Synthetic oligonucleotide
  Sense strand starting at position 2445 of SEQ ID NO: 916838
gcagcacugaggcaauuau

SEQ ID NO: 1188003 - RNA, 19 nt, Artificial Sequence
  Description of Artificial Sequence: Synthetic oligonucleotide
  Antisense strand to SEQ ID NO: 1188002
auaauugccucagugcugc

SEQ ID NO: 1188004 - RNA, 19 nt, Artificial Sequence
  Description of Artificial Sequence: Synthetic oligonucleotide
  Sense strand starting at position 2472 of SEQ ID NO: 916838
ucagaacguggguggaaau

SEQ ID NO: 1188005 - RNA, 19 nt, Artificial Sequence
  Description of Artificial Sequence: Synthetic oligonucleotide
  Antisense strand to SEQ ID NO: 1188004
auuuccacccacguucuga

SEQ ID NO: 1188006 - RNA, 19 nt, Artificial Sequence
  Description of Artificial Sequence: Synthetic oligonucleotide
  Sense strand starting at position 2498 of SEQ ID NO: 916838
gcucuauuaucccucggga

SEQ ID NO: 1188007 - RNA, 19 nt, Artificial Sequence
  Description of Artificial Sequence: Synthetic oligonucleotide
  Antisense strand to SEQ ID NO: 1188006
ucccgagggauaauagagc

SEQ ID NO: 1188008 - RNA, 19 nt, Artificial Sequence
  Description of Artificial Sequence: Synthetic oligonucleotide
  Sense strand starting at position 2500 of SEQ ID NO: 916838
ucuauuaucccucgggauc

SEQ ID NO: 1188009 - RNA, 19 nt, Artificial Sequence
  Description of Artificial Sequence: Synthetic oligonucleotide
  Antisense strand to SEQ ID NO: 1188008
gaucccgagggauaauaga

SEQ ID NO: 1188010 - RNA, 19 nt, Artificial Sequence
  Description of Artificial Sequence: Synthetic oligonucleotide
  Sense strand starting at position 2501 of SEQ ID NO: 916838
cuauuaucccucgggaucu

SEQ ID NO: 1188011 - RNA, 19 nt, Artificial Sequence
  Description of Artificial Sequence: Synthetic oligonucleotide
  Antisense strand to SEQ ID NO: 1188010
agaucccgagggauaauag

SEQ ID NO: 1188012 - RNA, 19 nt, Artificial Sequence
  Description of Artificial Sequence: Synthetic oligonucleotide
  Sense strand starting at position 2503 of SEQ ID NO: 916838
auuaucccucgggaucuaa

SEQ ID NO: 1188013 - RNA, 19 nt, Artificial Sequence
  Description of Artificial Sequence: Synthetic oligonucleotide
  Antisense strand to SEQ ID NO: 1188012
uuagaucccgagggauaau

SEQ ID NO: 1188014 - RNA, 19 nt, Artificial Sequence
  Description of Artificial Sequence: Synthetic oligonucleotide
  Sense strand starting at position 2541 of SEQ ID NO: 916838
cuggucaaucagugaucca

SEQ ID NO: 1188015 - RNA, 19 nt, Artificial Sequence
  Description of Artificial Sequence: Synthetic oligonucleotide
  Antisense strand to SEQ ID NO: 1188014
uggaucacugauugaccag

SEQ ID NO: 1188016 - RNA, 19 nt, Artificial Sequence
  Description of Artificial Sequence: Synthetic oligonucleotide
  Sense strand starting at position 2544 of SEQ ID NO: 916838
gucaaucagugauccacga

SEQ ID NO: 1188017 - RNA, 19 nt, Artificial Sequence
  Description of Artificial Sequence: Synthetic oligonucleotide
  Antisense strand to SEQ ID NO: 1188016
ucguggaucacugauugac

SEQ ID NO: 1188018 - RNA, 19 nt, Artificial Sequence
  Description of Artificial Sequence: Synthetic oligonucleotide
  Sense strand starting at position 2589 of SEQ ID NO: 916838
ggacuuggugccugaugga

SEQ ID NO: 1188019 - RNA, 19 nt, Artificial Sequence
  Description of Artificial Sequence: Synthetic oligonucleotide
  Antisense strand to SEQ ID NO: 1188018
uccaucaggcaccaagucc

SEQ ID NO: 1188020 - RNA, 19 nt, Artificial Sequence
  Description of Artificial Sequence: Synthetic oligonucleotide
  Sense strand starting at position 2722 of SEQ ID NO: 916838
ggaaauaacuuagacgaca

SEQ ID NO: 1188021 - RNA, 19 nt, Artificial Sequence
  Description of Artificial Sequence: Synthetic oligonucleotide
  Antisense strand to SEQ ID NO: 1188020
ugucgucuaaguuauuucc

SEQ ID NO: 1188022 - RNA, 19 nt, Artificial Sequence
  Description of Artificial Sequence: Synthetic oligonucleotide
  Sense strand starting at position 2970 of SEQ ID NO: 916838
gagaaagaauuauggaucu

SEQ ID NO: 1188023 - RNA, 19 nt, Artificial Sequence
  Description of Artificial Sequence: Synthetic oligonucleotide
  Antisense strand to SEQ ID NO: 1188022
agauccauaauucuuucuc

SEQ ID NO: 1188024 - RNA, 19 nt, Artificial Sequence
  Description of Artificial Sequence: Synthetic oligonucleotide
  Sense strand starting at position 3005 of SEQ ID NO: 916838
gaugaaaggucucuuugcu

SEQ ID NO: 1188025 - RNA, 19 nt, Artificial Sequence
  Description of Artificial Sequence: Synthetic oligonucleotide
  Antisense strand to SEQ ID NO: 1188024
agcaaagagaccuuucauc

SEQ ID NO: 1188026 - RNA, 19 nt, Artificial Sequence
  Description of Artificial Sequence: Synthetic oligonucleotide
  Sense strand starting at position 3027 of SEQ ID NO: 916838
gggcucucuuaaucacgaa

SEQ ID NO: 1188027 - RNA, 19 nt, Artificial Sequence
  Description of Artificial Sequence: Synthetic oligonucleotide
  Antisense strand to SEQ ID NO: 1188026
uucgugauuaagagagccc

SEQ ID NO: 1188028 - RNA, 19 nt, Artificial Sequence
  Description of Artificial Sequence: Synthetic oligonucleotide
  Sense strand starting at position 3031 of SEQ ID NO: 916838
ucucuuaaucacgaaaguc

SEQ ID NO: 1188029 - RNA, 19 nt, Artificial Sequence
  Description of Artificial Sequence: Synthetic oligonucleotide
  Antisense strand to SEQ ID NO: 1188028
gacuuucgugauuaagaga

SEQ ID NO: 1188030 - RNA, 19 nt, Artificial Sequence
  Description of Artificial Sequence: Synthetic oligonucleotide
  Sense strand starting at position 3080 of SEQ ID NO: 916838
cuuguucuacaucagguaa

SEQ ID NO: 1188031 - RNA, 19 nt, Artificial Sequence
  Description of Artificial Sequence: Synthetic oligonucleotide
  Antisense strand to SEQ ID NO: 1188030
uuaccugauguagaacaag

SEQ ID NO: 1188032 - RNA, 19 nt, Artificial Sequence
  Description of Artificial Sequence: Synthetic oligonucleotide
  Sense strand starting at position 3110 of SEQ ID NO: 916838
caaagcugucucugcagau

SEQ ID NO: 1188033 - RNA, 19 nt, Artificial Sequence
  Description of Artificial Sequence: Synthetic oligonucleotide
  Antisense strand to SEQ ID NO: 1188032
aucugcagagacagcuuug

SEQ ID NO: 1188034 - RNA, 19 nt, Artificial Sequence
  Description of Artificial Sequence: Synthetic oligonucleotide
  Sense strand starting at position 3111 of SEQ ID NO: 916838
aaagcugucucugcagauu

SEQ ID NO: 1188035 - RNA, 19 nt, Artificial Sequence
  Description of Artificial Sequence: Synthetic oligonucleotide
  Antisense strand to SEQ ID NO: 1188034
aaucugcagagacagcuuu

SEQ ID NO: 1188036 - RNA, 19 nt, Artificial Sequence
  Description of Artificial Sequence: Synthetic oligonucleotide
  Sense strand starting at position 3137 of SEQ ID NO: 916838
gggccaauuuguuccacuu

SEQ ID NO: 1188037 - RNA, 19 nt, Artificial Sequence
  Description of Artificial Sequence: Synthetic oligonucleotide
  Antisense strand to SEQ ID NO: 1188036
aaguggaacaaauuggccc

SEQ ID NO: 1188038 - RNA, 19 nt, Artificial Sequence
  Description of Artificial Sequence: Synthetic oligonucleotide
  Sense strand starting at position 3193 of SEQ ID NO: 916838
acuaaagucuuggcaggaa

SEQ ID NO: 1188039 - RNA, 19 nt, Artificial Sequence
  Description of Artificial Sequence: Synthetic oligonucleotide
  Antisense strand to SEQ ID NO: 1188038
uuccugccaagacuuuagu

SEQ ID NO: 1188040 - RNA, 19 nt, Artificial Sequence
  Description of Artificial Sequence: Synthetic oligonucleotide
  Sense strand starting at position 3219 of SEQ ID NO: 916838
auuugaguuuaggaauucu

SEQ ID NO: 1188041 - RNA, 19 nt, Artificial Sequence
  Description of Artificial Sequence: Synthetic oligonucleotide
  Antisense strand to SEQ ID NO: 1188040
agaauuccuaaacucaaau

SEQ ID NO: 1188042 - RNA, 19 nt, Artificial Sequence
  Description of Artificial Sequence: Synthetic oligonucleotide
  Sense strand starting at position 3466 of SEQ ID NO: 916838
agaaaucuguaacuguuau

SEQ ID NO: 1188043 - RNA, 19 nt, Artificial Sequence
  Description of Artificial Sequence: Synthetic oligonucleotide
  Antisense strand to SEQ ID NO: 1188042
auaacaguuacagauuucu

SEQ ID NO: 1188044 - RNA, 19 nt, Artificial Sequence
  Description of Artificial Sequence: Synthetic oligonucleotide
  Sense strand starting at position 3485 of SEQ ID NO: 916838
gagugucagguuuagacua

SEQ ID NO: 1188045 - RNA, 19 nt, Artificial Sequence
  Description of Artificial Sequence: Synthetic oligonucleotide
  Antisense strand to SEQ ID NO: 1188044
uagucuaaaccugacacuc

SEQ ID NO: 1188046 - RNA, 19 nt, Artificial Sequence
  Description of Artificial Sequence: Synthetic oligonucleotide
  Sense strand starting at position 3492 of SEQ ID NO: 916838
agguuuagacuacgccaaa

SEQ ID NO: 1188047 - RNA, 19 nt, Artificial Sequence
  Description of Artificial Sequence: Synthetic oligonucleotide
  Antisense strand to SEQ ID NO: 1188046
uuuggcguagucuaaaccu

SEQ ID NO: 1188048 - RNA, 19 nt, Artificial Sequence
  Description of Artificial Sequence: Synthetic oligonucleotide
  Sense strand starting at position 3566 of SEQ ID NO: 916838
gcuguagacaggugaaaga

SEQ ID NO: 1188049 - RNA, 19 nt, Artificial Sequence
  Description of Artificial Sequence: Synthetic oligonucleotide
  Antisense strand to SEQ ID NO: 1188048
ucuuucaccugucuacagc

SEQ ID NO: 1188050 - RNA, 19 nt, Artificial Sequence
  Description of Artificial Sequence: Synthetic oligonucleotide
  Sense strand starting at position 3699 of SEQ ID NO: 916838
agcuuaacucucugagcau

SEQ ID NO: 1188051 - RNA, 19 nt, Artificial Sequence
  Description of Artificial Sequence: Synthetic oligonucleotide
  Antisense strand to SEQ ID NO: 1188050
augcucagagaguuaagcu

SEQ ID NO: 1188052 - RNA, 19 nt, Artificial Sequence
  Description of Artificial Sequence: Synthetic oligonucleotide
  Sense strand starting at position 3871 of SEQ ID NO: 916838
agcauuaauccuuguagua

SEQ ID NO: 1188053 - RNA, 19 nt, Artificial Sequence
  Description of Artificial Sequence: Synthetic oligonucleotide
  Antisense strand to SEQ ID NO: 1188052
uacuacaaggauuaaugcu

SEQ ID NO: 1188054 - RNA, 19 nt, Artificial Sequence
  Description of Artificial Sequence: Synthetic oligonucleotide
  Sense strand starting at position 6 of SEQ ID NO: 916839
cuaauaaugcuauguguau

SEQ ID NO: 1188055 - RNA, 19 nt, Artificial Sequence
  Description of Artificial Sequence: Synthetic oligonucleotide
  Antisense strand to SEQ ID NO: 1188054
auacacauagcauuauuag

SEQ ID NO: 1188056 - RNA, 19 nt, Artificial Sequence
  Description of Artificial Sequence: Synthetic oligonucleotide
  Sense strand starting at position 12 of SEQ ID NO: 916839
augcuauguguauaaauag

SEQ ID NO: 1188057 - RNA, 19 nt, Artificial Sequence
  Description of Artificial Sequence: Synthetic oligonucleotide
  Antisense strand to SEQ ID NO: 1188056
cuauuuauacacauagcau

SEQ ID NO: 1188058 - RNA, 19 nt, Artificial Sequence
  Description of Artificial Sequence: Synthetic oligonucleotide
  Sense strand starting at position 76 of SEQ ID NO: 916839
ugguguaucccagauagca

SEQ ID NO: 1188059 - RNA, 19 nt, Artificial Sequence
  Description of Artificial Sequence: Synthetic oligonucleotide
  Antisense strand to SEQ ID NO: 1188058
ugcuaucugggauacacca

SEQ ID NO: 1188060 - RNA, 19 nt, Artificial Sequence
  Description of Artificial Sequence: Synthetic oligonucleotide
  Sense strand starting at position 86 of SEQ ID NO: 916839
cagauagcaccacgagaau

SEQ ID NO: 1188061 - RNA, 19 nt, Artificial Sequence
  Description of Artificial Sequence: Synthetic oligonucleotide
  Antisense strand to SEQ ID NO: 1188060
auucucguggugcuaucug

SEQ ID NO: 1188062 - RNA, 19 nt, Artificial Sequence
  Description of Artificial Sequence: Synthetic oligonucleotide
  Sense strand starting at position 137 of SEQ ID NO: 916839
agauaucugucagcagaca

SEQ ID NO: 1188063 - RNA, 19 nt, Artificial Sequence
  Description of Artificial Sequence: Synthetic oligonucleotide
  Antisense strand to SEQ ID NO: 1188062
ugucugcugacagauaucu

SEQ ID NO: 1188064 - RNA, 19 nt, Artificial Sequence
  Description of Artificial Sequence: Synthetic oligonucleotide
  Sense strand starting at position 138 of SEQ ID NO: 916839
gauaucugucagcagacau

SEQ ID NO: 1188065 - RNA, 19 nt, Artificial Sequence
  Description of Artificial Sequence: Synthetic oligonucleotide
  Antisense strand to SEQ ID NO: 1188064
augucugcugacagauauc

SEQ ID NO: 1188066 - RNA, 19 nt, Artificial Sequence
  Description of Artificial Sequence: Synthetic oligonucleotide
  Sense strand starting at position 148 of SEQ ID NO: 916839
agcagacauuuguacguau

SEQ ID NO: 1188067 - RNA, 19 nt, Artificial Sequence
  Description of Artificial Sequence: Synthetic oligonucleotide
  Antisense strand to SEQ ID NO: 1188066
auacguacaaaugucugcu

SEQ ID NO: 1188068 - RNA, 19 nt, Artificial Sequence
  Description of Artificial Sequence: Synthetic oligonucleotide
  Sense strand starting at position 150 of SEQ ID NO: 916839
cagacauuuguacguaugu

SEQ ID NO: 1188069 - RNA, 19 nt, Artificial Sequence
  Description of Artificial Sequence: Synthetic oligonucleotide
  Antisense strand to SEQ ID NO: 1188068
acauacguacaaaugucug

SEQ ID NO: 1188070 - RNA, 19 nt, Artificial Sequence
  Description of Artificial Sequence: Synthetic oligonucleotide
  Sense strand starting at position 159 of SEQ ID NO: 916839
guacguaugugcaugguga

SEQ ID NO: 1188071 - RNA, 19 nt, Artificial Sequence
  Description of Artificial Sequence: Synthetic oligonucleotide
  Antisense strand to SEQ ID NO: 1188070
ucaccaugcacauacguac

SEQ ID NO: 1188072 - RNA, 19 nt, Artificial Sequence
  Description of Artificial Sequence: Synthetic oligonucleotide
  Sense strand starting at position 187 of SEQ ID NO: 916839
gaauaaagaugucuuugau

SEQ ID NO: 1188073 - RNA, 19 nt, Artificial Sequence
  Description of Artificial Sequence: Synthetic oligonucleotide
  Antisense strand to SEQ ID NO: 1188072
aucaaagacaucuuuauuc

SEQ ID NO: 1188074 - RNA, 19 nt, Artificial Sequence
  Description of Artificial Sequence: Synthetic oligonucleotide
  Sense strand starting at position 596 of SEQ ID NO: 916839
ccuacuagcuuuguagagu

SEQ ID NO: 1188075 - RNA, 19 nt, Artificial Sequence
  Description of Artificial Sequence: Synthetic oligonucleotide
  Antisense strand to SEQ ID NO: 1188074
acucuacaaagcuaguagg

SEQ ID NO: 1188076 - RNA, 19 nt, Artificial Sequence
  Description of Artificial Sequence: Synthetic oligonucleotide
  Sense strand starting at position 599 of SEQ ID NO: 916839
acuagcuuuguagaguaau

SEQ ID NO: 1188077 - RNA, 19 nt, Artificial Sequence
  Description of Artificial Sequence: Synthetic oligonucleotide
  Antisense strand to SEQ ID NO: 1188076
auuacucuacaaagcuagu

SEQ ID NO: 1188078 - RNA, 19 nt, Artificial Sequence
  Description of Artificial Sequence: Synthetic oligonucleotide
  Sense strand starting at position 602 of SEQ ID NO: 916839
agcuuuguagaguaaucca

SEQ ID NO: 1188079 - RNA, 19 nt, Artificial Sequence
  Description of Artificial Sequence: Synthetic oligonucleotide
  Antisense strand to SEQ ID NO: 1188078
uggauuacucuacaaagcu

SEQ ID NO: 1188080 - RNA, 19 nt, Artificial Sequence
  Description of Artificial Sequence: Synthetic oligonucleotide
  Sense strand starting at position 643 of SEQ ID NO: 916839
acauuagaguaagauuaga

SEQ ID NO: 1188081 - RNA, 19 nt, Artificial Sequence
  Description of Artificial Sequence: Synthetic oligonucleotide
  Antisense strand to SEQ ID NO: 1188080
ucuaaucuuacucuaaugu

SEQ ID NO: 1188082 - RNA, 19 nt, Artificial Sequence
  Description of Artificial Sequence: Synthetic oligonucleotide
  Sense strand starting at position 734 of SEQ ID NO: 916839
acugccauuccggaaacau

SEQ ID NO: 1188083 - RNA, 19 nt, Artificial Sequence
  Description of Artificial Sequence: Synthetic oligonucleotide
  Antisense strand to SEQ ID NO: 1188082
auguuuccggaauggcagu

SEQ ID NO: 1188084 - RNA, 19 nt, Artificial Sequence
  Description of Artificial Sequence: Synthetic oligonucleotide
  Sense strand starting at position 759 of SEQ ID NO: 916839
ccaaguaugcugcaaucau

SEQ ID NO: 1188085 - RNA, 19 nt, Artificial Sequence
  Description of Artificial Sequence: Synthetic oligonucleotide
  Antisense strand to SEQ ID NO: 1188084
augauugcagcauacuugg

SEQ ID NO: 1188086 - RNA, 19 nt, Artificial Sequence
  Description of Artificial Sequence: Synthetic oligonucleotide
  Sense strand starting at position 916 of SEQ ID NO: 916839
guauaaugauaguuuccaa

SEQ ID NO: 1188087 - RNA, 19 nt, Artificial Sequence
  Description of Artificial Sequence: Synthetic oligonucleotide
  Antisense strand to SEQ ID NO: 1188086
uuggaaacuaucauuauac

SEQ ID NO: 1188088 - RNA, 19 nt, Artificial Sequence
  Description of Artificial Sequence: Synthetic oligonucleotide
  Sense strand starting at position 960 of SEQ ID NO: 916839
gcagaaauccucuagucac

SEQ ID NO: 1188089 - RNA, 19 nt, Artificial Sequence
  Description of Artificial Sequence: Synthetic oligonucleotide
  Antisense strand to SEQ ID NO: 1188088
gugacuagaggauuucugc

SEQ ID NO: 1188090 - RNA, 19 nt, Artificial Sequence
  Description of Artificial Sequence: Synthetic oligonucleotide
  Sense strand starting at position 1040 of SEQ ID NO: 916839
ggguucacuggugauaagu

SEQ ID NO: 1188091 - RNA, 19 nt, Artificial Sequence
  Description of Artificial Sequence: Synthetic oligonucleotide
  Antisense strand to SEQ ID NO: 1188090
acuuaucaccagugaaccc

SEQ ID NO: 1188092 - RNA, 19 nt, Artificial Sequence
  Description of Artificial Sequence: Synthetic oligonucleotide
  Sense strand starting at position 1058 of SEQ ID NO: 916839
ucaugagacucugagcaaa

SEQ ID NO: 1188093 - RNA, 19 nt, Artificial Sequence
  Description of Artificial Sequence: Synthetic oligonucleotide
  Antisense strand to SEQ ID NO: 1188092
uuugcucagagucucauga

SEQ ID NO: 1188094 - RNA, 19 nt, Artificial Sequence
  Description of Artificial Sequence: Synthetic oligonucleotide
  Sense strand starting at position 1089 of SEQ ID NO: 916839
agguuagaauucuuuagaa

SEQ ID NO: 1188095 - RNA, 19 nt, Artificial Sequence
  Description of Artificial Sequence: Synthetic oligonucleotide
  Antisense strand to SEQ ID NO: 1188094
uucuaaagaauucuaaccu

SEQ ID NO: 1188096 - RNA, 19 nt, Artificial Sequence
  Description of Artificial Sequence: Synthetic oligonucleotide
  Sense strand starting at position 1091 of SEQ ID NO: 916839
guuagaauucuuuagaagu

SEQ ID NO: 1188097 - RNA, 19 nt, Artificial Sequence
  Description of Artificial Sequence: Synthetic oligonucleotide
  Antisense strand to SEQ ID NO: 1188096
acuucuaaagaauucuaac

SEQ ID NO: 1188098 - RNA, 19 nt, Artificial Sequence
  Description of Artificial Sequence: Synthetic oligonucleotide
  Sense strand starting at position 1161 of SEQ ID NO: 916839
cuaaguacuuuguuguuua

SEQ ID NO: 1188099 - RNA, 19 nt, Artificial Sequence
  Description of Artificial Sequence: Synthetic oligonucleotide
  Antisense strand to SEQ ID NO: 1188098
uaaacaacaaaguacuuag

SEQ ID NO: 1188100 - RNA, 19 nt, Artificial Sequence
  Description of Artificial Sequence: Synthetic oligonucleotide
  Sense strand starting at position 1322 of SEQ ID NO: 916839
gguuccagaagucagugua

SEQ ID NO: 1188101 - RNA, 19 nt, Artificial Sequence
  Description of Artificial Sequence: Synthetic oligonucleotide
  Antisense strand to SEQ ID NO: 1188100
uacacugacuucuggaacc

SEQ ID NO: 1188102 - RNA, 19 nt, Artificial Sequence
  Description of Artificial Sequence: Synthetic oligonucleotide
  Sense strand starting at position 1377 of SEQ ID NO: 916839
aauugaggccagcaaguuu

SEQ ID NO: 1188103 - RNA, 19 nt, Artificial Sequence
  Description of Artificial Sequence: Synthetic oligonucleotide
  Antisense strand to SEQ ID NO: 1188102
aaacuugcuggccucaauu

SEQ ID NO: 1188104 - RNA, 19 nt, Artificial Sequence
  Description of Artificial Sequence: Synthetic oligonucleotide
  Sense strand starting at position 1460 of SEQ ID NO: 916839
acauuuaagcgguagcuuu

SEQ ID NO: 1188105 - RNA, 19 nt, Artificial Sequence
  Description of Artificial Sequence: Synthetic oligonucleotide
  Antisense strand to SEQ ID NO: 1188104
aaagcuaccgcuuaaaugu

SEQ ID NO: 1188106 - RNA, 19 nt, Artificial Sequence
  Description of Artificial Sequence: Synthetic oligonucleotide
  Sense strand starting at position 1678 of SEQ ID NO: 916839
ccugaagucgguuagguua

SEQ ID NO: 1188107 - RNA, 19 nt, Artificial Sequence
  Description of Artificial Sequence: Synthetic oligonucleotide
  Antisense strand to SEQ ID NO: 1188106
uaaccuaaccgacuucagg

SEQ ID NO: 1188108 - RNA, 19 nt, Artificial Sequence
  Description of Artificial Sequence: Synthetic oligonucleotide
  Sense strand starting at position 1681 of SEQ ID NO: 916839
gaagucgguuagguuauaa

SEQ ID NO: 1188109 - RNA, 19 nt, Artificial Sequence
  Description of Artificial Sequence: Synthetic oligonucleotide
  Antisense strand to SEQ ID NO: 1188108
uuauaaccuaaccgacuuc

SEQ ID NO: 1188110 - RNA, 19 nt, Artificial Sequence
  Description of Artificial Sequence: Synthetic oligonucleotide
  Sense strand starting at position 2215 of SEQ ID NO: 916839
cuccauauuccgggagcca

SEQ ID NO: 1188111 - RNA, 19 nt, Artificial Sequence
  Description of Artificial Sequence: Synthetic oligonucleotide
  Antisense strand to SEQ ID NO: 1188110
uggcucccggaauauggag

SEQ ID NO: 1188112 - RNA, 19 nt, Artificial Sequence
  Description of Artificial Sequence: Synthetic oligonucleotide
  Sense strand starting at position 2263 of SEQ ID NO: 916839
ccgcgauuggucgacagga

SEQ ID NO: 1188113 - RNA, 19 nt, Artificial Sequence
  Description of Artificial Sequence: Synthetic oligonucleotide
  Antisense strand to SEQ ID NO: 1188112
uccugucgaccaaucgcgg

SEQ ID NO: 1188114 - RNA, 19 nt, Artificial Sequence
  Description of Artificial Sequence: Synthetic oligonucleotide
  Sense strand starting at position 2575 of SEQ ID NO: 916839
gagguauagcucuauccug

SEQ ID NO: 1188115 - RNA, 19 nt, Artificial Sequence
  Description of Artificial Sequence: Synthetic oligonucleotide
  Antisense strand to SEQ ID NO: 1188114
caggauagagcuauaccuc

SEQ ID NO: 1188116 - RNA, 19 nt, Artificial Sequence
  Description of Artificial Sequence: Synthetic oligonucleotide
  Sense strand starting at position 3539 of SEQ ID NO: 916839
ucugcaaugucguuuacag

SEQ ID NO: 1188117 - RNA, 19 nt, Artificial Sequence
  Description of Artificial Sequence: Synthetic oligonucleotide
  Antisense strand to SEQ ID NO: 1188116
cuguaaacgacauugcaga

SEQ ID NO: 1188118 - RNA, 19 nt, Artificial Sequence
  Description of Artificial Sequence: Synthetic oligonucleotide
  Sense strand starting at position 3623 of SEQ ID NO: 916839
aaagguaauugagcuucuu

SEQ ID NO: 1188119 - RNA, 19 nt, Artificial Sequence
  Description of Artificial Sequence: Synthetic oligonucleotide
  Antisense strand to SEQ ID NO: 1188118
aagaagcucaauuaccuuu

SEQ ID NO: 1188120 - RNA, 19 nt, Artificial Sequence
  Description of Artificial Sequence: Synthetic oligonucleotide
  Sense strand starting at position 3730 of SEQ ID NO: 916839
ccaaauaaagugcgaagua

SEQ ID NO: 1188121 - RNA, 19 nt, Artificial Sequence
  Description of Artificial Sequence: Synthetic oligonucleotide
  Antisense strand to SEQ ID NO: 1188120
uacuucgcacuuuauuugg

SEQ ID NO: 1188122 - RNA, 19 nt, Artificial Sequence
  Description of Artificial Sequence: Synthetic oligonucleotide
  Sense strand starting at position 3862 of SEQ ID NO: 916839
cugagauucucgcuacagu

SEQ ID NO: 1188123 - RNA, 19 nt, Artificial Sequence
  Description of Artificial Sequence: Synthetic oligonucleotide
  Antisense strand to SEQ ID NO: 1188122
acuguagcgagaaucucag

SEQ ID NO: 1188124 - RNA, 19 nt, Artificial Sequence
  Description of Artificial Sequence: Synthetic oligonucleotide
  Sense strand starting at position 3863 of SEQ ID NO: 916839
ugagauucucgcuacagua

SEQ ID NO: 1188125 - RNA, 19 nt, Artificial Sequence
  Description of Artificial Sequence: Synthetic oligonucleotide
  Antisense strand to SEQ ID NO: 1188124
uacuguagcgagaaucuca

SEQ ID NO: 1188126 - RNA, 19 nt, Artificial Sequence
  Description of Artificial Sequence: Synthetic oligonucleotide
  Sense strand starting at position 3876 of SEQ ID NO: 916839
acaguacaucuguggaguu

SEQ ID NO: 1188127 - RNA, 19 nt, Artificial Sequence
  Description of Artificial Sequence: Synthetic oligonucleotide
  Antisense strand to SEQ ID NO: 1188126
aacuccacagauguacugu

SEQ ID NO: 1188128 - RNA, 19 nt, Artificial Sequence
  Description of Artificial Sequence: Synthetic oligonucleotide
  Sense strand starting at position 3895 of SEQ ID NO: 916839
ucagaaagguuugaugaag

SEQ ID NO: 1188129 - RNA, 19 nt, Artificial Sequence
  Description of Artificial Sequence: Synthetic oligonucleotide
  Antisense strand to SEQ ID NO: 1188128
cuucaucaaaccuuucuga

SEQ ID NO: 1188130 - RNA, 19 nt, Artificial Sequence
  Description of Artificial Sequence: Synthetic oligonucleotide
  Sense strand starting at position 3906 of SEQ ID NO: 916839
ugaugaaguuccuccagau

SEQ ID NO: 1188131 - RNA, 19 nt, Artificial Sequence
  Description of Artificial Sequence: Synthetic oligonucleotide
  Antisense strand to SEQ ID NO: 1188130
aucuggaggaacuucauca

SEQ ID NO: 1188132 - RNA, 19 nt, Artificial Sequence
  Description of Artificial Sequence: Synthetic oligonucleotide
  Sense strand starting at position 3910 of SEQ ID NO: 916839
gaaguuccuccagaucgga

SEQ ID NO: 1188133 - RNA, 19 nt, Artificial Sequence
  Description of Artificial Sequence: Synthetic oligonucleotide
  Antisense strand to SEQ ID NO: 1188132
uccgaucuggaggaacuuc

SEQ ID NO: 1188134 - RNA, 19 nt, Artificial Sequence
  Description of Artificial Sequence: Synthetic oligonucleotide
  Sense strand starting at position 400 of SEQ ID NO: 916840
ucauucuguuacccagagu

SEQ ID NO: 1188135 - RNA, 19 nt, Artificial Sequence
  Description of Artificial Sequence: Synthetic oligonucleotide
  Antisense strand to SEQ ID NO: 1188134
acucuggguaacagaauga

SEQ ID NO: 1188136 - RNA, 19 nt, Artificial Sequence
  Description of Artificial Sequence: Synthetic oligonucleotide
  Sense strand starting at position 403 of SEQ ID NO: 916840
uucuguuacccagagugga

SEQ ID NO: 1188137 - RNA, 19 nt, Artificial Sequence
  Description of Artificial Sequence: Synthetic oligonucleotide
  Antisense strand to SEQ ID NO: 1188136
uccacucuggguaacagaa

SEQ ID NO: 1188138 - RNA, 19 nt, Artificial Sequence
  Description of Artificial Sequence: Synthetic oligonucleotide
  Sense strand starting at position 1220 of SEQ ID NO: 916840
uggagaucuucucauuaaa

SEQ ID NO: 1188139 - RNA, 19 nt, Artificial Sequence
  Description of Artificial Sequence: Synthetic oligonucleotide
  Antisense strand to SEQ ID NO: 1188138
uuuaaugagaagaucucca

SEQ ID NO: 1188140 - RNA, 19 nt, Artificial Sequence
  Description of Artificial Sequence: Synthetic oligonucleotide
  Sense strand starting at position 1304 of SEQ ID NO: 916840
gguugauguuaccaagacu

SEQ ID NO: 1188141 - RNA, 19 nt, Artificial Sequence
  Description of Artificial Sequence: Synthetic oligonucleotide
  Antisense strand to SEQ ID NO: 1188140
agucuugguaacaucaacc

SEQ ID NO: 1188142 - RNA, 19 nt, Artificial Sequence
  Description of Artificial Sequence: Synthetic oligonucleotide
  Sense strand starting at position 1665 of SEQ ID NO: 916840
cuacuccuacuugggaauu

SEQ ID NO: 1188143 - RNA, 19 nt, Artificial Sequence
  Description of Artificial Sequence: Synthetic oligonucleotide
  Antisense strand to SEQ ID NO: 1188142
aauucccaaguaggaguag

SEQ ID NO: 1188144 - RNA, 19 nt, Artificial Sequence
  Description of Artificial Sequence: Synthetic oligonucleotide
  Sense strand starting at position 1825 of SEQ ID NO: 916840
uccuauauuugguaggacu

SEQ ID NO: 1188145 - RNA, 19 nt, Artificial Sequence
  Description of Artificial Sequence: Synthetic oligonucleotide
  Antisense strand to SEQ ID NO: 1188144
aguccuaccaaauauagga

SEQ ID NO: 1188146 - RNA, 19 nt, Artificial Sequence
  Description of Artificial Sequence: Synthetic oligonucleotide
  Sense strand starting at position 1850 of SEQ ID NO: 916840
aauaaucgaccguggacau

SEQ ID NO: 1188147 - RNA, 19 nt, Artificial Sequence
  Description of Artificial Sequence: Synthetic oligonucleotide
  Antisense strand to SEQ ID NO: 1188146
auguccacggucgauuauu

SEQ ID NO: 1188148 - RNA, 19 nt, Artificial Sequence
  Description of Artificial Sequence: Synthetic oligonucleotide
  Sense strand starting at position 1851 of SEQ ID NO: 916840
auaaucgaccguggacauu

SEQ ID NO: 1188149 - RNA, 19 nt, Artificial Sequence
  Description of Artificial Sequence: Synthetic oligonucleotide
  Antisense strand to SEQ ID NO: 1188148
aauguccacggucgauuau

SEQ ID NO: 1188150 - RNA, 19 nt, Artificial Sequence
  Description of Artificial Sequence: Synthetic oligonucleotide
  Sense strand starting at position 1960 of SEQ ID NO: 916840
gcaggaacccuuuguacuc

SEQ ID NO: 1188151 - RNA, 19 nt, Artificial Sequence
  Description of Artificial Sequence: Synthetic oligonucleotide
  Antisense strand to SEQ ID NO: 1188150
gaguacaaaggguuccugc

SEQ ID NO: 1188152 - RNA, 19 nt, Artificial Sequence
  Description of Artificial Sequence: Synthetic oligonucleotide
  Sense strand starting at position 2039 of SEQ ID NO: 916840
gggcucaucucagacugau

SEQ ID NO: 1188153 - RNA, 19 nt, Artificial Sequence
  Description of Artificial Sequence: Synthetic oligonucleotide
  Antisense strand to SEQ ID NO: 1188152
aucagucugagaugagccc

SEQ ID NO: 1188154 - RNA, 19 nt, Artificial Sequence
  Description of Artificial Sequence: Synthetic oligonucleotide
  Sense strand starting at position 2058 of SEQ ID NO: 916840
aucagcguuucccugaguu

SEQ ID NO: 1188155 - RNA, 19 nt, Artificial Sequence
  Description of Artificial Sequence: Synthetic oligonucleotide
  Antisense strand to SEQ ID NO: 1188154
aacucagggaaacgcugau

SEQ ID NO: 1188156 - RNA, 19 nt, Artificial Sequence
  Description of Artificial Sequence: Synthetic oligonucleotide
  Sense strand starting at position 2060 of SEQ ID NO: 916840
cagcguuucccugaguucu

SEQ ID NO: 1188157 - RNA, 19 nt, Artificial Sequence
  Description of Artificial Sequence: Synthetic oligonucleotide
  Antisense strand to SEQ ID NO: 1188156
agaacucagggaaacgcug

SEQ ID NO: 1188158 - RNA, 19 nt, Artificial Sequence
  Description of Artificial Sequence: Synthetic oligonucleotide
  Sense strand starting at position 2094 of SEQ ID NO: 916840
ucuuaaauauugggaagca

SEQ ID NO: 1188159 - RNA, 19 nt, Artificial Sequence
  Description of Artificial Sequence: Synthetic oligonucleotide
  Antisense strand to SEQ ID NO: 1188158
ugcuucccaauauuuaaga

SEQ ID NO: 1188160 - RNA, 19 nt, Artificial Sequence
  Description of Artificial Sequence: Synthetic oligonucleotide
  Sense strand starting at position 2109 of SEQ ID NO: 916840
agcagaaggucugggagaa

SEQ ID NO: 1188161 - RNA, 19 nt, Artificial Sequence
  Description of Artificial Sequence: Synthetic oligonucleotide
  Antisense strand to SEQ ID NO: 1188160
uucucccagaccuucugcu

SEQ ID NO: 1188162 - RNA, 19 nt, Artificial Sequence
  Description of Artificial Sequence: Synthetic oligonucleotide
  Sense strand starting at position 2110 of SEQ ID NO: 916840
gcagaaggucugggagaaa

SEQ ID NO: 1188163 - RNA, 19 nt, Artificial Sequence
  Description of Artificial Sequence: Synthetic oligonucleotide
  Antisense strand to SEQ ID NO: 1188162
uuucucccagaccuucugc

SEQ ID NO: 1188164 - RNA, 19 nt, Artificial Sequence
  Description of Artificial Sequence: Synthetic oligonucleotide
  Sense strand starting at position 2130 of SEQ ID NO: 916840
gggauacccugccagaaau

SEQ ID NO: 1188165 - RNA, 19 nt, Artificial Sequence
  Description of Artificial Sequence: Synthetic oligonucleotide
  Antisense strand to SEQ ID NO: 1188164
auuucuggcaggguauccc

SEQ ID NO: 1188166 - RNA, 19 nt, Artificial Sequence
  Description of Artificial Sequence: Synthetic oligonucleotide
  Sense strand starting at position 2200 of SEQ ID NO: 916840
gcucuaaucucuguguuug

SEQ ID NO: 1188167 - RNA, 19 nt, Artificial Sequence
  Description of Artificial Sequence: Synthetic oligonucleotide
  Antisense strand to SEQ ID NO: 1188166
caaacacagagauuagagc

SEQ ID NO: 1188168 - RNA, 19 nt, Artificial Sequence
  Description of Artificial Sequence: Synthetic oligonucleotide
  Sense strand starting at position 2202 of SEQ ID NO: 916840
ucuaaucucuguguuugca

SEQ ID NO: 1188169 - RNA, 19 nt, Artificial Sequence
  Description of Artificial Sequence: Synthetic oligonucleotide
  Antisense strand to SEQ ID NO: 1188168
ugcaaacacagagauuaga

SEQ ID NO: 1188170 - RNA, 19 nt, Artificial Sequence
  Description of Artificial Sequence: Synthetic oligonucleotide
  Sense strand starting at position 2210 of SEQ ID NO: 916840
cuguguuugcaauaaaucc

SEQ ID NO: 1188171 - RNA, 19 nt, Artificial Sequence
  Description of Artificial Sequence: Synthetic oligonucleotide
  Antisense strand to SEQ ID NO: 1188170
ggauuuauugcaaacacag

SEQ ID NO: 1188172 - RNA, 19 nt, Artificial Sequence
  Description of Artificial Sequence: Synthetic oligonucleotide
  Sense strand starting at position 2257 of SEQ ID NO: 916840
gcuuucuuuccauagggag

SEQ ID NO: 1188173 - RNA, 19 nt, Artificial Sequence
  Description of Artificial Sequence: Synthetic oligonucleotide
  Antisense strand to SEQ ID NO: 1188172
cucccuauggaaagaaagc

SEQ ID NO: 1188174 - RNA, 19 nt, Artificial Sequence
  Description of Artificial Sequence: Synthetic oligonucleotide
  Sense strand starting at position 2272 of SEQ ID NO: 916840
ggagcugacucauaucauc

SEQ ID NO: 1188175 - RNA, 19 nt, Artificial Sequence
  Description of Artificial Sequence: Synthetic oligonucleotide
  Antisense strand to SEQ ID NO: 1188174
gaugauaugagucagcucc

SEQ ID NO: 1188176 - RNA, 19 nt, Artificial Sequence
  Description of Artificial Sequence: Synthetic oligonucleotide
  Sense strand starting at position 2352 of SEQ ID NO: 916840
agcucagauuuaggaagga

SEQ ID NO: 1188177 - RNA, 19 nt, Artificial Sequence
  Description of Artificial Sequence: Synthetic oligonucleotide
  Antisense strand to SEQ ID NO: 1188176
uccuuccuaaaucugagcu

SEQ ID NO: 1188178 - RNA, 19 nt, Artificial Sequence
  Description of Artificial Sequence: Synthetic oligonucleotide
  Sense strand starting at position 2414 of SEQ ID NO: 916840
agguacucgcccuguauuu

SEQ ID NO: 1188179 - RNA, 19 nt, Artificial Sequence
  Description of Artificial Sequence: Synthetic oligonucleotide
  Antisense strand to SEQ ID NO: 1188178
aaauacagggcgaguaccu

SEQ ID NO: 1188180 - RNA, 19 nt, Artificial Sequence
  Description of Artificial Sequence: Synthetic oligonucleotide
  Sense strand starting at position 2498 of SEQ ID NO: 916840
uuauccugggucugggaau

SEQ ID NO: 1188181 - RNA, 19 nt, Artificial Sequence
  Description of Artificial Sequence: Synthetic oligonucleotide
  Antisense strand to SEQ ID NO: 1188180
auucccagacccaggauaa

SEQ ID NO: 1188182 - RNA, 19 nt, Artificial Sequence
  Description of Artificial Sequence: Synthetic oligonucleotide
  Sense strand starting at position 2533 of SEQ ID NO: 916840
gcauuacugccagaaacca

SEQ ID NO: 1188183 - RNA, 19 nt, Artificial Sequence
  Description of Artificial Sequence: Synthetic oligonucleotide
  Antisense strand to SEQ ID NO: 1188182
ugguuucuggcaguaaugc

SEQ ID NO: 1188184 - RNA, 19 nt, Artificial Sequence
  Description of Artificial Sequence: Synthetic oligonucleotide
  Sense strand starting at position 2556 of SEQ ID NO: 916840
ucagcuaaucuuggcucaa

SEQ ID NO: 1188185 - RNA, 19 nt, Artificial Sequence
  Description of Artificial Sequence: Synthetic oligonucleotide
  Antisense strand to SEQ ID NO: 1188184
uugagccaagauuagcuga

SEQ ID NO: 1188186 - RNA, 19 nt, Artificial Sequence
  Description of Artificial Sequence: Synthetic oligonucleotide
  Sense strand starting at position 2558 of SEQ ID NO: 916840
agcuaaucuuggcucaacu

SEQ ID NO: 1188187 - RNA, 19 nt, Artificial Sequence
  Description of Artificial Sequence: Synthetic oligonucleotide
  Antisense strand to SEQ ID NO: 1188186
aguugagccaagauuagcu

SEQ ID NO: 1188188 - RNA, 19 nt, Artificial Sequence
  Description of Artificial Sequence: Synthetic oligonucleotide
  Sense strand starting at position 2596 of SEQ ID NO: 916840
cgaagcaggucucugguua

SEQ ID NO: 1188189 - RNA, 19 nt, Artificial Sequence
  Description of Artificial Sequence: Synthetic oligonucleotide
  Antisense strand to SEQ ID NO: 1188188
uaaccagagaccugcuucg

SEQ ID NO: 1188190 - RNA, 19 nt, Artificial Sequence
  Description of Artificial Sequence: Synthetic oligonucleotide
  Sense strand starting at position 2597 of SEQ ID NO: 916840
gaagcaggucucugguuaa

SEQ ID NO: 1188191 - RNA, 19 nt, Artificial Sequence
  Description of Artificial Sequence: Synthetic oligonucleotide
  Antisense strand to SEQ ID NO: 1188190
uuaaccagagaccugcuuc

SEQ ID NO: 1188192 - RNA, 19 nt, Artificial Sequence
  Description of Artificial Sequence: Synthetic oligonucleotide
  Sense strand starting at position 3299 of SEQ ID NO: 916840
uuugaauggaguuguuaga

SEQ ID NO: 1188193 - RNA, 19 nt, Artificial Sequence
  Description of Artificial Sequence: Synthetic oligonucleotide
  Antisense strand to SEQ ID NO: 1188192
ucuaacaacuccauucaaa

SEQ ID NO: 1188194 - RNA, 19 nt, Artificial Sequence
  Description of Artificial Sequence: Synthetic oligonucleotide
  Sense strand starting at position 3314 of SEQ ID NO: 916840
uagaauagaugaugacaga

SEQ ID NO: 1188195 - RNA, 19 nt, Artificial Sequence
  Description of Artificial Sequence: Synthetic oligonucleotide
  Antisense strand to SEQ ID NO: 1188194
ucugucaucaucuauucua

SEQ ID NO: 1188196 - RNA, 19 nt, Artificial Sequence
  Description of Artificial Sequence: Synthetic oligonucleotide
  Sense strand starting at position 3317 of SEQ ID NO: 916840
aauagaugaugacagauga

SEQ ID NO: 1188197 - RNA, 19 nt, Artificial Sequence
  Description of Artificial Sequence: Synthetic oligonucleotide
  Antisense strand to SEQ ID NO: 1188196
ucaucugucaucaucuauu

SEQ ID NO: 1188198 - RNA, 19 nt, Artificial Sequence
  Description of Artificial Sequence: Synthetic oligonucleotide
  Sense strand starting at position 3468 of SEQ ID NO: 916840
cugaguggcugaguucuua

SEQ ID NO: 1188199 - RNA, 19 nt, Artificial Sequence
  Description of Artificial Sequence: Synthetic oligonucleotide
  Antisense strand to SEQ ID NO: 1188198
uaagaacucagccacucag

SEQ ID NO: 1188200 - RNA, 19 nt, Artificial Sequence
  Description of Artificial Sequence: Synthetic oligonucleotide
  Sense strand starting at position 3472 of SEQ ID NO: 916840
guggcugaguucuuagaau

SEQ ID NO: 1188201 - RNA, 19 nt, Artificial Sequence
  Description of Artificial Sequence: Synthetic oligonucleotide
  Antisense strand to SEQ ID NO: 1188200
auucuaagaacucagccac

SEQ ID NO: 1188202 - RNA, 19 nt, Artificial Sequence
  Description of Artificial Sequence: Synthetic oligonucleotide
  Sense strand starting at position 3486 of SEQ ID NO: 916840
agaauaugauucuggaaag

SEQ ID NO: 1188203 - RNA, 19 nt, Artificial Sequence
  Description of Artificial Sequence: Synthetic oligonucleotide
  Antisense strand to SEQ ID NO: 1188202
cuuuccagaaucauauucu

SEQ ID NO: 1188204 - RNA, 19 nt, Artificial Sequence
  Description of Artificial Sequence: Synthetic oligonucleotide
  Sense strand starting at position 3517 of SEQ ID NO: 916840
ggagaagaauuaggaagaa

SEQ ID NO: 1188205 - RNA, 19 nt, Artificial Sequence
  Description of Artificial Sequence: Synthetic oligonucleotide
  Antisense strand to SEQ ID NO: 1188204
uucuuccuaauucuucucc

SEQ ID NO: 1188206 - RNA, 19 nt, Artificial Sequence
  Description of Artificial Sequence: Synthetic oligonucleotide
  Sense strand starting at position 3564 of SEQ ID NO: 916840
uguuacucuguaugacuga

SEQ ID NO: 1188207 - RNA, 19 nt, Artificial Sequence
  Description of Artificial Sequence: Synthetic oligonucleotide
  Antisense strand to SEQ ID NO: 1188206
ucagucauacagaguaaca

SEQ ID NO: 1188208 - RNA, 19 nt, Artificial Sequence
  Description of Artificial Sequence: Synthetic oligonucleotide
  Sense strand starting at position 3565 of SEQ ID NO: 916840
guuacucuguaugacugaa

SEQ ID NO: 1188209 - RNA, 19 nt, Artificial Sequence
  Description of Artificial Sequence: Synthetic oligonucleotide
  Antisense strand to SEQ ID NO: 1188208
uucagucauacagaguaac

SEQ ID NO: 1188210 - RNA, 19 nt, Artificial Sequence
  Description of Artificial Sequence: Synthetic oligonucleotide
  Sense strand starting at position 3614 of SEQ ID NO: 916840
ugaauuagguaaccuugaa

SEQ ID NO: 1188211 - RNA, 19 nt, Artificial Sequence
  Description of Artificial Sequence: Synthetic oligonucleotide
  Antisense strand to SEQ ID NO: 1188210
uucaagguuaccuaauuca

SEQ ID NO: 1188212 - RNA, 19 nt, Artificial Sequence
  Description of Artificial Sequence: Synthetic oligonucleotide
  Sense strand starting at position 3869 of SEQ ID NO: 916840
gagucuuugagucggaguc

SEQ ID NO: 1188213 - RNA, 19 nt, Artificial Sequence
  Description of Artificial Sequence: Synthetic oligonucleotide
  Antisense strand to SEQ ID NO: 1188212
gacuccgacucaaagacuc

SEQ ID NO: 1188214 - RNA, 19 nt, Artificial Sequence
  Description of Artificial Sequence: Synthetic oligonucleotide
  Sense strand starting at position 28 of SEQ ID NO: 916841
caguaaagcucucgacugu

SEQ ID NO: 1188215 - RNA, 19 nt, Artificial Sequence
  Description of Artificial Sequence: Synthetic oligonucleotide
  Antisense strand to SEQ ID NO: 1188214
acagucgagagcuuuacug

SEQ ID NO: 1188216 - RNA, 19 nt, Artificial Sequence
  Description of Artificial Sequence: Synthetic oligonucleotide
  Sense strand starting at position 29 of SEQ ID NO: 916841
aguaaagcucucgacugua

SEQ ID NO: 1188217 - RNA, 19 nt, Artificial Sequence
  Description of Artificial Sequence: Synthetic oligonucleotide
  Antisense strand to SEQ ID NO: 1188216
uacagucgagagcuuuacu

SEQ ID NO: 1188218 - RNA, 19 nt, Artificial Sequence
  Description of Artificial Sequence: Synthetic oligonucleotide
  Sense strand starting at position 128 of SEQ ID NO: 916841
acgaucugacuuugcuauu

SEQ ID NO: 1188219 - RNA, 19 nt, Artificial Sequence
  Description of Artificial Sequence: Synthetic oligonucleotide
  Antisense strand to SEQ ID NO: 1188218
aauagcaaagucagaucgu

SEQ ID NO: 1188220 - RNA, 19 nt, Artificial Sequence
  Description of Artificial Sequence: Synthetic oligonucleotide
  Sense strand starting at position 227 of SEQ ID NO: 916841
ccucacuucuuggcaguua

SEQ ID NO: 1188221 - RNA, 19 nt, Artificial Sequence
  Description of Artificial Sequence: Synthetic oligonucleotide
  Antisense strand to SEQ ID NO: 1188220
uaacugccaagaagugagg

SEQ ID NO: 1188222 - RNA, 19 nt, Artificial Sequence
  Description of Artificial Sequence: Synthetic oligonucleotide
  Sense strand starting at position 262 of SEQ ID NO: 916841
gcuugaugcuaacuugauu

SEQ ID NO: 1188223 - RNA, 19 nt, Artificial Sequence
  Description of Artificial Sequence: Synthetic oligonucleotide
  Antisense strand to SEQ ID NO: 1188222
aaucaaguuagcaucaagc

SEQ ID NO: 1188224 - RNA, 19 nt, Artificial Sequence
  Description of Artificial Sequence: Synthetic oligonucleotide
  Sense strand starting at position 318 of SEQ ID NO: 916841
gcccguaacuccuuuaaag

SEQ ID NO: 1188225 - RNA, 19 nt, Artificial Sequence
  Description of Artificial Sequence: Synthetic oligonucleotide
  Antisense strand to SEQ ID NO: 1188224
cuuuaaaggaguuacgggc

SEQ ID NO: 1188226 - RNA, 19 nt, Artificial Sequence
  Description of Artificial Sequence: Synthetic oligonucleotide
  Sense strand starting at position 363 of SEQ ID NO: 916841
cccacuucuuuguaaagga

SEQ ID NO: 1188227 - RNA, 19 nt, Artificial Sequence
  Description of Artificial Sequence: Synthetic oligonucleotide
  Antisense strand to SEQ ID NO: 1188226
uccuuuacaaagaaguggg

SEQ ID NO: 1188228 - RNA, 19 nt, Artificial Sequence
  Description of Artificial Sequence: Synthetic oligonucleotide
  Sense strand starting at position 457 of SEQ ID NO: 916841
cuggaaagcuccucaaaca

SEQ ID NO: 1188229 - RNA, 19 nt, Artificial Sequence
  Description of Artificial Sequence: Synthetic oligonucleotide
  Antisense strand to SEQ ID NO: 1188228
uguuugaggagcuuuccag

SEQ ID NO: 1188230 - RNA, 19 nt, Artificial Sequence
  Description of Artificial Sequence: Synthetic oligonucleotide
  Sense strand starting at position 489 of SEQ ID NO: 916841
agccuucuggucugaacuu

SEQ ID NO: 1188231 - RNA, 19 nt, Artificial Sequence
  Description of Artificial Sequence: Synthetic oligonucleotide
  Antisense strand to SEQ ID NO: 1188230
aaguucagaccagaaggcu

SEQ ID NO: 1188232 - RNA, 19 nt, Artificial Sequence
  Description of Artificial Sequence: Synthetic oligonucleotide
  Sense strand starting at position 490 of SEQ ID NO: 916841
gccuucuggucugaacuua

SEQ ID NO: 1188233 - RNA, 19 nt, Artificial Sequence
  Description of Artificial Sequence: Synthetic oligonucleotide
  Antisense strand to SEQ ID NO: 1188232
uaaguucagaccagaaggc

SEQ ID NO: 1188234 - RNA, 19 nt, Artificial Sequence
  Description of Artificial Sequence: Synthetic oligonucleotide
  Sense strand starting at position 521 of SEQ ID NO: 916841
auagaagggucccguucau

SEQ ID NO: 1188235 - RNA, 19 nt, Artificial Sequence
  Description of Artificial Sequence: Synthetic oligonucleotide
  Antisense strand to SEQ ID NO: 1188234
augaacgggacccuucuau

SEQ ID NO: 1188236 - RNA, 19 nt, Artificial Sequence
  Description of Artificial Sequence: Synthetic oligonucleotide
  Sense strand starting at position 1258 of SEQ ID NO: 916841
gcgggauuccucggcacua

SEQ ID NO: 1188237 - RNA, 19 nt, Artificial Sequence
  Description of Artificial Sequence: Synthetic oligonucleotide
  Antisense strand to SEQ ID NO: 1188236
uagugccgaggaaucccgc

SEQ ID NO: 1188238 - RNA, 19 nt, Artificial Sequence
  Description of Artificial Sequence: Synthetic oligonucleotide
  Sense strand starting at position 1260 of SEQ ID NO: 916841
gggauuccucggcacuaga

SEQ ID NO: 1188239 - RNA, 19 nt, Artificial Sequence
  Description of Artificial Sequence: Synthetic oligonucleotide
  Antisense strand to SEQ ID NO: 1188238
ucuagugccgaggaauccc

SEQ ID NO: 1188240 - RNA, 19 nt, Artificial Sequence
  Description of Artificial Sequence: Synthetic oligonucleotide
  Sense strand starting at position 1410 of SEQ ID NO: 916841
cgccgaagggcgugauguu

SEQ ID NO: 1188241 - RNA, 19 nt, Artificial Sequence
  Description of Artificial Sequence: Synthetic oligonucleotide
  Antisense strand to SEQ ID NO: 1188240
aacaucacgcccuucggcg

SEQ ID NO: 1188242 - RNA, 19 nt, Artificial Sequence
  Description of Artificial Sequence: Synthetic oligonucleotide
  Sense strand starting at position 1779 of SEQ ID NO: 916841
uggacgugaugccguagaa

SEQ ID NO: 1188243 - RNA, 19 nt, Artificial Sequence
  Description of Artificial Sequence: Synthetic oligonucleotide
  Antisense strand to SEQ ID NO: 1188242
uucuacggcaucacgucca

SEQ ID NO: 1188244 - RNA, 19 nt, Artificial Sequence
  Description of Artificial Sequence: Synthetic oligonucleotide
  Sense strand starting at position 2124 of SEQ ID NO: 916841
gccgguauucuggaucacu

SEQ ID NO: 1188245 - RNA, 19 nt, Artificial Sequence
  Description of Artificial Sequence: Synthetic oligonucleotide
  Antisense strand to SEQ ID NO: 1188244
agugauccagaauaccggc

SEQ ID NO: 1188246 - RNA, 19 nt, Artificial Sequence
  Description of Artificial Sequence: Synthetic oligonucleotide
  Sense strand starting at position 2236 of SEQ ID NO: 916841
gagcgcagucaugcgguua

SEQ ID NO: 1188247 - RNA, 19 nt, Artificial Sequence
  Description of Artificial Sequence: Synthetic oligonucleotide
  Antisense strand to SEQ ID NO: 1188246
uaaccgcaugacugcgcuc

SEQ ID NO: 1188248 - RNA, 19 nt, Artificial Sequence
  Description of Artificial Sequence: Synthetic oligonucleotide
  Sense strand starting at position 2452 of SEQ ID NO: 916841
guuggaauuacgugcauga

SEQ ID NO: 1188249 - RNA, 19 nt, Artificial Sequence
  Description of Artificial Sequence: Synthetic oligonucleotide
  Antisense strand to SEQ ID NO: 1188248
ucaugcacguaauuccaac

SEQ ID NO: 1188250 - RNA, 19 nt, Artificial Sequence
  Description of Artificial Sequence: Synthetic oligonucleotide
  Sense strand starting at position 2630 of SEQ ID NO: 916841
gggcuucaguccuggagag

SEQ ID NO: 1188251 - RNA, 19 nt, Artificial Sequence
  Description of Artificial Sequence: Synthetic oligonucleotide
  Antisense strand to SEQ ID NO: 1188250
cucuccaggacugaagccc

SEQ ID NO: 1188252 - RNA, 19 nt, Artificial Sequence
  Description of Artificial Sequence: Synthetic oligonucleotide
  Sense strand starting at position 2632 of SEQ ID NO: 916841
gcuucaguccuggagagga

SEQ ID NO: 1188253 - RNA, 19 nt, Artificial Sequence
  Description of Artificial Sequence: Synthetic oligonucleotide
  Antisense strand to SEQ ID NO: 1188252
uccucuccaggacugaagc

SEQ ID NO: 1188254 - RNA, 19 nt, Artificial Sequence
  Description of Artificial Sequence: Synthetic oligonucleotide
  Sense strand starting at position 2725 of SEQ ID NO: 916841
gcagcuuuggccucugcua

SEQ ID NO: 1188255 - RNA, 19 nt, Artificial Sequence
  Description of Artificial Sequence: Synthetic oligonucleotide
  Antisense strand to SEQ ID NO: 1188254
uagcagaggccaaagcugc

SEQ ID NO: 1188256 - RNA, 19 nt, Artificial Sequence
  Description of Artificial Sequence: Synthetic oligonucleotide
  Sense strand starting at position 2797 of SEQ ID NO: 916841
ucuucuagacuuugccgaa

SEQ ID NO: 1188257 - RNA, 19 nt, Artificial Sequence
  Description of Artificial Sequence: Synthetic oligonucleotide
  Antisense strand to SEQ ID NO: 1188256
uucggcaaagucuagaaga

SEQ ID NO: 1188258 - RNA, 19 nt, Artificial Sequence
  Description of Artificial Sequence: Synthetic oligonucleotide
  Sense strand starting at position 2800 of SEQ ID NO: 916841
ucuagacuuugccgaagga

SEQ ID NO: 1188259 - RNA, 19 nt, Artificial Sequence
  Description of Artificial Sequence: Synthetic oligonucleotide
  Antisense strand to SEQ ID NO: 1188258
uccuucggcaaagucuaga

SEQ ID NO: 1188260 - RNA, 19 nt, Artificial Sequence
  Description of Artificial Sequence: Synthetic oligonucleotide
  Sense strand starting at position 2845 of SEQ ID NO: 916841
gagacucacuggcuuagaa

SEQ ID NO: 1188261 - RNA, 19 nt, Artificial Sequence
  Description of Artificial Sequence: Synthetic oligonucleotide
  Antisense strand to SEQ ID NO: 1188260
uucuaagccagugagucuc

SEQ ID NO: 1188262 - RNA, 19 nt, Artificial Sequence
  Description of Artificial Sequence: Synthetic oligonucleotide
  Sense strand starting at position 3095 of SEQ ID NO: 916841
uguuaacagguguaagcuu

SEQ ID NO: 1188263 - RNA, 19 nt, Artificial Sequence
  Description of Artificial Sequence: Synthetic oligonucleotide
  Antisense strand to SEQ ID NO: 1188262
aagcuuacaccuguuaaca

SEQ ID NO: 1188264 - RNA, 19 nt, Artificial Sequence
  Description of Artificial Sequence: Synthetic oligonucleotide
  Sense strand starting at position 3121 of SEQ ID NO: 916841
gcaggauucucuuguguuu

SEQ ID NO: 1188265 - RNA, 19 nt, Artificial Sequence
  Description of Artificial Sequence: Synthetic oligonucleotide
  Antisense strand to SEQ ID NO: 1188264
aaacacaagagaauccugc

SEQ ID NO: 1188266 - RNA, 19 nt, Artificial Sequence
  Description of Artificial Sequence: Synthetic oligonucleotide
  Sense strand starting at position 3745 of SEQ ID NO: 916841
aaggaaucgugauccacag

SEQ ID NO: 1188267 - RNA, 19 nt, Artificial Sequence
  Description of Artificial Sequence: Synthetic oligonucleotide
  Antisense strand to SEQ ID NO: 1188266
cuguggaucacgauuccuu

SEQ ID NO: 1188268 - RNA, 19 nt, Artificial Sequence
  Description of Artificial Sequence: Synthetic oligonucleotide
  Sense strand starting at position 3866 of SEQ ID NO: 916841
guaggucaucuggagaagu

SEQ ID NO: 1188269 - RNA, 19 nt, Artificial Sequence
  Description of Artificial Sequence: Synthetic oligonucleotide
  Antisense strand to SEQ ID NO: 1188268
acuucuccagaugaccuac

SEQ ID NO: 1188270 - RNA, 19 nt, Artificial Sequence
  Description of Artificial Sequence: Synthetic oligonucleotide
  Sense strand starting at position 3881 of SEQ ID NO: 916841
aaguaauccugccaguaag

SEQ ID NO: 1188271 - RNA, 19 nt, Artificial Sequence
  Description of Artificial Sequence: Synthetic oligonucleotide
  Antisense strand to SEQ ID NO: 1188270
cuuacuggcaggauuacuu

SEQ ID NO: 1188272 - RNA, 19 nt, Artificial Sequence
  Description of Artificial Sequence: Synthetic oligonucleotide
  Sense strand starting at position 3956 of SEQ ID NO: 916841
gacugauggucagcacagu

SEQ ID NO: 1188273 - RNA, 19 nt, Artificial Sequence
  Description of Artificial Sequence: Synthetic oligonucleotide
  Antisense strand to SEQ ID NO: 1188272
acugugcugaccaucaguc

SEQ ID NO: 1188274 - RNA, 19 nt, Artificial Sequence
  Description of Artificial Sequence: Synthetic oligonucleotide
  Sense strand starting at position 77 of SEQ ID NO: 916842
ucugaugacugaccucaga

SEQ ID NO: 1188275 - RNA, 19 nt, Artificial Sequence
  Description of Artificial Sequence: Synthetic oligonucleotide
  Antisense strand to SEQ ID NO: 1188274
ucugaggucagucaucaga

SEQ ID NO: 1188276 - RNA, 19 nt, Artificial Sequence
  Description of Artificial Sequence: Synthetic oligonucleotide
  Sense strand starting at position 165 of SEQ ID NO: 916842
agguaagcagaguaaguua

SEQ ID NO: 1188277 - RNA, 19 nt, Artificial Sequence
  Description of Artificial Sequence: Synthetic oligonucleotide
  Antisense strand to SEQ ID NO: 1188276
uaacuuacucugcuuaccu

SEQ ID NO: 1188278 - RNA, 19 nt, Artificial Sequence
  Description of Artificial Sequence: Synthetic oligonucleotide
  Sense strand starting at position 173 of SEQ ID NO: 916842
agaguaaguuagucuggga

SEQ ID NO: 1188279 - RNA, 19 nt, Artificial Sequence
  Description of Artificial Sequence: Synthetic oligonucleotide
  Antisense strand to SEQ ID NO: 1188278
ucccagacuaacuuacucu

SEQ ID NO: 1188280 - RNA, 19 nt, Artificial Sequence
  Description of Artificial Sequence: Synthetic oligonucleotide
  Sense strand starting at position 414 of SEQ ID NO: 916842
cagaauaaugucugguaca

SEQ ID NO: 1188281 - RNA, 19 nt, Artificial Sequence
  Description of Artificial Sequence: Synthetic oligonucleotide
  Antisense strand to SEQ ID NO: 1188280
uguaccagacauuauucug

SEQ ID NO: 1188282 - RNA, 19 nt, Artificial Sequence
  Description of Artificial Sequence: Synthetic oligonucleotide
  Sense strand starting at position 419 of SEQ ID NO: 916842
uaaugucugguacagagua

SEQ ID NO: 1188283 - RNA, 19 nt, Artificial Sequence
  Description of Artificial Sequence: Synthetic oligonucleotide
  Antisense strand to SEQ ID NO: 1188282
uacucuguaccagacauua

SEQ ID NO: 1188284 - RNA, 19 nt, Artificial Sequence
  Description of Artificial Sequence: Synthetic oligonucleotide
  Sense strand starting at position 424 of SEQ ID NO: 916842
ucugguacagaguagucaa

SEQ ID NO: 1188285 - RNA, 19 nt, Artificial Sequence
  Description of Artificial Sequence: Synthetic oligonucleotide
  Antisense strand to SEQ ID NO: 1188284
uugacuacucuguaccaga

SEQ ID NO: 1188286 - RNA, 19 nt, Artificial Sequence
  Description of Artificial Sequence: Synthetic oligonucleotide
  Sense strand starting at position 427 of SEQ ID NO: 916842
gguacagaguagucaauaa

SEQ ID NO: 1188287 - RNA, 19 nt, Artificial Sequence
  Description of Artificial Sequence: Synthetic oligonucleotide
  Antisense strand to SEQ ID NO: 1188286
uuauugacuacucuguacc

SEQ ID NO: 1188288 - RNA, 19 nt, Artificial Sequence
  Description of Artificial Sequence: Synthetic oligonucleotide
  Sense strand starting at position 456 of SEQ ID NO: 916842
uugaauguugagugauuau

SEQ ID NO: 1188289 - RNA, 19 nt, Artificial Sequence
  Description of Artificial Sequence: Synthetic oligonucleotide
  Antisense strand to SEQ ID NO: 1188288
auaaucacucaacauucaa

SEQ ID NO: 1188290 - RNA, 19 nt, Artificial Sequence
  Description of Artificial Sequence: Synthetic oligonucleotide
  Sense strand starting at position 466 of SEQ ID NO: 916842
agugauuauuugccaugca

SEQ ID NO: 1188291 - RNA, 19 nt, Artificial Sequence
  Description of Artificial Sequence: Synthetic oligonucleotide
  Antisense strand to SEQ ID NO: 1188290
ugcauggcaaauaaucacu

SEQ ID NO: 1188292 - RNA, 19 nt, Artificial Sequence
  Description of Artificial Sequence: Synthetic oligonucleotide
  Sense strand starting at position 469 of SEQ ID NO: 916842
gauuauuugccaugcagug

SEQ ID NO: 1188293 - RNA, 19 nt, Artificial Sequence
  Description of Artificial Sequence: Synthetic oligonucleotide
  Antisense strand to SEQ ID NO: 1188292
cacugcauggcaaauaauc

SEQ ID NO: 1188294 - RNA, 19 nt, Artificial Sequence
  Description of Artificial Sequence: Synthetic oligonucleotide
  Sense strand starting at position 544 of SEQ ID NO: 916842
uccaauggauucucugaau

SEQ ID NO: 1188295 - RNA, 19 nt, Artificial Sequence
  Description of Artificial Sequence: Synthetic oligonucleotide
  Antisense strand to SEQ ID NO: 1188294
auucagagaauccauugga

SEQ ID NO: 1188296 - RNA, 19 nt, Artificial Sequence
  Description of Artificial Sequence: Synthetic oligonucleotide
  Sense strand starting at position 550 of SEQ ID NO: 916842
ggauucucugaaugguaau

SEQ ID NO: 1188297 - RNA, 19 nt, Artificial Sequence
  Description of Artificial Sequence: Synthetic oligonucleotide
  Antisense strand to SEQ ID NO: 1188296
auuaccauucagagaaucc

SEQ ID NO: 1188298 - RNA, 19 nt, Artificial Sequence
  Description of Artificial Sequence: Synthetic oligonucleotide
  Sense strand starting at position 591 of SEQ ID NO: 916842
ugauauguugaguaccuga

SEQ ID NO: 1188299 - RNA, 19 nt, Artificial Sequence
  Description of Artificial Sequence: Synthetic oligonucleotide
  Antisense strand to SEQ ID NO: 1188298
ucagguacucaacauauca

SEQ ID NO: 1188300 - RNA, 19 nt, Artificial Sequence
  Description of Artificial Sequence: Synthetic oligonucleotide
  Sense strand starting at position 596 of SEQ ID NO: 916842
uguugaguaccugauaucu

SEQ ID NO: 1188301 - RNA, 19 nt, Artificial Sequence
  Description of Artificial Sequence: Synthetic oligonucleotide
  Antisense strand to SEQ ID NO: 1188300
agauaucagguacucaaca

SEQ ID NO: 1188302 - RNA, 19 nt, Artificial Sequence
  Description of Artificial Sequence: Synthetic oligonucleotide
  Sense strand starting at position 665 of SEQ ID NO: 916842
uucucauuauuggugaaca

SEQ ID NO: 1188303 - RNA, 19 nt, Artificial Sequence
  Description of Artificial Sequence: Synthetic oligonucleotide
  Antisense strand to SEQ ID NO: 1188302
uguucaccaauaaugagaa

SEQ ID NO: 1188304 - RNA, 19 nt, Artificial Sequence
  Description of Artificial Sequence: Synthetic oligonucleotide
  Sense strand starting at position 930 of SEQ ID NO: 916842
cuucuuguugcuuaagaag

SEQ ID NO: 1188305 - RNA, 19 nt, Artificial Sequence
  Description of Artificial Sequence: Synthetic oligonucleotide
  Antisense strand to SEQ ID NO: 1188304
cuucuuaagcaacaagaag

SEQ ID NO: 1188306 - RNA, 19 nt, Artificial Sequence
  Description of Artificial Sequence: Synthetic oligonucleotide
  Sense strand starting at position 993 of SEQ ID NO: 916842
guugcucucuauuucuuau

SEQ ID NO: 1188307 - RNA, 19 nt, Artificial Sequence
  Description of Artificial Sequence: Synthetic oligonucleotide
  Antisense strand to SEQ ID NO: 1188306
auaagaaauagagagcaac

SEQ ID NO: 1188308 - RNA, 19 nt, Artificial Sequence
  Description of Artificial Sequence: Synthetic oligonucleotide
  Sense strand starting at position 1085 of SEQ ID NO: 916842
uguaaagaugcacacuaua

SEQ ID NO: 1188309 - RNA, 19 nt, Artificial Sequence
  Description of Artificial Sequence: Synthetic oligonucleotide
  Antisense strand to SEQ ID NO: 1188308
uauagugugcaucuuuaca

SEQ ID NO: 1188310 - RNA, 19 nt, Artificial Sequence
  Description of Artificial Sequence: Synthetic oligonucleotide
  Sense strand starting at position 1307 of SEQ ID NO: 916842
gagggaauuugucaugaau

SEQ ID NO: 1188311 - RNA, 19 nt, Artificial Sequence
  Description of Artificial Sequence: Synthetic oligonucleotide
  Antisense strand to SEQ ID NO: 1188310
auucaugacaaauucccuc

SEQ ID NO: 1188312 - RNA, 19 nt, Artificial Sequence
  Description of Artificial Sequence: Synthetic oligonucleotide
  Sense strand starting at position 1309 of SEQ ID NO: 916842
gggaauuugucaugaauuu

SEQ ID NO: 1188313 - RNA, 19 nt, Artificial Sequence
  Description of Artificial Sequence: Synthetic oligonucleotide
  Antisense strand to SEQ ID NO: 1188312
aaauucaugacaaauuccc

SEQ ID NO: 1188314 - RNA, 19 nt, Artificial Sequence
  Description of Artificial Sequence: Synthetic oligonucleotide
  Sense strand starting at position 1688 of SEQ ID NO: 916842
aauagacaucagugagcca

SEQ ID NO: 1188315 - RNA, 19 nt, Artificial Sequence
  Description of Artificial Sequence: Synthetic oligonucleotide
  Antisense strand to SEQ ID NO: 1188314
uggcucacugaugucuauu

SEQ ID NO: 1188316 - RNA, 19 nt, Artificial Sequence
  Description of Artificial Sequence: Synthetic oligonucleotide
  Sense strand starting at position 1950 of SEQ ID NO: 916842
gugauauaaguguacuuuc

SEQ ID NO: 1188317 - RNA, 19 nt, Artificial Sequence
  Description of Artificial Sequence: Synthetic oligonucleotide
  Antisense strand to SEQ ID NO: 1188316
gaaaguacacuuauaucac

SEQ ID NO: 1188318 - RNA, 19 nt, Artificial Sequence
  Description of Artificial Sequence: Synthetic oligonucleotide
  Sense strand starting at position 1979 of SEQ ID NO: 916842
ugguaaagccuguaacaga

SEQ ID NO: 1188319 - RNA, 19 nt, Artificial Sequence
  Description of Artificial Sequence: Synthetic oligonucleotide
  Antisense strand to SEQ ID NO: 1188318
ucuguuacaggcuuuacca

SEQ ID NO: 1188320 - RNA, 19 nt, Artificial Sequence
  Description of Artificial Sequence: Synthetic oligonucleotide
  Sense strand starting at position 2165 of SEQ ID NO: 916842
gauccaagagcaugaguau

SEQ ID NO: 1188321 - RNA, 19 nt, Artificial Sequence
  Description of Artificial Sequence: Synthetic oligonucleotide
  Antisense strand to SEQ ID NO: 1188320
auacucaugcucuuggauc

SEQ ID NO: 1188322 - RNA, 19 nt, Artificial Sequence
  Description of Artificial Sequence: Synthetic oligonucleotide
  Sense strand starting at position 2166 of SEQ ID NO: 916842
auccaagagcaugaguauu

SEQ ID NO: 1188323 - RNA, 19 nt, Artificial Sequence
  Description of Artificial Sequence: Synthetic oligonucleotide
  Antisense strand to SEQ ID NO: 1188322
aauacucaugcucuuggau

SEQ ID NO: 1188324 - RNA, 19 nt, Artificial Sequence
  Description of Artificial Sequence: Synthetic oligonucleotide
  Sense strand starting at position 2215 of SEQ ID NO: 916842
aucugauuuguuugcuuaa

SEQ ID NO: 1188325 - RNA, 19 nt, Artificial Sequence
  Description of Artificial Sequence: Synthetic oligonucleotide
  Antisense strand to SEQ ID NO: 1188324
uuaagcaaacaaaucagau

SEQ ID NO: 1188326 - RNA, 19 nt, Artificial Sequence
  Description of Artificial Sequence: Synthetic oligonucleotide
  Sense strand starting at position 2216 of SEQ ID NO: 916842
ucugauuuguuugcuuaau

SEQ ID NO: 1188327 - RNA, 19 nt, Artificial Sequence
  Description of Artificial Sequence: Synthetic oligonucleotide
  Antisense strand to SEQ ID NO: 1188326
auuaagcaaacaaaucaga

SEQ ID NO: 1188328 - RNA, 19 nt, Artificial Sequence
  Description of Artificial Sequence: Synthetic oligonucleotide
  Sense strand starting at position 2577 of SEQ ID NO: 916842
agguaacaagcagaguuua

SEQ ID NO: 1188329 - RNA, 19 nt, Artificial Sequence
  Description of Artificial Sequence: Synthetic oligonucleotide
  Antisense strand to SEQ ID NO: 1188328
uaaacucugcuuguuaccu

SEQ ID NO: 1188330 - RNA, 19 nt, Artificial Sequence
  Description of Artificial Sequence: Synthetic oligonucleotide
  Sense strand starting at position 2737 of SEQ ID NO: 916842
aucaguagucagggauaca

SEQ ID NO: 1188331 - RNA, 19 nt, Artificial Sequence
  Description of Artificial Sequence: Synthetic oligonucleotide
  Antisense strand to SEQ ID NO: 1188330
uguaucccugacuacugau

SEQ ID NO: 1188332 - RNA, 19 nt, Artificial Sequence
  Description of Artificial Sequence: Synthetic oligonucleotide
  Sense strand starting at position 2941 of SEQ ID NO: 916842
accggaacuauugggucaa

SEQ ID NO: 1188333 - RNA, 19 nt, Artificial Sequence
  Description of Artificial Sequence: Synthetic oligonucleotide
  Antisense strand to SEQ ID NO: 1188332
uugacccaauaguuccggu

SEQ ID NO: 1188334 - RNA, 19 nt, Artificial Sequence
  Description of Artificial Sequence: Synthetic oligonucleotide
  Sense strand starting at position 2980 of SEQ ID NO: 916842
ugaguauaggaauguuauu

SEQ ID NO: 1188335 - RNA, 19 nt, Artificial Sequence
  Description of Artificial Sequence: Synthetic oligonucleotide
  Antisense strand to SEQ ID NO: 1188334
aauaacauuccuauacuca

SEQ ID NO: 1188336 - RNA, 19 nt, Artificial Sequence
  Description of Artificial Sequence: Synthetic oligonucleotide
  Sense strand starting at position 3167 of SEQ ID NO: 916842
cccuaaauuuccuuugugu

SEQ ID NO: 1188337 - RNA, 19 nt, Artificial Sequence
  Description of Artificial Sequence: Synthetic oligonucleotide
  Antisense strand to SEQ ID NO: 1188336
acacaaaggaaauuuaggg

SEQ ID NO: 1188338 - RNA, 19 nt, Artificial Sequence
  Description of Artificial Sequence: Synthetic oligonucleotide
  Sense strand starting at position 3182 of SEQ ID NO: 916842
guguaaauugaucaugcaa

SEQ ID NO: 1188339 - RNA, 19 nt, Artificial Sequence
  Description of Artificial Sequence: Synthetic oligonucleotide
  Antisense strand to SEQ ID NO: 1188338
uugcaugaucaauuuacac

SEQ ID NO: 1188340 - RNA, 19 nt, Artificial Sequence
  Description of Artificial Sequence: Synthetic oligonucleotide
  Sense strand starting at position 3321 of SEQ ID NO: 916842
ucacccuaccuuuggagaa

SEQ ID NO: 1188341 - RNA, 19 nt, Artificial Sequence
  Description of Artificial Sequence: Synthetic oligonucleotide
  Antisense strand to SEQ ID NO: 1188340
uucuccaaagguaggguga

SEQ ID NO: 1188342 - RNA, 19 nt, Artificial Sequence
  Description of Artificial Sequence: Synthetic oligonucleotide
  Sense strand starting at position 3331 of SEQ ID NO: 916842
uuuggagaaugacuccuau

SEQ ID NO: 1188343 - RNA, 19 nt, Artificial Sequence
  Description of Artificial Sequence: Synthetic oligonucleotide
  Antisense strand to SEQ ID NO: 1188342
auaggagucauucuccaaa

SEQ ID NO: 1188344 - RNA, 19 nt, Artificial Sequence
  Description of Artificial Sequence: Synthetic oligonucleotide
  Sense strand starting at position 3414 of SEQ ID NO: 916842
caacacccggucuaagaua

SEQ ID NO: 1188345 - RNA, 19 nt, Artificial Sequence
  Description of Artificial Sequence: Synthetic oligonucleotide
  Antisense strand to SEQ ID NO: 1188344
uaucuuagaccggguguug

SEQ ID NO: 1188346 - RNA, 19 nt, Artificial Sequence
  Description of Artificial Sequence: Synthetic oligonucleotide
  Sense strand starting at position 3459 of SEQ ID NO: 916842
uuuaaucuugaguggaaug

SEQ ID NO: 1188347 - RNA, 19 nt, Artificial Sequence
  Description of Artificial Sequence: Synthetic oligonucleotide
  Antisense strand to SEQ ID NO: 1188346
cauuccacucaagauuaaa

SEQ ID NO: 1188348 - RNA, 19 nt, Artificial Sequence
  Description of Artificial Sequence: Synthetic oligonucleotide
  Sense strand starting at position 3460 of SEQ ID NO: 916842
uuaaucuugaguggaauga

SEQ ID NO: 1188349 - RNA, 19 nt, Artificial Sequence
  Description of Artificial Sequence: Synthetic oligonucleotide
  Antisense strand to SEQ ID NO: 1188348
ucauuccacucaagauuaa

SEQ ID NO: 1188350 - RNA, 19 nt, Artificial Sequence
  Description of Artificial Sequence: Synthetic oligonucleotide
  Sense strand starting at position 3464 of SEQ ID NO: 916842
ucuugaguggaaugacuua

SEQ ID NO: 1188351 - RNA, 19 nt, Artificial Sequence
  Description of Artificial Sequence: Synthetic oligonucleotide
  Antisense strand to SEQ ID NO: 1188350
uaagucauuccacucaaga

SEQ ID NO: 1188352 - RNA, 19 nt, Artificial Sequence
  Description of Artificial Sequence: Synthetic oligonucleotide
  Sense strand starting at position 3811 of SEQ ID NO: 916842
uccacaauacuugggaauu

SEQ ID NO: 1188353 - RNA, 19 nt, Artificial Sequence
  Description of Artificial Sequence: Synthetic oligonucleotide
  Antisense strand to SEQ ID NO: 1188352
aauucccaaguauugugga

SEQ ID NO: 1188354 - RNA, 19 nt, Artificial Sequence
  Description of Artificial Sequence: Synthetic oligonucleotide
  Sense strand starting at position 58 of SEQ ID NO: 916843
gcaaaugaaugucuagaaa

SEQ ID NO: 1188355 - RNA, 19 nt, Artificial Sequence
  Description of Artificial Sequence: Synthetic oligonucleotide
  Antisense strand to SEQ ID NO: 1188354
uuucuagacauucauuugc

SEQ ID NO: 1188356 - RNA, 19 nt, Artificial Sequence
  Description of Artificial Sequence: Synthetic oligonucleotide
  Sense strand starting at position 107 of SEQ ID NO: 916843
auuugaacaucgggaaaca

SEQ ID NO: 1188357 - RNA, 19 nt, Artificial Sequence
  Description of Artificial Sequence: Synthetic oligonucleotide
  Antisense strand to SEQ ID NO: 1188356
uguuucccgauguucaaau

SEQ ID NO: 1188358 - RNA, 19 nt, Artificial Sequence
  Description of Artificial Sequence: Synthetic oligonucleotide
  Sense strand starting at position 116 of SEQ ID NO: 916843
ucgggaaacagauguuaaa

SEQ ID NO: 1188359 - RNA, 19 nt, Artificial Sequence
  Description of Artificial Sequence: Synthetic oligonucleotide
  Antisense strand to SEQ ID NO: 1188358
uuuaacaucuguuucccga

SEQ ID NO: 1188360 - RNA, 19 nt, Artificial Sequence
  Description of Artificial Sequence: Synthetic oligonucleotide
  Sense strand starting at position 178 of SEQ ID NO: 916843
aguaauauguaacugcaaa

SEQ ID NO: 1188361 - RNA, 19 nt, Artificial Sequence
  Description of Artificial Sequence: Synthetic oligonucleotide
  Antisense strand to SEQ ID NO: 1188360
uuugcaguuacauauuacu

SEQ ID NO: 1188362 - RNA, 19 nt, Artificial Sequence
  Description of Artificial Sequence: Synthetic oligonucleotide
  Sense strand starting at position 305 of SEQ ID NO: 916843
ucacuuggauugcuuuaaa

SEQ ID NO: 1188363 - RNA, 19 nt, Artificial Sequence
  Description of Artificial Sequence: Synthetic oligonucleotide
  Antisense strand to SEQ ID NO: 1188362
uuuaaagcaauccaaguga

SEQ ID NO: 1188364 - RNA, 19 nt, Artificial Sequence
  Description of Artificial Sequence: Synthetic oligonucleotide
  Sense strand starting at position 308 of SEQ ID NO: 916843
cuuggauugcuuuaaaugu

SEQ ID NO: 1188365 - RNA, 19 nt, Artificial Sequence
  Description of Artificial Sequence: Synthetic oligonucleotide
  Antisense strand to SEQ ID NO: 1188364
acauuuaaagcaauccaag

SEQ ID NO: 1188366 - RNA, 19 nt, Artificial Sequence
  Description of Artificial Sequence: Synthetic oligonucleotide
  Sense strand starting at position 325 of SEQ ID NO: 916843
guaaucugcucagucagaa

SEQ ID NO: 1188367 - RNA, 19 nt, Artificial Sequence
  Description of Artificial Sequence: Synthetic oligonucleotide
  Antisense strand to SEQ ID NO: 1188366
uucugacugagcagauuac

SEQ ID NO: 1188368 - RNA, 19 nt, Artificial Sequence
  Description of Artificial Sequence: Synthetic oligonucleotide
  Sense strand starting at position 340 of SEQ ID NO: 916843
agaaguagaaccuggaguu

SEQ ID NO: 1188369 - RNA, 19 nt, Artificial Sequence
  Description of Artificial Sequence: Synthetic oligonucleotide
  Antisense strand to SEQ ID NO: 1188368
aacuccagguucuacuucu

SEQ ID NO: 1188370 - RNA, 19 nt, Artificial Sequence
  Description of Artificial Sequence: Synthetic oligonucleotide
  Sense strand starting at position 341 of SEQ ID NO: 916843
gaaguagaaccuggaguua

SEQ ID NO: 1188371 - RNA, 19 nt, Artificial Sequence
  Description of Artificial Sequence: Synthetic oligonucleotide
  Antisense strand to SEQ ID NO: 1188370
uaacuccagguucuacuuc

SEQ ID NO: 1188372 - RNA, 19 nt, Artificial Sequence
  Description of Artificial Sequence: Synthetic oligonucleotide
  Sense strand starting at position 352 of SEQ ID NO: 916843
uggaguuaggauugcuuca

SEQ ID NO: 1188373 - RNA, 19 nt, Artificial Sequence
  Description of Artificial Sequence: Synthetic oligonucleotide
  Antisense strand to SEQ ID NO: 1188372
ugaagcaauccuaacucca

SEQ ID NO: 1188374 - RNA, 19 nt, Artificial Sequence
  Description of Artificial Sequence: Synthetic oligonucleotide
  Sense strand starting at position 576 of SEQ ID NO: 916843
ggaaauggcauccaguagu

SEQ ID NO: 1188375 - RNA, 19 nt, Artificial Sequence
  Description of Artificial Sequence: Synthetic oligonucleotide
  Antisense strand to SEQ ID NO: 1188374
acuacuggaugccauuucc

SEQ ID NO: 1188376 - RNA, 19 nt, Artificial Sequence
  Description of Artificial Sequence: Synthetic oligonucleotide
  Sense strand starting at position 633 of SEQ ID NO: 916843
ucaucauuguccgcuauuu

SEQ ID NO: 1188377 - RNA, 19 nt, Artificial Sequence
  Description of Artificial Sequence: Synthetic oligonucleotide
  Antisense strand to SEQ ID NO: 1188376
aaauagcggacaaugauga

SEQ ID NO: 1188378 - RNA, 19 nt, Artificial Sequence
  Description of Artificial Sequence: Synthetic oligonucleotide
  Sense strand starting at position 1267 of SEQ ID NO: 916843
cugaucaucugcucaaaga

SEQ ID NO: 1188379 - RNA, 19 nt, Artificial Sequence
  Description of Artificial Sequence: Synthetic oligonucleotide
  Antisense strand to SEQ ID NO: 1188378
ucuuugagcagaugaucag

SEQ ID NO: 1188380 - RNA, 19 nt, Artificial Sequence
  Description of Artificial Sequence: Synthetic oligonucleotide
  Sense strand starting at position 1321 of SEQ ID NO: 916843
caccuucugcggcaaugaa

SEQ ID NO: 1188381 - RNA, 19 nt, Artificial Sequence
  Description of Artificial Sequence: Synthetic oligonucleotide
  Antisense strand to SEQ ID NO: 1188380
uucauugccgcagaaggug

SEQ ID NO: 1188382 - RNA, 19 nt, Artificial Sequence
  Description of Artificial Sequence: Synthetic oligonucleotide
  Sense strand starting at position 2209 of SEQ ID NO: 916843
guagaucugucuuuccaga

SEQ ID NO: 1188383 - RNA, 19 nt, Artificial Sequence
  Description of Artificial Sequence: Synthetic oligonucleotide
  Antisense strand to SEQ ID NO: 1188382
ucuggaaagacagaucuac

SEQ ID NO: 1188384 - RNA, 19 nt, Artificial Sequence
  Description of Artificial Sequence: Synthetic oligonucleotide
  Sense strand starting at position 2214 of SEQ ID NO: 916843
ucugucuuuccagaugggu

SEQ ID NO: 1188385 - RNA, 19 nt, Artificial Sequence
  Description of Artificial Sequence: Synthetic oligonucleotide
  Antisense strand to SEQ ID NO: 1188384
acccaucuggaaagacaga

SEQ ID NO: 1188386 - RNA, 19 nt, Artificial Sequence
  Description of Artificial Sequence: Synthetic oligonucleotide
  Sense strand starting at position 2334 of SEQ ID NO: 916843
agaagagucuggccgaaug

SEQ ID NO: 1188387 - RNA, 19 nt, Artificial Sequence
  Description of Artificial Sequence: Synthetic oligonucleotide
  Antisense strand to SEQ ID NO: 1188386
cauucggccagacucuucu

SEQ ID NO: 1188388 - RNA, 19 nt, Artificial Sequence
  Description of Artificial Sequence: Synthetic oligonucleotide
  Sense strand starting at position 2344 of SEQ ID NO: 916843
ggccgaaugcagggagaau

SEQ ID NO: 1188389 - RNA, 19 nt, Artificial Sequence
  Description of Artificial Sequence: Synthetic oligonucleotide
  Antisense strand to SEQ ID NO: 1188388
auucucccugcauucggcc

SEQ ID NO: 1188390 - RNA, 19 nt, Artificial Sequence
  Description of Artificial Sequence: Synthetic oligonucleotide
  Sense strand starting at position 2345 of SEQ ID NO: 916843
gccgaaugcagggagaaua

SEQ ID NO: 1188391 - RNA, 19 nt, Artificial Sequence
  Description of Artificial Sequence: Synthetic oligonucleotide
  Antisense strand to SEQ ID NO: 1188390
uauucucccugcauucggc

SEQ ID NO: 1188392 - RNA, 19 nt, Artificial Sequence
  Description of Artificial Sequence: Synthetic oligonucleotide
  Sense strand starting at position 2363 of SEQ ID NO: 916843
aggagauccucauugugag

SEQ ID NO: 1188393 - RNA, 19 nt, Artificial Sequence
  Description of Artificial Sequence: Synthetic oligonucleotide
  Antisense strand to SEQ ID NO: 1188392
cucacaaugaggaucuccu

SEQ ID NO: 1188394 - RNA, 19 nt, Artificial Sequence
  Description of Artificial Sequence: Synthetic oligonucleotide
  Sense strand starting at position 2387 of SEQ ID NO: 916843
agggaaaguguugagccau

SEQ ID NO: 1188395 - RNA, 19 nt, Artificial Sequence
  Description of Artificial Sequence: Synthetic oligonucleotide
  Antisense strand to SEQ ID NO: 1188394
auggcucaacacuuucccu

SEQ ID NO: 1188396 - RNA, 19 nt, Artificial Sequence
  Description of Artificial Sequence: Synthetic oligonucleotide
  Sense strand starting at position 2441 of SEQ ID NO: 916843
ggcacuguuggagauuaga

SEQ ID NO: 1188397 - RNA, 19 nt, Artificial Sequence
  Description of Artificial Sequence: Synthetic oligonucleotide
  Antisense strand to SEQ ID NO: 1188396
ucuaaucuccaacagugcc

SEQ ID NO: 1188398 - RNA, 19 nt, Artificial Sequence
  Description of Artificial Sequence: Synthetic oligonucleotide
  Sense strand starting at position 2628 of SEQ ID NO: 916843
uuaguuauuugacaacgaa

SEQ ID NO: 1188399 - RNA, 19 nt, Artificial Sequence
  Description of Artificial Sequence: Synthetic oligonucleotide
  Antisense strand to SEQ ID NO: 1188398
uucguugucaaauaacuaa

SEQ ID NO: 1188400 - RNA, 19 nt, Artificial Sequence
  Description of Artificial Sequence: Synthetic oligonucleotide
  Sense strand starting at position 2643 of SEQ ID NO: 916843
cgaauagugcuagagauaa

SEQ ID NO: 1188401 - RNA, 19 nt, Artificial Sequence
  Description of Artificial Sequence: Synthetic oligonucleotide
  Antisense strand to SEQ ID NO: 1188400
uuaucucuagcacuauucg

SEQ ID NO: 1188402 - RNA, 19 nt, Artificial Sequence
  Description of Artificial Sequence: Synthetic oligonucleotide
  Sense strand starting at position 2651 of SEQ ID NO: 916843
gcuagagauaaugguaauu

SEQ ID NO: 1188403 - RNA, 19 nt, Artificial Sequence
  Description of Artificial Sequence: Synthetic oligonucleotide
  Antisense strand to SEQ ID NO: 1188402
aauuaccauuaucucuagc

SEQ ID NO: 1188404 - RNA, 19 nt, Artificial Sequence
  Description of Artificial Sequence: Synthetic oligonucleotide
  Sense strand starting at position 2763 of SEQ ID NO: 916843
cccauagauuggguuucuu

SEQ ID NO: 1188405 - RNA, 19 nt, Artificial Sequence
  Description of Artificial Sequence: Synthetic oligonucleotide
  Antisense strand to SEQ ID NO: 1188404
aagaaacccaaucuauggg

SEQ ID NO: 1188406 - RNA, 19 nt, Artificial Sequence
  Description of Artificial Sequence: Synthetic oligonucleotide
  Sense strand starting at position 2767 of SEQ ID NO: 916843
uagauuggguuucuuuaau

SEQ ID NO: 1188407 - RNA, 19 nt, Artificial Sequence
  Description of Artificial Sequence: Synthetic oligonucleotide
  Antisense strand to SEQ ID NO: 1188406
auuaaagaaacccaaucua

SEQ ID NO: 1188408 - RNA, 19 nt, Artificial Sequence
  Description of Artificial Sequence: Synthetic oligonucleotide
  Sense strand starting at position 3013 of SEQ ID NO: 916843
ucuguuguaauggacgaaa

SEQ ID NO: 1188409 - RNA, 19 nt, Artificial Sequence
  Description of Artificial Sequence: Synthetic oligonucleotide
  Antisense strand to SEQ ID NO: 1188408
uuucguccauuacaacaga

SEQ ID NO: 1188410 - RNA, 19 nt, Artificial Sequence
  Description of Artificial Sequence: Synthetic oligonucleotide
  Sense strand starting at position 3015 of SEQ ID NO: 916843
uguuguaauggacgaaauu

SEQ ID NO: 1188411 - RNA, 19 nt, Artificial Sequence
  Description of Artificial Sequence: Synthetic oligonucleotide
  Antisense strand to SEQ ID NO: 1188410
aauuucguccauuacaaca

SEQ ID NO: 1188412 - RNA, 19 nt, Artificial Sequence
  Description of Artificial Sequence: Synthetic oligonucleotide
  Sense strand starting at position 3119 of SEQ ID NO: 916843
guggcugguaggcauaaua

SEQ ID NO: 1188413 - RNA, 19 nt, Artificial Sequence
  Description of Artificial Sequence: Synthetic oligonucleotide
  Antisense strand to SEQ ID NO: 1188412
uauuaugccuaccagccac

SEQ ID NO: 1188414 - RNA, 19 nt, Artificial Sequence
  Description of Artificial Sequence: Synthetic oligonucleotide
  Sense strand starting at position 3294 of SEQ ID NO: 916843
auaauaggccuuugauaau

SEQ ID NO: 1188415 - RNA, 19 nt, Artificial Sequence
  Description of Artificial Sequence: Synthetic oligonucleotide
  Antisense strand to SEQ ID NO: 1188414
auuaucaaaggccuauuau

SEQ ID NO: 1188416 - RNA, 19 nt, Artificial Sequence
  Description of Artificial Sequence: Synthetic oligonucleotide
  Sense strand starting at position 3312 of SEQ ID NO: 916843
ugaugaaaugucuagcagu

SEQ ID NO: 1188417 - RNA, 19 nt, Artificial Sequence
  Description of Artificial Sequence: Synthetic oligonucleotide
  Antisense strand to SEQ ID NO: 1188416
acugcuagacauuucauca

SEQ ID NO: 1188418 - RNA, 19 nt, Artificial Sequence
  Description of Artificial Sequence: Synthetic oligonucleotide
  Sense strand starting at position 3590 of SEQ ID NO: 916843
ccuauugcugaaugccaaa

SEQ ID NO: 1188419 - RNA, 19 nt, Artificial Sequence
  Description of Artificial Sequence: Synthetic oligonucleotide
  Antisense strand to SEQ ID NO: 1188418
uuuggcauucagcaauagg

SEQ ID NO: 1188420 - RNA, 19 nt, Artificial Sequence
  Description of Artificial Sequence: Synthetic oligonucleotide
  Sense strand starting at position 3625 of SEQ ID NO: 916843
augauaucguaaccuucuu

SEQ ID NO: 1188421 - RNA, 19 nt, Artificial Sequence
  Description of Artificial Sequence: Synthetic oligonucleotide
  Antisense strand to SEQ ID NO: 1188420
aagaagguuacgauaucau

SEQ ID NO: 1188422 - RNA, 19 nt, Artificial Sequence
  Description of Artificial Sequence: Synthetic oligonucleotide
  Sense strand starting at position 3693 of SEQ ID NO: 916843
cugucacagaguuaguauu

SEQ ID NO: 1188423 - RNA, 19 nt, Artificial Sequence
  Description of Artificial Sequence: Synthetic oligonucleotide
  Antisense strand to SEQ ID NO: 1188422
aauacuaacucugugacag

SEQ ID NO: 1188424 - RNA, 19 nt, Artificial Sequence
  Description of Artificial Sequence: Synthetic oligonucleotide
  Sense strand starting at position 3703 of SEQ ID NO: 916843
guuaguauuugggaacuca

SEQ ID NO: 1188425 - RNA, 19 nt, Artificial Sequence
  Description of Artificial Sequence: Synthetic oligonucleotide
  Antisense strand to SEQ ID NO: 1188424
ugaguucccaaauacuaac

SEQ ID NO: 1188426 - RNA, 19 nt, Artificial Sequence
  Description of Artificial Sequence: Synthetic oligonucleotide
  Sense strand starting at position 3714 of SEQ ID NO: 916843
ggaacucauuucuaaauug

SEQ ID NO: 1188427 - RNA, 19 nt, Artificial Sequence
  Description of Artificial Sequence: Synthetic oligonucleotide
  Antisense strand to SEQ ID NO: 1188426
caauuuagaaaugaguucc

SEQ ID NO: 1188428 - RNA, 19 nt, Artificial Sequence
  Description of Artificial Sequence: Synthetic oligonucleotide
  Sense strand starting at position 3736 of SEQ ID NO: 916843
uguugugauagcuagguau

SEQ ID NO: 1188429 - RNA, 19 nt, Artificial Sequence
  Description of Artificial Sequence: Synthetic oligonucleotide
  Antisense strand to SEQ ID NO: 1188428
auaccuagcuaucacaaca

SEQ ID NO: 1188430 - RNA, 19 nt, Artificial Sequence
  Description of Artificial Sequence: Synthetic oligonucleotide
  Sense strand starting at position 3740 of SEQ ID NO: 916843
gugauagcuagguauguua

SEQ ID NO: 1188431 - RNA, 19 nt, Artificial Sequence
  Description of Artificial Sequence: Synthetic oligonucleotide
  Antisense strand to SEQ ID NO: 1188430
uaacauaccuagcuaucac

SEQ ID NO: 1188432 - RNA, 19 nt, Artificial Sequence
  Description of Artificial Sequence: Synthetic oligonucleotide
  Sense strand starting at position 3913 of SEQ ID NO: 916843
cuuggaaugcucugguaaa

SEQ ID NO: 1188433 - RNA, 19 nt, Artificial Sequence
  Description of Artificial Sequence: Synthetic oligonucleotide
  Antisense strand to SEQ ID NO: 1188432
uuuaccagagcauuccaag

SEQ ID NO: 1188434 - RNA, 19 nt, Artificial Sequence
  Description of Artificial Sequence: Synthetic oligonucleotide
  Sense strand starting at position 33 of SEQ ID NO: 916844
cacuaauuggaguguauau

SEQ ID NO: 1188435 - RNA, 19 nt, Artificial Sequence
  Description of Artificial Sequence: Synthetic oligonucleotide
  Antisense strand to SEQ ID NO: 1188434
auauacacuccaauuagug

SEQ ID NO: 1188436 - RNA, 19 nt, Artificial Sequence
  Description of Artificial Sequence: Synthetic oligonucleotide
  Sense strand starting at position 89 of SEQ ID NO: 916844
gcaagcuugguccaaauaa

SEQ ID NO: 1188437 - RNA, 19 nt, Artificial Sequence
  Description of Artificial Sequence: Synthetic oligonucleotide
  Antisense strand to SEQ ID NO: 1188436
uuauuuggaccaagcuugc

SEQ ID NO: 1188438 - RNA, 19 nt, Artificial Sequence
  Description of Artificial Sequence: Synthetic oligonucleotide
  Sense strand starting at position 193 of SEQ ID NO: 916844
uuuggaaagugaccaugua

SEQ ID NO: 1188439 - RNA, 19 nt, Artificial Sequence
  Description of Artificial Sequence: Synthetic oligonucleotide
  Antisense strand to SEQ ID NO: 1188438
uacauggucacuuuccaaa

SEQ ID NO: 1188440 - RNA, 19 nt, Artificial Sequence
  Description of Artificial Sequence: Synthetic oligonucleotide
  Sense strand starting at position 432 of SEQ ID NO: 916844
uuucuaucauacuugagga

SEQ ID NO: 1188441 - RNA, 19 nt, Artificial Sequence
  Description of Artificial Sequence: Synthetic oligonucleotide
  Antisense strand to SEQ ID NO: 1188440
uccucaaguaugauagaaa

SEQ ID NO: 1188442 - RNA, 19 nt, Artificial Sequence
  Description of Artificial Sequence: Synthetic oligonucleotide
  Sense strand starting at position 479 of SEQ ID NO: 916844
uuaucuaguguuuacagaa

SEQ ID NO: 1188443 - RNA, 19 nt, Artificial Sequence
  Description of Artificial Sequence: Synthetic oligonucleotide
  Antisense strand to SEQ ID NO: 1188442
uucuguaaacacuagauaa

SEQ ID NO: 1188444 - RNA, 19 nt, Artificial Sequence
  Description of Artificial Sequence: Synthetic oligonucleotide
  Sense strand starting at position 726 of SEQ ID NO: 916844
ggacuuaaucuguguaaca

SEQ ID NO: 1188445 - RNA, 19 nt, Artificial Sequence
  Description of Artificial Sequence: Synthetic oligonucleotide
  Antisense strand to SEQ ID NO: 1188444
uguuacacagauuaagucc

SEQ ID NO: 1188446 - RNA, 19 nt, Artificial Sequence
  Description of Artificial Sequence: Synthetic oligonucleotide
  Sense strand starting at position 1162 of SEQ ID NO: 916844
ucuucucucccagagucau

SEQ ID NO: 1188447 - RNA, 19 nt, Artificial Sequence
  Description of Artificial Sequence: Synthetic oligonucleotide
  Antisense strand to SEQ ID NO: 1188446
augacucugggagagaaga

SEQ ID NO: 1188448 - RNA, 19 nt, Artificial Sequence
  Description of Artificial Sequence: Synthetic oligonucleotide
  Sense strand starting at position 1185 of SEQ ID NO: 916844
uagggaaauuacguauaug

SEQ ID NO: 1188449 - RNA, 19 nt, Artificial Sequence
  Description of Artificial Sequence: Synthetic oligonucleotide
  Antisense strand to SEQ ID NO: 1188448
cauauacguaauuucccua

SEQ ID NO: 1188450 - RNA, 19 nt, Artificial Sequence
  Description of Artificial Sequence: Synthetic oligonucleotide
  Sense strand starting at position 1188 of SEQ ID NO: 916844
ggaaauuacguauauggcu

SEQ ID NO: 1188451 - RNA, 19 nt, Artificial Sequence
  Description of Artificial Sequence: Synthetic oligonucleotide
  Antisense strand to SEQ ID NO: 1188450
agccauauacguaauuucc

SEQ ID NO: 1188452 - RNA, 19 nt, Artificial Sequence
  Description of Artificial Sequence: Synthetic oligonucleotide
  Sense strand starting at position 1297 of SEQ ID NO: 916844
ccuuucuaggaaugaaauc

SEQ ID NO: 1188453 - RNA, 19 nt, Artificial Sequence
  Description of Artificial Sequence: Synthetic oligonucleotide
  Antisense strand to SEQ ID NO: 1188452
gauuucauuccuagaaagg

SEQ ID NO: 1188454 - RNA, 19 nt, Artificial Sequence
  Description of Artificial Sequence: Synthetic oligonucleotide
  Sense strand starting at position 1427 of SEQ ID NO: 916844
ugguucuuccuagaaaguu

SEQ ID NO: 1188455 - RNA, 19 nt, Artificial Sequence
  Description of Artificial Sequence: Synthetic oligonucleotide
  Antisense strand to SEQ ID NO: 1188454
aacuuucuaggaagaacca

SEQ ID NO: 1188456 - RNA, 19 nt, Artificial Sequence
  Description of Artificial Sequence: Synthetic oligonucleotide
  Sense strand starting at position 1442 of SEQ ID NO: 916844
aguuuagaauuccuuagag

SEQ ID NO: 1188457 - RNA, 19 nt, Artificial Sequence
  Description of Artificial Sequence: Synthetic oligonucleotide
  Antisense strand to SEQ ID NO: 1188456
cucuaaggaauucuaaacu

SEQ ID NO: 1188458 - RNA, 19 nt, Artificial Sequence
  Description of Artificial Sequence: Synthetic oligonucleotide
  Sense strand starting at position 1444 of SEQ ID NO: 916844
uuuagaauuccuuagagca

SEQ ID NO: 1188459 - RNA, 19 nt, Artificial Sequence
  Description of Artificial Sequence: Synthetic oligonucleotide
  Antisense strand to SEQ ID NO: 1188458
ugcucuaaggaauucuaaa

SEQ ID NO: 1188460 - RNA, 19 nt, Artificial Sequence
  Description of Artificial Sequence: Synthetic oligonucleotide
  Sense strand starting at position 1605 of SEQ ID NO: 916844
agcauuagaucauuaacug

SEQ ID NO: 1188461 - RNA, 19 nt, Artificial Sequence
  Description of Artificial Sequence: Synthetic oligonucleotide
  Antisense strand to SEQ ID NO: 1188460
caguuaaugaucuaaugcu

SEQ ID NO: 1188462 - RNA, 19 nt, Artificial Sequence
  Description of Artificial Sequence: Synthetic oligonucleotide
  Sense strand starting at position 1746 of SEQ ID NO: 916844
cccacaggaucuccugaua

SEQ ID NO: 1188463 - RNA, 19 nt, Artificial Sequence
  Description of Artificial Sequence: Synthetic oligonucleotide
  Antisense strand to SEQ ID NO: 1188462
uaucaggagauccuguggg

SEQ ID NO: 1188464 - RNA, 19 nt, Artificial Sequence
  Description of Artificial Sequence: Synthetic oligonucleotide
  Sense strand starting at position 1786 of SEQ ID NO: 916844
auguuagaaucccuuaagu

SEQ ID NO: 1188465 - RNA, 19 nt, Artificial Sequence
  Description of Artificial Sequence: Synthetic oligonucleotide
  Antisense strand to SEQ ID NO: 1188464
acuuaagggauucuaacau

SEQ ID NO: 1188466 - RNA, 19 nt, Artificial Sequence
  Description of Artificial Sequence: Synthetic oligonucleotide
  Sense strand starting at position 1788 of SEQ ID NO: 916844
guuagaaucccuuaaguuu

SEQ ID NO: 1188467 - RNA, 19 nt, Artificial Sequence
  Description of Artificial Sequence: Synthetic oligonucleotide
  Antisense strand to SEQ ID NO: 1188466
aaacuuaagggauucuaac

SEQ ID NO: 1188468 - RNA, 19 nt, Artificial Sequence
  Description of Artificial Sequence: Synthetic oligonucleotide
  Sense strand starting at position 1819 of SEQ ID NO: 916844
guaucacugaggcaggauu

SEQ ID NO: 1188469 - RNA, 19 nt, Artificial Sequence
  Description of Artificial Sequence: Synthetic oligonucleotide
  Antisense strand to SEQ ID NO: 1188468
aauccugccucagugauac

SEQ ID NO: 1188470 - RNA, 19 nt, Artificial Sequence
  Description of Artificial Sequence: Synthetic oligonucleotide
  Sense strand starting at position 1821 of SEQ ID NO: 916844
aucacugaggcaggauuaa

SEQ ID NO: 1188471 - RNA, 19 nt, Artificial Sequence
  Description of Artificial Sequence: Synthetic oligonucleotide
  Antisense strand to SEQ ID NO: 1188470
uuaauccugccucagugau

SEQ ID NO: 1188472 - RNA, 19 nt, Artificial Sequence
  Description of Artificial Sequence: Synthetic oligonucleotide
  Sense strand starting at position 2070 of SEQ ID NO: 916844
ccuagcucacuugaguaau

SEQ ID NO: 1188473 - RNA, 19 nt, Artificial Sequence
  Description of Artificial Sequence: Synthetic oligonucleotide
  Antisense strand to SEQ ID NO: 1188472
auuacucaagugagcuagg

SEQ ID NO: 1188474 - RNA, 19 nt, Artificial Sequence
  Description of Artificial Sequence: Synthetic oligonucleotide
  Sense strand starting at position 2073 of SEQ ID NO: 916844
agcucacuugaguaaucau

SEQ ID NO: 1188475 - RNA, 19 nt, Artificial Sequence
  Description of Artificial Sequence: Synthetic oligonucleotide
  Antisense strand to SEQ ID NO: 1188474
augauuacucaagugagcu

SEQ ID NO: 1188476 - RNA, 19 nt, Artificial Sequence
  Description of Artificial Sequence: Synthetic oligonucleotide
  Sense strand starting at position 2648 of SEQ ID NO: 916844
augagacuccugcauaauu

SEQ ID NO: 1188477 - RNA, 19 nt, Artificial Sequence
  Description of Artificial Sequence: Synthetic oligonucleotide
  Antisense strand to SEQ ID NO: 1188476
aauuaugcaggagucucau

SEQ ID NO: 1188478 - RNA, 19 nt, Artificial Sequence
  Description of Artificial Sequence: Synthetic oligonucleotide
  Sense strand starting at position 2650 of SEQ ID NO: 916844
gagacuccugcauaauugu

SEQ ID NO: 1188479 - RNA, 19 nt, Artificial Sequence
  Description of Artificial Sequence: Synthetic oligonucleotide
  Antisense strand to SEQ ID NO: 1188478
acaauuaugcaggagucuc

SEQ ID NO: 1188480 - RNA, 19 nt, Artificial Sequence
  Description of Artificial Sequence: Synthetic oligonucleotide
  Sense strand starting at position 2763 of SEQ ID NO: 916844
ccuguuaugguacagguaa

SEQ ID NO: 1188481 - RNA, 19 nt, Artificial Sequence
  Description of Artificial Sequence: Synthetic oligonucleotide
  Antisense strand to SEQ ID NO: 1188480
uuaccuguaccauaacagg

SEQ ID NO: 1188482 - RNA, 19 nt, Artificial Sequence
  Description of Artificial Sequence: Synthetic oligonucleotide
  Sense strand starting at position 2771 of SEQ ID NO: 916844
gguacagguaaguaucaau

SEQ ID NO: 1188483 - RNA, 19 nt, Artificial Sequence
  Description of Artificial Sequence: Synthetic oligonucleotide
  Antisense strand to SEQ ID NO: 1188482
auugauacuuaccuguacc

SEQ ID NO: 1188484 - RNA, 19 nt, Artificial Sequence
  Description of Artificial Sequence: Synthetic oligonucleotide
  Sense strand starting at position 2929 of SEQ ID NO: 916844
cgucucacucuagaacuau

SEQ ID NO: 1188485 - RNA, 19 nt, Artificial Sequence
  Description of Artificial Sequence: Synthetic oligonucleotide
  Antisense strand to SEQ ID NO: 1188484
auaguucuagagugagacg

SEQ ID NO: 1188486 - RNA, 19 nt, Artificial Sequence
  Description of Artificial Sequence: Synthetic oligonucleotide
  Sense strand starting at position 3009 of SEQ ID NO: 916844
ccuuaaaguggucauauug

SEQ ID NO: 1188487 - RNA, 19 nt, Artificial Sequence
  Description of Artificial Sequence: Synthetic oligonucleotide
  Antisense strand to SEQ ID NO: 1188486
caauaugaccacuuuaagg

SEQ ID NO: 1188488 - RNA, 19 nt, Artificial Sequence
  Description of Artificial Sequence: Synthetic oligonucleotide
  Sense strand starting at position 3148 of SEQ ID NO: 916844
acacucaauuaguugguaa

SEQ ID NO: 1188489 - RNA, 19 nt, Artificial Sequence
  Description of Artificial Sequence: Synthetic oligonucleotide
  Antisense strand to SEQ ID NO: 1188488
uuaccaacuaauugagugu

SEQ ID NO: 1188490 - RNA, 19 nt, Artificial Sequence
  Description of Artificial Sequence: Synthetic oligonucleotide
  Sense strand starting at position 3257 of SEQ ID NO: 916844
augaaagagccauguugaa

SEQ ID NO: 1188491 - RNA, 19 nt, Artificial Sequence
  Description of Artificial Sequence: Synthetic oligonucleotide
  Antisense strand to SEQ ID NO: 1188490
uucaacauggcucuuucau

SEQ ID NO: 1188492 - RNA, 19 nt, Artificial Sequence
  Description of Artificial Sequence: Synthetic oligonucleotide
  Sense strand starting at position 3339 of SEQ ID NO: 916844
uuacgagugaauugaauug

SEQ ID NO: 1188493 - RNA, 19 nt, Artificial Sequence
  Description of Artificial Sequence: Synthetic oligonucleotide
  Antisense strand to SEQ ID NO: 1188492
caauucaauucacucguaa

SEQ ID NO: 1188494 - RNA, 19 nt, Artificial Sequence
  Description of Artificial Sequence: Synthetic oligonucleotide
  Sense strand starting at position 3344 of SEQ ID NO: 916844
agugaauugaauugguaga

SEQ ID NO: 1188495 - RNA, 19 nt, Artificial Sequence
  Description of Artificial Sequence: Synthetic oligonucleotide
  Antisense strand to SEQ ID NO: 1188494
ucuaccaauucaauucacu

SEQ ID NO: 1188496 - RNA, 19 nt, Artificial Sequence
  Description of Artificial Sequence: Synthetic oligonucleotide
  Sense strand starting at position 3345 of SEQ ID NO: 916844
gugaauugaauugguagau

SEQ ID NO: 1188497 - RNA, 19 nt, Artificial Sequence
  Description of Artificial Sequence: Synthetic oligonucleotide
  Antisense strand to SEQ ID NO: 1188496
aucuaccaauucaauucac

SEQ ID NO: 1188498 - RNA, 19 nt, Artificial Sequence
  Description of Artificial Sequence: Synthetic oligonucleotide
  Sense strand starting at position 3346 of SEQ ID NO: 916844
ugaauugaauugguagauu

SEQ ID NO: 1188499 - RNA, 19 nt, Artificial Sequence
  Description of Artificial Sequence: Synthetic oligonucleotide
  Antisense strand to SEQ ID NO: 1188498
aaucuaccaauucaauuca

SEQ ID NO: 1188500 - RNA, 19 nt, Artificial Sequence
  Description of Artificial Sequence: Synthetic oligonucleotide
  Sense strand starting at position 3402 of SEQ ID NO: 916844
uugucauauuucucuguag

SEQ ID NO: 1188501 - RNA, 19 nt, Artificial Sequence
  Description of Artificial Sequence: Synthetic oligonucleotide
  Antisense strand to SEQ ID NO: 1188500
cuacagagaaauaugacaa

SEQ ID NO: 1188502 - RNA, 19 nt, Artificial Sequence
  Description of Artificial Sequence: Synthetic oligonucleotide
  Sense strand starting at position 3405 of SEQ ID NO: 916844
ucauauuucucuguaggca

SEQ ID NO: 1188503 - RNA, 19 nt, Artificial Sequence
  Description of Artificial Sequence: Synthetic oligonucleotide
  Antisense strand to SEQ ID NO: 1188502
ugccuacagagaaauauga

SEQ ID NO: 1188504 - RNA, 19 nt, Artificial Sequence
  Description of Artificial Sequence: Synthetic oligonucleotide
  Sense strand starting at position 3443 of SEQ ID NO: 916844
ugacuuuagguuuggacau

SEQ ID NO: 1188505 - RNA, 19 nt, Artificial Sequence
  Description of Artificial Sequence: Synthetic oligonucleotide
  Antisense strand to SEQ ID NO: 1188504
auguccaaaccuaaaguca

SEQ ID NO: 1188506 - RNA, 19 nt, Artificial Sequence
  Description of Artificial Sequence: Synthetic oligonucleotide
  Sense strand starting at position 3504 of SEQ ID NO: 916844
ggccauguccaagaguaug

SEQ ID NO: 1188507 - RNA, 19 nt, Artificial Sequence
  Description of Artificial Sequence: Synthetic oligonucleotide
  Antisense strand to SEQ ID NO: 1188506
cauacucuuggacauggcc

SEQ ID NO: 1188508 - RNA, 19 nt, Artificial Sequence
  Description of Artificial Sequence: Synthetic oligonucleotide
  Sense strand starting at position 3709 of SEQ ID NO: 916844
uauuguaagcccuaagaga

SEQ ID NO: 1188509 - RNA, 19 nt, Artificial Sequence
  Description of Artificial Sequence: Synthetic oligonucleotide
  Antisense strand to SEQ ID NO: 1188508
ucucuuagggcuuacaaua

SEQ ID NO: 1188510 - RNA, 19 nt, Artificial Sequence
  Description of Artificial Sequence: Synthetic oligonucleotide
  Sense strand starting at position 3811 of SEQ ID NO: 916844
gcaggcaauagugaggaau

SEQ ID NO: 1188511 - RNA, 19 nt, Artificial Sequence
  Description of Artificial Sequence: Synthetic oligonucleotide
  Antisense strand to SEQ ID NO: 1188510
auuccucacuauugccugc

SEQ ID NO: 1188512 - RNA, 19 nt, Artificial Sequence
  Description of Artificial Sequence: Synthetic oligonucleotide
  Sense strand starting at position 3819 of SEQ ID NO: 916844
uagugaggaaucuguuaga

SEQ ID NO: 1188513 - RNA, 19 nt, Artificial Sequence
  Description of Artificial Sequence: Synthetic oligonucleotide
  Antisense strand to SEQ ID NO: 1188512
ucuaacagauuccucacua

SEQ ID NO: 1188514 - RNA, 19 nt, Artificial Sequence
  Description of Artificial Sequence: Synthetic oligonucleotide
  Sense strand starting at position 231 of SEQ ID NO: 916845
auucuugacuuugccagau

SEQ ID NO: 1188515 - RNA, 19 nt, Artificial Sequence
  Description of Artificial Sequence: Synthetic oligonucleotide
  Antisense strand to SEQ ID NO: 1188514
aucuggcaaagucaagaau

SEQ ID NO: 1188516 - RNA, 19 nt, Artificial Sequence
  Description of Artificial Sequence: Synthetic oligonucleotide
  Sense strand starting at position 235 of SEQ ID NO: 916845
uugacuuugccagauuccu

SEQ ID NO: 1188517 - RNA, 19 nt, Artificial Sequence
  Description of Artificial Sequence: Synthetic oligonucleotide
  Antisense strand to SEQ ID NO: 1188516
aggaaucuggcaaagucaa

SEQ ID NO: 1188518 - RNA, 19 nt, Artificial Sequence
  Description of Artificial Sequence: Synthetic oligonucleotide
  Sense strand starting at position 244 of SEQ ID NO: 916845
ccagauuccuuugucauua

SEQ ID NO: 1188519 - RNA, 19 nt, Artificial Sequence
  Description of Artificial Sequence: Synthetic oligonucleotide
  Antisense strand to SEQ ID NO: 1188518
uaaugacaaaggaaucugg

SEQ ID NO: 1188520 - RNA, 19 nt, Artificial Sequence
  Description of Artificial Sequence: Synthetic oligonucleotide
  Sense strand starting at position 249 of SEQ ID NO: 916845
uuccuuugucauuacuuga

SEQ ID NO: 1188521 - RNA, 19 nt, Artificial Sequence
  Description of Artificial Sequence: Synthetic oligonucleotide
  Antisense strand to SEQ ID NO: 1188520
ucaaguaaugacaaaggaa

SEQ ID NO: 1188522 - RNA, 19 nt, Artificial Sequence
  Description of Artificial Sequence: Synthetic oligonucleotide
  Sense strand starting at position 359 of SEQ ID NO: 916845
gagugcucaacggaaggau

SEQ ID NO: 1188523 - RNA, 19 nt, Artificial Sequence
  Description of Artificial Sequence: Synthetic oligonucleotide
  Antisense strand to SEQ ID NO: 1188522
auccuuccguugagcacuc

SEQ ID NO: 1188524 - RNA, 19 nt, Artificial Sequence
  Description of Artificial Sequence: Synthetic oligonucleotide
  Sense strand starting at position 412 of SEQ ID NO: 916845
ucuauauuuggcugguuua

SEQ ID NO: 1188525 - RNA, 19 nt, Artificial Sequence
  Description of Artificial Sequence: Synthetic oligonucleotide
  Antisense strand to SEQ ID NO: 1188524
uaaaccagccaaauauaga

SEQ ID NO: 1188526 - RNA, 19 nt, Artificial Sequence
  Description of Artificial Sequence: Synthetic oligonucleotide
  Sense strand starting at position 413 of SEQ ID NO: 916845
cuauauuuggcugguuuau

SEQ ID NO: 1188527 - RNA, 19 nt, Artificial Sequence
  Description of Artificial Sequence: Synthetic oligonucleotide
  Antisense strand to SEQ ID NO: 1188526
auaaaccagccaaauauag

SEQ ID NO: 1188528 - RNA, 19 nt, Artificial Sequence
  Description of Artificial Sequence: Synthetic oligonucleotide
  Sense strand starting at position 423 of SEQ ID NO: 916845
cugguuuaugcugcuguca

SEQ ID NO: 1188529 - RNA, 19 nt, Artificial Sequence
  Description of Artificial Sequence: Synthetic oligonucleotide
  Antisense strand to SEQ ID NO: 1188528
ugacagcagcauaaaccag

SEQ ID NO: 1188530 - RNA, 19 nt, Artificial Sequence
  Description of Artificial Sequence: Synthetic oligonucleotide
  Sense strand starting at position 436 of SEQ ID NO: 916845
cugucacugagcuagguuu

SEQ ID NO: 1188531 - RNA, 19 nt, Artificial Sequence
  Description of Artificial Sequence: Synthetic oligonucleotide
  Antisense strand to SEQ ID NO: 1188530
aaaccuagcucagugacag

SEQ ID NO: 1188532 - RNA, 19 nt, Artificial Sequence
  Description of Artificial Sequence: Synthetic oligonucleotide
  Sense strand starting at position 478 of SEQ ID NO: 916845
guaggucugauugaagcuu

SEQ ID NO: 1188533 - RNA, 19 nt, Artificial Sequence
  Description of Artificial Sequence: Synthetic oligonucleotide
  Antisense strand to SEQ ID NO: 1188532
aagcuucaaucagaccuac

SEQ ID NO: 1188534 - RNA, 19 nt, Artificial Sequence
  Description of Artificial Sequence: Synthetic oligonucleotide
  Sense strand starting at position 633 of SEQ ID NO: 916845
aucucagauugccuggaaa

SEQ ID NO: 1188535 - RNA, 19 nt, Artificial Sequence
  Description of Artificial Sequence: Synthetic oligonucleotide
  Antisense strand to SEQ ID NO: 1188534
uuuccaggcaaucugagau

SEQ ID NO: 1188536 - RNA, 19 nt, Artificial Sequence
  Description of Artificial Sequence: Synthetic oligonucleotide
  Sense strand starting at position 635 of SEQ ID NO: 916845
cucagauugccuggaaaua

SEQ ID NO: 1188537 - RNA, 19 nt, Artificial Sequence
  Description of Artificial Sequence: Synthetic oligonucleotide
  Antisense strand to SEQ ID NO: 1188536
uauuuccaggcaaucugag

SEQ ID NO: 1188538 - RNA, 19 nt, Artificial Sequence
  Description of Artificial Sequence: Synthetic oligonucleotide
  Sense strand starting at position 730 of SEQ ID NO: 916845
ucaccaggauuagaaauaa

SEQ ID NO: 1188539 - RNA, 19 nt, Artificial Sequence
  Description of Artificial Sequence: Synthetic oligonucleotide
  Antisense strand to SEQ ID NO: 1188538
uuauuucuaauccugguga

SEQ ID NO: 1188540 - RNA, 19 nt, Artificial Sequence
  Description of Artificial Sequence: Synthetic oligonucleotide
  Sense strand starting at position 1036 of SEQ ID NO: 916845
cacugcaauuaugugagau

SEQ ID NO: 1188541 - RNA, 19 nt, Artificial Sequence
  Description of Artificial Sequence: Synthetic oligonucleotide
  Antisense strand to SEQ ID NO: 1188540
aucucacauaauugcagug

SEQ ID NO: 1188542 - RNA, 19 nt, Artificial Sequence
  Description of Artificial Sequence: Synthetic oligonucleotide
  Sense strand starting at position 1541 of SEQ ID NO: 916845
auacgaagcuacucagaaa

SEQ ID NO: 1188543 - RNA, 19 nt, Artificial Sequence
  Description of Artificial Sequence: Synthetic oligonucleotide
  Antisense strand to SEQ ID NO: 1188542
uuucugaguagcuucguau

SEQ ID NO: 1188544 - RNA, 19 nt, Artificial Sequence
  Description of Artificial Sequence: Synthetic oligonucleotide
  Sense strand starting at position 2172 of SEQ ID NO: 916845
aagugagacuuuccaaggu

SEQ ID NO: 1188545 - RNA, 19 nt, Artificial Sequence
  Description of Artificial Sequence: Synthetic oligonucleotide
  Antisense strand to SEQ ID NO: 1188544
accuuggaaagucucacuu

SEQ ID NO: 1188546 - RNA, 19 nt, Artificial Sequence
  Description of Artificial Sequence: Synthetic oligonucleotide
  Sense strand starting at position 2176 of SEQ ID NO: 916845
gagacuuuccaaggugaug

SEQ ID NO: 1188547 - RNA, 19 nt, Artificial Sequence
  Description of Artificial Sequence: Synthetic oligonucleotide
  Antisense strand to SEQ ID NO: 1188546
caucaccuuggaaagucuc

SEQ ID NO: 1188548 - RNA, 19 nt, Artificial Sequence
  Description of Artificial Sequence: Synthetic oligonucleotide
  Sense strand starting at position 2196 of SEQ ID NO: 916845
uauaguaaccggcacaaua

SEQ ID NO: 1188549 - RNA, 19 nt, Artificial Sequence
  Description of Artificial Sequence: Synthetic oligonucleotide
  Antisense strand to SEQ ID NO: 1188548
uauugugccgguuacuaua

SEQ ID NO: 1188550 - RNA, 19 nt, Artificial Sequence
  Description of Artificial Sequence: Synthetic oligonucleotide
  Sense strand starting at position 2431 of SEQ ID NO: 916845
gcauuugaguagcccaaau

SEQ ID NO: 1188551 - RNA, 19 nt, Artificial Sequence
  Description of Artificial Sequence: Synthetic oligonucleotide
  Antisense strand to SEQ ID NO: 1188550
auuugggcuacucaaaugc

SEQ ID NO: 1188552 - RNA, 19 nt, Artificial Sequence
  Description of Artificial Sequence: Synthetic oligonucleotide
  Sense strand starting at position 2518 of SEQ ID NO: 916845
aaaguaugauacguagaug

SEQ ID NO: 1188553 - RNA, 19 nt, Artificial Sequence
  Description of Artificial Sequence: Synthetic oligonucleotide
  Antisense strand to SEQ ID NO: 1188552
caucuacguaucauacuuu

SEQ ID NO: 1188554 - RNA, 19 nt, Artificial Sequence
  Description of Artificial Sequence: Synthetic oligonucleotide
  Sense strand starting at position 2521 of SEQ ID NO: 916845
guaugauacguagaugcca

SEQ ID NO: 1188555 - RNA, 19 nt, Artificial Sequence
  Description of Artificial Sequence: Synthetic oligonucleotide
  Antisense strand to SEQ ID NO: 1188554
uggcaucuacguaucauac

SEQ ID NO: 1188556 - RNA, 19 nt, Artificial Sequence
  Description of Artificial Sequence: Synthetic oligonucleotide
  Sense strand starting at position 2569 of SEQ ID NO: 916845
gccggaagauaucuagaac

SEQ ID NO: 1188557 - RNA, 19 nt, Artificial Sequence
  Description of Artificial Sequence: Synthetic oligonucleotide
  Antisense strand to SEQ ID NO: 1188556
guucuagauaucuuccggc

SEQ ID NO: 1188558 - RNA, 19 nt, Artificial Sequence
  Description of Artificial Sequence: Synthetic oligonucleotide
  Sense strand starting at position 2581 of SEQ ID NO: 916845
cuagaaccugcuuagaacu

SEQ ID NO: 1188559 - RNA, 19 nt, Artificial Sequence
  Description of Artificial Sequence: Synthetic oligonucleotide
  Antisense strand to SEQ ID NO: 1188558
aguucuaagcagguucuag

SEQ ID NO: 1188560 - RNA, 19 nt, Artificial Sequence
  Description of Artificial Sequence: Synthetic oligonucleotide
  Sense strand starting at position 2611 of SEQ ID NO: 916845
ccucauuguccucaggaua

SEQ ID NO: 1188561 - RNA, 19 nt, Artificial Sequence
  Description of Artificial Sequence: Synthetic oligonucleotide
  Antisense strand to SEQ ID NO: 1188560
uauccugaggacaaugagg

SEQ ID NO: 1188562 - RNA, 19 nt, Artificial Sequence
  Description of Artificial Sequence: Synthetic oligonucleotide
  Sense strand starting at position 2884 of SEQ ID NO: 916845
guauccauguauucuaauc

SEQ ID NO: 1188563 - RNA, 19 nt, Artificial Sequence
  Description of Artificial Sequence: Synthetic oligonucleotide
  Antisense strand to SEQ ID NO: 1188562
gauuagaauacauggauac

SEQ ID NO: 1188564 - RNA, 19 nt, Artificial Sequence
  Description of Artificial Sequence: Synthetic oligonucleotide
  Sense strand starting at position 3066 of SEQ ID NO: 916845
gccucugggcuuuacucaa

SEQ ID NO: 1188565 - RNA, 19 nt, Artificial Sequence
  Description of Artificial Sequence: Synthetic oligonucleotide
  Antisense strand to SEQ ID NO: 1188564
uugaguaaagcccagaggc

SEQ ID NO: 1188566 - RNA, 19 nt, Artificial Sequence
  Description of Artificial Sequence: Synthetic oligonucleotide
  Sense strand starting at position 3140 of SEQ ID NO: 916845
ggguucuaaggucaugcua

SEQ ID NO: 1188567 - RNA, 19 nt, Artificial Sequence
  Description of Artificial Sequence: Synthetic oligonucleotide
  Antisense strand to SEQ ID NO: 1188566
uagcaugaccuuagaaccc

SEQ ID NO: 1188568 - RNA, 19 nt, Artificial Sequence
  Description of Artificial Sequence: Synthetic oligonucleotide
  Sense strand starting at position 3254 of SEQ ID NO: 916845
gggagugggcguuaccuaa

SEQ ID NO: 1188569 - RNA, 19 nt, Artificial Sequence
  Description of Artificial Sequence: Synthetic oligonucleotide
  Antisense strand to SEQ ID NO: 1188568
uuagguaacgcccacuccc

SEQ ID NO: 1188570 - RNA, 19 nt, Artificial Sequence
  Description of Artificial Sequence: Synthetic oligonucleotide
  Sense strand starting at position 3301 of SEQ ID NO: 916845
gcaaguuguggccacauuu

SEQ ID NO: 1188571 - RNA, 19 nt, Artificial Sequence
  Description of Artificial Sequence: Synthetic oligonucleotide
  Antisense strand to SEQ ID NO: 1188570
aaauguggccacaacuugc

SEQ ID NO: 1188572 - RNA, 19 nt, Artificial Sequence
  Description of Artificial Sequence: Synthetic oligonucleotide
  Sense strand starting at position 3409 of SEQ ID NO: 916845
cugcaugcgacugacaaau

SEQ ID NO: 1188573 - RNA, 19 nt, Artificial Sequence
  Description of Artificial Sequence: Synthetic oligonucleotide
  Antisense strand to SEQ ID NO: 1188572
auuugucagucgcaugcag

SEQ ID NO: 1188574 - RNA, 19 nt, Artificial Sequence
  Description of Artificial Sequence: Synthetic oligonucleotide
  Sense strand starting at position 3455 of SEQ ID NO: 916845
aggagucauuuccacaaga

SEQ ID NO: 1188575 - RNA, 19 nt, Artificial Sequence
  Description of Artificial Sequence: Synthetic oligonucleotide
  Antisense strand to SEQ ID NO: 1188574
ucuuguggaaaugacuccu

SEQ ID NO: 1188576 - RNA, 19 nt, Artificial Sequence
  Description of Artificial Sequence: Synthetic oligonucleotide
  Sense strand starting at position 3546 of SEQ ID NO: 916845
gaauccuugguaggcuaaa

SEQ ID NO: 1188577 - RNA, 19 nt, Artificial Sequence
  Description of Artificial Sequence: Synthetic oligonucleotide
  Antisense strand to SEQ ID NO: 1188576
uuuagccuaccaaggauuc

SEQ ID NO: 1188578 - RNA, 19 nt, Artificial Sequence
  Description of Artificial Sequence: Synthetic oligonucleotide
  Sense strand starting at position 3547 of SEQ ID NO: 916845
aauccuugguaggcuaaau

SEQ ID NO: 1188579 - RNA, 19 nt, Artificial Sequence
  Description of Artificial Sequence: Synthetic oligonucleotide
  Antisense strand to SEQ ID NO: 1188578
auuuagccuaccaaggauu

SEQ ID NO: 1188580 - RNA, 19 nt, Artificial Sequence
  Description of Artificial Sequence: Synthetic oligonucleotide
  Sense strand starting at position 3558 of SEQ ID NO: 916845
ggcuaaauauugcuaauau

SEQ ID NO: 1188581 - RNA, 19 nt, Artificial Sequence
  Description of Artificial Sequence: Synthetic oligonucleotide
  Antisense strand to SEQ ID NO: 1188580
auauuagcaauauuuagcc

SEQ ID NO: 1188582 - RNA, 19 nt, Artificial Sequence
  Description of Artificial Sequence: Synthetic oligonucleotide
  Sense strand starting at position 3643 of SEQ ID NO: 916845
cagcaagacucugugguaa

SEQ ID NO: 1188583 - RNA, 19 nt, Artificial Sequence
  Description of Artificial Sequence: Synthetic oligonucleotide
  Antisense strand to SEQ ID NO: 1188582
uuaccacagagucuugcug

SEQ ID NO: 1188584 - RNA, 19 nt, Artificial Sequence
  Description of Artificial Sequence: Synthetic oligonucleotide
  Sense strand starting at position 3654 of SEQ ID NO: 916845
ugugguaaauaacuucuua

SEQ ID NO: 1188585 - RNA, 19 nt, Artificial Sequence
  Description of Artificial Sequence: Synthetic oligonucleotide
  Antisense strand to SEQ ID NO: 1188584
uaagaaguuauuuaccaca

SEQ ID NO: 1188586 - RNA, 19 nt, Artificial Sequence
  Description of Artificial Sequence: Synthetic oligonucleotide
  Sense strand starting at position 3712 of SEQ ID NO: 916845
agguuaaacuuaccugaga

SEQ ID NO: 1188587 - RNA, 19 nt, Artificial Sequence
  Description of Artificial Sequence: Synthetic oligonucleotide
  Antisense strand to SEQ ID NO: 1188586
ucucagguaaguuuaaccu

SEQ ID NO: 1188588 - RNA, 19 nt, Artificial Sequence
  Description of Artificial Sequence: Synthetic oligonucleotide
  Sense strand starting at position 3713 of SEQ ID NO: 916845
gguuaaacuuaccugagau

SEQ ID NO: 1188589 - RNA, 19 nt, Artificial Sequence
  Description of Artificial Sequence: Synthetic oligonucleotide
  Antisense strand to SEQ ID NO: 1188588
aucucagguaaguuuaacc

SEQ ID NO: 1188590 - RNA, 19 nt, Artificial Sequence
  Description of Artificial Sequence: Synthetic oligonucleotide
  Sense strand starting at position 3959 of SEQ ID NO: 916845
uuguguaaccaucaccaga

SEQ ID NO: 1188591 - RNA, 19 nt, Artificial Sequence
  Description of Artificial Sequence: Synthetic oligonucleotide
  Antisense strand to SEQ ID NO: 1188590
ucuggugaugguuacacaa

SEQ ID NO: 1188592 - RNA, 19 nt, Artificial Sequence
  Description of Artificial Sequence: Synthetic oligonucleotide
  Sense strand starting at position 3961 of SEQ ID NO: 916845
guguaaccaucaccagaaa

SEQ ID NO: 1188593 - RNA, 19 nt, Artificial Sequence
  Description of Artificial Sequence: Synthetic oligonucleotide
  Antisense strand to SEQ ID NO: 1188592
uuucuggugaugguuacac

SEQ ID NO: 1188594 - RNA, 19 nt, Artificial Sequence
  Description of Artificial Sequence: Synthetic oligonucleotide
  Sense strand starting at position 184 of SEQ ID NO: 916846
cuauacugcucuguuugau

SEQ ID NO: 1188595 - RNA, 19 nt, Artificial Sequence
  Description of Artificial Sequence: Synthetic oligonucleotide
  Antisense strand to SEQ ID NO: 1188594
aucaaacagagcaguauag

SEQ ID NO: 1188596 - RNA, 19 nt, Artificial Sequence
  Description of Artificial Sequence: Synthetic oligonucleotide
  Sense strand starting at position 190 of SEQ ID NO: 916846
ugcucuguuugauuggaaa

SEQ ID NO: 1188597 - RNA, 19 nt, Artificial Sequence
  Description of Artificial Sequence: Synthetic oligonucleotide
  Antisense strand to SEQ ID NO: 1188596
uuuccaaucaaacagagca

SEQ ID NO: 1188598 - RNA, 19 nt, Artificial Sequence
  Description of Artificial Sequence: Synthetic oligonucleotide
  Sense strand starting at position 266 of SEQ ID NO: 916846
aauguuucccugugagaua

SEQ ID NO: 1188599 - RNA, 19 nt, Artificial Sequence
  Description of Artificial Sequence: Synthetic oligonucleotide
  Antisense strand to SEQ ID NO: 1188598
uaucucacagggaaacauu

SEQ ID NO: 1188600 - RNA, 19 nt, Artificial Sequence
  Description of Artificial Sequence: Synthetic oligonucleotide
  Sense strand starting at position 298 of SEQ ID NO: 916846
ugaauagcuuuggccacaa

SEQ ID NO: 1188601 - RNA, 19 nt, Artificial Sequence
  Description of Artificial Sequence: Synthetic oligonucleotide
  Antisense strand to SEQ ID NO: 1188600
uuguggccaaagcuauuca

SEQ ID NO: 1188602 - RNA, 19 nt, Artificial Sequence
  Description of Artificial Sequence: Synthetic oligonucleotide
  Sense strand starting at position 372 of SEQ ID NO: 916846
ggguucuguaucugauacu

SEQ ID NO: 1188603 - RNA, 19 nt, Artificial Sequence
  Description of Artificial Sequence: Synthetic oligonucleotide
  Antisense strand to SEQ ID NO: 1188602
aguaucagauacagaaccc

SEQ ID NO: 1188604 - RNA, 19 nt, Artificial Sequence
  Description of Artificial Sequence: Synthetic oligonucleotide
  Sense strand starting at position 398 of SEQ ID NO: 916846
gcucguauucugccauauu

SEQ ID NO: 1188605 - RNA, 19 nt, Artificial Sequence
  Description of Artificial Sequence: Synthetic oligonucleotide
  Antisense strand to SEQ ID NO: 1188604
aauauggcagaauacgagc

SEQ ID NO: 1188606 - RNA, 19 nt, Artificial Sequence
  Description of Artificial Sequence: Synthetic oligonucleotide
  Sense strand starting at position 401 of SEQ ID NO: 916846
cguauucugccauauuaau

SEQ ID NO: 1188607 - RNA, 19 nt, Artificial Sequence
  Description of Artificial Sequence: Synthetic oligonucleotide
  Antisense strand to SEQ ID NO: 1188606
auuaauauggcagaauacg

SEQ ID NO: 1188608 - RNA, 19 nt, Artificial Sequence
  Description of Artificial Sequence: Synthetic oligonucleotide
  Sense strand starting at position 473 of SEQ ID NO: 916846
auuauuaaccacugguaag

SEQ ID NO: 1188609 - RNA, 19 nt, Artificial Sequence
  Description of Artificial Sequence: Synthetic oligonucleotide
  Antisense strand to SEQ ID NO: 1188608
cuuaccagugguuaauaau

SEQ ID NO: 1188610 - RNA, 19 nt, Artificial Sequence
  Description of Artificial Sequence: Synthetic oligonucleotide
  Sense strand starting at position 1049 of SEQ ID NO: 916846
ugaccuggcgucgacaaau

SEQ ID NO: 1188611 - RNA, 19 nt, Artificial Sequence
  Description of Artificial Sequence: Synthetic oligonucleotide
  Antisense strand to SEQ ID NO: 1188610
auuugucgacgccagguca

SEQ ID NO: 1188612 - RNA, 19 nt, Artificial Sequence
  Description of Artificial Sequence: Synthetic oligonucleotide
  Sense strand starting at position 1123 of SEQ ID NO: 916846
guaauauaguuaguagaac

SEQ ID NO: 1188613 - RNA, 19 nt, Artificial Sequence
  Description of Artificial Sequence: Synthetic oligonucleotide
  Antisense strand to SEQ ID NO: 1188612
guucuacuaacuauauuac

SEQ ID NO: 1188614 - RNA, 19 nt, Artificial Sequence
  Description of Artificial Sequence: Synthetic oligonucleotide
  Sense strand starting at position 1154 of SEQ ID NO: 916846
guaguuucgggaggagagu

SEQ ID NO: 1188615 - RNA, 19 nt, Artificial Sequence
  Description of Artificial Sequence: Synthetic oligonucleotide
  Antisense strand to SEQ ID NO: 1188614
acucuccucccgaaacuac

SEQ ID NO: 1188616 - RNA, 19 nt, Artificial Sequence
  Description of Artificial Sequence: Synthetic oligonucleotide
  Sense strand starting at position 1169 of SEQ ID NO: 916846
gaguuuacccaguacuuag

SEQ ID NO: 1188617 - RNA, 19 nt, Artificial Sequence
  Description of Artificial Sequence: Synthetic oligonucleotide
  Antisense strand to SEQ ID NO: 1188616
cuaaguacuggguaaacuc

SEQ ID NO: 1188618 - RNA, 19 nt, Artificial Sequence
  Description of Artificial Sequence: Synthetic oligonucleotide
  Sense strand starting at position 2025 of SEQ ID NO: 916846
cgcccauugguggagaaga

SEQ ID NO: 1188619 - RNA, 19 nt, Artificial Sequence
  Description of Artificial Sequence: Synthetic oligonucleotide
  Antisense strand to SEQ ID NO: 1188618
ucuucuccaccaaugggcg

SEQ ID NO: 1188620 - RNA, 19 nt, Artificial Sequence
  Description of Artificial Sequence: Synthetic oligonucleotide
  Sense strand starting at position 2058 of SEQ ID NO: 916846
gcgucaucgcguucuccua

SEQ ID NO: 1188621 - RNA, 19 nt, Artificial Sequence
  Description of Artificial Sequence: Synthetic oligonucleotide
  Antisense strand to SEQ ID NO: 1188620
uaggagaacgcgaugacgc

SEQ ID NO: 1188622 - RNA, 19 nt, Artificial Sequence
  Description of Artificial Sequence: Synthetic oligonucleotide
  Sense strand starting at position 2152 of SEQ ID NO: 916846
cgcgcguuccgggucuaua

SEQ ID NO: 1188623 - RNA, 19 nt, Artificial Sequence
  Description of Artificial Sequence: Synthetic oligonucleotide
  Antisense strand to SEQ ID NO: 1188622
uauagacccggaacgcgcg

SEQ ID NO: 1188624 - RNA, 19 nt, Artificial Sequence
  Description of Artificial Sequence: Synthetic oligonucleotide
  Sense strand starting at position 2153 of SEQ ID NO: 916846
gcgcguuccgggucuauau

SEQ ID NO: 1188625 - RNA, 19 nt, Artificial Sequence
  Description of Artificial Sequence: Synthetic oligonucleotide
  Antisense strand to SEQ ID NO: 1188624
auauagacccggaacgcgc

SEQ ID NO: 1188626 - RNA, 19 nt, Artificial Sequence
  Description of Artificial Sequence: Synthetic oligonucleotide
  Sense strand starting at position 2154 of SEQ ID NO: 916846
cgcguuccgggucuauauu

SEQ ID NO: 1188627 - RNA, 19 nt, Artificial Sequence
  Description of Artificial Sequence: Synthetic oligonucleotide
  Antisense strand to SEQ ID NO: 1188626
aauauagacccggaacgcg

SEQ ID NO: 1188628 - RNA, 19 nt, Artificial Sequence
  Description of Artificial Sequence: Synthetic oligonucleotide
  Sense strand starting at position 2155 of SEQ ID NO: 916846
gcguuccgggucuauauuu

SEQ ID NO: 1188629 - RNA, 19 nt, Artificial Sequence
  Description of Artificial Sequence: Synthetic oligonucleotide
  Antisense strand to SEQ ID NO: 1188628
aaauauagacccggaacgc

SEQ ID NO: 1188630 - RNA, 19 nt, Artificial Sequence
  Description of Artificial Sequence: Synthetic oligonucleotide
  Sense strand starting at position 2229 of SEQ ID NO: 916846
aggugucucuccuugacca

SEQ ID NO: 1188631 - RNA, 19 nt, Artificial Sequence
  Description of Artificial Sequence: Synthetic oligonucleotide
  Antisense strand to SEQ ID NO: 1188630
uggucaaggagagacaccu

SEQ ID NO: 1188632 - RNA, 19 nt, Artificial Sequence
  Description of Artificial Sequence: Synthetic oligonucleotide
  Sense strand starting at position 2281 of SEQ ID NO: 916846
aguaucuaguagucacuua

SEQ ID NO: 1188633 - RNA, 19 nt, Artificial Sequence
  Description of Artificial Sequence: Synthetic oligonucleotide
  Antisense strand to SEQ ID NO: 1188632
uaagugacuacuagauacu

SEQ ID NO: 1188634 - RNA, 19 nt, Artificial Sequence
  Description of Artificial Sequence: Synthetic oligonucleotide
  Sense strand starting at position 2312 of SEQ ID NO: 916846
aaacgcgaaugcuugauaa

SEQ ID NO: 1188635 - RNA, 19 nt, Artificial Sequence
  Description of Artificial Sequence: Synthetic oligonucleotide
  Antisense strand to SEQ ID NO: 1188634
uuaucaagcauucgcguuu

SEQ ID NO: 1188636 - RNA, 19 nt, Artificial Sequence
  Description of Artificial Sequence: Synthetic oligonucleotide
  Sense strand starting at position 2314 of SEQ ID NO: 916846
acgcgaaugcuugauaaua

SEQ ID NO: 1188637 - RNA, 19 nt, Artificial Sequence
  Description of Artificial Sequence: Synthetic oligonucleotide
  Antisense strand to SEQ ID NO: 1188636
uauuaucaagcauucgcgu

SEQ ID NO: 1188638 - RNA, 19 nt, Artificial Sequence
  Description of Artificial Sequence: Synthetic oligonucleotide
  Sense strand starting at position 2338 of SEQ ID NO: 916846
agguguuggaguuacaaca

SEQ ID NO: 1188639 - RNA, 19 nt, Artificial Sequence
  Description of Artificial Sequence: Synthetic oligonucleotide
  Antisense strand to SEQ ID NO: 1188638
uguuguaacuccaacaccu

SEQ ID NO: 1188640 - RNA, 19 nt, Artificial Sequence
  Description of Artificial Sequence: Synthetic oligonucleotide
  Sense strand starting at position 2410 of SEQ ID NO: 916846
aguuccauccauugacauu

SEQ ID NO: 1188641 - RNA, 19 nt, Artificial Sequence
  Description of Artificial Sequence: Synthetic oligonucleotide
  Antisense strand to SEQ ID NO: 1188640
aaugucaauggauggaacu

SEQ ID NO: 1188642 - RNA, 19 nt, Artificial Sequence
  Description of Artificial Sequence: Synthetic oligonucleotide
  Sense strand starting at position 2507 of SEQ ID NO: 916846
acagcuugccgcguuauca

SEQ ID NO: 1188643 - RNA, 19 nt, Artificial Sequence
  Description of Artificial Sequence: Synthetic oligonucleotide
  Antisense strand to SEQ ID NO: 1188642
ugauaacgcggcaagcugu

SEQ ID NO: 1188644 - RNA, 19 nt, Artificial Sequence
  Description of Artificial Sequence: Synthetic oligonucleotide
  Sense strand starting at position 2517 of SEQ ID NO: 916846
gcguuaucacaguaaucua

SEQ ID NO: 1188645 - RNA, 19 nt, Artificial Sequence
  Description of Artificial Sequence: Synthetic oligonucleotide
  Antisense strand to SEQ ID NO: 1188644
uagauuacugugauaacgc

SEQ ID NO: 1188646 - RNA, 19 nt, Artificial Sequence
  Description of Artificial Sequence: Synthetic oligonucleotide
  Sense strand starting at position 2534 of SEQ ID NO: 916846
uacagaacacguugaaaca

SEQ ID NO: 1188647 - RNA, 19 nt, Artificial Sequence
  Description of Artificial Sequence: Synthetic oligonucleotide
  Antisense strand to SEQ ID NO: 1188646
uguuucaacguguucugua

SEQ ID NO: 1188648 - RNA, 19 nt, Artificial Sequence
  Description of Artificial Sequence: Synthetic oligonucleotide
  Sense strand starting at position 2564 of SEQ ID NO: 916846
agauguuacagcgaugaac

SEQ ID NO: 1188649 - RNA, 19 nt, Artificial Sequence
  Description of Artificial Sequence: Synthetic oligonucleotide
  Antisense strand to SEQ ID NO: 1188648
guucaucgcuguaacaucu

SEQ ID NO: 1188650 - RNA, 19 nt, Artificial Sequence
  Description of Artificial Sequence: Synthetic oligonucleotide
  Sense strand starting at position 2566 of SEQ ID NO: 916846
auguuacagcgaugaacua

SEQ ID NO: 1188651 - RNA, 19 nt, Artificial Sequence
  Description of Artificial Sequence: Synthetic oligonucleotide
  Antisense strand to SEQ ID NO: 1188650
uaguucaucgcuguaacau

SEQ ID NO: 1188652 - RNA, 19 nt, Artificial Sequence
  Description of Artificial Sequence: Synthetic oligonucleotide
  Sense strand starting at position 2683 of SEQ ID NO: 916846
gggagaguuuaauagggau

SEQ ID NO: 1188653 - RNA, 19 nt, Artificial Sequence
  Description of Artificial Sequence: Synthetic oligonucleotide
  Antisense strand to SEQ ID NO: 1188652
aucccuauuaaacucuccc

SEQ ID NO: 1188654 - RNA, 19 nt, Artificial Sequence
  Description of Artificial Sequence: Synthetic oligonucleotide
  Sense strand starting at position 2779 of SEQ ID NO: 916846
guaccuguucccuagaugu

SEQ ID NO: 1188655 - RNA, 19 nt, Artificial Sequence
  Description of Artificial Sequence: Synthetic oligonucleotide
  Antisense strand to SEQ ID NO: 1188654
acaucuagggaacagguac

SEQ ID NO: 1188656 - RNA, 19 nt, Artificial Sequence
  Description of Artificial Sequence: Synthetic oligonucleotide
  Sense strand starting at position 2781 of SEQ ID NO: 916846
accuguucccuagauguaa

SEQ ID NO: 1188657 - RNA, 19 nt, Artificial Sequence
  Description of Artificial Sequence: Synthetic oligonucleotide
  Antisense strand to SEQ ID NO: 1188656
uuacaucuagggaacaggu

SEQ ID NO: 1188658 - RNA, 19 nt, Artificial Sequence
  Description of Artificial Sequence: Synthetic oligonucleotide
  Sense strand starting at position 3254 of SEQ ID NO: 916846
ucaggugucugguucugga

SEQ ID NO: 1188659 - RNA, 19 nt, Artificial Sequence
  Description of Artificial Sequence: Synthetic oligonucleotide
  Antisense strand to SEQ ID NO: 1188658
uccagaaccagacaccuga

SEQ ID NO: 1188660 - RNA, 19 nt, Artificial Sequence
  Description of Artificial Sequence: Synthetic oligonucleotide
  Sense strand starting at position 3288 of SEQ ID NO: 916846
ccuugcagagucuaugaga

SEQ ID NO: 1188661 - RNA, 19 nt, Artificial Sequence
  Description of Artificial Sequence: Synthetic oligonucleotide
  Antisense strand to SEQ ID NO: 1188660
ucucauagacucugcaagg

SEQ ID NO: 1188662 - RNA, 19 nt, Artificial Sequence
  Description of Artificial Sequence: Synthetic oligonucleotide
  Sense strand starting at position 3304 of SEQ ID NO: 916846
agaacucaaugagauaaug

SEQ ID NO: 1188663 - RNA, 19 nt, Artificial Sequence
  Description of Artificial Sequence: Synthetic oligonucleotide
  Antisense strand to SEQ ID NO: 1188662
cauuaucucauugaguucu

SEQ ID NO: 1188664 - RNA, 19 nt, Artificial Sequence
  Description of Artificial Sequence: Synthetic oligonucleotide
  Sense strand starting at position 3754 of SEQ ID NO: 916846
ccuacagucccaggaagaa

SEQ ID NO: 1188665 - RNA, 19 nt, Artificial Sequence
  Description of Artificial Sequence: Synthetic oligonucleotide
  Antisense strand to SEQ ID NO: 1188664
uucuuccugggacuguagg

SEQ ID NO: 1188666 - RNA, 19 nt, Artificial Sequence
  Description of Artificial Sequence: Synthetic oligonucleotide
  Sense strand starting at position 3863 of SEQ ID NO: 916846
gacugaggagucugaucuu

SEQ ID NO: 1188667 - RNA, 19 nt, Artificial Sequence
  Description of Artificial Sequence: Synthetic oligonucleotide
  Antisense strand to SEQ ID NO: 1188666
aagaucagacuccucaguc

SEQ ID NO: 1188668 - RNA, 19 nt, Artificial Sequence
  Description of Artificial Sequence: Synthetic oligonucleotide
  Sense strand starting at position 3866 of SEQ ID NO: 916846
ugaggagucugaucuuaug

SEQ ID NO: 1188669 - RNA, 19 nt, Artificial Sequence
  Description of Artificial Sequence: Synthetic oligonucleotide
  Antisense strand to SEQ ID NO: 1188668
cauaagaucagacuccuca

SEQ ID NO: 1188670 - RNA, 19 nt, Artificial Sequence
  Description of Artificial Sequence: Synthetic oligonucleotide
  Sense strand starting at position 3872 of SEQ ID NO: 916846
gucugaucuuauguagaca

SEQ ID NO: 1188671 - RNA, 19 nt, Artificial Sequence
  Description of Artificial Sequence: Synthetic oligonucleotide
  Antisense strand to SEQ ID NO: 1188670
ugucuacauaagaucagac

SEQ ID NO: 1188672 - RNA, 19 nt, Artificial Sequence
  Description of Artificial Sequence: Synthetic oligonucleotide
  Sense strand starting at position 3891 of SEQ ID NO: 916846
gagguagucacugaagggu

SEQ ID NO: 1188673 - RNA, 19 nt, Artificial Sequence
  Description of Artificial Sequence: Synthetic oligonucleotide
  Antisense strand to SEQ ID NO: 1188672
acccuucagugacuaccuc

SEQ ID NO: 1188674 - RNA, 19 nt, Artificial Sequence
  Description of Artificial Sequence: Synthetic oligonucleotide
  Sense strand starting at position 372 of SEQ ID NO: 916847
ccugcucccuugucacaua

SEQ ID NO: 1188675 - RNA, 19 nt, Artificial Sequence
  Description of Artificial Sequence: Synthetic oligonucleotide
  Antisense strand to SEQ ID NO: 1188674
uaugugacaagggagcagg

SEQ ID NO: 1188676 - RNA, 19 nt, Artificial Sequence
  Description of Artificial Sequence: Synthetic oligonucleotide
  Sense strand starting at position 375 of SEQ ID NO: 916847
gcucccuugucacauacua

SEQ ID NO: 1188677 - RNA, 19 nt, Artificial Sequence
  Description of Artificial Sequence: Synthetic oligonucleotide
  Antisense strand to SEQ ID NO: 1188676
uaguaugugacaagggagc

SEQ ID NO: 1188678 - RNA, 19 nt, Artificial Sequence
  Description of Artificial Sequence: Synthetic oligonucleotide
  Sense strand starting at position 1057 of SEQ ID NO: 916847
ccgagauccugcugccaga

SEQ ID NO: 1188679 - RNA, 19 nt, Artificial Sequence
  Description of Artificial Sequence: Synthetic oligonucleotide
  Antisense strand to SEQ ID NO: 1188678
ucuggcagcaggaucucgg

SEQ ID NO: 1188680 - RNA, 19 nt, Artificial Sequence
  Description of Artificial Sequence: Synthetic oligonucleotide
  Sense strand starting at position 1073 of SEQ ID NO: 916847
agacucggcucuccaagaa

SEQ ID NO: 1188681 - RNA, 19 nt, Artificial Sequence
  Description of Artificial Sequence: Synthetic oligonucleotide
  Antisense strand to SEQ ID NO: 1188680
uucuuggagagccgagucu

SEQ ID NO: 1188682 - RNA, 19 nt, Artificial Sequence
  Description of Artificial Sequence: Synthetic oligonucleotide
  Sense strand starting at position 1158 of SEQ ID NO: 916847
ugcagauucucugccuacu

SEQ ID NO: 1188683 - RNA, 19 nt, Artificial Sequence
  Description of Artificial Sequence: Synthetic oligonucleotide
  Antisense strand to SEQ ID NO: 1188682
aguaggcagagaaucugca

SEQ ID NO: 1188684 - RNA, 19 nt, Artificial Sequence
  Description of Artificial Sequence: Synthetic oligonucleotide
  Sense strand starting at position 1215 of SEQ ID NO: 916847
uuccaagucccugagaugu

SEQ ID NO: 1188685 - RNA, 19 nt, Artificial Sequence
  Description of Artificial Sequence: Synthetic oligonucleotide
  Antisense strand to SEQ ID NO: 1188684
acaucucagggacuuggaa

SEQ ID NO: 1188686 - RNA, 19 nt, Artificial Sequence
  Description of Artificial Sequence: Synthetic oligonucleotide
  Sense strand starting at position 1301 of SEQ ID NO: 916847
gcaagcauugccuagguca

SEQ ID NO: 1188687 - RNA, 19 nt, Artificial Sequence
  Description of Artificial Sequence: Synthetic oligonucleotide
  Antisense strand to SEQ ID NO: 1188686
ugaccuaggcaaugcuugc

SEQ ID NO: 1188688 - RNA, 19 nt, Artificial Sequence
  Description of Artificial Sequence: Synthetic oligonucleotide
  Sense strand starting at position 1303 of SEQ ID NO: 916847
aagcauugccuaggucagu

SEQ ID NO: 1188689 - RNA, 19 nt, Artificial Sequence
  Description of Artificial Sequence: Synthetic oligonucleotide
  Antisense strand to SEQ ID NO: 1188688
acugaccuaggcaaugcuu

SEQ ID NO: 1188690 - RNA, 19 nt, Artificial Sequence
  Description of Artificial Sequence: Synthetic oligonucleotide
  Sense strand starting at position 1427 of SEQ ID NO: 916847
agaagagucauuggaaguc

SEQ ID NO: 1188691 - RNA, 19 nt, Artificial Sequence
  Description of Artificial Sequence: Synthetic oligonucleotide
  Antisense strand to SEQ ID NO: 1188690
gacuuccaaugacucuucu

SEQ ID NO: 1188692 - RNA, 19 nt, Artificial Sequence
  Description of Artificial Sequence: Synthetic oligonucleotide
  Sense strand starting at position 2530 of SEQ ID NO: 916847
gagggagagucucuauguu

SEQ ID NO: 1188693 - RNA, 19 nt, Artificial Sequence
  Description of Artificial Sequence: Synthetic oligonucleotide
  Antisense strand to SEQ ID NO: 1188692
aacauagagacucucccuc

SEQ ID NO: 1188694 - RNA, 19 nt, Artificial Sequence
  Description of Artificial Sequence: Synthetic oligonucleotide
  Sense strand starting at position 2602 of SEQ ID NO: 916847
uguggaaauguguagauau

SEQ ID NO: 1188695 - RNA, 19 nt, Artificial Sequence
  Description of Artificial Sequence: Synthetic oligonucleotide
  Antisense strand to SEQ ID NO: 1188694
auaucuacacauuuccaca

SEQ ID NO: 1188696 - RNA, 19 nt, Artificial Sequence
  Description of Artificial Sequence: Synthetic oligonucleotide
  Sense strand starting at position 2744 of SEQ ID NO: 916847
gcugguuccucuuggguca

SEQ ID NO: 1188697 - RNA, 19 nt, Artificial Sequence
  Description of Artificial Sequence: Synthetic oligonucleotide
  Antisense strand to SEQ ID NO: 1188696
ugacccaagaggaaccagc

SEQ ID NO: 1188698 - RNA, 19 nt, Artificial Sequence
  Description of Artificial Sequence: Synthetic oligonucleotide
  Sense strand starting at position 2884 of SEQ ID NO: 916847
guccuacugacauggaaug

SEQ ID NO: 1188699 - RNA, 19 nt, Artificial Sequence
  Description of Artificial Sequence: Synthetic oligonucleotide
  Antisense strand to SEQ ID NO: 1188698
cauuccaugucaguaggac

SEQ ID NO: 1188700 - RNA, 19 nt, Artificial Sequence
  Description of Artificial Sequence: Synthetic oligonucleotide
  Sense strand starting at position 3078 of SEQ ID NO: 916847
ggugaaauggcuuacgccu

SEQ ID NO: 1188701 - RNA, 19 nt, Artificial Sequence
  Description of Artificial Sequence: Synthetic oligonucleotide
  Antisense strand to SEQ ID NO: 1188700
aggcguaagccauuucacc

SEQ ID NO: 1188702 - RNA, 19 nt, Artificial Sequence
  Description of Artificial Sequence: Synthetic oligonucleotide
  Sense strand starting at position 3413 of SEQ ID NO: 916847
aagcacauauguggucaaa

SEQ ID NO: 1188703 - RNA, 19 nt, Artificial Sequence
  Description of Artificial Sequence: Synthetic oligonucleotide
  Antisense strand to SEQ ID NO: 1188702
uuugaccacauaugugcuu

SEQ ID NO: 1188704 - RNA, 19 nt, Artificial Sequence
  Description of Artificial Sequence: Synthetic oligonucleotide
  Sense strand starting at position 3415 of SEQ ID NO: 916847
gcacauauguggucaaacu

SEQ ID NO: 1188705 - RNA, 19 nt, Artificial Sequence
  Description of Artificial Sequence: Synthetic oligonucleotide
  Antisense strand to SEQ ID NO: 1188704
aguuugaccacauaugugc

SEQ ID NO: 1188706 - RNA, 19 nt, Artificial Sequence
  Description of Artificial Sequence: Synthetic oligonucleotide
  Sense strand starting at position 3467 of SEQ ID NO: 916847
ucccuaugguuccuaaaga

SEQ ID NO: 1188707 - RNA, 19 nt, Artificial Sequence
  Description of Artificial Sequence: Synthetic oligonucleotide
  Antisense strand to SEQ ID NO: 1188706
ucuuuaggaaccauaggga

SEQ ID NO: 1188708 - RNA, 19 nt, Artificial Sequence
  Description of Artificial Sequence: Synthetic oligonucleotide
  Sense strand starting at position 3468 of SEQ ID NO: 916847
cccuaugguuccuaaagaa

SEQ ID NO: 1188709 - RNA, 19 nt, Artificial Sequence
  Description of Artificial Sequence: Synthetic oligonucleotide
  Antisense strand to SEQ ID NO: 1188708
uucuuuaggaaccauaggg

SEQ ID NO: 1188710 - RNA, 19 nt, Artificial Sequence
  Description of Artificial Sequence: Synthetic oligonucleotide
  Sense strand starting at position 3501 of SEQ ID NO: 916847
acuccagaauccugcuguu

SEQ ID NO: 1188711 - RNA, 19 nt, Artificial Sequence
  Description of Artificial Sequence: Synthetic oligonucleotide
  Antisense strand to SEQ ID NO: 1188710
aacagcaggauucuggagu

SEQ ID NO: 1188712 - RNA, 19 nt, Artificial Sequence
  Description of Artificial Sequence: Synthetic oligonucleotide
  Sense strand starting at position 3513 of SEQ ID NO: 916847
ugcuguuugccaugauccu

SEQ ID NO: 1188713 - RNA, 19 nt, Artificial Sequence
  Description of Artificial Sequence: Synthetic oligonucleotide
  Antisense strand to SEQ ID NO: 1188712
aggaucauggcaaacagca

SEQ ID NO: 1188714 - RNA, 19 nt, Artificial Sequence
  Description of Artificial Sequence: Synthetic oligonucleotide
  Sense strand starting at position 3650 of SEQ ID NO: 916847
cuccuauuguuccgcagaa

SEQ ID NO: 1188715 - RNA, 19 nt, Artificial Sequence
  Description of Artificial Sequence: Synthetic oligonucleotide
  Antisense strand to SEQ ID NO: 1188714
uucugcggaacaauaggag

SEQ ID NO: 1188716 - RNA, 19 nt, Artificial Sequence
  Description of Artificial Sequence: Synthetic oligonucleotide
  Sense strand starting at position 3651 of SEQ ID NO: 916847
uccuauuguuccgcagaag

SEQ ID NO: 1188717 - RNA, 19 nt, Artificial Sequence
  Description of Artificial Sequence: Synthetic oligonucleotide
  Antisense strand to SEQ ID NO: 1188716
cuucugcggaacaauagga

SEQ ID NO: 1188718 - RNA, 19 nt, Artificial Sequence
  Description of Artificial Sequence: Synthetic oligonucleotide
  Sense strand starting at position 3652 of SEQ ID NO: 916847
ccuauuguuccgcagaagu

SEQ ID NO: 1188719 - RNA, 19 nt, Artificial Sequence
  Description of Artificial Sequence: Synthetic oligonucleotide
  Antisense strand to SEQ ID NO: 1188718
acuucugcggaacaauagg

SEQ ID NO: 1188720 - RNA, 19 nt, Artificial Sequence
  Description of Artificial Sequence: Synthetic oligonucleotide
  Sense strand starting at position 3654 of SEQ ID NO: 916847
uauuguuccgcagaagucu

SEQ ID NO: 1188721 - RNA, 19 nt, Artificial Sequence
  Description of Artificial Sequence: Synthetic oligonucleotide
  Antisense strand to SEQ ID NO: 1188720
agacuucugcggaacaaua

SEQ ID NO: 1188722 - RNA, 19 nt, Artificial Sequence
  Description of Artificial Sequence: Synthetic oligonucleotide
  Sense strand starting at position 3667 of SEQ ID NO: 916847
aagucuuaucugggcgcua

SEQ ID NO: 1188723 - RNA, 19 nt, Artificial Sequence
  Description of Artificial Sequence: Synthetic oligonucleotide
  Antisense strand to SEQ ID NO: 1188722
uagcgcccagauaagacuu

SEQ ID NO: 1188724 - RNA, 19 nt, Artificial Sequence
  Description of Artificial Sequence: Synthetic oligonucleotide
  Sense strand starting at position 3669 of SEQ ID NO: 916847
gucuuaucugggcgcuaca

SEQ ID NO: 1188725 - RNA, 19 nt, Artificial Sequence
  Description of Artificial Sequence: Synthetic oligonucleotide
  Antisense strand to SEQ ID NO: 1188724
uguagcgcccagauaagac

SEQ ID NO: 1188726 - RNA, 19 nt, Artificial Sequence
  Description of Artificial Sequence: Synthetic oligonucleotide
  Sense strand starting at position 3712 of SEQ ID NO: 916847
ucccuauuaucggcuaaag

SEQ ID NO: 1188727 - RNA, 19 nt, Artificial Sequence
  Description of Artificial Sequence: Synthetic oligonucleotide
  Antisense strand to SEQ ID NO: 1188726
cuuuagccgauaauaggga

SEQ ID NO: 1188728 - RNA, 19 nt, Artificial Sequence
  Description of Artificial Sequence: Synthetic oligonucleotide
  Sense strand starting at position 3784 of SEQ ID NO: 916847
gcagucuauugucuguuga

SEQ ID NO: 1188729 - RNA, 19 nt, Artificial Sequence
  Description of Artificial Sequence: Synthetic oligonucleotide
  Antisense strand to SEQ ID NO: 1188728
ucaacagacaauagacugc

SEQ ID NO: 1188730 - RNA, 19 nt, Artificial Sequence
  Description of Artificial Sequence: Synthetic oligonucleotide
  Sense strand starting at position 3788 of SEQ ID NO: 916847
ucuauugucuguugaggaa

SEQ ID NO: 1188731 - RNA, 19 nt, Artificial Sequence
  Description of Artificial Sequence: Synthetic oligonucleotide
  Antisense strand to SEQ ID NO: 1188730
uuccucaacagacaauaga

SEQ ID NO: 1188732 - RNA, 19 nt, Artificial Sequence
  Description of Artificial Sequence: Synthetic oligonucleotide
  Sense strand starting at position 3848 of SEQ ID NO: 916847
aguggacucggagaugcau

SEQ ID NO: 1188733 - RNA, 19 nt, Artificial Sequence
  Description of Artificial Sequence: Synthetic oligonucleotide
  Antisense strand to SEQ ID NO: 1188732
augcaucuccgaguccacu

SEQ ID NO: 1188734 - RNA, 19 nt, Artificial Sequence
  Description of Artificial Sequence: Synthetic oligonucleotide
  Sense strand starting at position 3850 of SEQ ID NO: 916847
uggacucggagaugcauua

SEQ ID NO: 1188735 - RNA, 19 nt, Artificial Sequence
  Description of Artificial Sequence: Synthetic oligonucleotide
  Antisense strand to SEQ ID NO: 1188734
uaaugcaucuccgagucca

SEQ ID NO: 1188736 - RNA, 19 nt, Artificial Sequence
  Description of Artificial Sequence: Synthetic oligonucleotide
  Sense strand starting at position 3889 of SEQ ID NO: 916847
uggacauggcugugugaau

SEQ ID NO: 1188737 - RNA, 19 nt, Artificial Sequence
  Description of Artificial Sequence: Synthetic oligonucleotide
  Antisense strand to SEQ ID NO: 1188736
auucacacagccaugucca

SEQ ID NO: 1188738 - RNA, 19 nt, Artificial Sequence
  Description of Artificial Sequence: Synthetic oligonucleotide
  Sense strand starting at position 3890 of SEQ ID NO: 916847
ggacauggcugugugaaug

SEQ ID NO: 1188739 - RNA, 19 nt, Artificial Sequence
  Description of Artificial Sequence: Synthetic oligonucleotide
  Antisense strand to SEQ ID NO: 1188738
cauucacacagccaugucc

SEQ ID NO: 1188740 - RNA, 19 nt, Artificial Sequence
  Description of Artificial Sequence: Synthetic oligonucleotide
  Sense strand starting at position 4 of SEQ ID NO: 916848
uuggucacuuuggauauuu

SEQ ID NO: 1188741 - RNA, 19 nt, Artificial Sequence
  Description of Artificial Sequence: Synthetic oligonucleotide
  Antisense strand to SEQ ID NO: 1188740
aaauauccaaagugaccaa

SEQ ID NO: 1188742 - RNA, 19 nt, Artificial Sequence
  Description of Artificial Sequence: Synthetic oligonucleotide
  Sense strand starting at position 36 of SEQ ID NO: 916848
auauguuacggagagcuuu

SEQ ID NO: 1188743 - RNA, 19 nt, Artificial Sequence
  Description of Artificial Sequence: Synthetic oligonucleotide
  Antisense strand to SEQ ID NO: 1188742
aaagcucuccguaacauau

SEQ ID NO: 1188744 - RNA, 19 nt, Artificial Sequence
  Description of Artificial Sequence: Synthetic oligonucleotide
  Sense strand starting at position 162 of SEQ ID NO: 916848
gcauguggaguugaauaua

SEQ ID NO: 1188745 - RNA, 19 nt, Artificial Sequence
  Description of Artificial Sequence: Synthetic oligonucleotide
  Antisense strand to SEQ ID NO: 1188744
uauauucaacuccacaugc

SEQ ID NO: 1188746 - RNA, 19 nt, Artificial Sequence
  Description of Artificial Sequence: Synthetic oligonucleotide
  Sense strand starting at position 929 of SEQ ID NO: 916848
guaacuugacgauggucua

SEQ ID NO: 1188747 - RNA, 19 nt, Artificial Sequence
  Description of Artificial Sequence: Synthetic oligonucleotide
  Antisense strand to SEQ ID NO: 1188746
uagaccaucgucaaguuac

SEQ ID NO: 1188748 - RNA, 19 nt, Artificial Sequence
  Description of Artificial Sequence: Synthetic oligonucleotide
  Sense strand starting at position 1051 of SEQ ID NO: 916848
ucagguuaggcuggaucaa

SEQ ID NO: 1188749 - RNA, 19 nt, Artificial Sequence
  Description of Artificial Sequence: Synthetic oligonucleotide
  Antisense strand to SEQ ID NO: 1188748
uugauccagccuaaccuga

SEQ ID NO: 1188750 - RNA, 19 nt, Artificial Sequence
  Description of Artificial Sequence: Synthetic oligonucleotide
  Sense strand starting at position 1134 of SEQ ID NO: 916848
ugguccguggccuaucaaa

SEQ ID NO: 1188751 - RNA, 19 nt, Artificial Sequence
  Description of Artificial Sequence: Synthetic oligonucleotide
  Antisense strand to SEQ ID NO: 1188750
uuugauaggccacggacca

SEQ ID NO: 1188752 - RNA, 19 nt, Artificial Sequence
  Description of Artificial Sequence: Synthetic oligonucleotide
  Sense strand starting at position 1339 of SEQ ID NO: 916848
ggucaagggcggugacaau

SEQ ID NO: 1188753 - RNA, 19 nt, Artificial Sequence
  Description of Artificial Sequence: Synthetic oligonucleotide
  Antisense strand to SEQ ID NO: 1188752
auugucaccgcccuugacc

SEQ ID NO: 1188754 - RNA, 19 nt, Artificial Sequence
  Description of Artificial Sequence: Synthetic oligonucleotide
  Sense strand starting at position 1997 of SEQ ID NO: 916848
gcagucucggcgagcuaga

SEQ ID NO: 1188755 - RNA, 19 nt, Artificial Sequence
  Description of Artificial Sequence: Synthetic oligonucleotide
  Antisense strand to SEQ ID NO: 1188754
ucuagcucgccgagacugc

SEQ ID NO: 1188756 - RNA, 19 nt, Artificial Sequence
  Description of Artificial Sequence: Synthetic oligonucleotide
  Sense strand starting at position 2388 of SEQ ID NO: 916848
cuggcaaccguauggaauu

SEQ ID NO: 1188757 - RNA, 19 nt, Artificial Sequence
  Description of Artificial Sequence: Synthetic oligonucleotide
  Antisense strand to SEQ ID NO: 1188756
aauuccauacgguugccag

SEQ ID NO: 1188758 - RNA, 19 nt, Artificial Sequence
  Description of Artificial Sequence: Synthetic oligonucleotide
  Sense strand starting at position 2643 of SEQ ID NO: 916848
ggucuacuucccuggcauu

SEQ ID NO: 1188759 - RNA, 19 nt, Artificial Sequence
  Description of Artificial Sequence: Synthetic oligonucleotide
  Antisense strand to SEQ ID NO: 1188758
aaugccagggaaguagacc

SEQ ID NO: 1188760 - RNA, 19 nt, Artificial Sequence
  Description of Artificial Sequence: Synthetic oligonucleotide
  Sense strand starting at position 2644 of SEQ ID NO: 916848
gucuacuucccuggcauua

SEQ ID NO: 1188761 - RNA, 19 nt, Artificial Sequence
  Description of Artificial Sequence: Synthetic oligonucleotide
  Antisense strand to SEQ ID NO: 1188760
uaaugccagggaaguagac

SEQ ID NO: 1188762 - RNA, 19 nt, Artificial Sequence
  Description of Artificial Sequence: Synthetic oligonucleotide
  Sense strand starting at position 2656 of SEQ ID NO: 916848
ggcauuaaauguguuuguu

SEQ ID NO: 1188763 - RNA, 19 nt, Artificial Sequence
  Description of Artificial Sequence: Synthetic oligonucleotide
  Antisense strand to SEQ ID NO: 1188762
aacaaacacauuuaaugcc

SEQ ID NO: 1188764 - RNA, 19 nt, Artificial Sequence
  Description of Artificial Sequence: Synthetic oligonucleotide
  Sense strand starting at position 2662 of SEQ ID NO: 916848
aaauguguuuguucuggag

SEQ ID NO: 1188765 - RNA, 19 nt, Artificial Sequence
  Description of Artificial Sequence: Synthetic oligonucleotide
  Antisense strand to SEQ ID NO: 1188764
cuccagaacaaacacauuu

SEQ ID NO: 1188766 - RNA, 19 nt, Artificial Sequence
  Description of Artificial Sequence: Synthetic oligonucleotide
  Sense strand starting at position 2666 of SEQ ID NO: 916848
guguuuguucuggagcaau

SEQ ID NO: 1188767 - RNA, 19 nt, Artificial Sequence
  Description of Artificial Sequence: Synthetic oligonucleotide
  Antisense strand to SEQ ID NO: 1188766
auugcuccagaacaaacac

SEQ ID NO: 1188768 - RNA, 19 nt, Artificial Sequence
  Description of Artificial Sequence: Synthetic oligonucleotide
  Sense strand starting at position 2701 of SEQ ID NO: 916848
ccauuucuauagcuaguuu

SEQ ID NO: 1188769 - RNA, 19 nt, Artificial Sequence
  Description of Artificial Sequence: Synthetic oligonucleotide
  Antisense strand to SEQ ID NO: 1188768
aaacuagcuauagaaaugg

SEQ ID NO: 1188770 - RNA, 19 nt, Artificial Sequence
  Description of Artificial Sequence: Synthetic oligonucleotide
  Sense strand starting at position 2774 of SEQ ID NO: 916848
auuugauucuuugaggaca

SEQ ID NO: 1188771 - RNA, 19 nt, Artificial Sequence
  Description of Artificial Sequence: Synthetic oligonucleotide
  Antisense strand to SEQ ID NO: 1188770
uguccucaaagaaucaaau

SEQ ID NO: 1188772 - RNA, 19 nt, Artificial Sequence
  Description of Artificial Sequence: Synthetic oligonucleotide
  Sense strand starting at position 2795 of SEQ ID NO: 916848
gaacauaucucugugguga

SEQ ID NO: 1188773 - RNA, 19 nt, Artificial Sequence
  Description of Artificial Sequence: Synthetic oligonucleotide
  Antisense strand to SEQ ID NO: 1188772
ucaccacagagauauguuc

SEQ ID NO: 1188774 - RNA, 19 nt, Artificial Sequence
  Description of Artificial Sequence: Synthetic oligonucleotide
  Sense strand starting at position 2796 of SEQ ID NO: 916848
aacauaucucuguggugaa

SEQ ID NO: 1188775 - RNA, 19 nt, Artificial Sequence
  Description of Artificial Sequence: Synthetic oligonucleotide
  Antisense strand to SEQ ID NO: 1188774
uucaccacagagauauguu

SEQ ID NO: 1188776 - RNA, 19 nt, Artificial Sequence
  Description of Artificial Sequence: Synthetic oligonucleotide
  Sense strand starting at position 2876 of SEQ ID NO: 916848
acucauguaacggguaauu

SEQ ID NO: 1188777 - RNA, 19 nt, Artificial Sequence
  Description of Artificial Sequence: Synthetic oligonucleotide
  Antisense strand to SEQ ID NO: 1188776
aauuacccguuacaugagu

SEQ ID NO: 1188778 - RNA, 19 nt, Artificial Sequence
  Description of Artificial Sequence: Synthetic oligonucleotide
  Sense strand starting at position 2922 of SEQ ID NO: 916848
ccugauuugugauucggca

SEQ ID NO: 1188779 - RNA, 19 nt, Artificial Sequence
  Description of Artificial Sequence: Synthetic oligonucleotide
  Antisense strand to SEQ ID NO: 1188778
ugccgaaucacaaaucagg

SEQ ID NO: 1188780 - RNA, 19 nt, Artificial Sequence
  Description of Artificial Sequence: Synthetic oligonucleotide
  Sense strand starting at position 2926 of SEQ ID NO: 916848
auuugugauucggcaggca

SEQ ID NO: 1188781 - RNA, 19 nt, Artificial Sequence
  Description of Artificial Sequence: Synthetic oligonucleotide
  Antisense strand to SEQ ID NO: 1188780
ugccugccgaaucacaaau

SEQ ID NO: 1188782 - RNA, 19 nt, Artificial Sequence
  Description of Artificial Sequence: Synthetic oligonucleotide
  Sense strand starting at position 2928 of SEQ ID NO: 916848
uugugauucggcaggcagu

SEQ ID NO: 1188783 - RNA, 19 nt, Artificial Sequence
  Description of Artificial Sequence: Synthetic oligonucleotide
  Antisense strand to SEQ ID NO: 1188782
acugccugccgaaucacaa

SEQ ID NO: 1188784 - RNA, 19 nt, Artificial Sequence
  Description of Artificial Sequence: Synthetic oligonucleotide
  Sense strand starting at position 2983 of SEQ ID NO: 916848
aggauagcuucucuccuga

SEQ ID NO: 1188785 - RNA, 19 nt, Artificial Sequence
  Description of Artificial Sequence: Synthetic oligonucleotide
  Antisense strand to SEQ ID NO: 1188784
ucaggagagaagcuauccu

SEQ ID NO: 1188786 - RNA, 19 nt, Artificial Sequence
  Description of Artificial Sequence: Synthetic oligonucleotide
  Sense strand starting at position 2985 of SEQ ID NO: 916848
gauagcuucucuccugaga

SEQ ID NO: 1188787 - RNA, 19 nt, Artificial Sequence
  Description of Artificial Sequence: Synthetic oligonucleotide
  Antisense strand to SEQ ID NO: 1188786
ucucaggagagaagcuauc

SEQ ID NO: 1188788 - RNA, 19 nt, Artificial Sequence
  Description of Artificial Sequence: Synthetic oligonucleotide
  Sense strand starting at position 2988 of SEQ ID NO: 916848
agcuucucuccugagaauc

SEQ ID NO: 1188789 - RNA, 19 nt, Artificial Sequence
  Description of Artificial Sequence: Synthetic oligonucleotide
  Antisense strand to SEQ ID NO: 1188788
gauucucaggagagaagcu

SEQ ID NO: 1188790 - RNA, 19 nt, Artificial Sequence
  Description of Artificial Sequence: Synthetic oligonucleotide
  Sense strand starting at position 3093 of SEQ ID NO: 916848
uuaaacuguugagugaauu

SEQ ID NO: 1188791 - RNA, 19 nt, Artificial Sequence
  Description of Artificial Sequence: Synthetic oligonucleotide
  Antisense strand to SEQ ID NO: 1188790
aauucacucaacaguuuaa

SEQ ID NO: 1188792 - RNA, 19 nt, Artificial Sequence
  Description of Artificial Sequence: Synthetic oligonucleotide
  Sense strand starting at position 3094 of SEQ ID NO: 916848
uaaacuguugagugaauua

SEQ ID NO: 1188793 - RNA, 19 nt, Artificial Sequence
  Description of Artificial Sequence: Synthetic oligonucleotide
  Antisense strand to SEQ ID NO: 1188792
uaauucacucaacaguuua

SEQ ID NO: 1188794 - RNA, 19 nt, Artificial Sequence
  Description of Artificial Sequence: Synthetic oligonucleotide
  Sense strand starting at position 3099 of SEQ ID NO: 916848
uguugagugaauuaacagu

SEQ ID NO: 1188795 - RNA, 19 nt, Artificial Sequence
  Description of Artificial Sequence: Synthetic oligonucleotide
  Antisense strand to SEQ ID NO: 1188794
acuguuaauucacucaaca

SEQ ID NO: 1188796 - RNA, 19 nt, Artificial Sequence
  Description of Artificial Sequence: Synthetic oligonucleotide
  Sense strand starting at position 3106 of SEQ ID NO: 916848
ugaauuaacaguuguuggu

SEQ ID NO: 1188797 - RNA, 19 nt, Artificial Sequence
  Description of Artificial Sequence: Synthetic oligonucleotide
  Antisense strand to SEQ ID NO: 1188796
accaacaacuguuaauuca

SEQ ID NO: 1188798 - RNA, 19 nt, Artificial Sequence
  Description of Artificial Sequence: Synthetic oligonucleotide
  Sense strand starting at position 3188 of SEQ ID NO: 916848
ggcuaaagauaguuuguuu

SEQ ID NO: 1188799 - RNA, 19 nt, Artificial Sequence
  Description of Artificial Sequence: Synthetic oligonucleotide
  Antisense strand to SEQ ID NO: 1188798
aaacaaacuaucuuuagcc

SEQ ID NO: 1188800 - RNA, 19 nt, Artificial Sequence
  Description of Artificial Sequence: Synthetic oligonucleotide
  Sense strand starting at position 3339 of SEQ ID NO: 916848
gggacugcuaaagauguuu

SEQ ID NO: 1188801 - RNA, 19 nt, Artificial Sequence
  Description of Artificial Sequence: Synthetic oligonucleotide
  Antisense strand to SEQ ID NO: 1188800
aaacaucuuuagcaguccc

SEQ ID NO: 1188802 - RNA, 19 nt, Artificial Sequence
  Description of Artificial Sequence: Synthetic oligonucleotide
  Sense strand starting at position 3717 of SEQ ID NO: 916848
ccgucauucccaggcauca

SEQ ID NO: 1188803 - RNA, 19 nt, Artificial Sequence
  Description of Artificial Sequence: Synthetic oligonucleotide
  Antisense strand to SEQ ID NO: 1188802
ugaugccugggaaugacgg

SEQ ID NO: 1188804 - RNA, 19 nt, Artificial Sequence
  Description of Artificial Sequence: Synthetic oligonucleotide
  Sense strand starting at position 3750 of SEQ ID NO: 916848
gccuuuagaucugcagcaa

SEQ ID NO: 1188805 - RNA, 19 nt, Artificial Sequence
  Description of Artificial Sequence: Synthetic oligonucleotide
  Antisense strand to SEQ ID NO: 1188804
uugcugcagaucuaaaggc

SEQ ID NO: 1188806 - RNA, 19 nt, Artificial Sequence
  Description of Artificial Sequence: Synthetic oligonucleotide
  Sense strand starting at position 3751 of SEQ ID NO: 916848
ccuuuagaucugcagcaau

SEQ ID NO: 1188807 - RNA, 19 nt, Artificial Sequence
  Description of Artificial Sequence: Synthetic oligonucleotide
  Antisense strand to SEQ ID NO: 1188806
auugcugcagaucuaaagg

SEQ ID NO: 1188808 - RNA, 19 nt, Artificial Sequence
  Description of Artificial Sequence: Synthetic oligonucleotide
  Sense strand starting at position 3754 of SEQ ID NO: 916848
uuagaucugcagcaaugaa

SEQ ID NO: 1188809 - RNA, 19 nt, Artificial Sequence
  Description of Artificial Sequence: Synthetic oligonucleotide
  Antisense strand to SEQ ID NO: 1188808
uucauugcugcagaucuaa

SEQ ID NO: 1188810 - RNA, 19 nt, Artificial Sequence
  Description of Artificial Sequence: Synthetic oligonucleotide
  Sense strand starting at position 3794 of SEQ ID NO: 916848
gacaauauugcaggugaga

SEQ ID NO: 1188811 - RNA, 19 nt, Artificial Sequence
  Description of Artificial Sequence: Synthetic oligonucleotide
  Antisense strand to SEQ ID NO: 1188810
ucucaccugcaauauuguc

SEQ ID NO: 1188812 - RNA, 19 nt, Artificial Sequence
  Description of Artificial Sequence: Synthetic oligonucleotide
  Sense strand starting at position 3830 of SEQ ID NO: 916848
caugcuacgguauaguaaa

SEQ ID NO: 1188813 - RNA, 19 nt, Artificial Sequence
  Description of Artificial Sequence: Synthetic oligonucleotide
  Antisense strand to SEQ ID NO: 1188812
uuuacuauaccguagcaug

SEQ ID NO: 1188814 - RNA, 19 nt, Artificial Sequence
  Description of Artificial Sequence: Synthetic oligonucleotide
  Sense strand starting at position 3907 of SEQ ID NO: 916848
augagaagcaucugguucu

SEQ ID NO: 1188815 - RNA, 19 nt, Artificial Sequence
  Description of Artificial Sequence: Synthetic oligonucleotide
  Antisense strand to SEQ ID NO: 1188814
agaaccagaugcuucucau

SEQ ID NO: 1188816 - RNA, 19 nt, Artificial Sequence
  Description of Artificial Sequence: Synthetic oligonucleotide
  Sense strand starting at position 3913 of SEQ ID NO: 916848
agcaucugguucuuugaca

SEQ ID NO: 1188817 - RNA, 19 nt, Artificial Sequence
  Description of Artificial Sequence: Synthetic oligonucleotide
  Antisense strand to SEQ ID NO: 1188816
ugucaaagaaccagaugcu

SEQ ID NO: 1188818 - RNA, 19 nt, Artificial Sequence
  Description of Artificial Sequence: Synthetic oligonucleotide
  Sense strand starting at position 3933 of SEQ ID NO: 916848
uucccucuugcugagauga

SEQ ID NO: 1188819 - RNA, 19 nt, Artificial Sequence
  Description of Artificial Sequence: Synthetic oligonucleotide
  Antisense strand to SEQ ID NO: 1188818
ucaucucagcaagagggaa

SEQ ID NO: 1188820 - RNA, 19 nt, Artificial Sequence
  Description of Artificial Sequence: Synthetic oligonucleotide
  Sense strand starting at position 700 of SEQ ID NO: 916849
gacccuuaguccugagauc

SEQ ID NO: 1188821 - RNA, 19 nt, Artificial Sequence
  Description of Artificial Sequence: Synthetic oligonucleotide
  Antisense strand to SEQ ID NO: 1188820
gaucucaggacuaaggguc

SEQ ID NO: 1188822 - RNA, 19 nt, Artificial Sequence
  Description of Artificial Sequence: Synthetic oligonucleotide
  Sense strand starting at position 856 of SEQ ID NO: 916849
gagugugcucaagaagcca

SEQ ID NO: 1188823 - RNA, 19 nt, Artificial Sequence
  Description of Artificial Sequence: Synthetic oligonucleotide
  Antisense strand to SEQ ID NO: 1188822
uggcuucuugagcacacuc

SEQ ID NO: 1188824 - RNA, 19 nt, Artificial Sequence
  Description of Artificial Sequence: Synthetic oligonucleotide
  Sense strand starting at position 1018 of SEQ ID NO: 916849
uucuaaauuuagucugugu

SEQ ID NO: 1188825 - RNA, 19 nt, Artificial Sequence
  Description of Artificial Sequence: Synthetic oligonucleotide
  Antisense strand to SEQ ID NO: 1188824
acacagacuaaauuuagaa

SEQ ID NO: 1188826 - RNA, 19 nt, Artificial Sequence
  Description of Artificial Sequence: Synthetic oligonucleotide
  Sense strand starting at position 1020 of SEQ ID NO: 916849
cuaaauuuagucuguguau

SEQ ID NO: 1188827 - RNA, 19 nt, Artificial Sequence
  Description of Artificial Sequence: Synthetic oligonucleotide
  Antisense strand to SEQ ID NO: 1188826
auacacagacuaaauuuag

SEQ ID NO: 1188828 - RNA, 19 nt, Artificial Sequence
  Description of Artificial Sequence: Synthetic oligonucleotide
  Sense strand starting at position 1224 of SEQ ID NO: 916849
acuugaacuccugguaggu

SEQ ID NO: 1188829 - RNA, 19 nt, Artificial Sequence
  Description of Artificial Sequence: Synthetic oligonucleotide
  Antisense strand to SEQ ID NO: 1188828
accuaccaggaguucaagu

SEQ ID NO: 1188830 - RNA, 19 nt, Artificial Sequence
  Description of Artificial Sequence: Synthetic oligonucleotide
  Sense strand starting at position 1226 of SEQ ID NO: 916849
uugaacuccugguagguau

SEQ ID NO: 1188831 - RNA, 19 nt, Artificial Sequence
  Description of Artificial Sequence: Synthetic oligonucleotide
  Antisense strand to SEQ ID NO: 1188830
auaccuaccaggaguucaa

SEQ ID NO: 1188832 - RNA, 19 nt, Artificial Sequence
  Description of Artificial Sequence: Synthetic oligonucleotide
  Sense strand starting at position 1258 of SEQ ID NO: 916849
ggcaguuccuccucccgaa

SEQ ID NO: 1188833 - RNA, 19 nt, Artificial Sequence
  Description of Artificial Sequence: Synthetic oligonucleotide
  Antisense strand to SEQ ID NO: 1188832
uucgggaggaggaacugcc

SEQ ID NO: 1188834 - RNA, 19 nt, Artificial Sequence
  Description of Artificial Sequence: Synthetic oligonucleotide
  Sense strand starting at position 1431 of SEQ ID NO: 916849
caugaagauuuacggcauu

SEQ ID NO: 1188835 - RNA, 19 nt, Artificial Sequence
  Description of Artificial Sequence: Synthetic oligonucleotide
  Antisense strand to SEQ ID NO: 1188834
aaugccguaaaucuucaug

SEQ ID NO: 1188836 - RNA, 19 nt, Artificial Sequence
  Description of Artificial Sequence: Synthetic oligonucleotide
  Sense strand starting at position 1449 of SEQ ID NO: 916849
uuuguuacguaucuauaca

SEQ ID NO: 1188837 - RNA, 19 nt, Artificial Sequence
  Description of Artificial Sequence: Synthetic oligonucleotide
  Antisense strand to SEQ ID NO: 1188836
uguauagauacguaacaaa

SEQ ID NO: 1188838 - RNA, 19 nt, Artificial Sequence
  Description of Artificial Sequence: Synthetic oligonucleotide
  Sense strand starting at position 1526 of SEQ ID NO: 916849
cuucguuugcugugggauc

SEQ ID NO: 1188839 - RNA, 19 nt, Artificial Sequence
  Description of Artificial Sequence: Synthetic oligonucleotide
  Antisense strand to SEQ ID NO: 1188838
gaucccacagcaaacgaag

SEQ ID NO: 1188840 - RNA, 19 nt, Artificial Sequence
  Description of Artificial Sequence: Synthetic oligonucleotide
  Sense strand starting at position 1574 of SEQ ID NO: 916849
guaggugcucaguaaauca

SEQ ID NO: 1188841 - RNA, 19 nt, Artificial Sequence
  Description of Artificial Sequence: Synthetic oligonucleotide
  Antisense strand to SEQ ID NO: 1188840
ugauuuacugagcaccuac

SEQ ID NO: 1188842 - RNA, 19 nt, Artificial Sequence
  Description of Artificial Sequence: Synthetic oligonucleotide
  Sense strand starting at position 1910 of SEQ ID NO: 916849
guccguuaaugugguuaca

SEQ ID NO: 1188843 - RNA, 19 nt, Artificial Sequence
  Description of Artificial Sequence: Synthetic oligonucleotide
  Antisense strand to SEQ ID NO: 1188842
uguaaccacauuaacggac

SEQ ID NO: 1188844 - RNA, 19 nt, Artificial Sequence
  Description of Artificial Sequence: Synthetic oligonucleotide
  Sense strand starting at position 1912 of SEQ ID NO: 916849
ccguuaaugugguuacaaa

SEQ ID NO: 1188845 - RNA, 19 nt, Artificial Sequence
  Description of Artificial Sequence: Synthetic oligonucleotide
  Antisense strand to SEQ ID NO: 1188844
uuuguaaccacauuaacgg

SEQ ID NO: 1188846 - RNA, 19 nt, Artificial Sequence
  Description of Artificial Sequence: Synthetic oligonucleotide
  Sense strand starting at position 1948 of SEQ ID NO: 916849
gggagcccuccguaagcaa

SEQ ID NO: 1188847 - RNA, 19 nt, Artificial Sequence
  Description of Artificial Sequence: Synthetic oligonucleotide
  Antisense strand to SEQ ID NO: 1188846
uugcuuacggagggcuccc

SEQ ID NO: 1188848 - RNA, 19 nt, Artificial Sequence
  Description of Artificial Sequence: Synthetic oligonucleotide
  Sense strand starting at position 2238 of SEQ ID NO: 916849
ggagauagugcccgggcua

SEQ ID NO: 1188849 - RNA, 19 nt, Artificial Sequence
  Description of Artificial Sequence: Synthetic oligonucleotide
  Antisense strand to SEQ ID NO: 1188848
uagcccgggcacuaucucc

SEQ ID NO: 1188850 - RNA, 19 nt, Artificial Sequence
  Description of Artificial Sequence: Synthetic oligonucleotide
  Sense strand starting at position 2239 of SEQ ID NO: 916849
gagauagugcccgggcuau

SEQ ID NO: 1188851 - RNA, 19 nt, Artificial Sequence
  Description of Artificial Sequence: Synthetic oligonucleotide
  Antisense strand to SEQ ID NO: 1188850
auagcccgggcacuaucuc

SEQ ID NO: 1188852 - RNA, 19 nt, Artificial Sequence
  Description of Artificial Sequence: Synthetic oligonucleotide
  Sense strand starting at position 2575 of SEQ ID NO: 916849
uggguaacagcucaagauu

SEQ ID NO: 1188853 - RNA, 19 nt, Artificial Sequence
  Description of Artificial Sequence: Synthetic oligonucleotide
  Antisense strand to SEQ ID NO: 1188852
aaucuugagcuguuaccca

SEQ ID NO: 1188854 - RNA, 19 nt, Artificial Sequence
  Description of Artificial Sequence: Synthetic oligonucleotide
  Sense strand starting at position 2729 of SEQ ID NO: 916849
ucggcuuuggaguaauaaa

SEQ ID NO: 1188855 - RNA, 19 nt, Artificial Sequence
  Description of Artificial Sequence: Synthetic oligonucleotide
  Antisense strand to SEQ ID NO: 1188854
uuuauuacuccaaagccga

SEQ ID NO: 1188856 - RNA, 19 nt, Artificial Sequence
  Description of Artificial Sequence: Synthetic oligonucleotide
  Sense strand starting at position 2953 of SEQ ID NO: 916849
cuucuuaaaugaggauauc

SEQ ID NO: 1188857 - RNA, 19 nt, Artificial Sequence
  Description of Artificial Sequence: Synthetic oligonucleotide
  Antisense strand to SEQ ID NO: 1188856
gauauccucauuuaagaag

SEQ ID NO: 1188858 - RNA, 19 nt, Artificial Sequence
  Description of Artificial Sequence: Synthetic oligonucleotide
  Sense strand starting at position 2963 of SEQ ID NO: 916849
gaggauaucucagucaaca

SEQ ID NO: 1188859 - RNA, 19 nt, Artificial Sequence
  Description of Artificial Sequence: Synthetic oligonucleotide
  Antisense strand to SEQ ID NO: 1188858
uguugacugagauauccuc

SEQ ID NO: 1188860 - RNA, 19 nt, Artificial Sequence
  Description of Artificial Sequence: Synthetic oligonucleotide
  Sense strand starting at position 3002 of SEQ ID NO: 916849
gcaacugaauuguugauca

SEQ ID NO: 1188861 - RNA, 19 nt, Artificial Sequence
  Description of Artificial Sequence: Synthetic oligonucleotide
  Antisense strand to SEQ ID NO: 1188860
ugaucaacaauucaguugc

SEQ ID NO: 1188862 - RNA, 19 nt, Artificial Sequence
  Description of Artificial Sequence: Synthetic oligonucleotide
  Sense strand starting at position 3006 of SEQ ID NO: 916849
cugaauuguugaucaggga

SEQ ID NO: 1188863 - RNA, 19 nt, Artificial Sequence
  Description of Artificial Sequence: Synthetic oligonucleotide
  Antisense strand to SEQ ID NO: 1188862
ucccugaucaacaauucag

SEQ ID NO: 1188864 - RNA, 19 nt, Artificial Sequence
  Description of Artificial Sequence: Synthetic oligonucleotide
  Sense strand starting at position 3009 of SEQ ID NO: 916849
aauuguugaucagggaacu

SEQ ID NO: 1188865 - RNA, 19 nt, Artificial Sequence
  Description of Artificial Sequence: Synthetic oligonucleotide
  Antisense strand to SEQ ID NO: 1188864
aguucccugaucaacaauu

SEQ ID NO: 1188866 - RNA, 19 nt, Artificial Sequence
  Description of Artificial Sequence: Synthetic oligonucleotide
  Sense strand starting at position 3010 of SEQ ID NO: 916849
auuguugaucagggaacuu

SEQ ID NO: 1188867 - RNA, 19 nt, Artificial Sequence
  Description of Artificial Sequence: Synthetic oligonucleotide
  Antisense strand to SEQ ID NO: 1188866
aaguucccugaucaacaau

SEQ ID NO: 1188868 - RNA, 19 nt, Artificial Sequence
  Description of Artificial Sequence: Synthetic oligonucleotide
  Sense strand starting at position 3051 of SEQ ID NO: 916849
ccaauucgugcccacuaga

SEQ ID NO: 1188869 - RNA, 19 nt, Artificial Sequence
  Description of Artificial Sequence: Synthetic oligonucleotide
  Antisense strand to SEQ ID NO: 1188868
ucuagugggcacgaauugg

SEQ ID NO: 1188870 - RNA, 19 nt, Artificial Sequence
  Description of Artificial Sequence: Synthetic oligonucleotide
  Sense strand starting at position 3054 of SEQ ID NO: 916849
auucgugcccacuagaaug

SEQ ID NO: 1188871 - RNA, 19 nt, Artificial Sequence
  Description of Artificial Sequence: Synthetic oligonucleotide
  Antisense strand to SEQ ID NO: 1188870
cauucuagugggcacgaau

SEQ ID NO: 1188872 - RNA, 19 nt, Artificial Sequence
  Description of Artificial Sequence: Synthetic oligonucleotide
  Sense strand starting at position 3173 of SEQ ID NO: 916849
gguacaaauugauaaauug

SEQ ID NO: 1188873 - RNA, 19 nt, Artificial Sequence
  Description of Artificial Sequence: Synthetic oligonucleotide
  Antisense strand to SEQ ID NO: 1188872
caauuuaucaauuuguacc

SEQ ID NO: 1188874 - RNA, 19 nt, Artificial Sequence
  Description of Artificial Sequence: Synthetic oligonucleotide
  Sense strand starting at position 3180 of SEQ ID NO: 916849
auugauaaauuguuuggca

SEQ ID NO: 1188875 - RNA, 19 nt, Artificial Sequence
  Description of Artificial Sequence: Synthetic oligonucleotide
  Antisense strand to SEQ ID NO: 1188874
ugccaaacaauuuaucaau

SEQ ID NO: 1188876 - RNA, 19 nt, Artificial Sequence
  Description of Artificial Sequence: Synthetic oligonucleotide
  Sense strand starting at position 3181 of SEQ ID NO: 916849
uugauaaauuguuuggcaa

SEQ ID NO: 1188877 - RNA, 19 nt, Artificial Sequence
  Description of Artificial Sequence: Synthetic oligonucleotide
  Antisense strand to SEQ ID NO: 1188876
uugccaaacaauuuaucaa

SEQ ID NO: 1188878 - RNA, 19 nt, Artificial Sequence
  Description of Artificial Sequence: Synthetic oligonucleotide
  Sense strand starting at position 3182 of SEQ ID NO: 916849
ugauaaauuguuuggcaau

SEQ ID NO: 1188879 - RNA, 19 nt, Artificial Sequence
  Description of Artificial Sequence: Synthetic oligonucleotide
  Antisense strand to SEQ ID NO: 1188878
auugccaaacaauuuauca

SEQ ID NO: 1188880 - RNA, 19 nt, Artificial Sequence
  Description of Artificial Sequence: Synthetic oligonucleotide
  Sense strand starting at position 3183 of SEQ ID NO: 916849
gauaaauuguuuggcaaua

SEQ ID NO: 1188881 - RNA, 19 nt, Artificial Sequence
  Description of Artificial Sequence: Synthetic oligonucleotide
  Antisense strand to SEQ ID NO: 1188880
uauugccaaacaauuuauc

SEQ ID NO: 1188882 - RNA, 19 nt, Artificial Sequence
  Description of Artificial Sequence: Synthetic oligonucleotide
  Sense strand starting at position 158 of SEQ ID NO: 916850
cucucaaguagcugagaga

SEQ ID NO: 1188883 - RNA, 19 nt, Artificial Sequence
  Description of Artificial Sequence: Synthetic oligonucleotide
  Antisense strand to SEQ ID NO: 1188882
ucucucagcuacuugagag

SEQ ID NO: 1188884 - RNA, 19 nt, Artificial Sequence
  Description of Artificial Sequence: Synthetic oligonucleotide
  Sense strand starting at position 159 of SEQ ID NO: 916850
ucucaaguagcugagagau

SEQ ID NO: 1188885 - RNA, 19 nt, Artificial Sequence
  Description of Artificial Sequence: Synthetic oligonucleotide
  Antisense strand to SEQ ID NO: 1188884
aucucucagcuacuugaga

SEQ ID NO: 1188886 - RNA, 19 nt, Artificial Sequence
  Description of Artificial Sequence: Synthetic oligonucleotide
  Sense strand starting at position 161 of SEQ ID NO: 916850
ucaaguagcugagagauua

SEQ ID NO: 1188887 - RNA, 19 nt, Artificial Sequence
  Description of Artificial Sequence: Synthetic oligonucleotide
  Antisense strand to SEQ ID NO: 1188886
uaaucucucagcuacuuga

SEQ ID NO: 1188888 - RNA, 19 nt, Artificial Sequence
  Description of Artificial Sequence: Synthetic oligonucleotide
  Sense strand starting at position 535 of SEQ ID NO: 916850
ccauuauauuggucaggcu

SEQ ID NO: 1188889 - RNA, 19 nt, Artificial Sequence
  Description of Artificial Sequence: Synthetic oligonucleotide
  Antisense strand to SEQ ID NO: 1188888
agccugaccaauauaaugg

SEQ ID NO: 1188890 - RNA, 19 nt, Artificial Sequence
  Description of Artificial Sequence: Synthetic oligonucleotide
  Sense strand starting at position 649 of SEQ ID NO: 916850
uaugguuauuacuugauga

SEQ ID NO: 1188891 - RNA, 19 nt, Artificial Sequence
  Description of Artificial Sequence: Synthetic oligonucleotide
  Antisense strand to SEQ ID NO: 1188890
ucaucaaguaauaaccaua

SEQ ID NO: 1188892 - RNA, 19 nt, Artificial Sequence
  Description of Artificial Sequence: Synthetic oligonucleotide
  Sense strand starting at position 656 of SEQ ID NO: 916850
auuacuugaugauaugcua

SEQ ID NO: 1188893 - RNA, 19 nt, Artificial Sequence
  Description of Artificial Sequence: Synthetic oligonucleotide
  Antisense strand to SEQ ID NO: 1188892
uagcauaucaucaaguaau

SEQ ID NO: 1188894 - RNA, 19 nt, Artificial Sequence
  Description of Artificial Sequence: Synthetic oligonucleotide
  Sense strand starting at position 1191 of SEQ ID NO: 916850
uucucagaucacugaagau

SEQ ID NO: 1188895 - RNA, 19 nt, Artificial Sequence
  Description of Artificial Sequence: Synthetic oligonucleotide
  Antisense strand to SEQ ID NO: 1188894
aucuucagugaucugagaa

SEQ ID NO: 1188896 - RNA, 19 nt, Artificial Sequence
  Description of Artificial Sequence: Synthetic oligonucleotide
  Sense strand starting at position 1437 of SEQ ID NO: 916850
auugcuuuccuuggcaaag

SEQ ID NO: 1188897 - RNA, 19 nt, Artificial Sequence
  Description of Artificial Sequence: Synthetic oligonucleotide
  Antisense strand to SEQ ID NO: 1188896
cuuugccaaggaaagcaau

SEQ ID NO: 1188898 - RNA, 19 nt, Artificial Sequence
  Description of Artificial Sequence: Synthetic oligonucleotide
  Sense strand starting at position 1438 of SEQ ID NO: 916850
uugcuuuccuuggcaaaga

SEQ ID NO: 1188899 - RNA, 19 nt, Artificial Sequence
  Description of Artificial Sequence: Synthetic oligonucleotide
  Antisense strand to SEQ ID NO: 1188898
ucuuugccaaggaaagcaa

SEQ ID NO: 1188900 - RNA, 19 nt, Artificial Sequence
  Description of Artificial Sequence: Synthetic oligonucleotide
  Sense strand starting at position 1691 of SEQ ID NO: 916850
cacugugcugauuaagaga

SEQ ID NO: 1188901 - RNA, 19 nt, Artificial Sequence
  Description of Artificial Sequence: Synthetic oligonucleotide
  Antisense strand to SEQ ID NO: 1188900
ucucuuaaucagcacagug

SEQ ID NO: 1188902 - RNA, 19 nt, Artificial Sequence
  Description of Artificial Sequence: Synthetic oligonucleotide
  Sense strand starting at position 1740 of SEQ ID NO: 916850
agaaaucauccucgacaug

SEQ ID NO: 1188903 - RNA, 19 nt, Artificial Sequence
  Description of Artificial Sequence: Synthetic oligonucleotide
  Antisense strand to SEQ ID NO: 1188902
caugucgaggaugauuucu

SEQ ID NO: 1188904 - RNA, 19 nt, Artificial Sequence
  Description of Artificial Sequence: Synthetic oligonucleotide
  Sense strand starting at position 1766 of SEQ ID NO: 916850
ugccuugaagcaugaucua

SEQ ID NO: 1188905 - RNA, 19 nt, Artificial Sequence
  Description of Artificial Sequence: Synthetic oligonucleotide
  Antisense strand to SEQ ID NO: 1188904
uagaucaugcuucaaggca

SEQ ID NO: 1188906 - RNA, 19 nt, Artificial Sequence
  Description of Artificial Sequence: Synthetic oligonucleotide
  Sense strand starting at position 1778 of SEQ ID NO: 916850
ugaucuaucuaguuccacu

SEQ ID NO: 1188907 - RNA, 19 nt, Artificial Sequence
  Description of Artificial Sequence: Synthetic oligonucleotide
  Antisense strand to SEQ ID NO: 1188906
aguggaacuagauagauca

SEQ ID NO: 1188908 - RNA, 19 nt, Artificial Sequence
  Description of Artificial Sequence: Synthetic oligonucleotide
  Sense strand starting at position 1820 of SEQ ID NO: 916850
ucugacucuucuccagagu

SEQ ID NO: 1188909 - RNA, 19 nt, Artificial Sequence
  Description of Artificial Sequence: Synthetic oligonucleotide
  Antisense strand to SEQ ID NO: 1188908
acucuggagaagagucaga

SEQ ID NO: 1188910 - RNA, 19 nt, Artificial Sequence
  Description of Artificial Sequence: Synthetic oligonucleotide
  Sense strand starting at position 1916 of SEQ ID NO: 916850
guuggagucuuugcauugu

SEQ ID NO: 1188911 - RNA, 19 nt, Artificial Sequence
  Description of Artificial Sequence: Synthetic oligonucleotide
  Antisense strand to SEQ ID NO: 1188910
acaaugcaaagacuccaac

SEQ ID NO: 1188912 - RNA, 19 nt, Artificial Sequence
  Description of Artificial Sequence: Synthetic oligonucleotide
  Sense strand starting at position 1944 of SEQ ID NO: 916850
ucagguugugugggagcaa

SEQ ID NO: 1188913 - RNA, 19 nt, Artificial Sequence
  Description of Artificial Sequence: Synthetic oligonucleotide
  Antisense strand to SEQ ID NO: 1188912
uugcucccacacaaccuga

SEQ ID NO: 1188914 - RNA, 19 nt, Artificial Sequence
  Description of Artificial Sequence: Synthetic oligonucleotide
  Sense strand starting at position 2005 of SEQ ID NO: 916850
gagaaugagucagaguugu

SEQ ID NO: 1188915 - RNA, 19 nt, Artificial Sequence
  Description of Artificial Sequence: Synthetic oligonucleotide
  Antisense strand to SEQ ID NO: 1188914
acaacucugacucauucuc

SEQ ID NO: 1188916 - RNA, 19 nt, Artificial Sequence
  Description of Artificial Sequence: Synthetic oligonucleotide
  Sense strand starting at position 2009 of SEQ ID NO: 916850
augagucagaguugugucu

SEQ ID NO: 1188917 - RNA, 19 nt, Artificial Sequence
  Description of Artificial Sequence: Synthetic oligonucleotide
  Antisense strand to SEQ ID NO: 1188916
agacacaacucugacucau

SEQ ID NO: 1188918 - RNA, 19 nt, Artificial Sequence
  Description of Artificial Sequence: Synthetic oligonucleotide
  Sense strand starting at position 2039 of SEQ ID NO: 916850
guaauugcgauuugcuaag

SEQ ID NO: 1188919 - RNA, 19 nt, Artificial Sequence
  Description of Artificial Sequence: Synthetic oligonucleotide
  Antisense strand to SEQ ID NO: 1188918
cuuagcaaaucgcaauuac

SEQ ID NO: 1188920 - RNA, 19 nt, Artificial Sequence
  Description of Artificial Sequence: Synthetic oligonucleotide
  Sense strand starting at position 2045 of SEQ ID NO: 916850
gcgauuugcuaagaguuua

SEQ ID NO: 1188921 - RNA, 19 nt, Artificial Sequence
  Description of Artificial Sequence: Synthetic oligonucleotide
  Antisense strand to SEQ ID NO: 1188920
uaaacucuuagcaaaucgc

SEQ ID NO: 1188922 - RNA, 19 nt, Artificial Sequence
  Description of Artificial Sequence: Synthetic oligonucleotide
  Sense strand starting at position 2053 of SEQ ID NO: 916850
cuaagaguuuacuuucugu

SEQ ID NO: 1188923 - RNA, 19 nt, Artificial Sequence
  Description of Artificial Sequence: Synthetic oligonucleotide
  Antisense strand to SEQ ID NO: 1188922
acagaaaguaaacucuuag

SEQ ID NO: 1188924 - RNA, 19 nt, Artificial Sequence
  Description of Artificial Sequence: Synthetic oligonucleotide
  Sense strand starting at position 2060 of SEQ ID NO: 916850
uuuacuuucuguuugggaa

SEQ ID NO: 1188925 - RNA, 19 nt, Artificial Sequence
  Description of Artificial Sequence: Synthetic oligonucleotide
  Antisense strand to SEQ ID NO: 1188924
uucccaaacagaaaguaaa

SEQ ID NO: 1188926 - RNA, 19 nt, Artificial Sequence
  Description of Artificial Sequence: Synthetic oligonucleotide
  Sense strand starting at position 2061 of SEQ ID NO: 916850
uuacuuucuguuugggaaa

SEQ ID NO: 1188927 - RNA, 19 nt, Artificial Sequence
  Description of Artificial Sequence: Synthetic oligonucleotide
  Antisense strand to SEQ ID NO: 1188926
uuucccaaacagaaaguaa

SEQ ID NO: 1188928 - RNA, 19 nt, Artificial Sequence
  Description of Artificial Sequence: Synthetic oligonucleotide
  Sense strand starting at position 2064 of SEQ ID NO: 916850
cuuucuguuugggaaauug

SEQ ID NO: 1188929 - RNA, 19 nt, Artificial Sequence
  Description of Artificial Sequence: Synthetic oligonucleotide
  Antisense strand to SEQ ID NO: 1188928
caauuucccaaacagaaag

SEQ ID NO: 1188930 - RNA, 19 nt, Artificial Sequence
  Description of Artificial Sequence: Synthetic oligonucleotide
  Sense strand starting at position 2263 of SEQ ID NO: 916850
ccacuacagcccgguuaau

SEQ ID NO: 1188931 - RNA, 19 nt, Artificial Sequence
  Description of Artificial Sequence: Synthetic oligonucleotide
  Antisense strand to SEQ ID NO: 1188930
auuaaccgggcuguagugg

SEQ ID NO: 1188932 - RNA, 19 nt, Artificial Sequence
  Description of Artificial Sequence: Synthetic oligonucleotide
  Sense strand starting at position 2350 of SEQ ID NO: 916850
cagaguuauucgcccaccu

SEQ ID NO: 1188933 - RNA, 19 nt, Artificial Sequence
  Description of Artificial Sequence: Synthetic oligonucleotide
  Antisense strand to SEQ ID NO: 1188932
aggugggcgaauaacucug

SEQ ID NO: 1188934 - RNA, 19 nt, Artificial Sequence
  Description of Artificial Sequence: Synthetic oligonucleotide
  Sense strand starting at position 2388 of SEQ ID NO: 916850
gauuauaggcgugaaccuu

SEQ ID NO: 1188935 - RNA, 19 nt, Artificial Sequence
  Description of Artificial Sequence: Synthetic oligonucleotide
  Antisense strand to SEQ ID NO: 1188934
aagguucacgccuauaauc

SEQ ID NO: 1188936 - RNA, 19 nt, Artificial Sequence
  Description of Artificial Sequence: Synthetic oligonucleotide
  Sense strand starting at position 2412 of SEQ ID NO: 916850
cuggccagguuucuugaau

SEQ ID NO: 1188937 - RNA, 19 nt, Artificial Sequence
  Description of Artificial Sequence: Synthetic oligonucleotide
  Antisense strand to SEQ ID NO: 1188936
auucaagaaaccuggccag

SEQ ID NO: 1188938 - RNA, 19 nt, Artificial Sequence
  Description of Artificial Sequence: Synthetic oligonucleotide
  Sense strand starting at position 2413 of SEQ ID NO: 916850
uggccagguuucuugaaug

SEQ ID NO: 1188939 - RNA, 19 nt, Artificial Sequence
  Description of Artificial Sequence: Synthetic oligonucleotide
  Antisense strand to SEQ ID NO: 1188938
cauucaagaaaccuggcca

SEQ ID NO: 1188940 - RNA, 19 nt, Artificial Sequence
  Description of Artificial Sequence: Synthetic oligonucleotide
  Sense strand starting at position 2427 of SEQ ID NO: 916850
gaauguuagguuugggaau

SEQ ID NO: 1188941 - RNA, 19 nt, Artificial Sequence
  Description of Artificial Sequence: Synthetic oligonucleotide
  Antisense strand to SEQ ID NO: 1188940
auucccaaaccuaacauuc

SEQ ID NO: 1188942 - RNA, 19 nt, Artificial Sequence
  Description of Artificial Sequence: Synthetic oligonucleotide
  Sense strand starting at position 2428 of SEQ ID NO: 916850
aauguuagguuugggaaua

SEQ ID NO: 1188943 - RNA, 19 nt, Artificial Sequence
  Description of Artificial Sequence: Synthetic oligonucleotide
  Antisense strand to SEQ ID NO: 1188942
uauucccaaaccuaacauu

SEQ ID NO: 1188944 - RNA, 19 nt, Artificial Sequence
  Description of Artificial Sequence: Synthetic oligonucleotide
  Sense strand starting at position 2775 of SEQ ID NO: 916850
uuagacuauuuauguccau

SEQ ID NO: 1188945 - RNA, 19 nt, Artificial Sequence
  Description of Artificial Sequence: Synthetic oligonucleotide
  Antisense strand to SEQ ID NO: 1188944
auggacauaaauagucuaa

SEQ ID NO: 1188946 - RNA, 19 nt, Artificial Sequence
  Description of Artificial Sequence: Synthetic oligonucleotide
  Sense strand starting at position 3138 of SEQ ID NO: 916850
ugggucuaagggugauaga

SEQ ID NO: 1188947 - RNA, 19 nt, Artificial Sequence
  Description of Artificial Sequence: Synthetic oligonucleotide
  Antisense strand to SEQ ID NO: 1188946
ucuaucacccuuagaccca

SEQ ID NO: 1188948 - RNA, 19 nt, Artificial Sequence
  Description of Artificial Sequence: Synthetic oligonucleotide
  Sense strand starting at position 3367 of SEQ ID NO: 916850
cuccaauaaugacaugagu

SEQ ID NO: 1188949 - RNA, 19 nt, Artificial Sequence
  Description of Artificial Sequence: Synthetic oligonucleotide
  Antisense strand to SEQ ID NO: 1188948
acucaugucauuauuggag

SEQ ID NO: 1188950 - RNA, 19 nt, Artificial Sequence
  Description of Artificial Sequence: Synthetic oligonucleotide
  Sense strand starting at position 3373 of SEQ ID NO: 916850
uaaugacaugaguguggau

SEQ ID NO: 1188951 - RNA, 19 nt, Artificial Sequence
  Description of Artificial Sequence: Synthetic oligonucleotide
  Antisense strand to SEQ ID NO: 1188950
auccacacucaugucauua

SEQ ID NO: 1188952 - RNA, 19 nt, Artificial Sequence
  Description of Artificial Sequence: Synthetic oligonucleotide
  Sense strand starting at position 3388 of SEQ ID NO: 916850
ggauccagcuuguccauaa

SEQ ID NO: 1188953 - RNA, 19 nt, Artificial Sequence
  Description of Artificial Sequence: Synthetic oligonucleotide
  Antisense strand to SEQ ID NO: 1188952
uuauggacaagcuggaucc

SEQ ID NO: 1188954 - RNA, 19 nt, Artificial Sequence
  Description of Artificial Sequence: Synthetic oligonucleotide
  Sense strand starting at position 3434 of SEQ ID NO: 916850
uguaaagacuggucaccua

SEQ ID NO: 1188955 - RNA, 19 nt, Artificial Sequence
  Description of Artificial Sequence: Synthetic oligonucleotide
  Antisense strand to SEQ ID NO: 1188954
uaggugaccagucuuuaca

SEQ ID NO: 1188956 - RNA, 19 nt, Artificial Sequence
  Description of Artificial Sequence: Synthetic oligonucleotide
  Sense strand starting at position 3520 of SEQ ID NO: 916850
cacagagacugguaagaaa

SEQ ID NO: 1188957 - RNA, 19 nt, Artificial Sequence
  Description of Artificial Sequence: Synthetic oligonucleotide
  Antisense strand to SEQ ID NO: 1188956
uuucuuaccagucucugug

SEQ ID NO: 1188958 - RNA, 19 nt, Artificial Sequence
  Description of Artificial Sequence: Synthetic oligonucleotide
  Sense strand starting at position 3560 of SEQ ID NO: 916850
ggccaaguuccuuaagaga

SEQ ID NO: 1188959 - RNA, 19 nt, Artificial Sequence
  Description of Artificial Sequence: Synthetic oligonucleotide
  Antisense strand to SEQ ID NO: 1188958
ucucuuaaggaacuuggcc

SEQ ID NO: 1188960 - RNA, 19 nt, Artificial Sequence
  Description of Artificial Sequence: Synthetic oligonucleotide
  Sense strand starting at position 3647 of SEQ ID NO: 916850
guguuaauaucaccuaauc

SEQ ID NO: 1188961 - RNA, 19 nt, Artificial Sequence
  Description of Artificial Sequence: Synthetic oligonucleotide
  Antisense strand to SEQ ID NO: 1188960
gauuaggugauauuaacac

SEQ ID NO: 1188962 - RNA, 19 nt, Artificial Sequence
  Description of Artificial Sequence: Synthetic oligonucleotide
  Sense strand starting at position 208 of SEQ ID NO: 916851
ggaagaaaguacuuacucu

SEQ ID NO: 1188963 - RNA, 19 nt, Artificial Sequence
  Description of Artificial Sequence: Synthetic oligonucleotide
  Antisense strand to SEQ ID NO: 1188962
agaguaaguacuuucuucc

SEQ ID NO: 1188964 - RNA, 19 nt, Artificial Sequence
  Description of Artificial Sequence: Synthetic oligonucleotide
  Sense strand starting at position 277 of SEQ ID NO: 916851
gggagaaccggucaucuuc

SEQ ID NO: 1188965 - RNA, 19 nt, Artificial Sequence
  Description of Artificial Sequence: Synthetic oligonucleotide
  Antisense strand to SEQ ID NO: 1188964
gaagaugaccgguucuccc

SEQ ID NO: 1188966 - RNA, 19 nt, Artificial Sequence
  Description of Artificial Sequence: Synthetic oligonucleotide
  Sense strand starting at position 702 of SEQ ID NO: 916851
ucuuucugcuuuguagaga

SEQ ID NO: 1188967 - RNA, 19 nt, Artificial Sequence
  Description of Artificial Sequence: Synthetic oligonucleotide
  Antisense strand to SEQ ID NO: 1188966
ucucuacaaagcagaaaga

SEQ ID NO: 1188968 - RNA, 19 nt, Artificial Sequence
  Description of Artificial Sequence: Synthetic oligonucleotide
  Sense strand starting at position 707 of SEQ ID NO: 916851
cugcuuuguagagauggga

SEQ ID NO: 1188969 - RNA, 19 nt, Artificial Sequence
  Description of Artificial Sequence: Synthetic oligonucleotide
  Antisense strand to SEQ ID NO: 1188968
ucccaucucuacaaagcag

SEQ ID NO: 1188970 - RNA, 19 nt, Artificial Sequence
  Description of Artificial Sequence: Synthetic oligonucleotide
  Sense strand starting at position 1354 of SEQ ID NO: 916851
aaggucuaaugcuuccaga

SEQ ID NO: 1188971 - RNA, 19 nt, Artificial Sequence
  Description of Artificial Sequence: Synthetic oligonucleotide
  Antisense strand to SEQ ID NO: 1188970
ucuggaagcauuagaccuu

SEQ ID NO: 1188972 - RNA, 19 nt, Artificial Sequence
  Description of Artificial Sequence: Synthetic oligonucleotide
  Sense strand starting at position 1461 of SEQ ID NO: 916851
aguggcauaugguuaccua

SEQ ID NO: 1188973 - RNA, 19 nt, Artificial Sequence
  Description of Artificial Sequence: Synthetic oligonucleotide
  Antisense strand to SEQ ID NO: 1188972
uagguaaccauaugccacu

SEQ ID NO: 1188974 - RNA, 19 nt, Artificial Sequence
  Description of Artificial Sequence: Synthetic oligonucleotide
  Sense strand starting at position 1462 of SEQ ID NO: 916851
guggcauaugguuaccuaa

SEQ ID NO: 1188975 - RNA, 19 nt, Artificial Sequence
  Description of Artificial Sequence: Synthetic oligonucleotide
  Antisense strand to SEQ ID NO: 1188974
uuagguaaccauaugccac

SEQ ID NO: 1188976 - RNA, 19 nt, Artificial Sequence
  Description of Artificial Sequence: Synthetic oligonucleotide
  Sense strand starting at position 1501 of SEQ ID NO: 916851
acaacuucuccgggugacu

SEQ ID NO: 1188977 - RNA, 19 nt, Artificial Sequence
  Description of Artificial Sequence: Synthetic oligonucleotide
  Antisense strand to SEQ ID NO: 1188976
agucacccggagaaguugu

SEQ ID NO: 1188978 - RNA, 19 nt, Artificial Sequence
  Description of Artificial Sequence: Synthetic oligonucleotide
  Sense strand starting at position 1503 of SEQ ID NO: 916851
aacuucuccgggugacuuu

SEQ ID NO: 1188979 - RNA, 19 nt, Artificial Sequence
  Description of Artificial Sequence: Synthetic oligonucleotide
  Antisense strand to SEQ ID NO: 1188978
aaagucacccggagaaguu

SEQ ID NO: 1188980 - RNA, 19 nt, Artificial Sequence
  Description of Artificial Sequence: Synthetic oligonucleotide
  Sense strand starting at position 1510 of SEQ ID NO: 916851
ccgggugacuuuccuauga

SEQ ID NO: 1188981 - RNA, 19 nt, Artificial Sequence
  Description of Artificial Sequence: Synthetic oligonucleotide
  Antisense strand to SEQ ID NO: 1188980
ucauaggaaagucacccgg

SEQ ID NO: 1188982 - RNA, 19 nt, Artificial Sequence
  Description of Artificial Sequence: Synthetic oligonucleotide
  Sense strand starting at position 1514 of SEQ ID NO: 916851
gugacuuuccuaugauaag

SEQ ID NO: 1188983 - RNA, 19 nt, Artificial Sequence
  Description of Artificial Sequence: Synthetic oligonucleotide
  Antisense strand to SEQ ID NO: 1188982
cuuaucauaggaaagucac

SEQ ID NO: 1188984 - RNA, 19 nt, Artificial Sequence
  Description of Artificial Sequence: Synthetic oligonucleotide
  Sense strand starting at position 1532 of SEQ ID NO: 916851
ggugaacagaacuguauga

SEQ ID NO: 1188985 - RNA, 19 nt, Artificial Sequence
  Description of Artificial Sequence: Synthetic oligonucleotide
  Antisense strand to SEQ ID NO: 1188984
ucauacaguucuguucacc

SEQ ID NO: 1188986 - RNA, 19 nt, Artificial Sequence
  Description of Artificial Sequence: Synthetic oligonucleotide
  Sense strand starting at position 1610 of SEQ ID NO: 916851
uuaagauagcuuggugacu

SEQ ID NO: 1188987 - RNA, 19 nt, Artificial Sequence
  Description of Artificial Sequence: Synthetic oligonucleotide
  Antisense strand to SEQ ID NO: 1188986
agucaccaagcuaucuuaa

SEQ ID NO: 1188988 - RNA, 19 nt, Artificial Sequence
  Description of Artificial Sequence: Synthetic oligonucleotide
  Sense strand starting at position 1611 of SEQ ID NO: 916851
uaagauagcuuggugacuu

SEQ ID NO: 1188989 - RNA, 19 nt, Artificial Sequence
  Description of Artificial Sequence: Synthetic oligonucleotide
  Antisense strand to SEQ ID NO: 1188988
aagucaccaagcuaucuua

SEQ ID NO: 1188990 - RNA, 19 nt, Artificial Sequence
  Description of Artificial Sequence: Synthetic oligonucleotide
  Sense strand starting at position 1846 of SEQ ID NO: 916851
ccacguccucaggaaggau

SEQ ID NO: 1188991 - RNA, 19 nt, Artificial Sequence
  Description of Artificial Sequence: Synthetic oligonucleotide
  Antisense strand to SEQ ID NO: 1188990
auccuuccugaggacgugg

SEQ ID NO: 1188992 - RNA, 19 nt, Artificial Sequence
  Description of Artificial Sequence: Synthetic oligonucleotide
  Sense strand starting at position 2000 of SEQ ID NO: 916851
uugugaucucucggaauuc

SEQ ID NO: 1188993 - RNA, 19 nt, Artificial Sequence
  Description of Artificial Sequence: Synthetic oligonucleotide
  Antisense strand to SEQ ID NO: 1188992
gaauuccgagagaucacaa

SEQ ID NO: 1188994 - RNA, 19 nt, Artificial Sequence
  Description of Artificial Sequence: Synthetic oligonucleotide
  Sense strand starting at position 2010 of SEQ ID NO: 916851
ucggaauucuguguuauca

SEQ ID NO: 1188995 - RNA, 19 nt, Artificial Sequence
  Description of Artificial Sequence: Synthetic oligonucleotide
  Antisense strand to SEQ ID NO: 1188994
ugauaacacagaauuccga

SEQ ID NO: 1188996 - RNA, 19 nt, Artificial Sequence
  Description of Artificial Sequence: Synthetic oligonucleotide
  Sense strand starting at position 2328 of SEQ ID NO: 916851
gugcuacuaucagagauuu

SEQ ID NO: 1188997 - RNA, 19 nt, Artificial Sequence
  Description of Artificial Sequence: Synthetic oligonucleotide
  Antisense strand to SEQ ID NO: 1188996
aaaucucugauaguagcac

SEQ ID NO: 1188998 - RNA, 19 nt, Artificial Sequence
  Description of Artificial Sequence: Synthetic oligonucleotide
  Sense strand starting at position 2343 of SEQ ID NO: 916851
auuuaagguuguuagaaag

SEQ ID NO: 1188999 - RNA, 19 nt, Artificial Sequence
  Description of Artificial Sequence: Synthetic oligonucleotide
  Antisense strand to SEQ ID NO: 1188998
cuuucuaacaaccuuaaau

SEQ ID NO: 1189000 - RNA, 19 nt, Artificial Sequence
  Description of Artificial Sequence: Synthetic oligonucleotide
  Sense strand starting at position 2349 of SEQ ID NO: 916851
gguuguuagaaagaguguu

SEQ ID NO: 1189001 - RNA, 19 nt, Artificial Sequence
  Description of Artificial Sequence: Synthetic oligonucleotide
  Antisense strand to SEQ ID NO: 1189000
aacacucuuucuaacaacc

SEQ ID NO: 1189002 - RNA, 19 nt, Artificial Sequence
  Description of Artificial Sequence: Synthetic oligonucleotide
  Sense strand starting at position 2357 of SEQ ID NO: 916851
gaaagaguguuaguaagaa

SEQ ID NO: 1189003 - RNA, 19 nt, Artificial Sequence
  Description of Artificial Sequence: Synthetic oligonucleotide
  Antisense strand to SEQ ID NO: 1189002
uucuuacuaacacucuuuc

SEQ ID NO: 1189004 - RNA, 19 nt, Artificial Sequence
  Description of Artificial Sequence: Synthetic oligonucleotide
  Sense strand starting at position 2927 of SEQ ID NO: 916851
cgccgagcccuauauuuaa

SEQ ID NO: 1189005 - RNA, 19 nt, Artificial Sequence
  Description of Artificial Sequence: Synthetic oligonucleotide
  Antisense strand to SEQ ID NO: 1189004
uuaaauauagggcucggcg

SEQ ID NO: 1189006 - RNA, 19 nt, Artificial Sequence
  Description of Artificial Sequence: Synthetic oligonucleotide
  Sense strand starting at position 3057 of SEQ ID NO: 916851
ccgaauacacgcuauguau

SEQ ID NO: 1189007 - RNA, 19 nt, Artificial Sequence
  Description of Artificial Sequence: Synthetic oligonucleotide
  Antisense strand to SEQ ID NO: 1189006
auacauagcguguauucgg

SEQ ID NO: 1189008 - RNA, 19 nt, Artificial Sequence
  Description of Artificial Sequence: Synthetic oligonucleotide
  Sense strand starting at position 3059 of SEQ ID NO: 916851
gaauacacgcuauguauca

SEQ ID NO: 1189009 - RNA, 19 nt, Artificial Sequence
  Description of Artificial Sequence: Synthetic oligonucleotide
  Antisense strand to SEQ ID NO: 1189008
ugauacauagcguguauuc

SEQ ID NO: 1189010 - RNA, 19 nt, Artificial Sequence
  Description of Artificial Sequence: Synthetic oligonucleotide
  Sense strand starting at position 3084 of SEQ ID NO: 916851
cuccaagaagcuggugauu

SEQ ID NO: 1189011 - RNA, 19 nt, Artificial Sequence
  Description of Artificial Sequence: Synthetic oligonucleotide
  Antisense strand to SEQ ID NO: 1189010
aaucaccagcuucuuggag

SEQ ID NO: 1189012 - RNA, 19 nt, Artificial Sequence
  Description of Artificial Sequence: Synthetic oligonucleotide
  Sense strand starting at position 3087 of SEQ ID NO: 916851
caagaagcuggugauucuu

SEQ ID NO: 1189013 - RNA, 19 nt, Artificial Sequence
  Description of Artificial Sequence: Synthetic oligonucleotide
  Antisense strand to SEQ ID NO: 1189012
aagaaucaccagcuucuug

SEQ ID NO: 1189014 - RNA, 19 nt, Artificial Sequence
  Description of Artificial Sequence: Synthetic oligonucleotide
  Sense strand starting at position 3461 of SEQ ID NO: 916851
aguucugacccacaaguca

SEQ ID NO: 1189015 - RNA, 19 nt, Artificial Sequence
  Description of Artificial Sequence: Synthetic oligonucleotide
  Antisense strand to SEQ ID NO: 1189014
ugacuugugggucagaacu

SEQ ID NO: 1189016 - RNA, 19 nt, Artificial Sequence
  Description of Artificial Sequence: Synthetic oligonucleotide
  Sense strand starting at position 3566 of SEQ ID NO: 916851
auauccuauuaguuaugga

SEQ ID NO: 1189017 - RNA, 19 nt, Artificial Sequence
  Description of Artificial Sequence: Synthetic oligonucleotide
  Antisense strand to SEQ ID NO: 1189016
uccauaacuaauaggauau

SEQ ID NO: 1189018 - RNA, 19 nt, Artificial Sequence
  Description of Artificial Sequence: Synthetic oligonucleotide
  Sense strand starting at position 3576 of SEQ ID NO: 916851
aguuauggacugugaguuu

SEQ ID NO: 1189019 - RNA, 19 nt, Artificial Sequence
  Description of Artificial Sequence: Synthetic oligonucleotide
  Antisense strand to SEQ ID NO: 1189018
aaacucacaguccauaacu

SEQ ID NO: 1189020 - RNA, 19 nt, Artificial Sequence
  Description of Artificial Sequence: Synthetic oligonucleotide
  Sense strand starting at position 3748 of SEQ ID NO: 916851
acaacuugguuuguguuua

SEQ ID NO: 1189021 - RNA, 19 nt, Artificial Sequence
  Description of Artificial Sequence: Synthetic oligonucleotide
  Antisense strand to SEQ ID NO: 1189020
uaaacacaaaccaaguugu

SEQ ID NO: 1189022 - RNA, 19 nt, Artificial Sequence
  Description of Artificial Sequence: Synthetic oligonucleotide
  Sense strand starting at position 3752 of SEQ ID NO: 916851
cuugguuuguguuuaaaca

SEQ ID NO: 1189023 - RNA, 19 nt, Artificial Sequence
  Description of Artificial Sequence: Synthetic oligonucleotide
  Antisense strand to SEQ ID NO: 1189022
uguuuaaacacaaaccaag

SEQ ID NO: 1189024 - RNA, 19 nt, Artificial Sequence
  Description of Artificial Sequence: Synthetic oligonucleotide
  Sense strand starting at position 3753 of SEQ ID NO: 916851
uugguuuguguuuaaacag

SEQ ID NO: 1189025 - RNA, 19 nt, Artificial Sequence
  Description of Artificial Sequence: Synthetic oligonucleotide
  Antisense strand to SEQ ID NO: 1189024
cuguuuaaacacaaaccaa

SEQ ID NO: 1189026 - RNA, 19 nt, Artificial Sequence
  Description of Artificial Sequence: Synthetic oligonucleotide
  Sense strand starting at position 3761 of SEQ ID NO: 916851
uguuuaaacagcuggguaa

SEQ ID NO: 1189027 - RNA, 19 nt, Artificial Sequence
  Description of Artificial Sequence: Synthetic oligonucleotide
  Antisense strand to SEQ ID NO: 1189026
uuacccagcuguuuaaaca

SEQ ID NO: 1189028 - RNA, 19 nt, Artificial Sequence
  Description of Artificial Sequence: Synthetic oligonucleotide
  Sense strand starting at position 3776 of SEQ ID NO: 916851
guaagugagagauaguauc

SEQ ID NO: 1189029 - RNA, 19 nt, Artificial Sequence
  Description of Artificial Sequence: Synthetic oligonucleotide
  Antisense strand to SEQ ID NO: 1189028
gauacuaucucucacuuac

SEQ ID NO: 1189030 - RNA, 19 nt, Artificial Sequence
  Description of Artificial Sequence: Synthetic oligonucleotide
  Sense strand starting at position 3782 of SEQ ID NO: 916851
gagagauaguaucuaggcu

SEQ ID NO: 1189031 - RNA, 19 nt, Artificial Sequence
  Description of Artificial Sequence: Synthetic oligonucleotide
  Antisense strand to SEQ ID NO: 1189030
agccuagauacuaucucuc

SEQ ID NO: 1189032 - RNA, 19 nt, Artificial Sequence
  Description of Artificial Sequence: Synthetic oligonucleotide
  Sense strand starting at position 3783 of SEQ ID NO: 916851
agagauaguaucuaggcuu

SEQ ID NO: 1189033 - RNA, 19 nt, Artificial Sequence
  Description of Artificial Sequence: Synthetic oligonucleotide
  Antisense strand to SEQ ID NO: 1189032
aagccuagauacuaucucu

SEQ ID NO: 1189034 - RNA, 19 nt, Artificial Sequence
  Description of Artificial Sequence: Synthetic oligonucleotide
  Sense strand starting at position 3892 of SEQ ID NO: 916851
gaaggacgcuugguaaaga

SEQ ID NO: 1189035 - RNA, 19 nt, Artificial Sequence
  Description of Artificial Sequence: Synthetic oligonucleotide
  Antisense strand to SEQ ID NO: 1189034
ucuuuaccaagcguccuuc

SEQ ID NO: 1189036 - RNA, 19 nt, Artificial Sequence
  Description of Artificial Sequence: Synthetic oligonucleotide
  Sense strand starting at position 3897 of SEQ ID NO: 916851
acgcuugguaaagagauaa

SEQ ID NO: 1189037 - RNA, 19 nt, Artificial Sequence
  Description of Artificial Sequence: Synthetic oligonucleotide
  Antisense strand to SEQ ID NO: 1189036
uuaucucuuuaccaagcgu

SEQ ID NO: 1189038 - RNA, 19 nt, Artificial Sequence
  Description of Artificial Sequence: Synthetic oligonucleotide
  Sense strand starting at position 3938 of SEQ ID NO: 916851
gagaaaguguaucuuccuu

SEQ ID NO: 1189039 - RNA, 19 nt, Artificial Sequence
  Description of Artificial Sequence: Synthetic oligonucleotide
  Antisense strand to SEQ ID NO: 1189038
aaggaagauacacuuucuc

SEQ ID NO: 1189040 - RNA, 19 nt, Artificial Sequence
  Description of Artificial Sequence: Synthetic oligonucleotide
  Sense strand starting at position 3945 of SEQ ID NO: 916851
uguaucuuccuuuaggguu

SEQ ID NO: 1189041 - RNA, 19 nt, Artificial Sequence
  Description of Artificial Sequence: Synthetic oligonucleotide
  Antisense strand to SEQ ID NO: 1189040
aacccuaaaggaagauaca

SEQ ID NO: 1189042 - RNA, 19 nt, Artificial Sequence
  Description of Artificial Sequence: Synthetic oligonucleotide
  Sense strand starting at position 15 of SEQ ID NO: 916852
acagucuauugucucuaua

SEQ ID NO: 1189043 - RNA, 19 nt, Artificial Sequence
  Description of Artificial Sequence: Synthetic oligonucleotide
  Antisense strand to SEQ ID NO: 1189042
uauagagacaauagacugu

SEQ ID NO: 1189044 - RNA, 19 nt, Artificial Sequence
  Description of Artificial Sequence: Synthetic oligonucleotide
  Sense strand starting at position 17 of SEQ ID NO: 916852
agucuauugucucuauacu

SEQ ID NO: 1189045 - RNA, 19 nt, Artificial Sequence
  Description of Artificial Sequence: Synthetic oligonucleotide
  Antisense strand to SEQ ID NO: 1189044
aguauagagacaauagacu

SEQ ID NO: 1189046 - RNA, 19 nt, Artificial Sequence
  Description of Artificial Sequence: Synthetic oligonucleotide
  Sense strand starting at position 18 of SEQ ID NO: 916852
gucuauugucucuauacug

SEQ ID NO: 1189047 - RNA, 19 nt, Artificial Sequence
  Description of Artificial Sequence: Synthetic oligonucleotide
  Antisense strand to SEQ ID NO: 1189046
caguauagagacaauagac

SEQ ID NO: 1189048 - RNA, 19 nt, Artificial Sequence
  Description of Artificial Sequence: Synthetic oligonucleotide
  Sense strand starting at position 300 of SEQ ID NO: 916852
gucuuacaaggcuaaugau

SEQ ID NO: 1189049 - RNA, 19 nt, Artificial Sequence
  Description of Artificial Sequence: Synthetic oligonucleotide
  Antisense strand to SEQ ID NO: 1189048
aucauuagccuuguaagac

SEQ ID NO: 1189050 - RNA, 19 nt, Artificial Sequence
  Description of Artificial Sequence: Synthetic oligonucleotide
  Sense strand starting at position 321 of SEQ ID NO: 916852
acacauaacugggaaacaa

SEQ ID NO: 1189051 - RNA, 19 nt, Artificial Sequence
  Description of Artificial Sequence: Synthetic oligonucleotide
  Antisense strand to SEQ ID NO: 1189050
uuguuucccaguuaugugu

SEQ ID NO: 1189052 - RNA, 19 nt, Artificial Sequence
  Description of Artificial Sequence: Synthetic oligonucleotide
  Sense strand starting at position 378 of SEQ ID NO: 916852
acuaguuguuaauccuauu

SEQ ID NO: 1189053 - RNA, 19 nt, Artificial Sequence
  Description of Artificial Sequence: Synthetic oligonucleotide
  Antisense strand to SEQ ID NO: 1189052
aauaggauuaacaacuagu

SEQ ID NO: 1189054 - RNA, 19 nt, Artificial Sequence
  Description of Artificial Sequence: Synthetic oligonucleotide
  Sense strand starting at position 395 of SEQ ID NO: 916852
uuuccuaaacgugaaauau

SEQ ID NO: 1189055 - RNA, 19 nt, Artificial Sequence
  Description of Artificial Sequence: Synthetic oligonucleotide
  Antisense strand to SEQ ID NO: 1189054
auauuucacguuuaggaaa

SEQ ID NO: 1189056 - RNA, 19 nt, Artificial Sequence
  Description of Artificial Sequence: Synthetic oligonucleotide
  Sense strand starting at position 522 of SEQ ID NO: 916852
ccaaacuagugucuaaaca

SEQ ID NO: 1189057 - RNA, 19 nt, Artificial Sequence
  Description of Artificial Sequence: Synthetic oligonucleotide
  Antisense strand to SEQ ID NO: 1189056
uguuuagacacuaguuugg

SEQ ID NO: 1189058 - RNA, 19 nt, Artificial Sequence
  Description of Artificial Sequence: Synthetic oligonucleotide
  Sense strand starting at position 905 of SEQ ID NO: 916852
auaaguuacuaagugcuaa

SEQ ID NO: 1189059 - RNA, 19 nt, Artificial Sequence
  Description of Artificial Sequence: Synthetic oligonucleotide
  Antisense strand to SEQ ID NO: 1189058
uuagcacuuaguaacuuau

SEQ ID NO: 1189060 - RNA, 19 nt, Artificial Sequence
  Description of Artificial Sequence: Synthetic oligonucleotide
  Sense strand starting at position 953 of SEQ ID NO: 916852
ugcagacagcucuaaagua

SEQ ID NO: 1189061 - RNA, 19 nt, Artificial Sequence
  Description of Artificial Sequence: Synthetic oligonucleotide
  Antisense strand to SEQ ID NO: 1189060
uacuuuagagcugucugca

SEQ ID NO: 1189062 - RNA, 19 nt, Artificial Sequence
  Description of Artificial Sequence: Synthetic oligonucleotide
  Sense strand starting at position 1125 of SEQ ID NO: 916852
uuucuuaucgaucacagca

SEQ ID NO: 1189063 - RNA, 19 nt, Artificial Sequence
  Description of Artificial Sequence: Synthetic oligonucleotide
  Antisense strand to SEQ ID NO: 1189062
ugcugugaucgauaagaaa

SEQ ID NO: 1189064 - RNA, 19 nt, Artificial Sequence
  Description of Artificial Sequence: Synthetic oligonucleotide
  Sense strand starting at position 1189 of SEQ ID NO: 916852
ccacucuucugggcugaca

SEQ ID NO: 1189065 - RNA, 19 nt, Artificial Sequence
  Description of Artificial Sequence: Synthetic oligonucleotide
  Antisense strand to SEQ ID NO: 1189064
ugucagcccagaagagugg

SEQ ID NO: 1189066 - RNA, 19 nt, Artificial Sequence
  Description of Artificial Sequence: Synthetic oligonucleotide
  Sense strand starting at position 1261 of SEQ ID NO: 916852
augacucauuuguggauuu

SEQ ID NO: 1189067 - RNA, 19 nt, Artificial Sequence
  Description of Artificial Sequence: Synthetic oligonucleotide
  Antisense strand to SEQ ID NO: 1189066
aaauccacaaaugagucau

SEQ ID NO: 1189068 - RNA, 19 nt, Artificial Sequence
  Description of Artificial Sequence: Synthetic oligonucleotide
  Sense strand starting at position 1296 of SEQ ID NO: 916852
accagugugcguucgaauu

SEQ ID NO: 1189069 - RNA, 19 nt, Artificial Sequence
  Description of Artificial Sequence: Synthetic oligonucleotide
  Antisense strand to SEQ ID NO: 1189068
aauucgaacgcacacuggu

SEQ ID NO: 1189070 - RNA, 19 nt, Artificial Sequence
  Description of Artificial Sequence: Synthetic oligonucleotide
  Sense strand starting at position 2221 of SEQ ID NO: 916852
gugucauugacccgauuug

SEQ ID NO: 1189071 - RNA, 19 nt, Artificial Sequence
  Description of Artificial Sequence: Synthetic oligonucleotide
  Antisense strand to SEQ ID NO: 1189070
caaaucgggucaaugacac

SEQ ID NO: 1189072 - RNA, 19 nt, Artificial Sequence
  Description of Artificial Sequence: Synthetic oligonucleotide
  Sense strand starting at position 2287 of SEQ ID NO: 916852
guauuaaaugcugagcaaa

SEQ ID NO: 1189073 - RNA, 19 nt, Artificial Sequence
  Description of Artificial Sequence: Synthetic oligonucleotide
  Antisense strand to SEQ ID NO: 1189072
uuugcucagcauuuaauac

SEQ ID NO: 1189074 - RNA, 19 nt, Artificial Sequence
  Description of Artificial Sequence: Synthetic oligonucleotide
  Sense strand starting at position 2289 of SEQ ID NO: 916852
auuaaaugcugagcaaauu

SEQ ID NO: 1189075 - RNA, 19 nt, Artificial Sequence
  Description of Artificial Sequence: Synthetic oligonucleotide
  Antisense strand to SEQ ID NO: 1189074
aauuugcucagcauuuaau

SEQ ID NO: 1189076 - RNA, 19 nt, Artificial Sequence
  Description of Artificial Sequence: Synthetic oligonucleotide
  Sense strand starting at position 2405 of SEQ ID NO: 916852
agcaucaucggguauaacu

SEQ ID NO: 1189077 - RNA, 19 nt, Artificial Sequence
  Description of Artificial Sequence: Synthetic oligonucleotide
  Antisense strand to SEQ ID NO: 1189076
aguuauacccgaugaugcu

SEQ ID NO: 1189078 - RNA, 19 nt, Artificial Sequence
  Description of Artificial Sequence: Synthetic oligonucleotide
  Sense strand starting at position 2426 of SEQ ID NO: 916852
aaggguuucuccuuagauc

SEQ ID NO: 1189079 - RNA, 19 nt, Artificial Sequence
  Description of Artificial Sequence: Synthetic oligonucleotide
  Antisense strand to SEQ ID NO: 1189078
gaucuaaggagaaacccuu

SEQ ID NO: 1189080 - RNA, 19 nt, Artificial Sequence
  Description of Artificial Sequence: Synthetic oligonucleotide
  Sense strand starting at position 2427 of SEQ ID NO: 916852
aggguuucuccuuagauca

SEQ ID NO: 1189081 - RNA, 19 nt, Artificial Sequence
  Description of Artificial Sequence: Synthetic oligonucleotide
  Antisense strand to SEQ ID NO: 1189080
ugaucuaaggagaaacccu

SEQ ID NO: 1189082 - RNA, 19 nt, Artificial Sequence
  Description of Artificial Sequence: Synthetic oligonucleotide
  Sense strand starting at position 2511 of SEQ ID NO: 916852
aauguaaacgagugcuacu

SEQ ID NO: 1189083 - RNA, 19 nt, Artificial Sequence
  Description of Artificial Sequence: Synthetic oligonucleotide
  Antisense strand to SEQ ID NO: 1189082
aguagcacucguuuacauu

SEQ ID NO: 1189084 - RNA, 19 nt, Artificial Sequence
  Description of Artificial Sequence: Synthetic oligonucleotide
  Sense strand starting at position 2671 of SEQ ID NO: 916852
aacagucuugaucgacagu

SEQ ID NO: 1189085 - RNA, 19 nt, Artificial Sequence
  Description of Artificial Sequence: Synthetic oligonucleotide
  Antisense strand to SEQ ID NO: 1189084
acugucgaucaagacuguu

SEQ ID NO: 1189086 - RNA, 19 nt, Artificial Sequence
  Description of Artificial Sequence: Synthetic oligonucleotide
  Sense strand starting at position 2672 of SEQ ID NO: 916852
acagucuugaucgacagua

SEQ ID NO: 1189087 - RNA, 19 nt, Artificial Sequence
  Description of Artificial Sequence: Synthetic oligonucleotide
  Antisense strand to SEQ ID NO: 1189086
uacugucgaucaagacugu

SEQ ID NO: 1189088 - RNA, 19 nt, Artificial Sequence
  Description of Artificial Sequence: Synthetic oligonucleotide
  Sense strand starting at position 2674 of SEQ ID NO: 916852
agucuugaucgacaguaag

SEQ ID NO: 1189089 - RNA, 19 nt, Artificial Sequence
  Description of Artificial Sequence: Synthetic oligonucleotide
  Antisense strand to SEQ ID NO: 1189088
cuuacugucgaucaagacu

SEQ ID NO: 1189090 - RNA, 19 nt, Artificial Sequence
  Description of Artificial Sequence: Synthetic oligonucleotide
  Sense strand starting at position 2863 of SEQ ID NO: 916852
gacagagucuaggauuaau

SEQ ID NO: 1189091 - RNA, 19 nt, Artificial Sequence
  Description of Artificial Sequence: Synthetic oligonucleotide
  Antisense strand to SEQ ID NO: 1189090
auuaauccuagacucuguc

SEQ ID NO: 1189092 - RNA, 19 nt, Artificial Sequence
  Description of Artificial Sequence: Synthetic oligonucleotide
  Sense strand starting at position 3107 of SEQ ID NO: 916852
ggacaugccuguuccaacu

SEQ ID NO: 1189093 - RNA, 19 nt, Artificial Sequence
  Description of Artificial Sequence: Synthetic oligonucleotide
  Antisense strand to SEQ ID NO: 1189092
aguuggaacaggcaugucc

SEQ ID NO: 1189094 - RNA, 19 nt, Artificial Sequence
  Description of Artificial Sequence: Synthetic oligonucleotide
  Sense strand starting at position 3135 of SEQ ID NO: 916852
ucaugcaaugcucaaggaa

SEQ ID NO: 1189095 - RNA, 19 nt, Artificial Sequence
  Description of Artificial Sequence: Synthetic oligonucleotide
  Antisense strand to SEQ ID NO: 1189094
uuccuugagcauugcauga

SEQ ID NO: 1189096 - RNA, 19 nt, Artificial Sequence
  Description of Artificial Sequence: Synthetic oligonucleotide
  Sense strand starting at position 3241 of SEQ ID NO: 916852
cccugaguuuccucucuag

SEQ ID NO: 1189097 - RNA, 19 nt, Artificial Sequence
  Description of Artificial Sequence: Synthetic oligonucleotide
  Antisense strand to SEQ ID NO: 1189096
cuagagaggaaacucaggg

SEQ ID NO: 1189098 - RNA, 19 nt, Artificial Sequence
  Description of Artificial Sequence: Synthetic oligonucleotide
  Sense strand starting at position 3244 of SEQ ID NO: 916852
ugaguuuccucucuagaau

SEQ ID NO: 1189099 - RNA, 19 nt, Artificial Sequence
  Description of Artificial Sequence: Synthetic oligonucleotide
  Antisense strand to SEQ ID NO: 1189098
auucuagagaggaaacuca

SEQ ID NO: 1189100 - RNA, 19 nt, Artificial Sequence
  Description of Artificial Sequence: Synthetic oligonucleotide
  Sense strand starting at position 3245 of SEQ ID NO: 916852
gaguuuccucucuagaaug

SEQ ID NO: 1189101 - RNA, 19 nt, Artificial Sequence
  Description of Artificial Sequence: Synthetic oligonucleotide
  Antisense strand to SEQ ID NO: 1189100
cauucuagagaggaaacuc

SEQ ID NO: 1189102 - RNA, 19 nt, Artificial Sequence
  Description of Artificial Sequence: Synthetic oligonucleotide
  Sense strand starting at position 3247 of SEQ ID NO: 916852
guuuccucucuagaaugaa

SEQ ID NO: 1189103 - RNA, 19 nt, Artificial Sequence
  Description of Artificial Sequence: Synthetic oligonucleotide
  Antisense strand to SEQ ID NO: 1189102
uucauucuagagaggaaac

SEQ ID NO: 1189104 - RNA, 19 nt, Artificial Sequence
  Description of Artificial Sequence: Synthetic oligonucleotide
  Sense strand starting at position 3358 of SEQ ID NO: 916852
agaggcauuugggaauugu

SEQ ID NO: 1189105 - RNA, 19 nt, Artificial Sequence
  Description of Artificial Sequence: Synthetic oligonucleotide
  Antisense strand to SEQ ID NO: 1189104
acaauucccaaaugccucu

SEQ ID NO: 1189106 - RNA, 19 nt, Artificial Sequence
  Description of Artificial Sequence: Synthetic oligonucleotide
  Sense strand starting at position 3512 of SEQ ID NO: 916852
uugagagaucgaggcgagu

SEQ ID NO: 1189107 - RNA, 19 nt, Artificial Sequence
  Description of Artificial Sequence: Synthetic oligonucleotide
  Antisense strand to SEQ ID NO: 1189106
acucgccucgaucucucaa

SEQ ID NO: 1189108 - RNA, 19 nt, Artificial Sequence
  Description of Artificial Sequence: Synthetic oligonucleotide
  Sense strand starting at position 3688 of SEQ ID NO: 916852
ggagguuugcagugagaua

SEQ ID NO: 1189109 - RNA, 19 nt, Artificial Sequence
  Description of Artificial Sequence: Synthetic oligonucleotide
  Antisense strand to SEQ ID NO: 1189108
uaucucacugcaaaccucc

SEQ ID NO: 1189110 - RNA, 19 nt, Artificial Sequence
  Description of Artificial Sequence: Synthetic oligonucleotide
  Sense strand starting at position 3689 of SEQ ID NO: 916852
gagguuugcagugagauau

SEQ ID NO: 1189111 - RNA, 19 nt, Artificial Sequence
  Description of Artificial Sequence: Synthetic oligonucleotide
  Antisense strand to SEQ ID NO: 1189110
auaucucacugcaaaccuc

SEQ ID NO: 1189112 - RNA, 19 nt, Artificial Sequence
  Description of Artificial Sequence: Synthetic oligonucleotide
  Sense strand starting at position 3693 of SEQ ID NO: 916852
uuugcagugagauaucaug

SEQ ID NO: 1189113 - RNA, 19 nt, Artificial Sequence
  Description of Artificial Sequence: Synthetic oligonucleotide
  Antisense strand to SEQ ID NO: 1189112
caugauaucucacugcaaa

SEQ ID NO: 1189114 - RNA, 19 nt, Artificial Sequence
  Description of Artificial Sequence: Synthetic oligonucleotide
  Sense strand starting at position 3796 of SEQ ID NO: 916852
agggcauccuaauuaagag

SEQ ID NO: 1189115 - RNA, 19 nt, Artificial Sequence
  Description of Artificial Sequence: Synthetic oligonucleotide
  Antisense strand to SEQ ID NO: 1189114
cucuuaauuaggaugcccu

SEQ ID NO: 1189116 - RNA, 19 nt, Artificial Sequence
  Description of Artificial Sequence: Synthetic oligonucleotide
  Sense strand starting at position 3797 of SEQ ID NO: 916852
gggcauccuaauuaagagu

SEQ ID NO: 1189117 - RNA, 19 nt, Artificial Sequence
  Description of Artificial Sequence: Synthetic oligonucleotide
  Antisense strand to SEQ ID NO: 1189116
acucuuaauuaggaugccc

SEQ ID NO: 1189118 - RNA, 19 nt, Artificial Sequence
  Description of Artificial Sequence: Synthetic oligonucleotide
  Sense strand starting at position 3951 of SEQ ID NO: 916852
gaugacagaccuuguccau

SEQ ID NO: 1189119 - RNA, 19 nt, Artificial Sequence
  Description of Artificial Sequence: Synthetic oligonucleotide
  Antisense strand to SEQ ID NO: 1189118
auggacaaggucugucauc

SEQ ID NO: 1189120 - RNA, 19 nt, Artificial Sequence
  Description of Artificial Sequence: Synthetic oligonucleotide
  Sense strand starting at position 3981 of SEQ ID NO: 916852
cgguuacgauggaagcaua

SEQ ID NO: 1189121 - RNA, 19 nt, Artificial Sequence
  Description of Artificial Sequence: Synthetic oligonucleotide
  Antisense strand to SEQ ID NO: 1189120
uaugcuuccaucguaaccg

SEQ ID NO: 1189122 - RNA, 19 nt, Artificial Sequence
  Description of Artificial Sequence: Synthetic oligonucleotide
  Sense strand starting at position 99 of SEQ ID NO: 916853
ggcgauuuggcaggcaaac

SEQ ID NO: 1189123 - RNA, 19 nt, Artificial Sequence
  Description of Artificial Sequence: Synthetic oligonucleotide
  Antisense strand to SEQ ID NO: 1189122
guuugccugccaaaucgcc

SEQ ID NO: 1189124 - RNA, 19 nt, Artificial Sequence
  Description of Artificial Sequence: Synthetic oligonucleotide
  Sense strand starting at position 482 of SEQ ID NO: 916853
cugcaagcauccuuuagua

SEQ ID NO: 1189125 - RNA, 19 nt, Artificial Sequence
  Description of Artificial Sequence: Synthetic oligonucleotide
  Antisense strand to SEQ ID NO: 1189124
uacuaaaggaugcuugcag

SEQ ID NO: 1189126 - RNA, 19 nt, Artificial Sequence
  Description of Artificial Sequence: Synthetic oligonucleotide
  Sense strand starting at position 484 of SEQ ID NO: 916853
gcaagcauccuuuaguaau

SEQ ID NO: 1189127 - RNA, 19 nt, Artificial Sequence
  Description of Artificial Sequence: Synthetic oligonucleotide
  Antisense strand to SEQ ID NO: 1189126
auuacuaaaggaugcuugc

SEQ ID NO: 1189128 - RNA, 19 nt, Artificial Sequence
  Description of Artificial Sequence: Synthetic oligonucleotide
  Sense strand starting at position 1010 of SEQ ID NO: 916853
agagaugauuucuacguua

SEQ ID NO: 1189129 - RNA, 19 nt, Artificial Sequence
  Description of Artificial Sequence: Synthetic oligonucleotide
  Antisense strand to SEQ ID NO: 1189128
uaacguagaaaucaucucu

SEQ ID NO: 1189130 - RNA, 19 nt, Artificial Sequence
  Description of Artificial Sequence: Synthetic oligonucleotide
  Sense strand starting at position 1092 of SEQ ID NO: 916853
ucaccuuaccuccggaaau

SEQ ID NO: 1189131 - RNA, 19 nt, Artificial Sequence
  Description of Artificial Sequence: Synthetic oligonucleotide
  Antisense strand to SEQ ID NO: 1189130
auuuccggagguaagguga

SEQ ID NO: 1189132 - RNA, 19 nt, Artificial Sequence
  Description of Artificial Sequence: Synthetic oligonucleotide
  Sense strand starting at position 1176 of SEQ ID NO: 916853
uuugauguccuuuguguca

SEQ ID NO: 1189133 - RNA, 19 nt, Artificial Sequence
  Description of Artificial Sequence: Synthetic oligonucleotide
  Antisense strand to SEQ ID NO: 1189132
ugacacaaaggacaucaaa

SEQ ID NO: 1189134 - RNA, 19 nt, Artificial Sequence
  Description of Artificial Sequence: Synthetic oligonucleotide
  Sense strand starting at position 1268 of SEQ ID NO: 916853
gcggauuucggaggaaggu

SEQ ID NO: 1189135 - RNA, 19 nt, Artificial Sequence
  Description of Artificial Sequence: Synthetic oligonucleotide
  Antisense strand to SEQ ID NO: 1189134
accuuccuccgaaauccgc

SEQ ID NO: 1189136 - RNA, 19 nt, Artificial Sequence
  Description of Artificial Sequence: Synthetic oligonucleotide
  Sense strand starting at position 1369 of SEQ ID NO: 916853
ggccgauugcaucagaauc

SEQ ID NO: 1189137 - RNA, 19 nt, Artificial Sequence
  Description of Artificial Sequence: Synthetic oligonucleotide
  Antisense strand to SEQ ID NO: 1189136
gauucugaugcaaucggcc

SEQ ID NO: 1189138 - RNA, 19 nt, Artificial Sequence
  Description of Artificial Sequence: Synthetic oligonucleotide
  Sense strand starting at position 1516 of SEQ ID NO: 916853
auggcuugugaugguuuaa

SEQ ID NO: 1189139 - RNA, 19 nt, Artificial Sequence
  Description of Artificial Sequence: Synthetic oligonucleotide
  Antisense strand to SEQ ID NO: 1189138
uuaaaccaucacaagccau

SEQ ID NO: 1189140 - RNA, 19 nt, Artificial Sequence
  Description of Artificial Sequence: Synthetic oligonucleotide
  Sense strand starting at position 2005 of SEQ ID NO: 916853
agggaguugcauuguggga

SEQ ID NO: 1189141 - RNA, 19 nt, Artificial Sequence
  Description of Artificial Sequence: Synthetic oligonucleotide
  Antisense strand to SEQ ID NO: 1189140
ucccacaaugcaacucccu

SEQ ID NO: 1189142 - RNA, 19 nt, Artificial Sequence
  Description of Artificial Sequence: Synthetic oligonucleotide
  Sense strand starting at position 2651 of SEQ ID NO: 916853
agccaauuagacugucaua

SEQ ID NO: 1189143 - RNA, 19 nt, Artificial Sequence
  Description of Artificial Sequence: Synthetic oligonucleotide
  Antisense strand to SEQ ID NO: 1189142
uaugacagucuaauuggcu

SEQ ID NO: 1189144 - RNA, 19 nt, Artificial Sequence
  Description of Artificial Sequence: Synthetic oligonucleotide
  Sense strand starting at position 2661 of SEQ ID NO: 916853
acugucauagcgcgaauuu

SEQ ID NO: 1189145 - RNA, 19 nt, Artificial Sequence
  Description of Artificial Sequence: Synthetic oligonucleotide
  Antisense strand to SEQ ID NO: 1189144
aaauucgcgcuaugacagu

SEQ ID NO: 1189146 - RNA, 19 nt, Artificial Sequence
  Description of Artificial Sequence: Synthetic oligonucleotide
  Sense strand starting at position 2662 of SEQ ID NO: 916853
cugucauagcgcgaauuug

SEQ ID NO: 1189147 - RNA, 19 nt, Artificial Sequence
  Description of Artificial Sequence: Synthetic oligonucleotide
  Antisense strand to SEQ ID NO: 1189146
caaauucgcgcuaugacag

SEQ ID NO: 1189148 - RNA, 19 nt, Artificial Sequence
  Description of Artificial Sequence: Synthetic oligonucleotide
  Sense strand starting at position 2672 of SEQ ID NO: 916853
gcgaauuugcaggguggaa

SEQ ID NO: 1189149 - RNA, 19 nt, Artificial Sequence
  Description of Artificial Sequence: Synthetic oligonucleotide
  Antisense strand to SEQ ID NO: 1189148
uuccacccugcaaauucgc

SEQ ID NO: 1189150 - RNA, 19 nt, Artificial Sequence
  Description of Artificial Sequence: Synthetic oligonucleotide
  Sense strand starting at position 2792 of SEQ ID NO: 916853
gcguuucaaguagacagua

SEQ ID NO: 1189151 - RNA, 19 nt, Artificial Sequence
  Description of Artificial Sequence: Synthetic oligonucleotide
  Antisense strand to SEQ ID NO: 1189150
uacugucuacuugaaacgc

SEQ ID NO: 1189152 - RNA, 19 nt, Artificial Sequence
  Description of Artificial Sequence: Synthetic oligonucleotide
  Sense strand starting at position 2797 of SEQ ID NO: 916853
ucaaguagacaguagucau

SEQ ID NO: 1189153 - RNA, 19 nt, Artificial Sequence
  Description of Artificial Sequence: Synthetic oligonucleotide
  Antisense strand to SEQ ID NO: 1189152
augacuacugucuacuuga

SEQ ID NO: 1189154 - RNA, 19 nt, Artificial Sequence
  Description of Artificial Sequence: Synthetic oligonucleotide
  Sense strand starting at position 2801 of SEQ ID NO: 916853
guagacaguagucauugua

SEQ ID NO: 1189155 - RNA, 19 nt, Artificial Sequence
  Description of Artificial Sequence: Synthetic oligonucleotide
  Antisense strand to SEQ ID NO: 1189154
uacaaugacuacugucuac

SEQ ID NO: 1189156 - RNA, 19 nt, Artificial Sequence
  Description of Artificial Sequence: Synthetic oligonucleotide
  Sense strand starting at position 2916 of SEQ ID NO: 916853
ggcaguaaauggccuuuau

SEQ ID NO: 1189157 - RNA, 19 nt, Artificial Sequence
  Description of Artificial Sequence: Synthetic oligonucleotide
  Antisense strand to SEQ ID NO: 1189156
auaaaggccauuuacugcc

SEQ ID NO: 1189158 - RNA, 19 nt, Artificial Sequence
  Description of Artificial Sequence: Synthetic oligonucleotide
  Sense strand starting at position 2920 of SEQ ID NO: 916853
guaaauggccuuuauuagu

SEQ ID NO: 1189159 - RNA, 19 nt, Artificial Sequence
  Description of Artificial Sequence: Synthetic oligonucleotide
  Antisense strand to SEQ ID NO: 1189158
acuaauaaaggccauuuac

SEQ ID NO: 1189160 - RNA, 19 nt, Artificial Sequence
  Description of Artificial Sequence: Synthetic oligonucleotide
  Sense strand starting at position 2941 of SEQ ID NO: 916853
aacaguggcuuccugagaa

SEQ ID NO: 1189161 - RNA, 19 nt, Artificial Sequence
  Description of Artificial Sequence: Synthetic oligonucleotide
  Antisense strand to SEQ ID NO: 1189160
uucucaggaagccacuguu

SEQ ID NO: 1189162 - RNA, 19 nt, Artificial Sequence
  Description of Artificial Sequence: Synthetic oligonucleotide
  Sense strand starting at position 2951 of SEQ ID NO: 916853
uccugagaauccuauuuag

SEQ ID NO: 1189163 - RNA, 19 nt, Artificial Sequence
  Description of Artificial Sequence: Synthetic oligonucleotide
  Antisense strand to SEQ ID NO: 1189162
cuaaauaggauucucagga

SEQ ID NO: 1189164 - RNA, 19 nt, Artificial Sequence
  Description of Artificial Sequence: Synthetic oligonucleotide
  Sense strand starting at position 2971 of SEQ ID NO: 916853
aggcaugcucuugagaaau

SEQ ID NO: 1189165 - RNA, 19 nt, Artificial Sequence
  Description of Artificial Sequence: Synthetic oligonucleotide
  Antisense strand to SEQ ID NO: 1189164
auuucucaagagcaugccu

SEQ ID NO: 1189166 - RNA, 19 nt, Artificial Sequence
  Description of Artificial Sequence: Synthetic oligonucleotide
  Sense strand starting at position 3167 of SEQ ID NO: 916853
agcaauauucuauagguca

SEQ ID NO: 1189167 - RNA, 19 nt, Artificial Sequence
  Description of Artificial Sequence: Synthetic oligonucleotide
  Antisense strand to SEQ ID NO: 1189166
ugaccuauagaauauugcu

SEQ ID NO: 1189168 - RNA, 19 nt, Artificial Sequence
  Description of Artificial Sequence: Synthetic oligonucleotide
  Sense strand starting at position 3196 of SEQ ID NO: 916853
gguucuuucuaccuuacua

SEQ ID NO: 1189169 - RNA, 19 nt, Artificial Sequence
  Description of Artificial Sequence: Synthetic oligonucleotide
  Antisense strand to SEQ ID NO: 1189168
uaguaagguagaaagaacc

SEQ ID NO: 1189170 - RNA, 19 nt, Artificial Sequence
  Description of Artificial Sequence: Synthetic oligonucleotide
  Sense strand starting at position 3286 of SEQ ID NO: 916853
ucaauaagguaagaaaucu

SEQ ID NO: 1189171 - RNA, 19 nt, Artificial Sequence
  Description of Artificial Sequence: Synthetic oligonucleotide
  Antisense strand to SEQ ID NO: 1189170
agauuucuuaccuuauuga

SEQ ID NO: 1189172 - RNA, 19 nt, Artificial Sequence
  Description of Artificial Sequence: Synthetic oligonucleotide
  Sense strand starting at position 3323 of SEQ ID NO: 916853
aacugugagccauagcuua

SEQ ID NO: 1189173 - RNA, 19 nt, Artificial Sequence
  Description of Artificial Sequence: Synthetic oligonucleotide
  Antisense strand to SEQ ID NO: 1189172
uaagcuauggcucacaguu

SEQ ID NO: 1189174 - RNA, 19 nt, Artificial Sequence
  Description of Artificial Sequence: Synthetic oligonucleotide
  Sense strand starting at position 3337 of SEQ ID NO: 916853
gcuuaauaggccuguugga

SEQ ID NO: 1189175 - RNA, 19 nt, Artificial Sequence
  Description of Artificial Sequence: Synthetic oligonucleotide
  Antisense strand to SEQ ID NO: 1189174
uccaacaggccuauuaagc

SEQ ID NO: 1189176 - RNA, 19 nt, Artificial Sequence
  Description of Artificial Sequence: Synthetic oligonucleotide
  Sense strand starting at position 3385 of SEQ ID NO: 916853
auucaucgcuguuuggaga

SEQ ID NO: 1189177 - RNA, 19 nt, Artificial Sequence
  Description of Artificial Sequence: Synthetic oligonucleotide
  Antisense strand to SEQ ID NO: 1189176
ucuccaaacagcgaugaau

SEQ ID NO: 1189178 - RNA, 19 nt, Artificial Sequence
  Description of Artificial Sequence: Synthetic oligonucleotide
  Sense strand starting at position 3398 of SEQ ID NO: 916853
uggagauuaucugaaccaa

SEQ ID NO: 1189179 - RNA, 19 nt, Artificial Sequence
  Description of Artificial Sequence: Synthetic oligonucleotide
  Antisense strand to SEQ ID NO: 1189178
uugguucagauaaucucca

SEQ ID NO: 1189180 - RNA, 19 nt, Artificial Sequence
  Description of Artificial Sequence: Synthetic oligonucleotide
  Sense strand starting at position 3445 of SEQ ID NO: 916853
acuugcuaguuucuguaua

SEQ ID NO: 1189181 - RNA, 19 nt, Artificial Sequence
  Description of Artificial Sequence: Synthetic oligonucleotide
  Antisense strand to SEQ ID NO: 1189180
uauacagaaacuagcaagu

SEQ ID NO: 1189182 - RNA, 19 nt, Artificial Sequence
  Description of Artificial Sequence: Synthetic oligonucleotide
  Sense strand starting at position 3450 of SEQ ID NO: 916853
cuaguuucuguauaucaaa

SEQ ID NO: 1189183 - RNA, 19 nt, Artificial Sequence
  Description of Artificial Sequence: Synthetic oligonucleotide
  Antisense strand to SEQ ID NO: 1189182
uuugauauacagaaacuag

SEQ ID NO: 1189184 - RNA, 19 nt, Artificial Sequence
  Description of Artificial Sequence: Synthetic oligonucleotide
  Sense strand starting at position 3474 of SEQ ID NO: 916853
ugcaguuauuuagcacuuu

SEQ ID NO: 1189185 - RNA, 19 nt, Artificial Sequence
  Description of Artificial Sequence: Synthetic oligonucleotide
  Antisense strand to SEQ ID NO: 1189184
aaagugcuaaauaacugca

SEQ ID NO: 1189186 - RNA, 19 nt, Artificial Sequence
  Description of Artificial Sequence: Synthetic oligonucleotide
  Sense strand starting at position 3590 of SEQ ID NO: 916853
cccucaguuggguauuauc

SEQ ID NO: 1189187 - RNA, 19 nt, Artificial Sequence
  Description of Artificial Sequence: Synthetic oligonucleotide
  Antisense strand to SEQ ID NO: 1189186
gauaauacccaacugaggg

SEQ ID NO: 1189188 - RNA, 19 nt, Artificial Sequence
  Description of Artificial Sequence: Synthetic oligonucleotide
  Sense strand starting at position 3598 of SEQ ID NO: 916853
uggguauuauccucuuuaa

SEQ ID NO: 1189189 - RNA, 19 nt, Artificial Sequence
  Description of Artificial Sequence: Synthetic oligonucleotide
  Antisense strand to SEQ ID NO: 1189188
uuaaagaggauaauaccca

SEQ ID NO: 1189190 - RNA, 19 nt, Artificial Sequence
  Description of Artificial Sequence: Synthetic oligonucleotide
  Sense strand starting at position 3652 of SEQ ID NO: 916853
cuaagacaguaauuaguga

SEQ ID NO: 1189191 - RNA, 19 nt, Artificial Sequence
  Description of Artificial Sequence: Synthetic oligonucleotide
  Antisense strand to SEQ ID NO: 1189190
ucacuaauuacugucuuag

SEQ ID NO: 1189192 - RNA, 19 nt, Artificial Sequence
  Description of Artificial Sequence: Synthetic oligonucleotide
  Sense strand starting at position 3750 of SEQ ID NO: 916853
agacauucuugggccuaga

SEQ ID NO: 1189193 - RNA, 19 nt, Artificial Sequence
  Description of Artificial Sequence: Synthetic oligonucleotide
  Antisense strand to SEQ ID NO: 1189192
ucuaggcccaagaaugucu

SEQ ID NO: 1189194 - RNA, 19 nt, Artificial Sequence
  Description of Artificial Sequence: Synthetic oligonucleotide
  Sense strand starting at position 3753 of SEQ ID NO: 916853
cauucuugggccuagaguu

SEQ ID NO: 1189195 - RNA, 19 nt, Artificial Sequence
  Description of Artificial Sequence: Synthetic oligonucleotide
  Antisense strand to SEQ ID NO: 1189194
aacucuaggcccaagaaug

SEQ ID NO: 1189196 - RNA, 19 nt, Artificial Sequence
  Description of Artificial Sequence: Synthetic oligonucleotide
  Sense strand starting at position 3934 of SEQ ID NO: 916853
cacagauggucucucguuu

SEQ ID NO: 1189197 - RNA, 19 nt, Artificial Sequence
  Description of Artificial Sequence: Synthetic oligonucleotide
  Antisense strand to SEQ ID NO: 1189196
aaacgagagaccaucugug

SEQ ID NO: 1189198 - RNA, 19 nt, Artificial Sequence
  Description of Artificial Sequence: Synthetic oligonucleotide
  Sense strand starting at position 3938 of SEQ ID NO: 916853
gauggucucucguuuaauu

SEQ ID NO: 1189199 - RNA, 19 nt, Artificial Sequence
  Description of Artificial Sequence: Synthetic oligonucleotide
  Antisense strand to SEQ ID NO: 1189198
aauuaaacgagagaccauc

SEQ ID NO: 1189200 - RNA, 19 nt, Artificial Sequence
  Description of Artificial Sequence: Synthetic oligonucleotide
  Sense strand starting at position 3940 of SEQ ID NO: 916853
uggucucucguuuaauucu

SEQ ID NO: 1189201 - RNA, 19 nt, Artificial Sequence
  Description of Artificial Sequence: Synthetic oligonucleotide
  Antisense strand to SEQ ID NO: 1189200
agaauuaaacgagagacca

SEQ ID NO: 1189202 - RNA, 19 nt, Artificial Sequence
  Description of Artificial Sequence: Synthetic oligonucleotide
  Sense strand starting at position 214 of SEQ ID NO: 916854
uugucaucugaguaguaca

SEQ ID NO: 1189203 - RNA, 19 nt, Artificial Sequence
  Description of Artificial Sequence: Synthetic oligonucleotide
  Antisense strand to SEQ ID NO: 1189202
uguacuacucagaugacaa

SEQ ID NO: 1189204 - RNA, 19 nt, Artificial Sequence
  Description of Artificial Sequence: Synthetic oligonucleotide
  Sense strand starting at position 320 of SEQ ID NO: 916854
ugugccuuugcauacaaga

SEQ ID NO: 1189205 - RNA, 19 nt, Artificial Sequence
  Description of Artificial Sequence: Synthetic oligonucleotide
  Antisense strand to SEQ ID NO: 1189204
ucuuguaugcaaaggcaca

SEQ ID NO: 1189206 - RNA, 19 nt, Artificial Sequence
  Description of Artificial Sequence: Synthetic oligonucleotide
  Sense strand starting at position 418 of SEQ ID NO: 916854
agauguauauucucccaga

SEQ ID NO: 1189207 - RNA, 19 nt, Artificial Sequence
  Description of Artificial Sequence: Synthetic oligonucleotide
  Antisense strand to SEQ ID NO: 1189206
ucugggagaauauacaucu

SEQ ID NO: 1189208 - RNA, 19 nt, Artificial Sequence
  Description of Artificial Sequence: Synthetic oligonucleotide
  Sense strand starting at position 419 of SEQ ID NO: 916854
gauguauauucucccagag

SEQ ID NO: 1189209 - RNA, 19 nt, Artificial Sequence
  Description of Artificial Sequence: Synthetic oligonucleotide
  Antisense strand to SEQ ID NO: 1189208
cucugggagaauauacauc

SEQ ID NO: 1189210 - RNA, 19 nt, Artificial Sequence
  Description of Artificial Sequence: Synthetic oligonucleotide
  Sense strand starting at position 452 of SEQ ID NO: 916854
gguaguuuccaucaagaua

SEQ ID NO: 1189211 - RNA, 19 nt, Artificial Sequence
  Description of Artificial Sequence: Synthetic oligonucleotide
  Antisense strand to SEQ ID NO: 1189210
uaucuugauggaaacuacc

SEQ ID NO: 1189212 - RNA, 19 nt, Artificial Sequence
  Description of Artificial Sequence: Synthetic oligonucleotide
  Sense strand starting at position 559 of SEQ ID NO: 916854
ucugguagauauguuuaau

SEQ ID NO: 1189213 - RNA, 19 nt, Artificial Sequence
  Description of Artificial Sequence: Synthetic oligonucleotide
  Antisense strand to SEQ ID NO: 1189212
auuaaacauaucuaccaga

SEQ ID NO: 1189214 - RNA, 19 nt, Artificial Sequence
  Description of Artificial Sequence: Synthetic oligonucleotide
  Sense strand starting at position 745 of SEQ ID NO: 916854
ccaagauuccugggugagu

SEQ ID NO: 1189215 - RNA, 19 nt, Artificial Sequence
  Description of Artificial Sequence: Synthetic oligonucleotide
  Antisense strand to SEQ ID NO: 1189214
acucacccaggaaucuugg

SEQ ID NO: 1189216 - RNA, 19 nt, Artificial Sequence
  Description of Artificial Sequence: Synthetic oligonucleotide
  Sense strand starting at position 746 of SEQ ID NO: 916854
caagauuccugggugagua

SEQ ID NO: 1189217 - RNA, 19 nt, Artificial Sequence
  Description of Artificial Sequence: Synthetic oligonucleotide
  Antisense strand to SEQ ID NO: 1189216
uacucacccaggaaucuug

SEQ ID NO: 1189218 - RNA, 19 nt, Artificial Sequence
  Description of Artificial Sequence: Synthetic oligonucleotide
  Sense strand starting at position 747 of SEQ ID NO: 916854
aagauuccugggugaguaa

SEQ ID NO: 1189219 - RNA, 19 nt, Artificial Sequence
  Description of Artificial Sequence: Synthetic oligonucleotide
  Antisense strand to SEQ ID NO: 1189218
uuacucacccaggaaucuu

SEQ ID NO: 1189220 - RNA, 19 nt, Artificial Sequence
  Description of Artificial Sequence: Synthetic oligonucleotide
  Sense strand starting at position 763 of SEQ ID NO: 916854
uaagcugaggccugauauu

SEQ ID NO: 1189221 - RNA, 19 nt, Artificial Sequence
  Description of Artificial Sequence: Synthetic oligonucleotide
  Antisense strand to SEQ ID NO: 1189220
aauaucaggccucagcuua

SEQ ID NO: 1189222 - RNA, 19 nt, Artificial Sequence
  Description of Artificial Sequence: Synthetic oligonucleotide
  Sense strand starting at position 783 of SEQ ID NO: 916854
auauuugacucagagccua

SEQ ID NO: 1189223 - RNA, 19 nt, Artificial Sequence
  Description of Artificial Sequence: Synthetic oligonucleotide
  Antisense strand to SEQ ID NO: 1189222
uaggcucugagucaaauau

SEQ ID NO: 1189224 - RNA, 19 nt, Artificial Sequence
  Description of Artificial Sequence: Synthetic oligonucleotide
  Sense strand starting at position 818 of SEQ ID NO: 916854
cuuccaucaccuggaguaa

SEQ ID NO: 1189225 - RNA, 19 nt, Artificial Sequence
  Description of Artificial Sequence: Synthetic oligonucleotide
  Antisense strand to SEQ ID NO: 1189224
uuacuccaggugauggaag

SEQ ID NO: 1189226 - RNA, 19 nt, Artificial Sequence
  Description of Artificial Sequence: Synthetic oligonucleotide
  Sense strand starting at position 882 of SEQ ID NO: 916854
cagugaggugaucagugaa

SEQ ID NO: 1189227 - RNA, 19 nt, Artificial Sequence
  Description of Artificial Sequence: Synthetic oligonucleotide
  Antisense strand to SEQ ID NO: 1189226
uucacugaucaccucacug

SEQ ID NO: 1189228 - RNA, 19 nt, Artificial Sequence
  Description of Artificial Sequence: Synthetic oligonucleotide
  Sense strand starting at position 885 of SEQ ID NO: 916854
ugaggugaucagugaacac

SEQ ID NO: 1189229 - RNA, 19 nt, Artificial Sequence
  Description of Artificial Sequence: Synthetic oligonucleotide
  Antisense strand to SEQ ID NO: 1189228
guguucacugaucaccuca

SEQ ID NO: 1189230 - RNA, 19 nt, Artificial Sequence
  Description of Artificial Sequence: Synthetic oligonucleotide
  Sense strand starting at position 896 of SEQ ID NO: 916854
gugaacacuucucccaaga

SEQ ID NO: 1189231 - RNA, 19 nt, Artificial Sequence
  Description of Artificial Sequence: Synthetic oligonucleotide
  Antisense strand to SEQ ID NO: 1189230
ucuugggagaaguguucac

SEQ ID NO: 1189232 - RNA, 19 nt, Artificial Sequence
  Description of Artificial Sequence: Synthetic oligonucleotide
  Sense strand starting at position 1030 of SEQ ID NO: 916854
uagggugaacugugagaaa

SEQ ID NO: 1189233 - RNA, 19 nt, Artificial Sequence
  Description of Artificial Sequence: Synthetic oligonucleotide
  Antisense strand to SEQ ID NO: 1189232
uuucucacaguucacccua

SEQ ID NO: 1189234 - RNA, 19 nt, Artificial Sequence
  Description of Artificial Sequence: Synthetic oligonucleotide
  Sense strand starting at position 1088 of SEQ ID NO: 916854
cagauugugaaggguccua

SEQ ID NO: 1189235 - RNA, 19 nt, Artificial Sequence
  Description of Artificial Sequence: Synthetic oligonucleotide
  Antisense strand to SEQ ID NO: 1189234
uaggacccuucacaaucug

SEQ ID NO: 1189236 - RNA, 19 nt, Artificial Sequence
  Description of Artificial Sequence: Synthetic oligonucleotide
  Sense strand starting at position 1104 of SEQ ID NO: 916854
cuaaguguauggcuaagga

SEQ ID NO: 1189237 - RNA, 19 nt, Artificial Sequence
  Description of Artificial Sequence: Synthetic oligonucleotide
  Antisense strand to SEQ ID NO: 1189236
uccuuagccauacacuuag

SEQ ID NO: 1189238 - RNA, 19 nt, Artificial Sequence
  Description of Artificial Sequence: Synthetic oligonucleotide
  Sense strand starting at position 1128 of SEQ ID NO: 916854
gacuguauuugugugcaau

SEQ ID NO: 1189239 - RNA, 19 nt, Artificial Sequence
  Description of Artificial Sequence: Synthetic oligonucleotide
  Antisense strand to SEQ ID NO: 1189238
auugcacacaaauacaguc

SEQ ID NO: 1189240 - RNA, 19 nt, Artificial Sequence
  Description of Artificial Sequence: Synthetic oligonucleotide
  Sense strand starting at position 1129 of SEQ ID NO: 916854
acuguauuugugugcaaug

SEQ ID NO: 1189241 - RNA, 19 nt, Artificial Sequence
  Description of Artificial Sequence: Synthetic oligonucleotide
  Antisense strand to SEQ ID NO: 1189240
cauugcacacaaauacagu

SEQ ID NO: 1189242 - RNA, 19 nt, Artificial Sequence
  Description of Artificial Sequence: Synthetic oligonucleotide
  Sense strand starting at position 1244 of SEQ ID NO: 916854
gggagcauaacuugauaug

SEQ ID NO: 1189243 - RNA, 19 nt, Artificial Sequence
  Description of Artificial Sequence: Synthetic oligonucleotide
  Antisense strand to SEQ ID NO: 1189242
cauaucaaguuaugcuccc

SEQ ID NO: 1189244 - RNA, 19 nt, Artificial Sequence
  Description of Artificial Sequence: Synthetic oligonucleotide
  Sense strand starting at position 1320 of SEQ ID NO: 916854
ccauauguugugcuugcau

SEQ ID NO: 1189245 - RNA, 19 nt, Artificial Sequence
  Description of Artificial Sequence: Synthetic oligonucleotide
  Antisense strand to SEQ ID NO: 1189244
augcaagcacaacauaugg

SEQ ID NO: 1189246 - RNA, 19 nt, Artificial Sequence
  Description of Artificial Sequence: Synthetic oligonucleotide
  Sense strand starting at position 1322 of SEQ ID NO: 916854
auauguugugcuugcauuu

SEQ ID NO: 1189247 - RNA, 19 nt, Artificial Sequence
  Description of Artificial Sequence: Synthetic oligonucleotide
  Antisense strand to SEQ ID NO: 1189246
aaaugcaagcacaacauau

SEQ ID NO: 1189248 - RNA, 19 nt, Artificial Sequence
  Description of Artificial Sequence: Synthetic oligonucleotide
  Sense strand starting at position 1436 of SEQ ID NO: 916854
gaacuugggcaguggaaau

SEQ ID NO: 1189249 - RNA, 19 nt, Artificial Sequence
  Description of Artificial Sequence: Synthetic oligonucleotide
  Antisense strand to SEQ ID NO: 1189248
auuuccacugcccaaguuc

SEQ ID NO: 1189250 - RNA, 19 nt, Artificial Sequence
  Description of Artificial Sequence: Synthetic oligonucleotide
  Sense strand starting at position 1654 of SEQ ID NO: 916854
ucucaaggucucgauccaa

SEQ ID NO: 1189251 - RNA, 19 nt, Artificial Sequence
  Description of Artificial Sequence: Synthetic oligonucleotide
  Antisense strand to SEQ ID NO: 1189250
uuggaucgagaccuugaga

SEQ ID NO: 1189252 - RNA, 19 nt, Artificial Sequence
  Description of Artificial Sequence: Synthetic oligonucleotide
  Sense strand starting at position 1694 of SEQ ID NO: 916854
cuaugugcuggacauuaga

SEQ ID NO: 1189253 - RNA, 19 nt, Artificial Sequence
  Description of Artificial Sequence: Synthetic oligonucleotide
  Antisense strand to SEQ ID NO: 1189252
ucuaauguccagcacauag

SEQ ID NO: 1189254 - RNA, 19 nt, Artificial Sequence
  Description of Artificial Sequence: Synthetic oligonucleotide
  Sense strand starting at position 1927 of SEQ ID NO: 916854
gucaaagaagagugcaaua

SEQ ID NO: 1189255 - RNA, 19 nt, Artificial Sequence
  Description of Artificial Sequence: Synthetic oligonucleotide
  Antisense strand to SEQ ID NO: 1189254
uauugcacucuucuuugac

SEQ ID NO: 1189256 - RNA, 19 nt, Artificial Sequence
  Description of Artificial Sequence: Synthetic oligonucleotide
  Sense strand starting at position 2001 of SEQ ID NO: 916854
ggaaauagcugaucccuuu

SEQ ID NO: 1189257 - RNA, 19 nt, Artificial Sequence
  Description of Artificial Sequence: Synthetic oligonucleotide
  Antisense strand to SEQ ID NO: 1189256
aaagggaucagcuauuucc

SEQ ID NO: 1189258 - RNA, 19 nt, Artificial Sequence
  Description of Artificial Sequence: Synthetic oligonucleotide
  Sense strand starting at position 2145 of SEQ ID NO: 916854
ugaaauguauaugccuaca

SEQ ID NO: 1189259 - RNA, 19 nt, Artificial Sequence
  Description of Artificial Sequence: Synthetic oligonucleotide
  Antisense strand to SEQ ID NO: 1189258
uguaggcauauacauuuca

SEQ ID NO: 1189260 - RNA, 19 nt, Artificial Sequence
  Description of Artificial Sequence: Synthetic oligonucleotide
  Sense strand starting at position 2290 of SEQ ID NO: 916854
gcgaauaaaccucaagauu

SEQ ID NO: 1189261 - RNA, 19 nt, Artificial Sequence
  Description of Artificial Sequence: Synthetic oligonucleotide
  Antisense strand to SEQ ID NO: 1189260
aaucuugagguuuauucgc

SEQ ID NO: 1189262 - RNA, 19 nt, Artificial Sequence
  Description of Artificial Sequence: Synthetic oligonucleotide
  Sense strand starting at position 2359 of SEQ ID NO: 916854
ugagaaaucgagugacucu

SEQ ID NO: 1189263 - RNA, 19 nt, Artificial Sequence
  Description of Artificial Sequence: Synthetic oligonucleotide
  Antisense strand to SEQ ID NO: 1189262
agagucacucgauuucuca

SEQ ID NO: 1189264 - RNA, 19 nt, Artificial Sequence
  Description of Artificial Sequence: Synthetic oligonucleotide
  Sense strand starting at position 2478 of SEQ ID NO: 916854
accaaauuggcaugagaca

SEQ ID NO: 1189265 - RNA, 19 nt, Artificial Sequence
  Description of Artificial Sequence: Synthetic oligonucleotide
  Antisense strand to SEQ ID NO: 1189264
ugucucaugccaauuuggu

SEQ ID NO: 1189266 - RNA, 19 nt, Artificial Sequence
  Description of Artificial Sequence: Synthetic oligonucleotide
  Sense strand starting at position 2566 of SEQ ID NO: 916854
gcacgaguugcugcacagu

SEQ ID NO: 1189267 - RNA, 19 nt, Artificial Sequence
  Description of Artificial Sequence: Synthetic oligonucleotide
  Antisense strand to SEQ ID NO: 1189266
acugugcagcaacucgugc

SEQ ID NO: 1189268 - RNA, 19 nt, Artificial Sequence
  Description of Artificial Sequence: Synthetic oligonucleotide
  Sense strand starting at position 2776 of SEQ ID NO: 916854
ccgcggauucguccgagaa

SEQ ID NO: 1189269 - RNA, 19 nt, Artificial Sequence
  Description of Artificial Sequence: Synthetic oligonucleotide
  Antisense strand to SEQ ID NO: 1189268
uucucggacgaauccgcgg

SEQ ID NO: 1189270 - RNA, 19 nt, Artificial Sequence
  Description of Artificial Sequence: Synthetic oligonucleotide
  Sense strand starting at position 2779 of SEQ ID NO: 916854
cggauucguccgagaaagu

SEQ ID NO: 1189271 - RNA, 19 nt, Artificial Sequence
  Description of Artificial Sequence: Synthetic oligonucleotide
  Antisense strand to SEQ ID NO: 1189270
acuuucucggacgaauccg

SEQ ID NO: 1189272 - RNA, 19 nt, Artificial Sequence
  Description of Artificial Sequence: Synthetic oligonucleotide
  Sense strand starting at position 2780 of SEQ ID NO: 916854
ggauucguccgagaaagua

SEQ ID NO: 1189273 - RNA, 19 nt, Artificial Sequence
  Description of Artificial Sequence: Synthetic oligonucleotide
  Antisense strand to SEQ ID NO: 1189272
uacuuucucggacgaaucc

SEQ ID NO: 1189274 - RNA, 19 nt, Artificial Sequence
  Description of Artificial Sequence: Synthetic oligonucleotide
  Sense strand starting at position 2832 of SEQ ID NO: 916854
gaacgaggguuuguacaaa

SEQ ID NO: 1189275 - RNA, 19 nt, Artificial Sequence
  Description of Artificial Sequence: Synthetic oligonucleotide
  Antisense strand to SEQ ID NO: 1189274
uuuguacaaacccucguuc

SEQ ID NO: 1189276 - RNA, 19 nt, Artificial Sequence
  Description of Artificial Sequence: Synthetic oligonucleotide
  Sense strand starting at position 3029 of SEQ ID NO: 916854
ggcgauuuggcaggcaaac

SEQ ID NO: 1189277 - RNA, 19 nt, Artificial Sequence
  Description of Artificial Sequence: Synthetic oligonucleotide
  Antisense strand to SEQ ID NO: 1189276
guuugccugccaaaucgcc

SEQ ID NO: 1189278 - RNA, 19 nt, Artificial Sequence
  Description of Artificial Sequence: Synthetic oligonucleotide
  Sense strand starting at position 3414 of SEQ ID NO: 916854
gcaagcauccuuuaguaau

SEQ ID NO: 1189279 - RNA, 19 nt, Artificial Sequence
  Description of Artificial Sequence: Synthetic oligonucleotide
  Antisense strand to SEQ ID NO: 1189278
auuacuaaaggaugcuugc

SEQ ID NO: 1189280 - RNA, 19 nt, Artificial Sequence
  Description of Artificial Sequence: Synthetic oligonucleotide
  Sense strand starting at position 3940 of SEQ ID NO: 916854
agagaugauuucuacguua

SEQ ID NO: 1189281 - RNA, 19 nt, Artificial Sequence
  Description of Artificial Sequence: Synthetic oligonucleotide
  Antisense strand to SEQ ID NO: 1189280
uaacguagaaaucaucucu

SEQ ID NO: 1189282 - RNA, 19 nt, Artificial Sequence
  Description of Artificial Sequence: Synthetic oligonucleotide
  Sense strand starting at position 1 of SEQ ID NO: 916855
ccuggucacugcucaaagu

SEQ ID NO: 1189283 - RNA, 19 nt, Artificial Sequence
  Description of Artificial Sequence: Synthetic oligonucleotide
  Antisense strand to SEQ ID NO: 1189282
acuuugagcagugaccagg

SEQ ID NO: 1189284 - RNA, 19 nt, Artificial Sequence
  Description of Artificial Sequence: Synthetic oligonucleotide
  Sense strand starting at position 162 of SEQ ID NO: 916855
ucucaaggucucgauccaa

SEQ ID NO: 1189285 - RNA, 19 nt, Artificial Sequence
  Description of Artificial Sequence: Synthetic oligonucleotide
  Antisense strand to SEQ ID NO: 1189284
uuggaucgagaccuugaga

SEQ ID NO: 1189286 - RNA, 19 nt, Artificial Sequence
  Description of Artificial Sequence: Synthetic oligonucleotide
  Sense strand starting at position 199 of SEQ ID NO: 916855
guacuaugugcuggacauu

SEQ ID NO: 1189287 - RNA, 19 nt, Artificial Sequence
  Description of Artificial Sequence: Synthetic oligonucleotide
  Antisense strand to SEQ ID NO: 1189286
aauguccagcacauaguac

SEQ ID NO: 1189288 - RNA, 19 nt, Artificial Sequence
  Description of Artificial Sequence: Synthetic oligonucleotide
  Sense strand starting at position 202 of SEQ ID NO: 916855
cuaugugcuggacauuaga

SEQ ID NO: 1189289 - RNA, 19 nt, Artificial Sequence
  Description of Artificial Sequence: Synthetic oligonucleotide
  Antisense strand to SEQ ID NO: 1189288
ucuaauguccagcacauag

SEQ ID NO: 1189290 - RNA, 19 nt, Artificial Sequence
  Description of Artificial Sequence: Synthetic oligonucleotide
  Sense strand starting at position 435 of SEQ ID NO: 916855
gucaaagaagagugcaaua

SEQ ID NO: 1189291 - RNA, 19 nt, Artificial Sequence
  Description of Artificial Sequence: Synthetic oligonucleotide
  Antisense strand to SEQ ID NO: 1189290
uauugcacucuucuuugac

SEQ ID NO: 1189292 - RNA, 19 nt, Artificial Sequence
  Description of Artificial Sequence: Synthetic oligonucleotide
  Sense strand starting at position 509 of SEQ ID NO: 916855
ggaaauagcugaucccuuu

SEQ ID NO: 1189293 - RNA, 19 nt, Artificial Sequence
  Description of Artificial Sequence: Synthetic oligonucleotide
  Antisense strand to SEQ ID NO: 1189292
aaagggaucagcuauuucc

SEQ ID NO: 1189294 - RNA, 19 nt, Artificial Sequence
  Description of Artificial Sequence: Synthetic oligonucleotide
  Sense strand starting at position 575 of SEQ ID NO: 916855
cccggugagucacucuauu

SEQ ID NO: 1189295 - RNA, 19 nt, Artificial Sequence
  Description of Artificial Sequence: Synthetic oligonucleotide
  Antisense strand to SEQ ID NO: 1189294
aauagagugacucaccggg

SEQ ID NO: 1189296 - RNA, 19 nt, Artificial Sequence
  Description of Artificial Sequence: Synthetic oligonucleotide
  Sense strand starting at position 653 of SEQ ID NO: 916855
ugaaauguauaugccuaca

SEQ ID NO: 1189297 - RNA, 19 nt, Artificial Sequence
  Description of Artificial Sequence: Synthetic oligonucleotide
  Antisense strand to SEQ ID NO: 1189296
uguaggcauauacauuuca

SEQ ID NO: 1189298 - RNA, 19 nt, Artificial Sequence
  Description of Artificial Sequence: Synthetic oligonucleotide
  Sense strand starting at position 717 of SEQ ID NO: 916855
ugaaacaaaucuuguuagu

SEQ ID NO: 1189299 - RNA, 19 nt, Artificial Sequence
  Description of Artificial Sequence: Synthetic oligonucleotide
  Antisense strand to SEQ ID NO: 1189298
acuaacaagauuuguuuca

SEQ ID NO: 1189300 - RNA, 19 nt, Artificial Sequence
  Description of Artificial Sequence: Synthetic oligonucleotide
  Sense strand starting at position 750 of SEQ ID NO: 916855
caguaagcccucuguagaa

SEQ ID NO: 1189301 - RNA, 19 nt, Artificial Sequence
  Description of Artificial Sequence: Synthetic oligonucleotide
  Antisense strand to SEQ ID NO: 1189300
uucuacagagggcuuacug

SEQ ID NO: 1189302 - RNA, 19 nt, Artificial Sequence
  Description of Artificial Sequence: Synthetic oligonucleotide
  Sense strand starting at position 798 of SEQ ID NO: 916855
gcgaauaaaccucaagauu

SEQ ID NO: 1189303 - RNA, 19 nt, Artificial Sequence
  Description of Artificial Sequence: Synthetic oligonucleotide
  Antisense strand to SEQ ID NO: 1189302
aaucuugagguuuauucgc

SEQ ID NO: 1189304 - RNA, 19 nt, Artificial Sequence
  Description of Artificial Sequence: Synthetic oligonucleotide
  Sense strand starting at position 867 of SEQ ID NO: 916855
ugagaaaucgagugacucu

SEQ ID NO: 1189305 - RNA, 19 nt, Artificial Sequence
  Description of Artificial Sequence: Synthetic oligonucleotide
  Antisense strand to SEQ ID NO: 1189304
agagucacucgauuucuca

SEQ ID NO: 1189306 - RNA, 19 nt, Artificial Sequence
  Description of Artificial Sequence: Synthetic oligonucleotide
  Sense strand starting at position 874 of SEQ ID NO: 916855
ucgagugacucucaagaga

SEQ ID NO: 1189307 - RNA, 19 nt, Artificial Sequence
  Description of Artificial Sequence: Synthetic oligonucleotide
  Antisense strand to SEQ ID NO: 1189306
ucucuugagagucacucga

SEQ ID NO: 1189308 - RNA, 19 nt, Artificial Sequence
  Description of Artificial Sequence: Synthetic oligonucleotide
  Sense strand starting at position 967 of SEQ ID NO: 916855
uuugcaagauuucgggagu

SEQ ID NO: 1189309 - RNA, 19 nt, Artificial Sequence
  Description of Artificial Sequence: Synthetic oligonucleotide
  Antisense strand to SEQ ID NO: 1189308
acucccgaaaucuugcaaa

SEQ ID NO: 1189310 - RNA, 19 nt, Artificial Sequence
  Description of Artificial Sequence: Synthetic oligonucleotide
  Sense strand starting at position 968 of SEQ ID NO: 916855
uugcaagauuucgggagua

SEQ ID NO: 1189311 - RNA, 19 nt, Artificial Sequence
  Description of Artificial Sequence: Synthetic oligonucleotide
  Antisense strand to SEQ ID NO: 1189310
uacucccgaaaucuugcaa

SEQ ID NO: 1189312 - RNA, 19 nt, Artificial Sequence
  Description of Artificial Sequence: Synthetic oligonucleotide
  Sense strand starting at position 984 of SEQ ID NO: 916855
guaccaaauuggcaugaga

SEQ ID NO: 1189313 - RNA, 19 nt, Artificial Sequence
  Description of Artificial Sequence: Synthetic oligonucleotide
  Antisense strand to SEQ ID NO: 1189312
ucucaugccaauuugguac

SEQ ID NO: 1189314 - RNA, 19 nt, Artificial Sequence
  Description of Artificial Sequence: Synthetic oligonucleotide
  Sense strand starting at position 986 of SEQ ID NO: 916855
accaaauuggcaugagaca

SEQ ID NO: 1189315 - RNA, 19 nt, Artificial Sequence
  Description of Artificial Sequence: Synthetic oligonucleotide
  Antisense strand to SEQ ID NO: 1189314
ugucucaugccaauuuggu

SEQ ID NO: 1189316 - RNA, 19 nt, Artificial Sequence
  Description of Artificial Sequence: Synthetic oligonucleotide
  Sense strand starting at position 1074 of SEQ ID NO: 916855
gcacgaguugcugcacagu

SEQ ID NO: 1189317 - RNA, 19 nt, Artificial Sequence
  Description of Artificial Sequence: Synthetic oligonucleotide
  Antisense strand to SEQ ID NO: 1189316
acugugcagcaacucgugc

SEQ ID NO: 1189318 - RNA, 19 nt, Artificial Sequence
  Description of Artificial Sequence: Synthetic oligonucleotide
  Sense strand starting at position 1098 of SEQ ID NO: 916855
uuaucaaggugacaaauua

SEQ ID NO: 1189319 - RNA, 19 nt, Artificial Sequence
  Description of Artificial Sequence: Synthetic oligonucleotide
  Antisense strand to SEQ ID NO: 1189318
uaauuugucaccuugauaa

SEQ ID NO: 1189320 - RNA, 19 nt, Artificial Sequence
  Description of Artificial Sequence: Synthetic oligonucleotide
  Sense strand starting at position 1284 of SEQ ID NO: 916855
ccgcggauucguccgagaa

SEQ ID NO: 1189321 - RNA, 19 nt, Artificial Sequence
  Description of Artificial Sequence: Synthetic oligonucleotide
  Antisense strand to SEQ ID NO: 1189320
uucucggacgaauccgcgg

SEQ ID NO: 1189322 - RNA, 19 nt, Artificial Sequence
  Description of Artificial Sequence: Synthetic oligonucleotide
  Sense strand starting at position 1285 of SEQ ID NO: 916855
cgcggauucguccgagaaa

SEQ ID NO: 1189323 - RNA, 19 nt, Artificial Sequence
  Description of Artificial Sequence: Synthetic oligonucleotide
  Antisense strand to SEQ ID NO: 1189322
uuucucggacgaauccgcg

SEQ ID NO: 1189324 - RNA, 19 nt, Artificial Sequence
  Description of Artificial Sequence: Synthetic oligonucleotide
  Sense strand starting at position 1287 of SEQ ID NO: 916855
cggauucguccgagaaagu

SEQ ID NO: 1189325 - RNA, 19 nt, Artificial Sequence
  Description of Artificial Sequence: Synthetic oligonucleotide
  Antisense strand to SEQ ID NO: 1189324
acuuucucggacgaauccg

SEQ ID NO: 1189326 - RNA, 19 nt, Artificial Sequence
  Description of Artificial Sequence: Synthetic oligonucleotide
  Sense strand starting at position 1288 of SEQ ID NO: 916855
ggauucguccgagaaagua

SEQ ID NO: 1189327 - RNA, 19 nt, Artificial Sequence
  Description of Artificial Sequence: Synthetic oligonucleotide
  Antisense strand to SEQ ID NO: 1189326
uacuuucucggacgaaucc

SEQ ID NO: 1189328 - RNA, 19 nt, Artificial Sequence
  Description of Artificial Sequence: Synthetic oligonucleotide
  Sense strand starting at position 1297 of SEQ ID NO: 916855
cgagaaaguacgugauccu

SEQ ID NO: 1189329 - RNA, 19 nt, Artificial Sequence
  Description of Artificial Sequence: Synthetic oligonucleotide
  Antisense strand to SEQ ID NO: 1189328
aggaucacguacuuucucg

SEQ ID NO: 1189330 - RNA, 19 nt, Artificial Sequence
  Description of Artificial Sequence: Synthetic oligonucleotide
  Sense strand starting at position 1320 of SEQ ID NO: 916855
gcaguuagguuucuaacag

SEQ ID NO: 1189331 - RNA, 19 nt, Artificial Sequence
  Description of Artificial Sequence: Synthetic oligonucleotide
  Antisense strand to SEQ ID NO: 1189330
cuguuagaaaccuaacugc

SEQ ID NO: 1189332 - RNA, 19 nt, Artificial Sequence
  Description of Artificial Sequence: Synthetic oligonucleotide
  Sense strand starting at position 1321 of SEQ ID NO: 916855
caguuagguuucuaacaga

SEQ ID NO: 1189333 - RNA, 19 nt, Artificial Sequence
  Description of Artificial Sequence: Synthetic oligonucleotide
  Antisense strand to SEQ ID NO: 1189332
ucuguuagaaaccuaacug

SEQ ID NO: 1189334 - RNA, 19 nt, Artificial Sequence
  Description of Artificial Sequence: Synthetic oligonucleotide
  Sense strand starting at position 1324 of SEQ ID NO: 916855
uuagguuucuaacagagaa

SEQ ID NO: 1189335 - RNA, 19 nt, Artificial Sequence
  Description of Artificial Sequence: Synthetic oligonucleotide
  Antisense strand to SEQ ID NO: 1189334
uucucuguuagaaaccuaa

SEQ ID NO: 1189336 - RNA, 19 nt, Artificial Sequence
  Description of Artificial Sequence: Synthetic oligonucleotide
  Sense strand starting at position 1340 of SEQ ID NO: 916855
gaacgaggguuuguacaaa

SEQ ID NO: 1189337 - RNA, 19 nt, Artificial Sequence
  Description of Artificial Sequence: Synthetic oligonucleotide
  Antisense strand to SEQ ID NO: 1189336
uuuguacaaacccucguuc

SEQ ID NO: 1189338 - RNA, 19 nt, Artificial Sequence
  Description of Artificial Sequence: Synthetic oligonucleotide
  Sense strand starting at position 1537 of SEQ ID NO: 916855
ggcgauuuggcaggcaaac

SEQ ID NO: 1189339 - RNA, 19 nt, Artificial Sequence
  Description of Artificial Sequence: Synthetic oligonucleotide
  Antisense strand to SEQ ID NO: 1189338
guuugccugccaaaucgcc

SEQ ID NO: 1189340 - RNA, 19 nt, Artificial Sequence
  Description of Artificial Sequence: Synthetic oligonucleotide
  Sense strand starting at position 1920 of SEQ ID NO: 916855
cugcaagcauccuuuagua

SEQ ID NO: 1189341 - RNA, 19 nt, Artificial Sequence
  Description of Artificial Sequence: Synthetic oligonucleotide
  Antisense strand to SEQ ID NO: 1189340
uacuaaaggaugcuugcag

SEQ ID NO: 1189342 - RNA, 19 nt, Artificial Sequence
  Description of Artificial Sequence: Synthetic oligonucleotide
  Sense strand starting at position 1922 of SEQ ID NO: 916855
gcaagcauccuuuaguaau

SEQ ID NO: 1189343 - RNA, 19 nt, Artificial Sequence
  Description of Artificial Sequence: Synthetic oligonucleotide
  Antisense strand to SEQ ID NO: 1189342
auuacuaaaggaugcuugc

SEQ ID NO: 1189344 - RNA, 19 nt, Artificial Sequence
  Description of Artificial Sequence: Synthetic oligonucleotide
  Sense strand starting at position 2448 of SEQ ID NO: 916855
agagaugauuucuacguua

SEQ ID NO: 1189345 - RNA, 19 nt, Artificial Sequence
  Description of Artificial Sequence: Synthetic oligonucleotide
  Antisense strand to SEQ ID NO: 1189344
uaacguagaaaucaucucu

SEQ ID NO: 1189346 - RNA, 19 nt, Artificial Sequence
  Description of Artificial Sequence: Synthetic oligonucleotide
  Sense strand starting at position 2530 of SEQ ID NO: 916855
ucaccuuaccuccggaaau

SEQ ID NO: 1189347 - RNA, 19 nt, Artificial Sequence
  Description of Artificial Sequence: Synthetic oligonucleotide
  Antisense strand to SEQ ID NO: 1189346
auuuccggagguaagguga

SEQ ID NO: 1189348 - RNA, 19 nt, Artificial Sequence
  Description of Artificial Sequence: Synthetic oligonucleotide
  Sense strand starting at position 2614 of SEQ ID NO: 916855
uuugauguccuuuguguca

SEQ ID NO: 1189349 - RNA, 19 nt, Artificial Sequence
  Description of Artificial Sequence: Synthetic oligonucleotide
  Antisense strand to SEQ ID NO: 1189348
ugacacaaaggacaucaaa

SEQ ID NO: 1189350 - RNA, 19 nt, Artificial Sequence
  Description of Artificial Sequence: Synthetic oligonucleotide
  Sense strand starting at position 2706 of SEQ ID NO: 916855
gcggauuucggaggaaggu

SEQ ID NO: 1189351 - RNA, 19 nt, Artificial Sequence
  Description of Artificial Sequence: Synthetic oligonucleotide
  Antisense strand to SEQ ID NO: 1189350
accuuccuccgaaauccgc

SEQ ID NO: 1189352 - RNA, 19 nt, Artificial Sequence
  Description of Artificial Sequence: Synthetic oligonucleotide
  Sense strand starting at position 2807 of SEQ ID NO: 916855
ggccgauugcaucagaauc

SEQ ID NO: 1189353 - RNA, 19 nt, Artificial Sequence
  Description of Artificial Sequence: Synthetic oligonucleotide
  Antisense strand to SEQ ID NO: 1189352
gauucugaugcaaucggcc

SEQ ID NO: 1189354 - RNA, 19 nt, Artificial Sequence
  Description of Artificial Sequence: Synthetic oligonucleotide
  Sense strand starting at position 2954 of SEQ ID NO: 916855
auggcuugugaugguuuaa

SEQ ID NO: 1189355 - RNA, 19 nt, Artificial Sequence
  Description of Artificial Sequence: Synthetic oligonucleotide
  Antisense strand to SEQ ID NO: 1189354
uuaaaccaucacaagccau

SEQ ID NO: 1189356 - RNA, 19 nt, Artificial Sequence
  Description of Artificial Sequence: Synthetic oligonucleotide
  Sense strand starting at position 3038 of SEQ ID NO: 916855
accaaagcugcgugucagu

SEQ ID NO: 1189357 - RNA, 19 nt, Artificial Sequence
  Description of Artificial Sequence: Synthetic oligonucleotide
  Antisense strand to SEQ ID NO: 1189356
acugacacgcagcuuuggu

SEQ ID NO: 1189358 - RNA, 19 nt, Artificial Sequence
  Description of Artificial Sequence: Synthetic oligonucleotide
  Sense strand starting at position 3112 of SEQ ID NO: 916855
cuugcagcucucugacgau

SEQ ID NO: 1189359 - RNA, 19 nt, Artificial Sequence
  Description of Artificial Sequence: Synthetic oligonucleotide
  Antisense strand to SEQ ID NO: 1189358
aucgucagagagcugcaag

SEQ ID NO: 1189360 - RNA, 19 nt, Artificial Sequence
  Description of Artificial Sequence: Synthetic oligonucleotide
  Sense strand starting at position 3443 of SEQ ID NO: 916855
agggaguugcauuguggga

SEQ ID NO: 1189361 - RNA, 19 nt, Artificial Sequence
  Description of Artificial Sequence: Synthetic oligonucleotide
  Antisense strand to SEQ ID NO: 1189360
ucccacaaugcaacucccu

SEQ ID NO: 1189362 - RNA, 19 nt, Artificial Sequence
  Description of Artificial Sequence: Synthetic oligonucleotide
  Sense strand starting at position 85 of SEQ ID NO: 916856
acagcauagcucugauaca

SEQ ID NO: 1189363 - RNA, 19 nt, Artificial Sequence
  Description of Artificial Sequence: Synthetic oligonucleotide
  Antisense strand to SEQ ID NO: 1189362
uguaucagagcuaugcugu

SEQ ID NO: 1189364 - RNA, 19 nt, Artificial Sequence
  Description of Artificial Sequence: Synthetic oligonucleotide
  Sense strand starting at position 124 of SEQ ID NO: 916856
aauauuaacuaggaguuga

SEQ ID NO: 1189365 - RNA, 19 nt, Artificial Sequence
  Description of Artificial Sequence: Synthetic oligonucleotide
  Antisense strand to SEQ ID NO: 1189364
ucaacuccuaguuaauauu

SEQ ID NO: 1189366 - RNA, 19 nt, Artificial Sequence
  Description of Artificial Sequence: Synthetic oligonucleotide
  Sense strand starting at position 151 of SEQ ID NO: 916856
ccagcuaucuugucauuac

SEQ ID NO: 1189367 - RNA, 19 nt, Artificial Sequence
  Description of Artificial Sequence: Synthetic oligonucleotide
  Antisense strand to SEQ ID NO: 1189366
guaaugacaagauagcugg

SEQ ID NO: 1189368 - RNA, 19 nt, Artificial Sequence
  Description of Artificial Sequence: Synthetic oligonucleotide
  Sense strand starting at position 242 of SEQ ID NO: 916856
agcagaguccuagguaacu

SEQ ID NO: 1189369 - RNA, 19 nt, Artificial Sequence
  Description of Artificial Sequence: Synthetic oligonucleotide
  Antisense strand to SEQ ID NO: 1189368
aguuaccuaggacucugcu

SEQ ID NO: 1189370 - RNA, 19 nt, Artificial Sequence
  Description of Artificial Sequence: Synthetic oligonucleotide
  Sense strand starting at position 340 of SEQ ID NO: 916856
ggguaggaguaguugaagu

SEQ ID NO: 1189371 - RNA, 19 nt, Artificial Sequence
  Description of Artificial Sequence: Synthetic oligonucleotide
  Antisense strand to SEQ ID NO: 1189370
acuucaacuacuccuaccc

SEQ ID NO: 1189372 - RNA, 19 nt, Artificial Sequence
  Description of Artificial Sequence: Synthetic oligonucleotide
  Sense strand starting at position 350 of SEQ ID NO: 916856
aguugaagucgcuguugga

SEQ ID NO: 1189373 - RNA, 19 nt, Artificial Sequence
  Description of Artificial Sequence: Synthetic oligonucleotide
  Antisense strand to SEQ ID NO: 1189372
uccaacagcgacuucaacu

SEQ ID NO: 1189374 - RNA, 19 nt, Artificial Sequence
  Description of Artificial Sequence: Synthetic oligonucleotide
  Sense strand starting at position 949 of SEQ ID NO: 916856
cguaaucuguccuuuacug

SEQ ID NO: 1189375 - RNA, 19 nt, Artificial Sequence
  Description of Artificial Sequence: Synthetic oligonucleotide
  Antisense strand to SEQ ID NO: 1189374
caguaaaggacagauuacg

SEQ ID NO: 1189376 - RNA, 19 nt, Artificial Sequence
  Description of Artificial Sequence: Synthetic oligonucleotide
  Sense strand starting at position 985 of SEQ ID NO: 916856
gagaaaugccucugccgca

SEQ ID NO: 1189377 - RNA, 19 nt, Artificial Sequence
  Description of Artificial Sequence: Synthetic oligonucleotide
  Antisense strand to SEQ ID NO: 1189376
ugcggcagaggcauuucuc

SEQ ID NO: 1189378 - RNA, 19 nt, Artificial Sequence
  Description of Artificial Sequence: Synthetic oligonucleotide
  Sense strand starting at position 1169 of SEQ ID NO: 916856
cuccuauguccggaaagaa

SEQ ID NO: 1189379 - RNA, 19 nt, Artificial Sequence
  Description of Artificial Sequence: Synthetic oligonucleotide
  Antisense strand to SEQ ID NO: 1189378
uucuuuccggacauaggag

SEQ ID NO: 1189380 - RNA, 19 nt, Artificial Sequence
  Description of Artificial Sequence: Synthetic oligonucleotide
  Sense strand starting at position 1203 of SEQ ID NO: 916856
gaucgucgauugucaaaug

SEQ ID NO: 1189381 - RNA, 19 nt, Artificial Sequence
  Description of Artificial Sequence: Synthetic oligonucleotide
  Antisense strand to SEQ ID NO: 1189380
cauuugacaaucgacgauc

SEQ ID NO: 1189382 - RNA, 19 nt, Artificial Sequence
  Description of Artificial Sequence: Synthetic oligonucleotide
  Sense strand starting at position 1246 of SEQ ID NO: 916856
uggccucuccuguaauaca

SEQ ID NO: 1189383 - RNA, 19 nt, Artificial Sequence
  Description of Artificial Sequence: Synthetic oligonucleotide
  Antisense strand to SEQ ID NO: 1189382
uguauuacaggagaggcca

SEQ ID NO: 1189384 - RNA, 19 nt, Artificial Sequence
  Description of Artificial Sequence: Synthetic oligonucleotide
  Sense strand starting at position 1670 of SEQ ID NO: 916856
agacgucuucaguggguuu

SEQ ID NO: 1189385 - RNA, 19 nt, Artificial Sequence
  Description of Artificial Sequence: Synthetic oligonucleotide
  Antisense strand to SEQ ID NO: 1189384
aaacccacugaagacgucu

SEQ ID NO: 1189386 - RNA, 19 nt, Artificial Sequence
  Description of Artificial Sequence: Synthetic oligonucleotide
  Sense strand starting at position 1683 of SEQ ID NO: 916856
ggguuucucucagucaaau

SEQ ID NO: 1189387 - RNA, 19 nt, Artificial Sequence
  Description of Artificial Sequence: Synthetic oligonucleotide
  Antisense strand to SEQ ID NO: 1189386
auuugacugagagaaaccc

SEQ ID NO: 1189388 - RNA, 19 nt, Artificial Sequence
  Description of Artificial Sequence: Synthetic oligonucleotide
  Sense strand starting at position 1989 of SEQ ID NO: 916856
ccuucucuuuguguaucaa

SEQ ID NO: 1189389 - RNA, 19 nt, Artificial Sequence
  Description of Artificial Sequence: Synthetic oligonucleotide
  Antisense strand to SEQ ID NO: 1189388
uugauacacaaagagaagg

SEQ ID NO: 1189390 - RNA, 19 nt, Artificial Sequence
  Description of Artificial Sequence: Synthetic oligonucleotide
  Sense strand starting at position 2150 of SEQ ID NO: 916856
cuuucuagauagucuggaa

SEQ ID NO: 1189391 - RNA, 19 nt, Artificial Sequence
  Description of Artificial Sequence: Synthetic oligonucleotide
  Antisense strand to SEQ ID NO: 1189390
uuccagacuaucuagaaag

SEQ ID NO: 1189392 - RNA, 19 nt, Artificial Sequence
  Description of Artificial Sequence: Synthetic oligonucleotide
  Sense strand starting at position 2207 of SEQ ID NO: 916856
aggguuggugcucaacaca

SEQ ID NO: 1189393 - RNA, 19 nt, Artificial Sequence
  Description of Artificial Sequence: Synthetic oligonucleotide
  Antisense strand to SEQ ID NO: 1189392
uguguugagcaccaacccu

SEQ ID NO: 1189394 - RNA, 19 nt, Artificial Sequence
  Description of Artificial Sequence: Synthetic oligonucleotide
  Sense strand starting at position 2226 of SEQ ID NO: 916856
ugcgguugucuuugaggag

SEQ ID NO: 1189395 - RNA, 19 nt, Artificial Sequence
  Description of Artificial Sequence: Synthetic oligonucleotide
  Antisense strand to SEQ ID NO: 1189394
cuccucaaagacaaccgca

SEQ ID NO: 1189396 - RNA, 19 nt, Artificial Sequence
  Description of Artificial Sequence: Synthetic oligonucleotide
  Sense strand starting at position 2230 of SEQ ID NO: 916856
guugucuuugaggagccau

SEQ ID NO: 1189397 - RNA, 19 nt, Artificial Sequence
  Description of Artificial Sequence: Synthetic oligonucleotide
  Antisense strand to SEQ ID NO: 1189396
auggcuccucaaagacaac

SEQ ID NO: 1189398 - RNA, 19 nt, Artificial Sequence
  Description of Artificial Sequence: Synthetic oligonucleotide
  Sense strand starting at position 2340 of SEQ ID NO: 916856
acacuuucuugauuguuau

SEQ ID NO: 1189399 - RNA, 19 nt, Artificial Sequence
  Description of Artificial Sequence: Synthetic oligonucleotide
  Antisense strand to SEQ ID NO: 1189398
auaacaaucaagaaagugu

SEQ ID NO: 1189400 - RNA, 19 nt, Artificial Sequence
  Description of Artificial Sequence: Synthetic oligonucleotide
  Sense strand starting at position 2404 of SEQ ID NO: 916856
gcagcaagguuguccugau

SEQ ID NO: 1189401 - RNA, 19 nt, Artificial Sequence
  Description of Artificial Sequence: Synthetic oligonucleotide
  Antisense strand to SEQ ID NO: 1189400
aucaggacaaccuugcugc

SEQ ID NO: 1189402 - RNA, 19 nt, Artificial Sequence
  Description of Artificial Sequence: Synthetic oligonucleotide
  Sense strand starting at position 2408 of SEQ ID NO: 916856
caagguuguccugaugguu

SEQ ID NO: 1189403 - RNA, 19 nt, Artificial Sequence
  Description of Artificial Sequence: Synthetic oligonucleotide
  Antisense strand to SEQ ID NO: 1189402
aaccaucaggacaaccuug

SEQ ID NO: 1189404 - RNA, 19 nt, Artificial Sequence
  Description of Artificial Sequence: Synthetic oligonucleotide
  Sense strand starting at position 2691 of SEQ ID NO: 916856
ggcacugccuugucugaau

SEQ ID NO: 1189405 - RNA, 19 nt, Artificial Sequence
  Description of Artificial Sequence: Synthetic oligonucleotide
  Antisense strand to SEQ ID NO: 1189404
auucagacaaggcagugcc

SEQ ID NO: 1189406 - RNA, 19 nt, Artificial Sequence
  Description of Artificial Sequence: Synthetic oligonucleotide
  Sense strand starting at position 2944 of SEQ ID NO: 916856
agaaauugggcagggcaua

SEQ ID NO: 1189407 - RNA, 19 nt, Artificial Sequence
  Description of Artificial Sequence: Synthetic oligonucleotide
  Antisense strand to SEQ ID NO: 1189406
uaugcccugcccaauuucu

SEQ ID NO: 1189408 - RNA, 19 nt, Artificial Sequence
  Description of Artificial Sequence: Synthetic oligonucleotide
  Sense strand starting at position 2973 of SEQ ID NO: 916856
cugggugugaucgcaguuu

SEQ ID NO: 1189409 - RNA, 19 nt, Artificial Sequence
  Description of Artificial Sequence: Synthetic oligonucleotide
  Antisense strand to SEQ ID NO: 1189408
aaacugcgaucacacccag

SEQ ID NO: 1189410 - RNA, 19 nt, Artificial Sequence
  Description of Artificial Sequence: Synthetic oligonucleotide
  Sense strand starting at position 3069 of SEQ ID NO: 916856
ugcaccaguguuuaugauu

SEQ ID NO: 1189411 - RNA, 19 nt, Artificial Sequence
  Description of Artificial Sequence: Synthetic oligonucleotide
  Antisense strand to SEQ ID NO: 1189410
aaucauaaacacuggugca

SEQ ID NO: 1189412 - RNA, 19 nt, Artificial Sequence
  Description of Artificial Sequence: Synthetic oligonucleotide
  Sense strand starting at position 3074 of SEQ ID NO: 916856
caguguuuaugauugacaa

SEQ ID NO: 1189413 - RNA, 19 nt, Artificial Sequence
  Description of Artificial Sequence: Synthetic oligonucleotide
  Antisense strand to SEQ ID NO: 1189412
uugucaaucauaaacacug

SEQ ID NO: 1189414 - RNA, 19 nt, Artificial Sequence
  Description of Artificial Sequence: Synthetic oligonucleotide
  Sense strand starting at position 3075 of SEQ ID NO: 916856
aguguuuaugauugacaag

SEQ ID NO: 1189415 - RNA, 19 nt, Artificial Sequence
  Description of Artificial Sequence: Synthetic oligonucleotide
  Antisense strand to SEQ ID NO: 1189414
cuugucaaucauaaacacu

SEQ ID NO: 1189416 - RNA, 19 nt, Artificial Sequence
  Description of Artificial Sequence: Synthetic oligonucleotide
  Sense strand starting at position 3158 of SEQ ID NO: 916856
gccagucuucccuaccgca

SEQ ID NO: 1189417 - RNA, 19 nt, Artificial Sequence
  Description of Artificial Sequence: Synthetic oligonucleotide
  Antisense strand to SEQ ID NO: 1189416
ugcgguagggaagacuggc

SEQ ID NO: 1189418 - RNA, 19 nt, Artificial Sequence
  Description of Artificial Sequence: Synthetic oligonucleotide
  Sense strand starting at position 3410 of SEQ ID NO: 916856
guuccagacuauuuguagu

SEQ ID NO: 1189419 - RNA, 19 nt, Artificial Sequence
  Description of Artificial Sequence: Synthetic oligonucleotide
  Antisense strand to SEQ ID NO: 1189418
acuacaaauagucuggaac

SEQ ID NO: 1189420 - RNA, 19 nt, Artificial Sequence
  Description of Artificial Sequence: Synthetic oligonucleotide
  Sense strand starting at position 3426 of SEQ ID NO: 916856
aguaucaucugcccaaaga

SEQ ID NO: 1189421 - RNA, 19 nt, Artificial Sequence
  Description of Artificial Sequence: Synthetic oligonucleotide
  Antisense strand to SEQ ID NO: 1189420
ucuuugggcagaugauacu

SEQ ID NO: 1189422 - RNA, 19 nt, Artificial Sequence
  Description of Artificial Sequence: Synthetic oligonucleotide
  Sense strand starting at position 3427 of SEQ ID NO: 916856
guaucaucugcccaaagau

SEQ ID NO: 1189423 - RNA, 19 nt, Artificial Sequence
  Description of Artificial Sequence: Synthetic oligonucleotide
  Antisense strand to SEQ ID NO: 1189422
aucuuugggcagaugauac

SEQ ID NO: 1189424 - RNA, 19 nt, Artificial Sequence
  Description of Artificial Sequence: Synthetic oligonucleotide
  Sense strand starting at position 3467 of SEQ ID NO: 916856
uuuggaauuugacacacaa

SEQ ID NO: 1189425 - RNA, 19 nt, Artificial Sequence
  Description of Artificial Sequence: Synthetic oligonucleotide
  Antisense strand to SEQ ID NO: 1189424
uugugugucaaauuccaaa

SEQ ID NO: 1189426 - RNA, 19 nt, Artificial Sequence
  Description of Artificial Sequence: Synthetic oligonucleotide
  Sense strand starting at position 3562 of SEQ ID NO: 916856
uugguagugguagguuaga

SEQ ID NO: 1189427 - RNA, 19 nt, Artificial Sequence
  Description of Artificial Sequence: Synthetic oligonucleotide
  Antisense strand to SEQ ID NO: 1189426
ucuaaccuaccacuaccaa

SEQ ID NO: 1189428 - RNA, 19 nt, Artificial Sequence
  Description of Artificial Sequence: Synthetic oligonucleotide
  Sense strand starting at position 3580 of SEQ ID NO: 916856
agaggagucccaggaaguu

SEQ ID NO: 1189429 - RNA, 19 nt, Artificial Sequence
  Description of Artificial Sequence: Synthetic oligonucleotide
  Antisense strand to SEQ ID NO: 1189428
aacuuccugggacuccucu

SEQ ID NO: 1189430 - RNA, 19 nt, Artificial Sequence
  Description of Artificial Sequence: Synthetic oligonucleotide
  Sense strand starting at position 3589 of SEQ ID NO: 916856
ccaggaaguuucuuuauau

SEQ ID NO: 1189431 - RNA, 19 nt, Artificial Sequence
  Description of Artificial Sequence: Synthetic oligonucleotide
  Antisense strand to SEQ ID NO: 1189430
auauaaagaaacuuccugg

SEQ ID NO: 1189432 - RNA, 19 nt, Artificial Sequence
  Description of Artificial Sequence: Synthetic oligonucleotide
  Sense strand starting at position 3718 of SEQ ID NO: 916856
gguaguuauggguggcaag

SEQ ID NO: 1189433 - RNA, 19 nt, Artificial Sequence
  Description of Artificial Sequence: Synthetic oligonucleotide
  Antisense strand to SEQ ID NO: 1189432
cuugccacccauaacuacc

SEQ ID NO: 1189434 - RNA, 19 nt, Artificial Sequence
  Description of Artificial Sequence: Synthetic oligonucleotide
  Sense strand starting at position 3719 of SEQ ID NO: 916856
guaguuauggguggcaagu

SEQ ID NO: 1189435 - RNA, 19 nt, Artificial Sequence
  Description of Artificial Sequence: Synthetic oligonucleotide
  Antisense strand to SEQ ID NO: 1189434
acuugccacccauaacuac

SEQ ID NO: 1189436 - RNA, 19 nt, Artificial Sequence
  Description of Artificial Sequence: Synthetic oligonucleotide
  Sense strand starting at position 3871 of SEQ ID NO: 916856
ugaucuggucucuguauga

SEQ ID NO: 1189437 - RNA, 19 nt, Artificial Sequence
  Description of Artificial Sequence: Synthetic oligonucleotide
  Antisense strand to SEQ ID NO: 1189436
ucauacagagaccagauca

SEQ ID NO: 1189438 - RNA, 19 nt, Artificial Sequence
  Description of Artificial Sequence: Synthetic oligonucleotide
  Sense strand starting at position 3878 of SEQ ID NO: 916856
gucucuguaugaucagaac

SEQ ID NO: 1189439 - RNA, 19 nt, Artificial Sequence
  Description of Artificial Sequence: Synthetic oligonucleotide
  Antisense strand to SEQ ID NO: 1189438
guucugaucauacagagac

SEQ ID NO: 1189440 - RNA, 19 nt, Artificial Sequence
  Description of Artificial Sequence: Synthetic oligonucleotide
  Sense strand starting at position 3955 of SEQ ID NO: 916856
gccaguuugauuggucuuu

SEQ ID NO: 1189441 - RNA, 19 nt, Artificial Sequence
  Description of Artificial Sequence: Synthetic oligonucleotide
  Antisense strand to SEQ ID NO: 1189440
aaagaccaaucaaacuggc

SEQ ID NO: 1189442 - RNA, 19 nt, Artificial Sequence
  Description of Artificial Sequence: Synthetic oligonucleotide
  Sense strand starting at position 19 of SEQ ID NO: 916857
acaucugcccuugauaguu

SEQ ID NO: 1189443 - RNA, 19 nt, Artificial Sequence
  Description of Artificial Sequence: Synthetic oligonucleotide
  Antisense strand to SEQ ID NO: 1189442
aacuaucaagggcagaugu

SEQ ID NO: 1189444 - RNA, 19 nt, Artificial Sequence
  Description of Artificial Sequence: Synthetic oligonucleotide
  Sense strand starting at position 36 of SEQ ID NO: 916857
uugcccuugggcuaaagau

SEQ ID NO: 1189445 - RNA, 19 nt, Artificial Sequence
  Description of Artificial Sequence: Synthetic oligonucleotide
  Antisense strand to SEQ ID NO: 1189444
aucuuuagcccaagggcaa

SEQ ID NO: 1189446 - RNA, 19 nt, Artificial Sequence
  Description of Artificial Sequence: Synthetic oligonucleotide
  Sense strand starting at position 285 of SEQ ID NO: 916857
auaccuuauugucuaagua

SEQ ID NO: 1189447 - RNA, 19 nt, Artificial Sequence
  Description of Artificial Sequence: Synthetic oligonucleotide
  Antisense strand to SEQ ID NO: 1189446
uacuuagacaauaagguau

SEQ ID NO: 1189448 - RNA, 19 nt, Artificial Sequence
  Description of Artificial Sequence: Synthetic oligonucleotide
  Sense strand starting at position 336 of SEQ ID NO: 916857
uuuccaauccuccaguguu

SEQ ID NO: 1189449 - RNA, 19 nt, Artificial Sequence
  Description of Artificial Sequence: Synthetic oligonucleotide
  Antisense strand to SEQ ID NO: 1189448
aacacuggaggauuggaaa

SEQ ID NO: 1189450 - RNA, 19 nt, Artificial Sequence
  Description of Artificial Sequence: Synthetic oligonucleotide
  Sense strand starting at position 668 of SEQ ID NO: 916857
gaucacaugcaguaugauu

SEQ ID NO: 1189451 - RNA, 19 nt, Artificial Sequence
  Description of Artificial Sequence: Synthetic oligonucleotide
  Antisense strand to SEQ ID NO: 1189450
aaucauacugcaugugauc

SEQ ID NO: 1189452 - RNA, 19 nt, Artificial Sequence
  Description of Artificial Sequence: Synthetic oligonucleotide
  Sense strand starting at position 792 of SEQ ID NO: 916857
gggagaucuuaugcaagau

SEQ ID NO: 1189453 - RNA, 19 nt, Artificial Sequence
  Description of Artificial Sequence: Synthetic oligonucleotide
  Antisense strand to SEQ ID NO: 1189452
aucuugcauaagaucuccc

SEQ ID NO: 1189454 - RNA, 19 nt, Artificial Sequence
  Description of Artificial Sequence: Synthetic oligonucleotide
  Sense strand starting at position 815 of SEQ ID NO: 916857
guggaaguucugcaucuug

SEQ ID NO: 1189455 - RNA, 19 nt, Artificial Sequence
  Description of Artificial Sequence: Synthetic oligonucleotide
  Antisense strand to SEQ ID NO: 1189454
caagaugcagaacuuccac

SEQ ID NO: 1189456 - RNA, 19 nt, Artificial Sequence
  Description of Artificial Sequence: Synthetic oligonucleotide
  Sense strand starting at position 836 of SEQ ID NO: 916857
aggccuauagugggucaga

SEQ ID NO: 1189457 - RNA, 19 nt, Artificial Sequence
  Description of Artificial Sequence: Synthetic oligonucleotide
  Antisense strand to SEQ ID NO: 1189456
ucugacccacuauaggccu

SEQ ID NO: 1189458 - RNA, 19 nt, Artificial Sequence
  Description of Artificial Sequence: Synthetic oligonucleotide
  Sense strand starting at position 936 of SEQ ID NO: 916857
uauacuaaagugugucaga

SEQ ID NO: 1189459 - RNA, 19 nt, Artificial Sequence
  Description of Artificial Sequence: Synthetic oligonucleotide
  Antisense strand to SEQ ID NO: 1189458
ucugacacacuuuaguaua

SEQ ID NO: 1189460 - RNA, 19 nt, Artificial Sequence
  Description of Artificial Sequence: Synthetic oligonucleotide
  Sense strand starting at position 1088 of SEQ ID NO: 916857
agguguaaccacuggagga

SEQ ID NO: 1189461 - RNA, 19 nt, Artificial Sequence
  Description of Artificial Sequence: Synthetic oligonucleotide
  Antisense strand to SEQ ID NO: 1189460
uccuccagugguuacaccu

SEQ ID NO: 1189462 - RNA, 19 nt, Artificial Sequence
  Description of Artificial Sequence: Synthetic oligonucleotide
  Sense strand starting at position 1089 of SEQ ID NO: 916857
gguguaaccacuggaggaa

SEQ ID NO: 1189463 - RNA, 19 nt, Artificial Sequence
  Description of Artificial Sequence: Synthetic oligonucleotide
  Antisense strand to SEQ ID NO: 1189462
uuccuccagugguuacacc

SEQ ID NO: 1189464 - RNA, 19 nt, Artificial Sequence
  Description of Artificial Sequence: Synthetic oligonucleotide
  Sense strand starting at position 1190 of SEQ ID NO: 916857
gcuuccuggguuuaauauu

SEQ ID NO: 1189465 - RNA, 19 nt, Artificial Sequence
  Description of Artificial Sequence: Synthetic oligonucleotide
  Antisense strand to SEQ ID NO: 1189464
aauauuaaacccaggaagc

SEQ ID NO: 1189466 - RNA, 19 nt, Artificial Sequence
  Description of Artificial Sequence: Synthetic oligonucleotide
  Sense strand starting at position 1339 of SEQ ID NO: 916857
acagaugccucuguacaga

SEQ ID NO: 1189467 - RNA, 19 nt, Artificial Sequence
  Description of Artificial Sequence: Synthetic oligonucleotide
  Antisense strand to SEQ ID NO: 1189466
ucuguacagaggcaucugu

SEQ ID NO: 1189468 - RNA, 19 nt, Artificial Sequence
  Description of Artificial Sequence: Synthetic oligonucleotide
  Sense strand starting at position 1418 of SEQ ID NO: 916857
agcauacuguuacuaaaga

SEQ ID NO: 1189469 - RNA, 19 nt, Artificial Sequence
  Description of Artificial Sequence: Synthetic oligonucleotide
  Antisense strand to SEQ ID NO: 1189468
ucuuuaguaacaguaugcu

SEQ ID NO: 1189470 - RNA, 19 nt, Artificial Sequence
  Description of Artificial Sequence: Synthetic oligonucleotide
  Sense strand starting at position 1693 of SEQ ID NO: 916857
acaagacuauagccugaau

SEQ ID NO: 1189471 - RNA, 19 nt, Artificial Sequence
  Description of Artificial Sequence: Synthetic oligonucleotide
  Antisense strand to SEQ ID NO: 1189470
auucaggcuauagucuugu

SEQ ID NO: 1189472 - RNA, 19 nt, Artificial Sequence
  Description of Artificial Sequence: Synthetic oligonucleotide
  Sense strand starting at position 2096 of SEQ ID NO: 916857
gcgaccuaucccgccguaa

SEQ ID NO: 1189473 - RNA, 19 nt, Artificial Sequence
  Description of Artificial Sequence: Synthetic oligonucleotide
  Antisense strand to SEQ ID NO: 1189472
uuacggcgggauaggucgc

SEQ ID NO: 1189474 - RNA, 19 nt, Artificial Sequence
  Description of Artificial Sequence: Synthetic oligonucleotide
  Sense strand starting at position 2177 of SEQ ID NO: 916857
gcgaguguacccaguguua

SEQ ID NO: 1189475 - RNA, 19 nt, Artificial Sequence
  Description of Artificial Sequence: Synthetic oligonucleotide
  Antisense strand to SEQ ID NO: 1189474
uaacacuggguacacucgc

SEQ ID NO: 1189476 - RNA, 19 nt, Artificial Sequence
  Description of Artificial Sequence: Synthetic oligonucleotide
  Sense strand starting at position 2298 of SEQ ID NO: 916857
gguagaaagaguuacgagu

SEQ ID NO: 1189477 - RNA, 19 nt, Artificial Sequence
  Description of Artificial Sequence: Synthetic oligonucleotide
  Antisense strand to SEQ ID NO: 1189476
acucguaacucuuucuacc

SEQ ID NO: 1189478 - RNA, 19 nt, Artificial Sequence
  Description of Artificial Sequence: Synthetic oligonucleotide
  Sense strand starting at position 2304 of SEQ ID NO: 916857
aagaguuacgagugaaagg

SEQ ID NO: 1189479 - RNA, 19 nt, Artificial Sequence
  Description of Artificial Sequence: Synthetic oligonucleotide
  Antisense strand to SEQ ID NO: 1189478
ccuuucacucguaacucuu

SEQ ID NO: 1189480 - RNA, 19 nt, Artificial Sequence
  Description of Artificial Sequence: Synthetic oligonucleotide
  Sense strand starting at position 2417 of SEQ ID NO: 916857
cgauaauaucuauaguagc

SEQ ID NO: 1189481 - RNA, 19 nt, Artificial Sequence
  Description of Artificial Sequence: Synthetic oligonucleotide
  Antisense strand to SEQ ID NO: 1189480
gcuacuauagauauuaucg

SEQ ID NO: 1189482 - RNA, 19 nt, Artificial Sequence
  Description of Artificial Sequence: Synthetic oligonucleotide
  Sense strand starting at position 2451 of SEQ ID NO: 916857
aguguuuacgugccaugca

SEQ ID NO: 1189483 - RNA, 19 nt, Artificial Sequence
  Description of Artificial Sequence: Synthetic oligonucleotide
  Antisense strand to SEQ ID NO: 1189482
ugcauggcacguaaacacu

SEQ ID NO: 1189484 - RNA, 19 nt, Artificial Sequence
  Description of Artificial Sequence: Synthetic oligonucleotide
  Sense strand starting at position 2629 of SEQ ID NO: 916857
aguggacugacuugcucaa

SEQ ID NO: 1189485 - RNA, 19 nt, Artificial Sequence
  Description of Artificial Sequence: Synthetic oligonucleotide
  Antisense strand to SEQ ID NO: 1189484
uugagcaagucaguccacu

SEQ ID NO: 1189486 - RNA, 19 nt, Artificial Sequence
  Description of Artificial Sequence: Synthetic oligonucleotide
  Sense strand starting at position 2633 of SEQ ID NO: 916857
gacugacuugcucaaggua

SEQ ID NO: 1189487 - RNA, 19 nt, Artificial Sequence
  Description of Artificial Sequence: Synthetic oligonucleotide
  Antisense strand to SEQ ID NO: 1189486
uaccuugagcaagucaguc

SEQ ID NO: 1189488 - RNA, 19 nt, Artificial Sequence
  Description of Artificial Sequence: Synthetic oligonucleotide
  Sense strand starting at position 2636 of SEQ ID NO: 916857
ugacuugcucaagguaacu

SEQ ID NO: 1189489 - RNA, 19 nt, Artificial Sequence
  Description of Artificial Sequence: Synthetic oligonucleotide
  Antisense strand to SEQ ID NO: 1189488
aguuaccuugagcaaguca

SEQ ID NO: 1189490 - RNA, 19 nt, Artificial Sequence
  Description of Artificial Sequence: Synthetic oligonucleotide
  Sense strand starting at position 3106 of SEQ ID NO: 916857
uuagauuuauugggaacaa

SEQ ID NO: 1189491 - RNA, 19 nt, Artificial Sequence
  Description of Artificial Sequence: Synthetic oligonucleotide
  Antisense strand to SEQ ID NO: 1189490
uuguucccaauaaaucuaa

SEQ ID NO: 1189492 - RNA, 19 nt, Artificial Sequence
  Description of Artificial Sequence: Synthetic oligonucleotide
  Sense strand starting at position 3184 of SEQ ID NO: 916857
acugucuggcaugaguauu

SEQ ID NO: 1189493 - RNA, 19 nt, Artificial Sequence
  Description of Artificial Sequence: Synthetic oligonucleotide
  Antisense strand to SEQ ID NO: 1189492
aauacucaugccagacagu

SEQ ID NO: 1189494 - RNA, 19 nt, Artificial Sequence
  Description of Artificial Sequence: Synthetic oligonucleotide
  Sense strand starting at position 3192 of SEQ ID NO: 916857
gcaugaguauuauuuaguu

SEQ ID NO: 1189495 - RNA, 19 nt, Artificial Sequence
  Description of Artificial Sequence: Synthetic oligonucleotide
  Antisense strand to SEQ ID NO: 1189494
aacuaaauaauacucaugc

SEQ ID NO: 1189496 - RNA, 19 nt, Artificial Sequence
  Description of Artificial Sequence: Synthetic oligonucleotide
  Sense strand starting at position 3257 of SEQ ID NO: 916857
aggaaaucacgcuaucgaa

SEQ ID NO: 1189497 - RNA, 19 nt, Artificial Sequence
  Description of Artificial Sequence: Synthetic oligonucleotide
  Antisense strand to SEQ ID NO: 1189496
uucgauagcgugauuuccu

SEQ ID NO: 1189498 - RNA, 19 nt, Artificial Sequence
  Description of Artificial Sequence: Synthetic oligonucleotide
  Sense strand starting at position 3287 of SEQ ID NO: 916857
auggacauuugcuaacauu

SEQ ID NO: 1189499 - RNA, 19 nt, Artificial Sequence
  Description of Artificial Sequence: Synthetic oligonucleotide
  Antisense strand to SEQ ID NO: 1189498
aauguuagcaaauguccau

SEQ ID NO: 1189500 - RNA, 19 nt, Artificial Sequence
  Description of Artificial Sequence: Synthetic oligonucleotide
  Sense strand starting at position 3312 of SEQ ID NO: 916857
aaugcuuugggugguagaa

SEQ ID NO: 1189501 - RNA, 19 nt, Artificial Sequence
  Description of Artificial Sequence: Synthetic oligonucleotide
  Antisense strand to SEQ ID NO: 1189500
uucuaccacccaaagcauu

SEQ ID NO: 1189502 - RNA, 19 nt, Artificial Sequence
  Description of Artificial Sequence: Synthetic oligonucleotide
  Sense strand starting at position 3324 of SEQ ID NO: 916857
gguagaaguaauugaauuc

SEQ ID NO: 1189503 - RNA, 19 nt, Artificial Sequence
  Description of Artificial Sequence: Synthetic oligonucleotide
  Antisense strand to SEQ ID NO: 1189502
gaauucaauuacuucuacc

SEQ ID NO: 1189504 - RNA, 19 nt, Artificial Sequence
  Description of Artificial Sequence: Synthetic oligonucleotide
  Sense strand starting at position 3406 of SEQ ID NO: 916857
gaccucugagcuuggaaua

SEQ ID NO: 1189505 - RNA, 19 nt, Artificial Sequence
  Description of Artificial Sequence: Synthetic oligonucleotide
  Antisense strand to SEQ ID NO: 1189504
uauuccaagcucagagguc

SEQ ID NO: 1189506 - RNA, 19 nt, Artificial Sequence
  Description of Artificial Sequence: Synthetic oligonucleotide
  Sense strand starting at position 3407 of SEQ ID NO: 916857
accucugagcuuggaauaa

SEQ ID NO: 1189507 - RNA, 19 nt, Artificial Sequence
  Description of Artificial Sequence: Synthetic oligonucleotide
  Antisense strand to SEQ ID NO: 1189506
uuauuccaagcucagaggu

SEQ ID NO: 1189508 - RNA, 19 nt, Artificial Sequence
  Description of Artificial Sequence: Synthetic oligonucleotide
  Sense strand starting at position 3483 of SEQ ID NO: 916857
ccaggaucuugacuggcau

SEQ ID NO: 1189509 - RNA, 19 nt, Artificial Sequence
  Description of Artificial Sequence: Synthetic oligonucleotide
  Antisense strand to SEQ ID NO: 1189508
augccagucaagauccugg

SEQ ID NO: 1189510 - RNA, 19 nt, Artificial Sequence
  Description of Artificial Sequence: Synthetic oligonucleotide
  Sense strand starting at position 3484 of SEQ ID NO: 916857
caggaucuugacuggcaua

SEQ ID NO: 1189511 - RNA, 19 nt, Artificial Sequence
  Description of Artificial Sequence: Synthetic oligonucleotide
  Antisense strand to SEQ ID NO: 1189510
uaugccagucaagauccug

SEQ ID NO: 1189512 - RNA, 19 nt, Artificial Sequence
  Description of Artificial Sequence: Synthetic oligonucleotide
  Sense strand starting at position 3485 of SEQ ID NO: 916857
aggaucuugacuggcauaa

SEQ ID NO: 1189513 - RNA, 19 nt, Artificial Sequence
  Description of Artificial Sequence: Synthetic oligonucleotide
  Antisense strand to SEQ ID NO: 1189512
uuaugccagucaagauccu

SEQ ID NO: 1189514 - RNA, 19 nt, Artificial Sequence
  Description of Artificial Sequence: Synthetic oligonucleotide
  Sense strand starting at position 3489 of SEQ ID NO: 916857
ucuugacuggcauaaacau

SEQ ID NO: 1189515 - RNA, 19 nt, Artificial Sequence
  Description of Artificial Sequence: Synthetic oligonucleotide
  Antisense strand to SEQ ID NO: 1189514
auguuuaugccagucaaga

SEQ ID NO: 1189516 - RNA, 19 nt, Artificial Sequence
  Description of Artificial Sequence: Synthetic oligonucleotide
  Sense strand starting at position 3742 of SEQ ID NO: 916857
agaauaugcccuugagaac

SEQ ID NO: 1189517 - RNA, 19 nt, Artificial Sequence
  Description of Artificial Sequence: Synthetic oligonucleotide
  Antisense strand to SEQ ID NO: 1189516
guucucaagggcauauucu

SEQ ID NO: 1189518 - RNA, 19 nt, Artificial Sequence
  Description of Artificial Sequence: Synthetic oligonucleotide
  Sense strand starting at position 3793 of SEQ ID NO: 916857
aagauaagacuuuguuguc

SEQ ID NO: 1189519 - RNA, 19 nt, Artificial Sequence
  Description of Artificial Sequence: Synthetic oligonucleotide
  Antisense strand to SEQ ID NO: 1189518
gacaacaaagucuuaucuu

SEQ ID NO: 1189520 - RNA, 19 nt, Artificial Sequence
  Description of Artificial Sequence: Synthetic oligonucleotide
  Sense strand starting at position 3794 of SEQ ID NO: 916857
agauaagacuuuguugucu

SEQ ID NO: 1189521 - RNA, 19 nt, Artificial Sequence
  Description of Artificial Sequence: Synthetic oligonucleotide
  Antisense strand to SEQ ID NO: 1189520
agacaacaaagucuuaucu

SEQ ID NO: 1189522 - RNA, 19 nt, Artificial Sequence
  Description of Artificial Sequence: Synthetic oligonucleotide
  Sense strand starting at position 17 of SEQ ID NO: 916858
aggguucuguggccuggaa

SEQ ID NO: 1189523 - RNA, 19 nt, Artificial Sequence
  Description of Artificial Sequence: Synthetic oligonucleotide
  Antisense strand to SEQ ID NO: 1189522
uuccaggccacagaacccu

SEQ ID NO: 1189524 - RNA, 19 nt, Artificial Sequence
  Description of Artificial Sequence: Synthetic oligonucleotide
  Sense strand starting at position 58 of SEQ ID NO: 916858
ucccuuguguucucuauca

SEQ ID NO: 1189525 - RNA, 19 nt, Artificial Sequence
  Description of Artificial Sequence: Synthetic oligonucleotide
  Antisense strand to SEQ ID NO: 1189524
ugauagagaacacaaggga

SEQ ID NO: 1189526 - RNA, 19 nt, Artificial Sequence
  Description of Artificial Sequence: Synthetic oligonucleotide
  Sense strand starting at position 60 of SEQ ID NO: 916858
ccuuguguucucuaucaac

SEQ ID NO: 1189527 - RNA, 19 nt, Artificial Sequence
  Description of Artificial Sequence: Synthetic oligonucleotide
  Antisense strand to SEQ ID NO: 1189526
guugauagagaacacaagg

SEQ ID NO: 1189528 - RNA, 19 nt, Artificial Sequence
  Description of Artificial Sequence: Synthetic oligonucleotide
  Sense strand starting at position 84 of SEQ ID NO: 916858
uugagaggcucccagggau

SEQ ID NO: 1189529 - RNA, 19 nt, Artificial Sequence
  Description of Artificial Sequence: Synthetic oligonucleotide
  Antisense strand to SEQ ID NO: 1189528
aucccugggagccucucaa

SEQ ID NO: 1189530 - RNA, 19 nt, Artificial Sequence
  Description of Artificial Sequence: Synthetic oligonucleotide
  Sense strand starting at position 148 of SEQ ID NO: 916858
cccagaaaccauggaaugu

SEQ ID NO: 1189531 - RNA, 19 nt, Artificial Sequence
  Description of Artificial Sequence: Synthetic oligonucleotide
  Antisense strand to SEQ ID NO: 1189530
acauuccaugguuucuggg

SEQ ID NO: 1189532 - RNA, 19 nt, Artificial Sequence
  Description of Artificial Sequence: Synthetic oligonucleotide
  Sense strand starting at position 152 of SEQ ID NO: 916858
gaaaccauggaaugucauu

SEQ ID NO: 1189533 - RNA, 19 nt, Artificial Sequence
  Description of Artificial Sequence: Synthetic oligonucleotide
  Antisense strand to SEQ ID NO: 1189532
aaugacauuccaugguuuc

SEQ ID NO: 1189534 - RNA, 19 nt, Artificial Sequence
  Description of Artificial Sequence: Synthetic oligonucleotide
  Sense strand starting at position 157 of SEQ ID NO: 916858
cauggaaugucauucuuag

SEQ ID NO: 1189535 - RNA, 19 nt, Artificial Sequence
  Description of Artificial Sequence: Synthetic oligonucleotide
  Antisense strand to SEQ ID NO: 1189534
cuaagaaugacauuccaug

SEQ ID NO: 1189536 - RNA, 19 nt, Artificial Sequence
  Description of Artificial Sequence: Synthetic oligonucleotide
  Sense strand starting at position 161 of SEQ ID NO: 916858
gaaugucauucuuaggaag

SEQ ID NO: 1189537 - RNA, 19 nt, Artificial Sequence
  Description of Artificial Sequence: Synthetic oligonucleotide
  Antisense strand to SEQ ID NO: 1189536
cuuccuaagaaugacauuc

SEQ ID NO: 1189538 - RNA, 19 nt, Artificial Sequence
  Description of Artificial Sequence: Synthetic oligonucleotide
  Sense strand starting at position 164 of SEQ ID NO: 916858
ugucauucuuaggaagauc

SEQ ID NO: 1189539 - RNA, 19 nt, Artificial Sequence
  Description of Artificial Sequence: Synthetic oligonucleotide
  Antisense strand to SEQ ID NO: 1189538
gaucuuccuaagaaugaca

SEQ ID NO: 1189540 - RNA, 19 nt, Artificial Sequence
  Description of Artificial Sequence: Synthetic oligonucleotide
  Sense strand starting at position 172 of SEQ ID NO: 916858
uuaggaagaucugugaguu

SEQ ID NO: 1189541 - RNA, 19 nt, Artificial Sequence
  Description of Artificial Sequence: Synthetic oligonucleotide
  Antisense strand to SEQ ID NO: 1189540
aacucacagaucuuccuaa

SEQ ID NO: 1189542 - RNA, 19 nt, Artificial Sequence
  Description of Artificial Sequence: Synthetic oligonucleotide
  Sense strand starting at position 173 of SEQ ID NO: 916858
uaggaagaucugugaguug

SEQ ID NO: 1189543 - RNA, 19 nt, Artificial Sequence
  Description of Artificial Sequence: Synthetic oligonucleotide
  Antisense strand to SEQ ID NO: 1189542
caacucacagaucuuccua

SEQ ID NO: 1189544 - RNA, 19 nt, Artificial Sequence
  Description of Artificial Sequence: Synthetic oligonucleotide
  Sense strand starting at position 178 of SEQ ID NO: 916858
agaucugugaguuguccau

SEQ ID NO: 1189545 - RNA, 19 nt, Artificial Sequence
  Description of Artificial Sequence: Synthetic oligonucleotide
  Antisense strand to SEQ ID NO: 1189544
auggacaacucacagaucu

SEQ ID NO: 1189546 - RNA, 19 nt, Artificial Sequence
  Description of Artificial Sequence: Synthetic oligonucleotide
  Sense strand starting at position 180 of SEQ ID NO: 916858
aucugugaguuguccauuu

SEQ ID NO: 1189547 - RNA, 19 nt, Artificial Sequence
  Description of Artificial Sequence: Synthetic oligonucleotide
  Antisense strand to SEQ ID NO: 1189546
aaauggacaacucacagau

SEQ ID NO: 1189548 - RNA, 19 nt, Artificial Sequence
  Description of Artificial Sequence: Synthetic oligonucleotide
  Sense strand starting at position 571 of SEQ ID NO: 916858
aaagaagucuacgaauuug

SEQ ID NO: 1189549 - RNA, 19 nt, Artificial Sequence
  Description of Artificial Sequence: Synthetic oligonucleotide
  Antisense strand to SEQ ID NO: 1189548
caaauucguagacuucuuu

SEQ ID NO: 1189550 - RNA, 19 nt, Artificial Sequence
  Description of Artificial Sequence: Synthetic oligonucleotide
  Sense strand starting at position 608 of SEQ ID NO: 916858
gacacugaacagugauacu

SEQ ID NO: 1189551 - RNA, 19 nt, Artificial Sequence
  Description of Artificial Sequence: Synthetic oligonucleotide
  Antisense strand to SEQ ID NO: 1189550
aguaucacuguucaguguc

SEQ ID NO: 1189552 - RNA, 19 nt, Artificial Sequence
  Description of Artificial Sequence: Synthetic oligonucleotide
  Sense strand starting at position 1049 of SEQ ID NO: 916858
uuuguaacuccagggaucu

SEQ ID NO: 1189553 - RNA, 19 nt, Artificial Sequence
  Description of Artificial Sequence: Synthetic oligonucleotide
  Antisense strand to SEQ ID NO: 1189552
agaucccuggaguuacaaa

SEQ ID NO: 1189554 - RNA, 19 nt, Artificial Sequence
  Description of Artificial Sequence: Synthetic oligonucleotide
  Sense strand starting at position 1504 of SEQ ID NO: 916858
aggacugugcccuggaaga

SEQ ID NO: 1189555 - RNA, 19 nt, Artificial Sequence
  Description of Artificial Sequence: Synthetic oligonucleotide
  Antisense strand to SEQ ID NO: 1189554
ucuuccagggcacaguccu

SEQ ID NO: 1189556 - RNA, 19 nt, Artificial Sequence
  Description of Artificial Sequence: Synthetic oligonucleotide
  Sense strand starting at position 1506 of SEQ ID NO: 916858
gacugugcccuggaagaau

SEQ ID NO: 1189557 - RNA, 19 nt, Artificial Sequence
  Description of Artificial Sequence: Synthetic oligonucleotide
  Antisense strand to SEQ ID NO: 1189556
auucuuccagggcacaguc

SEQ ID NO: 1189558 - RNA, 19 nt, Artificial Sequence
  Description of Artificial Sequence: Synthetic oligonucleotide
  Sense strand starting at position 2029 of SEQ ID NO: 916858
ugugaaggcucacauaaga

SEQ ID NO: 1189559 - RNA, 19 nt, Artificial Sequence
  Description of Artificial Sequence: Synthetic oligonucleotide
  Antisense strand to SEQ ID NO: 1189558
ucuuaugugagccuucaca

SEQ ID NO: 1189560 - RNA, 19 nt, Artificial Sequence
  Description of Artificial Sequence: Synthetic oligonucleotide
  Sense strand starting at position 2302 of SEQ ID NO: 916858
cauauuccuugggaagguu

SEQ ID NO: 1189561 - RNA, 19 nt, Artificial Sequence
  Description of Artificial Sequence: Synthetic oligonucleotide
  Antisense strand to SEQ ID NO: 1189560
aaccuucccaaggaauaug

SEQ ID NO: 1189562 - RNA, 19 nt, Artificial Sequence
  Description of Artificial Sequence: Synthetic oligonucleotide
  Sense strand starting at position 2380 of SEQ ID NO: 916858
agaugcaugcaugggaaau

SEQ ID NO: 1189563 - RNA, 19 nt, Artificial Sequence
  Description of Artificial Sequence: Synthetic oligonucleotide
  Antisense strand to SEQ ID NO: 1189562
auuucccaugcaugcaucu

SEQ ID NO: 1189564 - RNA, 19 nt, Artificial Sequence
  Description of Artificial Sequence: Synthetic oligonucleotide
  Sense strand starting at position 2382 of SEQ ID NO: 916858
augcaugcaugggaaauaa

SEQ ID NO: 1189565 - RNA, 19 nt, Artificial Sequence
  Description of Artificial Sequence: Synthetic oligonucleotide
  Antisense strand to SEQ ID NO: 1189564
uuauuucccaugcaugcau

SEQ ID NO: 1189566 - RNA, 19 nt, Artificial Sequence
  Description of Artificial Sequence: Synthetic oligonucleotide
  Sense strand starting at position 2517 of SEQ ID NO: 916858
ugaugucugaccuggccua

SEQ ID NO: 1189567 - RNA, 19 nt, Artificial Sequence
  Description of Artificial Sequence: Synthetic oligonucleotide
  Antisense strand to SEQ ID NO: 1189566
uaggccaggucagacauca

SEQ ID NO: 1189568 - RNA, 19 nt, Artificial Sequence
  Description of Artificial Sequence: Synthetic oligonucleotide
  Sense strand starting at position 2518 of SEQ ID NO: 916858
gaugucugaccuggccuaa

SEQ ID NO: 1189569 - RNA, 19 nt, Artificial Sequence
  Description of Artificial Sequence: Synthetic oligonucleotide
  Antisense strand to SEQ ID NO: 1189568
uuaggccaggucagacauc

SEQ ID NO: 1189570 - RNA, 19 nt, Artificial Sequence
  Description of Artificial Sequence: Synthetic oligonucleotide
  Sense strand starting at position 2586 of SEQ ID NO: 916858
uuggcauuaccugauagca

SEQ ID NO: 1189571 - RNA, 19 nt, Artificial Sequence
  Description of Artificial Sequence: Synthetic oligonucleotide
  Antisense strand to SEQ ID NO: 1189570
ugcuaucagguaaugccaa

SEQ ID NO: 1189572 - RNA, 19 nt, Artificial Sequence
  Description of Artificial Sequence: Synthetic oligonucleotide
  Sense strand starting at position 2802 of SEQ ID NO: 916858
ccaaaugccuaguugcuaa

SEQ ID NO: 1189573 - RNA, 19 nt, Artificial Sequence
  Description of Artificial Sequence: Synthetic oligonucleotide
  Antisense strand to SEQ ID NO: 1189572
uuagcaacuaggcauuugg

SEQ ID NO: 1189574 - RNA, 19 nt, Artificial Sequence
  Description of Artificial Sequence: Synthetic oligonucleotide
  Sense strand starting at position 2860 of SEQ ID NO: 916858
agaguagagugguaacauu

SEQ ID NO: 1189575 - RNA, 19 nt, Artificial Sequence
  Description of Artificial Sequence: Synthetic oligonucleotide
  Antisense strand to SEQ ID NO: 1189574
aauguuaccacucuacucu

SEQ ID NO: 1189576 - RNA, 19 nt, Artificial Sequence
  Description of Artificial Sequence: Synthetic oligonucleotide
  Sense strand starting at position 3691 of SEQ ID NO: 916858
cugguucucagaggcuaau

SEQ ID NO: 1189577 - RNA, 19 nt, Artificial Sequence
  Description of Artificial Sequence: Synthetic oligonucleotide
  Antisense strand to SEQ ID NO: 1189576
auuagccucugagaaccag

SEQ ID NO: 1189578 - RNA, 19 nt, Artificial Sequence
  Description of Artificial Sequence: Synthetic oligonucleotide
  Sense strand starting at position 3703 of SEQ ID NO: 916858
ggcuaauugugggaggaga

SEQ ID NO: 1189579 - RNA, 19 nt, Artificial Sequence
  Description of Artificial Sequence: Synthetic oligonucleotide
  Antisense strand to SEQ ID NO: 1189578
ucuccucccacaauuagcc

SEQ ID NO: 1189580 - RNA, 19 nt, Artificial Sequence
  Description of Artificial Sequence: Synthetic oligonucleotide
  Sense strand starting at position 3731 of SEQ ID NO: 916858
ggaauuaguuaacauagga

SEQ ID NO: 1189581 - RNA, 19 nt, Artificial Sequence
  Description of Artificial Sequence: Synthetic oligonucleotide
  Antisense strand to SEQ ID NO: 1189580
uccuauguuaacuaauucc

SEQ ID NO: 1189582 - RNA, 19 nt, Artificial Sequence
  Description of Artificial Sequence: Synthetic oligonucleotide
  Sense strand starting at position 3852 of SEQ ID NO: 916858
gugggcugcgaguaugaau

SEQ ID NO: 1189583 - RNA, 19 nt, Artificial Sequence
  Description of Artificial Sequence: Synthetic oligonucleotide
  Antisense strand to SEQ ID NO: 1189582
auucauacucgcagcccac

SEQ ID NO: 1189584 - RNA, 19 nt, Artificial Sequence
  Description of Artificial Sequence: Synthetic oligonucleotide
  Sense strand starting at position 3879 of SEQ ID NO: 916858
agagaagacuuacacgauc

SEQ ID NO: 1189585 - RNA, 19 nt, Artificial Sequence
  Description of Artificial Sequence: Synthetic oligonucleotide
  Antisense strand to SEQ ID NO: 1189584
gaucguguaagucuucucu

SEQ ID NO: 1189586 - RNA, 19 nt, Artificial Sequence
  Description of Artificial Sequence: Synthetic oligonucleotide
  Sense strand starting at position 3891 of SEQ ID NO: 916858
cacgaucauuuaggaaguu

SEQ ID NO: 1189587 - RNA, 19 nt, Artificial Sequence
  Description of Artificial Sequence: Synthetic oligonucleotide
  Antisense strand to SEQ ID NO: 1189586
aacuuccuaaaugaucgug

SEQ ID NO: 1189588 - RNA, 19 nt, Artificial Sequence
  Description of Artificial Sequence: Synthetic oligonucleotide
  Sense strand starting at position 3900 of SEQ ID NO: 916858
uuaggaaguugcuacauga

SEQ ID NO: 1189589 - RNA, 19 nt, Artificial Sequence
  Description of Artificial Sequence: Synthetic oligonucleotide
  Antisense strand to SEQ ID NO: 1189588
ucauguagcaacuuccuaa

SEQ ID NO: 1189590 - RNA, 19 nt, Artificial Sequence
  Description of Artificial Sequence: Synthetic oligonucleotide
  Sense strand starting at position 3939 of SEQ ID NO: 916858
ucuuguaguuaucucacua

SEQ ID NO: 1189591 - RNA, 19 nt, Artificial Sequence
  Description of Artificial Sequence: Synthetic oligonucleotide
  Antisense strand to SEQ ID NO: 1189590
uagugagauaacuacaaga

SEQ ID NO: 1189592 - RNA, 19 nt, Artificial Sequence
  Description of Artificial Sequence: Synthetic oligonucleotide
  Sense strand starting at position 3943 of SEQ ID NO: 916858
guaguuaucucacuauuau

SEQ ID NO: 1189593 - RNA, 19 nt, Artificial Sequence
  Description of Artificial Sequence: Synthetic oligonucleotide
  Antisense strand to SEQ ID NO: 1189592
auaauagugagauaacuac

SEQ ID NO: 1189594 - RNA, 19 nt, Artificial Sequence
  Description of Artificial Sequence: Synthetic oligonucleotide
  Sense strand starting at position 3950 of SEQ ID NO: 916858
ucucacuauuauugggaau

SEQ ID NO: 1189595 - RNA, 19 nt, Artificial Sequence
  Description of Artificial Sequence: Synthetic oligonucleotide
  Antisense strand to SEQ ID NO: 1189594
auucccaauaauagugaga

SEQ ID NO: 1189596 - RNA, 19 nt, Artificial Sequence
  Description of Artificial Sequence: Synthetic oligonucleotide
  Sense strand starting at position 3952 of SEQ ID NO: 916858
ucacuauuauugggaauca

SEQ ID NO: 1189597 - RNA, 19 nt, Artificial Sequence
  Description of Artificial Sequence: Synthetic oligonucleotide
  Antisense strand to SEQ ID NO: 1189596
ugauucccaauaauaguga

SEQ ID NO: 1189598 - RNA, 19 nt, Artificial Sequence
  Description of Artificial Sequence: Synthetic oligonucleotide
  Sense strand starting at position 3976 of SEQ ID NO: 916858
agaauuagcuguuuaguuc

SEQ ID NO: 1189599 - RNA, 19 nt, Artificial Sequence
  Description of Artificial Sequence: Synthetic oligonucleotide
  Antisense strand to SEQ ID NO: 1189598
gaacuaaacagcuaauucu

SEQ ID NO: 1189600 - RNA, 19 nt, Artificial Sequence
  Description of Artificial Sequence: Synthetic oligonucleotide
  Sense strand starting at position 3977 of SEQ ID NO: 916858
gaauuagcuguuuaguucu

SEQ ID NO: 1189601 - RNA, 19 nt, Artificial Sequence
  Description of Artificial Sequence: Synthetic oligonucleotide
  Antisense strand to SEQ ID NO: 1189600
agaacuaaacagcuaauuc

SEQ ID NO: 1189602 - RNA, 19 nt, Artificial Sequence
  Description of Artificial Sequence: Synthetic oligonucleotide
  Sense strand starting at position 13 of SEQ ID NO: 916859
ggugguaguucacaucugu

SEQ ID NO: 1189603 - RNA, 19 nt, Artificial Sequence
  Description of Artificial Sequence: Synthetic oligonucleotide
  Antisense strand to SEQ ID NO: 1189602
acagaugugaacuaccacc

SEQ ID NO: 1189604 - RNA, 19 nt, Artificial Sequence
  Description of Artificial Sequence: Synthetic oligonucleotide
  Sense strand starting at position 349 of SEQ ID NO: 916859
ggagcucgguucugaagaa

SEQ ID NO: 1189605 - RNA, 19 nt, Artificial Sequence
  Description of Artificial Sequence: Synthetic oligonucleotide
  Antisense strand to SEQ ID NO: 1189604
uucuucagaaccgagcucc

SEQ ID NO: 1189606 - RNA, 19 nt, Artificial Sequence
  Description of Artificial Sequence: Synthetic oligonucleotide
  Sense strand starting at position 350 of SEQ ID NO: 916859
gagcucgguucugaagaau

SEQ ID NO: 1189607 - RNA, 19 nt, Artificial Sequence
  Description of Artificial Sequence: Synthetic oligonucleotide
  Antisense strand to SEQ ID NO: 1189606
auucuucagaaccgagcuc

SEQ ID NO: 1189608 - RNA, 19 nt, Artificial Sequence
  Description of Artificial Sequence: Synthetic oligonucleotide
  Sense strand starting at position 368 of SEQ ID NO: 916859
uuuguaacuccagggaucu

SEQ ID NO: 1189609 - RNA, 19 nt, Artificial Sequence
  Description of Artificial Sequence: Synthetic oligonucleotide
  Antisense strand to SEQ ID NO: 1189608
agaucccuggaguuacaaa

SEQ ID NO: 1189610 - RNA, 19 nt, Artificial Sequence
  Description of Artificial Sequence: Synthetic oligonucleotide
  Sense strand starting at position 823 of SEQ ID NO: 916859
aggacugugcccuggaaga

SEQ ID NO: 1189611 - RNA, 19 nt, Artificial Sequence
  Description of Artificial Sequence: Synthetic oligonucleotide
  Antisense strand to SEQ ID NO: 1189610
ucuuccagggcacaguccu

SEQ ID NO: 1189612 - RNA, 19 nt, Artificial Sequence
  Description of Artificial Sequence: Synthetic oligonucleotide
  Sense strand starting at position 825 of SEQ ID NO: 916859
gacugugcccuggaagaau

SEQ ID NO: 1189613 - RNA, 19 nt, Artificial Sequence
  Description of Artificial Sequence: Synthetic oligonucleotide
  Antisense strand to SEQ ID NO: 1189612
auucuuccagggcacaguc

SEQ ID NO: 1189614 - RNA, 19 nt, Artificial Sequence
  Description of Artificial Sequence: Synthetic oligonucleotide
  Sense strand starting at position 1348 of SEQ ID NO: 916859
ugugaaggcucacauaaga

SEQ ID NO: 1189615 - RNA, 19 nt, Artificial Sequence
  Description of Artificial Sequence: Synthetic oligonucleotide
  Antisense strand to SEQ ID NO: 1189614
ucuuaugugagccuucaca

SEQ ID NO: 1189616 - RNA, 19 nt, Artificial Sequence
  Description of Artificial Sequence: Synthetic oligonucleotide
  Sense strand starting at position 1620 of SEQ ID NO: 916859
ccauauuccuugggaaggu

SEQ ID NO: 1189617 - RNA, 19 nt, Artificial Sequence
  Description of Artificial Sequence: Synthetic oligonucleotide
  Antisense strand to SEQ ID NO: 1189616
accuucccaaggaauaugg

SEQ ID NO: 1189618 - RNA, 19 nt, Artificial Sequence
  Description of Artificial Sequence: Synthetic oligonucleotide
  Sense strand starting at position 1621 of SEQ ID NO: 916859
cauauuccuugggaagguu

SEQ ID NO: 1189619 - RNA, 19 nt, Artificial Sequence
  Description of Artificial Sequence: Synthetic oligonucleotide
  Antisense strand to SEQ ID NO: 1189618
aaccuucccaaggaauaug

SEQ ID NO: 1189620 - RNA, 19 nt, Artificial Sequence
  Description of Artificial Sequence: Synthetic oligonucleotide
  Sense strand starting at position 1699 of SEQ ID NO: 916859
agaugcaugcaugggaaau

SEQ ID NO: 1189621 - RNA, 19 nt, Artificial Sequence
  Description of Artificial Sequence: Synthetic oligonucleotide
  Antisense strand to SEQ ID NO: 1189620
auuucccaugcaugcaucu

SEQ ID NO: 1189622 - RNA, 19 nt, Artificial Sequence
  Description of Artificial Sequence: Synthetic oligonucleotide
  Sense strand starting at position 1701 of SEQ ID NO: 916859
augcaugcaugggaaauaa

SEQ ID NO: 1189623 - RNA, 19 nt, Artificial Sequence
  Description of Artificial Sequence: Synthetic oligonucleotide
  Antisense strand to SEQ ID NO: 1189622
uuauuucccaugcaugcau

SEQ ID NO: 1189624 - RNA, 19 nt, Artificial Sequence
  Description of Artificial Sequence: Synthetic oligonucleotide
  Sense strand starting at position 1716 of SEQ ID NO: 916859
auaaacuguucuuagcagu

SEQ ID NO: 1189625 - RNA, 19 nt, Artificial Sequence
  Description of Artificial Sequence: Synthetic oligonucleotide
  Antisense strand to SEQ ID NO: 1189624
acugcuaagaacaguuuau

SEQ ID NO: 1189626 - RNA, 19 nt, Artificial Sequence
  Description of Artificial Sequence: Synthetic oligonucleotide
  Sense strand starting at position 1836 of SEQ ID NO: 916859
ugaugucugaccuggccua

SEQ ID NO: 1189627 - RNA, 19 nt, Artificial Sequence
  Description of Artificial Sequence: Synthetic oligonucleotide
  Antisense strand to SEQ ID NO: 1189626
uaggccaggucagacauca

SEQ ID NO: 1189628 - RNA, 19 nt, Artificial Sequence
  Description of Artificial Sequence: Synthetic oligonucleotide
  Sense strand starting at position 1837 of SEQ ID NO: 916859
gaugucugaccuggccuaa

SEQ ID NO: 1189629 - RNA, 19 nt, Artificial Sequence
  Description of Artificial Sequence: Synthetic oligonucleotide
  Antisense strand to SEQ ID NO: 1189628
uuaggccaggucagacauc

SEQ ID NO: 1189630 - RNA, 19 nt, Artificial Sequence
  Description of Artificial Sequence: Synthetic oligonucleotide
  Sense strand starting at position 1905 of SEQ ID NO: 916859
uuggcauuaccugauagca

SEQ ID NO: 1189631 - RNA, 19 nt, Artificial Sequence
  Description of Artificial Sequence: Synthetic oligonucleotide
  Antisense strand to SEQ ID NO: 1189630
ugcuaucagguaaugccaa

SEQ ID NO: 1189632 - RNA, 19 nt, Artificial Sequence
  Description of Artificial Sequence: Synthetic oligonucleotide
  Sense strand starting at position 2121 of SEQ ID NO: 916859
ccaaaugccuaguugcuaa

SEQ ID NO: 1189633 - RNA, 19 nt, Artificial Sequence
  Description of Artificial Sequence: Synthetic oligonucleotide
  Antisense strand to SEQ ID NO: 1189632
uuagcaacuaggcauuugg

SEQ ID NO: 1189634 - RNA, 19 nt, Artificial Sequence
  Description of Artificial Sequence: Synthetic oligonucleotide
  Sense strand starting at position 2179 of SEQ ID NO: 916859
agaguagagugguaacauu

SEQ ID NO: 1189635 - RNA, 19 nt, Artificial Sequence
  Description of Artificial Sequence: Synthetic oligonucleotide
  Antisense strand to SEQ ID NO: 1189634
aauguuaccacucuacucu

SEQ ID NO: 1189636 - RNA, 19 nt, Artificial Sequence
  Description of Artificial Sequence: Synthetic oligonucleotide
  Sense strand starting at position 3010 of SEQ ID NO: 916859
cugguucucagaggcuaau

SEQ ID NO: 1189637 - RNA, 19 nt, Artificial Sequence
  Description of Artificial Sequence: Synthetic oligonucleotide
  Antisense strand to SEQ ID NO: 1189636
auuagccucugagaaccag

SEQ ID NO: 1189638 - RNA, 19 nt, Artificial Sequence
  Description of Artificial Sequence: Synthetic oligonucleotide
  Sense strand starting at position 3022 of SEQ ID NO: 916859
ggcuaauugugggaggaga

SEQ ID NO: 1189639 - RNA, 19 nt, Artificial Sequence
  Description of Artificial Sequence: Synthetic oligonucleotide
  Antisense strand to SEQ ID NO: 1189638
ucuccucccacaauuagcc

SEQ ID NO: 1189640 - RNA, 19 nt, Artificial Sequence
  Description of Artificial Sequence: Synthetic oligonucleotide
  Sense strand starting at position 3050 of SEQ ID NO: 916859
ggaauuaguuaacauagga

SEQ ID NO: 1189641 - RNA, 19 nt, Artificial Sequence
  Description of Artificial Sequence: Synthetic oligonucleotide
  Antisense strand to SEQ ID NO: 1189640
uccuauguuaacuaauucc

SEQ ID NO: 1189642 - RNA, 19 nt, Artificial Sequence
  Description of Artificial Sequence: Synthetic oligonucleotide
  Sense strand starting at position 3171 of SEQ ID NO: 916859
gugggcugcgaguaugaau

SEQ ID NO: 1189643 - RNA, 19 nt, Artificial Sequence
  Description of Artificial Sequence: Synthetic oligonucleotide
  Antisense strand to SEQ ID NO: 1189642
auucauacucgcagcccac

SEQ ID NO: 1189644 - RNA, 19 nt, Artificial Sequence
  Description of Artificial Sequence: Synthetic oligonucleotide
  Sense strand starting at position 3198 of SEQ ID NO: 916859
agagaagacuuacacgauc

SEQ ID NO: 1189645 - RNA, 19 nt, Artificial Sequence
  Description of Artificial Sequence: Synthetic oligonucleotide
  Antisense strand to SEQ ID NO: 1189644
gaucguguaagucuucucu

SEQ ID NO: 1189646 - RNA, 19 nt, Artificial Sequence
  Description of Artificial Sequence: Synthetic oligonucleotide
  Sense strand starting at position 3210 of SEQ ID NO: 916859
cacgaucauuuaggaaguu

SEQ ID NO: 1189647 - RNA, 19 nt, Artificial Sequence
  Description of Artificial Sequence: Synthetic oligonucleotide
  Antisense strand to SEQ ID NO: 1189646
aacuuccuaaaugaucgug

SEQ ID NO: 1189648 - RNA, 19 nt, Artificial Sequence
  Description of Artificial Sequence: Synthetic oligonucleotide
  Sense strand starting at position 3219 of SEQ ID NO: 916859
uuaggaaguugcuacauga

SEQ ID NO: 1189649 - RNA, 19 nt, Artificial Sequence
  Description of Artificial Sequence: Synthetic oligonucleotide
  Antisense strand to SEQ ID NO: 1189648
ucauguagcaacuuccuaa

SEQ ID NO: 1189650 - RNA, 19 nt, Artificial Sequence
  Description of Artificial Sequence: Synthetic oligonucleotide
  Sense strand starting at position 3258 of SEQ ID NO: 916859
ucuuguaguuaucucacua

SEQ ID NO: 1189651 - RNA, 19 nt, Artificial Sequence
  Description of Artificial Sequence: Synthetic oligonucleotide
  Antisense strand to SEQ ID NO: 1189650
uagugagauaacuacaaga

SEQ ID NO: 1189652 - RNA, 19 nt, Artificial Sequence
  Description of Artificial Sequence: Synthetic oligonucleotide
  Sense strand starting at position 3262 of SEQ ID NO: 916859
guaguuaucucacuauuau

SEQ ID NO: 1189653 - RNA, 19 nt, Artificial Sequence
  Description of Artificial Sequence: Synthetic oligonucleotide
  Antisense strand to SEQ ID NO: 1189652
auaauagugagauaacuac

SEQ ID NO: 1189654 - RNA, 19 nt, Artificial Sequence
  Description of Artificial Sequence: Synthetic oligonucleotide
  Sense strand starting at position 3269 of SEQ ID NO: 916859
ucucacuauuauugggaau

SEQ ID NO: 1189655 - RNA, 19 nt, Artificial Sequence
  Description of Artificial Sequence: Synthetic oligonucleotide
  Antisense strand to SEQ ID NO: 1189654
auucccaauaauagugaga

SEQ ID NO: 1189656 - RNA, 19 nt, Artificial Sequence
  Description of Artificial Sequence: Synthetic oligonucleotide
  Sense strand starting at position 3271 of SEQ ID NO: 916859
ucacuauuauugggaauca

SEQ ID NO: 1189657 - RNA, 19 nt, Artificial Sequence
  Description of Artificial Sequence: Synthetic oligonucleotide
  Antisense strand to SEQ ID NO: 1189656
ugauucccaauaauaguga

SEQ ID NO: 1189658 - RNA, 19 nt, Artificial Sequence
  Description of Artificial Sequence: Synthetic oligonucleotide
  Sense strand starting at position 3295 of SEQ ID NO: 916859
agaauuagcuguuuaguuc

SEQ ID NO: 1189659 - RNA, 19 nt, Artificial Sequence
  Description of Artificial Sequence: Synthetic oligonucleotide
  Antisense strand to SEQ ID NO: 1189658
gaacuaaacagcuaauucu

SEQ ID NO: 1189660 - RNA, 19 nt, Artificial Sequence
  Description of Artificial Sequence: Synthetic oligonucleotide
  Sense strand starting at position 3296 of SEQ ID NO: 916859
gaauuagcuguuuaguucu

SEQ ID NO: 1189661 - RNA, 19 nt, Artificial Sequence
  Description of Artificial Sequence: Synthetic oligonucleotide
  Antisense strand to SEQ ID NO: 1189660
agaacuaaacagcuaauuc

SEQ ID NO: 1189662 - RNA, 19 nt, Artificial Sequence
  Description of Artificial Sequence: Synthetic oligonucleotide
  Sense strand starting at position 3373 of SEQ ID NO: 916859
ccuguaaucucaguacggu

SEQ ID NO: 1189663 - RNA, 19 nt, Artificial Sequence
  Description of Artificial Sequence: Synthetic oligonucleotide
  Antisense strand to SEQ ID NO: 1189662
accguacugagauuacagg

SEQ ID NO: 1189664 - RNA, 19 nt, Artificial Sequence
  Description of Artificial Sequence: Synthetic oligonucleotide
  Sense strand starting at position 3704 of SEQ ID NO: 916859
gccugaagucucugcguua

SEQ ID NO: 1189665 - RNA, 19 nt, Artificial Sequence
  Description of Artificial Sequence: Synthetic oligonucleotide
  Antisense strand to SEQ ID NO: 1189664
uaacgcagagacuucaggc

SEQ ID NO: 1189666 - RNA, 19 nt, Artificial Sequence
  Description of Artificial Sequence: Synthetic oligonucleotide
  Sense strand starting at position 3705 of SEQ ID NO: 916859
ccugaagucucugcguuaa

SEQ ID NO: 1189667 - RNA, 19 nt, Artificial Sequence
  Description of Artificial Sequence: Synthetic oligonucleotide
  Antisense strand to SEQ ID NO: 1189666
uuaacgcagagacuucagg

SEQ ID NO: 1189668 - RNA, 19 nt, Artificial Sequence
  Description of Artificial Sequence: Synthetic oligonucleotide
  Sense strand starting at position 3743 of SEQ ID NO: 916859
aaagguguguaugagugua

SEQ ID NO: 1189669 - RNA, 19 nt, Artificial Sequence
  Description of Artificial Sequence: Synthetic oligonucleotide
  Antisense strand to SEQ ID NO: 1189668
uacacucauacacaccuuu

SEQ ID NO: 1189670 - RNA, 19 nt, Artificial Sequence
  Description of Artificial Sequence: Synthetic oligonucleotide
  Sense strand starting at position 3746 of SEQ ID NO: 916859
gguguguaugaguguacga

SEQ ID NO: 1189671 - RNA, 19 nt, Artificial Sequence
  Description of Artificial Sequence: Synthetic oligonucleotide
  Antisense strand to SEQ ID NO: 1189670
ucguacacucauacacacc

SEQ ID NO: 1189672 - RNA, 19 nt, Artificial Sequence
  Description of Artificial Sequence: Synthetic oligonucleotide
  Sense strand starting at position 3748 of SEQ ID NO: 916859
uguguaugaguguacgaua

SEQ ID NO: 1189673 - RNA, 19 nt, Artificial Sequence
  Description of Artificial Sequence: Synthetic oligonucleotide
  Antisense strand to SEQ ID NO: 1189672
uaucguacacucauacaca

SEQ ID NO: 1189674 - RNA, 19 nt, Artificial Sequence
  Description of Artificial Sequence: Synthetic oligonucleotide
  Sense strand starting at position 3751 of SEQ ID NO: 916859
guaugaguguacgauaaug

SEQ ID NO: 1189675 - RNA, 19 nt, Artificial Sequence
  Description of Artificial Sequence: Synthetic oligonucleotide
  Antisense strand to SEQ ID NO: 1189674
cauuaucguacacucauac

SEQ ID NO: 1189676 - RNA, 19 nt, Artificial Sequence
  Description of Artificial Sequence: Synthetic oligonucleotide
  Sense strand starting at position 3753 of SEQ ID NO: 916859
augaguguacgauaaugau

SEQ ID NO: 1189677 - RNA, 19 nt, Artificial Sequence
  Description of Artificial Sequence: Synthetic oligonucleotide
  Antisense strand to SEQ ID NO: 1189676
aucauuaucguacacucau

SEQ ID NO: 1189678 - RNA, 19 nt, Artificial Sequence
  Description of Artificial Sequence: Synthetic oligonucleotide
  Sense strand starting at position 3756 of SEQ ID NO: 916859
aguguacgauaaugauaau

SEQ ID NO: 1189679 - RNA, 19 nt, Artificial Sequence
  Description of Artificial Sequence: Synthetic oligonucleotide
  Antisense strand to SEQ ID NO: 1189678
auuaucauuaucguacacu

SEQ ID NO: 1189680 - RNA, 19 nt, Artificial Sequence
  Description of Artificial Sequence: Synthetic oligonucleotide
  Sense strand starting at position 3759 of SEQ ID NO: 916859
guacgauaaugauaauguu

SEQ ID NO: 1189681 - RNA, 19 nt, Artificial Sequence
  Description of Artificial Sequence: Synthetic oligonucleotide
  Antisense strand to SEQ ID NO: 1189680
aacauuaucauuaucguac

SEQ ID NO: 1189682 - RNA, 19 nt, Artificial Sequence
  Description of Artificial Sequence: Synthetic oligonucleotide
  Sense strand starting at position 709 of SEQ ID NO: 916860
agagauguauuauuaagca

SEQ ID NO: 1189683 - RNA, 19 nt, Artificial Sequence
  Description of Artificial Sequence: Synthetic oligonucleotide
  Antisense strand to SEQ ID NO: 1189682
ugcuuaauaauacaucucu

SEQ ID NO: 1189684 - RNA, 19 nt, Artificial Sequence
  Description of Artificial Sequence: Synthetic oligonucleotide
  Sense strand starting at position 793 of SEQ ID NO: 916860
guauauauguaagcauaga

SEQ ID NO: 1189685 - RNA, 19 nt, Artificial Sequence
  Description of Artificial Sequence: Synthetic oligonucleotide
  Antisense strand to SEQ ID NO: 1189684
ucuaugcuuacauauauac

SEQ ID NO: 1189686 - RNA, 19 nt, Artificial Sequence
  Description of Artificial Sequence: Synthetic oligonucleotide
  Sense strand starting at position 1030 of SEQ ID NO: 916860
cuuccaaggucuguagaga

SEQ ID NO: 1189687 - RNA, 19 nt, Artificial Sequence
  Description of Artificial Sequence: Synthetic oligonucleotide
  Antisense strand to SEQ ID NO: 1189686
ucucuacagaccuuggaag

SEQ ID NO: 1189688 - RNA, 19 nt, Artificial Sequence
  Description of Artificial Sequence: Synthetic oligonucleotide
  Sense strand starting at position 1177 of SEQ ID NO: 916860
aucuaaagugaauguuuga

SEQ ID NO: 1189689 - RNA, 19 nt, Artificial Sequence
  Description of Artificial Sequence: Synthetic oligonucleotide
  Antisense strand to SEQ ID NO: 1189688
ucaaacauucacuuuagau

SEQ ID NO: 1189690 - RNA, 19 nt, Artificial Sequence
  Description of Artificial Sequence: Synthetic oligonucleotide
  Sense strand starting at position 1187 of SEQ ID NO: 916860
aauguuugagaguaguaac

SEQ ID NO: 1189691 - RNA, 19 nt, Artificial Sequence
  Description of Artificial Sequence: Synthetic oligonucleotide
  Antisense strand to SEQ ID NO: 1189690
guuacuacucucaaacauu

SEQ ID NO: 1189692 - RNA, 19 nt, Artificial Sequence
  Description of Artificial Sequence: Synthetic oligonucleotide
  Sense strand starting at position 1366 of SEQ ID NO: 916860
acuggauuccuuugguaau

SEQ ID NO: 1189693 - RNA, 19 nt, Artificial Sequence
  Description of Artificial Sequence: Synthetic oligonucleotide
  Antisense strand to SEQ ID NO: 1189692
auuaccaaaggaauccagu

SEQ ID NO: 1189694 - RNA, 19 nt, Artificial Sequence
  Description of Artificial Sequence: Synthetic oligonucleotide
  Sense strand starting at position 1494 of SEQ ID NO: 916860
uggcauagucaucauacuu

SEQ ID NO: 1189695 - RNA, 19 nt, Artificial Sequence
  Description of Artificial Sequence: Synthetic oligonucleotide
  Antisense strand to SEQ ID NO: 1189694
aaguaugaugacuaugcca

SEQ ID NO: 1189696 - RNA, 19 nt, Artificial Sequence
  Description of Artificial Sequence: Synthetic oligonucleotide
  Sense strand starting at position 1637 of SEQ ID NO: 916860
ugccaaaugccguuugcuu

SEQ ID NO: 1189697 - RNA, 19 nt, Artificial Sequence
  Description of Artificial Sequence: Synthetic oligonucleotide
  Antisense strand to SEQ ID NO: 1189696
aagcaaacggcauuuggca

SEQ ID NO: 1189698 - RNA, 19 nt, Artificial Sequence
  Description of Artificial Sequence: Synthetic oligonucleotide
  Sense strand starting at position 1638 of SEQ ID NO: 916860
gccaaaugccguuugcuuu

SEQ ID NO: 1189699 - RNA, 19 nt, Artificial Sequence
  Description of Artificial Sequence: Synthetic oligonucleotide
  Antisense strand to SEQ ID NO: 1189698
aaagcaaacggcauuuggc

SEQ ID NO: 1189700 - RNA, 19 nt, Artificial Sequence
  Description of Artificial Sequence: Synthetic oligonucleotide
  Sense strand starting at position 1804 of SEQ ID NO: 916860
gguaauagaucuuccuuua

SEQ ID NO: 1189701 - RNA, 19 nt, Artificial Sequence
  Description of Artificial Sequence: Synthetic oligonucleotide
  Antisense strand to SEQ ID NO: 1189700
uaaaggaagaucuauuacc

SEQ ID NO: 1189702 - RNA, 19 nt, Artificial Sequence
  Description of Artificial Sequence: Synthetic oligonucleotide
  Sense strand starting at position 1829 of SEQ ID NO: 916860
gucauauugucaucacaaa

SEQ ID NO: 1189703 - RNA, 19 nt, Artificial Sequence
  Description of Artificial Sequence: Synthetic oligonucleotide
  Antisense strand to SEQ ID NO: 1189702
uuugugaugacaauaugac

SEQ ID NO: 1189704 - RNA, 19 nt, Artificial Sequence
  Description of Artificial Sequence: Synthetic oligonucleotide
  Sense strand starting at position 1851 of SEQ ID NO: 916860
cccuguacuccuuagaucu

SEQ ID NO: 1189705 - RNA, 19 nt, Artificial Sequence
  Description of Artificial Sequence: Synthetic oligonucleotide
  Antisense strand to SEQ ID NO: 1189704
agaucuaaggaguacaggg

SEQ ID NO: 1189706 - RNA, 19 nt, Artificial Sequence
  Description of Artificial Sequence: Synthetic oligonucleotide
  Sense strand starting at position 2168 of SEQ ID NO: 916860
aacugcuuuguguacagaa

SEQ ID NO: 1189707 - RNA, 19 nt, Artificial Sequence
  Description of Artificial Sequence: Synthetic oligonucleotide
  Antisense strand to SEQ ID NO: 1189706
uucuguacacaaagcaguu

SEQ ID NO: 1189708 - RNA, 19 nt, Artificial Sequence
  Description of Artificial Sequence: Synthetic oligonucleotide
  Sense strand starting at position 2170 of SEQ ID NO: 916860
cugcuuuguguacagaaau

SEQ ID NO: 1189709 - RNA, 19 nt, Artificial Sequence
  Description of Artificial Sequence: Synthetic oligonucleotide
  Antisense strand to SEQ ID NO: 1189708
auuucuguacacaaagcag

SEQ ID NO: 1189710 - RNA, 19 nt, Artificial Sequence
  Description of Artificial Sequence: Synthetic oligonucleotide
  Sense strand starting at position 2227 of SEQ ID NO: 916860
aguauuucuuaucuuugca

SEQ ID NO: 1189711 - RNA, 19 nt, Artificial Sequence
  Description of Artificial Sequence: Synthetic oligonucleotide
  Antisense strand to SEQ ID NO: 1189710
ugcaaagauaagaaauacu

SEQ ID NO: 1189712 - RNA, 19 nt, Artificial Sequence
  Description of Artificial Sequence: Synthetic oligonucleotide
  Sense strand starting at position 2239 of SEQ ID NO: 916860
cuuugcauacuuuauguga

SEQ ID NO: 1189713 - RNA, 19 nt, Artificial Sequence
  Description of Artificial Sequence: Synthetic oligonucleotide
  Antisense strand to SEQ ID NO: 1189712
ucacauaaaguaugcaaag

SEQ ID NO: 1189714 - RNA, 19 nt, Artificial Sequence
  Description of Artificial Sequence: Synthetic oligonucleotide
  Sense strand starting at position 2256 of SEQ ID NO: 916860
gaucaauauccacguaagg

SEQ ID NO: 1189715 - RNA, 19 nt, Artificial Sequence
  Description of Artificial Sequence: Synthetic oligonucleotide
  Antisense strand to SEQ ID NO: 1189714
ccuuacguggauauugauc

SEQ ID NO: 1189716 - RNA, 19 nt, Artificial Sequence
  Description of Artificial Sequence: Synthetic oligonucleotide
  Sense strand starting at position 2337 of SEQ ID NO: 916860
uuacuauugcaaggacuca

SEQ ID NO: 1189717 - RNA, 19 nt, Artificial Sequence
  Description of Artificial Sequence: Synthetic oligonucleotide
  Antisense strand to SEQ ID NO: 1189716
ugaguccuugcaauaguaa

SEQ ID NO: 1189718 - RNA, 19 nt, Artificial Sequence
  Description of Artificial Sequence: Synthetic oligonucleotide
  Sense strand starting at position 2377 of SEQ ID NO: 916860
ugcaucugucaguacacaa

SEQ ID NO: 1189719 - RNA, 19 nt, Artificial Sequence
  Description of Artificial Sequence: Synthetic oligonucleotide
  Antisense strand to SEQ ID NO: 1189718
uuguguacugacagaugca

SEQ ID NO: 1189720 - RNA, 19 nt, Artificial Sequence
  Description of Artificial Sequence: Synthetic oligonucleotide
  Sense strand starting at position 2498 of SEQ ID NO: 916860
caaggaugauguuuacuau

SEQ ID NO: 1189721 - RNA, 19 nt, Artificial Sequence
  Description of Artificial Sequence: Synthetic oligonucleotide
  Antisense strand to SEQ ID NO: 1189720
auaguaaacaucauccuug

SEQ ID NO: 1189722 - RNA, 19 nt, Artificial Sequence
  Description of Artificial Sequence: Synthetic oligonucleotide
  Sense strand starting at position 2501 of SEQ ID NO: 916860
ggaugauguuuacuauaaa

SEQ ID NO: 1189723 - RNA, 19 nt, Artificial Sequence
  Description of Artificial Sequence: Synthetic oligonucleotide
  Antisense strand to SEQ ID NO: 1189722
uuuauaguaaacaucaucc

SEQ ID NO: 1189724 - RNA, 19 nt, Artificial Sequence
  Description of Artificial Sequence: Synthetic oligonucleotide
  Sense strand starting at position 2524 of SEQ ID NO: 916860
cuugguagguauccugaau

SEQ ID NO: 1189725 - RNA, 19 nt, Artificial Sequence
  Description of Artificial Sequence: Synthetic oligonucleotide
  Antisense strand to SEQ ID NO: 1189724
auucaggauaccuaccaag

SEQ ID NO: 1189726 - RNA, 19 nt, Artificial Sequence
  Description of Artificial Sequence: Synthetic oligonucleotide
  Sense strand starting at position 2580 of SEQ ID NO: 916860
uggagucauauuuguaguu

SEQ ID NO: 1189727 - RNA, 19 nt, Artificial Sequence
  Description of Artificial Sequence: Synthetic oligonucleotide
  Antisense strand to SEQ ID NO: 1189726
aacuacaaauaugacucca

SEQ ID NO: 1189728 - RNA, 19 nt, Artificial Sequence
  Description of Artificial Sequence: Synthetic oligonucleotide
  Sense strand starting at position 2785 of SEQ ID NO: 916860
cccauaaucccaggguaga

SEQ ID NO: 1189729 - RNA, 19 nt, Artificial Sequence
  Description of Artificial Sequence: Synthetic oligonucleotide
  Antisense strand to SEQ ID NO: 1189728
ucuacccugggauuauggg

SEQ ID NO: 1189730 - RNA, 19 nt, Artificial Sequence
  Description of Artificial Sequence: Synthetic oligonucleotide
  Sense strand starting at position 2786 of SEQ ID NO: 916860
ccauaaucccaggguagaa

SEQ ID NO: 1189731 - RNA, 19 nt, Artificial Sequence
  Description of Artificial Sequence: Synthetic oligonucleotide
  Antisense strand to SEQ ID NO: 1189730
uucuacccugggauuaugg

SEQ ID NO: 1189732 - RNA, 19 nt, Artificial Sequence
  Description of Artificial Sequence: Synthetic oligonucleotide
  Sense strand starting at position 2827 of SEQ ID NO: 916860
ugacuagagucucuuugaa

SEQ ID NO: 1189733 - RNA, 19 nt, Artificial Sequence
  Description of Artificial Sequence: Synthetic oligonucleotide
  Antisense strand to SEQ ID NO: 1189732
uucaaagagacucuaguca

SEQ ID NO: 1189734 - RNA, 19 nt, Artificial Sequence
  Description of Artificial Sequence: Synthetic oligonucleotide
  Sense strand starting at position 2829 of SEQ ID NO: 916860
acuagagucucuuugaaga

SEQ ID NO: 1189735 - RNA, 19 nt, Artificial Sequence
  Description of Artificial Sequence: Synthetic oligonucleotide
  Antisense strand to SEQ ID NO: 1189734
ucuucaaagagacucuagu

SEQ ID NO: 1189736 - RNA, 19 nt, Artificial Sequence
  Description of Artificial Sequence: Synthetic oligonucleotide
  Sense strand starting at position 2839 of SEQ ID NO: 916860
cuuugaagacuuugaacua

SEQ ID NO: 1189737 - RNA, 19 nt, Artificial Sequence
  Description of Artificial Sequence: Synthetic oligonucleotide
  Antisense strand to SEQ ID NO: 1189736
uaguucaaagucuucaaag

SEQ ID NO: 1189738 - RNA, 19 nt, Artificial Sequence
  Description of Artificial Sequence: Synthetic oligonucleotide
  Sense strand starting at position 3350 of SEQ ID NO: 916860
gggucugggaucugggaau

SEQ ID NO: 1189739 - RNA, 19 nt, Artificial Sequence
  Description of Artificial Sequence: Synthetic oligonucleotide
  Antisense strand to SEQ ID NO: 1189738
auucccagaucccagaccc

SEQ ID NO: 1189740 - RNA, 19 nt, Artificial Sequence
  Description of Artificial Sequence: Synthetic oligonucleotide
  Sense strand starting at position 3434 of SEQ ID NO: 916860
guguuugaggcccauaaau

SEQ ID NO: 1189741 - RNA, 19 nt, Artificial Sequence
  Description of Artificial Sequence: Synthetic oligonucleotide
  Antisense strand to SEQ ID NO: 1189740
auuuaugggccucaaacac

SEQ ID NO: 1189742 - RNA, 19 nt, Artificial Sequence
  Description of Artificial Sequence: Synthetic oligonucleotide
  Sense strand starting at position 3436 of SEQ ID NO: 916860
guuugaggcccauaaaucu

SEQ ID NO: 1189743 - RNA, 19 nt, Artificial Sequence
  Description of Artificial Sequence: Synthetic oligonucleotide
  Antisense strand to SEQ ID NO: 1189742
agauuuaugggccucaaac

SEQ ID NO: 1189744 - RNA, 19 nt, Artificial Sequence
  Description of Artificial Sequence: Synthetic oligonucleotide
  Sense strand starting at position 3470 of SEQ ID NO: 916860
uuuccaugugaugauuaug

SEQ ID NO: 1189745 - RNA, 19 nt, Artificial Sequence
  Description of Artificial Sequence: Synthetic oligonucleotide
  Antisense strand to SEQ ID NO: 1189744
cauaaucaucacauggaaa

SEQ ID NO: 1189746 - RNA, 19 nt, Artificial Sequence
  Description of Artificial Sequence: Synthetic oligonucleotide
  Sense strand starting at position 3480 of SEQ ID NO: 916860
augauuauggugcagacuu

SEQ ID NO: 1189747 - RNA, 19 nt, Artificial Sequence
  Description of Artificial Sequence: Synthetic oligonucleotide
  Antisense strand to SEQ ID NO: 1189746
aagucugcaccauaaucau

SEQ ID NO: 1189748 - RNA, 19 nt, Artificial Sequence
  Description of Artificial Sequence: Synthetic oligonucleotide
  Sense strand starting at position 3506 of SEQ ID NO: 916860
acuugcaaugaguagauua

SEQ ID NO: 1189749 - RNA, 19 nt, Artificial Sequence
  Description of Artificial Sequence: Synthetic oligonucleotide
  Antisense strand to SEQ ID NO: 1189748
uaaucuacucauugcaagu

SEQ ID NO: 1189750 - RNA, 19 nt, Artificial Sequence
  Description of Artificial Sequence: Synthetic oligonucleotide
  Sense strand starting at position 3568 of SEQ ID NO: 916860
gacagaaaguugguguuua

SEQ ID NO: 1189751 - RNA, 19 nt, Artificial Sequence
  Description of Artificial Sequence: Synthetic oligonucleotide
  Antisense strand to SEQ ID NO: 1189750
uaaacaccaacuuucuguc

SEQ ID NO: 1189752 - RNA, 19 nt, Artificial Sequence
  Description of Artificial Sequence: Synthetic oligonucleotide
  Sense strand starting at position 3614 of SEQ ID NO: 916860
gccagagugaagcagagau

SEQ ID NO: 1189753 - RNA, 19 nt, Artificial Sequence
  Description of Artificial Sequence: Synthetic oligonucleotide
  Antisense strand to SEQ ID NO: 1189752
aucucugcuucacucuggc

SEQ ID NO: 1189754 - RNA, 19 nt, Artificial Sequence
  Description of Artificial Sequence: Synthetic oligonucleotide
  Sense strand starting at position 3668 of SEQ ID NO: 916860
gagagccuuccagguaaug

SEQ ID NO: 1189755 - RNA, 19 nt, Artificial Sequence
  Description of Artificial Sequence: Synthetic oligonucleotide
  Antisense strand to SEQ ID NO: 1189754
cauuaccuggaaggcucuc

SEQ ID NO: 1189756 - RNA, 19 nt, Artificial Sequence
  Description of Artificial Sequence: Synthetic oligonucleotide
  Sense strand starting at position 3682 of SEQ ID NO: 916860
uaaugaaaggcugagcuau

SEQ ID NO: 1189757 - RNA, 19 nt, Artificial Sequence
  Description of Artificial Sequence: Synthetic oligonucleotide
  Antisense strand to SEQ ID NO: 1189756
auagcucagccuuucauua

SEQ ID NO: 1189758 - RNA, 19 nt, Artificial Sequence
  Description of Artificial Sequence: Synthetic oligonucleotide
  Sense strand starting at position 3696 of SEQ ID NO: 916860
gcuauacaucuggaacuua

SEQ ID NO: 1189759 - RNA, 19 nt, Artificial Sequence
  Description of Artificial Sequence: Synthetic oligonucleotide
  Antisense strand to SEQ ID NO: 1189758
uaaguuccagauguauagc

SEQ ID NO: 1189760 - RNA, 19 nt, Artificial Sequence
  Description of Artificial Sequence: Synthetic oligonucleotide
  Sense strand starting at position 3918 of SEQ ID NO: 916860
gcagaauuaccaggaugau

SEQ ID NO: 1189761 - RNA, 19 nt, Artificial Sequence
  Description of Artificial Sequence: Synthetic oligonucleotide
  Antisense strand to SEQ ID NO: 1189760
aucauccugguaauucugc

SEQ ID NO: 1189762 - RNA, 19 nt, Artificial Sequence
  Description of Artificial Sequence: Synthetic oligonucleotide
  Sense strand starting at position 15 of SEQ ID NO: 916861
uucagaucuggagggaagu

SEQ ID NO: 1189763 - RNA, 19 nt, Artificial Sequence
  Description of Artificial Sequence: Synthetic oligonucleotide
  Antisense strand to SEQ ID NO: 1189762
acuucccuccagaucugaa

SEQ ID NO: 1189764 - RNA, 19 nt, Artificial Sequence
  Description of Artificial Sequence: Synthetic oligonucleotide
  Sense strand starting at position 26 of SEQ ID NO: 916861
agggaagucagaugucuuu

SEQ ID NO: 1189765 - RNA, 19 nt, Artificial Sequence
  Description of Artificial Sequence: Synthetic oligonucleotide
  Antisense strand to SEQ ID NO: 1189764
aaagacaucugacuucccu

SEQ ID NO: 1189766 - RNA, 19 nt, Artificial Sequence
  Description of Artificial Sequence: Synthetic oligonucleotide
  Sense strand starting at position 65 of SEQ ID NO: 916861
ccuaauagaugaggaaacu

SEQ ID NO: 1189767 - RNA, 19 nt, Artificial Sequence
  Description of Artificial Sequence: Synthetic oligonucleotide
  Antisense strand to SEQ ID NO: 1189766
aguuuccucaucuauuagg

SEQ ID NO: 1189768 - RNA, 19 nt, Artificial Sequence
  Description of Artificial Sequence: Synthetic oligonucleotide
  Sense strand starting at position 203 of SEQ ID NO: 916861
cggucuucgcaaugcaauc

SEQ ID NO: 1189769 - RNA, 19 nt, Artificial Sequence
  Description of Artificial Sequence: Synthetic oligonucleotide
  Antisense strand to SEQ ID NO: 1189768
gauugcauugcgaagaccg

SEQ ID NO: 1189770 - RNA, 19 nt, Artificial Sequence
  Description of Artificial Sequence: Synthetic oligonucleotide
  Sense strand starting at position 294 of SEQ ID NO: 916861
agugaaccuugacaaacau

SEQ ID NO: 1189771 - RNA, 19 nt, Artificial Sequence
  Description of Artificial Sequence: Synthetic oligonucleotide
  Antisense strand to SEQ ID NO: 1189770
auguuugucaagguucacu

SEQ ID NO: 1189772 - RNA, 19 nt, Artificial Sequence
  Description of Artificial Sequence: Synthetic oligonucleotide
  Sense strand starting at position 341 of SEQ ID NO: 916861
gaacuagggcucuguagau

SEQ ID NO: 1189773 - RNA, 19 nt, Artificial Sequence
  Description of Artificial Sequence: Synthetic oligonucleotide
  Antisense strand to SEQ ID NO: 1189772
aucuacagagcccuaguuc

SEQ ID NO: 1189774 - RNA, 19 nt, Artificial Sequence
  Description of Artificial Sequence: Synthetic oligonucleotide
  Sense strand starting at position 354 of SEQ ID NO: 916861
guagauaacgcgcagagau

SEQ ID NO: 1189775 - RNA, 19 nt, Artificial Sequence
  Description of Artificial Sequence: Synthetic oligonucleotide
  Antisense strand to SEQ ID NO: 1189774
aucucugcgcguuaucuac

SEQ ID NO: 1189776 - RNA, 19 nt, Artificial Sequence
  Description of Artificial Sequence: Synthetic oligonucleotide
  Sense strand starting at position 375 of SEQ ID NO: 916861
gccaguuguccucaggauc

SEQ ID NO: 1189777 - RNA, 19 nt, Artificial Sequence
  Description of Artificial Sequence: Synthetic oligonucleotide
  Antisense strand to SEQ ID NO: 1189776
gauccugaggacaacuggc

SEQ ID NO: 1189778 - RNA, 19 nt, Artificial Sequence
  Description of Artificial Sequence: Synthetic oligonucleotide
  Sense strand starting at position 572 of SEQ ID NO: 916861
cccuguggcagugaguaaa

SEQ ID NO: 1189779 - RNA, 19 nt, Artificial Sequence
  Description of Artificial Sequence: Synthetic oligonucleotide
  Antisense strand to SEQ ID NO: 1189778
uuuacucacugccacaggg

SEQ ID NO: 1189780 - RNA, 19 nt, Artificial Sequence
  Description of Artificial Sequence: Synthetic oligonucleotide
  Sense strand starting at position 575 of SEQ ID NO: 916861
uguggcagugaguaaauua

SEQ ID NO: 1189781 - RNA, 19 nt, Artificial Sequence
  Description of Artificial Sequence: Synthetic oligonucleotide
  Antisense strand to SEQ ID NO: 1189780
uaauuuacucacugccaca

SEQ ID NO: 1189782 - RNA, 19 nt, Artificial Sequence
  Description of Artificial Sequence: Synthetic oligonucleotide
  Sense strand starting at position 725 of SEQ ID NO: 916861
cuguguaaucccggguaag

SEQ ID NO: 1189783 - RNA, 19 nt, Artificial Sequence
  Description of Artificial Sequence: Synthetic oligonucleotide
  Antisense strand to SEQ ID NO: 1189782
cuuacccgggauuacacag

SEQ ID NO: 1189784 - RNA, 19 nt, Artificial Sequence
  Description of Artificial Sequence: Synthetic oligonucleotide
  Sense strand starting at position 726 of SEQ ID NO: 916861
uguguaaucccggguaagc

SEQ ID NO: 1189785 - RNA, 19 nt, Artificial Sequence
  Description of Artificial Sequence: Synthetic oligonucleotide
  Antisense strand to SEQ ID NO: 1189784
gcuuacccgggauuacaca

SEQ ID NO: 1189786 - RNA, 19 nt, Artificial Sequence
  Description of Artificial Sequence: Synthetic oligonucleotide
  Sense strand starting at position 728 of SEQ ID NO: 916861
uguaaucccggguaagcaa

SEQ ID NO: 1189787 - RNA, 19 nt, Artificial Sequence
  Description of Artificial Sequence: Synthetic oligonucleotide
  Antisense strand to SEQ ID NO: 1189786
uugcuuacccgggauuaca

SEQ ID NO: 1189788 - RNA, 19 nt, Artificial Sequence
  Description of Artificial Sequence: Synthetic oligonucleotide
  Sense strand starting at position 814 of SEQ ID NO: 916861
agacuaauguaaggauuaa

SEQ ID NO: 1189789 - RNA, 19 nt, Artificial Sequence
  Description of Artificial Sequence: Synthetic oligonucleotide
  Antisense strand to SEQ ID NO: 1189788
uuaauccuuacauuagucu

SEQ ID NO: 1189790 - RNA, 19 nt, Artificial Sequence
  Description of Artificial Sequence: Synthetic oligonucleotide
  Sense strand starting at position 844 of SEQ ID NO: 916861
gaagcagguugcuuaacau

SEQ ID NO: 1189791 - RNA, 19 nt, Artificial Sequence
  Description of Artificial Sequence: Synthetic oligonucleotide
  Antisense strand to SEQ ID NO: 1189790
auguuaagcaaccugcuuc

SEQ ID NO: 1189792 - RNA, 19 nt, Artificial Sequence
  Description of Artificial Sequence: Synthetic oligonucleotide
  Sense strand starting at position 1134 of SEQ ID NO: 916861
gaaagagaauguccaguuu

SEQ ID NO: 1189793 - RNA, 19 nt, Artificial Sequence
  Description of Artificial Sequence: Synthetic oligonucleotide
  Antisense strand to SEQ ID NO: 1189792
aaacuggacauucucuuuc

SEQ ID NO: 1189794 - RNA, 19 nt, Artificial Sequence
  Description of Artificial Sequence: Synthetic oligonucleotide
  Sense strand starting at position 1142 of SEQ ID NO: 916861
auguccaguuucuaugaga

SEQ ID NO: 1189795 - RNA, 19 nt, Artificial Sequence
  Description of Artificial Sequence: Synthetic oligonucleotide
  Antisense strand to SEQ ID NO: 1189794
ucucauagaaacuggacau

SEQ ID NO: 1189796 - RNA, 19 nt, Artificial Sequence
  Description of Artificial Sequence: Synthetic oligonucleotide
  Sense strand starting at position 1452 of SEQ ID NO: 916861
ggcagugugccgugacaga

SEQ ID NO: 1189797 - RNA, 19 nt, Artificial Sequence
  Description of Artificial Sequence: Synthetic oligonucleotide
  Antisense strand to SEQ ID NO: 1189796
ucugucacggcacacugcc

SEQ ID NO: 1189798 - RNA, 19 nt, Artificial Sequence
  Description of Artificial Sequence: Synthetic oligonucleotide
  Sense strand starting at position 2126 of SEQ ID NO: 916861
ggcggauuccugggcccau

SEQ ID NO: 1189799 - RNA, 19 nt, Artificial Sequence
  Description of Artificial Sequence: Synthetic oligonucleotide
  Antisense strand to SEQ ID NO: 1189798
augggcccaggaauccgcc

SEQ ID NO: 1189800 - RNA, 19 nt, Artificial Sequence
  Description of Artificial Sequence: Synthetic oligonucleotide
  Sense strand starting at position 2187 of SEQ ID NO: 916861
ccggaaauaugccuuuaua

SEQ ID NO: 1189801 - RNA, 19 nt, Artificial Sequence
  Description of Artificial Sequence: Synthetic oligonucleotide
  Antisense strand to SEQ ID NO: 1189800
uauaaaggcauauuuccgg

SEQ ID NO: 1189802 - RNA, 19 nt, Artificial Sequence
  Description of Artificial Sequence: Synthetic oligonucleotide
  Sense strand starting at position 2207 of SEQ ID NO: 916861
gagcgaaccgcgaggauua

SEQ ID NO: 1189803 - RNA, 19 nt, Artificial Sequence
  Description of Artificial Sequence: Synthetic oligonucleotide
  Antisense strand to SEQ ID NO: 1189802
uaauccucgcgguucgcuc

SEQ ID NO: 1189804 - RNA, 19 nt, Artificial Sequence
  Description of Artificial Sequence: Synthetic oligonucleotide
  Sense strand starting at position 2231 of SEQ ID NO: 916861
cuuuaccucugaguacgau

SEQ ID NO: 1189805 - RNA, 19 nt, Artificial Sequence
  Description of Artificial Sequence: Synthetic oligonucleotide
  Antisense strand to SEQ ID NO: 1189804
aucguacucagagguaaag

SEQ ID NO: 1189806 - RNA, 19 nt, Artificial Sequence
  Description of Artificial Sequence: Synthetic oligonucleotide
  Sense strand starting at position 2237 of SEQ ID NO: 916861
cucugaguacgaugcguau

SEQ ID NO: 1189807 - RNA, 19 nt, Artificial Sequence
  Description of Artificial Sequence: Synthetic oligonucleotide
  Antisense strand to SEQ ID NO: 1189806
auacgcaucguacucagag

SEQ ID NO: 1189808 - RNA, 19 nt, Artificial Sequence
  Description of Artificial Sequence: Synthetic oligonucleotide
  Sense strand starting at position 2239 of SEQ ID NO: 916861
cugaguacgaugcguauuu

SEQ ID NO: 1189809 - RNA, 19 nt, Artificial Sequence
  Description of Artificial Sequence: Synthetic oligonucleotide
  Antisense strand to SEQ ID NO: 1189808
aaauacgcaucguacucag

SEQ ID NO: 1189810 - RNA, 19 nt, Artificial Sequence
  Description of Artificial Sequence: Synthetic oligonucleotide
  Sense strand starting at position 2317 of SEQ ID NO: 916861
auuagaguacgcugugaau

SEQ ID NO: 1189811 - RNA, 19 nt, Artificial Sequence
  Description of Artificial Sequence: Synthetic oligonucleotide
  Antisense strand to SEQ ID NO: 1189810
auucacagcguacucuaau

SEQ ID NO: 1189812 - RNA, 19 nt, Artificial Sequence
  Description of Artificial Sequence: Synthetic oligonucleotide
  Sense strand starting at position 2319 of SEQ ID NO: 916861
uagaguacgcugugaauag

SEQ ID NO: 1189813 - RNA, 19 nt, Artificial Sequence
  Description of Artificial Sequence: Synthetic oligonucleotide
  Antisense strand to SEQ ID NO: 1189812
cuauucacagcguacucua

SEQ ID NO: 1189814 - RNA, 19 nt, Artificial Sequence
  Description of Artificial Sequence: Synthetic oligonucleotide
  Sense strand starting at position 2323 of SEQ ID NO: 916861
guacgcugugaauagaauu

SEQ ID NO: 1189815 - RNA, 19 nt, Artificial Sequence
  Description of Artificial Sequence: Synthetic oligonucleotide
  Antisense strand to SEQ ID NO: 1189814
aauucuauucacagcguac

SEQ ID NO: 1189816 - RNA, 19 nt, Artificial Sequence
  Description of Artificial Sequence: Synthetic oligonucleotide
  Sense strand starting at position 2378 of SEQ ID NO: 916861
caccauaucgcagaggauu

SEQ ID NO: 1189817 - RNA, 19 nt, Artificial Sequence
  Description of Artificial Sequence: Synthetic oligonucleotide
  Antisense strand to SEQ ID NO: 1189816
aauccucugcgauauggug

SEQ ID NO: 1189818 - RNA, 19 nt, Artificial Sequence
  Description of Artificial Sequence: Synthetic oligonucleotide
  Sense strand starting at position 2845 of SEQ ID NO: 916861
ccugacccucgggaucaua

SEQ ID NO: 1189819 - RNA, 19 nt, Artificial Sequence
  Description of Artificial Sequence: Synthetic oligonucleotide
  Antisense strand to SEQ ID NO: 1189818
uaugaucccgagggucagg

SEQ ID NO: 1189820 - RNA, 19 nt, Artificial Sequence
  Description of Artificial Sequence: Synthetic oligonucleotide
  Sense strand starting at position 2853 of SEQ ID NO: 916861
ucgggaucauaccauugua

SEQ ID NO: 1189821 - RNA, 19 nt, Artificial Sequence
  Description of Artificial Sequence: Synthetic oligonucleotide
  Antisense strand to SEQ ID NO: 1189820
uacaaugguaugaucccga

SEQ ID NO: 1189822 - RNA, 19 nt, Artificial Sequence
  Description of Artificial Sequence: Synthetic oligonucleotide
  Sense strand starting at position 2856 of SEQ ID NO: 916861
ggaucauaccauuguaagg

SEQ ID NO: 1189823 - RNA, 19 nt, Artificial Sequence
  Description of Artificial Sequence: Synthetic oligonucleotide
  Antisense strand to SEQ ID NO: 1189822
ccuuacaaugguaugaucc

SEQ ID NO: 1189824 - RNA, 19 nt, Artificial Sequence
  Description of Artificial Sequence: Synthetic oligonucleotide
  Sense strand starting at position 2858 of SEQ ID NO: 916861
aucauaccauuguaaggaa

SEQ ID NO: 1189825 - RNA, 19 nt, Artificial Sequence
  Description of Artificial Sequence: Synthetic oligonucleotide
  Antisense strand to SEQ ID NO: 1189824
uuccuuacaaugguaugau

SEQ ID NO: 1189826 - RNA, 19 nt, Artificial Sequence
  Description of Artificial Sequence: Synthetic oligonucleotide
  Sense strand starting at position 3060 of SEQ ID NO: 916861
gugugugcugccguaacaa

SEQ ID NO: 1189827 - RNA, 19 nt, Artificial Sequence
  Description of Artificial Sequence: Synthetic oligonucleotide
  Antisense strand to SEQ ID NO: 1189826
uuguuacggcagcacacac

SEQ ID NO: 1189828 - RNA, 19 nt, Artificial Sequence
  Description of Artificial Sequence: Synthetic oligonucleotide
  Sense strand starting at position 3839 of SEQ ID NO: 916861
gcaugucuggcauauaaug

SEQ ID NO: 1189829 - RNA, 19 nt, Artificial Sequence
  Description of Artificial Sequence: Synthetic oligonucleotide
  Antisense strand to SEQ ID NO: 1189828
cauuauaugccagacaugc

SEQ ID NO: 1189830 - RNA, 19 nt, Artificial Sequence
  Description of Artificial Sequence: Synthetic oligonucleotide
  Sense strand starting at position 3872 of SEQ ID NO: 916861
guuuguugaauaggugagu

SEQ ID NO: 1189831 - RNA, 19 nt, Artificial Sequence
  Description of Artificial Sequence: Synthetic oligonucleotide
  Antisense strand to SEQ ID NO: 1189830
acucaccuauucaacaaac

SEQ ID NO: 1189832 - RNA, 19 nt, Artificial Sequence
  Description of Artificial Sequence: Synthetic oligonucleotide
  Sense strand starting at position 3878 of SEQ ID NO: 916861
ugaauaggugagugugagu

SEQ ID NO: 1189833 - RNA, 19 nt, Artificial Sequence
  Description of Artificial Sequence: Synthetic oligonucleotide
  Antisense strand to SEQ ID NO: 1189832
acucacacucaccuauuca

SEQ ID NO: 1189834 - RNA, 19 nt, Artificial Sequence
  Description of Artificial Sequence: Synthetic oligonucleotide
  Sense strand starting at position 3884 of SEQ ID NO: 916861
ggugagugugagugaauga

SEQ ID NO: 1189835 - RNA, 19 nt, Artificial Sequence
  Description of Artificial Sequence: Synthetic oligonucleotide
  Antisense strand to SEQ ID NO: 1189834
ucauucacucacacucacc

SEQ ID NO: 1189836 - RNA, 19 nt, Artificial Sequence
  Description of Artificial Sequence: Synthetic oligonucleotide
  Sense strand starting at position 3889 of SEQ ID NO: 916861
gugugagugaaugaaggua

SEQ ID NO: 1189837 - RNA, 19 nt, Artificial Sequence
  Description of Artificial Sequence: Synthetic oligonucleotide
  Antisense strand to SEQ ID NO: 1189836
uaccuucauucacucacac

SEQ ID NO: 1189838 - RNA, 19 nt, Artificial Sequence
  Description of Artificial Sequence: Synthetic oligonucleotide
  Sense strand starting at position 3897 of SEQ ID NO: 916861
gaaugaagguaagaauaaa

SEQ ID NO: 1189839 - RNA, 19 nt, Artificial Sequence
  Description of Artificial Sequence: Synthetic oligonucleotide
  Antisense strand to SEQ ID NO: 1189838
uuuauucuuaccuucauuc

SEQ ID NO: 1189840 - RNA, 19 nt, Artificial Sequence
  Description of Artificial Sequence: Synthetic oligonucleotide
  Sense strand starting at position 3979 of SEQ ID NO: 916861
gauguaaaccaguguuaag

SEQ ID NO: 1189841 - RNA, 19 nt, Artificial Sequence
  Description of Artificial Sequence: Synthetic oligonucleotide
  Antisense strand to SEQ ID NO: 1189840
cuuaacacugguuuacauc

SEQ ID NO: 1189842 - RNA, 19 nt, Artificial Sequence
  Description of Artificial Sequence: Synthetic oligonucleotide
  Sense strand starting at position 42 of SEQ ID NO: 916862
aauggcccuguguguuaua

SEQ ID NO: 1189843 - RNA, 19 nt, Artificial Sequence
  Description of Artificial Sequence: Synthetic oligonucleotide
  Antisense strand to SEQ ID NO: 1189842
uauaacacacagggccauu

SEQ ID NO: 1189844 - RNA, 19 nt, Artificial Sequence
  Description of Artificial Sequence: Synthetic oligonucleotide
  Sense strand starting at position 243 of SEQ ID NO: 916862
uuagcucuuugcccagauu

SEQ ID NO: 1189845 - RNA, 19 nt, Artificial Sequence
  Description of Artificial Sequence: Synthetic oligonucleotide
  Antisense strand to SEQ ID NO: 1189844
aaucugggcaaagagcuaa

SEQ ID NO: 1189846 - RNA, 19 nt, Artificial Sequence
  Description of Artificial Sequence: Synthetic oligonucleotide
  Sense strand starting at position 435 of SEQ ID NO: 916862
gggcaagaacauugccuau

SEQ ID NO: 1189847 - RNA, 19 nt, Artificial Sequence
  Description of Artificial Sequence: Synthetic oligonucleotide
  Antisense strand to SEQ ID NO: 1189846
auaggcaauguucuugccc

SEQ ID NO: 1189848 - RNA, 19 nt, Artificial Sequence
  Description of Artificial Sequence: Synthetic oligonucleotide
  Sense strand starting at position 573 of SEQ ID NO: 916862
ggauguaucuucuauuaau

SEQ ID NO: 1189849 - RNA, 19 nt, Artificial Sequence
  Description of Artificial Sequence: Synthetic oligonucleotide
  Antisense strand to SEQ ID NO: 1189848
auuaauagaagauacaucc

SEQ ID NO: 1189850 - RNA, 19 nt, Artificial Sequence
  Description of Artificial Sequence: Synthetic oligonucleotide
  Sense strand starting at position 711 of SEQ ID NO: 916862
acuuguuuccaagacgugu

SEQ ID NO: 1189851 - RNA, 19 nt, Artificial Sequence
  Description of Artificial Sequence: Synthetic oligonucleotide
  Antisense strand to SEQ ID NO: 1189850
acacgucuuggaaacaagu

SEQ ID NO: 1189852 - RNA, 19 nt, Artificial Sequence
  Description of Artificial Sequence: Synthetic oligonucleotide
  Sense strand starting at position 726 of SEQ ID NO: 916862
gugucauccuuccugagau

SEQ ID NO: 1189853 - RNA, 19 nt, Artificial Sequence
  Description of Artificial Sequence: Synthetic oligonucleotide
  Antisense strand to SEQ ID NO: 1189852
aucucaggaaggaugacac

SEQ ID NO: 1189854 - RNA, 19 nt, Artificial Sequence
  Description of Artificial Sequence: Synthetic oligonucleotide
  Sense strand starting at position 797 of SEQ ID NO: 916862
cccucuuuccaaggcagaa

SEQ ID NO: 1189855 - RNA, 19 nt, Artificial Sequence
  Description of Artificial Sequence: Synthetic oligonucleotide
  Antisense strand to SEQ ID NO: 1189854
uucugccuuggaaagaggg

SEQ ID NO: 1189856 - RNA, 19 nt, Artificial Sequence
  Description of Artificial Sequence: Synthetic oligonucleotide
  Sense strand starting at position 848 of SEQ ID NO: 916862
gugagaauucaaugggcug

SEQ ID NO: 1189857 - RNA, 19 nt, Artificial Sequence
  Description of Artificial Sequence: Synthetic oligonucleotide
  Antisense strand to SEQ ID NO: 1189856
cagcccauugaauucucac

SEQ ID NO: 1189858 - RNA, 19 nt, Artificial Sequence
  Description of Artificial Sequence: Synthetic oligonucleotide
  Sense strand starting at position 1038 of SEQ ID NO: 916862
ggucacaaaguuuguguga

SEQ ID NO: 1189859 - RNA, 19 nt, Artificial Sequence
  Description of Artificial Sequence: Synthetic oligonucleotide
  Antisense strand to SEQ ID NO: 1189858
ucacacaaacuuugugacc

SEQ ID NO: 1189860 - RNA, 19 nt, Artificial Sequence
  Description of Artificial Sequence: Synthetic oligonucleotide
  Sense strand starting at position 2160 of SEQ ID NO: 916862
gcgugaagguccuuccaac

SEQ ID NO: 1189861 - RNA, 19 nt, Artificial Sequence
  Description of Artificial Sequence: Synthetic oligonucleotide
  Antisense strand to SEQ ID NO: 1189860
guuggaaggaccuucacgc

SEQ ID NO: 1189862 - RNA, 19 nt, Artificial Sequence
  Description of Artificial Sequence: Synthetic oligonucleotide
  Sense strand starting at position 2171 of SEQ ID NO: 916862
cuuccaacugcuugcuaga

SEQ ID NO: 1189863 - RNA, 19 nt, Artificial Sequence
  Description of Artificial Sequence: Synthetic oligonucleotide
  Antisense strand to SEQ ID NO: 1189862
ucuagcaagcaguuggaag

SEQ ID NO: 1189864 - RNA, 19 nt, Artificial Sequence
  Description of Artificial Sequence: Synthetic oligonucleotide
  Sense strand starting at position 2173 of SEQ ID NO: 916862
uccaacugcuugcuagaaa

SEQ ID NO: 1189865 - RNA, 19 nt, Artificial Sequence
  Description of Artificial Sequence: Synthetic oligonucleotide
  Antisense strand to SEQ ID NO: 1189864
uuucuagcaagcaguugga

SEQ ID NO: 1189866 - RNA, 19 nt, Artificial Sequence
  Description of Artificial Sequence: Synthetic oligonucleotide
  Sense strand starting at position 2283 of SEQ ID NO: 916862
guuuaaauuccgggcaaac

SEQ ID NO: 1189867 - RNA, 19 nt, Artificial Sequence
  Description of Artificial Sequence: Synthetic oligonucleotide
  Antisense strand to SEQ ID NO: 1189866
guuugcccggaauuuaaac

SEQ ID NO: 1189868 - RNA, 19 nt, Artificial Sequence
  Description of Artificial Sequence: Synthetic oligonucleotide
  Sense strand starting at position 2285 of SEQ ID NO: 916862
uuaaauuccgggcaaacau

SEQ ID NO: 1189869 - RNA, 19 nt, Artificial Sequence
  Description of Artificial Sequence: Synthetic oligonucleotide
  Antisense strand to SEQ ID NO: 1189868
auguuugcccggaauuuaa

SEQ ID NO: 1189870 - RNA, 19 nt, Artificial Sequence
  Description of Artificial Sequence: Synthetic oligonucleotide
  Sense strand starting at position 2296 of SEQ ID NO: 916862
gcaaacauccuucgcgauu

SEQ ID NO: 1189871 - RNA, 19 nt, Artificial Sequence
  Description of Artificial Sequence: Synthetic oligonucleotide
  Antisense strand to SEQ ID NO: 1189870
aaucgcgaaggauguuugc

SEQ ID NO: 1189872 - RNA, 19 nt, Artificial Sequence
  Description of Artificial Sequence: Synthetic oligonucleotide
  Sense strand starting at position 2374 of SEQ ID NO: 916862
ugagcuaauggccagauua

SEQ ID NO: 1189873 - RNA, 19 nt, Artificial Sequence
  Description of Artificial Sequence: Synthetic oligonucleotide
  Antisense strand to SEQ ID NO: 1189872
uaaucuggccauuagcuca

SEQ ID NO: 1189874 - RNA, 19 nt, Artificial Sequence
  Description of Artificial Sequence: Synthetic oligonucleotide
  Sense strand starting at position 2376 of SEQ ID NO: 916862
agcuaauggccagauuaaa

SEQ ID NO: 1189875 - RNA, 19 nt, Artificial Sequence
  Description of Artificial Sequence: Synthetic oligonucleotide
  Antisense strand to SEQ ID NO: 1189874
uuuaaucuggccauuagcu

SEQ ID NO: 1189876 - RNA, 19 nt, Artificial Sequence
  Description of Artificial Sequence: Synthetic oligonucleotide
  Sense strand starting at position 2436 of SEQ ID NO: 916862
acagucucacuaugacuua

SEQ ID NO: 1189877 - RNA, 19 nt, Artificial Sequence
  Description of Artificial Sequence: Synthetic oligonucleotide
  Antisense strand to SEQ ID NO: 1189876
uaagucauagugagacugu

SEQ ID NO: 1189878 - RNA, 19 nt, Artificial Sequence
  Description of Artificial Sequence: Synthetic oligonucleotide
  Sense strand starting at position 2448 of SEQ ID NO: 916862
ugacuuaggucuucuucuu

SEQ ID NO: 1189879 - RNA, 19 nt, Artificial Sequence
  Description of Artificial Sequence: Synthetic oligonucleotide
  Antisense strand to SEQ ID NO: 1189878
aagaagaagaccuaaguca

SEQ ID NO: 1189880 - RNA, 19 nt, Artificial Sequence
  Description of Artificial Sequence: Synthetic oligonucleotide
  Sense strand starting at position 2461 of SEQ ID NO: 916862
cuucuugagucucaaguca

SEQ ID NO: 1189881 - RNA, 19 nt, Artificial Sequence
  Description of Artificial Sequence: Synthetic oligonucleotide
  Antisense strand to SEQ ID NO: 1189880
ugacuugagacucaagaag

SEQ ID NO: 1189882 - RNA, 19 nt, Artificial Sequence
  Description of Artificial Sequence: Synthetic oligonucleotide
  Sense strand starting at position 2468 of SEQ ID NO: 916862
agucucaagucagaagcaa

SEQ ID NO: 1189883 - RNA, 19 nt, Artificial Sequence
  Description of Artificial Sequence: Synthetic oligonucleotide
  Antisense strand to SEQ ID NO: 1189882
uugcuucugacuugagacu

SEQ ID NO: 1189884 - RNA, 19 nt, Artificial Sequence
  Description of Artificial Sequence: Synthetic oligonucleotide
  Sense strand starting at position 2509 of SEQ ID NO: 916862
aaggaugacuguugaagca

SEQ ID NO: 1189885 - RNA, 19 nt, Artificial Sequence
  Description of Artificial Sequence: Synthetic oligonucleotide
  Antisense strand to SEQ ID NO: 1189884
ugcuucaacagucauccuu

SEQ ID NO: 1189886 - RNA, 19 nt, Artificial Sequence
  Description of Artificial Sequence: Synthetic oligonucleotide
  Sense strand starting at position 2611 of SEQ ID NO: 916862
agguuagaauaucaugaau

SEQ ID NO: 1189887 - RNA, 19 nt, Artificial Sequence
  Description of Artificial Sequence: Synthetic oligonucleotide
  Antisense strand to SEQ ID NO: 1189886
auucaugauauucuaaccu

SEQ ID NO: 1189888 - RNA, 19 nt, Artificial Sequence
  Description of Artificial Sequence: Synthetic oligonucleotide
  Sense strand starting at position 3176 of SEQ ID NO: 916862
aagguagucugauacaugu

SEQ ID NO: 1189889 - RNA, 19 nt, Artificial Sequence
  Description of Artificial Sequence: Synthetic oligonucleotide
  Antisense strand to SEQ ID NO: 1189888
acauguaucagacuaccuu

SEQ ID NO: 1189890 - RNA, 19 nt, Artificial Sequence
  Description of Artificial Sequence: Synthetic oligonucleotide
  Sense strand starting at position 3178 of SEQ ID NO: 916862
gguagucugauacauguua

SEQ ID NO: 1189891 - RNA, 19 nt, Artificial Sequence
  Description of Artificial Sequence: Synthetic oligonucleotide
  Antisense strand to SEQ ID NO: 1189890
uaacauguaucagacuacc

SEQ ID NO: 1189892 - RNA, 19 nt, Artificial Sequence
  Description of Artificial Sequence: Synthetic oligonucleotide
  Sense strand starting at position 3225 of SEQ ID NO: 916862
uguguugguccugaaauug

SEQ ID NO: 1189893 - RNA, 19 nt, Artificial Sequence
  Description of Artificial Sequence: Synthetic oligonucleotide
  Antisense strand to SEQ ID NO: 1189892
caauuucaggaccaacaca

SEQ ID NO: 1189894 - RNA, 19 nt, Artificial Sequence
  Description of Artificial Sequence: Synthetic oligonucleotide
  Sense strand starting at position 3271 of SEQ ID NO: 916862
gaagcagaauuguauuucu

SEQ ID NO: 1189895 - RNA, 19 nt, Artificial Sequence
  Description of Artificial Sequence: Synthetic oligonucleotide
  Antisense strand to SEQ ID NO: 1189894
agaaauacaauucugcuuc

SEQ ID NO: 1189896 - RNA, 19 nt, Artificial Sequence
  Description of Artificial Sequence: Synthetic oligonucleotide
  Sense strand starting at position 3554 of SEQ ID NO: 916862
auaccuuucuuauagcagu

SEQ ID NO: 1189897 - RNA, 19 nt, Artificial Sequence
  Description of Artificial Sequence: Synthetic oligonucleotide
  Antisense strand to SEQ ID NO: 1189896
acugcuauaagaaagguau

SEQ ID NO: 1189898 - RNA, 19 nt, Artificial Sequence
  Description of Artificial Sequence: Synthetic oligonucleotide
  Sense strand starting at position 3578 of SEQ ID NO: 916862
ugcugugguuauuuaagua

SEQ ID NO: 1189899 - RNA, 19 nt, Artificial Sequence
  Description of Artificial Sequence: Synthetic oligonucleotide
  Antisense strand to SEQ ID NO: 1189898
uacuuaaauaaccacagca

SEQ ID NO: 1189900 - RNA, 19 nt, Artificial Sequence
  Description of Artificial Sequence: Synthetic oligonucleotide
  Sense strand starting at position 3582 of SEQ ID NO: 916862
gugguuauuuaaguacuuu

SEQ ID NO: 1189901 - RNA, 19 nt, Artificial Sequence
  Description of Artificial Sequence: Synthetic oligonucleotide
  Antisense strand to SEQ ID NO: 1189900
aaaguacuuaaauaaccac

SEQ ID NO: 1189902 - RNA, 19 nt, Artificial Sequence
  Description of Artificial Sequence: Synthetic oligonucleotide
  Sense strand starting at position 3601 of SEQ ID NO: 916862
auauguugacuuuagcuua

SEQ ID NO: 1189903 - RNA, 19 nt, Artificial Sequence
  Description of Artificial Sequence: Synthetic oligonucleotide
  Antisense strand to SEQ ID NO: 1189902
uaagcuaaagucaacauau

SEQ ID NO: 1189904 - RNA, 19 nt, Artificial Sequence
  Description of Artificial Sequence: Synthetic oligonucleotide
  Sense strand starting at position 3604 of SEQ ID NO: 916862
uguugacuuuagcuuacua

SEQ ID NO: 1189905 - RNA, 19 nt, Artificial Sequence
  Description of Artificial Sequence: Synthetic oligonucleotide
  Antisense strand to SEQ ID NO: 1189904
uaguaagcuaaagucaaca

SEQ ID NO: 1189906 - RNA, 19 nt, Artificial Sequence
  Description of Artificial Sequence: Synthetic oligonucleotide
  Sense strand starting at position 3628 of SEQ ID NO: 916862
uuauaaguucuuugaaagc

SEQ ID NO: 1189907 - RNA, 19 nt, Artificial Sequence
  Description of Artificial Sequence: Synthetic oligonucleotide
  Antisense strand to SEQ ID NO: 1189906
gcuuucaaagaacuuauaa

SEQ ID NO: 1189908 - RNA, 19 nt, Artificial Sequence
  Description of Artificial Sequence: Synthetic oligonucleotide
  Sense strand starting at position 3637 of SEQ ID NO: 916862
cuuugaaagcaaugauuau

SEQ ID NO: 1189909 - RNA, 19 nt, Artificial Sequence
  Description of Artificial Sequence: Synthetic oligonucleotide
  Antisense strand to SEQ ID NO: 1189908
auaaucauugcuuucaaag

SEQ ID NO: 1189910 - RNA, 19 nt, Artificial Sequence
  Description of Artificial Sequence: Synthetic oligonucleotide
  Sense strand starting at position 3834 of SEQ ID NO: 916862
gggagcuuaacaggcuuau

SEQ ID NO: 1189911 - RNA, 19 nt, Artificial Sequence
  Description of Artificial Sequence: Synthetic oligonucleotide
  Antisense strand to SEQ ID NO: 1189910
auaagccuguuaagcuccc

SEQ ID NO: 1189912 - RNA, 19 nt, Artificial Sequence
  Description of Artificial Sequence: Synthetic oligonucleotide
  Sense strand starting at position 3844 of SEQ ID NO: 916862
caggcuuaucagggaaaca

SEQ ID NO: 1189913 - RNA, 19 nt, Artificial Sequence
  Description of Artificial Sequence: Synthetic oligonucleotide
  Antisense strand to SEQ ID NO: 1189912
uguuucccugauaagccug

SEQ ID NO: 1189914 - RNA, 19 nt, Artificial Sequence
  Description of Artificial Sequence: Synthetic oligonucleotide
  Sense strand starting at position 3864 of SEQ ID NO: 916862
gguauauguuaaugaguaa

SEQ ID NO: 1189915 - RNA, 19 nt, Artificial Sequence
  Description of Artificial Sequence: Synthetic oligonucleotide
  Antisense strand to SEQ ID NO: 1189914
uuacucauuaacauauacc

SEQ ID NO: 1189916 - RNA, 19 nt, Artificial Sequence
  Description of Artificial Sequence: Synthetic oligonucleotide
  Sense strand starting at position 3949 of SEQ ID NO: 916862
aggacauggauucgagcua

SEQ ID NO: 1189917 - RNA, 19 nt, Artificial Sequence
  Description of Artificial Sequence: Synthetic oligonucleotide
  Antisense strand to SEQ ID NO: 1189916
uagcucgaauccauguccu

SEQ ID NO: 1189918 - RNA, 19 nt, Artificial Sequence
  Description of Artificial Sequence: Synthetic oligonucleotide
  Sense strand starting at position 3950 of SEQ ID NO: 916862
ggacauggauucgagcuaa

SEQ ID NO: 1189919 - RNA, 19 nt, Artificial Sequence
  Description of Artificial Sequence: Synthetic oligonucleotide
  Antisense strand to SEQ ID NO: 1189918
uuagcucgaauccaugucc

SEQ ID NO: 1189920 - RNA, 19 nt, Artificial Sequence
  Description of Artificial Sequence: Synthetic oligonucleotide
  Sense strand starting at position 3954 of SEQ ID NO: 916862
auggauucgagcuaagucu

SEQ ID NO: 1189921 - RNA, 19 nt, Artificial Sequence
  Description of Artificial Sequence: Synthetic oligonucleotide
  Antisense strand to SEQ ID NO: 1189920
agacuuagcucgaauccau

SEQ ID NO: 1189922 - RNA, 19 nt, Artificial Sequence
  Description of Artificial Sequence: Synthetic oligonucleotide
  Sense strand starting at position 133 of SEQ ID NO: 916863
ccgugauagcuccacugca

SEQ ID NO: 1189923 - RNA, 19 nt, Artificial Sequence
  Description of Artificial Sequence: Synthetic oligonucleotide
  Antisense strand to SEQ ID NO: 1189922
ugcaguggagcuaucacgg

SEQ ID NO: 1189924 - RNA, 19 nt, Artificial Sequence
  Description of Artificial Sequence: Synthetic oligonucleotide
  Sense strand starting at position 373 of SEQ ID NO: 916863
cugaacuagugguagaagu

SEQ ID NO: 1189925 - RNA, 19 nt, Artificial Sequence
  Description of Artificial Sequence: Synthetic oligonucleotide
  Antisense strand to SEQ ID NO: 1189924
acuucuaccacuaguucag

SEQ ID NO: 1189926 - RNA, 19 nt, Artificial Sequence
  Description of Artificial Sequence: Synthetic oligonucleotide
  Sense strand starting at position 375 of SEQ ID NO: 916863
gaacuagugguagaaguuu

SEQ ID NO: 1189927 - RNA, 19 nt, Artificial Sequence
  Description of Artificial Sequence: Synthetic oligonucleotide
  Antisense strand to SEQ ID NO: 1189926
aaacuucuaccacuaguuc

SEQ ID NO: 1189928 - RNA, 19 nt, Artificial Sequence
  Description of Artificial Sequence: Synthetic oligonucleotide
  Sense strand starting at position 383 of SEQ ID NO: 916863
gguagaaguuucuaccaua

SEQ ID NO: 1189929 - RNA, 19 nt, Artificial Sequence
  Description of Artificial Sequence: Synthetic oligonucleotide
  Antisense strand to SEQ ID NO: 1189928
uaugguagaaacuucuacc

SEQ ID NO: 1189930 - RNA, 19 nt, Artificial Sequence
  Description of Artificial Sequence: Synthetic oligonucleotide
  Sense strand starting at position 386 of SEQ ID NO: 916863
agaaguuucuaccauagaa

SEQ ID NO: 1189931 - RNA, 19 nt, Artificial Sequence
  Description of Artificial Sequence: Synthetic oligonucleotide
  Antisense strand to SEQ ID NO: 1189930
uucuaugguagaaacuucu

SEQ ID NO: 1189932 - RNA, 19 nt, Artificial Sequence
  Description of Artificial Sequence: Synthetic oligonucleotide
  Sense strand starting at position 553 of SEQ ID NO: 916863
gcggguuuaccaggauucu

SEQ ID NO: 1189933 - RNA, 19 nt, Artificial Sequence
  Description of Artificial Sequence: Synthetic oligonucleotide
  Antisense strand to SEQ ID NO: 1189932
agaauccugguaaacccgc

SEQ ID NO: 1189934 - RNA, 19 nt, Artificial Sequence
  Description of Artificial Sequence: Synthetic oligonucleotide
  Sense strand starting at position 664 of SEQ ID NO: 916863
caacccgaguuucggaaua

SEQ ID NO: 1189935 - RNA, 19 nt, Artificial Sequence
  Description of Artificial Sequence: Synthetic oligonucleotide
  Antisense strand to SEQ ID NO: 1189934
uauuccgaaacucggguug

SEQ ID NO: 1189936 - RNA, 19 nt, Artificial Sequence
  Description of Artificial Sequence: Synthetic oligonucleotide
  Sense strand starting at position 666 of SEQ ID NO: 916863
acccgaguuucggaauauu

SEQ ID NO: 1189937 - RNA, 19 nt, Artificial Sequence
  Description of Artificial Sequence: Synthetic oligonucleotide
  Antisense strand to SEQ ID NO: 1189936
aauauuccgaaacucgggu

SEQ ID NO: 1189938 - RNA, 19 nt, Artificial Sequence
  Description of Artificial Sequence: Synthetic oligonucleotide
  Sense strand starting at position 1122 of SEQ ID NO: 916863
cccgguacauucggaauaa

SEQ ID NO: 1189939 - RNA, 19 nt, Artificial Sequence
  Description of Artificial Sequence: Synthetic oligonucleotide
  Antisense strand to SEQ ID NO: 1189938
uuauuccgaauguaccggg

SEQ ID NO: 1189940 - RNA, 19 nt, Artificial Sequence
  Description of Artificial Sequence: Synthetic oligonucleotide
  Sense strand starting at position 1123 of SEQ ID NO: 916863
ccgguacauucggaauaau

SEQ ID NO: 1189941 - RNA, 19 nt, Artificial Sequence
  Description of Artificial Sequence: Synthetic oligonucleotide
  Antisense strand to SEQ ID NO: 1189940
auuauuccgaauguaccgg

SEQ ID NO: 1189942 - RNA, 19 nt, Artificial Sequence
  Description of Artificial Sequence: Synthetic oligonucleotide
  Sense strand starting at position 1126 of SEQ ID NO: 916863
guacauucggaauaaucau

SEQ ID NO: 1189943 - RNA, 19 nt, Artificial Sequence
  Description of Artificial Sequence: Synthetic oligonucleotide
  Antisense strand to SEQ ID NO: 1189942
augauuauuccgaauguac

SEQ ID NO: 1189944 - RNA, 19 nt, Artificial Sequence
  Description of Artificial Sequence: Synthetic oligonucleotide
  Sense strand starting at position 1135 of SEQ ID NO: 916863
gaauaaucauaguagguuu

SEQ ID NO: 1189945 - RNA, 19 nt, Artificial Sequence
  Description of Artificial Sequence: Synthetic oligonucleotide
  Antisense strand to SEQ ID NO: 1189944
aaaccuacuaugauuauuc

SEQ ID NO: 1189946 - RNA, 19 nt, Artificial Sequence
  Description of Artificial Sequence: Synthetic oligonucleotide
  Sense strand starting at position 1229 of SEQ ID NO: 916863
cgagcucuuguuggaugga

SEQ ID NO: 1189947 - RNA, 19 nt, Artificial Sequence
  Description of Artificial Sequence: Synthetic oligonucleotide
  Antisense strand to SEQ ID NO: 1189946
uccauccaacaagagcucg

SEQ ID NO: 1189948 - RNA, 19 nt, Artificial Sequence
  Description of Artificial Sequence: Synthetic oligonucleotide
  Sense strand starting at position 1985 of SEQ ID NO: 916863
gcgcuuacgagaugaauga

SEQ ID NO: 1189949 - RNA, 19 nt, Artificial Sequence
  Description of Artificial Sequence: Synthetic oligonucleotide
  Antisense strand to SEQ ID NO: 1189948
ucauucaucucguaagcgc

SEQ ID NO: 1189950 - RNA, 19 nt, Artificial Sequence
  Description of Artificial Sequence: Synthetic oligonucleotide
  Sense strand starting at position 2245 of SEQ ID NO: 916863
gagcccugcuugguugaau

SEQ ID NO: 1189951 - RNA, 19 nt, Artificial Sequence
  Description of Artificial Sequence: Synthetic oligonucleotide
  Antisense strand to SEQ ID NO: 1189950
auucaaccaagcagggcuc

SEQ ID NO: 1189952 - RNA, 19 nt, Artificial Sequence
  Description of Artificial Sequence: Synthetic oligonucleotide
  Sense strand starting at position 2246 of SEQ ID NO: 916863
agcccugcuugguugaauu

SEQ ID NO: 1189953 - RNA, 19 nt, Artificial Sequence
  Description of Artificial Sequence: Synthetic oligonucleotide
  Antisense strand to SEQ ID NO: 1189952
aauucaaccaagcagggcu

SEQ ID NO: 1189954 - RNA, 19 nt, Artificial Sequence
  Description of Artificial Sequence: Synthetic oligonucleotide
  Sense strand starting at position 2337 of SEQ ID NO: 916863
gguguucaugacugugacu

SEQ ID NO: 1189955 - RNA, 19 nt, Artificial Sequence
  Description of Artificial Sequence: Synthetic oligonucleotide
  Antisense strand to SEQ ID NO: 1189954
agucacagucaugaacacc

SEQ ID NO: 1189956 - RNA, 19 nt, Artificial Sequence
  Description of Artificial Sequence: Synthetic oligonucleotide
  Sense strand starting at position 2505 of SEQ ID NO: 916863
uggucaguuugcccacaaa

SEQ ID NO: 1189957 - RNA, 19 nt, Artificial Sequence
  Description of Artificial Sequence: Synthetic oligonucleotide
  Antisense strand to SEQ ID NO: 1189956
uuugugggcaaacugacca

SEQ ID NO: 1189958 - RNA, 19 nt, Artificial Sequence
  Description of Artificial Sequence: Synthetic oligonucleotide
  Sense strand starting at position 2562 of SEQ ID NO: 916863
gcagcacucucagaaagga

SEQ ID NO: 1189959 - RNA, 19 nt, Artificial Sequence
  Description of Artificial Sequence: Synthetic oligonucleotide
  Antisense strand to SEQ ID NO: 1189958
uccuuucugagagugcugc

SEQ ID NO: 1189960 - RNA, 19 nt, Artificial Sequence
  Description of Artificial Sequence: Synthetic oligonucleotide
  Sense strand starting at position 2579 of SEQ ID NO: 916863
gauguuaacucugugcucu

SEQ ID NO: 1189961 - RNA, 19 nt, Artificial Sequence
  Description of Artificial Sequence: Synthetic oligonucleotide
  Antisense strand to SEQ ID NO: 1189960
agagcacagaguuaacauc

SEQ ID NO: 1189962 - RNA, 19 nt, Artificial Sequence
  Description of Artificial Sequence: Synthetic oligonucleotide
  Sense strand starting at position 2581 of SEQ ID NO: 916863
uguuaacucugugcucuga

SEQ ID NO: 1189963 - RNA, 19 nt, Artificial Sequence
  Description of Artificial Sequence: Synthetic oligonucleotide
  Antisense strand to SEQ ID NO: 1189962
ucagagcacagaguuaaca

SEQ ID NO: 1189964 - RNA, 19 nt, Artificial Sequence
  Description of Artificial Sequence: Synthetic oligonucleotide
  Sense strand starting at position 2638 of SEQ ID NO: 916863
gggugagguucauaguucu

SEQ ID NO: 1189965 - RNA, 19 nt, Artificial Sequence
  Description of Artificial Sequence: Synthetic oligonucleotide
  Antisense strand to SEQ ID NO: 1189964
agaacuaugaaccucaccc

SEQ ID NO: 1189966 - RNA, 19 nt, Artificial Sequence
  Description of Artificial Sequence: Synthetic oligonucleotide
  Sense strand starting at position 2641 of SEQ ID NO: 916863
ugagguucauaguucugga

SEQ ID NO: 1189967 - RNA, 19 nt, Artificial Sequence
  Description of Artificial Sequence: Synthetic oligonucleotide
  Antisense strand to SEQ ID NO: 1189966
uccagaacuaugaaccuca

SEQ ID NO: 1189968 - RNA, 19 nt, Artificial Sequence
  Description of Artificial Sequence: Synthetic oligonucleotide
  Sense strand starting at position 2685 of SEQ ID NO: 916863
ugcgccuucuaccagagau

SEQ ID NO: 1189969 - RNA, 19 nt, Artificial Sequence
  Description of Artificial Sequence: Synthetic oligonucleotide
  Antisense strand to SEQ ID NO: 1189968
aucucugguagaaggcgca

SEQ ID NO: 1189970 - RNA, 19 nt, Artificial Sequence
  Description of Artificial Sequence: Synthetic oligonucleotide
  Sense strand starting at position 2687 of SEQ ID NO: 916863
cgccuucuaccagagaugu

SEQ ID NO: 1189971 - RNA, 19 nt, Artificial Sequence
  Description of Artificial Sequence: Synthetic oligonucleotide
  Antisense strand to SEQ ID NO: 1189970
acaucucugguagaaggcg

SEQ ID NO: 1189972 - RNA, 19 nt, Artificial Sequence
  Description of Artificial Sequence: Synthetic oligonucleotide
  Sense strand starting at position 2794 of SEQ ID NO: 916863
ggaaauucaugugaugaug

SEQ ID NO: 1189973 - RNA, 19 nt, Artificial Sequence
  Description of Artificial Sequence: Synthetic oligonucleotide
  Antisense strand to SEQ ID NO: 1189972
caucaucacaugaauuucc

SEQ ID NO: 1189974 - RNA, 19 nt, Artificial Sequence
  Description of Artificial Sequence: Synthetic oligonucleotide
  Sense strand starting at position 2834 of SEQ ID NO: 916863
uuugaaauaugcuuugguu

SEQ ID NO: 1189975 - RNA, 19 nt, Artificial Sequence
  Description of Artificial Sequence: Synthetic oligonucleotide
  Antisense strand to SEQ ID NO: 1189974
aaccaaagcauauuucaaa

SEQ ID NO: 1189976 - RNA, 19 nt, Artificial Sequence
  Description of Artificial Sequence: Synthetic oligonucleotide
  Sense strand starting at position 2908 of SEQ ID NO: 916863
uggugcaucaccugagauc

SEQ ID NO: 1189977 - RNA, 19 nt, Artificial Sequence
  Description of Artificial Sequence: Synthetic oligonucleotide
  Antisense strand to SEQ ID NO: 1189976
gaucucaggugaugcacca

SEQ ID NO: 1189978 - RNA, 19 nt, Artificial Sequence
  Description of Artificial Sequence: Synthetic oligonucleotide
  Sense strand starting at position 3238 of SEQ ID NO: 916863
gcuccaguuccuuaauggu

SEQ ID NO: 1189979 - RNA, 19 nt, Artificial Sequence
  Description of Artificial Sequence: Synthetic oligonucleotide
  Antisense strand to SEQ ID NO: 1189978
accauuaaggaacuggagc

SEQ ID NO: 1189980 - RNA, 19 nt, Artificial Sequence
  Description of Artificial Sequence: Synthetic oligonucleotide
  Sense strand starting at position 3391 of SEQ ID NO: 916863
caguaaugcugcccacagu

SEQ ID NO: 1189981 - RNA, 19 nt, Artificial Sequence
  Description of Artificial Sequence: Synthetic oligonucleotide
  Antisense strand to SEQ ID NO: 1189980
acugugggcagcauuacug

SEQ ID NO: 1189982 - RNA, 19 nt, Artificial Sequence
  Description of Artificial Sequence: Synthetic oligonucleotide
  Sense strand starting at position 3657 of SEQ ID NO: 916863
ggcagugaguaucaugaag

SEQ ID NO: 1189983 - RNA, 19 nt, Artificial Sequence
  Description of Artificial Sequence: Synthetic oligonucleotide
  Antisense strand to SEQ ID NO: 1189982
cuucaugauacucacugcc

SEQ ID NO: 1189984 - RNA, 19 nt, Artificial Sequence
  Description of Artificial Sequence: Synthetic oligonucleotide
  Sense strand starting at position 3696 of SEQ ID NO: 916863
ugucacuaacuucgauaua

SEQ ID NO: 1189985 - RNA, 19 nt, Artificial Sequence
  Description of Artificial Sequence: Synthetic oligonucleotide
  Antisense strand to SEQ ID NO: 1189984
uauaucgaaguuagugaca

SEQ ID NO: 1189986 - RNA, 19 nt, Artificial Sequence
  Description of Artificial Sequence: Synthetic oligonucleotide
  Sense strand starting at position 3697 of SEQ ID NO: 916863
gucacuaacuucgauauau

SEQ ID NO: 1189987 - RNA, 19 nt, Artificial Sequence
  Description of Artificial Sequence: Synthetic oligonucleotide
  Antisense strand to SEQ ID NO: 1189986
auauaucgaaguuagugac

SEQ ID NO: 1189988 - RNA, 19 nt, Artificial Sequence
  Description of Artificial Sequence: Synthetic oligonucleotide
  Sense strand starting at position 3754 of SEQ ID NO: 916863
agcaaaugagaagguguau

SEQ ID NO: 1189989 - RNA, 19 nt, Artificial Sequence
  Description of Artificial Sequence: Synthetic oligonucleotide
  Antisense strand to SEQ ID NO: 1189988
auacaccuucucauuugcu

SEQ ID NO: 1189990 - RNA, 19 nt, Artificial Sequence
  Description of Artificial Sequence: Synthetic oligonucleotide
  Sense strand starting at position 3813 of SEQ ID NO: 916863
aagacaaugugaugucaua

SEQ ID NO: 1189991 - RNA, 19 nt, Artificial Sequence
  Description of Artificial Sequence: Synthetic oligonucleotide
  Antisense strand to SEQ ID NO: 1189990
uaugacaucacauugucuu

SEQ ID NO: 1189992 - RNA, 19 nt, Artificial Sequence
  Description of Artificial Sequence: Synthetic oligonucleotide
  Sense strand starting at position 3837 of SEQ ID NO: 916863
gagagugggcuuuggagau

SEQ ID NO: 1189993 - RNA, 19 nt, Artificial Sequence
  Description of Artificial Sequence: Synthetic oligonucleotide
  Antisense strand to SEQ ID NO: 1189992
aucuccaaagcccacucuc

SEQ ID NO: 1189994 - RNA, 19 nt, Artificial Sequence
  Description of Artificial Sequence: Synthetic oligonucleotide
  Sense strand starting at position 3841 of SEQ ID NO: 916863
gugggcuuuggagauacau

SEQ ID NO: 1189995 - RNA, 19 nt, Artificial Sequence
  Description of Artificial Sequence: Synthetic oligonucleotide
  Antisense strand to SEQ ID NO: 1189994
auguaucuccaaagcccac

SEQ ID NO: 1189996 - RNA, 19 nt, Artificial Sequence
  Description of Artificial Sequence: Synthetic oligonucleotide
  Sense strand starting at position 3964 of SEQ ID NO: 916863
agauaacuguaacuugauu

SEQ ID NO: 1189997 - RNA, 19 nt, Artificial Sequence
  Description of Artificial Sequence: Synthetic oligonucleotide
  Antisense strand to SEQ ID NO: 1189996
aaucaaguuacaguuaucu

SEQ ID NO: 1189998 - RNA, 19 nt, Artificial Sequence
  Description of Artificial Sequence: Synthetic oligonucleotide
  Sense strand starting at position 3982 of SEQ ID NO: 916863
uugauaugguaagcaguaa

SEQ ID NO: 1189999 - RNA, 19 nt, Artificial Sequence
  Description of Artificial Sequence: Synthetic oligonucleotide
  Antisense strand to SEQ ID NO: 1189998
uuacugcuuaccauaucaa

SEQ ID NO: 1190000 - RNA, 19 nt, Artificial Sequence
  Description of Artificial Sequence: Synthetic oligonucleotide
  Sense strand starting at position 3983 of SEQ ID NO: 916863
ugauaugguaagcaguaau

SEQ ID NO: 1190001 - RNA, 19 nt, Artificial Sequence
  Description of Artificial Sequence: Synthetic oligonucleotide
  Antisense strand to SEQ ID NO: 1190000
auuacugcuuaccauauca

SEQ ID NO: 1190002 - RNA, 19 nt, Artificial Sequence
  Description of Artificial Sequence: Synthetic oligonucleotide
  Sense strand starting at position 91 of SEQ ID NO: 916864
gacggagcuuguagugagu

SEQ ID NO: 1190003 - RNA, 19 nt, Artificial Sequence
  Description of Artificial Sequence: Synthetic oligonucleotide
  Antisense strand to SEQ ID NO: 1190002
acucacuacaagcuccguc

SEQ ID NO: 1190004 - RNA, 19 nt, Artificial Sequence
  Description of Artificial Sequence: Synthetic oligonucleotide
  Sense strand starting at position 349 of SEQ ID NO: 916864
aauggcccuguguguuaua

SEQ ID NO: 1190005 - RNA, 19 nt, Artificial Sequence
  Description of Artificial Sequence: Synthetic oligonucleotide
  Antisense strand to SEQ ID NO: 1190004
uauaacacacagggccauu

SEQ ID NO: 1190006 - RNA, 19 nt, Artificial Sequence
  Description of Artificial Sequence: Synthetic oligonucleotide
  Sense strand starting at position 550 of SEQ ID NO: 916864
uuagcucuuugcccagauu

SEQ ID NO: 1190007 - RNA, 19 nt, Artificial Sequence
  Description of Artificial Sequence: Synthetic oligonucleotide
  Antisense strand to SEQ ID NO: 1190006
aaucugggcaaagagcuaa

SEQ ID NO: 1190008 - RNA, 19 nt, Artificial Sequence
  Description of Artificial Sequence: Synthetic oligonucleotide
  Sense strand starting at position 742 of SEQ ID NO: 916864
gggcaagaacauugccuau

SEQ ID NO: 1190009 - RNA, 19 nt, Artificial Sequence
  Description of Artificial Sequence: Synthetic oligonucleotide
  Antisense strand to SEQ ID NO: 1190008
auaggcaauguucuugccc

SEQ ID NO: 1190010 - RNA, 19 nt, Artificial Sequence
  Description of Artificial Sequence: Synthetic oligonucleotide
  Sense strand starting at position 880 of SEQ ID NO: 916864
ggauguaucuucuauuaau

SEQ ID NO: 1190011 - RNA, 19 nt, Artificial Sequence
  Description of Artificial Sequence: Synthetic oligonucleotide
  Antisense strand to SEQ ID NO: 1190010
auuaauagaagauacaucc

SEQ ID NO: 1190012 - RNA, 19 nt, Artificial Sequence
  Description of Artificial Sequence: Synthetic oligonucleotide
  Sense strand starting at position 932 of SEQ ID NO: 916864
gagucagugucugauacuc

SEQ ID NO: 1190013 - RNA, 19 nt, Artificial Sequence
  Description of Artificial Sequence: Synthetic oligonucleotide
  Antisense strand to SEQ ID NO: 1190012
gaguaucagacacugacuc

SEQ ID NO: 1190014 - RNA, 19 nt, Artificial Sequence
  Description of Artificial Sequence: Synthetic oligonucleotide
  Sense strand starting at position 934 of SEQ ID NO: 916864
gucagugucugauacucau

SEQ ID NO: 1190015 - RNA, 19 nt, Artificial Sequence
  Description of Artificial Sequence: Synthetic oligonucleotide
  Antisense strand to SEQ ID NO: 1190014
augaguaucagacacugac

SEQ ID NO: 1190016 - RNA, 19 nt, Artificial Sequence
  Description of Artificial Sequence: Synthetic oligonucleotide
  Sense strand starting at position 956 of SEQ ID NO: 916864
guugcaaacucaggauauu

SEQ ID NO: 1190017 - RNA, 19 nt, Artificial Sequence
  Description of Artificial Sequence: Synthetic oligonucleotide
  Antisense strand to SEQ ID NO: 1190016
aauauccugaguuugcaac

SEQ ID NO: 1190018 - RNA, 19 nt, Artificial Sequence
  Description of Artificial Sequence: Synthetic oligonucleotide
  Sense strand starting at position 1018 of SEQ ID NO: 916864
acuuguuuccaagacgugu

SEQ ID NO: 1190019 - RNA, 19 nt, Artificial Sequence
  Description of Artificial Sequence: Synthetic oligonucleotide
  Antisense strand to SEQ ID NO: 1190018
acacgucuuggaaacaagu

SEQ ID NO: 1190020 - RNA, 19 nt, Artificial Sequence
  Description of Artificial Sequence: Synthetic oligonucleotide
  Sense strand starting at position 1033 of SEQ ID NO: 916864
gugucauccuuccugagau

SEQ ID NO: 1190021 - RNA, 19 nt, Artificial Sequence
  Description of Artificial Sequence: Synthetic oligonucleotide
  Antisense strand to SEQ ID NO: 1190020
aucucaggaaggaugacac

SEQ ID NO: 1190022 - RNA, 19 nt, Artificial Sequence
  Description of Artificial Sequence: Synthetic oligonucleotide
  Sense strand starting at position 1034 of SEQ ID NO: 916864
ugucauccuuccugagaug

SEQ ID NO: 1190023 - RNA, 19 nt, Artificial Sequence
  Description of Artificial Sequence: Synthetic oligonucleotide
  Antisense strand to SEQ ID NO: 1190022
caucucaggaaggaugaca

SEQ ID NO: 1190024 - RNA, 19 nt, Artificial Sequence
  Description of Artificial Sequence: Synthetic oligonucleotide
  Sense strand starting at position 1104 of SEQ ID NO: 916864
cccucuuuccaaggcagaa

SEQ ID NO: 1190025 - RNA, 19 nt, Artificial Sequence
  Description of Artificial Sequence: Synthetic oligonucleotide
  Antisense strand to SEQ ID NO: 1190024
uucugccuuggaaagaggg

SEQ ID NO: 1190026 - RNA, 19 nt, Artificial Sequence
  Description of Artificial Sequence: Synthetic oligonucleotide
  Sense strand starting at position 1155 of SEQ ID NO: 916864
gugagaauucaaugggcug

SEQ ID NO: 1190027 - RNA, 19 nt, Artificial Sequence
  Description of Artificial Sequence: Synthetic oligonucleotide
  Antisense strand to SEQ ID NO: 1190026
cagcccauugaauucucac

SEQ ID NO: 1190028 - RNA, 19 nt, Artificial Sequence
  Description of Artificial Sequence: Synthetic oligonucleotide
  Sense strand starting at position 1345 of SEQ ID NO: 916864
ggucacaaaguuuguguga

SEQ ID NO: 1190029 - RNA, 19 nt, Artificial Sequence
  Description of Artificial Sequence: Synthetic oligonucleotide
  Antisense strand to SEQ ID NO: 1190028
ucacacaaacuuugugacc

SEQ ID NO: 1190030 - RNA, 19 nt, Artificial Sequence
  Description of Artificial Sequence: Synthetic oligonucleotide
  Sense strand starting at position 2467 of SEQ ID NO: 916864
gcgugaagguccuuccaac

SEQ ID NO: 1190031 - RNA, 19 nt, Artificial Sequence
  Description of Artificial Sequence: Synthetic oligonucleotide
  Antisense strand to SEQ ID NO: 1190030
guuggaaggaccuucacgc

SEQ ID NO: 1190032 - RNA, 19 nt, Artificial Sequence
  Description of Artificial Sequence: Synthetic oligonucleotide
  Sense strand starting at position 2478 of SEQ ID NO: 916864
cuuccaacugcuugcuaga

SEQ ID NO: 1190033 - RNA, 19 nt, Artificial Sequence
  Description of Artificial Sequence: Synthetic oligonucleotide
  Antisense strand to SEQ ID NO: 1190032
ucuagcaagcaguuggaag

SEQ ID NO: 1190034 - RNA, 19 nt, Artificial Sequence
  Description of Artificial Sequence: Synthetic oligonucleotide
  Sense strand starting at position 2480 of SEQ ID NO: 916864
uccaacugcuugcuagaaa

SEQ ID NO: 1190035 - RNA, 19 nt, Artificial Sequence
  Description of Artificial Sequence: Synthetic oligonucleotide
  Antisense strand to SEQ ID NO: 1190034
uuucuagcaagcaguugga

SEQ ID NO: 1190036 - RNA, 19 nt, Artificial Sequence
  Description of Artificial Sequence: Synthetic oligonucleotide
  Sense strand starting at position 2588 of SEQ ID NO: 916864
auguuuaaauuccgggcaa

SEQ ID NO: 1190037 - RNA, 19 nt, Artificial Sequence
  Description of Artificial Sequence: Synthetic oligonucleotide
  Antisense strand to SEQ ID NO: 1190036
uugcccggaauuuaaacau

SEQ ID NO: 1190038 - RNA, 19 nt, Artificial Sequence
  Description of Artificial Sequence: Synthetic oligonucleotide
  Sense strand starting at position 2590 of SEQ ID NO: 916864
guuuaaauuccgggcaaac

SEQ ID NO: 1190039 - RNA, 19 nt, Artificial Sequence
  Description of Artificial Sequence: Synthetic oligonucleotide
  Antisense strand to SEQ ID NO: 1190038
guuugcccggaauuuaaac

SEQ ID NO: 1190040 - RNA, 19 nt, Artificial Sequence
  Description of Artificial Sequence: Synthetic oligonucleotide
  Sense strand starting at position 2592 of SEQ ID NO: 916864
uuaaauuccgggcaaacau

SEQ ID NO: 1190041 - RNA, 19 nt, Artificial Sequence
  Description of Artificial Sequence: Synthetic oligonucleotide
  Antisense strand to SEQ ID NO: 1190040
auguuugcccggaauuuaa

SEQ ID NO: 1190042 - RNA, 19 nt, Artificial Sequence
  Description of Artificial Sequence: Synthetic oligonucleotide
  Sense strand starting at position 2603 of SEQ ID NO: 916864
gcaaacauccuucgcgauu

SEQ ID NO: 1190043 - RNA, 19 nt, Artificial Sequence
  Description of Artificial Sequence: Synthetic oligonucleotide
  Antisense strand to SEQ ID NO: 1190042
aaucgcgaaggauguuugc

SEQ ID NO: 1190044 - RNA, 19 nt, Artificial Sequence
  Description of Artificial Sequence: Synthetic oligonucleotide
  Sense strand starting at position 2681 of SEQ ID NO: 916864
ugagcuaauggccagauua

SEQ ID NO: 1190045 - RNA, 19 nt, Artificial Sequence
  Description of Artificial Sequence: Synthetic oligonucleotide
  Antisense strand to SEQ ID NO: 1190044
uaaucuggccauuagcuca

SEQ ID NO: 1190046 - RNA, 19 nt, Artificial Sequence
  Description of Artificial Sequence: Synthetic oligonucleotide
  Sense strand starting at position 2683 of SEQ ID NO: 916864
agcuaauggccagauuaaa

SEQ ID NO: 1190047 - RNA, 19 nt, Artificial Sequence
  Description of Artificial Sequence: Synthetic oligonucleotide
  Antisense strand to SEQ ID NO: 1190046
uuuaaucuggccauuagcu

SEQ ID NO: 1190048 - RNA, 19 nt, Artificial Sequence
  Description of Artificial Sequence: Synthetic oligonucleotide
  Sense strand starting at position 2743 of SEQ ID NO: 916864
acagucucacuaugacuua

SEQ ID NO: 1190049 - RNA, 19 nt, Artificial Sequence
  Description of Artificial Sequence: Synthetic oligonucleotide
  Antisense strand to SEQ ID NO: 1190048
uaagucauagugagacugu

SEQ ID NO: 1190050 - RNA, 19 nt, Artificial Sequence
  Description of Artificial Sequence: Synthetic oligonucleotide
  Sense strand starting at position 2755 of SEQ ID NO: 916864
ugacuuaggucuucuucuu

SEQ ID NO: 1190051 - RNA, 19 nt, Artificial Sequence
  Description of Artificial Sequence: Synthetic oligonucleotide
  Antisense strand to SEQ ID NO: 1190050
aagaagaagaccuaaguca

SEQ ID NO: 1190052 - RNA, 19 nt, Artificial Sequence
  Description of Artificial Sequence: Synthetic oligonucleotide
  Sense strand starting at position 2768 of SEQ ID NO: 916864
cuucuugagucucaaguca

SEQ ID NO: 1190053 - RNA, 19 nt, Artificial Sequence
  Description of Artificial Sequence: Synthetic oligonucleotide
  Antisense strand to SEQ ID NO: 1190052
ugacuugagacucaagaag

SEQ ID NO: 1190054 - RNA, 19 nt, Artificial Sequence
  Description of Artificial Sequence: Synthetic oligonucleotide
  Sense strand starting at position 2775 of SEQ ID NO: 916864
agucucaagucagaagcaa

SEQ ID NO: 1190055 - RNA, 19 nt, Artificial Sequence
  Description of Artificial Sequence: Synthetic oligonucleotide
  Antisense strand to SEQ ID NO: 1190054
uugcuucugacuugagacu

SEQ ID NO: 1190056 - RNA, 19 nt, Artificial Sequence
  Description of Artificial Sequence: Synthetic oligonucleotide
  Sense strand starting at position 2816 of SEQ ID NO: 916864
aaggaugacuguugaagca

SEQ ID NO: 1190057 - RNA, 19 nt, Artificial Sequence
  Description of Artificial Sequence: Synthetic oligonucleotide
  Antisense strand to SEQ ID NO: 1190056
ugcuucaacagucauccuu

SEQ ID NO: 1190058 - RNA, 19 nt, Artificial Sequence
  Description of Artificial Sequence: Synthetic oligonucleotide
  Sense strand starting at position 2918 of SEQ ID NO: 916864
agguuagaauaucaugaau

SEQ ID NO: 1190059 - RNA, 19 nt, Artificial Sequence
  Description of Artificial Sequence: Synthetic oligonucleotide
  Antisense strand to SEQ ID NO: 1190058
auucaugauauucuaaccu

SEQ ID NO: 1190060 - RNA, 19 nt, Artificial Sequence
  Description of Artificial Sequence: Synthetic oligonucleotide
  Sense strand starting at position 3483 of SEQ ID NO: 916864
aagguagucugauacaugu

SEQ ID NO: 1190061 - RNA, 19 nt, Artificial Sequence
  Description of Artificial Sequence: Synthetic oligonucleotide
  Antisense strand to SEQ ID NO: 1190060
acauguaucagacuaccuu

SEQ ID NO: 1190062 - RNA, 19 nt, Artificial Sequence
  Description of Artificial Sequence: Synthetic oligonucleotide
  Sense strand starting at position 3485 of SEQ ID NO: 916864
gguagucugauacauguua

SEQ ID NO: 1190063 - RNA, 19 nt, Artificial Sequence
  Description of Artificial Sequence: Synthetic oligonucleotide
  Antisense strand to SEQ ID NO: 1190062
uaacauguaucagacuacc

SEQ ID NO: 1190064 - RNA, 19 nt, Artificial Sequence
  Description of Artificial Sequence: Synthetic oligonucleotide
  Sense strand starting at position 3532 of SEQ ID NO: 916864
uguguugguccugaaauug

SEQ ID NO: 1190065 - RNA, 19 nt, Artificial Sequence
  Description of Artificial Sequence: Synthetic oligonucleotide
  Antisense strand to SEQ ID NO: 1190064
caauuucaggaccaacaca

SEQ ID NO: 1190066 - RNA, 19 nt, Artificial Sequence
  Description of Artificial Sequence: Synthetic oligonucleotide
  Sense strand starting at position 3578 of SEQ ID NO: 916864
gaagcagaauuguauuucu

SEQ ID NO: 1190067 - RNA, 19 nt, Artificial Sequence
  Description of Artificial Sequence: Synthetic oligonucleotide
  Antisense strand to SEQ ID NO: 1190066
agaaauacaauucugcuuc

SEQ ID NO: 1190068 - RNA, 19 nt, Artificial Sequence
  Description of Artificial Sequence: Synthetic oligonucleotide
  Sense strand starting at position 3861 of SEQ ID NO: 916864
auaccuuucuuauagcagu

SEQ ID NO: 1190069 - RNA, 19 nt, Artificial Sequence
  Description of Artificial Sequence: Synthetic oligonucleotide
  Antisense strand to SEQ ID NO: 1190068
acugcuauaagaaagguau

SEQ ID NO: 1190070 - RNA, 19 nt, Artificial Sequence
  Description of Artificial Sequence: Synthetic oligonucleotide
  Sense strand starting at position 3885 of SEQ ID NO: 916864
ugcugugguuauuuaagua

SEQ ID NO: 1190071 - RNA, 19 nt, Artificial Sequence
  Description of Artificial Sequence: Synthetic oligonucleotide
  Antisense strand to SEQ ID NO: 1190070
uacuuaaauaaccacagca

SEQ ID NO: 1190072 - RNA, 19 nt, Artificial Sequence
  Description of Artificial Sequence: Synthetic oligonucleotide
  Sense strand starting at position 3889 of SEQ ID NO: 916864
gugguuauuuaaguacuuu

SEQ ID NO: 1190073 - RNA, 19 nt, Artificial Sequence
  Description of Artificial Sequence: Synthetic oligonucleotide
  Antisense strand to SEQ ID NO: 1190072
aaaguacuuaaauaaccac

SEQ ID NO: 1190074 - RNA, 19 nt, Artificial Sequence
  Description of Artificial Sequence: Synthetic oligonucleotide
  Sense strand starting at position 3908 of SEQ ID NO: 916864
auauguugacuuuagcuua

SEQ ID NO: 1190075 - RNA, 19 nt, Artificial Sequence
  Description of Artificial Sequence: Synthetic oligonucleotide
  Antisense strand to SEQ ID NO: 1190074
uaagcuaaagucaacauau

SEQ ID NO: 1190076 - RNA, 19 nt, Artificial Sequence
  Description of Artificial Sequence: Synthetic oligonucleotide
  Sense strand starting at position 3911 of SEQ ID NO: 916864
uguugacuuuagcuuacua

SEQ ID NO: 1190077 - RNA, 19 nt, Artificial Sequence
  Description of Artificial Sequence: Synthetic oligonucleotide
  Antisense strand to SEQ ID NO: 1190076
uaguaagcuaaagucaaca

SEQ ID NO: 1190078 - RNA, 19 nt, Artificial Sequence
  Description of Artificial Sequence: Synthetic oligonucleotide
  Sense strand starting at position 3935 of SEQ ID NO: 916864
uuauaaguucuuugaaagc

SEQ ID NO: 1190079 - RNA, 19 nt, Artificial Sequence
  Description of Artificial Sequence: Synthetic oligonucleotide
  Antisense strand to SEQ ID NO: 1190078
gcuuucaaagaacuuauaa

SEQ ID NO: 1190080 - RNA, 19 nt, Artificial Sequence
  Description of Artificial Sequence: Synthetic oligonucleotide
  Sense strand starting at position 3944 of SEQ ID NO: 916864
cuuugaaagcaaugauuau

SEQ ID NO: 1190081 - RNA, 19 nt, Artificial Sequence
  Description of Artificial Sequence: Synthetic oligonucleotide
  Antisense strand to SEQ ID NO: 1190080
auaaucauugcuuucaaag

SEQ ID NO: 1190082 - RNA, 19 nt, Artificial Sequence
  Description of Artificial Sequence: Synthetic oligonucleotide
  Sense strand starting at position 73 of SEQ ID NO: 916865
auguuuguugugccguuaa

SEQ ID NO: 1190083 - RNA, 19 nt, Artificial Sequence
  Description of Artificial Sequence: Synthetic oligonucleotide
  Antisense strand to SEQ ID NO: 1190082
uuaacggcacaacaaacau

SEQ ID NO: 1190084 - RNA, 19 nt, Artificial Sequence
  Description of Artificial Sequence: Synthetic oligonucleotide
  Sense strand starting at position 186 of SEQ ID NO: 916865
aggaaacuucugcaggcuu

SEQ ID NO: 1190085 - RNA, 19 nt, Artificial Sequence
  Description of Artificial Sequence: Synthetic oligonucleotide
  Antisense strand to SEQ ID NO: 1190084
aagccugcagaaguuuccu

SEQ ID NO: 1190086 - RNA, 19 nt, Artificial Sequence
  Description of Artificial Sequence: Synthetic oligonucleotide
  Sense strand starting at position 560 of SEQ ID NO: 916865
ugugucaaacucuauucua

SEQ ID NO: 1190087 - RNA, 19 nt, Artificial Sequence
  Description of Artificial Sequence: Synthetic oligonucleotide
  Antisense strand to SEQ ID NO: 1190086
uagaauagaguuugacaca

SEQ ID NO: 1190088 - RNA, 19 nt, Artificial Sequence
  Description of Artificial Sequence: Synthetic oligonucleotide
  Sense strand starting at position 617 of SEQ ID NO: 916865
cuggaugagguaggugaua

SEQ ID NO: 1190089 - RNA, 19 nt, Artificial Sequence
  Description of Artificial Sequence: Synthetic oligonucleotide
  Antisense strand to SEQ ID NO: 1190088
uaucaccuaccucauccag

SEQ ID NO: 1190090 - RNA, 19 nt, Artificial Sequence
  Description of Artificial Sequence: Synthetic oligonucleotide
  Sense strand starting at position 619 of SEQ ID NO: 916865
ggaugagguaggugauauu

SEQ ID NO: 1190091 - RNA, 19 nt, Artificial Sequence
  Description of Artificial Sequence: Synthetic oligonucleotide
  Antisense strand to SEQ ID NO: 1190090
aauaucaccuaccucaucc

SEQ ID NO: 1190092 - RNA, 19 nt, Artificial Sequence
  Description of Artificial Sequence: Synthetic oligonucleotide
  Sense strand starting at position 706 of SEQ ID NO: 916865
uagaaucugguccgaaaua

SEQ ID NO: 1190093 - RNA, 19 nt, Artificial Sequence
  Description of Artificial Sequence: Synthetic oligonucleotide
  Antisense strand to SEQ ID NO: 1190092
uauuucggaccagauucua

SEQ ID NO: 1190094 - RNA, 19 nt, Artificial Sequence
  Description of Artificial Sequence: Synthetic oligonucleotide
  Sense strand starting at position 882 of SEQ ID NO: 916865
gggccugagaccugaagaa

SEQ ID NO: 1190095 - RNA, 19 nt, Artificial Sequence
  Description of Artificial Sequence: Synthetic oligonucleotide
  Antisense strand to SEQ ID NO: 1190094
uucuucaggucucaggccc

SEQ ID NO: 1190096 - RNA, 19 nt, Artificial Sequence
  Description of Artificial Sequence: Synthetic oligonucleotide
  Sense strand starting at position 968 of SEQ ID NO: 916865
gcgagcacuacuguugcaa

SEQ ID NO: 1190097 - RNA, 19 nt, Artificial Sequence
  Description of Artificial Sequence: Synthetic oligonucleotide
  Antisense strand to SEQ ID NO: 1190096
uugcaacaguagugcucgc

SEQ ID NO: 1190098 - RNA, 19 nt, Artificial Sequence
  Description of Artificial Sequence: Synthetic oligonucleotide
  Sense strand starting at position 1151 of SEQ ID NO: 916865
gagauuucgauguggcagu

SEQ ID NO: 1190099 - RNA, 19 nt, Artificial Sequence
  Description of Artificial Sequence: Synthetic oligonucleotide
  Antisense strand to SEQ ID NO: 1190098
acugccacaucgaaaucuc

SEQ ID NO: 1190100 - RNA, 19 nt, Artificial Sequence
  Description of Artificial Sequence: Synthetic oligonucleotide
  Sense strand starting at position 1472 of SEQ ID NO: 916865
ucaggaaguccuuggaggu

SEQ ID NO: 1190101 - RNA, 19 nt, Artificial Sequence
  Description of Artificial Sequence: Synthetic oligonucleotide
  Antisense strand to SEQ ID NO: 1190100
accuccaaggacuuccuga

SEQ ID NO: 1190102 - RNA, 19 nt, Artificial Sequence
  Description of Artificial Sequence: Synthetic oligonucleotide
  Sense strand starting at position 2071 of SEQ ID NO: 916865
auugucacgccuugaauuu

SEQ ID NO: 1190103 - RNA, 19 nt, Artificial Sequence
  Description of Artificial Sequence: Synthetic oligonucleotide
  Antisense strand to SEQ ID NO: 1190102
aaauucaaggcgugacaau

SEQ ID NO: 1190104 - RNA, 19 nt, Artificial Sequence
  Description of Artificial Sequence: Synthetic oligonucleotide
  Sense strand starting at position 2162 of SEQ ID NO: 916865
agguuaaugggugacagua

SEQ ID NO: 1190105 - RNA, 19 nt, Artificial Sequence
  Description of Artificial Sequence: Synthetic oligonucleotide
  Antisense strand to SEQ ID NO: 1190104
uacugucacccauuaaccu

SEQ ID NO: 1190106 - RNA, 19 nt, Artificial Sequence
  Description of Artificial Sequence: Synthetic oligonucleotide
  Sense strand starting at position 2177 of SEQ ID NO: 916865
aguagauuaaugcagguga

SEQ ID NO: 1190107 - RNA, 19 nt, Artificial Sequence
  Description of Artificial Sequence: Synthetic oligonucleotide
  Antisense strand to SEQ ID NO: 1190106
ucaccugcauuaaucuacu

SEQ ID NO: 1190108 - RNA, 19 nt, Artificial Sequence
  Description of Artificial Sequence: Synthetic oligonucleotide
  Sense strand starting at position 2179 of SEQ ID NO: 916865
uagauuaaugcaggugaca

SEQ ID NO: 1190109 - RNA, 19 nt, Artificial Sequence
  Description of Artificial Sequence: Synthetic oligonucleotide
  Antisense strand to SEQ ID NO: 1190108
ugucaccugcauuaaucua

SEQ ID NO: 1190110 - RNA, 19 nt, Artificial Sequence
  Description of Artificial Sequence: Synthetic oligonucleotide
  Sense strand starting at position 2191 of SEQ ID NO: 916865
ggugacaaucuguagugaa

SEQ ID NO: 1190111 - RNA, 19 nt, Artificial Sequence
  Description of Artificial Sequence: Synthetic oligonucleotide
  Antisense strand to SEQ ID NO: 1190110
uucacuacagauugucacc

SEQ ID NO: 1190112 - RNA, 19 nt, Artificial Sequence
  Description of Artificial Sequence: Synthetic oligonucleotide
  Sense strand starting at position 2213 of SEQ ID NO: 916865
agaucacaguccuuagaca

SEQ ID NO: 1190113 - RNA, 19 nt, Artificial Sequence
  Description of Artificial Sequence: Synthetic oligonucleotide
  Antisense strand to SEQ ID NO: 1190112
ugucuaaggacugugaucu

SEQ ID NO: 1190114 - RNA, 19 nt, Artificial Sequence
  Description of Artificial Sequence: Synthetic oligonucleotide
  Sense strand starting at position 2330 of SEQ ID NO: 916865
auaguaguuauuggaagau

SEQ ID NO: 1190115 - RNA, 19 nt, Artificial Sequence
  Description of Artificial Sequence: Synthetic oligonucleotide
  Antisense strand to SEQ ID NO: 1190114
aucuuccaauaacuacuau

SEQ ID NO: 1190116 - RNA, 19 nt, Artificial Sequence
  Description of Artificial Sequence: Synthetic oligonucleotide
  Sense strand starting at position 2433 of SEQ ID NO: 916865
ggugaaccaguguaauucu

SEQ ID NO: 1190117 - RNA, 19 nt, Artificial Sequence
  Description of Artificial Sequence: Synthetic oligonucleotide
  Antisense strand to SEQ ID NO: 1190116
agaauuacacugguucacc

SEQ ID NO: 1190118 - RNA, 19 nt, Artificial Sequence
  Description of Artificial Sequence: Synthetic oligonucleotide
  Sense strand starting at position 2487 of SEQ ID NO: 916865
auuacugucgaaugauuaa

SEQ ID NO: 1190119 - RNA, 19 nt, Artificial Sequence
  Description of Artificial Sequence: Synthetic oligonucleotide
  Antisense strand to SEQ ID NO: 1190118
uuaaucauucgacaguaau

SEQ ID NO: 1190120 - RNA, 19 nt, Artificial Sequence
  Description of Artificial Sequence: Synthetic oligonucleotide
  Sense strand starting at position 2538 of SEQ ID NO: 916865
aucuuuaaucuaggucuga

SEQ ID NO: 1190121 - RNA, 19 nt, Artificial Sequence
  Description of Artificial Sequence: Synthetic oligonucleotide
  Antisense strand to SEQ ID NO: 1190120
ucagaccuagauuaaagau

SEQ ID NO: 1190122 - RNA, 19 nt, Artificial Sequence
  Description of Artificial Sequence: Synthetic oligonucleotide
  Sense strand starting at position 2736 of SEQ ID NO: 916865
auaauaugauucucagguu

SEQ ID NO: 1190123 - RNA, 19 nt, Artificial Sequence
  Description of Artificial Sequence: Synthetic oligonucleotide
  Antisense strand to SEQ ID NO: 1190122
aaccugagaaucauauuau

SEQ ID NO: 1190124 - RNA, 19 nt, Artificial Sequence
  Description of Artificial Sequence: Synthetic oligonucleotide
  Sense strand starting at position 3019 of SEQ ID NO: 916865
aaauaugugguuuggaauu

SEQ ID NO: 1190125 - RNA, 19 nt, Artificial Sequence
  Description of Artificial Sequence: Synthetic oligonucleotide
  Antisense strand to SEQ ID NO: 1190124
aauuccaaaccacauauuu

SEQ ID NO: 1190126 - RNA, 19 nt, Artificial Sequence
  Description of Artificial Sequence: Synthetic oligonucleotide
  Sense strand starting at position 3216 of SEQ ID NO: 916865
cugggaacuucuuuaaagc

SEQ ID NO: 1190127 - RNA, 19 nt, Artificial Sequence
  Description of Artificial Sequence: Synthetic oligonucleotide
  Antisense strand to SEQ ID NO: 1190126
gcuuuaaagaaguucccag

SEQ ID NO: 1190128 - RNA, 19 nt, Artificial Sequence
  Description of Artificial Sequence: Synthetic oligonucleotide
  Sense strand starting at position 3232 of SEQ ID NO: 916865
agccaacagcccuagauau

SEQ ID NO: 1190129 - RNA, 19 nt, Artificial Sequence
  Description of Artificial Sequence: Synthetic oligonucleotide
  Antisense strand to SEQ ID NO: 1190128
auaucuagggcuguuggcu

SEQ ID NO: 1190130 - RNA, 19 nt, Artificial Sequence
  Description of Artificial Sequence: Synthetic oligonucleotide
  Sense strand starting at position 3317 of SEQ ID NO: 916865
gcagcuaaugaucaauaca

SEQ ID NO: 1190131 - RNA, 19 nt, Artificial Sequence
  Description of Artificial Sequence: Synthetic oligonucleotide
  Antisense strand to SEQ ID NO: 1190130
uguauugaucauuagcugc

SEQ ID NO: 1190132 - RNA, 19 nt, Artificial Sequence
  Description of Artificial Sequence: Synthetic oligonucleotide
  Sense strand starting at position 3347 of SEQ ID NO: 916865
auguuagaagcagaauagu

SEQ ID NO: 1190133 - RNA, 19 nt, Artificial Sequence
  Description of Artificial Sequence: Synthetic oligonucleotide
  Antisense strand to SEQ ID NO: 1190132
acuauucugcuucuaacau

SEQ ID NO: 1190134 - RNA, 19 nt, Artificial Sequence
  Description of Artificial Sequence: Synthetic oligonucleotide
  Sense strand starting at position 3361 of SEQ ID NO: 916865
auagucugagguuaaaucu

SEQ ID NO: 1190135 - RNA, 19 nt, Artificial Sequence
  Description of Artificial Sequence: Synthetic oligonucleotide
  Antisense strand to SEQ ID NO: 1190134
agauuuaaccucagacuau

SEQ ID NO: 1190136 - RNA, 19 nt, Artificial Sequence
  Description of Artificial Sequence: Synthetic oligonucleotide
  Sense strand starting at position 3367 of SEQ ID NO: 916865
ugagguuaaaucuguagac

SEQ ID NO: 1190137 - RNA, 19 nt, Artificial Sequence
  Description of Artificial Sequence: Synthetic oligonucleotide
  Antisense strand to SEQ ID NO: 1190136
gucuacagauuuaaccuca

SEQ ID NO: 1190138 - RNA, 19 nt, Artificial Sequence
  Description of Artificial Sequence: Synthetic oligonucleotide
  Sense strand starting at position 3368 of SEQ ID NO: 916865
gagguuaaaucuguagacu

SEQ ID NO: 1190139 - RNA, 19 nt, Artificial Sequence
  Description of Artificial Sequence: Synthetic oligonucleotide
  Antisense strand to SEQ ID NO: 1190138
agucuacagauuuaaccuc

SEQ ID NO: 1190140 - RNA, 19 nt, Artificial Sequence
  Description of Artificial Sequence: Synthetic oligonucleotide
  Sense strand starting at position 3527 of SEQ ID NO: 916865
gugaauagacccugacacu

SEQ ID NO: 1190141 - RNA, 19 nt, Artificial Sequence
  Description of Artificial Sequence: Synthetic oligonucleotide
  Antisense strand to SEQ ID NO: 1190140
agugucagggucuauucac

SEQ ID NO: 1190142 - RNA, 19 nt, Artificial Sequence
  Description of Artificial Sequence: Synthetic oligonucleotide
  Sense strand starting at position 3551 of SEQ ID NO: 916865
auacuagcacuguaugauu

SEQ ID NO: 1190143 - RNA, 19 nt, Artificial Sequence
  Description of Artificial Sequence: Synthetic oligonucleotide
  Antisense strand to SEQ ID NO: 1190142
aaucauacagugcuaguau

SEQ ID NO: 1190144 - RNA, 19 nt, Artificial Sequence
  Description of Artificial Sequence: Synthetic oligonucleotide
  Sense strand starting at position 3587 of SEQ ID NO: 916865
uuuauugagaauugggcua

SEQ ID NO: 1190145 - RNA, 19 nt, Artificial Sequence
  Description of Artificial Sequence: Synthetic oligonucleotide
  Antisense strand to SEQ ID NO: 1190144
uagcccaauucucaauaaa

SEQ ID NO: 1190146 - RNA, 19 nt, Artificial Sequence
  Description of Artificial Sequence: Synthetic oligonucleotide
  Sense strand starting at position 3592 of SEQ ID NO: 916865
ugagaauugggcuacugua

SEQ ID NO: 1190147 - RNA, 19 nt, Artificial Sequence
  Description of Artificial Sequence: Synthetic oligonucleotide
  Antisense strand to SEQ ID NO: 1190146
uacaguagcccaauucuca

SEQ ID NO: 1190148 - RNA, 19 nt, Artificial Sequence
  Description of Artificial Sequence: Synthetic oligonucleotide
  Sense strand starting at position 3697 of SEQ ID NO: 916865
augaacuauguguaaucca

SEQ ID NO: 1190149 - RNA, 19 nt, Artificial Sequence
  Description of Artificial Sequence: Synthetic oligonucleotide
  Antisense strand to SEQ ID NO: 1190148
uggauuacacauaguucau

SEQ ID NO: 1190150 - RNA, 19 nt, Artificial Sequence
  Description of Artificial Sequence: Synthetic oligonucleotide
  Sense strand starting at position 3704 of SEQ ID NO: 916865
auguguaauccauacccua

SEQ ID NO: 1190151 - RNA, 19 nt, Artificial Sequence
  Description of Artificial Sequence: Synthetic oligonucleotide
  Antisense strand to SEQ ID NO: 1190150
uaggguauggauuacacau

SEQ ID NO: 1190152 - RNA, 19 nt, Artificial Sequence
  Description of Artificial Sequence: Synthetic oligonucleotide
  Sense strand starting at position 3780 of SEQ ID NO: 916865
agaauacaugaaugcucua

SEQ ID NO: 1190153 - RNA, 19 nt, Artificial Sequence
  Description of Artificial Sequence: Synthetic oligonucleotide
  Antisense strand to SEQ ID NO: 1190152
uagagcauucauguauucu

SEQ ID NO: 1190154 - RNA, 19 nt, Artificial Sequence
  Description of Artificial Sequence: Synthetic oligonucleotide
  Sense strand starting at position 3793 of SEQ ID NO: 916865
gcucuauuuccugagccuu

SEQ ID NO: 1190155 - RNA, 19 nt, Artificial Sequence
  Description of Artificial Sequence: Synthetic oligonucleotide
  Antisense strand to SEQ ID NO: 1190154
aaggcucaggaaauagagc

SEQ ID NO: 1190156 - RNA, 19 nt, Artificial Sequence
  Description of Artificial Sequence: Synthetic oligonucleotide
  Sense strand starting at position 3810 of SEQ ID NO: 916865
uuugaauauaugggauugu

SEQ ID NO: 1190157 - RNA, 19 nt, Artificial Sequence
  Description of Artificial Sequence: Synthetic oligonucleotide
  Antisense strand to SEQ ID NO: 1190156
acaaucccauauauucaaa

SEQ ID NO: 1190158 - RNA, 19 nt, Artificial Sequence
  Description of Artificial Sequence: Synthetic oligonucleotide
  Sense strand starting at position 3937 of SEQ ID NO: 916865
uuucuuacuggagagcuau

SEQ ID NO: 1190159 - RNA, 19 nt, Artificial Sequence
  Description of Artificial Sequence: Synthetic oligonucleotide
  Antisense strand to SEQ ID NO: 1190158
auagcucuccaguaagaaa

SEQ ID NO: 1190160 - RNA, 19 nt, Artificial Sequence
  Description of Artificial Sequence: Synthetic oligonucleotide
  Sense strand starting at position 3945 of SEQ ID NO: 916865
uggagagcuaucugagaac

SEQ ID NO: 1190161 - RNA, 19 nt, Artificial Sequence
  Description of Artificial Sequence: Synthetic oligonucleotide
  Antisense strand to SEQ ID NO: 1190160
guucucagauagcucucca

SEQ ID NO: 1190162 - RNA, 19 nt, Artificial Sequence
  Description of Artificial Sequence: Synthetic oligonucleotide
  Sense strand starting at position 100 of SEQ ID NO: 916866
agcuguuaaugauaauaac

SEQ ID NO: 1190163 - RNA, 19 nt, Artificial Sequence
  Description of Artificial Sequence: Synthetic oligonucleotide
  Antisense strand to SEQ ID NO: 1190162
guuauuaucauuaacagcu

SEQ ID NO: 1190164 - RNA, 19 nt, Artificial Sequence
  Description of Artificial Sequence: Synthetic oligonucleotide
  Sense strand starting at position 128 of SEQ ID NO: 916866
acaucugagucagcaguau

SEQ ID NO: 1190165 - RNA, 19 nt, Artificial Sequence
  Description of Artificial Sequence: Synthetic oligonucleotide
  Antisense strand to SEQ ID NO: 1190164
auacugcugacucagaugu

SEQ ID NO: 1190166 - RNA, 19 nt, Artificial Sequence
  Description of Artificial Sequence: Synthetic oligonucleotide
  Sense strand starting at position 132 of SEQ ID NO: 916866
cugagucagcaguauguua

SEQ ID NO: 1190167 - RNA, 19 nt, Artificial Sequence
  Description of Artificial Sequence: Synthetic oligonucleotide
  Antisense strand to SEQ ID NO: 1190166
uaacauacugcugacucag

SEQ ID NO: 1190168 - RNA, 19 nt, Artificial Sequence
  Description of Artificial Sequence: Synthetic oligonucleotide
  Sense strand starting at position 134 of SEQ ID NO: 916866
gagucagcaguauguuaaa

SEQ ID NO: 1190169 - RNA, 19 nt, Artificial Sequence
  Description of Artificial Sequence: Synthetic oligonucleotide
  Antisense strand to SEQ ID NO: 1190168
uuuaacauacugcugacuc

SEQ ID NO: 1190170 - RNA, 19 nt, Artificial Sequence
  Description of Artificial Sequence: Synthetic oligonucleotide
  Sense strand starting at position 158 of SEQ ID NO: 916866
gcacucuuucuacguauua

SEQ ID NO: 1190171 - RNA, 19 nt, Artificial Sequence
  Description of Artificial Sequence: Synthetic oligonucleotide
  Antisense strand to SEQ ID NO: 1190170
uaauacguagaaagagugc

SEQ ID NO: 1190172 - RNA, 19 nt, Artificial Sequence
  Description of Artificial Sequence: Synthetic oligonucleotide
  Sense strand starting at position 190 of SEQ ID NO: 916866
uccuaagaaucucugaagu

SEQ ID NO: 1190173 - RNA, 19 nt, Artificial Sequence
  Description of Artificial Sequence: Synthetic oligonucleotide
  Antisense strand to SEQ ID NO: 1190172
acuucagagauucuuagga

SEQ ID NO: 1190174 - RNA, 19 nt, Artificial Sequence
  Description of Artificial Sequence: Synthetic oligonucleotide
  Sense strand starting at position 192 of SEQ ID NO: 916866
cuaagaaucucugaaguua

SEQ ID NO: 1190175 - RNA, 19 nt, Artificial Sequence
  Description of Artificial Sequence: Synthetic oligonucleotide
  Antisense strand to SEQ ID NO: 1190174
uaacuucagagauucuuag

SEQ ID NO: 1190176 - RNA, 19 nt, Artificial Sequence
  Description of Artificial Sequence: Synthetic oligonucleotide
  Sense strand starting at position 201 of SEQ ID NO: 916866
ucugaaguuaggugucacu

SEQ ID NO: 1190177 - RNA, 19 nt, Artificial Sequence
  Description of Artificial Sequence: Synthetic oligonucleotide
  Antisense strand to SEQ ID NO: 1190176
agugacaccuaacuucaga

SEQ ID NO: 1190178 - RNA, 19 nt, Artificial Sequence
  Description of Artificial Sequence: Synthetic oligonucleotide
  Sense strand starting at position 226 of SEQ ID NO: 916866
uccacuuuaugugugagga

SEQ ID NO: 1190179 - RNA, 19 nt, Artificial Sequence
  Description of Artificial Sequence: Synthetic oligonucleotide
  Antisense strand to SEQ ID NO: 1190178
uccucacacauaaagugga

SEQ ID NO: 1190180 - RNA, 19 nt, Artificial Sequence
  Description of Artificial Sequence: Synthetic oligonucleotide
  Sense strand starting at position 227 of SEQ ID NO: 916866
ccacuuuaugugugaggaa

SEQ ID NO: 1190181 - RNA, 19 nt, Artificial Sequence
  Description of Artificial Sequence: Synthetic oligonucleotide
  Antisense strand to SEQ ID NO: 1190180
uuccucacacauaaagugg

SEQ ID NO: 1190182 - RNA, 19 nt, Artificial Sequence
  Description of Artificial Sequence: Synthetic oligonucleotide
  Sense strand starting at position 345 of SEQ ID NO: 916866
ggagcugggucucuaacuu

SEQ ID NO: 1190183 - RNA, 19 nt, Artificial Sequence
  Description of Artificial Sequence: Synthetic oligonucleotide
  Antisense strand to SEQ ID NO: 1190182
aaguuagagacccagcucc

SEQ ID NO: 1190184 - RNA, 19 nt, Artificial Sequence
  Description of Artificial Sequence: Synthetic oligonucleotide
  Sense strand starting at position 401 of SEQ ID NO: 916866
acucuaaguuucccuggaa

SEQ ID NO: 1190185 - RNA, 19 nt, Artificial Sequence
  Description of Artificial Sequence: Synthetic oligonucleotide
  Antisense strand to SEQ ID NO: 1190184
uuccagggaaacuuagagu

SEQ ID NO: 1190186 - RNA, 19 nt, Artificial Sequence
  Description of Artificial Sequence: Synthetic oligonucleotide
  Sense strand starting at position 402 of SEQ ID NO: 916866
cucuaaguuucccuggaag

SEQ ID NO: 1190187 - RNA, 19 nt, Artificial Sequence
  Description of Artificial Sequence: Synthetic oligonucleotide
  Antisense strand to SEQ ID NO: 1190186
cuuccagggaaacuuagag

SEQ ID NO: 1190188 - RNA, 19 nt, Artificial Sequence
  Description of Artificial Sequence: Synthetic oligonucleotide
  Sense strand starting at position 404 of SEQ ID NO: 916866
cuaaguuucccuggaagag

SEQ ID NO: 1190189 - RNA, 19 nt, Artificial Sequence
  Description of Artificial Sequence: Synthetic oligonucleotide
  Antisense strand to SEQ ID NO: 1190188
cucuuccagggaaacuuag

SEQ ID NO: 1190190 - RNA, 19 nt, Artificial Sequence
  Description of Artificial Sequence: Synthetic oligonucleotide
  Sense strand starting at position 515 of SEQ ID NO: 916866
ggccauagcguugcuaauc

SEQ ID NO: 1190191 - RNA, 19 nt, Artificial Sequence
  Description of Artificial Sequence: Synthetic oligonucleotide
  Antisense strand to SEQ ID NO: 1190190
gauuagcaacgcuauggcc

SEQ ID NO: 1190192 - RNA, 19 nt, Artificial Sequence
  Description of Artificial Sequence: Synthetic oligonucleotide
  Sense strand starting at position 563 of SEQ ID NO: 916866
uagggcgguggucagaaau

SEQ ID NO: 1190193 - RNA, 19 nt, Artificial Sequence
  Description of Artificial Sequence: Synthetic oligonucleotide
  Antisense strand to SEQ ID NO: 1190192
auuucugaccaccgcccua

SEQ ID NO: 1190194 - RNA, 19 nt, Artificial Sequence
  Description of Artificial Sequence: Synthetic oligonucleotide
  Sense strand starting at position 576 of SEQ ID NO: 916866
agaaaugagccuuacuguu

SEQ ID NO: 1190195 - RNA, 19 nt, Artificial Sequence
  Description of Artificial Sequence: Synthetic oligonucleotide
  Antisense strand to SEQ ID NO: 1190194
aacaguaaggcucauuucu

SEQ ID NO: 1190196 - RNA, 19 nt, Artificial Sequence
  Description of Artificial Sequence: Synthetic oligonucleotide
  Sense strand starting at position 582 of SEQ ID NO: 916866
gagccuuacuguuuccaga

SEQ ID NO: 1190197 - RNA, 19 nt, Artificial Sequence
  Description of Artificial Sequence: Synthetic oligonucleotide
  Antisense strand to SEQ ID NO: 1190196
ucuggaaacaguaaggcuc

SEQ ID NO: 1190198 - RNA, 19 nt, Artificial Sequence
  Description of Artificial Sequence: Synthetic oligonucleotide
  Sense strand starting at position 725 of SEQ ID NO: 916866
ccaguuugggcccaggauu

SEQ ID NO: 1190199 - RNA, 19 nt, Artificial Sequence
  Description of Artificial Sequence: Synthetic oligonucleotide
  Antisense strand to SEQ ID NO: 1190198
aauccugggcccaaacugg

SEQ ID NO: 1190200 - RNA, 19 nt, Artificial Sequence
  Description of Artificial Sequence: Synthetic oligonucleotide
  Sense strand starting at position 739 of SEQ ID NO: 916866
ggauuuggguuucaucaga

SEQ ID NO: 1190201 - RNA, 19 nt, Artificial Sequence
  Description of Artificial Sequence: Synthetic oligonucleotide
  Antisense strand to SEQ ID NO: 1190200
ucugaugaaacccaaaucc

SEQ ID NO: 1190202 - RNA, 19 nt, Artificial Sequence
  Description of Artificial Sequence: Synthetic oligonucleotide
  Sense strand starting at position 860 of SEQ ID NO: 916866
cguaacuugugguucagaa

SEQ ID NO: 1190203 - RNA, 19 nt, Artificial Sequence
  Description of Artificial Sequence: Synthetic oligonucleotide
  Antisense strand to SEQ ID NO: 1190202
uucugaaccacaaguuacg

SEQ ID NO: 1190204 - RNA, 19 nt, Artificial Sequence
  Description of Artificial Sequence: Synthetic oligonucleotide
  Sense strand starting at position 940 of SEQ ID NO: 916866
cgugguaacucaagaggga

SEQ ID NO: 1190205 - RNA, 19 nt, Artificial Sequence
  Description of Artificial Sequence: Synthetic oligonucleotide
  Antisense strand to SEQ ID NO: 1190204
ucccucuugaguuaccacg

SEQ ID NO: 1190206 - RNA, 19 nt, Artificial Sequence
  Description of Artificial Sequence: Synthetic oligonucleotide
  Sense strand starting at position 988 of SEQ ID NO: 916866
aaguuagacucagggaaga

SEQ ID NO: 1190207 - RNA, 19 nt, Artificial Sequence
  Description of Artificial Sequence: Synthetic oligonucleotide
  Antisense strand to SEQ ID NO: 1190206
ucuucccugagucuaacuu

SEQ ID NO: 1190208 - RNA, 19 nt, Artificial Sequence
  Description of Artificial Sequence: Synthetic oligonucleotide
  Sense strand starting at position 1815 of SEQ ID NO: 916866
ugugaucauuuauugcagu

SEQ ID NO: 1190209 - RNA, 19 nt, Artificial Sequence
  Description of Artificial Sequence: Synthetic oligonucleotide
  Antisense strand to SEQ ID NO: 1190208
acugcaauaaaugaucaca

SEQ ID NO: 1190210 - RNA, 19 nt, Artificial Sequence
  Description of Artificial Sequence: Synthetic oligonucleotide
  Sense strand starting at position 2051 of SEQ ID NO: 916866
gagagucgugggcaucaga

SEQ ID NO: 1190211 - RNA, 19 nt, Artificial Sequence
  Description of Artificial Sequence: Synthetic oligonucleotide
  Antisense strand to SEQ ID NO: 1190210
ucugaugcccacgacucuc

SEQ ID NO: 1190212 - RNA, 19 nt, Artificial Sequence
  Description of Artificial Sequence: Synthetic oligonucleotide
  Sense strand starting at position 2073 of SEQ ID NO: 916866
gcccuuuggccugagguua

SEQ ID NO: 1190213 - RNA, 19 nt, Artificial Sequence
  Description of Artificial Sequence: Synthetic oligonucleotide
  Antisense strand to SEQ ID NO: 1190212
uaaccucaggccaaagggc

SEQ ID NO: 1190214 - RNA, 19 nt, Artificial Sequence
  Description of Artificial Sequence: Synthetic oligonucleotide
  Sense strand starting at position 2267 of SEQ ID NO: 916866
gcaucaggucuccaggaga

SEQ ID NO: 1190215 - RNA, 19 nt, Artificial Sequence
  Description of Artificial Sequence: Synthetic oligonucleotide
  Antisense strand to SEQ ID NO: 1190214
ucuccuggagaccugaugc

SEQ ID NO: 1190216 - RNA, 19 nt, Artificial Sequence
  Description of Artificial Sequence: Synthetic oligonucleotide
  Sense strand starting at position 2379 of SEQ ID NO: 916866
cgcagaaucccaugugacu

SEQ ID NO: 1190217 - RNA, 19 nt, Artificial Sequence
  Description of Artificial Sequence: Synthetic oligonucleotide
  Antisense strand to SEQ ID NO: 1190216
agucacaugggauucugcg

SEQ ID NO: 1190218 - RNA, 19 nt, Artificial Sequence
  Description of Artificial Sequence: Synthetic oligonucleotide
  Sense strand starting at position 2392 of SEQ ID NO: 916866
gugacuuguccagggacuc

SEQ ID NO: 1190219 - RNA, 19 nt, Artificial Sequence
  Description of Artificial Sequence: Synthetic oligonucleotide
  Antisense strand to SEQ ID NO: 1190218
gagucccuggacaagucac

SEQ ID NO: 1190220 - RNA, 19 nt, Artificial Sequence
  Description of Artificial Sequence: Synthetic oligonucleotide
  Sense strand starting at position 2868 of SEQ ID NO: 916866
gcuauaaacugagaaccuu

SEQ ID NO: 1190221 - RNA, 19 nt, Artificial Sequence
  Description of Artificial Sequence: Synthetic oligonucleotide
  Antisense strand to SEQ ID NO: 1190220
aagguucucaguuuauagc

SEQ ID NO: 1190222 - RNA, 19 nt, Artificial Sequence
  Description of Artificial Sequence: Synthetic oligonucleotide
  Sense strand starting at position 2930 of SEQ ID NO: 916866
gaaucacacgcuggaguuu

SEQ ID NO: 1190223 - RNA, 19 nt, Artificial Sequence
  Description of Artificial Sequence: Synthetic oligonucleotide
  Antisense strand to SEQ ID NO: 1190222
aaacuccagcgugugauuc

SEQ ID NO: 1190224 - RNA, 19 nt, Artificial Sequence
  Description of Artificial Sequence: Synthetic oligonucleotide
  Sense strand starting at position 3154 of SEQ ID NO: 916866
gguuucccagucugucaaa

SEQ ID NO: 1190225 - RNA, 19 nt, Artificial Sequence
  Description of Artificial Sequence: Synthetic oligonucleotide
  Antisense strand to SEQ ID NO: 1190224
uuugacagacugggaaacc

SEQ ID NO: 1190226 - RNA, 19 nt, Artificial Sequence
  Description of Artificial Sequence: Synthetic oligonucleotide
  Sense strand starting at position 3163 of SEQ ID NO: 916866
gucugucaaagguagguaa

SEQ ID NO: 1190227 - RNA, 19 nt, Artificial Sequence
  Description of Artificial Sequence: Synthetic oligonucleotide
  Antisense strand to SEQ ID NO: 1190226
uuaccuaccuuugacagac

SEQ ID NO: 1190228 - RNA, 19 nt, Artificial Sequence
  Description of Artificial Sequence: Synthetic oligonucleotide
  Sense strand starting at position 3221 of SEQ ID NO: 916866
agggauaucauaggugcuu

SEQ ID NO: 1190229 - RNA, 19 nt, Artificial Sequence
  Description of Artificial Sequence: Synthetic oligonucleotide
  Antisense strand to SEQ ID NO: 1190228
aagcaccuaugauaucccu

SEQ ID NO: 1190230 - RNA, 19 nt, Artificial Sequence
  Description of Artificial Sequence: Synthetic oligonucleotide
  Sense strand starting at position 3222 of SEQ ID NO: 916866
gggauaucauaggugcuua

SEQ ID NO: 1190231 - RNA, 19 nt, Artificial Sequence
  Description of Artificial Sequence: Synthetic oligonucleotide
  Antisense strand to SEQ ID NO: 1190230
uaagcaccuaugauauccc

SEQ ID NO: 1190232 - RNA, 19 nt, Artificial Sequence
  Description of Artificial Sequence: Synthetic oligonucleotide
  Sense strand starting at position 3223 of SEQ ID NO: 916866
ggauaucauaggugcuuaa

SEQ ID NO: 1190233 - RNA, 19 nt, Artificial Sequence
  Description of Artificial Sequence: Synthetic oligonucleotide
  Antisense strand to SEQ ID NO: 1190232
uuaagcaccuaugauaucc

SEQ ID NO: 1190234 - RNA, 19 nt, Artificial Sequence
  Description of Artificial Sequence: Synthetic oligonucleotide
  Sense strand starting at position 3259 of SEQ ID NO: 916866
uguuguguguccucuggaa

SEQ ID NO: 1190235 - RNA, 19 nt, Artificial Sequence
  Description of Artificial Sequence: Synthetic oligonucleotide
  Antisense strand to SEQ ID NO: 1190234
uuccagaggacacacaaca

SEQ ID NO: 1190236 - RNA, 19 nt, Artificial Sequence
  Description of Artificial Sequence: Synthetic oligonucleotide
  Sense strand starting at position 3671 of SEQ ID NO: 916866
gugagacucucagucugua

SEQ ID NO: 1190237 - RNA, 19 nt, Artificial Sequence
  Description of Artificial Sequence: Synthetic oligonucleotide
  Antisense strand to SEQ ID NO: 1190236
uacagacugagagucucac

SEQ ID NO: 1190238 - RNA, 19 nt, Artificial Sequence
  Description of Artificial Sequence: Synthetic oligonucleotide
  Sense strand starting at position 3675 of SEQ ID NO: 916866
gacucucagucuguaguuu

SEQ ID NO: 1190239 - RNA, 19 nt, Artificial Sequence
  Description of Artificial Sequence: Synthetic oligonucleotide
  Antisense strand to SEQ ID NO: 1190238
aaacuacagacugagaguc

SEQ ID NO: 1190240 - RNA, 19 nt, Artificial Sequence
  Description of Artificial Sequence: Synthetic oligonucleotide
  Sense strand starting at position 3933 of SEQ ID NO: 916866
accacagaguuauugcaga

SEQ ID NO: 1190241 - RNA, 19 nt, Artificial Sequence
  Description of Artificial Sequence: Synthetic oligonucleotide
  Antisense strand to SEQ ID NO: 1190240
ucugcaauaacucuguggu

SEQ ID NO: 1190242 - RNA, 19 nt, Artificial Sequence
  Description of Artificial Sequence: Synthetic oligonucleotide
  Sense strand starting at position 6 of SEQ ID NO: 916867
gggccauagcguugcuaau

SEQ ID NO: 1190243 - RNA, 19 nt, Artificial Sequence
  Description of Artificial Sequence: Synthetic oligonucleotide
  Antisense strand to SEQ ID NO: 1190242
auuagcaacgcuauggccc

SEQ ID NO: 1190244 - RNA, 19 nt, Artificial Sequence
  Description of Artificial Sequence: Synthetic oligonucleotide
  Sense strand starting at position 7 of SEQ ID NO: 916867
ggccauagcguugcuaauc

SEQ ID NO: 1190245 - RNA, 19 nt, Artificial Sequence
  Description of Artificial Sequence: Synthetic oligonucleotide
  Antisense strand to SEQ ID NO: 1190244
gauuagcaacgcuauggcc

SEQ ID NO: 1190246 - RNA, 19 nt, Artificial Sequence
  Description of Artificial Sequence: Synthetic oligonucleotide
  Sense strand starting at position 55 of SEQ ID NO: 916867
uagggcgguggucagaaau

SEQ ID NO: 1190247 - RNA, 19 nt, Artificial Sequence
  Description of Artificial Sequence: Synthetic oligonucleotide
  Antisense strand to SEQ ID NO: 1190246
auuucugaccaccgcccua

SEQ ID NO: 1190248 - RNA, 19 nt, Artificial Sequence
  Description of Artificial Sequence: Synthetic oligonucleotide
  Sense strand starting at position 57 of SEQ ID NO: 916867
gggcgguggucagaaauga

SEQ ID NO: 1190249 - RNA, 19 nt, Artificial Sequence
  Description of Artificial Sequence: Synthetic oligonucleotide
  Antisense strand to SEQ ID NO: 1190248
ucauuucugaccaccgccc

SEQ ID NO: 1190250 - RNA, 19 nt, Artificial Sequence
  Description of Artificial Sequence: Synthetic oligonucleotide
  Sense strand starting at position 68 of SEQ ID NO: 916867
agaaaugagccuuacuguu

SEQ ID NO: 1190251 - RNA, 19 nt, Artificial Sequence
  Description of Artificial Sequence: Synthetic oligonucleotide
  Antisense strand to SEQ ID NO: 1190250
aacaguaaggcucauuucu

SEQ ID NO: 1190252 - RNA, 19 nt, Artificial Sequence
  Description of Artificial Sequence: Synthetic oligonucleotide
  Sense strand starting at position 74 of SEQ ID NO: 916867
gagccuuacuguuuccaga

SEQ ID NO: 1190253 - RNA, 19 nt, Artificial Sequence
  Description of Artificial Sequence: Synthetic oligonucleotide
  Antisense strand to SEQ ID NO: 1190252
ucuggaaacaguaaggcuc

SEQ ID NO: 1190254 - RNA, 19 nt, Artificial Sequence
  Description of Artificial Sequence: Synthetic oligonucleotide
  Sense strand starting at position 217 of SEQ ID NO: 916867
ccaguuugggcccaggauu

SEQ ID NO: 1190255 - RNA, 19 nt, Artificial Sequence
  Description of Artificial Sequence: Synthetic oligonucleotide
  Antisense strand to SEQ ID NO: 1190254
aauccugggcccaaacugg

SEQ ID NO: 1190256 - RNA, 19 nt, Artificial Sequence
  Description of Artificial Sequence: Synthetic oligonucleotide
  Sense strand starting at position 231 of SEQ ID NO: 916867
ggauuuggguuucaucaga

SEQ ID NO: 1190257 - RNA, 19 nt, Artificial Sequence
  Description of Artificial Sequence: Synthetic oligonucleotide
  Antisense strand to SEQ ID NO: 1190256
ucugaugaaacccaaaucc

SEQ ID NO: 1190258 - RNA, 19 nt, Artificial Sequence
  Description of Artificial Sequence: Synthetic oligonucleotide
  Sense strand starting at position 352 of SEQ ID NO: 916867
cguaacuugugguucagaa

SEQ ID NO: 1190259 - RNA, 19 nt, Artificial Sequence
  Description of Artificial Sequence: Synthetic oligonucleotide
  Antisense strand to SEQ ID NO: 1190258
uucugaaccacaaguuacg

SEQ ID NO: 1190260 - RNA, 19 nt, Artificial Sequence
  Description of Artificial Sequence: Synthetic oligonucleotide
  Sense strand starting at position 432 of SEQ ID NO: 916867
cgugguaacucaagaggga

SEQ ID NO: 1190261 - RNA, 19 nt, Artificial Sequence
  Description of Artificial Sequence: Synthetic oligonucleotide
  Antisense strand to SEQ ID NO: 1190260
ucccucuugaguuaccacg

SEQ ID NO: 1190262 - RNA, 19 nt, Artificial Sequence
  Description of Artificial Sequence: Synthetic oligonucleotide
  Sense strand starting at position 480 of SEQ ID NO: 916867
aaguuagacucagggaaga

SEQ ID NO: 1190263 - RNA, 19 nt, Artificial Sequence
  Description of Artificial Sequence: Synthetic oligonucleotide
  Antisense strand to SEQ ID NO: 1190262
ucuucccugagucuaacuu

SEQ ID NO: 1190264 - RNA, 19 nt, Artificial Sequence
  Description of Artificial Sequence: Synthetic oligonucleotide
  Sense strand starting at position 1307 of SEQ ID NO: 916867
ugugaucauuuauugcagu

SEQ ID NO: 1190265 - RNA, 19 nt, Artificial Sequence
  Description of Artificial Sequence: Synthetic oligonucleotide
  Antisense strand to SEQ ID NO: 1190264
acugcaauaaaugaucaca

SEQ ID NO: 1190266 - RNA, 19 nt, Artificial Sequence
  Description of Artificial Sequence: Synthetic oligonucleotide
  Sense strand starting at position 1308 of SEQ ID NO: 916867
gugaucauuuauugcaguu

SEQ ID NO: 1190267 - RNA, 19 nt, Artificial Sequence
  Description of Artificial Sequence: Synthetic oligonucleotide
  Antisense strand to SEQ ID NO: 1190266
aacugcaauaaaugaucac

SEQ ID NO: 1190268 - RNA, 19 nt, Artificial Sequence
  Description of Artificial Sequence: Synthetic oligonucleotide
  Sense strand starting at position 1348 of SEQ ID NO: 916867
cgagguuucuccuguccac

SEQ ID NO: 1190269 - RNA, 19 nt, Artificial Sequence
  Description of Artificial Sequence: Synthetic oligonucleotide
  Antisense strand to SEQ ID NO: 1190268
guggacaggagaaaccucg

SEQ ID NO: 1190270 - RNA, 19 nt, Artificial Sequence
  Description of Artificial Sequence: Synthetic oligonucleotide
  Sense strand starting at position 1539 of SEQ ID NO: 916867
uccugagagucgugggcau

SEQ ID NO: 1190271 - RNA, 19 nt, Artificial Sequence
  Description of Artificial Sequence: Synthetic oligonucleotide
  Antisense strand to SEQ ID NO: 1190270
augcccacgacucucagga

SEQ ID NO: 1190272 - RNA, 19 nt, Artificial Sequence
  Description of Artificial Sequence: Synthetic oligonucleotide
  Sense strand starting at position 1543 of SEQ ID NO: 916867
gagagucgugggcaucaga

SEQ ID NO: 1190273 - RNA, 19 nt, Artificial Sequence
  Description of Artificial Sequence: Synthetic oligonucleotide
  Antisense strand to SEQ ID NO: 1190272
ucugaugcccacgacucuc

SEQ ID NO: 1190274 - RNA, 19 nt, Artificial Sequence
  Description of Artificial Sequence: Synthetic oligonucleotide
  Sense strand starting at position 1565 of SEQ ID NO: 916867
gcccuuuggccugagguua

SEQ ID NO: 1190275 - RNA, 19 nt, Artificial Sequence
  Description of Artificial Sequence: Synthetic oligonucleotide
  Antisense strand to SEQ ID NO: 1190274
uaaccucaggccaaagggc

SEQ ID NO: 1190276 - RNA, 19 nt, Artificial Sequence
  Description of Artificial Sequence: Synthetic oligonucleotide
  Sense strand starting at position 1759 of SEQ ID NO: 916867
gcaucaggucuccaggaga

SEQ ID NO: 1190277 - RNA, 19 nt, Artificial Sequence
  Description of Artificial Sequence: Synthetic oligonucleotide
  Antisense strand to SEQ ID NO: 1190276
ucuccuggagaccugaugc

SEQ ID NO: 1190278 - RNA, 19 nt, Artificial Sequence
  Description of Artificial Sequence: Synthetic oligonucleotide
  Sense strand starting at position 1785 of SEQ ID NO: 916867
ggcagcugcuuaugggaaa

SEQ ID NO: 1190279 - RNA, 19 nt, Artificial Sequence
  Description of Artificial Sequence: Synthetic oligonucleotide
  Antisense strand to SEQ ID NO: 1190278
uuucccauaagcagcugcc

SEQ ID NO: 1190280 - RNA, 19 nt, Artificial Sequence
  Description of Artificial Sequence: Synthetic oligonucleotide
  Sense strand starting at position 1871 of SEQ ID NO: 916867
cgcagaaucccaugugacu

SEQ ID NO: 1190281 - RNA, 19 nt, Artificial Sequence
  Description of Artificial Sequence: Synthetic oligonucleotide
  Antisense strand to SEQ ID NO: 1190280
agucacaugggauucugcg

SEQ ID NO: 1190282 - RNA, 19 nt, Artificial Sequence
  Description of Artificial Sequence: Synthetic oligonucleotide
  Sense strand starting at position 1884 of SEQ ID NO: 916867
gugacuuguccagggacuc

SEQ ID NO: 1190283 - RNA, 19 nt, Artificial Sequence
  Description of Artificial Sequence: Synthetic oligonucleotide
  Antisense strand to SEQ ID NO: 1190282
gagucccuggacaagucac

SEQ ID NO: 1190284 - RNA, 19 nt, Artificial Sequence
  Description of Artificial Sequence: Synthetic oligonucleotide
  Sense strand starting at position 2360 of SEQ ID NO: 916867
gcuauaaacugagaaccuu

SEQ ID NO: 1190285 - RNA, 19 nt, Artificial Sequence
  Description of Artificial Sequence: Synthetic oligonucleotide
  Antisense strand to SEQ ID NO: 1190284
aagguucucaguuuauagc

SEQ ID NO: 1190286 - RNA, 19 nt, Artificial Sequence
  Description of Artificial Sequence: Synthetic oligonucleotide
  Sense strand starting at position 2422 of SEQ ID NO: 916867
gaaucacacgcuggaguuu

SEQ ID NO: 1190287 - RNA, 19 nt, Artificial Sequence
  Description of Artificial Sequence: Synthetic oligonucleotide
  Antisense strand to SEQ ID NO: 1190286
aaacuccagcgugugauuc

SEQ ID NO: 1190288 - RNA, 19 nt, Artificial Sequence
  Description of Artificial Sequence: Synthetic oligonucleotide
  Sense strand starting at position 2646 of SEQ ID NO: 916867
gguuucccagucugucaaa

SEQ ID NO: 1190289 - RNA, 19 nt, Artificial Sequence
  Description of Artificial Sequence: Synthetic oligonucleotide
  Antisense strand to SEQ ID NO: 1190288
uuugacagacugggaaacc

SEQ ID NO: 1190290 - RNA, 19 nt, Artificial Sequence
  Description of Artificial Sequence: Synthetic oligonucleotide
  Sense strand starting at position 2655 of SEQ ID NO: 916867
gucugucaaagguagguaa

SEQ ID NO: 1190291 - RNA, 19 nt, Artificial Sequence
  Description of Artificial Sequence: Synthetic oligonucleotide
  Antisense strand to SEQ ID NO: 1190290
uuaccuaccuuugacagac

SEQ ID NO: 1190292 - RNA, 19 nt, Artificial Sequence
  Description of Artificial Sequence: Synthetic oligonucleotide
  Sense strand starting at position 2713 of SEQ ID NO: 916867
agggauaucauaggugcuu

SEQ ID NO: 1190293 - RNA, 19 nt, Artificial Sequence
  Description of Artificial Sequence: Synthetic oligonucleotide
  Antisense strand to SEQ ID NO: 1190292
aagcaccuaugauaucccu

SEQ ID NO: 1190294 - RNA, 19 nt, Artificial Sequence
  Description of Artificial Sequence: Synthetic oligonucleotide
  Sense strand starting at position 2714 of SEQ ID NO: 916867
gggauaucauaggugcuua

SEQ ID NO: 1190295 - RNA, 19 nt, Artificial Sequence
  Description of Artificial Sequence: Synthetic oligonucleotide
  Antisense strand to SEQ ID NO: 1190294
uaagcaccuaugauauccc

SEQ ID NO: 1190296 - RNA, 19 nt, Artificial Sequence
  Description of Artificial Sequence: Synthetic oligonucleotide
  Sense strand starting at position 2715 of SEQ ID NO: 916867
ggauaucauaggugcuuaa

SEQ ID NO: 1190297 - RNA, 19 nt, Artificial Sequence
  Description of Artificial Sequence: Synthetic oligonucleotide
  Antisense strand to SEQ ID NO: 1190296
uuaagcaccuaugauaucc

SEQ ID NO: 1190298 - RNA, 19 nt, Artificial Sequence
  Description of Artificial Sequence: Synthetic oligonucleotide
  Sense strand starting at position 2751 of SEQ ID NO: 916867
uguuguguguccucuggaa

SEQ ID NO: 1190299 - RNA, 19 nt, Artificial Sequence
  Description of Artificial Sequence: Synthetic oligonucleotide
  Antisense strand to SEQ ID NO: 1190298
uuccagaggacacacaaca

SEQ ID NO: 1190300 - RNA, 19 nt, Artificial Sequence
  Description of Artificial Sequence: Synthetic oligonucleotide
  Sense strand starting at position 3112 of SEQ ID NO: 916867
augugcuuccucuguguau

SEQ ID NO: 1190301 - RNA, 19 nt, Artificial Sequence
  Description of Artificial Sequence: Synthetic oligonucleotide
  Antisense strand to SEQ ID NO: 1190300
auacacagaggaagcacau

SEQ ID NO: 1190302 - RNA, 19 nt, Artificial Sequence
  Description of Artificial Sequence: Synthetic oligonucleotide
  Sense strand starting at position 3113 of SEQ ID NO: 916867
ugugcuuccucuguguauu

SEQ ID NO: 1190303 - RNA, 19 nt, Artificial Sequence
  Description of Artificial Sequence: Synthetic oligonucleotide
  Antisense strand to SEQ ID NO: 1190302
aauacacagaggaagcaca

SEQ ID NO: 1190304 - RNA, 19 nt, Artificial Sequence
  Description of Artificial Sequence: Synthetic oligonucleotide
  Sense strand starting at position 3163 of SEQ ID NO: 916867
gugagacucucagucugua

SEQ ID NO: 1190305 - RNA, 19 nt, Artificial Sequence
  Description of Artificial Sequence: Synthetic oligonucleotide
  Antisense strand to SEQ ID NO: 1190304
uacagacugagagucucac

SEQ ID NO: 1190306 - RNA, 19 nt, Artificial Sequence
  Description of Artificial Sequence: Synthetic oligonucleotide
  Sense strand starting at position 3167 of SEQ ID NO: 916867
gacucucagucuguaguuu

SEQ ID NO: 1190307 - RNA, 19 nt, Artificial Sequence
  Description of Artificial Sequence: Synthetic oligonucleotide
  Antisense strand to SEQ ID NO: 1190306
aaacuacagacugagaguc

SEQ ID NO: 1190308 - RNA, 19 nt, Artificial Sequence
  Description of Artificial Sequence: Synthetic oligonucleotide
  Sense strand starting at position 3425 of SEQ ID NO: 916867
accacagaguuauugcaga

SEQ ID NO: 1190309 - RNA, 19 nt, Artificial Sequence
  Description of Artificial Sequence: Synthetic oligonucleotide
  Antisense strand to SEQ ID NO: 1190308
ucugcaauaacucuguggu

SEQ ID NO: 1190310 - RNA, 19 nt, Artificial Sequence
  Description of Artificial Sequence: Synthetic oligonucleotide
  Sense strand starting at position 3551 of SEQ ID NO: 916867
ggugaauuuccuuguuggu

SEQ ID NO: 1190311 - RNA, 19 nt, Artificial Sequence
  Description of Artificial Sequence: Synthetic oligonucleotide
  Antisense strand to SEQ ID NO: 1190310
accaacaaggaaauucacc

SEQ ID NO: 1190312 - RNA, 19 nt, Artificial Sequence
  Description of Artificial Sequence: Synthetic oligonucleotide
  Sense strand starting at position 3560 of SEQ ID NO: 916867
ccuuguugguucccucaaa

SEQ ID NO: 1190313 - RNA, 19 nt, Artificial Sequence
  Description of Artificial Sequence: Synthetic oligonucleotide
  Antisense strand to SEQ ID NO: 1190312
uuugagggaaccaacaagg

SEQ ID NO: 1190314 - RNA, 19 nt, Artificial Sequence
  Description of Artificial Sequence: Synthetic oligonucleotide
  Sense strand starting at position 3604 of SEQ ID NO: 916867
acaugcuuucugugaggau

SEQ ID NO: 1190315 - RNA, 19 nt, Artificial Sequence
  Description of Artificial Sequence: Synthetic oligonucleotide
  Antisense strand to SEQ ID NO: 1190314
auccucacagaaagcaugu

SEQ ID NO: 1190316 - RNA, 19 nt, Artificial Sequence
  Description of Artificial Sequence: Synthetic oligonucleotide
  Sense strand starting at position 3605 of SEQ ID NO: 916867
caugcuuucugugaggaug

SEQ ID NO: 1190317 - RNA, 19 nt, Artificial Sequence
  Description of Artificial Sequence: Synthetic oligonucleotide
  Antisense strand to SEQ ID NO: 1190316
cauccucacagaaagcaug

SEQ ID NO: 1190318 - RNA, 19 nt, Artificial Sequence
  Description of Artificial Sequence: Synthetic oligonucleotide
  Sense strand starting at position 3607 of SEQ ID NO: 916867
ugcuuucugugaggaugaa

SEQ ID NO: 1190319 - RNA, 19 nt, Artificial Sequence
  Description of Artificial Sequence: Synthetic oligonucleotide
  Antisense strand to SEQ ID NO: 1190318
uucauccucacagaaagca

SEQ ID NO: 1190320 - RNA, 19 nt, Artificial Sequence
  Description of Artificial Sequence: Synthetic oligonucleotide
  Sense strand starting at position 3774 of SEQ ID NO: 916867
gucccaccaucuuaauguu

SEQ ID NO: 1190321 - RNA, 19 nt, Artificial Sequence
  Description of Artificial Sequence: Synthetic oligonucleotide
  Antisense strand to SEQ ID NO: 1190320
aacauuaagauggugggac

SEQ ID NO: 1190322 - RNA, 19 nt, Artificial Sequence
  Description of Artificial Sequence: Synthetic oligonucleotide
  Sense strand starting at position 33 of SEQ ID NO: 916868
ggccuugagucucuguuau

SEQ ID NO: 1190323 - RNA, 19 nt, Artificial Sequence
  Description of Artificial Sequence: Synthetic oligonucleotide
  Antisense strand to SEQ ID NO: 1190322
auaacagagacucaaggcc

SEQ ID NO: 1190324 - RNA, 19 nt, Artificial Sequence
  Description of Artificial Sequence: Synthetic oligonucleotide
  Sense strand starting at position 35 of SEQ ID NO: 916868
ccuugagucucuguuauga

SEQ ID NO: 1190325 - RNA, 19 nt, Artificial Sequence
  Description of Artificial Sequence: Synthetic oligonucleotide
  Antisense strand to SEQ ID NO: 1190324
ucauaacagagacucaagg

SEQ ID NO: 1190326 - RNA, 19 nt, Artificial Sequence
  Description of Artificial Sequence: Synthetic oligonucleotide
  Sense strand starting at position 43 of SEQ ID NO: 916868
cucuguuaugagggagaag

SEQ ID NO: 1190327 - RNA, 19 nt, Artificial Sequence
  Description of Artificial Sequence: Synthetic oligonucleotide
  Antisense strand to SEQ ID NO: 1190326
cuucucccucauaacagag

SEQ ID NO: 1190328 - RNA, 19 nt, Artificial Sequence
  Description of Artificial Sequence: Synthetic oligonucleotide
  Sense strand starting at position 92 of SEQ ID NO: 916868
cuggguucagaguauguga

SEQ ID NO: 1190329 - RNA, 19 nt, Artificial Sequence
  Description of Artificial Sequence: Synthetic oligonucleotide
  Antisense strand to SEQ ID NO: 1190328
ucacauacucugaacccag

SEQ ID NO: 1190330 - RNA, 19 nt, Artificial Sequence
  Description of Artificial Sequence: Synthetic oligonucleotide
  Sense strand starting at position 95 of SEQ ID NO: 916868
gguucagaguaugugauca

SEQ ID NO: 1190331 - RNA, 19 nt, Artificial Sequence
  Description of Artificial Sequence: Synthetic oligonucleotide
  Antisense strand to SEQ ID NO: 1190330
ugaucacauacucugaacc

SEQ ID NO: 1190332 - RNA, 19 nt, Artificial Sequence
  Description of Artificial Sequence: Synthetic oligonucleotide
  Sense strand starting at position 231 of SEQ ID NO: 916868
gaggcacccugagaaauga

SEQ ID NO: 1190333 - RNA, 19 nt, Artificial Sequence
  Description of Artificial Sequence: Synthetic oligonucleotide
  Antisense strand to SEQ ID NO: 1190332
ucauuucucagggugccuc

SEQ ID NO: 1190334 - RNA, 19 nt, Artificial Sequence
  Description of Artificial Sequence: Synthetic oligonucleotide
  Sense strand starting at position 378 of SEQ ID NO: 916868
acaucugagucagcaguau

SEQ ID NO: 1190335 - RNA, 19 nt, Artificial Sequence
  Description of Artificial Sequence: Synthetic oligonucleotide
  Antisense strand to SEQ ID NO: 1190334
auacugcugacucagaugu

SEQ ID NO: 1190336 - RNA, 19 nt, Artificial Sequence
  Description of Artificial Sequence: Synthetic oligonucleotide
  Sense strand starting at position 382 of SEQ ID NO: 916868
cugagucagcaguauguua

SEQ ID NO: 1190337 - RNA, 19 nt, Artificial Sequence
  Description of Artificial Sequence: Synthetic oligonucleotide
  Antisense strand to SEQ ID NO: 1190336
uaacauacugcugacucag

SEQ ID NO: 1190338 - RNA, 19 nt, Artificial Sequence
  Description of Artificial Sequence: Synthetic oligonucleotide
  Sense strand starting at position 384 of SEQ ID NO: 916868
gagucagcaguauguuaaa

SEQ ID NO: 1190339 - RNA, 19 nt, Artificial Sequence
  Description of Artificial Sequence: Synthetic oligonucleotide
  Antisense strand to SEQ ID NO: 1190338
uuuaacauacugcugacuc

SEQ ID NO: 1190340 - RNA, 19 nt, Artificial Sequence
  Description of Artificial Sequence: Synthetic oligonucleotide
  Sense strand starting at position 440 of SEQ ID NO: 916868
uccuaagaaucucugaagu

SEQ ID NO: 1190341 - RNA, 19 nt, Artificial Sequence
  Description of Artificial Sequence: Synthetic oligonucleotide
  Antisense strand to SEQ ID NO: 1190340
acuucagagauucuuagga

SEQ ID NO: 1190342 - RNA, 19 nt, Artificial Sequence
  Description of Artificial Sequence: Synthetic oligonucleotide
  Sense strand starting at position 451 of SEQ ID NO: 916868
ucugaaguuaggugucacu

SEQ ID NO: 1190343 - RNA, 19 nt, Artificial Sequence
  Description of Artificial Sequence: Synthetic oligonucleotide
  Antisense strand to SEQ ID NO: 1190342
agugacaccuaacuucaga

SEQ ID NO: 1190344 - RNA, 19 nt, Artificial Sequence
  Description of Artificial Sequence: Synthetic oligonucleotide
  Sense strand starting at position 476 of SEQ ID NO: 916868
uccacuuuaugugugagga

SEQ ID NO: 1190345 - RNA, 19 nt, Artificial Sequence
  Description of Artificial Sequence: Synthetic oligonucleotide
  Antisense strand to SEQ ID NO: 1190344
uccucacacauaaagugga

SEQ ID NO: 1190346 - RNA, 19 nt, Artificial Sequence
  Description of Artificial Sequence: Synthetic oligonucleotide
  Sense strand starting at position 477 of SEQ ID NO: 916868
ccacuuuaugugugaggaa

SEQ ID NO: 1190347 - RNA, 19 nt, Artificial Sequence
  Description of Artificial Sequence: Synthetic oligonucleotide
  Antisense strand to SEQ ID NO: 1190346
uuccucacacauaaagugg

SEQ ID NO: 1190348 - RNA, 19 nt, Artificial Sequence
  Description of Artificial Sequence: Synthetic oligonucleotide
  Sense strand starting at position 595 of SEQ ID NO: 916868
ggagcugggucucuaacuu

SEQ ID NO: 1190349 - RNA, 19 nt, Artificial Sequence
  Description of Artificial Sequence: Synthetic oligonucleotide
  Antisense strand to SEQ ID NO: 1190348
aaguuagagacccagcucc

SEQ ID NO: 1190350 - RNA, 19 nt, Artificial Sequence
  Description of Artificial Sequence: Synthetic oligonucleotide
  Sense strand starting at position 651 of SEQ ID NO: 916868
acucuaaguuucccuggaa

SEQ ID NO: 1190351 - RNA, 19 nt, Artificial Sequence
  Description of Artificial Sequence: Synthetic oligonucleotide
  Antisense strand to SEQ ID NO: 1190350
uuccagggaaacuuagagu

SEQ ID NO: 1190352 - RNA, 19 nt, Artificial Sequence
  Description of Artificial Sequence: Synthetic oligonucleotide
  Sense strand starting at position 652 of SEQ ID NO: 916868
cucuaaguuucccuggaag

SEQ ID NO: 1190353 - RNA, 19 nt, Artificial Sequence
  Description of Artificial Sequence: Synthetic oligonucleotide
  Antisense strand to SEQ ID NO: 1190352
cuuccagggaaacuuagag

SEQ ID NO: 1190354 - RNA, 19 nt, Artificial Sequence
  Description of Artificial Sequence: Synthetic oligonucleotide
  Sense strand starting at position 654 of SEQ ID NO: 916868
cuaaguuucccuggaagag

SEQ ID NO: 1190355 - RNA, 19 nt, Artificial Sequence
  Description of Artificial Sequence: Synthetic oligonucleotide
  Antisense strand to SEQ ID NO: 1190354
cucuuccagggaaacuuag

SEQ ID NO: 1190356 - RNA, 19 nt, Artificial Sequence
  Description of Artificial Sequence: Synthetic oligonucleotide
  Sense strand starting at position 765 of SEQ ID NO: 916868
ggccauagcguugcuaauc

SEQ ID NO: 1190357 - RNA, 19 nt, Artificial Sequence
  Description of Artificial Sequence: Synthetic oligonucleotide
  Antisense strand to SEQ ID NO: 1190356
gauuagcaacgcuauggcc

SEQ ID NO: 1190358 - RNA, 19 nt, Artificial Sequence
  Description of Artificial Sequence: Synthetic oligonucleotide
  Sense strand starting at position 813 of SEQ ID NO: 916868
uagggcgguggucagaaau

SEQ ID NO: 1190359 - RNA, 19 nt, Artificial Sequence
  Description of Artificial Sequence: Synthetic oligonucleotide
  Antisense strand to SEQ ID NO: 1190358
auuucugaccaccgcccua

SEQ ID NO: 1190360 - RNA, 19 nt, Artificial Sequence
  Description of Artificial Sequence: Synthetic oligonucleotide
  Sense strand starting at position 826 of SEQ ID NO: 916868
agaaaugagccuuacuguu

SEQ ID NO: 1190361 - RNA, 19 nt, Artificial Sequence
  Description of Artificial Sequence: Synthetic oligonucleotide
  Antisense strand to SEQ ID NO: 1190360
aacaguaaggcucauuucu

SEQ ID NO: 1190362 - RNA, 19 nt, Artificial Sequence
  Description of Artificial Sequence: Synthetic oligonucleotide
  Sense strand starting at position 832 of SEQ ID NO: 916868
gagccuuacuguuuccaga

SEQ ID NO: 1190363 - RNA, 19 nt, Artificial Sequence
  Description of Artificial Sequence: Synthetic oligonucleotide
  Antisense strand to SEQ ID NO: 1190362
ucuggaaacaguaaggcuc

SEQ ID NO: 1190364 - RNA, 19 nt, Artificial Sequence
  Description of Artificial Sequence: Synthetic oligonucleotide
  Sense strand starting at position 975 of SEQ ID NO: 916868
ccaguuugggcccaggauu

SEQ ID NO: 1190365 - RNA, 19 nt, Artificial Sequence
  Description of Artificial Sequence: Synthetic oligonucleotide
  Antisense strand to SEQ ID NO: 1190364
aauccugggcccaaacugg

SEQ ID NO: 1190366 - RNA, 19 nt, Artificial Sequence
  Description of Artificial Sequence: Synthetic oligonucleotide
  Sense strand starting at position 989 of SEQ ID NO: 916868
ggauuuggguuucaucaga

SEQ ID NO: 1190367 - RNA, 19 nt, Artificial Sequence
  Description of Artificial Sequence: Synthetic oligonucleotide
  Antisense strand to SEQ ID NO: 1190366
ucugaugaaacccaaaucc

SEQ ID NO: 1190368 - RNA, 19 nt, Artificial Sequence
  Description of Artificial Sequence: Synthetic oligonucleotide
  Sense strand starting at position 1110 of SEQ ID NO: 916868
cguaacuugugguucagaa

SEQ ID NO: 1190369 - RNA, 19 nt, Artificial Sequence
  Description of Artificial Sequence: Synthetic oligonucleotide
  Antisense strand to SEQ ID NO: 1190368
uucugaaccacaaguuacg

SEQ ID NO: 1190370 - RNA, 19 nt, Artificial Sequence
  Description of Artificial Sequence: Synthetic oligonucleotide
  Sense strand starting at position 1190 of SEQ ID NO: 916868
cgugguaacucaagaggga

SEQ ID NO: 1190371 - RNA, 19 nt, Artificial Sequence
  Description of Artificial Sequence: Synthetic oligonucleotide
  Antisense strand to SEQ ID NO: 1190370
ucccucuugaguuaccacg

SEQ ID NO: 1190372 - RNA, 19 nt, Artificial Sequence
  Description of Artificial Sequence: Synthetic oligonucleotide
  Sense strand starting at position 1238 of SEQ ID NO: 916868
aaguuagacucagggaaga

SEQ ID NO: 1190373 - RNA, 19 nt, Artificial Sequence
  Description of Artificial Sequence: Synthetic oligonucleotide
  Antisense strand to SEQ ID NO: 1190372
ucuucccugagucuaacuu

SEQ ID NO: 1190374 - RNA, 19 nt, Artificial Sequence
  Description of Artificial Sequence: Synthetic oligonucleotide
  Sense strand starting at position 2065 of SEQ ID NO: 916868
ugugaucauuuauugcagu

SEQ ID NO: 1190375 - RNA, 19 nt, Artificial Sequence
  Description of Artificial Sequence: Synthetic oligonucleotide
  Antisense strand to SEQ ID NO: 1190374
acugcaauaaaugaucaca

SEQ ID NO: 1190376 - RNA, 19 nt, Artificial Sequence
  Description of Artificial Sequence: Synthetic oligonucleotide
  Sense strand starting at position 2301 of SEQ ID NO: 916868
gagagucgugggcaucaga

SEQ ID NO: 1190377 - RNA, 19 nt, Artificial Sequence
  Description of Artificial Sequence: Synthetic oligonucleotide
  Antisense strand to SEQ ID NO: 1190376
ucugaugcccacgacucuc

SEQ ID NO: 1190378 - RNA, 19 nt, Artificial Sequence
  Description of Artificial Sequence: Synthetic oligonucleotide
  Sense strand starting at position 2323 of SEQ ID NO: 916868
gcccuuuggccugagguua

SEQ ID NO: 1190379 - RNA, 19 nt, Artificial Sequence
  Description of Artificial Sequence: Synthetic oligonucleotide
  Antisense strand to SEQ ID NO: 1190378
uaaccucaggccaaagggc

SEQ ID NO: 1190380 - RNA, 19 nt, Artificial Sequence
  Description of Artificial Sequence: Synthetic oligonucleotide
  Sense strand starting at position 2517 of SEQ ID NO: 916868
gcaucaggucuccaggaga

SEQ ID NO: 1190381 - RNA, 19 nt, Artificial Sequence
  Description of Artificial Sequence: Synthetic oligonucleotide
  Antisense strand to SEQ ID NO: 1190380
ucuccuggagaccugaugc

SEQ ID NO: 1190382 - RNA, 19 nt, Artificial Sequence
  Description of Artificial Sequence: Synthetic oligonucleotide
  Sense strand starting at position 2629 of SEQ ID NO: 916868
cgcagaaucccaugugacu

SEQ ID NO: 1190383 - RNA, 19 nt, Artificial Sequence
  Description of Artificial Sequence: Synthetic oligonucleotide
  Antisense strand to SEQ ID NO: 1190382
agucacaugggauucugcg

SEQ ID NO: 1190384 - RNA, 19 nt, Artificial Sequence
  Description of Artificial Sequence: Synthetic oligonucleotide
  Sense strand starting at position 2642 of SEQ ID NO: 916868
gugacuuguccagggacuc

SEQ ID NO: 1190385 - RNA, 19 nt, Artificial Sequence
  Description of Artificial Sequence: Synthetic oligonucleotide
  Antisense strand to SEQ ID NO: 1190384
gagucccuggacaagucac

SEQ ID NO: 1190386 - RNA, 19 nt, Artificial Sequence
  Description of Artificial Sequence: Synthetic oligonucleotide
  Sense strand starting at position 3180 of SEQ ID NO: 916868
gaaucacacgcuggaguuu

SEQ ID NO: 1190387 - RNA, 19 nt, Artificial Sequence
  Description of Artificial Sequence: Synthetic oligonucleotide
  Antisense strand to SEQ ID NO: 1190386
aaacuccagcgugugauuc

SEQ ID NO: 1190388 - RNA, 19 nt, Artificial Sequence
  Description of Artificial Sequence: Synthetic oligonucleotide
  Sense strand starting at position 3404 of SEQ ID NO: 916868
gguuucccagucugucaaa

SEQ ID NO: 1190389 - RNA, 19 nt, Artificial Sequence
  Description of Artificial Sequence: Synthetic oligonucleotide
  Antisense strand to SEQ ID NO: 1190388
uuugacagacugggaaacc

SEQ ID NO: 1190390 - RNA, 19 nt, Artificial Sequence
  Description of Artificial Sequence: Synthetic oligonucleotide
  Sense strand starting at position 3413 of SEQ ID NO: 916868
gucugucaaagguagguaa

SEQ ID NO: 1190391 - RNA, 19 nt, Artificial Sequence
  Description of Artificial Sequence: Synthetic oligonucleotide
  Antisense strand to SEQ ID NO: 1190390
uuaccuaccuuugacagac

SEQ ID NO: 1190392 - RNA, 19 nt, Artificial Sequence
  Description of Artificial Sequence: Synthetic oligonucleotide
  Sense strand starting at position 3471 of SEQ ID NO: 916868
agggauaucauaggugcuu

SEQ ID NO: 1190393 - RNA, 19 nt, Artificial Sequence
  Description of Artificial Sequence: Synthetic oligonucleotide
  Antisense strand to SEQ ID NO: 1190392
aagcaccuaugauaucccu

SEQ ID NO: 1190394 - RNA, 19 nt, Artificial Sequence
  Description of Artificial Sequence: Synthetic oligonucleotide
  Sense strand starting at position 3472 of SEQ ID NO: 916868
gggauaucauaggugcuua

SEQ ID NO: 1190395 - RNA, 19 nt, Artificial Sequence
  Description of Artificial Sequence: Synthetic oligonucleotide
  Antisense strand to SEQ ID NO: 1190394
uaagcaccuaugauauccc

SEQ ID NO: 1190396 - RNA, 19 nt, Artificial Sequence
  Description of Artificial Sequence: Synthetic oligonucleotide
  Sense strand starting at position 3473 of SEQ ID NO: 916868
ggauaucauaggugcuuaa

SEQ ID NO: 1190397 - RNA, 19 nt, Artificial Sequence
  Description of Artificial Sequence: Synthetic oligonucleotide
  Antisense strand to SEQ ID NO: 1190396
uuaagcaccuaugauaucc

SEQ ID NO: 1190398 - RNA, 19 nt, Artificial Sequence
  Description of Artificial Sequence: Synthetic oligonucleotide
  Sense strand starting at position 3921 of SEQ ID NO: 916868
gugagacucucagucugua

SEQ ID NO: 1190399 - RNA, 19 nt, Artificial Sequence
  Description of Artificial Sequence: Synthetic oligonucleotide
  Antisense strand to SEQ ID NO: 1190398
uacagacugagagucucac

SEQ ID NO: 1190400 - RNA, 19 nt, Artificial Sequence
  Description of Artificial Sequence: Synthetic oligonucleotide
  Sense strand starting at position 3925 of SEQ ID NO: 916868
gacucucagucuguaguuu

SEQ ID NO: 1190401 - RNA, 19 nt, Artificial Sequence
  Description of Artificial Sequence: Synthetic oligonucleotide
  Antisense strand to SEQ ID NO: 1190400
aaacuacagacugagaguc

SEQ ID NO: 1190402 - RNA, 19 nt, Artificial Sequence
  Description of Artificial Sequence: Synthetic oligonucleotide
  Sense strand starting at position 93 of SEQ ID NO: 916869
caggaauugugaguaagau

SEQ ID NO: 1190403 - RNA, 19 nt, Artificial Sequence
  Description of Artificial Sequence: Synthetic oligonucleotide
  Antisense strand to SEQ ID NO: 1190402
aucuuacucacaauuccug

SEQ ID NO: 1190404 - RNA, 19 nt, Artificial Sequence
  Description of Artificial Sequence: Synthetic oligonucleotide
  Sense strand starting at position 105 of SEQ ID NO: 916869
guaagaugagguggucuaa

SEQ ID NO: 1190405 - RNA, 19 nt, Artificial Sequence
  Description of Artificial Sequence: Synthetic oligonucleotide
  Antisense strand to SEQ ID NO: 1190404
uuagaccaccucaucuuac

SEQ ID NO: 1190406 - RNA, 19 nt, Artificial Sequence
  Description of Artificial Sequence: Synthetic oligonucleotide
  Sense strand starting at position 201 of SEQ ID NO: 916869
aaauuaggagucugugaca

SEQ ID NO: 1190407 - RNA, 19 nt, Artificial Sequence
  Description of Artificial Sequence: Synthetic oligonucleotide
  Antisense strand to SEQ ID NO: 1190406
ugucacagacuccuaauuu

SEQ ID NO: 1190408 - RNA, 19 nt, Artificial Sequence
  Description of Artificial Sequence: Synthetic oligonucleotide
  Sense strand starting at position 268 of SEQ ID NO: 916869
ucagaaauggcccauucca

SEQ ID NO: 1190409 - RNA, 19 nt, Artificial Sequence
  Description of Artificial Sequence: Synthetic oligonucleotide
  Antisense strand to SEQ ID NO: 1190408
uggaaugggccauuucuga

SEQ ID NO: 1190410 - RNA, 19 nt, Artificial Sequence
  Description of Artificial Sequence: Synthetic oligonucleotide
  Sense strand starting at position 290 of SEQ ID NO: 916869
cacuguugggauugaggau

SEQ ID NO: 1190411 - RNA, 19 nt, Artificial Sequence
  Description of Artificial Sequence: Synthetic oligonucleotide
  Antisense strand to SEQ ID NO: 1190410
auccucaaucccaacagug

SEQ ID NO: 1190412 - RNA, 19 nt, Artificial Sequence
  Description of Artificial Sequence: Synthetic oligonucleotide
  Sense strand starting at position 320 of SEQ ID NO: 916869
gcccacauuuaguuagcaa

SEQ ID NO: 1190413 - RNA, 19 nt, Artificial Sequence
  Description of Artificial Sequence: Synthetic oligonucleotide
  Antisense strand to SEQ ID NO: 1190412
uugcuaacuaaaugugggc

SEQ ID NO: 1190414 - RNA, 19 nt, Artificial Sequence
  Description of Artificial Sequence: Synthetic oligonucleotide
  Sense strand starting at position 692 of SEQ ID NO: 916869
agaacuuucucagcaguaa

SEQ ID NO: 1190415 - RNA, 19 nt, Artificial Sequence
  Description of Artificial Sequence: Synthetic oligonucleotide
  Antisense strand to SEQ ID NO: 1190414
uuacugcugagaaaguucu

SEQ ID NO: 1190416 - RNA, 19 nt, Artificial Sequence
  Description of Artificial Sequence: Synthetic oligonucleotide
  Sense strand starting at position 754 of SEQ ID NO: 916869
uuagaaagucagugaacag

SEQ ID NO: 1190417 - RNA, 19 nt, Artificial Sequence
  Description of Artificial Sequence: Synthetic oligonucleotide
  Antisense strand to SEQ ID NO: 1190416
cuguucacugacuuucuaa

SEQ ID NO: 1190418 - RNA, 19 nt, Artificial Sequence
  Description of Artificial Sequence: Synthetic oligonucleotide
  Sense strand starting at position 1089 of SEQ ID NO: 916869
ggcaucuauguuuaucuga

SEQ ID NO: 1190419 - RNA, 19 nt, Artificial Sequence
  Description of Artificial Sequence: Synthetic oligonucleotide
  Antisense strand to SEQ ID NO: 1190418
ucagauaaacauagaugcc

SEQ ID NO: 1190420 - RNA, 19 nt, Artificial Sequence
  Description of Artificial Sequence: Synthetic oligonucleotide
  Sense strand starting at position 1241 of SEQ ID NO: 916869
gaucucucccagugaugga

SEQ ID NO: 1190421 - RNA, 19 nt, Artificial Sequence
  Description of Artificial Sequence: Synthetic oligonucleotide
  Antisense strand to SEQ ID NO: 1190420
uccaucacugggagagauc

SEQ ID NO: 1190422 - RNA, 19 nt, Artificial Sequence
  Description of Artificial Sequence: Synthetic oligonucleotide
  Sense strand starting at position 1452 of SEQ ID NO: 916869
gaaugacucugagccuuag

SEQ ID NO: 1190423 - RNA, 19 nt, Artificial Sequence
  Description of Artificial Sequence: Synthetic oligonucleotide
  Antisense strand to SEQ ID NO: 1190422
cuaaggcucagagucauuc

SEQ ID NO: 1190424 - RNA, 19 nt, Artificial Sequence
  Description of Artificial Sequence: Synthetic oligonucleotide
  Sense strand starting at position 1503 of SEQ ID NO: 916869
aggauauacuuagcuauaa

SEQ ID NO: 1190425 - RNA, 19 nt, Artificial Sequence
  Description of Artificial Sequence: Synthetic oligonucleotide
  Antisense strand to SEQ ID NO: 1190424
uuauagcuaaguauauccu

SEQ ID NO: 1190426 - RNA, 19 nt, Artificial Sequence
  Description of Artificial Sequence: Synthetic oligonucleotide
  Sense strand starting at position 1504 of SEQ ID NO: 916869
ggauauacuuagcuauaag

SEQ ID NO: 1190427 - RNA, 19 nt, Artificial Sequence
  Description of Artificial Sequence: Synthetic oligonucleotide
  Antisense strand to SEQ ID NO: 1190426
cuuauagcuaaguauaucc

SEQ ID NO: 1190428 - RNA, 19 nt, Artificial Sequence
  Description of Artificial Sequence: Synthetic oligonucleotide
  Sense strand starting at position 1599 of SEQ ID NO: 916869
ccugucagaguugaucauu

SEQ ID NO: 1190429 - RNA, 19 nt, Artificial Sequence
  Description of Artificial Sequence: Synthetic oligonucleotide
  Antisense strand to SEQ ID NO: 1190428
aaugaucaacucugacagg

SEQ ID NO: 1190430 - RNA, 19 nt, Artificial Sequence
  Description of Artificial Sequence: Synthetic oligonucleotide
  Sense strand starting at position 1602 of SEQ ID NO: 916869
gucagaguugaucauuguu

SEQ ID NO: 1190431 - RNA, 19 nt, Artificial Sequence
  Description of Artificial Sequence: Synthetic oligonucleotide
  Antisense strand to SEQ ID NO: 1190430
aacaaugaucaacucugac

SEQ ID NO: 1190432 - RNA, 19 nt, Artificial Sequence
  Description of Artificial Sequence: Synthetic oligonucleotide
  Sense strand starting at position 1654 of SEQ ID NO: 916869
uggaguuaaauccaguugu

SEQ ID NO: 1190433 - RNA, 19 nt, Artificial Sequence
  Description of Artificial Sequence: Synthetic oligonucleotide
  Antisense strand to SEQ ID NO: 1190432
acaacuggauuuaacucca

SEQ ID NO: 1190434 - RNA, 19 nt, Artificial Sequence
  Description of Artificial Sequence: Synthetic oligonucleotide
  Sense strand starting at position 1869 of SEQ ID NO: 916869
gucugagacgcagaaauag

SEQ ID NO: 1190435 - RNA, 19 nt, Artificial Sequence
  Description of Artificial Sequence: Synthetic oligonucleotide
  Antisense strand to SEQ ID NO: 1190434
cuauuucugcgucucagac

SEQ ID NO: 1190436 - RNA, 19 nt, Artificial Sequence
  Description of Artificial Sequence: Synthetic oligonucleotide
  Sense strand starting at position 1979 of SEQ ID NO: 916869
ggugcuggcuauuuaaagu

SEQ ID NO: 1190437 - RNA, 19 nt, Artificial Sequence
  Description of Artificial Sequence: Synthetic oligonucleotide
  Antisense strand to SEQ ID NO: 1190436
acuuuaaauagccagcacc

SEQ ID NO: 1190438 - RNA, 19 nt, Artificial Sequence
  Description of Artificial Sequence: Synthetic oligonucleotide
  Sense strand starting at position 2121 of SEQ ID NO: 916869
augagugauuucgcagucu

SEQ ID NO: 1190439 - RNA, 19 nt, Artificial Sequence
  Description of Artificial Sequence: Synthetic oligonucleotide
  Antisense strand to SEQ ID NO: 1190438
agacugcgaaaucacucau

SEQ ID NO: 1190440 - RNA, 19 nt, Artificial Sequence
  Description of Artificial Sequence: Synthetic oligonucleotide
  Sense strand starting at position 2396 of SEQ ID NO: 916869
gacgaugauuuagaacaaa

SEQ ID NO: 1190441 - RNA, 19 nt, Artificial Sequence
  Description of Artificial Sequence: Synthetic oligonucleotide
  Antisense strand to SEQ ID NO: 1190440
uuuguucuaaaucaucguc

SEQ ID NO: 1190442 - RNA, 19 nt, Artificial Sequence
  Description of Artificial Sequence: Synthetic oligonucleotide
  Sense strand starting at position 2506 of SEQ ID NO: 916869
ucgcuaaaugauuaauagu

SEQ ID NO: 1190443 - RNA, 19 nt, Artificial Sequence
  Description of Artificial Sequence: Synthetic oligonucleotide
  Antisense strand to SEQ ID NO: 1190442
acuauuaaucauuuagcga

SEQ ID NO: 1190444 - RNA, 19 nt, Artificial Sequence
  Description of Artificial Sequence: Synthetic oligonucleotide
  Sense strand starting at position 2523 of SEQ ID NO: 916869
guaguuacauuuguagagu

SEQ ID NO: 1190445 - RNA, 19 nt, Artificial Sequence
  Description of Artificial Sequence: Synthetic oligonucleotide
  Antisense strand to SEQ ID NO: 1190444
acucuacaaauguaacuac

SEQ ID NO: 1190446 - RNA, 19 nt, Artificial Sequence
  Description of Artificial Sequence: Synthetic oligonucleotide
  Sense strand starting at position 2692 of SEQ ID NO: 916869
agcuguuauaagggaagga

SEQ ID NO: 1190447 - RNA, 19 nt, Artificial Sequence
  Description of Artificial Sequence: Synthetic oligonucleotide
  Antisense strand to SEQ ID NO: 1190446
uccuucccuuauaacagcu

SEQ ID NO: 1190448 - RNA, 19 nt, Artificial Sequence
  Description of Artificial Sequence: Synthetic oligonucleotide
  Sense strand starting at position 2732 of SEQ ID NO: 916869
gaggucauccagggagcuu

SEQ ID NO: 1190449 - RNA, 19 nt, Artificial Sequence
  Description of Artificial Sequence: Synthetic oligonucleotide
  Antisense strand to SEQ ID NO: 1190448
aagcucccuggaugaccuc

SEQ ID NO: 1190450 - RNA, 19 nt, Artificial Sequence
  Description of Artificial Sequence: Synthetic oligonucleotide
  Sense strand starting at position 2866 of SEQ ID NO: 916869
uggaaaccugcucagacuu

SEQ ID NO: 1190451 - RNA, 19 nt, Artificial Sequence
  Description of Artificial Sequence: Synthetic oligonucleotide
  Antisense strand to SEQ ID NO: 1190450
aagucugagcagguuucca

SEQ ID NO: 1190452 - RNA, 19 nt, Artificial Sequence
  Description of Artificial Sequence: Synthetic oligonucleotide
  Sense strand starting at position 3071 of SEQ ID NO: 916869
cuggccagacugugagaau

SEQ ID NO: 1190453 - RNA, 19 nt, Artificial Sequence
  Description of Artificial Sequence: Synthetic oligonucleotide
  Antisense strand to SEQ ID NO: 1190452
auucucacagucuggccag

SEQ ID NO: 1190454 - RNA, 19 nt, Artificial Sequence
  Description of Artificial Sequence: Synthetic oligonucleotide
  Sense strand starting at position 3114 of SEQ ID NO: 916869
gagugagugaggugauaga

SEQ ID NO: 1190455 - RNA, 19 nt, Artificial Sequence
  Description of Artificial Sequence: Synthetic oligonucleotide
  Antisense strand to SEQ ID NO: 1190454
ucuaucaccucacucacuc

SEQ ID NO: 1190456 - RNA, 19 nt, Artificial Sequence
  Description of Artificial Sequence: Synthetic oligonucleotide
  Sense strand starting at position 3172 of SEQ ID NO: 916869
gaucgaagagucuaaggua

SEQ ID NO: 1190457 - RNA, 19 nt, Artificial Sequence
  Description of Artificial Sequence: Synthetic oligonucleotide
  Antisense strand to SEQ ID NO: 1190456
uaccuuagacucuucgauc

SEQ ID NO: 1190458 - RNA, 19 nt, Artificial Sequence
  Description of Artificial Sequence: Synthetic oligonucleotide
  Sense strand starting at position 3243 of SEQ ID NO: 916869
ggaaacacugcaugguaau

SEQ ID NO: 1190459 - RNA, 19 nt, Artificial Sequence
  Description of Artificial Sequence: Synthetic oligonucleotide
  Antisense strand to SEQ ID NO: 1190458
auuaccaugcaguguuucc

SEQ ID NO: 1190460 - RNA, 19 nt, Artificial Sequence
  Description of Artificial Sequence: Synthetic oligonucleotide
  Sense strand starting at position 3244 of SEQ ID NO: 916869
gaaacacugcaugguaaua

SEQ ID NO: 1190461 - RNA, 19 nt, Artificial Sequence
  Description of Artificial Sequence: Synthetic oligonucleotide
  Antisense strand to SEQ ID NO: 1190460
uauuaccaugcaguguuuc

SEQ ID NO: 1190462 - RNA, 19 nt, Artificial Sequence
  Description of Artificial Sequence: Synthetic oligonucleotide
  Sense strand starting at position 3255 of SEQ ID NO: 916869
ugguaauaccuggagagcu

SEQ ID NO: 1190463 - RNA, 19 nt, Artificial Sequence
  Description of Artificial Sequence: Synthetic oligonucleotide
  Antisense strand to SEQ ID NO: 1190462
agcucuccagguauuacca

SEQ ID NO: 1190464 - RNA, 19 nt, Artificial Sequence
  Description of Artificial Sequence: Synthetic oligonucleotide
  Sense strand starting at position 3267 of SEQ ID NO: 916869
gagagcuucccagaagcuu

SEQ ID NO: 1190465 - RNA, 19 nt, Artificial Sequence
  Description of Artificial Sequence: Synthetic oligonucleotide
  Antisense strand to SEQ ID NO: 1190464
aagcuucugggaagcucuc

SEQ ID NO: 1190466 - RNA, 19 nt, Artificial Sequence
  Description of Artificial Sequence: Synthetic oligonucleotide
  Sense strand starting at position 3275 of SEQ ID NO: 916869
cccagaagcuucuuggaaa

SEQ ID NO: 1190467 - RNA, 19 nt, Artificial Sequence
  Description of Artificial Sequence: Synthetic oligonucleotide
  Antisense strand to SEQ ID NO: 1190466
uuuccaagaagcuucuggg

SEQ ID NO: 1190468 - RNA, 19 nt, Artificial Sequence
  Description of Artificial Sequence: Synthetic oligonucleotide
  Sense strand starting at position 3352 of SEQ ID NO: 916869
uagacugagcucuguaaag

SEQ ID NO: 1190469 - RNA, 19 nt, Artificial Sequence
  Description of Artificial Sequence: Synthetic oligonucleotide
  Antisense strand to SEQ ID NO: 1190468
cuuuacagagcucagucua

SEQ ID NO: 1190470 - RNA, 19 nt, Artificial Sequence
  Description of Artificial Sequence: Synthetic oligonucleotide
  Sense strand starting at position 3354 of SEQ ID NO: 916869
gacugagcucuguaaagca

SEQ ID NO: 1190471 - RNA, 19 nt, Artificial Sequence
  Description of Artificial Sequence: Synthetic oligonucleotide
  Antisense strand to SEQ ID NO: 1190470
ugcuuuacagagcucaguc

SEQ ID NO: 1190472 - RNA, 19 nt, Artificial Sequence
  Description of Artificial Sequence: Synthetic oligonucleotide
  Sense strand starting at position 3634 of SEQ ID NO: 916869
gaaagacugucagugauaa

SEQ ID NO: 1190473 - RNA, 19 nt, Artificial Sequence
  Description of Artificial Sequence: Synthetic oligonucleotide
  Antisense strand to SEQ ID NO: 1190472
uuaucacugacagucuuuc

SEQ ID NO: 1190474 - RNA, 19 nt, Artificial Sequence
  Description of Artificial Sequence: Synthetic oligonucleotide
  Sense strand starting at position 3635 of SEQ ID NO: 916869
aaagacugucagugauaag

SEQ ID NO: 1190475 - RNA, 19 nt, Artificial Sequence
  Description of Artificial Sequence: Synthetic oligonucleotide
  Antisense strand to SEQ ID NO: 1190474
cuuaucacugacagucuuu

SEQ ID NO: 1190476 - RNA, 19 nt, Artificial Sequence
  Description of Artificial Sequence: Synthetic oligonucleotide
  Sense strand starting at position 3695 of SEQ ID NO: 916869
uguuguaugaaggaauguu

SEQ ID NO: 1190477 - RNA, 19 nt, Artificial Sequence
  Description of Artificial Sequence: Synthetic oligonucleotide
  Antisense strand to SEQ ID NO: 1190476
aacauuccuucauacaaca

SEQ ID NO: 1190478 - RNA, 19 nt, Artificial Sequence
  Description of Artificial Sequence: Synthetic oligonucleotide
  Sense strand starting at position 3703 of SEQ ID NO: 916869
gaaggaauguuggcuuuac

SEQ ID NO: 1190479 - RNA, 19 nt, Artificial Sequence
  Description of Artificial Sequence: Synthetic oligonucleotide
  Antisense strand to SEQ ID NO: 1190478
guaaagccaacauuccuuc

SEQ ID NO: 1190480 - RNA, 19 nt, Artificial Sequence
  Description of Artificial Sequence: Synthetic oligonucleotide
  Sense strand starting at position 3707 of SEQ ID NO: 916869
gaauguuggcuuuacuuac

SEQ ID NO: 1190481 - RNA, 19 nt, Artificial Sequence
  Description of Artificial Sequence: Synthetic oligonucleotide
  Antisense strand to SEQ ID NO: 1190480
guaaguaaagccaacauuc

SEQ ID NO: 1190482 - RNA, 19 nt, Artificial Sequence
  Description of Artificial Sequence: Synthetic oligonucleotide
  Sense strand starting at position 34 of SEQ ID NO: 916870
ccuccacuucuguaggauu

SEQ ID NO: 1190483 - RNA, 19 nt, Artificial Sequence
  Description of Artificial Sequence: Synthetic oligonucleotide
  Antisense strand to SEQ ID NO: 1190482
aauccuacagaaguggagg

SEQ ID NO: 1190484 - RNA, 19 nt, Artificial Sequence
  Description of Artificial Sequence: Synthetic oligonucleotide
  Sense strand starting at position 37 of SEQ ID NO: 916870
ccacuucuguaggauuuau

SEQ ID NO: 1190485 - RNA, 19 nt, Artificial Sequence
  Description of Artificial Sequence: Synthetic oligonucleotide
  Antisense strand to SEQ ID NO: 1190484
auaaauccuacagaagugg

SEQ ID NO: 1190486 - RNA, 19 nt, Artificial Sequence
  Description of Artificial Sequence: Synthetic oligonucleotide
  Sense strand starting at position 46 of SEQ ID NO: 916870
uaggauuuaugcuggacag

SEQ ID NO: 1190487 - RNA, 19 nt, Artificial Sequence
  Description of Artificial Sequence: Synthetic oligonucleotide
  Antisense strand to SEQ ID NO: 1190486
cuguccagcauaaauccua

SEQ ID NO: 1190488 - RNA, 19 nt, Artificial Sequence
  Description of Artificial Sequence: Synthetic oligonucleotide
  Sense strand starting at position 173 of SEQ ID NO: 916870
uuuaguccaucauuaagua

SEQ ID NO: 1190489 - RNA, 19 nt, Artificial Sequence
  Description of Artificial Sequence: Synthetic oligonucleotide
  Antisense strand to SEQ ID NO: 1190488
uacuuaaugauggacuaaa

SEQ ID NO: 1190490 - RNA, 19 nt, Artificial Sequence
  Description of Artificial Sequence: Synthetic oligonucleotide
  Sense strand starting at position 174 of SEQ ID NO: 916870
uuaguccaucauuaaguau

SEQ ID NO: 1190491 - RNA, 19 nt, Artificial Sequence
  Description of Artificial Sequence: Synthetic oligonucleotide
  Antisense strand to SEQ ID NO: 1190490
auacuuaaugauggacuaa

SEQ ID NO: 1190492 - RNA, 19 nt, Artificial Sequence
  Description of Artificial Sequence: Synthetic oligonucleotide
  Sense strand starting at position 225 of SEQ ID NO: 916870
gggcgccuaagacauaaau

SEQ ID NO: 1190493 - RNA, 19 nt, Artificial Sequence
  Description of Artificial Sequence: Synthetic oligonucleotide
  Antisense strand to SEQ ID NO: 1190492
auuuaugucuuaggcgccc

SEQ ID NO: 1190494 - RNA, 19 nt, Artificial Sequence
  Description of Artificial Sequence: Synthetic oligonucleotide
  Sense strand starting at position 237 of SEQ ID NO: 916870
cauaaauaggucuguguuu

SEQ ID NO: 1190495 - RNA, 19 nt, Artificial Sequence
  Description of Artificial Sequence: Synthetic oligonucleotide
  Antisense strand to SEQ ID NO: 1190494
aaacacagaccuauuuaug

SEQ ID NO: 1190496 - RNA, 19 nt, Artificial Sequence
  Description of Artificial Sequence: Synthetic oligonucleotide
  Sense strand starting at position 459 of SEQ ID NO: 916870
auacgucuuaaguagugaa

SEQ ID NO: 1190497 - RNA, 19 nt, Artificial Sequence
  Description of Artificial Sequence: Synthetic oligonucleotide
  Antisense strand to SEQ ID NO: 1190496
uucacuacuuaagacguau

SEQ ID NO: 1190498 - RNA, 19 nt, Artificial Sequence
  Description of Artificial Sequence: Synthetic oligonucleotide
  Sense strand starting at position 469 of SEQ ID NO: 916870
aguagugaaccgcaaggau

SEQ ID NO: 1190499 - RNA, 19 nt, Artificial Sequence
  Description of Artificial Sequence: Synthetic oligonucleotide
  Antisense strand to SEQ ID NO: 1190498
auccuugcgguucacuacu

SEQ ID NO: 1190500 - RNA, 19 nt, Artificial Sequence
  Description of Artificial Sequence: Synthetic oligonucleotide
  Sense strand starting at position 548 of SEQ ID NO: 916870
gaaaccgucgcagacuuau

SEQ ID NO: 1190501 - RNA, 19 nt, Artificial Sequence
  Description of Artificial Sequence: Synthetic oligonucleotide
  Antisense strand to SEQ ID NO: 1190500
auaagucugcgacgguuuc

SEQ ID NO: 1190502 - RNA, 19 nt, Artificial Sequence
  Description of Artificial Sequence: Synthetic oligonucleotide
  Sense strand starting at position 554 of SEQ ID NO: 916870
gucgcagacuuauuugcau

SEQ ID NO: 1190503 - RNA, 19 nt, Artificial Sequence
  Description of Artificial Sequence: Synthetic oligonucleotide
  Antisense strand to SEQ ID NO: 1190502
augcaaauaagucugcgac

SEQ ID NO: 1190504 - RNA, 19 nt, Artificial Sequence
  Description of Artificial Sequence: Synthetic oligonucleotide
  Sense strand starting at position 730 of SEQ ID NO: 916870
ugcuucucagcucaggaaa

SEQ ID NO: 1190505 - RNA, 19 nt, Artificial Sequence
  Description of Artificial Sequence: Synthetic oligonucleotide
  Antisense strand to SEQ ID NO: 1190504
uuuccugagcugagaagca

SEQ ID NO: 1190506 - RNA, 19 nt, Artificial Sequence
  Description of Artificial Sequence: Synthetic oligonucleotide
  Sense strand starting at position 849 of SEQ ID NO: 916870
uacguuagagugcaaggau

SEQ ID NO: 1190507 - RNA, 19 nt, Artificial Sequence
  Description of Artificial Sequence: Synthetic oligonucleotide
  Antisense strand to SEQ ID NO: 1190506
auccuugcacucuaacgua

SEQ ID NO: 1190508 - RNA, 19 nt, Artificial Sequence
  Description of Artificial Sequence: Synthetic oligonucleotide
  Sense strand starting at position 858 of SEQ ID NO: 916870
gugcaaggauuucccugua

SEQ ID NO: 1190509 - RNA, 19 nt, Artificial Sequence
  Description of Artificial Sequence: Synthetic oligonucleotide
  Antisense strand to SEQ ID NO: 1190508
uacagggaaauccuugcac

SEQ ID NO: 1190510 - RNA, 19 nt, Artificial Sequence
  Description of Artificial Sequence: Synthetic oligonucleotide
  Sense strand starting at position 929 of SEQ ID NO: 916870
guagaaacgaucuggguuu

SEQ ID NO: 1190511 - RNA, 19 nt, Artificial Sequence
  Description of Artificial Sequence: Synthetic oligonucleotide
  Antisense strand to SEQ ID NO: 1190510
aaacccagaucguuucuac

SEQ ID NO: 1190512 - RNA, 19 nt, Artificial Sequence
  Description of Artificial Sequence: Synthetic oligonucleotide
  Sense strand starting at position 1033 of SEQ ID NO: 916870
agccgugauuucuccagca

SEQ ID NO: 1190513 - RNA, 19 nt, Artificial Sequence
  Description of Artificial Sequence: Synthetic oligonucleotide
  Antisense strand to SEQ ID NO: 1190512
ugcuggagaaaucacggcu

SEQ ID NO: 1190514 - RNA, 19 nt, Artificial Sequence
  Description of Artificial Sequence: Synthetic oligonucleotide
  Sense strand starting at position 1035 of SEQ ID NO: 916870
ccgugauuucuccagcagc

SEQ ID NO: 1190515 - RNA, 19 nt, Artificial Sequence
  Description of Artificial Sequence: Synthetic oligonucleotide
  Antisense strand to SEQ ID NO: 1190514
gcugcuggagaaaucacgg

SEQ ID NO: 1190516 - RNA, 19 nt, Artificial Sequence
  Description of Artificial Sequence: Synthetic oligonucleotide
  Sense strand starting at position 1089 of SEQ ID NO: 916870
ggccauuuaucacaggaua

SEQ ID NO: 1190517 - RNA, 19 nt, Artificial Sequence
  Description of Artificial Sequence: Synthetic oligonucleotide
  Antisense strand to SEQ ID NO: 1190516
uauccugugauaaauggcc

SEQ ID NO: 1190518 - RNA, 19 nt, Artificial Sequence
  Description of Artificial Sequence: Synthetic oligonucleotide
  Sense strand starting at position 1160 of SEQ ID NO: 916870
cgccuucugccuuugcuaa

SEQ ID NO: 1190519 - RNA, 19 nt, Artificial Sequence
  Description of Artificial Sequence: Synthetic oligonucleotide
  Antisense strand to SEQ ID NO: 1190518
uuagcaaaggcagaaggcg

SEQ ID NO: 1190520 - RNA, 19 nt, Artificial Sequence
  Description of Artificial Sequence: Synthetic oligonucleotide
  Sense strand starting at position 1303 of SEQ ID NO: 916870
uggacuuucccguguugga

SEQ ID NO: 1190521 - RNA, 19 nt, Artificial Sequence
  Description of Artificial Sequence: Synthetic oligonucleotide
  Antisense strand to SEQ ID NO: 1190520
uccaacacgggaaagucca

SEQ ID NO: 1190522 - RNA, 19 nt, Artificial Sequence
  Description of Artificial Sequence: Synthetic oligonucleotide
  Sense strand starting at position 1904 of SEQ ID NO: 916870
gugugucugccagggaaac

SEQ ID NO: 1190523 - RNA, 19 nt, Artificial Sequence
  Description of Artificial Sequence: Synthetic oligonucleotide
  Antisense strand to SEQ ID NO: 1190522
guuucccuggcagacacac

SEQ ID NO: 1190524 - RNA, 19 nt, Artificial Sequence
  Description of Artificial Sequence: Synthetic oligonucleotide
  Sense strand starting at position 1905 of SEQ ID NO: 916870
ugugucugccagggaaaca

SEQ ID NO: 1190525 - RNA, 19 nt, Artificial Sequence
  Description of Artificial Sequence: Synthetic oligonucleotide
  Antisense strand to SEQ ID NO: 1190524
uguuucccuggcagacaca

SEQ ID NO: 1190526 - RNA, 19 nt, Artificial Sequence
  Description of Artificial Sequence: Synthetic oligonucleotide
  Sense strand starting at position 2352 of SEQ ID NO: 916870
ugagaauaauaauaggcau

SEQ ID NO: 1190527 - RNA, 19 nt, Artificial Sequence
  Description of Artificial Sequence: Synthetic oligonucleotide
  Antisense strand to SEQ ID NO: 1190526
augccuauuauuauucuca

SEQ ID NO: 1190528 - RNA, 19 nt, Artificial Sequence
  Description of Artificial Sequence: Synthetic oligonucleotide
  Sense strand starting at position 2403 of SEQ ID NO: 916870
agagucaguaaugggacua

SEQ ID NO: 1190529 - RNA, 19 nt, Artificial Sequence
  Description of Artificial Sequence: Synthetic oligonucleotide
  Antisense strand to SEQ ID NO: 1190528
uagucccauuacugacucu

SEQ ID NO: 1190530 - RNA, 19 nt, Artificial Sequence
  Description of Artificial Sequence: Synthetic oligonucleotide
  Sense strand starting at position 2475 of SEQ ID NO: 916870
ccauuuacaucucuugcga

SEQ ID NO: 1190531 - RNA, 19 nt, Artificial Sequence
  Description of Artificial Sequence: Synthetic oligonucleotide
  Antisense strand to SEQ ID NO: 1190530
ucgcaagagauguaaaugg

SEQ ID NO: 1190532 - RNA, 19 nt, Artificial Sequence
  Description of Artificial Sequence: Synthetic oligonucleotide
  Sense strand starting at position 2535 of SEQ ID NO: 916870
gccucauagcgcucaguga

SEQ ID NO: 1190533 - RNA, 19 nt, Artificial Sequence
  Description of Artificial Sequence: Synthetic oligonucleotide
  Antisense strand to SEQ ID NO: 1190532
ucacugagcgcuaugaggc

SEQ ID NO: 1190534 - RNA, 19 nt, Artificial Sequence
  Description of Artificial Sequence: Synthetic oligonucleotide
  Sense strand starting at position 2549 of SEQ ID NO: 916870
agugauucucgccagguua

SEQ ID NO: 1190535 - RNA, 19 nt, Artificial Sequence
  Description of Artificial Sequence: Synthetic oligonucleotide
  Antisense strand to SEQ ID NO: 1190534
uaaccuggcgagaaucacu

SEQ ID NO: 1190536 - RNA, 19 nt, Artificial Sequence
  Description of Artificial Sequence: Synthetic oligonucleotide
  Sense strand starting at position 2794 of SEQ ID NO: 916870
augcucuaaggaugaaauu

SEQ ID NO: 1190537 - RNA, 19 nt, Artificial Sequence
  Description of Artificial Sequence: Synthetic oligonucleotide
  Antisense strand to SEQ ID NO: 1190536
aauuucauccuuagagcau

SEQ ID NO: 1190538 - RNA, 19 nt, Artificial Sequence
  Description of Artificial Sequence: Synthetic oligonucleotide
  Sense strand starting at position 2858 of SEQ ID NO: 916870
ccuagaagcuagguagaaa

SEQ ID NO: 1190539 - RNA, 19 nt, Artificial Sequence
  Description of Artificial Sequence: Synthetic oligonucleotide
  Antisense strand to SEQ ID NO: 1190538
uuucuaccuagcuucuagg

SEQ ID NO: 1190540 - RNA, 19 nt, Artificial Sequence
  Description of Artificial Sequence: Synthetic oligonucleotide
  Sense strand starting at position 2869 of SEQ ID NO: 916870
gguagaaagguucaguaau

SEQ ID NO: 1190541 - RNA, 19 nt, Artificial Sequence
  Description of Artificial Sequence: Synthetic oligonucleotide
  Antisense strand to SEQ ID NO: 1190540
auuacugaaccuuucuacc

SEQ ID NO: 1190542 - RNA, 19 nt, Artificial Sequence
  Description of Artificial Sequence: Synthetic oligonucleotide
  Sense strand starting at position 2880 of SEQ ID NO: 916870
ucaguaauuuagcaaaguu

SEQ ID NO: 1190543 - RNA, 19 nt, Artificial Sequence
  Description of Artificial Sequence: Synthetic oligonucleotide
  Antisense strand to SEQ ID NO: 1190542
aacuuugcuaaauuacuga

SEQ ID NO: 1190544 - RNA, 19 nt, Artificial Sequence
  Description of Artificial Sequence: Synthetic oligonucleotide
  Sense strand starting at position 2984 of SEQ ID NO: 916870
acgguucguauccaauuaa

SEQ ID NO: 1190545 - RNA, 19 nt, Artificial Sequence
  Description of Artificial Sequence: Synthetic oligonucleotide
  Antisense strand to SEQ ID NO: 1190544
uuaauuggauacgaaccgu

SEQ ID NO: 1190546 - RNA, 19 nt, Artificial Sequence
  Description of Artificial Sequence: Synthetic oligonucleotide
  Sense strand starting at position 3090 of SEQ ID NO: 916870
aggucagaacauugcuacu

SEQ ID NO: 1190547 - RNA, 19 nt, Artificial Sequence
  Description of Artificial Sequence: Synthetic oligonucleotide
  Antisense strand to SEQ ID NO: 1190546
aguagcaauguucugaccu

SEQ ID NO: 1190548 - RNA, 19 nt, Artificial Sequence
  Description of Artificial Sequence: Synthetic oligonucleotide
  Sense strand starting at position 3092 of SEQ ID NO: 916870
gucagaacauugcuacuaa

SEQ ID NO: 1190549 - RNA, 19 nt, Artificial Sequence
  Description of Artificial Sequence: Synthetic oligonucleotide
  Antisense strand to SEQ ID NO: 1190548
uuaguagcaauguucugac

SEQ ID NO: 1190550 - RNA, 19 nt, Artificial Sequence
  Description of Artificial Sequence: Synthetic oligonucleotide
  Sense strand starting at position 3224 of SEQ ID NO: 916870
cccugccaugaguaaauaa

SEQ ID NO: 1190551 - RNA, 19 nt, Artificial Sequence
  Description of Artificial Sequence: Synthetic oligonucleotide
  Antisense strand to SEQ ID NO: 1190550
uuauuuacucauggcaggg

SEQ ID NO: 1190552 - RNA, 19 nt, Artificial Sequence
  Description of Artificial Sequence: Synthetic oligonucleotide
  Sense strand starting at position 3235 of SEQ ID NO: 916870
guaaauaaaugcucuuuga

SEQ ID NO: 1190553 - RNA, 19 nt, Artificial Sequence
  Description of Artificial Sequence: Synthetic oligonucleotide
  Antisense strand to SEQ ID NO: 1190552
ucaaagagcauuuauuuac

SEQ ID NO: 1190554 - RNA, 19 nt, Artificial Sequence
  Description of Artificial Sequence: Synthetic oligonucleotide
  Sense strand starting at position 3330 of SEQ ID NO: 916870
uuuggugacaggcaaauau

SEQ ID NO: 1190555 - RNA, 19 nt, Artificial Sequence
  Description of Artificial Sequence: Synthetic oligonucleotide
  Antisense strand to SEQ ID NO: 1190554
auauuugccugucaccaaa

SEQ ID NO: 1190556 - RNA, 19 nt, Artificial Sequence
  Description of Artificial Sequence: Synthetic oligonucleotide
  Sense strand starting at position 3453 of SEQ ID NO: 916870
uuaggauuaucugugggaa

SEQ ID NO: 1190557 - RNA, 19 nt, Artificial Sequence
  Description of Artificial Sequence: Synthetic oligonucleotide
  Antisense strand to SEQ ID NO: 1190556
uucccacagauaauccuaa

SEQ ID NO: 1190558 - RNA, 19 nt, Artificial Sequence
  Description of Artificial Sequence: Synthetic oligonucleotide
  Sense strand starting at position 3492 of SEQ ID NO: 916870
gcagaaaucguuuacggua

SEQ ID NO: 1190559 - RNA, 19 nt, Artificial Sequence
  Description of Artificial Sequence: Synthetic oligonucleotide
  Antisense strand to SEQ ID NO: 1190558
uaccguaaacgauuucugc

SEQ ID NO: 1190560 - RNA, 19 nt, Artificial Sequence
  Description of Artificial Sequence: Synthetic oligonucleotide
  Sense strand starting at position 3856 of SEQ ID NO: 916870
auaugcuggccucaaacuu

SEQ ID NO: 1190561 - RNA, 19 nt, Artificial Sequence
  Description of Artificial Sequence: Synthetic oligonucleotide
  Antisense strand to SEQ ID NO: 1190560
aaguuugaggccagcauau

SEQ ID NO: 1190562 - RNA, 19 nt, Artificial Sequence
  Description of Artificial Sequence: Synthetic oligonucleotide
  Sense strand starting at position 35 of SEQ ID NO: 916871
acgcccuucuuccugagaa

SEQ ID NO: 1190563 - RNA, 19 nt, Artificial Sequence
  Description of Artificial Sequence: Synthetic oligonucleotide
  Antisense strand to SEQ ID NO: 1190562
uucucaggaagaagggcgu

SEQ ID NO: 1190564 - RNA, 19 nt, Artificial Sequence
  Description of Artificial Sequence: Synthetic oligonucleotide
  Sense strand starting at position 168 of SEQ ID NO: 916871
gggugagauacauguggga

SEQ ID NO: 1190565 - RNA, 19 nt, Artificial Sequence
  Description of Artificial Sequence: Synthetic oligonucleotide
  Antisense strand to SEQ ID NO: 1190564
ucccacauguaucucaccc

SEQ ID NO: 1190566 - RNA, 19 nt, Artificial Sequence
  Description of Artificial Sequence: Synthetic oligonucleotide
  Sense strand starting at position 170 of SEQ ID NO: 916871
gugagauacaugugggaag

SEQ ID NO: 1190567 - RNA, 19 nt, Artificial Sequence
  Description of Artificial Sequence: Synthetic oligonucleotide
  Antisense strand to SEQ ID NO: 1190566
cuucccacauguaucucac

SEQ ID NO: 1190568 - RNA, 19 nt, Artificial Sequence
  Description of Artificial Sequence: Synthetic oligonucleotide
  Sense strand starting at position 273 of SEQ ID NO: 916871
caguuugagacguagagag

SEQ ID NO: 1190569 - RNA, 19 nt, Artificial Sequence
  Description of Artificial Sequence: Synthetic oligonucleotide
  Antisense strand to SEQ ID NO: 1190568
cucucuacgucucaaacug

SEQ ID NO: 1190570 - RNA, 19 nt, Artificial Sequence
  Description of Artificial Sequence: Synthetic oligonucleotide
  Sense strand starting at position 495 of SEQ ID NO: 916871
ucaugcaguccucagaaca

SEQ ID NO: 1190571 - RNA, 19 nt, Artificial Sequence
  Description of Artificial Sequence: Synthetic oligonucleotide
  Antisense strand to SEQ ID NO: 1190570
uguucugaggacugcauga

SEQ ID NO: 1190572 - RNA, 19 nt, Artificial Sequence
  Description of Artificial Sequence: Synthetic oligonucleotide
  Sense strand starting at position 976 of SEQ ID NO: 916871
gaaguugaguugcucaaag

SEQ ID NO: 1190573 - RNA, 19 nt, Artificial Sequence
  Description of Artificial Sequence: Synthetic oligonucleotide
  Antisense strand to SEQ ID NO: 1190572
cuuugagcaacucaacuuc

SEQ ID NO: 1190574 - RNA, 19 nt, Artificial Sequence
  Description of Artificial Sequence: Synthetic oligonucleotide
  Sense strand starting at position 978 of SEQ ID NO: 916871
aguugaguugcucaaagac

SEQ ID NO: 1190575 - RNA, 19 nt, Artificial Sequence
  Description of Artificial Sequence: Synthetic oligonucleotide
  Antisense strand to SEQ ID NO: 1190574
gucuuugagcaacucaacu

SEQ ID NO: 1190576 - RNA, 19 nt, Artificial Sequence
  Description of Artificial Sequence: Synthetic oligonucleotide
  Sense strand starting at position 1142 of SEQ ID NO: 916871
ucauguguucuacgaugag

SEQ ID NO: 1190577 - RNA, 19 nt, Artificial Sequence
  Description of Artificial Sequence: Synthetic oligonucleotide
  Antisense strand to SEQ ID NO: 1190576
cucaucguagaacacauga

SEQ ID NO: 1190578 - RNA, 19 nt, Artificial Sequence
  Description of Artificial Sequence: Synthetic oligonucleotide
  Sense strand starting at position 1146 of SEQ ID NO: 916871
guguucuacgaugaguaug

SEQ ID NO: 1190579 - RNA, 19 nt, Artificial Sequence
  Description of Artificial Sequence: Synthetic oligonucleotide
  Antisense strand to SEQ ID NO: 1190578
cauacucaucguagaacac

SEQ ID NO: 1190580 - RNA, 19 nt, Artificial Sequence
  Description of Artificial Sequence: Synthetic oligonucleotide
  Sense strand starting at position 1151 of SEQ ID NO: 916871
cuacgaugaguaugucuua

SEQ ID NO: 1190581 - RNA, 19 nt, Artificial Sequence
  Description of Artificial Sequence: Synthetic oligonucleotide
  Antisense strand to SEQ ID NO: 1190580
uaagacauacucaucguag

SEQ ID NO: 1190582 - RNA, 19 nt, Artificial Sequence
  Description of Artificial Sequence: Synthetic oligonucleotide
  Sense strand starting at position 1152 of SEQ ID NO: 916871
uacgaugaguaugucuuau

SEQ ID NO: 1190583 - RNA, 19 nt, Artificial Sequence
  Description of Artificial Sequence: Synthetic oligonucleotide
  Antisense strand to SEQ ID NO: 1190582
auaagacauacucaucgua

SEQ ID NO: 1190584 - RNA, 19 nt, Artificial Sequence
  Description of Artificial Sequence: Synthetic oligonucleotide
  Sense strand starting at position 1154 of SEQ ID NO: 916871
cgaugaguaugucuuauuu

SEQ ID NO: 1190585 - RNA, 19 nt, Artificial Sequence
  Description of Artificial Sequence: Synthetic oligonucleotide
  Antisense strand to SEQ ID NO: 1190584
aaauaagacauacucaucg

SEQ ID NO: 1190586 - RNA, 19 nt, Artificial Sequence
  Description of Artificial Sequence: Synthetic oligonucleotide
  Sense strand starting at position 1221 of SEQ ID NO: 916871
ugcgcagguguuucucaau

SEQ ID NO: 1190587 - RNA, 19 nt, Artificial Sequence
  Description of Artificial Sequence: Synthetic oligonucleotide
  Antisense strand to SEQ ID NO: 1190586
auugagaaacaccugcgca

SEQ ID NO: 1190588 - RNA, 19 nt, Artificial Sequence
  Description of Artificial Sequence: Synthetic oligonucleotide
  Sense strand starting at position 1318 of SEQ ID NO: 916871
cuuaccuguccacggaaga

SEQ ID NO: 1190589 - RNA, 19 nt, Artificial Sequence
  Description of Artificial Sequence: Synthetic oligonucleotide
  Antisense strand to SEQ ID NO: 1190588
ucuuccguggacagguaag

SEQ ID NO: 1190590 - RNA, 19 nt, Artificial Sequence
  Description of Artificial Sequence: Synthetic oligonucleotide
  Sense strand starting at position 1350 of SEQ ID NO: 916871
cuucuaugguucucccgaa

SEQ ID NO: 1190591 - RNA, 19 nt, Artificial Sequence
  Description of Artificial Sequence: Synthetic oligonucleotide
  Antisense strand to SEQ ID NO: 1190590
uucgggagaaccauagaag

SEQ ID NO: 1190592 - RNA, 19 nt, Artificial Sequence
  Description of Artificial Sequence: Synthetic oligonucleotide
  Sense strand starting at position 1374 of SEQ ID NO: 916871
ccaacuggaguccgaguua

SEQ ID NO: 1190593 - RNA, 19 nt, Artificial Sequence
  Description of Artificial Sequence: Synthetic oligonucleotide
  Antisense strand to SEQ ID NO: 1190592
uaacucggacuccaguugg

SEQ ID NO: 1190594 - RNA, 19 nt, Artificial Sequence
  Description of Artificial Sequence: Synthetic oligonucleotide
  Sense strand starting at position 1379 of SEQ ID NO: 916871
uggaguccgaguuacucua

SEQ ID NO: 1190595 - RNA, 19 nt, Artificial Sequence
  Description of Artificial Sequence: Synthetic oligonucleotide
  Antisense strand to SEQ ID NO: 1190594
uagaguaacucggacucca

SEQ ID NO: 1190596 - RNA, 19 nt, Artificial Sequence
  Description of Artificial Sequence: Synthetic oligonucleotide
  Sense strand starting at position 1381 of SEQ ID NO: 916871
gaguccgaguuacucuauu

SEQ ID NO: 1190597 - RNA, 19 nt, Artificial Sequence
  Description of Artificial Sequence: Synthetic oligonucleotide
  Antisense strand to SEQ ID NO: 1190596
aauagaguaacucggacuc

SEQ ID NO: 1190598 - RNA, 19 nt, Artificial Sequence
  Description of Artificial Sequence: Synthetic oligonucleotide
  Sense strand starting at position 1495 of SEQ ID NO: 916871
ccucuuauuccucaugugu

SEQ ID NO: 1190599 - RNA, 19 nt, Artificial Sequence
  Description of Artificial Sequence: Synthetic oligonucleotide
  Antisense strand to SEQ ID NO: 1190598
acacaugaggaauaagagg

SEQ ID NO: 1190600 - RNA, 19 nt, Artificial Sequence
  Description of Artificial Sequence: Synthetic oligonucleotide
  Sense strand starting at position 1501 of SEQ ID NO: 916871
auuccucaugugugaaaug

SEQ ID NO: 1190601 - RNA, 19 nt, Artificial Sequence
  Description of Artificial Sequence: Synthetic oligonucleotide
  Antisense strand to SEQ ID NO: 1190600
cauuucacacaugaggaau

SEQ ID NO: 1190602 - RNA, 19 nt, Artificial Sequence
  Description of Artificial Sequence: Synthetic oligonucleotide
  Sense strand starting at position 1562 of SEQ ID NO: 916871
aaauguucgcgucccugau

SEQ ID NO: 1190603 - RNA, 19 nt, Artificial Sequence
  Description of Artificial Sequence: Synthetic oligonucleotide
  Antisense strand to SEQ ID NO: 1190602
aucagggacgcgaacauuu

SEQ ID NO: 1190604 - RNA, 19 nt, Artificial Sequence
  Description of Artificial Sequence: Synthetic oligonucleotide
  Sense strand starting at position 1617 of SEQ ID NO: 916871
cucuuugcugccgauuuau

SEQ ID NO: 1190605 - RNA, 19 nt, Artificial Sequence
  Description of Artificial Sequence: Synthetic oligonucleotide
  Antisense strand to SEQ ID NO: 1190604
auaaaucggcagcaaagag

SEQ ID NO: 1190606 - RNA, 19 nt, Artificial Sequence
  Description of Artificial Sequence: Synthetic oligonucleotide
  Sense strand starting at position 2172 of SEQ ID NO: 916871
ccgcuuugaaacugagaua

SEQ ID NO: 1190607 - RNA, 19 nt, Artificial Sequence
  Description of Artificial Sequence: Synthetic oligonucleotide
  Antisense strand to SEQ ID NO: 1190606
uaucucaguuucaaagcgg

SEQ ID NO: 1190608 - RNA, 19 nt, Artificial Sequence
  Description of Artificial Sequence: Synthetic oligonucleotide
  Sense strand starting at position 2175 of SEQ ID NO: 916871
cuuugaaacugagauacaa

SEQ ID NO: 1190609 - RNA, 19 nt, Artificial Sequence
  Description of Artificial Sequence: Synthetic oligonucleotide
  Antisense strand to SEQ ID NO: 1190608
uuguaucucaguuucaaag

SEQ ID NO: 1190610 - RNA, 19 nt, Artificial Sequence
  Description of Artificial Sequence: Synthetic oligonucleotide
  Sense strand starting at position 2187 of SEQ ID NO: 916871
gauacaagccgauggguaa

SEQ ID NO: 1190611 - RNA, 19 nt, Artificial Sequence
  Description of Artificial Sequence: Synthetic oligonucleotide
  Antisense strand to SEQ ID NO: 1190610
uuacccaucggcuuguauc

SEQ ID NO: 1190612 - RNA, 19 nt, Artificial Sequence
  Description of Artificial Sequence: Synthetic oligonucleotide
  Sense strand starting at position 2394 of SEQ ID NO: 916871
cugagauccuaauuggguu

SEQ ID NO: 1190613 - RNA, 19 nt, Artificial Sequence
  Description of Artificial Sequence: Synthetic oligonucleotide
  Antisense strand to SEQ ID NO: 1190612
aacccaauuaggaucucag

SEQ ID NO: 1190614 - RNA, 19 nt, Artificial Sequence
  Description of Artificial Sequence: Synthetic oligonucleotide
  Sense strand starting at position 2643 of SEQ ID NO: 916871
ucuuacuauguuggucaaa

SEQ ID NO: 1190615 - RNA, 19 nt, Artificial Sequence
  Description of Artificial Sequence: Synthetic oligonucleotide
  Antisense strand to SEQ ID NO: 1190614
uuugaccaacauaguaaga

SEQ ID NO: 1190616 - RNA, 19 nt, Artificial Sequence
  Description of Artificial Sequence: Synthetic oligonucleotide
  Sense strand starting at position 2645 of SEQ ID NO: 916871
uuacuauguuggucaaacu

SEQ ID NO: 1190617 - RNA, 19 nt, Artificial Sequence
  Description of Artificial Sequence: Synthetic oligonucleotide
  Antisense strand to SEQ ID NO: 1190616
aguuugaccaacauaguaa

SEQ ID NO: 1190618 - RNA, 19 nt, Artificial Sequence
  Description of Artificial Sequence: Synthetic oligonucleotide
  Sense strand starting at position 2654 of SEQ ID NO: 916871
uggucaaacuggucacgaa

SEQ ID NO: 1190619 - RNA, 19 nt, Artificial Sequence
  Description of Artificial Sequence: Synthetic oligonucleotide
  Antisense strand to SEQ ID NO: 1190618
uucgugaccaguuugacca

SEQ ID NO: 1190620 - RNA, 19 nt, Artificial Sequence
  Description of Artificial Sequence: Synthetic oligonucleotide
  Sense strand starting at position 2667 of SEQ ID NO: 916871
cacgaacuccugggcuuau

SEQ ID NO: 1190621 - RNA, 19 nt, Artificial Sequence
  Description of Artificial Sequence: Synthetic oligonucleotide
  Antisense strand to SEQ ID NO: 1190620
auaagcccaggaguucgug

SEQ ID NO: 1190622 - RNA, 19 nt, Artificial Sequence
  Description of Artificial Sequence: Synthetic oligonucleotide
  Sense strand starting at position 2668 of SEQ ID NO: 916871
acgaacuccugggcuuaua

SEQ ID NO: 1190623 - RNA, 19 nt, Artificial Sequence
  Description of Artificial Sequence: Synthetic oligonucleotide
  Antisense strand to SEQ ID NO: 1190622
uauaagcccaggaguucgu

SEQ ID NO: 1190624 - RNA, 19 nt, Artificial Sequence
  Description of Artificial Sequence: Synthetic oligonucleotide
  Sense strand starting at position 2771 of SEQ ID NO: 916871
agacgaggucucuauaugu

SEQ ID NO: 1190625 - RNA, 19 nt, Artificial Sequence
  Description of Artificial Sequence: Synthetic oligonucleotide
  Antisense strand to SEQ ID NO: 1190624
acauauagagaccucgucu

SEQ ID NO: 1190626 - RNA, 19 nt, Artificial Sequence
  Description of Artificial Sequence: Synthetic oligonucleotide
  Sense strand starting at position 2851 of SEQ ID NO: 916871
gucagagcuguguaaacca

SEQ ID NO: 1190627 - RNA, 19 nt, Artificial Sequence
  Description of Artificial Sequence: Synthetic oligonucleotide
  Antisense strand to SEQ ID NO: 1190626
ugguuuacacagcucugac

SEQ ID NO: 1190628 - RNA, 19 nt, Artificial Sequence
  Description of Artificial Sequence: Synthetic oligonucleotide
  Sense strand starting at position 3324 of SEQ ID NO: 916871
auggaaucacccugaauuc

SEQ ID NO: 1190629 - RNA, 19 nt, Artificial Sequence
  Description of Artificial Sequence: Synthetic oligonucleotide
  Antisense strand to SEQ ID NO: 1190628
gaauucagggugauuccau

SEQ ID NO: 1190630 - RNA, 19 nt, Artificial Sequence
  Description of Artificial Sequence: Synthetic oligonucleotide
  Sense strand starting at position 3579 of SEQ ID NO: 916871
aaucaagaccgaggaguua

SEQ ID NO: 1190631 - RNA, 19 nt, Artificial Sequence
  Description of Artificial Sequence: Synthetic oligonucleotide
  Antisense strand to SEQ ID NO: 1190630
uaacuccucggucuugauu

SEQ ID NO: 1190632 - RNA, 19 nt, Artificial Sequence
  Description of Artificial Sequence: Synthetic oligonucleotide
  Sense strand starting at position 3590 of SEQ ID NO: 916871
aggaguuagugaucugcug

SEQ ID NO: 1190633 - RNA, 19 nt, Artificial Sequence
  Description of Artificial Sequence: Synthetic oligonucleotide
  Antisense strand to SEQ ID NO: 1190632
cagcagaucacuaacuccu

SEQ ID NO: 1190634 - RNA, 19 nt, Artificial Sequence
  Description of Artificial Sequence: Synthetic oligonucleotide
  Sense strand starting at position 3592 of SEQ ID NO: 916871
gaguuagugaucugcugau

SEQ ID NO: 1190635 - RNA, 19 nt, Artificial Sequence
  Description of Artificial Sequence: Synthetic oligonucleotide
  Antisense strand to SEQ ID NO: 1190634
aucagcagaucacuaacuc

SEQ ID NO: 1190636 - RNA, 19 nt, Artificial Sequence
  Description of Artificial Sequence: Synthetic oligonucleotide
  Sense strand starting at position 3596 of SEQ ID NO: 916871
uagugaucugcugauggau

SEQ ID NO: 1190637 - RNA, 19 nt, Artificial Sequence
  Description of Artificial Sequence: Synthetic oligonucleotide
  Antisense strand to SEQ ID NO: 1190636
auccaucagcagaucacua

SEQ ID NO: 1190638 - RNA, 19 nt, Artificial Sequence
  Description of Artificial Sequence: Synthetic oligonucleotide
  Sense strand starting at position 3599 of SEQ ID NO: 916871
ugaucugcugauggaugua

SEQ ID NO: 1190639 - RNA, 19 nt, Artificial Sequence
  Description of Artificial Sequence: Synthetic oligonucleotide
  Antisense strand to SEQ ID NO: 1190638
uacauccaucagcagauca

SEQ ID NO: 1190640 - RNA, 19 nt, Artificial Sequence
  Description of Artificial Sequence: Synthetic oligonucleotide
  Sense strand starting at position 3820 of SEQ ID NO: 916871
aucucuuauccuuacggua

SEQ ID NO: 1190641 - RNA, 19 nt, Artificial Sequence
  Description of Artificial Sequence: Synthetic oligonucleotide
  Antisense strand to SEQ ID NO: 1190640
uaccguaaggauaagagau

SEQ ID NO: 1190642 - RNA, 19 nt, Artificial Sequence
  Description of Artificial Sequence: Synthetic oligonucleotide
  Sense strand starting at position 94 of SEQ ID NO: 916872
gauugacuacagcauagua

SEQ ID NO: 1190643 - RNA, 19 nt, Artificial Sequence
  Description of Artificial Sequence: Synthetic oligonucleotide
  Antisense strand to SEQ ID NO: 1190642
uacuaugcuguagucaauc

SEQ ID NO: 1190644 - RNA, 19 nt, Artificial Sequence
  Description of Artificial Sequence: Synthetic oligonucleotide
  Sense strand starting at position 107 of SEQ ID NO: 916872
auaguauggccauaucucu

SEQ ID NO: 1190645 - RNA, 19 nt, Artificial Sequence
  Description of Artificial Sequence: Synthetic oligonucleotide
  Antisense strand to SEQ ID NO: 1190644
agagauauggccauacuau

SEQ ID NO: 1190646 - RNA, 19 nt, Artificial Sequence
  Description of Artificial Sequence: Synthetic oligonucleotide
  Sense strand starting at position 184 of SEQ ID NO: 916872
cucagaguguauucuuaag

SEQ ID NO: 1190647 - RNA, 19 nt, Artificial Sequence
  Description of Artificial Sequence: Synthetic oligonucleotide
  Antisense strand to SEQ ID NO: 1190646
cuuaagaauacacucugag

SEQ ID NO: 1190648 - RNA, 19 nt, Artificial Sequence
  Description of Artificial Sequence: Synthetic oligonucleotide
  Sense strand starting at position 186 of SEQ ID NO: 916872
cagaguguauucuuaagag

SEQ ID NO: 1190649 - RNA, 19 nt, Artificial Sequence
  Description of Artificial Sequence: Synthetic oligonucleotide
  Antisense strand to SEQ ID NO: 1190648
cucuuaagaauacacucug

SEQ ID NO: 1190650 - RNA, 19 nt, Artificial Sequence
  Description of Artificial Sequence: Synthetic oligonucleotide
  Sense strand starting at position 329 of SEQ ID NO: 916872
gauggaucaugaccucauu

SEQ ID NO: 1190651 - RNA, 19 nt, Artificial Sequence
  Description of Artificial Sequence: Synthetic oligonucleotide
  Antisense strand to SEQ ID NO: 1190650
aaugaggucaugauccauc

SEQ ID NO: 1190652 - RNA, 19 nt, Artificial Sequence
  Description of Artificial Sequence: Synthetic oligonucleotide
  Sense strand starting at position 332 of SEQ ID NO: 916872
ggaucaugaccucauugcu

SEQ ID NO: 1190653 - RNA, 19 nt, Artificial Sequence
  Description of Artificial Sequence: Synthetic oligonucleotide
  Antisense strand to SEQ ID NO: 1190652
agcaaugaggucaugaucc

SEQ ID NO: 1190654 - RNA, 19 nt, Artificial Sequence
  Description of Artificial Sequence: Synthetic oligonucleotide
  Sense strand starting at position 390 of SEQ ID NO: 916872
uuauucgcagagugaaaga

SEQ ID NO: 1190655 - RNA, 19 nt, Artificial Sequence
  Description of Artificial Sequence: Synthetic oligonucleotide
  Antisense strand to SEQ ID NO: 1190654
ucuuucacucugcgaauaa

SEQ ID NO: 1190656 - RNA, 19 nt, Artificial Sequence
  Description of Artificial Sequence: Synthetic oligonucleotide
  Sense strand starting at position 604 of SEQ ID NO: 916872
agagaaaccuaacuugcua

SEQ ID NO: 1190657 - RNA, 19 nt, Artificial Sequence
  Description of Artificial Sequence: Synthetic oligonucleotide
  Antisense strand to SEQ ID NO: 1190656
uagcaaguuagguuucucu

SEQ ID NO: 1190658 - RNA, 19 nt, Artificial Sequence
  Description of Artificial Sequence: Synthetic oligonucleotide
  Sense strand starting at position 649 of SEQ ID NO: 916872
ugauaaacuugugcuuaca

SEQ ID NO: 1190659 - RNA, 19 nt, Artificial Sequence
  Description of Artificial Sequence: Synthetic oligonucleotide
  Antisense strand to SEQ ID NO: 1190658
uguaagcacaaguuuauca

SEQ ID NO: 1190660 - RNA, 19 nt, Artificial Sequence
  Description of Artificial Sequence: Synthetic oligonucleotide
  Sense strand starting at position 1077 of SEQ ID NO: 916872
gcaggcacuagcuauagaa

SEQ ID NO: 1190661 - RNA, 19 nt, Artificial Sequence
  Description of Artificial Sequence: Synthetic oligonucleotide
  Antisense strand to SEQ ID NO: 1190660
uucuauagcuagugccugc

SEQ ID NO: 1190662 - RNA, 19 nt, Artificial Sequence
  Description of Artificial Sequence: Synthetic oligonucleotide
  Sense strand starting at position 1253 of SEQ ID NO: 916872
guugccaaagcuuaaagaa

SEQ ID NO: 1190663 - RNA, 19 nt, Artificial Sequence
  Description of Artificial Sequence: Synthetic oligonucleotide
  Antisense strand to SEQ ID NO: 1190662
uucuuuaagcuuuggcaac

SEQ ID NO: 1190664 - RNA, 19 nt, Artificial Sequence
  Description of Artificial Sequence: Synthetic oligonucleotide
  Sense strand starting at position 1286 of SEQ ID NO: 916872
uggguaauugcauacaaau

SEQ ID NO: 1190665 - RNA, 19 nt, Artificial Sequence
  Description of Artificial Sequence: Synthetic oligonucleotide
  Antisense strand to SEQ ID NO: 1190664
auuuguaugcaauuaccca

SEQ ID NO: 1190666 - RNA, 19 nt, Artificial Sequence
  Description of Artificial Sequence: Synthetic oligonucleotide
  Sense strand starting at position 1309 of SEQ ID NO: 916872
aaagcauuucugugcaaug

SEQ ID NO: 1190667 - RNA, 19 nt, Artificial Sequence
  Description of Artificial Sequence: Synthetic oligonucleotide
  Antisense strand to SEQ ID NO: 1190666
cauugcacagaaaugcuuu

SEQ ID NO: 1190668 - RNA, 19 nt, Artificial Sequence
  Description of Artificial Sequence: Synthetic oligonucleotide
  Sense strand starting at position 1310 of SEQ ID NO: 916872
aagcauuucugugcaauga

SEQ ID NO: 1190669 - RNA, 19 nt, Artificial Sequence
  Description of Artificial Sequence: Synthetic oligonucleotide
  Antisense strand to SEQ ID NO: 1190668
ucauugcacagaaaugcuu

SEQ ID NO: 1190670 - RNA, 19 nt, Artificial Sequence
  Description of Artificial Sequence: Synthetic oligonucleotide
  Sense strand starting at position 1339 of SEQ ID NO: 916872
gagagugacucccacauuu

SEQ ID NO: 1190671 - RNA, 19 nt, Artificial Sequence
  Description of Artificial Sequence: Synthetic oligonucleotide
  Antisense strand to SEQ ID NO: 1190670
aaaugugggagucacucuc

SEQ ID NO: 1190672 - RNA, 19 nt, Artificial Sequence
  Description of Artificial Sequence: Synthetic oligonucleotide
  Sense strand starting at position 1365 of SEQ ID NO: 916872
uuagaaacccugcaagagu

SEQ ID NO: 1190673 - RNA, 19 nt, Artificial Sequence
  Description of Artificial Sequence: Synthetic oligonucleotide
  Antisense strand to SEQ ID NO: 1190672
acucuugcaggguuucuaa

SEQ ID NO: 1190674 - RNA, 19 nt, Artificial Sequence
  Description of Artificial Sequence: Synthetic oligonucleotide
  Sense strand starting at position 1483 of SEQ ID NO: 916872
aggacuaacuugccugaau

SEQ ID NO: 1190675 - RNA, 19 nt, Artificial Sequence
  Description of Artificial Sequence: Synthetic oligonucleotide
  Antisense strand to SEQ ID NO: 1190674
auucaggcaaguuaguccu

SEQ ID NO: 1190676 - RNA, 19 nt, Artificial Sequence
  Description of Artificial Sequence: Synthetic oligonucleotide
  Sense strand starting at position 1484 of SEQ ID NO: 916872
ggacuaacuugccugaauc

SEQ ID NO: 1190677 - RNA, 19 nt, Artificial Sequence
  Description of Artificial Sequence: Synthetic oligonucleotide
  Antisense strand to SEQ ID NO: 1190676
gauucaggcaaguuagucc

SEQ ID NO: 1190678 - RNA, 19 nt, Artificial Sequence
  Description of Artificial Sequence: Synthetic oligonucleotide
  Sense strand starting at position 1501 of SEQ ID NO: 916872
ucaauaauccuguguagac

SEQ ID NO: 1190679 - RNA, 19 nt, Artificial Sequence
  Description of Artificial Sequence: Synthetic oligonucleotide
  Antisense strand to SEQ ID NO: 1190678
gucuacacaggauuauuga

SEQ ID NO: 1190680 - RNA, 19 nt, Artificial Sequence
  Description of Artificial Sequence: Synthetic oligonucleotide
  Sense strand starting at position 1575 of SEQ ID NO: 916872
gcaauauggcauuaauauu

SEQ ID NO: 1190681 - RNA, 19 nt, Artificial Sequence
  Description of Artificial Sequence: Synthetic oligonucleotide
  Antisense strand to SEQ ID NO: 1190680
aauauuaaugccauauugc

SEQ ID NO: 1190682 - RNA, 19 nt, Artificial Sequence
  Description of Artificial Sequence: Synthetic oligonucleotide
  Sense strand starting at position 1765 of SEQ ID NO: 916872
guuccaagcuauuuauguu

SEQ ID NO: 1190683 - RNA, 19 nt, Artificial Sequence
  Description of Artificial Sequence: Synthetic oligonucleotide
  Antisense strand to SEQ ID NO: 1190682
aacauaaauagcuuggaac

SEQ ID NO: 1190684 - RNA, 19 nt, Artificial Sequence
  Description of Artificial Sequence: Synthetic oligonucleotide
  Sense strand starting at position 1792 of SEQ ID NO: 916872
ugauaugucuuacuucuac

SEQ ID NO: 1190685 - RNA, 19 nt, Artificial Sequence
  Description of Artificial Sequence: Synthetic oligonucleotide
  Antisense strand to SEQ ID NO: 1190684
guagaaguaagacauauca

SEQ ID NO: 1190686 - RNA, 19 nt, Artificial Sequence
  Description of Artificial Sequence: Synthetic oligonucleotide
  Sense strand starting at position 1928 of SEQ ID NO: 916872
ccuggaacgcuuuaauaca

SEQ ID NO: 1190687 - RNA, 19 nt, Artificial Sequence
  Description of Artificial Sequence: Synthetic oligonucleotide
  Antisense strand to SEQ ID NO: 1190686
uguauuaaagcguuccagg

SEQ ID NO: 1190688 - RNA, 19 nt, Artificial Sequence
  Description of Artificial Sequence: Synthetic oligonucleotide
  Sense strand starting at position 2020 of SEQ ID NO: 916872
agugacucuuuagugagau

SEQ ID NO: 1190689 - RNA, 19 nt, Artificial Sequence
  Description of Artificial Sequence: Synthetic oligonucleotide
  Antisense strand to SEQ ID NO: 1190688
aucucacuaaagagucacu

SEQ ID NO: 1190690 - RNA, 19 nt, Artificial Sequence
  Description of Artificial Sequence: Synthetic oligonucleotide
  Sense strand starting at position 2481 of SEQ ID NO: 916872
auacguaauagguauagau

SEQ ID NO: 1190691 - RNA, 19 nt, Artificial Sequence
  Description of Artificial Sequence: Synthetic oligonucleotide
  Antisense strand to SEQ ID NO: 1190690
aucuauaccuauuacguau

SEQ ID NO: 1190692 - RNA, 19 nt, Artificial Sequence
  Description of Artificial Sequence: Synthetic oligonucleotide
  Sense strand starting at position 2483 of SEQ ID NO: 916872
acguaauagguauagauau

SEQ ID NO: 1190693 - RNA, 19 nt, Artificial Sequence
  Description of Artificial Sequence: Synthetic oligonucleotide
  Antisense strand to SEQ ID NO: 1190692
auaucuauaccuauuacgu

SEQ ID NO: 1190694 - RNA, 19 nt, Artificial Sequence
  Description of Artificial Sequence: Synthetic oligonucleotide
  Sense strand starting at position 2491 of SEQ ID NO: 916872
gguauagauauauguggaa

SEQ ID NO: 1190695 - RNA, 19 nt, Artificial Sequence
  Description of Artificial Sequence: Synthetic oligonucleotide
  Antisense strand to SEQ ID NO: 1190694
uuccacauauaucuauacc

SEQ ID NO: 1190696 - RNA, 19 nt, Artificial Sequence
  Description of Artificial Sequence: Synthetic oligonucleotide
  Sense strand starting at position 2754 of SEQ ID NO: 916872
uuuaacaagugauccugaa

SEQ ID NO: 1190697 - RNA, 19 nt, Artificial Sequence
  Description of Artificial Sequence: Synthetic oligonucleotide
  Antisense strand to SEQ ID NO: 1190696
uucaggaucacuuguuaaa

SEQ ID NO: 1190698 - RNA, 19 nt, Artificial Sequence
  Description of Artificial Sequence: Synthetic oligonucleotide
  Sense strand starting at position 2846 of SEQ ID NO: 916872
ggcauagucgcugcacuau

SEQ ID NO: 1190699 - RNA, 19 nt, Artificial Sequence
  Description of Artificial Sequence: Synthetic oligonucleotide
  Antisense strand to SEQ ID NO: 1190698
auagugcagcgacuaugcc

SEQ ID NO: 1190700 - RNA, 19 nt, Artificial Sequence
  Description of Artificial Sequence: Synthetic oligonucleotide
  Sense strand starting at position 3012 of SEQ ID NO: 916872
uagcgagagaaguauguuu

SEQ ID NO: 1190701 - RNA, 19 nt, Artificial Sequence
  Description of Artificial Sequence: Synthetic oligonucleotide
  Antisense strand to SEQ ID NO: 1190700
aaacauacuucucucgcua

SEQ ID NO: 1190702 - RNA, 19 nt, Artificial Sequence
  Description of Artificial Sequence: Synthetic oligonucleotide
  Sense strand starting at position 3017 of SEQ ID NO: 916872
agagaaguauguuucugug

SEQ ID NO: 1190703 - RNA, 19 nt, Artificial Sequence
  Description of Artificial Sequence: Synthetic oligonucleotide
  Antisense strand to SEQ ID NO: 1190702
cacagaaacauacuucucu

SEQ ID NO: 1190704 - RNA, 19 nt, Artificial Sequence
  Description of Artificial Sequence: Synthetic oligonucleotide
  Sense strand starting at position 3019 of SEQ ID NO: 916872
agaaguauguuucugugga

SEQ ID NO: 1190705 - RNA, 19 nt, Artificial Sequence
  Description of Artificial Sequence: Synthetic oligonucleotide
  Antisense strand to SEQ ID NO: 1190704
uccacagaaacauacuucu

SEQ ID NO: 1190706 - RNA, 19 nt, Artificial Sequence
  Description of Artificial Sequence: Synthetic oligonucleotide
  Sense strand starting at position 3021 of SEQ ID NO: 916872
aaguauguuucuguggaag

SEQ ID NO: 1190707 - RNA, 19 nt, Artificial Sequence
  Description of Artificial Sequence: Synthetic oligonucleotide
  Antisense strand to SEQ ID NO: 1190706
cuuccacagaaacauacuu

SEQ ID NO: 1190708 - RNA, 19 nt, Artificial Sequence
  Description of Artificial Sequence: Synthetic oligonucleotide
  Sense strand starting at position 3024 of SEQ ID NO: 916872
uauguuucuguggaagaua

SEQ ID NO: 1190709 - RNA, 19 nt, Artificial Sequence
  Description of Artificial Sequence: Synthetic oligonucleotide
  Antisense strand to SEQ ID NO: 1190708
uaucuuccacagaaacaua

SEQ ID NO: 1190710 - RNA, 19 nt, Artificial Sequence
  Description of Artificial Sequence: Synthetic oligonucleotide
  Sense strand starting at position 3138 of SEQ ID NO: 916872
aaugcaauuugcuugguau

SEQ ID NO: 1190711 - RNA, 19 nt, Artificial Sequence
  Description of Artificial Sequence: Synthetic oligonucleotide
  Antisense strand to SEQ ID NO: 1190710
auaccaagcaaauugcauu

SEQ ID NO: 1190712 - RNA, 19 nt, Artificial Sequence
  Description of Artificial Sequence: Synthetic oligonucleotide
  Sense strand starting at position 3139 of SEQ ID NO: 916872
augcaauuugcuugguaug

SEQ ID NO: 1190713 - RNA, 19 nt, Artificial Sequence
  Description of Artificial Sequence: Synthetic oligonucleotide
  Antisense strand to SEQ ID NO: 1190712
cauaccaagcaaauugcau

SEQ ID NO: 1190714 - RNA, 19 nt, Artificial Sequence
  Description of Artificial Sequence: Synthetic oligonucleotide
  Sense strand starting at position 3140 of SEQ ID NO: 916872
ugcaauuugcuugguaugu

SEQ ID NO: 1190715 - RNA, 19 nt, Artificial Sequence
  Description of Artificial Sequence: Synthetic oligonucleotide
  Antisense strand to SEQ ID NO: 1190714
acauaccaagcaaauugca

SEQ ID NO: 1190716 - RNA, 19 nt, Artificial Sequence
  Description of Artificial Sequence: Synthetic oligonucleotide
  Sense strand starting at position 3141 of SEQ ID NO: 916872
gcaauuugcuugguaugua

SEQ ID NO: 1190717 - RNA, 19 nt, Artificial Sequence
  Description of Artificial Sequence: Synthetic oligonucleotide
  Antisense strand to SEQ ID NO: 1190716
uacauaccaagcaaauugc

SEQ ID NO: 1190718 - RNA, 19 nt, Artificial Sequence
  Description of Artificial Sequence: Synthetic oligonucleotide
  Sense strand starting at position 3144 of SEQ ID NO: 916872
auuugcuugguauguaagu

SEQ ID NO: 1190719 - RNA, 19 nt, Artificial Sequence
  Description of Artificial Sequence: Synthetic oligonucleotide
  Antisense strand to SEQ ID NO: 1190718
acuuacauaccaagcaaau

SEQ ID NO: 1190720 - RNA, 19 nt, Artificial Sequence
  Description of Artificial Sequence: Synthetic oligonucleotide
  Sense strand starting at position 3176 of SEQ ID NO: 916872
acagguuauuguucugaac

SEQ ID NO: 1190721 - RNA, 19 nt, Artificial Sequence
  Description of Artificial Sequence: Synthetic oligonucleotide
  Antisense strand to SEQ ID NO: 1190720
guucagaacaauaaccugu

SEQ ID NO: 1190722 - RNA, 19 nt, Artificial Sequence
  Description of Artificial Sequence: Synthetic oligonucleotide
  Sense strand starting at position 134 of SEQ ID NO: 916873
uugcucagcuuaucaaaga

SEQ ID NO: 1190723 - RNA, 19 nt, Artificial Sequence
  Description of Artificial Sequence: Synthetic oligonucleotide
  Antisense strand to SEQ ID NO: 1190722
ucuuugauaagcugagcaa

SEQ ID NO: 1190724 - RNA, 19 nt, Artificial Sequence
  Description of Artificial Sequence: Synthetic oligonucleotide
  Sense strand starting at position 135 of SEQ ID NO: 916873
ugcucagcuuaucaaagaa

SEQ ID NO: 1190725 - RNA, 19 nt, Artificial Sequence
  Description of Artificial Sequence: Synthetic oligonucleotide
  Antisense strand to SEQ ID NO: 1190724
uucuuugauaagcugagca

SEQ ID NO: 1190726 - RNA, 19 nt, Artificial Sequence
  Description of Artificial Sequence: Synthetic oligonucleotide
  Sense strand starting at position 224 of SEQ ID NO: 916873
aggugacuguaagagauaa

SEQ ID NO: 1190727 - RNA, 19 nt, Artificial Sequence
  Description of Artificial Sequence: Synthetic oligonucleotide
  Antisense strand to SEQ ID NO: 1190726
uuaucucuuacagucaccu

SEQ ID NO: 1190728 - RNA, 19 nt, Artificial Sequence
  Description of Artificial Sequence: Synthetic oligonucleotide
  Sense strand starting at position 288 of SEQ ID NO: 916873
agguauauaucucagaaau

SEQ ID NO: 1190729 - RNA, 19 nt, Artificial Sequence
  Description of Artificial Sequence: Synthetic oligonucleotide
  Antisense strand to SEQ ID NO: 1190728
auuucugagauauauaccu

SEQ ID NO: 1190730 - RNA, 19 nt, Artificial Sequence
  Description of Artificial Sequence: Synthetic oligonucleotide
  Sense strand starting at position 290 of SEQ ID NO: 916873
guauauaucucagaaauug

SEQ ID NO: 1190731 - RNA, 19 nt, Artificial Sequence
  Description of Artificial Sequence: Synthetic oligonucleotide
  Antisense strand to SEQ ID NO: 1190730
caauuucugagauauauac

SEQ ID NO: 1190732 - RNA, 19 nt, Artificial Sequence
  Description of Artificial Sequence: Synthetic oligonucleotide
  Sense strand starting at position 467 of SEQ ID NO: 916873
aagcgacauuacuguagua

SEQ ID NO: 1190733 - RNA, 19 nt, Artificial Sequence
  Description of Artificial Sequence: Synthetic oligonucleotide
  Antisense strand to SEQ ID NO: 1190732
uacuacaguaaugucgcuu

SEQ ID NO: 1190734 - RNA, 19 nt, Artificial Sequence
  Description of Artificial Sequence: Synthetic oligonucleotide
  Sense strand starting at position 469 of SEQ ID NO: 916873
gcgacauuacuguaguaaa

SEQ ID NO: 1190735 - RNA, 19 nt, Artificial Sequence
  Description of Artificial Sequence: Synthetic oligonucleotide
  Antisense strand to SEQ ID NO: 1190734
uuuacuacaguaaugucgc

SEQ ID NO: 1190736 - RNA, 19 nt, Artificial Sequence
  Description of Artificial Sequence: Synthetic oligonucleotide
  Sense strand starting at position 526 of SEQ ID NO: 916873
ccuagugcuuaccucuaua

SEQ ID NO: 1190737 - RNA, 19 nt, Artificial Sequence
  Description of Artificial Sequence: Synthetic oligonucleotide
  Antisense strand to SEQ ID NO: 1190736
uauagagguaagcacuagg

SEQ ID NO: 1190738 - RNA, 19 nt, Artificial Sequence
  Description of Artificial Sequence: Synthetic oligonucleotide
  Sense strand starting at position 574 of SEQ ID NO: 916873
guaucaaucuagcaauaag

SEQ ID NO: 1190739 - RNA, 19 nt, Artificial Sequence
  Description of Artificial Sequence: Synthetic oligonucleotide
  Antisense strand to SEQ ID NO: 1190738
cuuauugcuagauugauac

SEQ ID NO: 1190740 - RNA, 19 nt, Artificial Sequence
  Description of Artificial Sequence: Synthetic oligonucleotide
  Sense strand starting at position 680 of SEQ ID NO: 916873
cagaucaggugcuaauaga

SEQ ID NO: 1190741 - RNA, 19 nt, Artificial Sequence
  Description of Artificial Sequence: Synthetic oligonucleotide
  Antisense strand to SEQ ID NO: 1190740
ucuauuagcaccugaucug

SEQ ID NO: 1190742 - RNA, 19 nt, Artificial Sequence
  Description of Artificial Sequence: Synthetic oligonucleotide
  Sense strand starting at position 757 of SEQ ID NO: 916873
guaugucuuucuucccauu

SEQ ID NO: 1190743 - RNA, 19 nt, Artificial Sequence
  Description of Artificial Sequence: Synthetic oligonucleotide
  Antisense strand to SEQ ID NO: 1190742
aaugggaagaaagacauac

SEQ ID NO: 1190744 - RNA, 19 nt, Artificial Sequence
  Description of Artificial Sequence: Synthetic oligonucleotide
  Sense strand starting at position 808 of SEQ ID NO: 916873
uaugaaauguugggucagu

SEQ ID NO: 1190745 - RNA, 19 nt, Artificial Sequence
  Description of Artificial Sequence: Synthetic oligonucleotide
  Antisense strand to SEQ ID NO: 1190744
acugacccaacauuucaua

SEQ ID NO: 1190746 - RNA, 19 nt, Artificial Sequence
  Description of Artificial Sequence: Synthetic oligonucleotide
  Sense strand starting at position 1043 of SEQ ID NO: 916873
gcaagugagcugugaucgu

SEQ ID NO: 1190747 - RNA, 19 nt, Artificial Sequence
  Description of Artificial Sequence: Synthetic oligonucleotide
  Antisense strand to SEQ ID NO: 1190746
acgaucacagcucacuugc

SEQ ID NO: 1190748 - RNA, 19 nt, Artificial Sequence
  Description of Artificial Sequence: Synthetic oligonucleotide
  Sense strand starting at position 1052 of SEQ ID NO: 916873
cugugaucguaccaccaca

SEQ ID NO: 1190749 - RNA, 19 nt, Artificial Sequence
  Description of Artificial Sequence: Synthetic oligonucleotide
  Antisense strand to SEQ ID NO: 1190748
uguggugguacgaucacag

SEQ ID NO: 1190750 - RNA, 19 nt, Artificial Sequence
  Description of Artificial Sequence: Synthetic oligonucleotide
  Sense strand starting at position 1198 of SEQ ID NO: 916873
agagcaagcuauuccugaa

SEQ ID NO: 1190751 - RNA, 19 nt, Artificial Sequence
  Description of Artificial Sequence: Synthetic oligonucleotide
  Antisense strand to SEQ ID NO: 1190750
uucaggaauagcuugcucu

SEQ ID NO: 1190752 - RNA, 19 nt, Artificial Sequence
  Description of Artificial Sequence: Synthetic oligonucleotide
  Sense strand starting at position 1201 of SEQ ID NO: 916873
gcaagcuauuccugaacaa

SEQ ID NO: 1190753 - RNA, 19 nt, Artificial Sequence
  Description of Artificial Sequence: Synthetic oligonucleotide
  Antisense strand to SEQ ID NO: 1190752
uuguucaggaauagcuugc

SEQ ID NO: 1190754 - RNA, 19 nt, Artificial Sequence
  Description of Artificial Sequence: Synthetic oligonucleotide
  Sense strand starting at position 1208 of SEQ ID NO: 916873
auuccugaacaaggugaua

SEQ ID NO: 1190755 - RNA, 19 nt, Artificial Sequence
  Description of Artificial Sequence: Synthetic oligonucleotide
  Antisense strand to SEQ ID NO: 1190754
uaucaccuuguucaggaau

SEQ ID NO: 1190756 - RNA, 19 nt, Artificial Sequence
  Description of Artificial Sequence: Synthetic oligonucleotide
  Sense strand starting at position 1295 of SEQ ID NO: 916873
aguaaauuaucccaucgag

SEQ ID NO: 1190757 - RNA, 19 nt, Artificial Sequence
  Description of Artificial Sequence: Synthetic oligonucleotide
  Antisense strand to SEQ ID NO: 1190756
cucgaugggauaauuuacu

SEQ ID NO: 1190758 - RNA, 19 nt, Artificial Sequence
  Description of Artificial Sequence: Synthetic oligonucleotide
  Sense strand starting at position 1298 of SEQ ID NO: 916873
aaauuaucccaucgagagg

SEQ ID NO: 1190759 - RNA, 19 nt, Artificial Sequence
  Description of Artificial Sequence: Synthetic oligonucleotide
  Antisense strand to SEQ ID NO: 1190758
ccucucgaugggauaauuu

SEQ ID NO: 1190760 - RNA, 19 nt, Artificial Sequence
  Description of Artificial Sequence: Synthetic oligonucleotide
  Sense strand starting at position 1307 of SEQ ID NO: 916873
caucgagaggcuuguauaa

SEQ ID NO: 1190761 - RNA, 19 nt, Artificial Sequence
  Description of Artificial Sequence: Synthetic oligonucleotide
  Antisense strand to SEQ ID NO: 1190760
uuauacaagccucucgaug

SEQ ID NO: 1190762 - RNA, 19 nt, Artificial Sequence
  Description of Artificial Sequence: Synthetic oligonucleotide
  Sense strand starting at position 1309 of SEQ ID NO: 916873
ucgagaggcuuguauaaca

SEQ ID NO: 1190763 - RNA, 19 nt, Artificial Sequence
  Description of Artificial Sequence: Synthetic oligonucleotide
  Antisense strand to SEQ ID NO: 1190762
uguuauacaagccucucga

SEQ ID NO: 1190764 - RNA, 19 nt, Artificial Sequence
  Description of Artificial Sequence: Synthetic oligonucleotide
  Sense strand starting at position 1464 of SEQ ID NO: 916873
cuuaccaucuugucaggaa

SEQ ID NO: 1190765 - RNA, 19 nt, Artificial Sequence
  Description of Artificial Sequence: Synthetic oligonucleotide
  Antisense strand to SEQ ID NO: 1190764
uuccugacaagaugguaag

SEQ ID NO: 1190766 - RNA, 19 nt, Artificial Sequence
  Description of Artificial Sequence: Synthetic oligonucleotide
  Sense strand starting at position 1479 of SEQ ID NO: 916873
ggaagaugaugauaguaac

SEQ ID NO: 1190767 - RNA, 19 nt, Artificial Sequence
  Description of Artificial Sequence: Synthetic oligonucleotide
  Antisense strand to SEQ ID NO: 1190766
guuacuaucaucaucuucc

SEQ ID NO: 1190768 - RNA, 19 nt, Artificial Sequence
  Description of Artificial Sequence: Synthetic oligonucleotide
  Sense strand starting at position 1482 of SEQ ID NO: 916873
agaugaugauaguaacaua

SEQ ID NO: 1190769 - RNA, 19 nt, Artificial Sequence
  Description of Artificial Sequence: Synthetic oligonucleotide
  Antisense strand to SEQ ID NO: 1190768
uauguuacuaucaucaucu

SEQ ID NO: 1190770 - RNA, 19 nt, Artificial Sequence
  Description of Artificial Sequence: Synthetic oligonucleotide
  Sense strand starting at position 1485 of SEQ ID NO: 916873
ugaugauaguaacauagca

SEQ ID NO: 1190771 - RNA, 19 nt, Artificial Sequence
  Description of Artificial Sequence: Synthetic oligonucleotide
  Antisense strand to SEQ ID NO: 1190770
ugcuauguuacuaucauca

SEQ ID NO: 1190772 - RNA, 19 nt, Artificial Sequence
  Description of Artificial Sequence: Synthetic oligonucleotide
  Sense strand starting at position 1520 of SEQ ID NO: 916873
ccguaagugugcugugaaa

SEQ ID NO: 1190773 - RNA, 19 nt, Artificial Sequence
  Description of Artificial Sequence: Synthetic oligonucleotide
  Antisense strand to SEQ ID NO: 1190772
uuucacagcacacuuacgg

SEQ ID NO: 1190774 - RNA, 19 nt, Artificial Sequence
  Description of Artificial Sequence: Synthetic oligonucleotide
  Sense strand starting at position 1522 of SEQ ID NO: 916873
guaagugugcugugaaaua

SEQ ID NO: 1190775 - RNA, 19 nt, Artificial Sequence
  Description of Artificial Sequence: Synthetic oligonucleotide
  Antisense strand to SEQ ID NO: 1190774
uauuucacagcacacuuac

SEQ ID NO: 1190776 - RNA, 19 nt, Artificial Sequence
  Description of Artificial Sequence: Synthetic oligonucleotide
  Sense strand starting at position 3669 of SEQ ID NO: 916873
gugugcaguauucgggaga

SEQ ID NO: 1190777 - RNA, 19 nt, Artificial Sequence
  Description of Artificial Sequence: Synthetic oligonucleotide
  Antisense strand to SEQ ID NO: 1190776
ucucccgaauacugcacac

SEQ ID NO: 1190778 - RNA, 19 nt, Artificial Sequence
  Description of Artificial Sequence: Synthetic oligonucleotide
  Sense strand starting at position 3674 of SEQ ID NO: 916873
caguauucgggagacccau

SEQ ID NO: 1190779 - RNA, 19 nt, Artificial Sequence
  Description of Artificial Sequence: Synthetic oligonucleotide
  Antisense strand to SEQ ID NO: 1190778
augggucucccgaauacug

SEQ ID NO: 1190780 - RNA, 19 nt, Artificial Sequence
  Description of Artificial Sequence: Synthetic oligonucleotide
  Sense strand starting at position 1442 of SEQ ID NO: 916874
uguaucaaacuugaguuga

SEQ ID NO: 1190781 - RNA, 19 nt, Artificial Sequence
  Description of Artificial Sequence: Synthetic oligonucleotide
  Antisense strand to SEQ ID NO: 1190780
ucaacucaaguuugauaca

SEQ ID NO: 1190782 - RNA, 19 nt, Artificial Sequence
  Description of Artificial Sequence: Synthetic oligonucleotide
  Sense strand starting at position 1465 of SEQ ID NO: 916874
aggaaacugaggugguuau

SEQ ID NO: 1190783 - RNA, 19 nt, Artificial Sequence
  Description of Artificial Sequence: Synthetic oligonucleotide
  Antisense strand to SEQ ID NO: 1190782
auaaccaccucaguuuccu

SEQ ID NO: 1190784 - RNA, 19 nt, Artificial Sequence
  Description of Artificial Sequence: Synthetic oligonucleotide
  Sense strand starting at position 1469 of SEQ ID NO: 916874
aacugaggugguuauguga

SEQ ID NO: 1190785 - RNA, 19 nt, Artificial Sequence
  Description of Artificial Sequence: Synthetic oligonucleotide
  Antisense strand to SEQ ID NO: 1190784
ucacauaaccaccucaguu

SEQ ID NO: 1190786 - RNA, 19 nt, Artificial Sequence
  Description of Artificial Sequence: Synthetic oligonucleotide
  Sense strand starting at position 1600 of SEQ ID NO: 916874
cagucaauguaguugacaa

SEQ ID NO: 1190787 - RNA, 19 nt, Artificial Sequence
  Description of Artificial Sequence: Synthetic oligonucleotide
  Antisense strand to SEQ ID NO: 1190786
uugucaacuacauugacug

SEQ ID NO: 1190788 - RNA, 19 nt, Artificial Sequence
  Description of Artificial Sequence: Synthetic oligonucleotide
  Sense strand starting at position 1703 of SEQ ID NO: 916874
agaccaagauuugaaacuu

SEQ ID NO: 1190789 - RNA, 19 nt, Artificial Sequence
  Description of Artificial Sequence: Synthetic oligonucleotide
  Antisense strand to SEQ ID NO: 1190788
aaguuucaaaucuuggucu

SEQ ID NO: 1190790 - RNA, 19 nt, Artificial Sequence
  Description of Artificial Sequence: Synthetic oligonucleotide
  Sense strand starting at position 1937 of SEQ ID NO: 916874
agagaaucucaaugguucu

SEQ ID NO: 1190791 - RNA, 19 nt, Artificial Sequence
  Description of Artificial Sequence: Synthetic oligonucleotide
  Antisense strand to SEQ ID NO: 1190790
agaaccauugagauucucu

SEQ ID NO: 1190792 - RNA, 19 nt, Artificial Sequence
  Description of Artificial Sequence: Synthetic oligonucleotide
  Sense strand starting at position 1947 of SEQ ID NO: 916874
aaugguucuuaccuggauu

SEQ ID NO: 1190793 - RNA, 19 nt, Artificial Sequence
  Description of Artificial Sequence: Synthetic oligonucleotide
  Antisense strand to SEQ ID NO: 1190792
aauccagguaagaaccauu

SEQ ID NO: 1190794 - RNA, 19 nt, Artificial Sequence
  Description of Artificial Sequence: Synthetic oligonucleotide
  Sense strand starting at position 2030 of SEQ ID NO: 916874
aaacaaguccagugaugau

SEQ ID NO: 1190795 - RNA, 19 nt, Artificial Sequence
  Description of Artificial Sequence: Synthetic oligonucleotide
  Antisense strand to SEQ ID NO: 1190794
aucaucacuggacuuguuu

SEQ ID NO: 1190796 - RNA, 19 nt, Artificial Sequence
  Description of Artificial Sequence: Synthetic oligonucleotide
  Sense strand starting at position 2062 of SEQ ID NO: 916874
augucauugcucuagucaa

SEQ ID NO: 1190797 - RNA, 19 nt, Artificial Sequence
  Description of Artificial Sequence: Synthetic oligonucleotide
  Antisense strand to SEQ ID NO: 1190796
uugacuagagcaaugacau

SEQ ID NO: 1190798 - RNA, 19 nt, Artificial Sequence
  Description of Artificial Sequence: Synthetic oligonucleotide
  Sense strand starting at position 2222 of SEQ ID NO: 916874
aauuaaguugguggcauaa

SEQ ID NO: 1190799 - RNA, 19 nt, Artificial Sequence
  Description of Artificial Sequence: Synthetic oligonucleotide
  Antisense strand to SEQ ID NO: 1190798
uuaugccaccaacuuaauu

SEQ ID NO: 1190800 - RNA, 19 nt, Artificial Sequence
  Description of Artificial Sequence: Synthetic oligonucleotide
  Sense strand starting at position 2385 of SEQ ID NO: 916874
acauaaguaugguucuaac

SEQ ID NO: 1190801 - RNA, 19 nt, Artificial Sequence
  Description of Artificial Sequence: Synthetic oligonucleotide
  Antisense strand to SEQ ID NO: 1190800
guuagaaccauacuuaugu

SEQ ID NO: 1190802 - RNA, 19 nt, Artificial Sequence
  Description of Artificial Sequence: Synthetic oligonucleotide
  Sense strand starting at position 2487 of SEQ ID NO: 916874
uuaagacugcuuuaugcga

SEQ ID NO: 1190803 - RNA, 19 nt, Artificial Sequence
  Description of Artificial Sequence: Synthetic oligonucleotide
  Antisense strand to SEQ ID NO: 1190802
ucgcauaaagcagucuuaa

SEQ ID NO: 1190804 - RNA, 19 nt, Artificial Sequence
  Description of Artificial Sequence: Synthetic oligonucleotide
  Sense strand starting at position 2502 of SEQ ID NO: 916874
gcgauagauucuuuacauc

SEQ ID NO: 1190805 - RNA, 19 nt, Artificial Sequence
  Description of Artificial Sequence: Synthetic oligonucleotide
  Antisense strand to SEQ ID NO: 1190804
gauguaaagaaucuaucgc

SEQ ID NO: 1190806 - RNA, 19 nt, Artificial Sequence
  Description of Artificial Sequence: Synthetic oligonucleotide
  Sense strand starting at position 2581 of SEQ ID NO: 916874
ggaagagcuuaacucaguu

SEQ ID NO: 1190807 - RNA, 19 nt, Artificial Sequence
  Description of Artificial Sequence: Synthetic oligonucleotide
  Antisense strand to SEQ ID NO: 1190806
aacugaguuaagcucuucc

SEQ ID NO: 1190808 - RNA, 19 nt, Artificial Sequence
  Description of Artificial Sequence: Synthetic oligonucleotide
  Sense strand starting at position 2744 of SEQ ID NO: 916874
ugugaagauauauguaugu

SEQ ID NO: 1190809 - RNA, 19 nt, Artificial Sequence
  Description of Artificial Sequence: Synthetic oligonucleotide
  Antisense strand to SEQ ID NO: 1190808
acauacauauaucuucaca

SEQ ID NO: 1190810 - RNA, 19 nt, Artificial Sequence
  Description of Artificial Sequence: Synthetic oligonucleotide
  Sense strand starting at position 2836 of SEQ ID NO: 916874
ugguaaugugaggaugcau

SEQ ID NO: 1190811 - RNA, 19 nt, Artificial Sequence
  Description of Artificial Sequence: Synthetic oligonucleotide
  Antisense strand to SEQ ID NO: 1190810
augcauccucacauuacca

SEQ ID NO: 1190812 - RNA, 19 nt, Artificial Sequence
  Description of Artificial Sequence: Synthetic oligonucleotide
  Sense strand starting at position 2918 of SEQ ID NO: 916874
guauuugaugucugugcca

SEQ ID NO: 1190813 - RNA, 19 nt, Artificial Sequence
  Description of Artificial Sequence: Synthetic oligonucleotide
  Antisense strand to SEQ ID NO: 1190812
uggcacagacaucaaauac

SEQ ID NO: 1190814 - RNA, 19 nt, Artificial Sequence
  Description of Artificial Sequence: Synthetic oligonucleotide
  Sense strand starting at position 2920 of SEQ ID NO: 916874
auuugaugucugugccaca

SEQ ID NO: 1190815 - RNA, 19 nt, Artificial Sequence
  Description of Artificial Sequence: Synthetic oligonucleotide
  Antisense strand to SEQ ID NO: 1190814
uguggcacagacaucaaau

SEQ ID NO: 1190816 - RNA, 19 nt, Artificial Sequence
  Description of Artificial Sequence: Synthetic oligonucleotide
  Sense strand starting at position 2936 of SEQ ID NO: 916874
acaguuaucugauugauua

SEQ ID NO: 1190817 - RNA, 19 nt, Artificial Sequence
  Description of Artificial Sequence: Synthetic oligonucleotide
  Antisense strand to SEQ ID NO: 1190816
uaaucaaucagauaacugu

SEQ ID NO: 1190818 - RNA, 19 nt, Artificial Sequence
  Description of Artificial Sequence: Synthetic oligonucleotide
  Sense strand starting at position 2937 of SEQ ID NO: 916874
caguuaucugauugauuag

SEQ ID NO: 1190819 - RNA, 19 nt, Artificial Sequence
  Description of Artificial Sequence: Synthetic oligonucleotide
  Antisense strand to SEQ ID NO: 1190818
cuaaucaaucagauaacug

SEQ ID NO: 1190820 - RNA, 19 nt, Artificial Sequence
  Description of Artificial Sequence: Synthetic oligonucleotide
  Sense strand starting at position 2943 of SEQ ID NO: 916874
ucugauugauuaguucuau

SEQ ID NO: 1190821 - RNA, 19 nt, Artificial Sequence
  Description of Artificial Sequence: Synthetic oligonucleotide
  Antisense strand to SEQ ID NO: 1190820
auagaacuaaucaaucaga

SEQ ID NO: 1190822 - RNA, 19 nt, Artificial Sequence
  Description of Artificial Sequence: Synthetic oligonucleotide
  Sense strand starting at position 2944 of SEQ ID NO: 916874
cugauugauuaguucuauu

SEQ ID NO: 1190823 - RNA, 19 nt, Artificial Sequence
  Description of Artificial Sequence: Synthetic oligonucleotide
  Antisense strand to SEQ ID NO: 1190822
aauagaacuaaucaaucag

SEQ ID NO: 1190824 - RNA, 19 nt, Artificial Sequence
  Description of Artificial Sequence: Synthetic oligonucleotide
  Sense strand starting at position 3022 of SEQ ID NO: 916874
gaagaaugacugugcagaa

SEQ ID NO: 1190825 - RNA, 19 nt, Artificial Sequence
  Description of Artificial Sequence: Synthetic oligonucleotide
  Antisense strand to SEQ ID NO: 1190824
uucugcacagucauucuuc

SEQ ID NO: 1190826 - RNA, 19 nt, Artificial Sequence
  Description of Artificial Sequence: Synthetic oligonucleotide
  Sense strand starting at position 3083 of SEQ ID NO: 916874
uccaaauacucugcugagu

SEQ ID NO: 1190827 - RNA, 19 nt, Artificial Sequence
  Description of Artificial Sequence: Synthetic oligonucleotide
  Antisense strand to SEQ ID NO: 1190826
acucagcagaguauuugga

SEQ ID NO: 1190828 - RNA, 19 nt, Artificial Sequence
  Description of Artificial Sequence: Synthetic oligonucleotide
  Sense strand starting at position 3088 of SEQ ID NO: 916874
auacucugcugaguaagaa

SEQ ID NO: 1190829 - RNA, 19 nt, Artificial Sequence
  Description of Artificial Sequence: Synthetic oligonucleotide
  Antisense strand to SEQ ID NO: 1190828
uucuuacucagcagaguau

SEQ ID NO: 1190830 - RNA, 19 nt, Artificial Sequence
  Description of Artificial Sequence: Synthetic oligonucleotide
  Sense strand starting at position 3149 of SEQ ID NO: 916874
agcagauucuggcucagga

SEQ ID NO: 1190831 - RNA, 19 nt, Artificial Sequence
  Description of Artificial Sequence: Synthetic oligonucleotide
  Antisense strand to SEQ ID NO: 1190830
uccugagccagaaucugcu

SEQ ID NO: 1190832 - RNA, 19 nt, Artificial Sequence
  Description of Artificial Sequence: Synthetic oligonucleotide
  Sense strand starting at position 3292 of SEQ ID NO: 916874
gggaauacaguuuggguuu

SEQ ID NO: 1190833 - RNA, 19 nt, Artificial Sequence
  Description of Artificial Sequence: Synthetic oligonucleotide
  Antisense strand to SEQ ID NO: 1190832
aaacccaaacuguauuccc

SEQ ID NO: 1190834 - RNA, 19 nt, Artificial Sequence
  Description of Artificial Sequence: Synthetic oligonucleotide
  Sense strand starting at position 3357 of SEQ ID NO: 916874
acaucaacauguuuggaga

SEQ ID NO: 1190835 - RNA, 19 nt, Artificial Sequence
  Description of Artificial Sequence: Synthetic oligonucleotide
  Antisense strand to SEQ ID NO: 1190834
ucuccaaacauguugaugu

SEQ ID NO: 1190836 - RNA, 19 nt, Artificial Sequence
  Description of Artificial Sequence: Synthetic oligonucleotide
  Sense strand starting at position 3432 of SEQ ID NO: 916874
uuauaauccugagcuaaag

SEQ ID NO: 1190837 - RNA, 19 nt, Artificial Sequence
  Description of Artificial Sequence: Synthetic oligonucleotide
  Antisense strand to SEQ ID NO: 1190836
cuuuagcucaggauuauaa

SEQ ID NO: 1190838 - RNA, 19 nt, Artificial Sequence
  Description of Artificial Sequence: Synthetic oligonucleotide
  Sense strand starting at position 3515 of SEQ ID NO: 916874
cuuccuaauuguguaaaua

SEQ ID NO: 1190839 - RNA, 19 nt, Artificial Sequence
  Description of Artificial Sequence: Synthetic oligonucleotide
  Antisense strand to SEQ ID NO: 1190838
uauuuacacaauuaggaag

SEQ ID NO: 1190840 - RNA, 19 nt, Artificial Sequence
  Description of Artificial Sequence: Synthetic oligonucleotide
  Sense strand starting at position 3630 of SEQ ID NO: 916874
ccacgcaucaguuagauga

SEQ ID NO: 1190841 - RNA, 19 nt, Artificial Sequence
  Description of Artificial Sequence: Synthetic oligonucleotide
  Antisense strand to SEQ ID NO: 1190840
ucaucuaacugaugcgugg

SEQ ID NO: 1190842 - RNA, 19 nt, Artificial Sequence
  Description of Artificial Sequence: Synthetic oligonucleotide
  Sense strand starting at position 3659 of SEQ ID NO: 916874
uuuaaagaaucagcugaua

SEQ ID NO: 1190843 - RNA, 19 nt, Artificial Sequence
  Description of Artificial Sequence: Synthetic oligonucleotide
  Antisense strand to SEQ ID NO: 1190842
uaucagcugauucuuuaaa

SEQ ID NO: 1190844 - RNA, 19 nt, Artificial Sequence
  Description of Artificial Sequence: Synthetic oligonucleotide
  Sense strand starting at position 3694 of SEQ ID NO: 916874
cuaucacagcucugaugaa

SEQ ID NO: 1190845 - RNA, 19 nt, Artificial Sequence
  Description of Artificial Sequence: Synthetic oligonucleotide
  Antisense strand to SEQ ID NO: 1190844
uucaucagagcugugauag

SEQ ID NO: 1190846 - RNA, 19 nt, Artificial Sequence
  Description of Artificial Sequence: Synthetic oligonucleotide
  Sense strand starting at position 3708 of SEQ ID NO: 916874
augaaauaucauggccuuu

SEQ ID NO: 1190847 - RNA, 19 nt, Artificial Sequence
  Description of Artificial Sequence: Synthetic oligonucleotide
  Antisense strand to SEQ ID NO: 1190846
aaaggccaugauauuucau

SEQ ID NO: 1190848 - RNA, 19 nt, Artificial Sequence
  Description of Artificial Sequence: Synthetic oligonucleotide
  Sense strand starting at position 3721 of SEQ ID NO: 916874
gccuuugaagucugaaaga

SEQ ID NO: 1190849 - RNA, 19 nt, Artificial Sequence
  Description of Artificial Sequence: Synthetic oligonucleotide
  Antisense strand to SEQ ID NO: 1190848
ucuuucagacuucaaaggc

SEQ ID NO: 1190850 - RNA, 19 nt, Artificial Sequence
  Description of Artificial Sequence: Synthetic oligonucleotide
  Sense strand starting at position 3738 of SEQ ID NO: 916874
gacuuaaaugccgauaugu

SEQ ID NO: 1190851 - RNA, 19 nt, Artificial Sequence
  Description of Artificial Sequence: Synthetic oligonucleotide
  Antisense strand to SEQ ID NO: 1190850
acauaucggcauuuaaguc

SEQ ID NO: 1190852 - RNA, 19 nt, Artificial Sequence
  Description of Artificial Sequence: Synthetic oligonucleotide
  Sense strand starting at position 3740 of SEQ ID NO: 916874
cuuaaaugccgauaugucu

SEQ ID NO: 1190853 - RNA, 19 nt, Artificial Sequence
  Description of Artificial Sequence: Synthetic oligonucleotide
  Antisense strand to SEQ ID NO: 1190852
agacauaucggcauuuaag

SEQ ID NO: 1190854 - RNA, 19 nt, Artificial Sequence
  Description of Artificial Sequence: Synthetic oligonucleotide
  Sense strand starting at position 3746 of SEQ ID NO: 916874
ugccgauaugucucugcua

SEQ ID NO: 1190855 - RNA, 19 nt, Artificial Sequence
  Description of Artificial Sequence: Synthetic oligonucleotide
  Antisense strand to SEQ ID NO: 1190854
uagcagagacauaucggca

SEQ ID NO: 1190856 - RNA, 19 nt, Artificial Sequence
  Description of Artificial Sequence: Synthetic oligonucleotide
  Sense strand starting at position 3775 of SEQ ID NO: 916874
guauaaacaucaguagguu

SEQ ID NO: 1190857 - RNA, 19 nt, Artificial Sequence
  Description of Artificial Sequence: Synthetic oligonucleotide
  Antisense strand to SEQ ID NO: 1190856
aaccuacugauguuuauac

SEQ ID NO: 1190858 - RNA, 19 nt, Artificial Sequence
  Description of Artificial Sequence: Synthetic oligonucleotide
  Sense strand starting at position 3868 of SEQ ID NO: 916874
uguaaagugccuuacauaa

SEQ ID NO: 1190859 - RNA, 19 nt, Artificial Sequence
  Description of Artificial Sequence: Synthetic oligonucleotide
  Antisense strand to SEQ ID NO: 1190858
uuauguaaggcacuuuaca

SEQ ID NO: 1190860 - RNA, 19 nt, Artificial Sequence
  Description of Artificial Sequence: Synthetic oligonucleotide
  Sense strand starting at position 12 of SEQ ID NO: 916875
auguccauucuuggaauca

SEQ ID NO: 1190861 - RNA, 19 nt, Artificial Sequence
  Description of Artificial Sequence: Synthetic oligonucleotide
  Antisense strand to SEQ ID NO: 1190860
ugauuccaagaauggacau

SEQ ID NO: 1190862 - RNA, 19 nt, Artificial Sequence
  Description of Artificial Sequence: Synthetic oligonucleotide
  Sense strand starting at position 136 of SEQ ID NO: 916875
uaagcacuugcagauguau

SEQ ID NO: 1190863 - RNA, 19 nt, Artificial Sequence
  Description of Artificial Sequence: Synthetic oligonucleotide
  Antisense strand to SEQ ID NO: 1190862
auacaucugcaagugcuua

SEQ ID NO: 1190864 - RNA, 19 nt, Artificial Sequence
  Description of Artificial Sequence: Synthetic oligonucleotide
  Sense strand starting at position 234 of SEQ ID NO: 916875
ggcuguaaugcggcuccaa

SEQ ID NO: 1190865 - RNA, 19 nt, Artificial Sequence
  Description of Artificial Sequence: Synthetic oligonucleotide
  Antisense strand to SEQ ID NO: 1190864
uuggagccgcauuacagcc

SEQ ID NO: 1190866 - RNA, 19 nt, Artificial Sequence
  Description of Artificial Sequence: Synthetic oligonucleotide
  Sense strand starting at position 235 of SEQ ID NO: 916875
gcuguaaugcggcuccaaa

SEQ ID NO: 1190867 - RNA, 19 nt, Artificial Sequence
  Description of Artificial Sequence: Synthetic oligonucleotide
  Antisense strand to SEQ ID NO: 1190866
uuuggagccgcauuacagc

SEQ ID NO: 1190868 - RNA, 19 nt, Artificial Sequence
  Description of Artificial Sequence: Synthetic oligonucleotide
  Sense strand starting at position 360 of SEQ ID NO: 916875
uucuguuauuucccguacu

SEQ ID NO: 1190869 - RNA, 19 nt, Artificial Sequence
  Description of Artificial Sequence: Synthetic oligonucleotide
  Antisense strand to SEQ ID NO: 1190868
aguacgggaaauaacagaa

SEQ ID NO: 1190870 - RNA, 19 nt, Artificial Sequence
  Description of Artificial Sequence: Synthetic oligonucleotide
  Sense strand starting at position 363 of SEQ ID NO: 916875
uguuauuucccguacuuuc

SEQ ID NO: 1190871 - RNA, 19 nt, Artificial Sequence
  Description of Artificial Sequence: Synthetic oligonucleotide
  Antisense strand to SEQ ID NO: 1190870
gaaaguacgggaaauaaca

SEQ ID NO: 1190872 - RNA, 19 nt, Artificial Sequence
  Description of Artificial Sequence: Synthetic oligonucleotide
  Sense strand starting at position 373 of SEQ ID NO: 916875
cguacuuuccaagacaacu

SEQ ID NO: 1190873 - RNA, 19 nt, Artificial Sequence
  Description of Artificial Sequence: Synthetic oligonucleotide
  Antisense strand to SEQ ID NO: 1190872
aguugucuuggaaaguacg

SEQ ID NO: 1190874 - RNA, 19 nt, Artificial Sequence
  Description of Artificial Sequence: Synthetic oligonucleotide
  Sense strand starting at position 441 of SEQ ID NO: 916875
auaagaaaugugggcacuu

SEQ ID NO: 1190875 - RNA, 19 nt, Artificial Sequence
  Description of Artificial Sequence: Synthetic oligonucleotide
  Antisense strand to SEQ ID NO: 1190874
aagugcccacauuucuuau

SEQ ID NO: 1190876 - RNA, 19 nt, Artificial Sequence
  Description of Artificial Sequence: Synthetic oligonucleotide
  Sense strand starting at position 460 of SEQ ID NO: 916875
gguuucucaucucucagaa

SEQ ID NO: 1190877 - RNA, 19 nt, Artificial Sequence
  Description of Artificial Sequence: Synthetic oligonucleotide
  Antisense strand to SEQ ID NO: 1190876
uucugagagaugagaaacc

SEQ ID NO: 1190878 - RNA, 19 nt, Artificial Sequence
  Description of Artificial Sequence: Synthetic oligonucleotide
  Sense strand starting at position 1004 of SEQ ID NO: 916875
ggcauuuguaugcagcauu

SEQ ID NO: 1190879 - RNA, 19 nt, Artificial Sequence
  Description of Artificial Sequence: Synthetic oligonucleotide
  Antisense strand to SEQ ID NO: 1190878
aaugcugcauacaaaugcc

SEQ ID NO: 1190880 - RNA, 19 nt, Artificial Sequence
  Description of Artificial Sequence: Synthetic oligonucleotide
  Sense strand starting at position 1287 of SEQ ID NO: 916875
auaacugucuuaucaggga

SEQ ID NO: 1190881 - RNA, 19 nt, Artificial Sequence
  Description of Artificial Sequence: Synthetic oligonucleotide
  Antisense strand to SEQ ID NO: 1190880
ucccugauaagacaguuau

SEQ ID NO: 1190882 - RNA, 19 nt, Artificial Sequence
  Description of Artificial Sequence: Synthetic oligonucleotide
  Sense strand starting at position 1292 of SEQ ID NO: 916875
ugucuuaucagggaagcca

SEQ ID NO: 1190883 - RNA, 19 nt, Artificial Sequence
  Description of Artificial Sequence: Synthetic oligonucleotide
  Antisense strand to SEQ ID NO: 1190882
uggcuucccugauaagaca

SEQ ID NO: 1190884 - RNA, 19 nt, Artificial Sequence
  Description of Artificial Sequence: Synthetic oligonucleotide
  Sense strand starting at position 1364 of SEQ ID NO: 916875
aagagcugugcccagaaga

SEQ ID NO: 1190885 - RNA, 19 nt, Artificial Sequence
  Description of Artificial Sequence: Synthetic oligonucleotide
  Antisense strand to SEQ ID NO: 1190884
ucuucugggcacagcucuu

SEQ ID NO: 1190886 - RNA, 19 nt, Artificial Sequence
  Description of Artificial Sequence: Synthetic oligonucleotide
  Sense strand starting at position 1473 of SEQ ID NO: 916875
ugaggugauuaagugacuu

SEQ ID NO: 1190887 - RNA, 19 nt, Artificial Sequence
  Description of Artificial Sequence: Synthetic oligonucleotide
  Antisense strand to SEQ ID NO: 1190886
aagucacuuaaucaccuca

SEQ ID NO: 1190888 - RNA, 19 nt, Artificial Sequence
  Description of Artificial Sequence: Synthetic oligonucleotide
  Sense strand starting at position 1477 of SEQ ID NO: 916875
gugauuaagugacuuugaa

SEQ ID NO: 1190889 - RNA, 19 nt, Artificial Sequence
  Description of Artificial Sequence: Synthetic oligonucleotide
  Antisense strand to SEQ ID NO: 1190888
uucaaagucacuuaaucac

SEQ ID NO: 1190890 - RNA, 19 nt, Artificial Sequence
  Description of Artificial Sequence: Synthetic oligonucleotide
  Sense strand starting at position 1561 of SEQ ID NO: 916875
gggagccugguauaguaau

SEQ ID NO: 1190891 - RNA, 19 nt, Artificial Sequence
  Description of Artificial Sequence: Synthetic oligonucleotide
  Antisense strand to SEQ ID NO: 1190890
auuacuauaccaggcuccc

SEQ ID NO: 1190892 - RNA, 19 nt, Artificial Sequence
  Description of Artificial Sequence: Synthetic oligonucleotide
  Sense strand starting at position 1774 of SEQ ID NO: 916875
aagggauauuuacaaggcu

SEQ ID NO: 1190893 - RNA, 19 nt, Artificial Sequence
  Description of Artificial Sequence: Synthetic oligonucleotide
  Antisense strand to SEQ ID NO: 1190892
agccuuguaaauaucccuu

SEQ ID NO: 1190894 - RNA, 19 nt, Artificial Sequence
  Description of Artificial Sequence: Synthetic oligonucleotide
  Sense strand starting at position 1790 of SEQ ID NO: 916875
gcuuuaagggcucagaaca

SEQ ID NO: 1190895 - RNA, 19 nt, Artificial Sequence
  Description of Artificial Sequence: Synthetic oligonucleotide
  Antisense strand to SEQ ID NO: 1190894
uguucugagcccuuaaagc

SEQ ID NO: 1190896 - RNA, 19 nt, Artificial Sequence
  Description of Artificial Sequence: Synthetic oligonucleotide
  Sense strand starting at position 1991 of SEQ ID NO: 916875
guuaaagucucacuuuaaa

SEQ ID NO: 1190897 - RNA, 19 nt, Artificial Sequence
  Description of Artificial Sequence: Synthetic oligonucleotide
  Antisense strand to SEQ ID NO: 1190896
uuuaaagugagacuuuaac

SEQ ID NO: 1190898 - RNA, 19 nt, Artificial Sequence
  Description of Artificial Sequence: Synthetic oligonucleotide
  Sense strand starting at position 2039 of SEQ ID NO: 916875
uuaugaguccaaugaugau

SEQ ID NO: 1190899 - RNA, 19 nt, Artificial Sequence
  Description of Artificial Sequence: Synthetic oligonucleotide
  Antisense strand to SEQ ID NO: 1190898
aucaucauuggacucauaa

SEQ ID NO: 1190900 - RNA, 19 nt, Artificial Sequence
  Description of Artificial Sequence: Synthetic oligonucleotide
  Sense strand starting at position 2045 of SEQ ID NO: 916875
guccaaugaugauuaacca

SEQ ID NO: 1190901 - RNA, 19 nt, Artificial Sequence
  Description of Artificial Sequence: Synthetic oligonucleotide
  Antisense strand to SEQ ID NO: 1190900
ugguuaaucaucauuggac

SEQ ID NO: 1190902 - RNA, 19 nt, Artificial Sequence
  Description of Artificial Sequence: Synthetic oligonucleotide
  Sense strand starting at position 2395 of SEQ ID NO: 916875
uuguuacauguguauggau

SEQ ID NO: 1190903 - RNA, 19 nt, Artificial Sequence
  Description of Artificial Sequence: Synthetic oligonucleotide
  Antisense strand to SEQ ID NO: 1190902
auccauacacauguaacaa

SEQ ID NO: 1190904 - RNA, 19 nt, Artificial Sequence
  Description of Artificial Sequence: Synthetic oligonucleotide
  Sense strand starting at position 2403 of SEQ ID NO: 916875
uguguauggaucuaauaug

SEQ ID NO: 1190905 - RNA, 19 nt, Artificial Sequence
  Description of Artificial Sequence: Synthetic oligonucleotide
  Antisense strand to SEQ ID NO: 1190904
cauauuagauccauacaca

SEQ ID NO: 1190906 - RNA, 19 nt, Artificial Sequence
  Description of Artificial Sequence: Synthetic oligonucleotide
  Sense strand starting at position 2408 of SEQ ID NO: 916875
auggaucuaauaugacgua

SEQ ID NO: 1190907 - RNA, 19 nt, Artificial Sequence
  Description of Artificial Sequence: Synthetic oligonucleotide
  Antisense strand to SEQ ID NO: 1190906
uacgucauauuagauccau

SEQ ID NO: 1190908 - RNA, 19 nt, Artificial Sequence
  Description of Artificial Sequence: Synthetic oligonucleotide
  Sense strand starting at position 2502 of SEQ ID NO: 916875
ucaagacuaguuuguauga

SEQ ID NO: 1190909 - RNA, 19 nt, Artificial Sequence
  Description of Artificial Sequence: Synthetic oligonucleotide
  Antisense strand to SEQ ID NO: 1190908
ucauacaaacuagucuuga

SEQ ID NO: 1190910 - RNA, 19 nt, Artificial Sequence
  Description of Artificial Sequence: Synthetic oligonucleotide
  Sense strand starting at position 2503 of SEQ ID NO: 916875
caagacuaguuuguaugau

SEQ ID NO: 1190911 - RNA, 19 nt, Artificial Sequence
  Description of Artificial Sequence: Synthetic oligonucleotide
  Antisense strand to SEQ ID NO: 1190910
aucauacaaacuagucuug

SEQ ID NO: 1190912 - RNA, 19 nt, Artificial Sequence
  Description of Artificial Sequence: Synthetic oligonucleotide
  Sense strand starting at position 2526 of SEQ ID NO: 916875
uccuuacaucaauguguaa

SEQ ID NO: 1190913 - RNA, 19 nt, Artificial Sequence
  Description of Artificial Sequence: Synthetic oligonucleotide
  Antisense strand to SEQ ID NO: 1190912
uuacacauugauguaagga

SEQ ID NO: 1190914 - RNA, 19 nt, Artificial Sequence
  Description of Artificial Sequence: Synthetic oligonucleotide
  Sense strand starting at position 2566 of SEQ ID NO: 916875
uugacuugcucuuuagaga

SEQ ID NO: 1190915 - RNA, 19 nt, Artificial Sequence
  Description of Artificial Sequence: Synthetic oligonucleotide
  Antisense strand to SEQ ID NO: 1190914
ucucuaaagagcaagucaa

SEQ ID NO: 1190916 - RNA, 19 nt, Artificial Sequence
  Description of Artificial Sequence: Synthetic oligonucleotide
  Sense strand starting at position 2567 of SEQ ID NO: 916875
ugacuugcucuuuagagaa

SEQ ID NO: 1190917 - RNA, 19 nt, Artificial Sequence
  Description of Artificial Sequence: Synthetic oligonucleotide
  Antisense strand to SEQ ID NO: 1190916
uucucuaaagagcaaguca

SEQ ID NO: 1190918 - RNA, 19 nt, Artificial Sequence
  Description of Artificial Sequence: Synthetic oligonucleotide
  Sense strand starting at position 2732 of SEQ ID NO: 916875
aacggagucuucucucaca

SEQ ID NO: 1190919 - RNA, 19 nt, Artificial Sequence
  Description of Artificial Sequence: Synthetic oligonucleotide
  Antisense strand to SEQ ID NO: 1190918
ugugagagaagacuccguu

SEQ ID NO: 1190920 - RNA, 19 nt, Artificial Sequence
  Description of Artificial Sequence: Synthetic oligonucleotide
  Sense strand starting at position 2805 of SEQ ID NO: 916875
uguguauguauauagcaaa

SEQ ID NO: 1190921 - RNA, 19 nt, Artificial Sequence
  Description of Artificial Sequence: Synthetic oligonucleotide
  Antisense strand to SEQ ID NO: 1190920
uuugcuauauacauacaca

SEQ ID NO: 1190922 - RNA, 19 nt, Artificial Sequence
  Description of Artificial Sequence: Synthetic oligonucleotide
  Sense strand starting at position 3232 of SEQ ID NO: 916875
agccuagauuaguucuaua

SEQ ID NO: 1190923 - RNA, 19 nt, Artificial Sequence
  Description of Artificial Sequence: Synthetic oligonucleotide
  Antisense strand to SEQ ID NO: 1190922
uauagaacuaaucuaggcu

SEQ ID NO: 1190924 - RNA, 19 nt, Artificial Sequence
  Description of Artificial Sequence: Synthetic oligonucleotide
  Sense strand starting at position 3707 of SEQ ID NO: 916875
guacaaaugcacugagaaa

SEQ ID NO: 1190925 - RNA, 19 nt, Artificial Sequence
  Description of Artificial Sequence: Synthetic oligonucleotide
  Antisense strand to SEQ ID NO: 1190924
uuucucagugcauuuguac

SEQ ID NO: 1190926 - RNA, 19 nt, Artificial Sequence
  Description of Artificial Sequence: Synthetic oligonucleotide
  Sense strand starting at position 3737 of SEQ ID NO: 916875
cuaaacuaacgcuaucagu

SEQ ID NO: 1190927 - RNA, 19 nt, Artificial Sequence
  Description of Artificial Sequence: Synthetic oligonucleotide
  Antisense strand to SEQ ID NO: 1190926
acugauagcguuaguuuag

SEQ ID NO: 1190928 - RNA, 19 nt, Artificial Sequence
  Description of Artificial Sequence: Synthetic oligonucleotide
  Sense strand starting at position 3811 of SEQ ID NO: 916875
cuuccuauguaaguaauua

SEQ ID NO: 1190929 - RNA, 19 nt, Artificial Sequence
  Description of Artificial Sequence: Synthetic oligonucleotide
  Antisense strand to SEQ ID NO: 1190928
uaauuacuuacauaggaag

SEQ ID NO: 1190930 - RNA, 19 nt, Artificial Sequence
  Description of Artificial Sequence: Synthetic oligonucleotide
  Sense strand starting at position 3815 of SEQ ID NO: 916875
cuauguaaguaauuagacu

SEQ ID NO: 1190931 - RNA, 19 nt, Artificial Sequence
  Description of Artificial Sequence: Synthetic oligonucleotide
  Antisense strand to SEQ ID NO: 1190930
agucuaauuacuuacauag

SEQ ID NO: 1190932 - RNA, 19 nt, Artificial Sequence
  Description of Artificial Sequence: Synthetic oligonucleotide
  Sense strand starting at position 3917 of SEQ ID NO: 916875
cuaacagcuguggaucaau

SEQ ID NO: 1190933 - RNA, 19 nt, Artificial Sequence
  Description of Artificial Sequence: Synthetic oligonucleotide
  Antisense strand to SEQ ID NO: 1190932
auugauccacagcuguuag

SEQ ID NO: 1190934 - RNA, 19 nt, Artificial Sequence
  Description of Artificial Sequence: Synthetic oligonucleotide
  Sense strand starting at position 3920 of SEQ ID NO: 916875
acagcuguggaucaauaca

SEQ ID NO: 1190935 - RNA, 19 nt, Artificial Sequence
  Description of Artificial Sequence: Synthetic oligonucleotide
  Antisense strand to SEQ ID NO: 1190934
uguauugauccacagcugu

SEQ ID NO: 1190936 - RNA, 19 nt, Artificial Sequence
  Description of Artificial Sequence: Synthetic oligonucleotide
  Sense strand starting at position 3965 of SEQ ID NO: 916875
cuguuuguugccgcaauaa

SEQ ID NO: 1190937 - RNA, 19 nt, Artificial Sequence
  Description of Artificial Sequence: Synthetic oligonucleotide
  Antisense strand to SEQ ID NO: 1190936
uuauugcggcaacaaacag

SEQ ID NO: 1190938 - RNA, 19 nt, Artificial Sequence
  Description of Artificial Sequence: Synthetic oligonucleotide
  Sense strand starting at position 3976 of SEQ ID NO: 916875
cgcaauaaucaucacaguu

SEQ ID NO: 1190939 - RNA, 19 nt, Artificial Sequence
  Description of Artificial Sequence: Synthetic oligonucleotide
  Antisense strand to SEQ ID NO: 1190938
aacugugaugauuauugcg

SEQ ID NO: 1190940 - RNA, 19 nt, Artificial Sequence
  Description of Artificial Sequence: Synthetic oligonucleotide
  Sense strand starting at position 149 of SEQ ID NO: 916876
agaagaaauucccuguguu

SEQ ID NO: 1190941 - RNA, 19 nt, Artificial Sequence
  Description of Artificial Sequence: Synthetic oligonucleotide
  Antisense strand to SEQ ID NO: 1190940
aacacagggaauuucuucu

SEQ ID NO: 1190942 - RNA, 19 nt, Artificial Sequence
  Description of Artificial Sequence: Synthetic oligonucleotide
  Sense strand starting at position 150 of SEQ ID NO: 916876
gaagaaauucccuguguua

SEQ ID NO: 1190943 - RNA, 19 nt, Artificial Sequence
  Description of Artificial Sequence: Synthetic oligonucleotide
  Antisense strand to SEQ ID NO: 1190942
uaacacagggaauuucuuc

SEQ ID NO: 1190944 - RNA, 19 nt, Artificial Sequence
  Description of Artificial Sequence: Synthetic oligonucleotide
  Sense strand starting at position 152 of SEQ ID NO: 916876
agaaauucccuguguuaga

SEQ ID NO: 1190945 - RNA, 19 nt, Artificial Sequence
  Description of Artificial Sequence: Synthetic oligonucleotide
  Antisense strand to SEQ ID NO: 1190944
ucuaacacagggaauuucu

SEQ ID NO: 1190946 - RNA, 19 nt, Artificial Sequence
  Description of Artificial Sequence: Synthetic oligonucleotide
  Sense strand starting at position 153 of SEQ ID NO: 916876
gaaauucccuguguuagag

SEQ ID NO: 1190947 - RNA, 19 nt, Artificial Sequence
  Description of Artificial Sequence: Synthetic oligonucleotide
  Antisense strand to SEQ ID NO: 1190946
cucuaacacagggaauuuc

SEQ ID NO: 1190948 - RNA, 19 nt, Artificial Sequence
  Description of Artificial Sequence: Synthetic oligonucleotide
  Sense strand starting at position 234 of SEQ ID NO: 916876
cagauauaugcugguauau

SEQ ID NO: 1190949 - RNA, 19 nt, Artificial Sequence
  Description of Artificial Sequence: Synthetic oligonucleotide
  Antisense strand to SEQ ID NO: 1190948
auauaccagcauauaucug

SEQ ID NO: 1190950 - RNA, 19 nt, Artificial Sequence
  Description of Artificial Sequence: Synthetic oligonucleotide
  Sense strand starting at position 528 of SEQ ID NO: 916876
cuaggaugcucuguagaua

SEQ ID NO: 1190951 - RNA, 19 nt, Artificial Sequence
  Description of Artificial Sequence: Synthetic oligonucleotide
  Antisense strand to SEQ ID NO: 1190950
uaucuacagagcauccuag

SEQ ID NO: 1190952 - RNA, 19 nt, Artificial Sequence
  Description of Artificial Sequence: Synthetic oligonucleotide
  Sense strand starting at position 529 of SEQ ID NO: 916876
uaggaugcucuguagauac

SEQ ID NO: 1190953 - RNA, 19 nt, Artificial Sequence
  Description of Artificial Sequence: Synthetic oligonucleotide
  Antisense strand to SEQ ID NO: 1190952
guaucuacagagcauccua

SEQ ID NO: 1190954 - RNA, 19 nt, Artificial Sequence
  Description of Artificial Sequence: Synthetic oligonucleotide
  Sense strand starting at position 584 of SEQ ID NO: 916876
gguguaauacugcauauaa

SEQ ID NO: 1190955 - RNA, 19 nt, Artificial Sequence
  Description of Artificial Sequence: Synthetic oligonucleotide
  Antisense strand to SEQ ID NO: 1190954
uuauaugcaguauuacacc

SEQ ID NO: 1190956 - RNA, 19 nt, Artificial Sequence
  Description of Artificial Sequence: Synthetic oligonucleotide
  Sense strand starting at position 645 of SEQ ID NO: 916876
cuagauaacgucuaauacu

SEQ ID NO: 1190957 - RNA, 19 nt, Artificial Sequence
  Description of Artificial Sequence: Synthetic oligonucleotide
  Antisense strand to SEQ ID NO: 1190956
aguauuagacguuaucuag

SEQ ID NO: 1190958 - RNA, 19 nt, Artificial Sequence
  Description of Artificial Sequence: Synthetic oligonucleotide
  Sense strand starting at position 800 of SEQ ID NO: 916876
ggaugugggaacuguguau

SEQ ID NO: 1190959 - RNA, 19 nt, Artificial Sequence
  Description of Artificial Sequence: Synthetic oligonucleotide
  Antisense strand to SEQ ID NO: 1190958
auacacaguucccacaucc

SEQ ID NO: 1190960 - RNA, 19 nt, Artificial Sequence
  Description of Artificial Sequence: Synthetic oligonucleotide
  Sense strand starting at position 804 of SEQ ID NO: 916876
gugggaacuguguauagag

SEQ ID NO: 1190961 - RNA, 19 nt, Artificial Sequence
  Description of Artificial Sequence: Synthetic oligonucleotide
  Antisense strand to SEQ ID NO: 1190960
cucuauacacaguucccac

SEQ ID NO: 1190962 - RNA, 19 nt, Artificial Sequence
  Description of Artificial Sequence: Synthetic oligonucleotide
  Sense strand starting at position 951 of SEQ ID NO: 916876
aggugcaaaguuuaacaaa

SEQ ID NO: 1190963 - RNA, 19 nt, Artificial Sequence
  Description of Artificial Sequence: Synthetic oligonucleotide
  Antisense strand to SEQ ID NO: 1190962
uuuguuaaacuuugcaccu

SEQ ID NO: 1190964 - RNA, 19 nt, Artificial Sequence
  Description of Artificial Sequence: Synthetic oligonucleotide
  Sense strand starting at position 1061 of SEQ ID NO: 916876
uucauugagccugagaggu

SEQ ID NO: 1190965 - RNA, 19 nt, Artificial Sequence
  Description of Artificial Sequence: Synthetic oligonucleotide
  Antisense strand to SEQ ID NO: 1190964
accucucaggcucaaugaa

SEQ ID NO: 1190966 - RNA, 19 nt, Artificial Sequence
  Description of Artificial Sequence: Synthetic oligonucleotide
  Sense strand starting at position 1067 of SEQ ID NO: 916876
gagccugagaggugaaaga

SEQ ID NO: 1190967 - RNA, 19 nt, Artificial Sequence
  Description of Artificial Sequence: Synthetic oligonucleotide
  Antisense strand to SEQ ID NO: 1190966
ucuuucaccucucaggcuc

SEQ ID NO: 1190968 - RNA, 19 nt, Artificial Sequence
  Description of Artificial Sequence: Synthetic oligonucleotide
  Sense strand starting at position 1091 of SEQ ID NO: 916876
ggacauguaaaguguaaua

SEQ ID NO: 1190969 - RNA, 19 nt, Artificial Sequence
  Description of Artificial Sequence: Synthetic oligonucleotide
  Antisense strand to SEQ ID NO: 1190968
uauuacacuuuacaugucc

SEQ ID NO: 1190970 - RNA, 19 nt, Artificial Sequence
  Description of Artificial Sequence: Synthetic oligonucleotide
  Sense strand starting at position 1093 of SEQ ID NO: 916876
acauguaaaguguaauauc

SEQ ID NO: 1190971 - RNA, 19 nt, Artificial Sequence
  Description of Artificial Sequence: Synthetic oligonucleotide
  Antisense strand to SEQ ID NO: 1190970
gauauuacacuuuacaugu

SEQ ID NO: 1190972 - RNA, 19 nt, Artificial Sequence
  Description of Artificial Sequence: Synthetic oligonucleotide
  Sense strand starting at position 1101 of SEQ ID NO: 916876
aguguaauaucuuugaauc

SEQ ID NO: 1190973 - RNA, 19 nt, Artificial Sequence
  Description of Artificial Sequence: Synthetic oligonucleotide
  Antisense strand to SEQ ID NO: 1190972
gauucaaagauauuacacu

SEQ ID NO: 1190974 - RNA, 19 nt, Artificial Sequence
  Description of Artificial Sequence: Synthetic oligonucleotide
  Sense strand starting at position 1102 of SEQ ID NO: 916876
guguaauaucuuugaauca

SEQ ID NO: 1190975 - RNA, 19 nt, Artificial Sequence
  Description of Artificial Sequence: Synthetic oligonucleotide
  Antisense strand to SEQ ID NO: 1190974
ugauucaaagauauuacac

SEQ ID NO: 1190976 - RNA, 19 nt, Artificial Sequence
  Description of Artificial Sequence: Synthetic oligonucleotide
  Sense strand starting at position 1143 of SEQ ID NO: 916876
agagaugucuuccuuugac

SEQ ID NO: 1190977 - RNA, 19 nt, Artificial Sequence
  Description of Artificial Sequence: Synthetic oligonucleotide
  Antisense strand to SEQ ID NO: 1190976
gucaaaggaagacaucucu

SEQ ID NO: 1190978 - RNA, 19 nt, Artificial Sequence
  Description of Artificial Sequence: Synthetic oligonucleotide
  Sense strand starting at position 1319 of SEQ ID NO: 916876
gugagcuagcaauacauaa

SEQ ID NO: 1190979 - RNA, 19 nt, Artificial Sequence
  Description of Artificial Sequence: Synthetic oligonucleotide
  Antisense strand to SEQ ID NO: 1190978
uuauguauugcuagcucac

SEQ ID NO: 1190980 - RNA, 19 nt, Artificial Sequence
  Description of Artificial Sequence: Synthetic oligonucleotide
  Sense strand starting at position 1369 of SEQ ID NO: 916876
acuauuguugcagaaauac

SEQ ID NO: 1190981 - RNA, 19 nt, Artificial Sequence
  Description of Artificial Sequence: Synthetic oligonucleotide
  Antisense strand to SEQ ID NO: 1190980
guauuucugcaacaauagu

SEQ ID NO: 1190982 - RNA, 19 nt, Artificial Sequence
  Description of Artificial Sequence: Synthetic oligonucleotide
  Sense strand starting at position 1461 of SEQ ID NO: 916876
cccguuaaacacuagaauc

SEQ ID NO: 1190983 - RNA, 19 nt, Artificial Sequence
  Description of Artificial Sequence: Synthetic oligonucleotide
  Antisense strand to SEQ ID NO: 1190982
gauucuaguguuuaacggg

SEQ ID NO: 1190984 - RNA, 19 nt, Artificial Sequence
  Description of Artificial Sequence: Synthetic oligonucleotide
  Sense strand starting at position 1608 of SEQ ID NO: 916876
aaacaaugaguuuguguag

SEQ ID NO: 1190985 - RNA, 19 nt, Artificial Sequence
  Description of Artificial Sequence: Synthetic oligonucleotide
  Antisense strand to SEQ ID NO: 1190984
cuacacaaacucauuguuu

SEQ ID NO: 1190986 - RNA, 19 nt, Artificial Sequence
  Description of Artificial Sequence: Synthetic oligonucleotide
  Sense strand starting at position 1611 of SEQ ID NO: 916876
caaugaguuuguguaggau

SEQ ID NO: 1190987 - RNA, 19 nt, Artificial Sequence
  Description of Artificial Sequence: Synthetic oligonucleotide
  Antisense strand to SEQ ID NO: 1190986
auccuacacaaacucauug

SEQ ID NO: 1190988 - RNA, 19 nt, Artificial Sequence
  Description of Artificial Sequence: Synthetic oligonucleotide
  Sense strand starting at position 1666 of SEQ ID NO: 916876
gaaggauuguucuuuguug

SEQ ID NO: 1190989 - RNA, 19 nt, Artificial Sequence
  Description of Artificial Sequence: Synthetic oligonucleotide
  Antisense strand to SEQ ID NO: 1190988
caacaaagaacaauccuuc

SEQ ID NO: 1190990 - RNA, 19 nt, Artificial Sequence
  Description of Artificial Sequence: Synthetic oligonucleotide
  Sense strand starting at position 1810 of SEQ ID NO: 916876
auugcucaugagggacaaa

SEQ ID NO: 1190991 - RNA, 19 nt, Artificial Sequence
  Description of Artificial Sequence: Synthetic oligonucleotide
  Antisense strand to SEQ ID NO: 1190990
uuugucccucaugagcaau

SEQ ID NO: 1190992 - RNA, 19 nt, Artificial Sequence
  Description of Artificial Sequence: Synthetic oligonucleotide
  Sense strand starting at position 1840 of SEQ ID NO: 916876
cugagagccaaguguuaaa

SEQ ID NO: 1190993 - RNA, 19 nt, Artificial Sequence
  Description of Artificial Sequence: Synthetic oligonucleotide
  Antisense strand to SEQ ID NO: 1190992
uuuaacacuuggcucucag

SEQ ID NO: 1190994 - RNA, 19 nt, Artificial Sequence
  Description of Artificial Sequence: Synthetic oligonucleotide
  Sense strand starting at position 1878 of SEQ ID NO: 916876
augcaaguaugguuauuaa

SEQ ID NO: 1190995 - RNA, 19 nt, Artificial Sequence
  Description of Artificial Sequence: Synthetic oligonucleotide
  Antisense strand to SEQ ID NO: 1190994
uuaauaaccauacuugcau

SEQ ID NO: 1190996 - RNA, 19 nt, Artificial Sequence
  Description of Artificial Sequence: Synthetic oligonucleotide
  Sense strand starting at position 2285 of SEQ ID NO: 916876
guuacauggagagguucuu

SEQ ID NO: 1190997 - RNA, 19 nt, Artificial Sequence
  Description of Artificial Sequence: Synthetic oligonucleotide
  Antisense strand to SEQ ID NO: 1190996
aagaaccucuccauguaac

SEQ ID NO: 1190998 - RNA, 19 nt, Artificial Sequence
  Description of Artificial Sequence: Synthetic oligonucleotide
  Sense strand starting at position 3200 of SEQ ID NO: 916876
ucccacaaugauugaagua

SEQ ID NO: 1190999 - RNA, 19 nt, Artificial Sequence
  Description of Artificial Sequence: Synthetic oligonucleotide
  Antisense strand to SEQ ID NO: 1190998
uacuucaaucauuguggga

SEQ ID NO: 1191000 - RNA, 19 nt, Artificial Sequence
  Description of Artificial Sequence: Synthetic oligonucleotide
  Sense strand starting at position 3441 of SEQ ID NO: 916876
ucacuuucugauggguuau

SEQ ID NO: 1191001 - RNA, 19 nt, Artificial Sequence
  Description of Artificial Sequence: Synthetic oligonucleotide
  Antisense strand to SEQ ID NO: 1191000
auaacccaucagaaaguga

SEQ ID NO: 1191002 - RNA, 19 nt, Artificial Sequence
  Description of Artificial Sequence: Synthetic oligonucleotide
  Sense strand starting at position 3568 of SEQ ID NO: 916876
ucgauuguuagaggaguau

SEQ ID NO: 1191003 - RNA, 19 nt, Artificial Sequence
  Description of Artificial Sequence: Synthetic oligonucleotide
  Antisense strand to SEQ ID NO: 1191002
auacuccucuaacaaucga

SEQ ID NO: 1191004 - RNA, 19 nt, Artificial Sequence
  Description of Artificial Sequence: Synthetic oligonucleotide
  Sense strand starting at position 3581 of SEQ ID NO: 916876
gaguauaaucaggguuguu

SEQ ID NO: 1191005 - RNA, 19 nt, Artificial Sequence
  Description of Artificial Sequence: Synthetic oligonucleotide
  Antisense strand to SEQ ID NO: 1191004
aacaacccugauuauacuc

SEQ ID NO: 1191006 - RNA, 19 nt, Artificial Sequence
  Description of Artificial Sequence: Synthetic oligonucleotide
  Sense strand starting at position 3584 of SEQ ID NO: 916876
uauaaucaggguuguuauu

SEQ ID NO: 1191007 - RNA, 19 nt, Artificial Sequence
  Description of Artificial Sequence: Synthetic oligonucleotide
  Antisense strand to SEQ ID NO: 1191006
aauaacaacccugauuaua

SEQ ID NO: 1191008 - RNA, 19 nt, Artificial Sequence
  Description of Artificial Sequence: Synthetic oligonucleotide
  Sense strand starting at position 3681 of SEQ ID NO: 916876
uuuccaugugaauagcaua

SEQ ID NO: 1191009 - RNA, 19 nt, Artificial Sequence
  Description of Artificial Sequence: Synthetic oligonucleotide
  Antisense strand to SEQ ID NO: 1191008
uaugcuauucacauggaaa

SEQ ID NO: 1191010 - RNA, 19 nt, Artificial Sequence
  Description of Artificial Sequence: Synthetic oligonucleotide
  Sense strand starting at position 3686 of SEQ ID NO: 916876
augugaauagcauaggcua

SEQ ID NO: 1191011 - RNA, 19 nt, Artificial Sequence
  Description of Artificial Sequence: Synthetic oligonucleotide
  Antisense strand to SEQ ID NO: 1191010
uagccuaugcuauucacau

SEQ ID NO: 1191012 - RNA, 19 nt, Artificial Sequence
  Description of Artificial Sequence: Synthetic oligonucleotide
  Sense strand starting at position 3737 of SEQ ID NO: 916876
guagcauuuccaggagcca

SEQ ID NO: 1191013 - RNA, 19 nt, Artificial Sequence
  Description of Artificial Sequence: Synthetic oligonucleotide
  Antisense strand to SEQ ID NO: 1191012
uggcuccuggaaaugcuac

SEQ ID NO: 1191014 - RNA, 19 nt, Artificial Sequence
  Description of Artificial Sequence: Synthetic oligonucleotide
  Sense strand starting at position 3801 of SEQ ID NO: 916876
aacagaagugacuguauca

SEQ ID NO: 1191015 - RNA, 19 nt, Artificial Sequence
  Description of Artificial Sequence: Synthetic oligonucleotide
  Antisense strand to SEQ ID NO: 1191014
ugauacagucacuucuguu

SEQ ID NO: 1191016 - RNA, 19 nt, Artificial Sequence
  Description of Artificial Sequence: Synthetic oligonucleotide
  Sense strand starting at position 3811 of SEQ ID NO: 916876
acuguaucaaugugagaug

SEQ ID NO: 1191017 - RNA, 19 nt, Artificial Sequence
  Description of Artificial Sequence: Synthetic oligonucleotide
  Antisense strand to SEQ ID NO: 1191016
caucucacauugauacagu

SEQ ID NO: 1191018 - RNA, 19 nt, Artificial Sequence
  Description of Artificial Sequence: Synthetic oligonucleotide
  Sense strand starting at position 3825 of SEQ ID NO: 916876
agauguagugguuauagau

SEQ ID NO: 1191019 - RNA, 19 nt, Artificial Sequence
  Description of Artificial Sequence: Synthetic oligonucleotide
  Antisense strand to SEQ ID NO: 1191018
aucuauaaccacuacaucu

SEQ ID NO: 1191020 - RNA, 19 nt, Artificial Sequence
  Description of Artificial Sequence: Synthetic oligonucleotide
  Sense strand starting at position 235 of SEQ ID NO: 916877
auauuaaagucagugacca

SEQ ID NO: 1191021 - RNA, 19 nt, Artificial Sequence
  Description of Artificial Sequence: Synthetic oligonucleotide
  Antisense strand to SEQ ID NO: 1191020
uggucacugacuuuaauau

SEQ ID NO: 1191022 - RNA, 19 nt, Artificial Sequence
  Description of Artificial Sequence: Synthetic oligonucleotide
  Sense strand starting at position 327 of SEQ ID NO: 916877
guguuacaucuagaaugcu

SEQ ID NO: 1191023 - RNA, 19 nt, Artificial Sequence
  Description of Artificial Sequence: Synthetic oligonucleotide
  Antisense strand to SEQ ID NO: 1191022
agcauucuagauguaacac

SEQ ID NO: 1191024 - RNA, 19 nt, Artificial Sequence
  Description of Artificial Sequence: Synthetic oligonucleotide
  Sense strand starting at position 549 of SEQ ID NO: 916877
acugcauagcuuuacugaa

SEQ ID NO: 1191025 - RNA, 19 nt, Artificial Sequence
  Description of Artificial Sequence: Synthetic oligonucleotide
  Antisense strand to SEQ ID NO: 1191024
uucaguaaagcuaugcagu

SEQ ID NO: 1191026 - RNA, 19 nt, Artificial Sequence
  Description of Artificial Sequence: Synthetic oligonucleotide
  Sense strand starting at position 576 of SEQ ID NO: 916877
augguuaaugcgcaaauua

SEQ ID NO: 1191027 - RNA, 19 nt, Artificial Sequence
  Description of Artificial Sequence: Synthetic oligonucleotide
  Antisense strand to SEQ ID NO: 1191026
uaauuugcgcauuaaccau

SEQ ID NO: 1191028 - RNA, 19 nt, Artificial Sequence
  Description of Artificial Sequence: Synthetic oligonucleotide
  Sense strand starting at position 606 of SEQ ID NO: 916877
guauguuccaaggaggcua

SEQ ID NO: 1191029 - RNA, 19 nt, Artificial Sequence
  Description of Artificial Sequence: Synthetic oligonucleotide
  Antisense strand to SEQ ID NO: 1191028
uagccuccuuggaacauac

SEQ ID NO: 1191030 - RNA, 19 nt, Artificial Sequence
  Description of Artificial Sequence: Synthetic oligonucleotide
  Sense strand starting at position 755 of SEQ ID NO: 916877
uuauuugcauuuggcaaau

SEQ ID NO: 1191031 - RNA, 19 nt, Artificial Sequence
  Description of Artificial Sequence: Synthetic oligonucleotide
  Antisense strand to SEQ ID NO: 1191030
auuugccaaaugcaaauaa

SEQ ID NO: 1191032 - RNA, 19 nt, Artificial Sequence
  Description of Artificial Sequence: Synthetic oligonucleotide
  Sense strand starting at position 765 of SEQ ID NO: 916877
uuggcaaauccuuaauuga

SEQ ID NO: 1191033 - RNA, 19 nt, Artificial Sequence
  Description of Artificial Sequence: Synthetic oligonucleotide
  Antisense strand to SEQ ID NO: 1191032
ucaauuaaggauuugccaa

SEQ ID NO: 1191034 - RNA, 19 nt, Artificial Sequence
  Description of Artificial Sequence: Synthetic oligonucleotide
  Sense strand starting at position 845 of SEQ ID NO: 916877
cuggguuuggagcauaacu

SEQ ID NO: 1191035 - RNA, 19 nt, Artificial Sequence
  Description of Artificial Sequence: Synthetic oligonucleotide
  Antisense strand to SEQ ID NO: 1191034
aguuaugcuccaaacccag

SEQ ID NO: 1191036 - RNA, 19 nt, Artificial Sequence
  Description of Artificial Sequence: Synthetic oligonucleotide
  Sense strand starting at position 847 of SEQ ID NO: 916877
ggguuuggagcauaacuua

SEQ ID NO: 1191037 - RNA, 19 nt, Artificial Sequence
  Description of Artificial Sequence: Synthetic oligonucleotide
  Antisense strand to SEQ ID NO: 1191036
uaaguuaugcuccaaaccc

SEQ ID NO: 1191038 - RNA, 19 nt, Artificial Sequence
  Description of Artificial Sequence: Synthetic oligonucleotide
  Sense strand starting at position 861 of SEQ ID NO: 916877
acuuauucuggaggccaaa

SEQ ID NO: 1191039 - RNA, 19 nt, Artificial Sequence
  Description of Artificial Sequence: Synthetic oligonucleotide
  Antisense strand to SEQ ID NO: 1191038
uuuggccuccagaauaagu

SEQ ID NO: 1191040 - RNA, 19 nt, Artificial Sequence
  Description of Artificial Sequence: Synthetic oligonucleotide
  Sense strand starting at position 927 of SEQ ID NO: 916877
auaaucaguccucauuagu

SEQ ID NO: 1191041 - RNA, 19 nt, Artificial Sequence
  Description of Artificial Sequence: Synthetic oligonucleotide
  Antisense strand to SEQ ID NO: 1191040
acuaaugaggacugauuau

SEQ ID NO: 1191042 - RNA, 19 nt, Artificial Sequence
  Description of Artificial Sequence: Synthetic oligonucleotide
  Sense strand starting at position 1049 of SEQ ID NO: 916877
ucggacucuguccagcaau

SEQ ID NO: 1191043 - RNA, 19 nt, Artificial Sequence
  Description of Artificial Sequence: Synthetic oligonucleotide
  Antisense strand to SEQ ID NO: 1191042
auugcuggacagaguccga

SEQ ID NO: 1191044 - RNA, 19 nt, Artificial Sequence
  Description of Artificial Sequence: Synthetic oligonucleotide
  Sense strand starting at position 1132 of SEQ ID NO: 916877
ggccaucuccugugaggaa

SEQ ID NO: 1191045 - RNA, 19 nt, Artificial Sequence
  Description of Artificial Sequence: Synthetic oligonucleotide
  Antisense strand to SEQ ID NO: 1191044
uuccucacaggagauggcc

SEQ ID NO: 1191046 - RNA, 19 nt, Artificial Sequence
  Description of Artificial Sequence: Synthetic oligonucleotide
  Sense strand starting at position 1164 of SEQ ID NO: 916877
gcuugacuucuggacacca

SEQ ID NO: 1191047 - RNA, 19 nt, Artificial Sequence
  Description of Artificial Sequence: Synthetic oligonucleotide
  Antisense strand to SEQ ID NO: 1191046
ugguguccagaagucaagc

SEQ ID NO: 1191048 - RNA, 19 nt, Artificial Sequence
  Description of Artificial Sequence: Synthetic oligonucleotide
  Sense strand starting at position 1274 of SEQ ID NO: 916877
acaaauuaucugugucaga

SEQ ID NO: 1191049 - RNA, 19 nt, Artificial Sequence
  Description of Artificial Sequence: Synthetic oligonucleotide
  Antisense strand to SEQ ID NO: 1191048
ucugacacagauaauuugu

SEQ ID NO: 1191050 - RNA, 19 nt, Artificial Sequence
  Description of Artificial Sequence: Synthetic oligonucleotide
  Sense strand starting at position 1648 of SEQ ID NO: 916877
ccaagucuuaccuggagga

SEQ ID NO: 1191051 - RNA, 19 nt, Artificial Sequence
  Description of Artificial Sequence: Synthetic oligonucleotide
  Antisense strand to SEQ ID NO: 1191050
uccuccagguaagacuugg

SEQ ID NO: 1191052 - RNA, 19 nt, Artificial Sequence
  Description of Artificial Sequence: Synthetic oligonucleotide
  Sense strand starting at position 1649 of SEQ ID NO: 916877
caagucuuaccuggaggaa

SEQ ID NO: 1191053 - RNA, 19 nt, Artificial Sequence
  Description of Artificial Sequence: Synthetic oligonucleotide
  Antisense strand to SEQ ID NO: 1191052
uuccuccagguaagacuug

SEQ ID NO: 1191054 - RNA, 19 nt, Artificial Sequence
  Description of Artificial Sequence: Synthetic oligonucleotide
  Sense strand starting at position 2200 of SEQ ID NO: 916877
gccaacuauuccuuaggga

SEQ ID NO: 1191055 - RNA, 19 nt, Artificial Sequence
  Description of Artificial Sequence: Synthetic oligonucleotide
  Antisense strand to SEQ ID NO: 1191054
ucccuaaggaauaguuggc

SEQ ID NO: 1191056 - RNA, 19 nt, Artificial Sequence
  Description of Artificial Sequence: Synthetic oligonucleotide
  Sense strand starting at position 2322 of SEQ ID NO: 916877
uuccauugguguucuagaa

SEQ ID NO: 1191057 - RNA, 19 nt, Artificial Sequence
  Description of Artificial Sequence: Synthetic oligonucleotide
  Antisense strand to SEQ ID NO: 1191056
uucuagaacaccaauggaa

SEQ ID NO: 1191058 - RNA, 19 nt, Artificial Sequence
  Description of Artificial Sequence: Synthetic oligonucleotide
  Sense strand starting at position 2326 of SEQ ID NO: 916877
auugguguucuagaaucuu

SEQ ID NO: 1191059 - RNA, 19 nt, Artificial Sequence
  Description of Artificial Sequence: Synthetic oligonucleotide
  Antisense strand to SEQ ID NO: 1191058
aagauucuagaacaccaau

SEQ ID NO: 1191060 - RNA, 19 nt, Artificial Sequence
  Description of Artificial Sequence: Synthetic oligonucleotide
  Sense strand starting at position 2332 of SEQ ID NO: 916877
guucuagaaucuuuaagga

SEQ ID NO: 1191061 - RNA, 19 nt, Artificial Sequence
  Description of Artificial Sequence: Synthetic oligonucleotide
  Antisense strand to SEQ ID NO: 1191060
uccuuaaagauucuagaac

SEQ ID NO: 1191062 - RNA, 19 nt, Artificial Sequence
  Description of Artificial Sequence: Synthetic oligonucleotide
  Sense strand starting at position 2416 of SEQ ID NO: 916877
augaucaguugcucauauu

SEQ ID NO: 1191063 - RNA, 19 nt, Artificial Sequence
  Description of Artificial Sequence: Synthetic oligonucleotide
  Antisense strand to SEQ ID NO: 1191062
aauaugagcaacugaucau

SEQ ID NO: 1191064 - RNA, 19 nt, Artificial Sequence
  Description of Artificial Sequence: Synthetic oligonucleotide
  Sense strand starting at position 2504 of SEQ ID NO: 916877
gccuaauuccaaggauaaa

SEQ ID NO: 1191065 - RNA, 19 nt, Artificial Sequence
  Description of Artificial Sequence: Synthetic oligonucleotide
  Antisense strand to SEQ ID NO: 1191064
uuuauccuuggaauuaggc

SEQ ID NO: 1191066 - RNA, 19 nt, Artificial Sequence
  Description of Artificial Sequence: Synthetic oligonucleotide
  Sense strand starting at position 2586 of SEQ ID NO: 916877
gaggaucuuaagcaguagu

SEQ ID NO: 1191067 - RNA, 19 nt, Artificial Sequence
  Description of Artificial Sequence: Synthetic oligonucleotide
  Antisense strand to SEQ ID NO: 1191066
acuacugcuuaagauccuc

SEQ ID NO: 1191068 - RNA, 19 nt, Artificial Sequence
  Description of Artificial Sequence: Synthetic oligonucleotide
  Sense strand starting at position 2589 of SEQ ID NO: 916877
gaucuuaagcaguaguagu

SEQ ID NO: 1191069 - RNA, 19 nt, Artificial Sequence
  Description of Artificial Sequence: Synthetic oligonucleotide
  Antisense strand to SEQ ID NO: 1191068
acuacuacugcuuaagauc

SEQ ID NO: 1191070 - RNA, 19 nt, Artificial Sequence
  Description of Artificial Sequence: Synthetic oligonucleotide
  Sense strand starting at position 2668 of SEQ ID NO: 916877
cucuuaaguggcugagacu

SEQ ID NO: 1191071 - RNA, 19 nt, Artificial Sequence
  Description of Artificial Sequence: Synthetic oligonucleotide
  Antisense strand to SEQ ID NO: 1191070
agucucagccacuuaagag

SEQ ID NO: 1191072 - RNA, 19 nt, Artificial Sequence
  Description of Artificial Sequence: Synthetic oligonucleotide
  Sense strand starting at position 2687 of SEQ ID NO: 916877
cugggauggucacuuaauu

SEQ ID NO: 1191073 - RNA, 19 nt, Artificial Sequence
  Description of Artificial Sequence: Synthetic oligonucleotide
  Antisense strand to SEQ ID NO: 1191072
aauuaagugaccaucccag

SEQ ID NO: 1191074 - RNA, 19 nt, Artificial Sequence
  Description of Artificial Sequence: Synthetic oligonucleotide
  Sense strand starting at position 2878 of SEQ ID NO: 916877
uggucagaauaguuaauau

SEQ ID NO: 1191075 - RNA, 19 nt, Artificial Sequence
  Description of Artificial Sequence: Synthetic oligonucleotide
  Antisense strand to SEQ ID NO: 1191074
auauuaacuauucugacca

SEQ ID NO: 1191076 - RNA, 19 nt, Artificial Sequence
  Description of Artificial Sequence: Synthetic oligonucleotide
  Sense strand starting at position 3041 of SEQ ID NO: 916877
cggaaauagugagcaaaca

SEQ ID NO: 1191077 - RNA, 19 nt, Artificial Sequence
  Description of Artificial Sequence: Synthetic oligonucleotide
  Antisense strand to SEQ ID NO: 1191076
uguuugcucacuauuuccg

SEQ ID NO: 1191078 - RNA, 19 nt, Artificial Sequence
  Description of Artificial Sequence: Synthetic oligonucleotide
  Sense strand starting at position 3059 of SEQ ID NO: 916877
auccgaauacauugagugu

SEQ ID NO: 1191079 - RNA, 19 nt, Artificial Sequence
  Description of Artificial Sequence: Synthetic oligonucleotide
  Antisense strand to SEQ ID NO: 1191078
acacucaauguauucggau

SEQ ID NO: 1191080 - RNA, 19 nt, Artificial Sequence
  Description of Artificial Sequence: Synthetic oligonucleotide
  Sense strand starting at position 3060 of SEQ ID NO: 916877
uccgaauacauugaguguu

SEQ ID NO: 1191081 - RNA, 19 nt, Artificial Sequence
  Description of Artificial Sequence: Synthetic oligonucleotide
  Antisense strand to SEQ ID NO: 1191080
aacacucaauguauucgga

SEQ ID NO: 1191082 - RNA, 19 nt, Artificial Sequence
  Description of Artificial Sequence: Synthetic oligonucleotide
  Sense strand starting at position 3063 of SEQ ID NO: 916877
gaauacauugaguguuagu

SEQ ID NO: 1191083 - RNA, 19 nt, Artificial Sequence
  Description of Artificial Sequence: Synthetic oligonucleotide
  Antisense strand to SEQ ID NO: 1191082
acuaacacucaauguauuc

SEQ ID NO: 1191084 - RNA, 19 nt, Artificial Sequence
  Description of Artificial Sequence: Synthetic oligonucleotide
  Sense strand starting at position 3068 of SEQ ID NO: 916877
cauugaguguuagucuaga

SEQ ID NO: 1191085 - RNA, 19 nt, Artificial Sequence
  Description of Artificial Sequence: Synthetic oligonucleotide
  Antisense strand to SEQ ID NO: 1191084
ucuagacuaacacucaaug

SEQ ID NO: 1191086 - RNA, 19 nt, Artificial Sequence
  Description of Artificial Sequence: Synthetic oligonucleotide
  Sense strand starting at position 3073 of SEQ ID NO: 916877
aguguuagucuagacuucu

SEQ ID NO: 1191087 - RNA, 19 nt, Artificial Sequence
  Description of Artificial Sequence: Synthetic oligonucleotide
  Antisense strand to SEQ ID NO: 1191086
agaagucuagacuaacacu

SEQ ID NO: 1191088 - RNA, 19 nt, Artificial Sequence
  Description of Artificial Sequence: Synthetic oligonucleotide
  Sense strand starting at position 3188 of SEQ ID NO: 916877
cucccuugagaauguaauu

SEQ ID NO: 1191089 - RNA, 19 nt, Artificial Sequence
  Description of Artificial Sequence: Synthetic oligonucleotide
  Antisense strand to SEQ ID NO: 1191088
aauuacauucucaagggag

SEQ ID NO: 1191090 - RNA, 19 nt, Artificial Sequence
  Description of Artificial Sequence: Synthetic oligonucleotide
  Sense strand starting at position 3265 of SEQ ID NO: 916877
agaguccacaguuaauguu

SEQ ID NO: 1191091 - RNA, 19 nt, Artificial Sequence
  Description of Artificial Sequence: Synthetic oligonucleotide
  Antisense strand to SEQ ID NO: 1191090
aacauuaacuguggacucu

SEQ ID NO: 1191092 - RNA, 19 nt, Artificial Sequence
  Description of Artificial Sequence: Synthetic oligonucleotide
  Sense strand starting at position 3494 of SEQ ID NO: 916877
gugguaaauuaaccacaga

SEQ ID NO: 1191093 - RNA, 19 nt, Artificial Sequence
  Description of Artificial Sequence: Synthetic oligonucleotide
  Antisense strand to SEQ ID NO: 1191092
ucugugguuaauuuaccac

SEQ ID NO: 1191094 - RNA, 19 nt, Artificial Sequence
  Description of Artificial Sequence: Synthetic oligonucleotide
  Sense strand starting at position 3788 of SEQ ID NO: 916877
cucuguccucuguacuuaa

SEQ ID NO: 1191095 - RNA, 19 nt, Artificial Sequence
  Description of Artificial Sequence: Synthetic oligonucleotide
  Antisense strand to SEQ ID NO: 1191094
uuaaguacagaggacagag

SEQ ID NO: 1191096 - RNA, 19 nt, Artificial Sequence
  Description of Artificial Sequence: Synthetic oligonucleotide
  Sense strand starting at position 3858 of SEQ ID NO: 916877
cuugauaaggucugcuaag

SEQ ID NO: 1191097 - RNA, 19 nt, Artificial Sequence
  Description of Artificial Sequence: Synthetic oligonucleotide
  Antisense strand to SEQ ID NO: 1191096
cuuagcagaccuuaucaag

SEQ ID NO: 1191098 - RNA, 19 nt, Artificial Sequence
  Description of Artificial Sequence: Synthetic oligonucleotide
  Sense strand starting at position 3859 of SEQ ID NO: 916877
uugauaaggucugcuaaga

SEQ ID NO: 1191099 - RNA, 19 nt, Artificial Sequence
  Description of Artificial Sequence: Synthetic oligonucleotide
  Antisense strand to SEQ ID NO: 1191098
ucuuagcagaccuuaucaa

SEQ ID NO: 1191100 - RNA, 19 nt, Artificial Sequence
  Description of Artificial Sequence: Synthetic oligonucleotide
  Sense strand starting at position 125 of SEQ ID NO: 916878
auauuaaagucagugacca

SEQ ID NO: 1191101 - RNA, 19 nt, Artificial Sequence
  Description of Artificial Sequence: Synthetic oligonucleotide
  Antisense strand to SEQ ID NO: 1191100
uggucacugacuuuaauau

SEQ ID NO: 1191102 - RNA, 19 nt, Artificial Sequence
  Description of Artificial Sequence: Synthetic oligonucleotide
  Sense strand starting at position 217 of SEQ ID NO: 916878
guguuacaucuagaaugcu

SEQ ID NO: 1191103 - RNA, 19 nt, Artificial Sequence
  Description of Artificial Sequence: Synthetic oligonucleotide
  Antisense strand to SEQ ID NO: 1191102
agcauucuagauguaacac

SEQ ID NO: 1191104 - RNA, 19 nt, Artificial Sequence
  Description of Artificial Sequence: Synthetic oligonucleotide
  Sense strand starting at position 439 of SEQ ID NO: 916878
acugcauagcuuuacugaa

SEQ ID NO: 1191105 - RNA, 19 nt, Artificial Sequence
  Description of Artificial Sequence: Synthetic oligonucleotide
  Antisense strand to SEQ ID NO: 1191104
uucaguaaagcuaugcagu

SEQ ID NO: 1191106 - RNA, 19 nt, Artificial Sequence
  Description of Artificial Sequence: Synthetic oligonucleotide
  Sense strand starting at position 466 of SEQ ID NO: 916878
augguuaaugcgcaaauua

SEQ ID NO: 1191107 - RNA, 19 nt, Artificial Sequence
  Description of Artificial Sequence: Synthetic oligonucleotide
  Antisense strand to SEQ ID NO: 1191106
uaauuugcgcauuaaccau

SEQ ID NO: 1191108 - RNA, 19 nt, Artificial Sequence
  Description of Artificial Sequence: Synthetic oligonucleotide
  Sense strand starting at position 496 of SEQ ID NO: 916878
guauguuccaaggaggcua

SEQ ID NO: 1191109 - RNA, 19 nt, Artificial Sequence
  Description of Artificial Sequence: Synthetic oligonucleotide
  Antisense strand to SEQ ID NO: 1191108
uagccuccuuggaacauac

SEQ ID NO: 1191110 - RNA, 19 nt, Artificial Sequence
  Description of Artificial Sequence: Synthetic oligonucleotide
  Sense strand starting at position 645 of SEQ ID NO: 916878
uuauuugcauuuggcaaau

SEQ ID NO: 1191111 - RNA, 19 nt, Artificial Sequence
  Description of Artificial Sequence: Synthetic oligonucleotide
  Antisense strand to SEQ ID NO: 1191110
auuugccaaaugcaaauaa

SEQ ID NO: 1191112 - RNA, 19 nt, Artificial Sequence
  Description of Artificial Sequence: Synthetic oligonucleotide
  Sense strand starting at position 655 of SEQ ID NO: 916878
uuggcaaauccuuaauuga

SEQ ID NO: 1191113 - RNA, 19 nt, Artificial Sequence
  Description of Artificial Sequence: Synthetic oligonucleotide
  Antisense strand to SEQ ID NO: 1191112
ucaauuaaggauuugccaa

SEQ ID NO: 1191114 - RNA, 19 nt, Artificial Sequence
  Description of Artificial Sequence: Synthetic oligonucleotide
  Sense strand starting at position 735 of SEQ ID NO: 916878
cuggguuuggagcauaacu

SEQ ID NO: 1191115 - RNA, 19 nt, Artificial Sequence
  Description of Artificial Sequence: Synthetic oligonucleotide
  Antisense strand to SEQ ID NO: 1191114
aguuaugcuccaaacccag

SEQ ID NO: 1191116 - RNA, 19 nt, Artificial Sequence
  Description of Artificial Sequence: Synthetic oligonucleotide
  Sense strand starting at position 737 of SEQ ID NO: 916878
ggguuuggagcauaacuua

SEQ ID NO: 1191117 - RNA, 19 nt, Artificial Sequence
  Description of Artificial Sequence: Synthetic oligonucleotide
  Antisense strand to SEQ ID NO: 1191116
uaaguuaugcuccaaaccc

SEQ ID NO: 1191118 - RNA, 19 nt, Artificial Sequence
  Description of Artificial Sequence: Synthetic oligonucleotide
  Sense strand starting at position 751 of SEQ ID NO: 916878
acuuauucuggaggccaaa

SEQ ID NO: 1191119 - RNA, 19 nt, Artificial Sequence
  Description of Artificial Sequence: Synthetic oligonucleotide
  Antisense strand to SEQ ID NO: 1191118
uuuggccuccagaauaagu

SEQ ID NO: 1191120 - RNA, 19 nt, Artificial Sequence
  Description of Artificial Sequence: Synthetic oligonucleotide
  Sense strand starting at position 817 of SEQ ID NO: 916878
auaaucaguccucauuagu

SEQ ID NO: 1191121 - RNA, 19 nt, Artificial Sequence
  Description of Artificial Sequence: Synthetic oligonucleotide
  Antisense strand to SEQ ID NO: 1191120
acuaaugaggacugauuau

SEQ ID NO: 1191122 - RNA, 19 nt, Artificial Sequence
  Description of Artificial Sequence: Synthetic oligonucleotide
  Sense strand starting at position 939 of SEQ ID NO: 916878
ucggacucuguccagcaau

SEQ ID NO: 1191123 - RNA, 19 nt, Artificial Sequence
  Description of Artificial Sequence: Synthetic oligonucleotide
  Antisense strand to SEQ ID NO: 1191122
auugcuggacagaguccga

SEQ ID NO: 1191124 - RNA, 19 nt, Artificial Sequence
  Description of Artificial Sequence: Synthetic oligonucleotide
  Sense strand starting at position 1022 of SEQ ID NO: 916878
ggccaucuccugugaggaa

SEQ ID NO: 1191125 - RNA, 19 nt, Artificial Sequence
  Description of Artificial Sequence: Synthetic oligonucleotide
  Antisense strand to SEQ ID NO: 1191124
uuccucacaggagauggcc

SEQ ID NO: 1191126 - RNA, 19 nt, Artificial Sequence
  Description of Artificial Sequence: Synthetic oligonucleotide
  Sense strand starting at position 1054 of SEQ ID NO: 916878
gcuugacuucuggacacca

SEQ ID NO: 1191127 - RNA, 19 nt, Artificial Sequence
  Description of Artificial Sequence: Synthetic oligonucleotide
  Antisense strand to SEQ ID NO: 1191126
ugguguccagaagucaagc

SEQ ID NO: 1191128 - RNA, 19 nt, Artificial Sequence
  Description of Artificial Sequence: Synthetic oligonucleotide
  Sense strand starting at position 1164 of SEQ ID NO: 916878
acaaauuaucugugucaga

SEQ ID NO: 1191129 - RNA, 19 nt, Artificial Sequence
  Description of Artificial Sequence: Synthetic oligonucleotide
  Antisense strand to SEQ ID NO: 1191128
ucugacacagauaauuugu

SEQ ID NO: 1191130 - RNA, 19 nt, Artificial Sequence
  Description of Artificial Sequence: Synthetic oligonucleotide
  Sense strand starting at position 1538 of SEQ ID NO: 916878
ccaagucuuaccuggagga

SEQ ID NO: 1191131 - RNA, 19 nt, Artificial Sequence
  Description of Artificial Sequence: Synthetic oligonucleotide
  Antisense strand to SEQ ID NO: 1191130
uccuccagguaagacuugg

SEQ ID NO: 1191132 - RNA, 19 nt, Artificial Sequence
  Description of Artificial Sequence: Synthetic oligonucleotide
  Sense strand starting at position 1539 of SEQ ID NO: 916878
caagucuuaccuggaggaa

SEQ ID NO: 1191133 - RNA, 19 nt, Artificial Sequence
  Description of Artificial Sequence: Synthetic oligonucleotide
  Antisense strand to SEQ ID NO: 1191132
uuccuccagguaagacuug

SEQ ID NO: 1191134 - RNA, 19 nt, Artificial Sequence
  Description of Artificial Sequence: Synthetic oligonucleotide
  Sense strand starting at position 2090 of SEQ ID NO: 916878
gccaacuauuccuuaggga

SEQ ID NO: 1191135 - RNA, 19 nt, Artificial Sequence
  Description of Artificial Sequence: Synthetic oligonucleotide
  Antisense strand to SEQ ID NO: 1191134
ucccuaaggaauaguuggc

SEQ ID NO: 1191136 - RNA, 19 nt, Artificial Sequence
  Description of Artificial Sequence: Synthetic oligonucleotide
  Sense strand starting at position 2212 of SEQ ID NO: 916878
uuccauugguguucuagaa

SEQ ID NO: 1191137 - RNA, 19 nt, Artificial Sequence
  Description of Artificial Sequence: Synthetic oligonucleotide
  Antisense strand to SEQ ID NO: 1191136
uucuagaacaccaauggaa

SEQ ID NO: 1191138 - RNA, 19 nt, Artificial Sequence
  Description of Artificial Sequence: Synthetic oligonucleotide
  Sense strand starting at position 2216 of SEQ ID NO: 916878
auugguguucuagaaucuu

SEQ ID NO: 1191139 - RNA, 19 nt, Artificial Sequence
  Description of Artificial Sequence: Synthetic oligonucleotide
  Antisense strand to SEQ ID NO: 1191138
aagauucuagaacaccaau

SEQ ID NO: 1191140 - RNA, 19 nt, Artificial Sequence
  Description of Artificial Sequence: Synthetic oligonucleotide
  Sense strand starting at position 2222 of SEQ ID NO: 916878
guucuagaaucuuuaagga

SEQ ID NO: 1191141 - RNA, 19 nt, Artificial Sequence
  Description of Artificial Sequence: Synthetic oligonucleotide
  Antisense strand to SEQ ID NO: 1191140
uccuuaaagauucuagaac

SEQ ID NO: 1191142 - RNA, 19 nt, Artificial Sequence
  Description of Artificial Sequence: Synthetic oligonucleotide
  Sense strand starting at position 2306 of SEQ ID NO: 916878
augaucaguugcucauauu

SEQ ID NO: 1191143 - RNA, 19 nt, Artificial Sequence
  Description of Artificial Sequence: Synthetic oligonucleotide
  Antisense strand to SEQ ID NO: 1191142
aauaugagcaacugaucau

SEQ ID NO: 1191144 - RNA, 19 nt, Artificial Sequence
  Description of Artificial Sequence: Synthetic oligonucleotide
  Sense strand starting at position 2394 of SEQ ID NO: 916878
gccuaauuccaaggauaaa

SEQ ID NO: 1191145 - RNA, 19 nt, Artificial Sequence
  Description of Artificial Sequence: Synthetic oligonucleotide
  Antisense strand to SEQ ID NO: 1191144
uuuauccuuggaauuaggc

SEQ ID NO: 1191146 - RNA, 19 nt, Artificial Sequence
  Description of Artificial Sequence: Synthetic oligonucleotide
  Sense strand starting at position 2476 of SEQ ID NO: 916878
gaggaucuuaagcaguagu

SEQ ID NO: 1191147 - RNA, 19 nt, Artificial Sequence
  Description of Artificial Sequence: Synthetic oligonucleotide
  Antisense strand to SEQ ID NO: 1191146
acuacugcuuaagauccuc

SEQ ID NO: 1191148 - RNA, 19 nt, Artificial Sequence
  Description of Artificial Sequence: Synthetic oligonucleotide
  Sense strand starting at position 2479 of SEQ ID NO: 916878
gaucuuaagcaguaguagu

SEQ ID NO: 1191149 - RNA, 19 nt, Artificial Sequence
  Description of Artificial Sequence: Synthetic oligonucleotide
  Antisense strand to SEQ ID NO: 1191148
acuacuacugcuuaagauc

SEQ ID NO: 1191150 - RNA, 19 nt, Artificial Sequence
  Description of Artificial Sequence: Synthetic oligonucleotide
  Sense strand starting at position 2558 of SEQ ID NO: 916878
cucuuaaguggcugagacu

SEQ ID NO: 1191151 - RNA, 19 nt, Artificial Sequence
  Description of Artificial Sequence: Synthetic oligonucleotide
  Antisense strand to SEQ ID NO: 1191150
agucucagccacuuaagag

SEQ ID NO: 1191152 - RNA, 19 nt, Artificial Sequence
  Description of Artificial Sequence: Synthetic oligonucleotide
  Sense strand starting at position 2577 of SEQ ID NO: 916878
cugggauggucacuuaauu

SEQ ID NO: 1191153 - RNA, 19 nt, Artificial Sequence
  Description of Artificial Sequence: Synthetic oligonucleotide
  Antisense strand to SEQ ID NO: 1191152
aauuaagugaccaucccag

SEQ ID NO: 1191154 - RNA, 19 nt, Artificial Sequence
  Description of Artificial Sequence: Synthetic oligonucleotide
  Sense strand starting at position 2768 of SEQ ID NO: 916878
uggucagaauaguuaauau

SEQ ID NO: 1191155 - RNA, 19 nt, Artificial Sequence
  Description of Artificial Sequence: Synthetic oligonucleotide
  Antisense strand to SEQ ID NO: 1191154
auauuaacuauucugacca

SEQ ID NO: 1191156 - RNA, 19 nt, Artificial Sequence
  Description of Artificial Sequence: Synthetic oligonucleotide
  Sense strand starting at position 2931 of SEQ ID NO: 916878
cggaaauagugagcaaaca

SEQ ID NO: 1191157 - RNA, 19 nt, Artificial Sequence
  Description of Artificial Sequence: Synthetic oligonucleotide
  Antisense strand to SEQ ID NO: 1191156
uguuugcucacuauuuccg

SEQ ID NO: 1191158 - RNA, 19 nt, Artificial Sequence
  Description of Artificial Sequence: Synthetic oligonucleotide
  Sense strand starting at position 2949 of SEQ ID NO: 916878
auccgaauacauugagugu

SEQ ID NO: 1191159 - RNA, 19 nt, Artificial Sequence
  Description of Artificial Sequence: Synthetic oligonucleotide
  Antisense strand to SEQ ID NO: 1191158
acacucaauguauucggau

SEQ ID NO: 1191160 - RNA, 19 nt, Artificial Sequence
  Description of Artificial Sequence: Synthetic oligonucleotide
  Sense strand starting at position 2950 of SEQ ID NO: 916878
uccgaauacauugaguguu

SEQ ID NO: 1191161 - RNA, 19 nt, Artificial Sequence
  Description of Artificial Sequence: Synthetic oligonucleotide
  Antisense strand to SEQ ID NO: 1191160
aacacucaauguauucgga

SEQ ID NO: 1191162 - RNA, 19 nt, Artificial Sequence
  Description of Artificial Sequence: Synthetic oligonucleotide
  Sense strand starting at position 2953 of SEQ ID NO: 916878
gaauacauugaguguuagu

SEQ ID NO: 1191163 - RNA, 19 nt, Artificial Sequence
  Description of Artificial Sequence: Synthetic oligonucleotide
  Antisense strand to SEQ ID NO: 1191162
acuaacacucaauguauuc

SEQ ID NO: 1191164 - RNA, 19 nt, Artificial Sequence
  Description of Artificial Sequence: Synthetic oligonucleotide
  Sense strand starting at position 2958 of SEQ ID NO: 916878
cauugaguguuagucuaga

SEQ ID NO: 1191165 - RNA, 19 nt, Artificial Sequence
  Description of Artificial Sequence: Synthetic oligonucleotide
  Antisense strand to SEQ ID NO: 1191164
ucuagacuaacacucaaug

SEQ ID NO: 1191166 - RNA, 19 nt, Artificial Sequence
  Description of Artificial Sequence: Synthetic oligonucleotide
  Sense strand starting at position 2963 of SEQ ID NO: 916878
aguguuagucuagacuucu

SEQ ID NO: 1191167 - RNA, 19 nt, Artificial Sequence
  Description of Artificial Sequence: Synthetic oligonucleotide
  Antisense strand to SEQ ID NO: 1191166
agaagucuagacuaacacu

SEQ ID NO: 1191168 - RNA, 19 nt, Artificial Sequence
  Description of Artificial Sequence: Synthetic oligonucleotide
  Sense strand starting at position 3078 of SEQ ID NO: 916878
cucccuugagaauguaauu

SEQ ID NO: 1191169 - RNA, 19 nt, Artificial Sequence
  Description of Artificial Sequence: Synthetic oligonucleotide
  Antisense strand to SEQ ID NO: 1191168
aauuacauucucaagggag

SEQ ID NO: 1191170 - RNA, 19 nt, Artificial Sequence
  Description of Artificial Sequence: Synthetic oligonucleotide
  Sense strand starting at position 3155 of SEQ ID NO: 916878
agaguccacaguuaauguu

SEQ ID NO: 1191171 - RNA, 19 nt, Artificial Sequence
  Description of Artificial Sequence: Synthetic oligonucleotide
  Antisense strand to SEQ ID NO: 1191170
aacauuaacuguggacucu

SEQ ID NO: 1191172 - RNA, 19 nt, Artificial Sequence
  Description of Artificial Sequence: Synthetic oligonucleotide
  Sense strand starting at position 3384 of SEQ ID NO: 916878
gugguaaauuaaccacaga

SEQ ID NO: 1191173 - RNA, 19 nt, Artificial Sequence
  Description of Artificial Sequence: Synthetic oligonucleotide
  Antisense strand to SEQ ID NO: 1191172
ucugugguuaauuuaccac

SEQ ID NO: 1191174 - RNA, 19 nt, Artificial Sequence
  Description of Artificial Sequence: Synthetic oligonucleotide
  Sense strand starting at position 3678 of SEQ ID NO: 916878
cucuguccucuguacuuaa

SEQ ID NO: 1191175 - RNA, 19 nt, Artificial Sequence
  Description of Artificial Sequence: Synthetic oligonucleotide
  Antisense strand to SEQ ID NO: 1191174
uuaaguacagaggacagag

SEQ ID NO: 1191176 - RNA, 19 nt, Artificial Sequence
  Description of Artificial Sequence: Synthetic oligonucleotide
  Sense strand starting at position 3748 of SEQ ID NO: 916878
cuugauaaggucugcuaag

SEQ ID NO: 1191177 - RNA, 19 nt, Artificial Sequence
  Description of Artificial Sequence: Synthetic oligonucleotide
  Antisense strand to SEQ ID NO: 1191176
cuuagcagaccuuaucaag

SEQ ID NO: 1191178 - RNA, 19 nt, Artificial Sequence
  Description of Artificial Sequence: Synthetic oligonucleotide
  Sense strand starting at position 3749 of SEQ ID NO: 916878
uugauaaggucugcuaaga

SEQ ID NO: 1191179 - RNA, 19 nt, Artificial Sequence
  Description of Artificial Sequence: Synthetic oligonucleotide
  Antisense strand to SEQ ID NO: 1191178
ucuuagcagaccuuaucaa

SEQ ID NO: 1191180 - RNA, 19 nt, Artificial Sequence
  Description of Artificial Sequence: Synthetic oligonucleotide
  Sense strand starting at position 11 of SEQ ID NO: 916879
cccuguuaucuuugaagau

SEQ ID NO: 1191181 - RNA, 19 nt, Artificial Sequence
  Description of Artificial Sequence: Synthetic oligonucleotide
  Antisense strand to SEQ ID NO: 1191180
aucuucaaagauaacaggg

SEQ ID NO: 1191182 - RNA, 19 nt, Artificial Sequence
  Description of Artificial Sequence: Synthetic oligonucleotide
  Sense strand starting at position 15 of SEQ ID NO: 916879
guuaucuuugaagauuccu

SEQ ID NO: 1191183 - RNA, 19 nt, Artificial Sequence
  Description of Artificial Sequence: Synthetic oligonucleotide
  Antisense strand to SEQ ID NO: 1191182
aggaaucuucaaagauaac

SEQ ID NO: 1191184 - RNA, 19 nt, Artificial Sequence
  Description of Artificial Sequence: Synthetic oligonucleotide
  Sense strand starting at position 53 of SEQ ID NO: 916879
ggguuucugcuacauucuu

SEQ ID NO: 1191185 - RNA, 19 nt, Artificial Sequence
  Description of Artificial Sequence: Synthetic oligonucleotide
  Antisense strand to SEQ ID NO: 1191184
aagaauguagcagaaaccc

SEQ ID NO: 1191186 - RNA, 19 nt, Artificial Sequence
  Description of Artificial Sequence: Synthetic oligonucleotide
  Sense strand starting at position 594 of SEQ ID NO: 916879
uugauaaaccgagguuaca

SEQ ID NO: 1191187 - RNA, 19 nt, Artificial Sequence
  Description of Artificial Sequence: Synthetic oligonucleotide
  Antisense strand to SEQ ID NO: 1191186
uguaaccucgguuuaucaa

SEQ ID NO: 1191188 - RNA, 19 nt, Artificial Sequence
  Description of Artificial Sequence: Synthetic oligonucleotide
  Sense strand starting at position 789 of SEQ ID NO: 916879
auucuuucucacugggauu

SEQ ID NO: 1191189 - RNA, 19 nt, Artificial Sequence
  Description of Artificial Sequence: Synthetic oligonucleotide
  Antisense strand to SEQ ID NO: 1191188
aaucccagugagaaagaau

SEQ ID NO: 1191190 - RNA, 19 nt, Artificial Sequence
  Description of Artificial Sequence: Synthetic oligonucleotide
  Sense strand starting at position 889 of SEQ ID NO: 916879
agaggcagaucuguaggaa

SEQ ID NO: 1191191 - RNA, 19 nt, Artificial Sequence
  Description of Artificial Sequence: Synthetic oligonucleotide
  Antisense strand to SEQ ID NO: 1191190
uuccuacagaucugccucu

SEQ ID NO: 1191192 - RNA, 19 nt, Artificial Sequence
  Description of Artificial Sequence: Synthetic oligonucleotide
  Sense strand starting at position 1026 of SEQ ID NO: 916879
ucugguuucccugaauauc

SEQ ID NO: 1191193 - RNA, 19 nt, Artificial Sequence
  Description of Artificial Sequence: Synthetic oligonucleotide
  Antisense strand to SEQ ID NO: 1191192
gauauucagggaaaccaga

SEQ ID NO: 1191194 - RNA, 19 nt, Artificial Sequence
  Description of Artificial Sequence: Synthetic oligonucleotide
  Sense strand starting at position 1036 of SEQ ID NO: 916879
cugaauaucuccucaggcu

SEQ ID NO: 1191195 - RNA, 19 nt, Artificial Sequence
  Description of Artificial Sequence: Synthetic oligonucleotide
  Antisense strand to SEQ ID NO: 1191194
agccugaggagauauucag

SEQ ID NO: 1191196 - RNA, 19 nt, Artificial Sequence
  Description of Artificial Sequence: Synthetic oligonucleotide
  Sense strand starting at position 1170 of SEQ ID NO: 916879
ucucucaaggccugagaaa

SEQ ID NO: 1191197 - RNA, 19 nt, Artificial Sequence
  Description of Artificial Sequence: Synthetic oligonucleotide
  Antisense strand to SEQ ID NO: 1191196
uuucucaggccuugagaga

SEQ ID NO: 1191198 - RNA, 19 nt, Artificial Sequence
  Description of Artificial Sequence: Synthetic oligonucleotide
  Sense strand starting at position 2225 of SEQ ID NO: 916879
cuugacguucucugaauuu

SEQ ID NO: 1191199 - RNA, 19 nt, Artificial Sequence
  Description of Artificial Sequence: Synthetic oligonucleotide
  Antisense strand to SEQ ID NO: 1191198
aaauucagagaacgucaag

SEQ ID NO: 1191200 - RNA, 19 nt, Artificial Sequence
  Description of Artificial Sequence: Synthetic oligonucleotide
  Sense strand starting at position 2244 of SEQ ID NO: 916879
uuagcuaauguggaaaguu

SEQ ID NO: 1191201 - RNA, 19 nt, Artificial Sequence
  Description of Artificial Sequence: Synthetic oligonucleotide
  Antisense strand to SEQ ID NO: 1191200
aacuuuccacauuagcuaa

SEQ ID NO: 1191202 - RNA, 19 nt, Artificial Sequence
  Description of Artificial Sequence: Synthetic oligonucleotide
  Sense strand starting at position 2276 of SEQ ID NO: 916879
uuuguuuaucgcuugcuca

SEQ ID NO: 1191203 - RNA, 19 nt, Artificial Sequence
  Description of Artificial Sequence: Synthetic oligonucleotide
  Antisense strand to SEQ ID NO: 1191202
ugagcaagcgauaaacaaa

SEQ ID NO: 1191204 - RNA, 19 nt, Artificial Sequence
  Description of Artificial Sequence: Synthetic oligonucleotide
  Sense strand starting at position 2278 of SEQ ID NO: 916879
uguuuaucgcuugcucaca

SEQ ID NO: 1191205 - RNA, 19 nt, Artificial Sequence
  Description of Artificial Sequence: Synthetic oligonucleotide
  Antisense strand to SEQ ID NO: 1191204
ugugagcaagcgauaaaca

SEQ ID NO: 1191206 - RNA, 19 nt, Artificial Sequence
  Description of Artificial Sequence: Synthetic oligonucleotide
  Sense strand starting at position 2554 of SEQ ID NO: 916879
cgggucugaaagugaucau

SEQ ID NO: 1191207 - RNA, 19 nt, Artificial Sequence
  Description of Artificial Sequence: Synthetic oligonucleotide
  Antisense strand to SEQ ID NO: 1191206
augaucacuuucagacccg

SEQ ID NO: 1191208 - RNA, 19 nt, Artificial Sequence
  Description of Artificial Sequence: Synthetic oligonucleotide
  Sense strand starting at position 2563 of SEQ ID NO: 916879
aagugaucaugccuguaaa

SEQ ID NO: 1191209 - RNA, 19 nt, Artificial Sequence
  Description of Artificial Sequence: Synthetic oligonucleotide
  Antisense strand to SEQ ID NO: 1191208
uuuacaggcaugaucacuu

SEQ ID NO: 1191210 - RNA, 19 nt, Artificial Sequence
  Description of Artificial Sequence: Synthetic oligonucleotide
  Sense strand starting at position 2564 of SEQ ID NO: 916879
agugaucaugccuguaaag

SEQ ID NO: 1191211 - RNA, 19 nt, Artificial Sequence
  Description of Artificial Sequence: Synthetic oligonucleotide
  Antisense strand to SEQ ID NO: 1191210
cuuuacaggcaugaucacu

SEQ ID NO: 1191212 - RNA, 19 nt, Artificial Sequence
  Description of Artificial Sequence: Synthetic oligonucleotide
  Sense strand starting at position 2585 of SEQ ID NO: 916879
aucucauauccaugguucu

SEQ ID NO: 1191213 - RNA, 19 nt, Artificial Sequence
  Description of Artificial Sequence: Synthetic oligonucleotide
  Antisense strand to SEQ ID NO: 1191212
agaaccauggauaugagau

SEQ ID NO: 1191214 - RNA, 19 nt, Artificial Sequence
  Description of Artificial Sequence: Synthetic oligonucleotide
  Sense strand starting at position 2586 of SEQ ID NO: 916879
ucucauauccaugguucua

SEQ ID NO: 1191215 - RNA, 19 nt, Artificial Sequence
  Description of Artificial Sequence: Synthetic oligonucleotide
  Antisense strand to SEQ ID NO: 1191214
uagaaccauggauaugaga

SEQ ID NO: 1191216 - RNA, 19 nt, Artificial Sequence
  Description of Artificial Sequence: Synthetic oligonucleotide
  Sense strand starting at position 2588 of SEQ ID NO: 916879
ucauauccaugguucuaga

SEQ ID NO: 1191217 - RNA, 19 nt, Artificial Sequence
  Description of Artificial Sequence: Synthetic oligonucleotide
  Antisense strand to SEQ ID NO: 1191216
ucuagaaccauggauauga

SEQ ID NO: 1191218 - RNA, 19 nt, Artificial Sequence
  Description of Artificial Sequence: Synthetic oligonucleotide
  Sense strand starting at position 2626 of SEQ ID NO: 916879
uuugaauaaucagugccau

SEQ ID NO: 1191219 - RNA, 19 nt, Artificial Sequence
  Description of Artificial Sequence: Synthetic oligonucleotide
  Antisense strand to SEQ ID NO: 1191218
auggcacugauuauucaaa

SEQ ID NO: 1191220 - RNA, 19 nt, Artificial Sequence
  Description of Artificial Sequence: Synthetic oligonucleotide
  Sense strand starting at position 2627 of SEQ ID NO: 916879
uugaauaaucagugccaug

SEQ ID NO: 1191221 - RNA, 19 nt, Artificial Sequence
  Description of Artificial Sequence: Synthetic oligonucleotide
  Antisense strand to SEQ ID NO: 1191220
cauggcacugauuauucaa

SEQ ID NO: 1191222 - RNA, 19 nt, Artificial Sequence
  Description of Artificial Sequence: Synthetic oligonucleotide
  Sense strand starting at position 2810 of SEQ ID NO: 916879
ggcaauaccugucugaaua

SEQ ID NO: 1191223 - RNA, 19 nt, Artificial Sequence
  Description of Artificial Sequence: Synthetic oligonucleotide
  Antisense strand to SEQ ID NO: 1191222
uauucagacagguauugcc

SEQ ID NO: 1191224 - RNA, 19 nt, Artificial Sequence
  Description of Artificial Sequence: Synthetic oligonucleotide
  Sense strand starting at position 2811 of SEQ ID NO: 916879
gcaauaccugucugaauag

SEQ ID NO: 1191225 - RNA, 19 nt, Artificial Sequence
  Description of Artificial Sequence: Synthetic oligonucleotide
  Antisense strand to SEQ ID NO: 1191224
cuauucagacagguauugc

SEQ ID NO: 1191226 - RNA, 19 nt, Artificial Sequence
  Description of Artificial Sequence: Synthetic oligonucleotide
  Sense strand starting at position 2820 of SEQ ID NO: 916879
gucugaauagagugacugu

SEQ ID NO: 1191227 - RNA, 19 nt, Artificial Sequence
  Description of Artificial Sequence: Synthetic oligonucleotide
  Antisense strand to SEQ ID NO: 1191226
acagucacucuauucagac

SEQ ID NO: 1191228 - RNA, 19 nt, Artificial Sequence
  Description of Artificial Sequence: Synthetic oligonucleotide
  Sense strand starting at position 2844 of SEQ ID NO: 916879
cgaaauagguuaguaaaua

SEQ ID NO: 1191229 - RNA, 19 nt, Artificial Sequence
  Description of Artificial Sequence: Synthetic oligonucleotide
  Antisense strand to SEQ ID NO: 1191228
uauuuacuaaccuauuucg

SEQ ID NO: 1191230 - RNA, 19 nt, Artificial Sequence
  Description of Artificial Sequence: Synthetic oligonucleotide
  Sense strand starting at position 2858 of SEQ ID NO: 916879
aaauauguacuguaaggca

SEQ ID NO: 1191231 - RNA, 19 nt, Artificial Sequence
  Description of Artificial Sequence: Synthetic oligonucleotide
  Antisense strand to SEQ ID NO: 1191230
ugccuuacaguacauauuu

SEQ ID NO: 1191232 - RNA, 19 nt, Artificial Sequence
  Description of Artificial Sequence: Synthetic oligonucleotide
  Sense strand starting at position 2863 of SEQ ID NO: 916879
uguacuguaaggcauuaga

SEQ ID NO: 1191233 - RNA, 19 nt, Artificial Sequence
  Description of Artificial Sequence: Synthetic oligonucleotide
  Antisense strand to SEQ ID NO: 1191232
ucuaaugccuuacaguaca

SEQ ID NO: 1191234 - RNA, 19 nt, Artificial Sequence
  Description of Artificial Sequence: Synthetic oligonucleotide
  Sense strand starting at position 2971 of SEQ ID NO: 916879
uuucccucccagugauaga

SEQ ID NO: 1191235 - RNA, 19 nt, Artificial Sequence
  Description of Artificial Sequence: Synthetic oligonucleotide
  Antisense strand to SEQ ID NO: 1191234
ucuaucacugggagggaaa

SEQ ID NO: 1191236 - RNA, 19 nt, Artificial Sequence
  Description of Artificial Sequence: Synthetic oligonucleotide
  Sense strand starting at position 3016 of SEQ ID NO: 916879
gcguucuguagguuuguaa

SEQ ID NO: 1191237 - RNA, 19 nt, Artificial Sequence
  Description of Artificial Sequence: Synthetic oligonucleotide
  Antisense strand to SEQ ID NO: 1191236
uuacaaaccuacagaacgc

SEQ ID NO: 1191238 - RNA, 19 nt, Artificial Sequence
  Description of Artificial Sequence: Synthetic oligonucleotide
  Sense strand starting at position 3025 of SEQ ID NO: 916879
agguuuguaaaccaguauu

SEQ ID NO: 1191239 - RNA, 19 nt, Artificial Sequence
  Description of Artificial Sequence: Synthetic oligonucleotide
  Antisense strand to SEQ ID NO: 1191238
aauacugguuuacaaaccu

SEQ ID NO: 1191240 - RNA, 19 nt, Artificial Sequence
  Description of Artificial Sequence: Synthetic oligonucleotide
  Sense strand starting at position 3090 of SEQ ID NO: 916879
cauguuaauccgggaacag

SEQ ID NO: 1191241 - RNA, 19 nt, Artificial Sequence
  Description of Artificial Sequence: Synthetic oligonucleotide
  Antisense strand to SEQ ID NO: 1191240
cuguucccggauuaacaug

SEQ ID NO: 1191242 - RNA, 19 nt, Artificial Sequence
  Description of Artificial Sequence: Synthetic oligonucleotide
  Sense strand starting at position 3582 of SEQ ID NO: 916879
uguaaauaugugcauggga

SEQ ID NO: 1191243 - RNA, 19 nt, Artificial Sequence
  Description of Artificial Sequence: Synthetic oligonucleotide
  Antisense strand to SEQ ID NO: 1191242
ucccaugcacauauuuaca

SEQ ID NO: 1191244 - RNA, 19 nt, Artificial Sequence
  Description of Artificial Sequence: Synthetic oligonucleotide
  Sense strand starting at position 3584 of SEQ ID NO: 916879
uaaauaugugcaugggaaa

SEQ ID NO: 1191245 - RNA, 19 nt, Artificial Sequence
  Description of Artificial Sequence: Synthetic oligonucleotide
  Antisense strand to SEQ ID NO: 1191244
uuucccaugcacauauuua

SEQ ID NO: 1191246 - RNA, 19 nt, Artificial Sequence
  Description of Artificial Sequence: Synthetic oligonucleotide
  Sense strand starting at position 3680 of SEQ ID NO: 916879
cuggcuuguccuuagauaa

SEQ ID NO: 1191247 - RNA, 19 nt, Artificial Sequence
  Description of Artificial Sequence: Synthetic oligonucleotide
  Antisense strand to SEQ ID NO: 1191246
uuaucuaaggacaagccag

SEQ ID NO: 1191248 - RNA, 19 nt, Artificial Sequence
  Description of Artificial Sequence: Synthetic oligonucleotide
  Sense strand starting at position 3784 of SEQ ID NO: 916879
uguccaccuugaucaugaa

SEQ ID NO: 1191249 - RNA, 19 nt, Artificial Sequence
  Description of Artificial Sequence: Synthetic oligonucleotide
  Antisense strand to SEQ ID NO: 1191248
uucaugaucaagguggaca

SEQ ID NO: 1191250 - RNA, 19 nt, Artificial Sequence
  Description of Artificial Sequence: Synthetic oligonucleotide
  Sense strand starting at position 3785 of SEQ ID NO: 916879
guccaccuugaucaugaau

SEQ ID NO: 1191251 - RNA, 19 nt, Artificial Sequence
  Description of Artificial Sequence: Synthetic oligonucleotide
  Antisense strand to SEQ ID NO: 1191250
auucaugaucaagguggac

SEQ ID NO: 1191252 - RNA, 19 nt, Artificial Sequence
  Description of Artificial Sequence: Synthetic oligonucleotide
  Sense strand starting at position 3854 of SEQ ID NO: 916879
uuucuauuauguguugaag

SEQ ID NO: 1191253 - RNA, 19 nt, Artificial Sequence
  Description of Artificial Sequence: Synthetic oligonucleotide
  Antisense strand to SEQ ID NO: 1191252
cuucaacacauaauagaaa

SEQ ID NO: 1191254 - RNA, 19 nt, Artificial Sequence
  Description of Artificial Sequence: Synthetic oligonucleotide
  Sense strand starting at position 3857 of SEQ ID NO: 916879
cuauuauguguugaagauu

SEQ ID NO: 1191255 - RNA, 19 nt, Artificial Sequence
  Description of Artificial Sequence: Synthetic oligonucleotide
  Antisense strand to SEQ ID NO: 1191254
aaucuucaacacauaauag

SEQ ID NO: 1191256 - RNA, 19 nt, Artificial Sequence
  Description of Artificial Sequence: Synthetic oligonucleotide
  Sense strand starting at position 3860 of SEQ ID NO: 916879
uuauguguugaagauuguu

SEQ ID NO: 1191257 - RNA, 19 nt, Artificial Sequence
  Description of Artificial Sequence: Synthetic oligonucleotide
  Antisense strand to SEQ ID NO: 1191256
aacaaucuucaacacauaa

SEQ ID NO: 1191258 - RNA, 19 nt, Artificial Sequence
  Description of Artificial Sequence: Synthetic oligonucleotide
  Sense strand starting at position 3865 of SEQ ID NO: 916879
uguugaagauuguuuagaa

SEQ ID NO: 1191259 - RNA, 19 nt, Artificial Sequence
  Description of Artificial Sequence: Synthetic oligonucleotide
  Antisense strand to SEQ ID NO: 1191258
uucuaaacaaucuucaaca

SEQ ID NO: 1191260 - RNA, 19 nt, Artificial Sequence
  Description of Artificial Sequence: Synthetic oligonucleotide
  Sense strand starting at position 21 of SEQ ID NO: 916880
acaaguacucagugcuaau

SEQ ID NO: 1191261 - RNA, 19 nt, Artificial Sequence
  Description of Artificial Sequence: Synthetic oligonucleotide
  Antisense strand to SEQ ID NO: 1191260
auuagcacugaguacuugu

SEQ ID NO: 1191262 - RNA, 19 nt, Artificial Sequence
  Description of Artificial Sequence: Synthetic oligonucleotide
  Sense strand starting at position 53 of SEQ ID NO: 916880
gagugcuuacgagauacua

SEQ ID NO: 1191263 - RNA, 19 nt, Artificial Sequence
  Description of Artificial Sequence: Synthetic oligonucleotide
  Antisense strand to SEQ ID NO: 1191262
uaguaucucguaagcacuc

SEQ ID NO: 1191264 - RNA, 19 nt, Artificial Sequence
  Description of Artificial Sequence: Synthetic oligonucleotide
  Sense strand starting at position 55 of SEQ ID NO: 916880
gugcuuacgagauacuaca

SEQ ID NO: 1191265 - RNA, 19 nt, Artificial Sequence
  Description of Artificial Sequence: Synthetic oligonucleotide
  Antisense strand to SEQ ID NO: 1191264
uguaguaucucguaagcac

SEQ ID NO: 1191266 - RNA, 19 nt, Artificial Sequence
  Description of Artificial Sequence: Synthetic oligonucleotide
  Sense strand starting at position 168 of SEQ ID NO: 916880
gagcuuagagguuagcaau

SEQ ID NO: 1191267 - RNA, 19 nt, Artificial Sequence
  Description of Artificial Sequence: Synthetic oligonucleotide
  Antisense strand to SEQ ID NO: 1191266
auugcuaaccucuaagcuc

SEQ ID NO: 1191268 - RNA, 19 nt, Artificial Sequence
  Description of Artificial Sequence: Synthetic oligonucleotide
  Sense strand starting at position 174 of SEQ ID NO: 916880
agagguuagcaauacuauc

SEQ ID NO: 1191269 - RNA, 19 nt, Artificial Sequence
  Description of Artificial Sequence: Synthetic oligonucleotide
  Antisense strand to SEQ ID NO: 1191268
gauaguauugcuaaccucu

SEQ ID NO: 1191270 - RNA, 19 nt, Artificial Sequence
  Description of Artificial Sequence: Synthetic oligonucleotide
  Sense strand starting at position 219 of SEQ ID NO: 916880
cccuguuaucuuugaagau

SEQ ID NO: 1191271 - RNA, 19 nt, Artificial Sequence
  Description of Artificial Sequence: Synthetic oligonucleotide
  Antisense strand to SEQ ID NO: 1191270
aucuucaaagauaacaggg

SEQ ID NO: 1191272 - RNA, 19 nt, Artificial Sequence
  Description of Artificial Sequence: Synthetic oligonucleotide
  Sense strand starting at position 223 of SEQ ID NO: 916880
guuaucuuugaagauuccu

SEQ ID NO: 1191273 - RNA, 19 nt, Artificial Sequence
  Description of Artificial Sequence: Synthetic oligonucleotide
  Antisense strand to SEQ ID NO: 1191272
aggaaucuucaaagauaac

SEQ ID NO: 1191274 - RNA, 19 nt, Artificial Sequence
  Description of Artificial Sequence: Synthetic oligonucleotide
  Sense strand starting at position 261 of SEQ ID NO: 916880
ggguuucugcuacauucuu

SEQ ID NO: 1191275 - RNA, 19 nt, Artificial Sequence
  Description of Artificial Sequence: Synthetic oligonucleotide
  Antisense strand to SEQ ID NO: 1191274
aagaauguagcagaaaccc

SEQ ID NO: 1191276 - RNA, 19 nt, Artificial Sequence
  Description of Artificial Sequence: Synthetic oligonucleotide
  Sense strand starting at position 802 of SEQ ID NO: 916880
uugauaaaccgagguuaca

SEQ ID NO: 1191277 - RNA, 19 nt, Artificial Sequence
  Description of Artificial Sequence: Synthetic oligonucleotide
  Antisense strand to SEQ ID NO: 1191276
uguaaccucgguuuaucaa

SEQ ID NO: 1191278 - RNA, 19 nt, Artificial Sequence
  Description of Artificial Sequence: Synthetic oligonucleotide
  Sense strand starting at position 997 of SEQ ID NO: 916880
auucuuucucacugggauu

SEQ ID NO: 1191279 - RNA, 19 nt, Artificial Sequence
  Description of Artificial Sequence: Synthetic oligonucleotide
  Antisense strand to SEQ ID NO: 1191278
aaucccagugagaaagaau

SEQ ID NO: 1191280 - RNA, 19 nt, Artificial Sequence
  Description of Artificial Sequence: Synthetic oligonucleotide
  Sense strand starting at position 1097 of SEQ ID NO: 916880
agaggcagaucuguaggaa

SEQ ID NO: 1191281 - RNA, 19 nt, Artificial Sequence
  Description of Artificial Sequence: Synthetic oligonucleotide
  Antisense strand to SEQ ID NO: 1191280
uuccuacagaucugccucu

SEQ ID NO: 1191282 - RNA, 19 nt, Artificial Sequence
  Description of Artificial Sequence: Synthetic oligonucleotide
  Sense strand starting at position 1234 of SEQ ID NO: 916880
ucugguuucccugaauauc

SEQ ID NO: 1191283 - RNA, 19 nt, Artificial Sequence
  Description of Artificial Sequence: Synthetic oligonucleotide
  Antisense strand to SEQ ID NO: 1191282
gauauucagggaaaccaga

SEQ ID NO: 1191284 - RNA, 19 nt, Artificial Sequence
  Description of Artificial Sequence: Synthetic oligonucleotide
  Sense strand starting at position 1244 of SEQ ID NO: 916880
cugaauaucuccucaggcu

SEQ ID NO: 1191285 - RNA, 19 nt, Artificial Sequence
  Description of Artificial Sequence: Synthetic oligonucleotide
  Antisense strand to SEQ ID NO: 1191284
agccugaggagauauucag

SEQ ID NO: 1191286 - RNA, 19 nt, Artificial Sequence
  Description of Artificial Sequence: Synthetic oligonucleotide
  Sense strand starting at position 1378 of SEQ ID NO: 916880
ucucucaaggccugagaaa

SEQ ID NO: 1191287 - RNA, 19 nt, Artificial Sequence
  Description of Artificial Sequence: Synthetic oligonucleotide
  Antisense strand to SEQ ID NO: 1191286
uuucucaggccuugagaga

SEQ ID NO: 1191288 - RNA, 19 nt, Artificial Sequence
  Description of Artificial Sequence: Synthetic oligonucleotide
  Sense strand starting at position 2433 of SEQ ID NO: 916880
cuugacguucucugaauuu

SEQ ID NO: 1191289 - RNA, 19 nt, Artificial Sequence
  Description of Artificial Sequence: Synthetic oligonucleotide
  Antisense strand to SEQ ID NO: 1191288
aaauucagagaacgucaag

SEQ ID NO: 1191290 - RNA, 19 nt, Artificial Sequence
  Description of Artificial Sequence: Synthetic oligonucleotide
  Sense strand starting at position 2452 of SEQ ID NO: 916880
uuagcuaauguggaaaguu

SEQ ID NO: 1191291 - RNA, 19 nt, Artificial Sequence
  Description of Artificial Sequence: Synthetic oligonucleotide
  Antisense strand to SEQ ID NO: 1191290
aacuuuccacauuagcuaa

SEQ ID NO: 1191292 - RNA, 19 nt, Artificial Sequence
  Description of Artificial Sequence: Synthetic oligonucleotide
  Sense strand starting at position 2460 of SEQ ID NO: 916880
uguggaaaguuacauuuau

SEQ ID NO: 1191293 - RNA, 19 nt, Artificial Sequence
  Description of Artificial Sequence: Synthetic oligonucleotide
  Antisense strand to SEQ ID NO: 1191292
auaaauguaacuuuccaca

SEQ ID NO: 1191294 - RNA, 19 nt, Artificial Sequence
  Description of Artificial Sequence: Synthetic oligonucleotide
  Sense strand starting at position 2484 of SEQ ID NO: 916880
uuuguuuaucgcuugcuca

SEQ ID NO: 1191295 - RNA, 19 nt, Artificial Sequence
  Description of Artificial Sequence: Synthetic oligonucleotide
  Antisense strand to SEQ ID NO: 1191294
ugagcaagcgauaaacaaa

SEQ ID NO: 1191296 - RNA, 19 nt, Artificial Sequence
  Description of Artificial Sequence: Synthetic oligonucleotide
  Sense strand starting at position 2486 of SEQ ID NO: 916880
uguuuaucgcuugcucaca

SEQ ID NO: 1191297 - RNA, 19 nt, Artificial Sequence
  Description of Artificial Sequence: Synthetic oligonucleotide
  Antisense strand to SEQ ID NO: 1191296
ugugagcaagcgauaaaca

SEQ ID NO: 1191298 - RNA, 19 nt, Artificial Sequence
  Description of Artificial Sequence: Synthetic oligonucleotide
  Sense strand starting at position 2762 of SEQ ID NO: 916880
cgggucugaaagugaucau

SEQ ID NO: 1191299 - RNA, 19 nt, Artificial Sequence
  Description of Artificial Sequence: Synthetic oligonucleotide
  Antisense strand to SEQ ID NO: 1191298
augaucacuuucagacccg

SEQ ID NO: 1191300 - RNA, 19 nt, Artificial Sequence
  Description of Artificial Sequence: Synthetic oligonucleotide
  Sense strand starting at position 2771 of SEQ ID NO: 916880
aagugaucaugccuguaaa

SEQ ID NO: 1191301 - RNA, 19 nt, Artificial Sequence
  Description of Artificial Sequence: Synthetic oligonucleotide
  Antisense strand to SEQ ID NO: 1191300
uuuacaggcaugaucacuu

SEQ ID NO: 1191302 - RNA, 19 nt, Artificial Sequence
  Description of Artificial Sequence: Synthetic oligonucleotide
  Sense strand starting at position 2772 of SEQ ID NO: 916880
agugaucaugccuguaaag

SEQ ID NO: 1191303 - RNA, 19 nt, Artificial Sequence
  Description of Artificial Sequence: Synthetic oligonucleotide
  Antisense strand to SEQ ID NO: 1191302
cuuuacaggcaugaucacu

SEQ ID NO: 1191304 - RNA, 19 nt, Artificial Sequence
  Description of Artificial Sequence: Synthetic oligonucleotide
  Sense strand starting at position 2793 of SEQ ID NO: 916880
aucucauauccaugguucu

SEQ ID NO: 1191305 - RNA, 19 nt, Artificial Sequence
  Description of Artificial Sequence: Synthetic oligonucleotide
  Antisense strand to SEQ ID NO: 1191304
agaaccauggauaugagau

SEQ ID NO: 1191306 - RNA, 19 nt, Artificial Sequence
  Description of Artificial Sequence: Synthetic oligonucleotide
  Sense strand starting at position 2794 of SEQ ID NO: 916880
ucucauauccaugguucua

SEQ ID NO: 1191307 - RNA, 19 nt, Artificial Sequence
  Description of Artificial Sequence: Synthetic oligonucleotide
  Antisense strand to SEQ ID NO: 1191306
uagaaccauggauaugaga

SEQ ID NO: 1191308 - RNA, 19 nt, Artificial Sequence
  Description of Artificial Sequence: Synthetic oligonucleotide
  Sense strand starting at position 2796 of SEQ ID NO: 916880
ucauauccaugguucuaga

SEQ ID NO: 1191309 - RNA, 19 nt, Artificial Sequence
  Description of Artificial Sequence: Synthetic oligonucleotide
  Antisense strand to SEQ ID NO: 1191308
ucuagaaccauggauauga

SEQ ID NO: 1191310 - RNA, 19 nt, Artificial Sequence
  Description of Artificial Sequence: Synthetic oligonucleotide
  Sense strand starting at position 2834 of SEQ ID NO: 916880
uuugaauaaucagugccau

SEQ ID NO: 1191311 - RNA, 19 nt, Artificial Sequence
  Description of Artificial Sequence: Synthetic oligonucleotide
  Antisense strand to SEQ ID NO: 1191310
auggcacugauuauucaaa

SEQ ID NO: 1191312 - RNA, 19 nt, Artificial Sequence
  Description of Artificial Sequence: Synthetic oligonucleotide
  Sense strand starting at position 2835 of SEQ ID NO: 916880
uugaauaaucagugccaug

SEQ ID NO: 1191313 - RNA, 19 nt, Artificial Sequence
  Description of Artificial Sequence: Synthetic oligonucleotide
  Antisense strand to SEQ ID NO: 1191312
cauggcacugauuauucaa

SEQ ID NO: 1191314 - RNA, 19 nt, Artificial Sequence
  Description of Artificial Sequence: Synthetic oligonucleotide
  Sense strand starting at position 3018 of SEQ ID NO: 916880
ggcaauaccugucugaaua

SEQ ID NO: 1191315 - RNA, 19 nt, Artificial Sequence
  Description of Artificial Sequence: Synthetic oligonucleotide
  Antisense strand to SEQ ID NO: 1191314
uauucagacagguauugcc

SEQ ID NO: 1191316 - RNA, 19 nt, Artificial Sequence
  Description of Artificial Sequence: Synthetic oligonucleotide
  Sense strand starting at position 3019 of SEQ ID NO: 916880
gcaauaccugucugaauag

SEQ ID NO: 1191317 - RNA, 19 nt, Artificial Sequence
  Description of Artificial Sequence: Synthetic oligonucleotide
  Antisense strand to SEQ ID NO: 1191316
cuauucagacagguauugc

SEQ ID NO: 1191318 - RNA, 19 nt, Artificial Sequence
  Description of Artificial Sequence: Synthetic oligonucleotide
  Sense strand starting at position 3028 of SEQ ID NO: 916880
gucugaauagagugacugu

SEQ ID NO: 1191319 - RNA, 19 nt, Artificial Sequence
  Description of Artificial Sequence: Synthetic oligonucleotide
  Antisense strand to SEQ ID NO: 1191318
acagucacucuauucagac

SEQ ID NO: 1191320 - RNA, 19 nt, Artificial Sequence
  Description of Artificial Sequence: Synthetic oligonucleotide
  Sense strand starting at position 3052 of SEQ ID NO: 916880
cgaaauagguuaguaaaua

SEQ ID NO: 1191321 - RNA, 19 nt, Artificial Sequence
  Description of Artificial Sequence: Synthetic oligonucleotide
  Antisense strand to SEQ ID NO: 1191320
uauuuacuaaccuauuucg

SEQ ID NO: 1191322 - RNA, 19 nt, Artificial Sequence
  Description of Artificial Sequence: Synthetic oligonucleotide
  Sense strand starting at position 3066 of SEQ ID NO: 916880
aaauauguacuguaaggca

SEQ ID NO: 1191323 - RNA, 19 nt, Artificial Sequence
  Description of Artificial Sequence: Synthetic oligonucleotide
  Antisense strand to SEQ ID NO: 1191322
ugccuuacaguacauauuu

SEQ ID NO: 1191324 - RNA, 19 nt, Artificial Sequence
  Description of Artificial Sequence: Synthetic oligonucleotide
  Sense strand starting at position 3071 of SEQ ID NO: 916880
uguacuguaaggcauuaga

SEQ ID NO: 1191325 - RNA, 19 nt, Artificial Sequence
  Description of Artificial Sequence: Synthetic oligonucleotide
  Antisense strand to SEQ ID NO: 1191324
ucuaaugccuuacaguaca

SEQ ID NO: 1191326 - RNA, 19 nt, Artificial Sequence
  Description of Artificial Sequence: Synthetic oligonucleotide
  Sense strand starting at position 3179 of SEQ ID NO: 916880
uuucccucccagugauaga

SEQ ID NO: 1191327 - RNA, 19 nt, Artificial Sequence
  Description of Artificial Sequence: Synthetic oligonucleotide
  Antisense strand to SEQ ID NO: 1191326
ucuaucacugggagggaaa

SEQ ID NO: 1191328 - RNA, 19 nt, Artificial Sequence
  Description of Artificial Sequence: Synthetic oligonucleotide
  Sense strand starting at position 3224 of SEQ ID NO: 916880
gcguucuguagguuuguaa

SEQ ID NO: 1191329 - RNA, 19 nt, Artificial Sequence
  Description of Artificial Sequence: Synthetic oligonucleotide
  Antisense strand to SEQ ID NO: 1191328
uuacaaaccuacagaacgc

SEQ ID NO: 1191330 - RNA, 19 nt, Artificial Sequence
  Description of Artificial Sequence: Synthetic oligonucleotide
  Sense strand starting at position 3233 of SEQ ID NO: 916880
agguuuguaaaccaguauu

SEQ ID NO: 1191331 - RNA, 19 nt, Artificial Sequence
  Description of Artificial Sequence: Synthetic oligonucleotide
  Antisense strand to SEQ ID NO: 1191330
aauacugguuuacaaaccu

SEQ ID NO: 1191332 - RNA, 19 nt, Artificial Sequence
  Description of Artificial Sequence: Synthetic oligonucleotide
  Sense strand starting at position 3298 of SEQ ID NO: 916880
cauguuaauccgggaacag

SEQ ID NO: 1191333 - RNA, 19 nt, Artificial Sequence
  Description of Artificial Sequence: Synthetic oligonucleotide
  Antisense strand to SEQ ID NO: 1191332
cuguucccggauuaacaug

SEQ ID NO: 1191334 - RNA, 19 nt, Artificial Sequence
  Description of Artificial Sequence: Synthetic oligonucleotide
  Sense strand starting at position 3790 of SEQ ID NO: 916880
uguaaauaugugcauggga

SEQ ID NO: 1191335 - RNA, 19 nt, Artificial Sequence
  Description of Artificial Sequence: Synthetic oligonucleotide
  Antisense strand to SEQ ID NO: 1191334
ucccaugcacauauuuaca

SEQ ID NO: 1191336 - RNA, 19 nt, Artificial Sequence
  Description of Artificial Sequence: Synthetic oligonucleotide
  Sense strand starting at position 3792 of SEQ ID NO: 916880
uaaauaugugcaugggaaa

SEQ ID NO: 1191337 - RNA, 19 nt, Artificial Sequence
  Description of Artificial Sequence: Synthetic oligonucleotide
  Antisense strand to SEQ ID NO: 1191336
uuucccaugcacauauuua

SEQ ID NO: 1191338 - RNA, 19 nt, Artificial Sequence
  Description of Artificial Sequence: Synthetic oligonucleotide
  Sense strand starting at position 3888 of SEQ ID NO: 916880
cuggcuuguccuuagauaa

SEQ ID NO: 1191339 - RNA, 19 nt, Artificial Sequence
  Description of Artificial Sequence: Synthetic oligonucleotide
  Antisense strand to SEQ ID NO: 1191338
uuaucuaaggacaagccag

SEQ ID NO: 1191340 - RNA, 19 nt, Artificial Sequence
  Description of Artificial Sequence: Synthetic oligonucleotide
  Sense strand starting at position 72 of SEQ ID NO: 916881
ucuggagguuuauaaaguu

SEQ ID NO: 1191341 - RNA, 19 nt, Artificial Sequence
  Description of Artificial Sequence: Synthetic oligonucleotide
  Antisense strand to SEQ ID NO: 1191340
aacuuuauaaaccuccaga

SEQ ID NO: 1191342 - RNA, 19 nt, Artificial Sequence
  Description of Artificial Sequence: Synthetic oligonucleotide
  Sense strand starting at position 210 of SEQ ID NO: 916881
gggcaaguugacugaguga

SEQ ID NO: 1191343 - RNA, 19 nt, Artificial Sequence
  Description of Artificial Sequence: Synthetic oligonucleotide
  Antisense strand to SEQ ID NO: 1191342
ucacucagucaacuugccc

SEQ ID NO: 1191344 - RNA, 19 nt, Artificial Sequence
  Description of Artificial Sequence: Synthetic oligonucleotide
  Sense strand starting at position 242 of SEQ ID NO: 916881
gcuucugaagacuggguau

SEQ ID NO: 1191345 - RNA, 19 nt, Artificial Sequence
  Description of Artificial Sequence: Synthetic oligonucleotide
  Antisense strand to SEQ ID NO: 1191344
auacccagucuucagaagc

SEQ ID NO: 1191346 - RNA, 19 nt, Artificial Sequence
  Description of Artificial Sequence: Synthetic oligonucleotide
  Sense strand starting at position 244 of SEQ ID NO: 916881
uucugaagacuggguauaa

SEQ ID NO: 1191347 - RNA, 19 nt, Artificial Sequence
  Description of Artificial Sequence: Synthetic oligonucleotide
  Antisense strand to SEQ ID NO: 1191346
uuauacccagucuucagaa

SEQ ID NO: 1191348 - RNA, 19 nt, Artificial Sequence
  Description of Artificial Sequence: Synthetic oligonucleotide
  Sense strand starting at position 350 of SEQ ID NO: 916881
gaaacuguaucugagacaa

SEQ ID NO: 1191349 - RNA, 19 nt, Artificial Sequence
  Description of Artificial Sequence: Synthetic oligonucleotide
  Antisense strand to SEQ ID NO: 1191348
uugucucagauacaguuuc

SEQ ID NO: 1191350 - RNA, 19 nt, Artificial Sequence
  Description of Artificial Sequence: Synthetic oligonucleotide
  Sense strand starting at position 352 of SEQ ID NO: 916881
aacuguaucugagacaagu

SEQ ID NO: 1191351 - RNA, 19 nt, Artificial Sequence
  Description of Artificial Sequence: Synthetic oligonucleotide
  Antisense strand to SEQ ID NO: 1191350
acuugucucagauacaguu

SEQ ID NO: 1191352 - RNA, 19 nt, Artificial Sequence
  Description of Artificial Sequence: Synthetic oligonucleotide
  Sense strand starting at position 513 of SEQ ID NO: 916881
cucucagugagaggugaaa

SEQ ID NO: 1191353 - RNA, 19 nt, Artificial Sequence
  Description of Artificial Sequence: Synthetic oligonucleotide
  Antisense strand to SEQ ID NO: 1191352
uuucaccucucacugagag

SEQ ID NO: 1191354 - RNA, 19 nt, Artificial Sequence
  Description of Artificial Sequence: Synthetic oligonucleotide
  Sense strand starting at position 662 of SEQ ID NO: 916881
aagguagaagccugggaau

SEQ ID NO: 1191355 - RNA, 19 nt, Artificial Sequence
  Description of Artificial Sequence: Synthetic oligonucleotide
  Antisense strand to SEQ ID NO: 1191354
auucccaggcuucuaccuu

SEQ ID NO: 1191356 - RNA, 19 nt, Artificial Sequence
  Description of Artificial Sequence: Synthetic oligonucleotide
  Sense strand starting at position 664 of SEQ ID NO: 916881
gguagaagccugggaauaa

SEQ ID NO: 1191357 - RNA, 19 nt, Artificial Sequence
  Description of Artificial Sequence: Synthetic oligonucleotide
  Antisense strand to SEQ ID NO: 1191356
uuauucccaggcuucuacc

SEQ ID NO: 1191358 - RNA, 19 nt, Artificial Sequence
  Description of Artificial Sequence: Synthetic oligonucleotide
  Sense strand starting at position 665 of SEQ ID NO: 916881
guagaagccugggaauaag

SEQ ID NO: 1191359 - RNA, 19 nt, Artificial Sequence
  Description of Artificial Sequence: Synthetic oligonucleotide
  Antisense strand to SEQ ID NO: 1191358
cuuauucccaggcuucuac

SEQ ID NO: 1191360 - RNA, 19 nt, Artificial Sequence
  Description of Artificial Sequence: Synthetic oligonucleotide
  Sense strand starting at position 695 of SEQ ID NO: 916881
ggcguagagacaugccaua

SEQ ID NO: 1191361 - RNA, 19 nt, Artificial Sequence
  Description of Artificial Sequence: Synthetic oligonucleotide
  Antisense strand to SEQ ID NO: 1191360
uauggcaugucucuacgcc

SEQ ID NO: 1191362 - RNA, 19 nt, Artificial Sequence
  Description of Artificial Sequence: Synthetic oligonucleotide
  Sense strand starting at position 719 of SEQ ID NO: 916881
agcagcuauuugucaggau

SEQ ID NO: 1191363 - RNA, 19 nt, Artificial Sequence
  Description of Artificial Sequence: Synthetic oligonucleotide
  Antisense strand to SEQ ID NO: 1191362
auccugacaaauagcugcu

SEQ ID NO: 1191364 - RNA, 19 nt, Artificial Sequence
  Description of Artificial Sequence: Synthetic oligonucleotide
  Sense strand starting at position 720 of SEQ ID NO: 916881
gcagcuauuugucaggauu

SEQ ID NO: 1191365 - RNA, 19 nt, Artificial Sequence
  Description of Artificial Sequence: Synthetic oligonucleotide
  Antisense strand to SEQ ID NO: 1191364
aauccugacaaauagcugc

SEQ ID NO: 1191366 - RNA, 19 nt, Artificial Sequence
  Description of Artificial Sequence: Synthetic oligonucleotide
  Sense strand starting at position 722 of SEQ ID NO: 916881
agcuauuugucaggauucu

SEQ ID NO: 1191367 - RNA, 19 nt, Artificial Sequence
  Description of Artificial Sequence: Synthetic oligonucleotide
  Antisense strand to SEQ ID NO: 1191366
agaauccugacaaauagcu

SEQ ID NO: 1191368 - RNA, 19 nt, Artificial Sequence
  Description of Artificial Sequence: Synthetic oligonucleotide
  Sense strand starting at position 888 of SEQ ID NO: 916881
cucugaggguagugagaaa

SEQ ID NO: 1191369 - RNA, 19 nt, Artificial Sequence
  Description of Artificial Sequence: Synthetic oligonucleotide
  Antisense strand to SEQ ID NO: 1191368
uuucucacuacccucagag

SEQ ID NO: 1191370 - RNA, 19 nt, Artificial Sequence
  Description of Artificial Sequence: Synthetic oligonucleotide
  Sense strand starting at position 914 of SEQ ID NO: 916881
gcagaccauuuccagagaa

SEQ ID NO: 1191371 - RNA, 19 nt, Artificial Sequence
  Description of Artificial Sequence: Synthetic oligonucleotide
  Antisense strand to SEQ ID NO: 1191370
uucucuggaaauggucugc

SEQ ID NO: 1191372 - RNA, 19 nt, Artificial Sequence
  Description of Artificial Sequence: Synthetic oligonucleotide
  Sense strand starting at position 1015 of SEQ ID NO: 916881
accuuaugaucuccaguua

SEQ ID NO: 1191373 - RNA, 19 nt, Artificial Sequence
  Description of Artificial Sequence: Synthetic oligonucleotide
  Antisense strand to SEQ ID NO: 1191372
uaacuggagaucauaaggu

SEQ ID NO: 1191374 - RNA, 19 nt, Artificial Sequence
  Description of Artificial Sequence: Synthetic oligonucleotide
  Sense strand starting at position 1016 of SEQ ID NO: 916881
ccuuaugaucuccaguuau

SEQ ID NO: 1191375 - RNA, 19 nt, Artificial Sequence
  Description of Artificial Sequence: Synthetic oligonucleotide
  Antisense strand to SEQ ID NO: 1191374
auaacuggagaucauaagg

SEQ ID NO: 1191376 - RNA, 19 nt, Artificial Sequence
  Description of Artificial Sequence: Synthetic oligonucleotide
  Sense strand starting at position 1247 of SEQ ID NO: 916881
ggugaucccuggguggaga

SEQ ID NO: 1191377 - RNA, 19 nt, Artificial Sequence
  Description of Artificial Sequence: Synthetic oligonucleotide
  Antisense strand to SEQ ID NO: 1191376
ucuccacccagggaucacc

SEQ ID NO: 1191378 - RNA, 19 nt, Artificial Sequence
  Description of Artificial Sequence: Synthetic oligonucleotide
  Sense strand starting at position 1295 of SEQ ID NO: 916881
cuugcucugugacuguuua

SEQ ID NO: 1191379 - RNA, 19 nt, Artificial Sequence
  Description of Artificial Sequence: Synthetic oligonucleotide
  Antisense strand to SEQ ID NO: 1191378
uaaacagucacagagcaag

SEQ ID NO: 1191380 - RNA, 19 nt, Artificial Sequence
  Description of Artificial Sequence: Synthetic oligonucleotide
  Sense strand starting at position 2535 of SEQ ID NO: 916881
cgcugucgccuccuaagua

SEQ ID NO: 1191381 - RNA, 19 nt, Artificial Sequence
  Description of Artificial Sequence: Synthetic oligonucleotide
  Antisense strand to SEQ ID NO: 1191380
uacuuaggaggcgacagcg

SEQ ID NO: 1191382 - RNA, 19 nt, Artificial Sequence
  Description of Artificial Sequence: Synthetic oligonucleotide
  Sense strand starting at position 2733 of SEQ ID NO: 916881
cacgcauucccggauugca

SEQ ID NO: 1191383 - RNA, 19 nt, Artificial Sequence
  Description of Artificial Sequence: Synthetic oligonucleotide
  Antisense strand to SEQ ID NO: 1191382
ugcaauccgggaaugcgug

SEQ ID NO: 1191384 - RNA, 19 nt, Artificial Sequence
  Description of Artificial Sequence: Synthetic oligonucleotide
  Sense strand starting at position 2763 of SEQ ID NO: 916881
uucuguaagcgcgcgauaa

SEQ ID NO: 1191385 - RNA, 19 nt, Artificial Sequence
  Description of Artificial Sequence: Synthetic oligonucleotide
  Antisense strand to SEQ ID NO: 1191384
uuaucgcgcgcuuacagaa

SEQ ID NO: 1191386 - RNA, 19 nt, Artificial Sequence
  Description of Artificial Sequence: Synthetic oligonucleotide
  Sense strand starting at position 3300 of SEQ ID NO: 916881
gggagugaucuugggaagu

SEQ ID NO: 1191387 - RNA, 19 nt, Artificial Sequence
  Description of Artificial Sequence: Synthetic oligonucleotide
  Antisense strand to SEQ ID NO: 1191386
acuucccaagaucacuccc

SEQ ID NO: 1191388 - RNA, 19 nt, Artificial Sequence
  Description of Artificial Sequence: Synthetic oligonucleotide
  Sense strand starting at position 3302 of SEQ ID NO: 916881
gagugaucuugggaaguuu

SEQ ID NO: 1191389 - RNA, 19 nt, Artificial Sequence
  Description of Artificial Sequence: Synthetic oligonucleotide
  Antisense strand to SEQ ID NO: 1191388
aaacuucccaagaucacuc

SEQ ID NO: 1191390 - RNA, 19 nt, Artificial Sequence
  Description of Artificial Sequence: Synthetic oligonucleotide
  Sense strand starting at position 3311 of SEQ ID NO: 916881
ugggaaguuuaauuaugca

SEQ ID NO: 1191391 - RNA, 19 nt, Artificial Sequence
  Description of Artificial Sequence: Synthetic oligonucleotide
  Antisense strand to SEQ ID NO: 1191390
ugcauaauuaaacuuccca

SEQ ID NO: 1191392 - RNA, 19 nt, Artificial Sequence
  Description of Artificial Sequence: Synthetic oligonucleotide
  Sense strand starting at position 3318 of SEQ ID NO: 916881
uuuaauuaugcacgacugu

SEQ ID NO: 1191393 - RNA, 19 nt, Artificial Sequence
  Description of Artificial Sequence: Synthetic oligonucleotide
  Antisense strand to SEQ ID NO: 1191392
acagucgugcauaauuaaa

SEQ ID NO: 1191394 - RNA, 19 nt, Artificial Sequence
  Description of Artificial Sequence: Synthetic oligonucleotide
  Sense strand starting at position 3319 of SEQ ID NO: 916881
uuaauuaugcacgacugua

SEQ ID NO: 1191395 - RNA, 19 nt, Artificial Sequence
  Description of Artificial Sequence: Synthetic oligonucleotide
  Antisense strand to SEQ ID NO: 1191394
uacagucgugcauaauuaa

SEQ ID NO: 1191396 - RNA, 19 nt, Artificial Sequence
  Description of Artificial Sequence: Synthetic oligonucleotide
  Sense strand starting at position 3331 of SEQ ID NO: 916881
gacuguauuggcugcuaga

SEQ ID NO: 1191397 - RNA, 19 nt, Artificial Sequence
  Description of Artificial Sequence: Synthetic oligonucleotide
  Antisense strand to SEQ ID NO: 1191396
ucuagcagccaauacaguc

SEQ ID NO: 1191398 - RNA, 19 nt, Artificial Sequence
  Description of Artificial Sequence: Synthetic oligonucleotide
  Sense strand starting at position 3344 of SEQ ID NO: 916881
gcuagacugugaggcauuu

SEQ ID NO: 1191399 - RNA, 19 nt, Artificial Sequence
  Description of Artificial Sequence: Synthetic oligonucleotide
  Antisense strand to SEQ ID NO: 1191398
aaaugccucacagucuagc

SEQ ID NO: 1191400 - RNA, 19 nt, Artificial Sequence
  Description of Artificial Sequence: Synthetic oligonucleotide
  Sense strand starting at position 3388 of SEQ ID NO: 916881
cugggagagcuuuggcaca

SEQ ID NO: 1191401 - RNA, 19 nt, Artificial Sequence
  Description of Artificial Sequence: Synthetic oligonucleotide
  Antisense strand to SEQ ID NO: 1191400
ugugccaaagcucucccag

SEQ ID NO: 1191402 - RNA, 19 nt, Artificial Sequence
  Description of Artificial Sequence: Synthetic oligonucleotide
  Sense strand starting at position 3429 of SEQ ID NO: 916881
agggaaggauuugguugaa

SEQ ID NO: 1191403 - RNA, 19 nt, Artificial Sequence
  Description of Artificial Sequence: Synthetic oligonucleotide
  Antisense strand to SEQ ID NO: 1191402
uucaaccaaauccuucccu

SEQ ID NO: 1191404 - RNA, 19 nt, Artificial Sequence
  Description of Artificial Sequence: Synthetic oligonucleotide
  Sense strand starting at position 3542 of SEQ ID NO: 916881
gucugauuacaccgaagac

SEQ ID NO: 1191405 - RNA, 19 nt, Artificial Sequence
  Description of Artificial Sequence: Synthetic oligonucleotide
  Antisense strand to SEQ ID NO: 1191404
gucuucgguguaaucagac

SEQ ID NO: 1191406 - RNA, 19 nt, Artificial Sequence
  Description of Artificial Sequence: Synthetic oligonucleotide
  Sense strand starting at position 3570 of SEQ ID NO: 916881
aggauucucucaucuggau

SEQ ID NO: 1191407 - RNA, 19 nt, Artificial Sequence
  Description of Artificial Sequence: Synthetic oligonucleotide
  Antisense strand to SEQ ID NO: 1191406
auccagaugagagaauccu

SEQ ID NO: 1191408 - RNA, 19 nt, Artificial Sequence
  Description of Artificial Sequence: Synthetic oligonucleotide
  Sense strand starting at position 3585 of SEQ ID NO: 916881
ggauuuccuugagguguac

SEQ ID NO: 1191409 - RNA, 19 nt, Artificial Sequence
  Description of Artificial Sequence: Synthetic oligonucleotide
  Antisense strand to SEQ ID NO: 1191408
guacaccucaaggaaaucc

SEQ ID NO: 1191410 - RNA, 19 nt, Artificial Sequence
  Description of Artificial Sequence: Synthetic oligonucleotide
  Sense strand starting at position 3607 of SEQ ID NO: 916881
gcuagaagggaguagucua

SEQ ID NO: 1191411 - RNA, 19 nt, Artificial Sequence
  Description of Artificial Sequence: Synthetic oligonucleotide
  Antisense strand to SEQ ID NO: 1191410
uagacuacucccuucuagc

SEQ ID NO: 1191412 - RNA, 19 nt, Artificial Sequence
  Description of Artificial Sequence: Synthetic oligonucleotide
  Sense strand starting at position 3625 of SEQ ID NO: 916881
auugaaacaucauugcaga

SEQ ID NO: 1191413 - RNA, 19 nt, Artificial Sequence
  Description of Artificial Sequence: Synthetic oligonucleotide
  Antisense strand to SEQ ID NO: 1191412
ucugcaaugauguuucaau

SEQ ID NO: 1191414 - RNA, 19 nt, Artificial Sequence
  Description of Artificial Sequence: Synthetic oligonucleotide
  Sense strand starting at position 3626 of SEQ ID NO: 916881
uugaaacaucauugcagau

SEQ ID NO: 1191415 - RNA, 19 nt, Artificial Sequence
  Description of Artificial Sequence: Synthetic oligonucleotide
  Antisense strand to SEQ ID NO: 1191414
aucugcaaugauguuucaa

SEQ ID NO: 1191416 - RNA, 19 nt, Artificial Sequence
  Description of Artificial Sequence: Synthetic oligonucleotide
  Sense strand starting at position 3644 of SEQ ID NO: 916881
uccaguuagagccaaggua

SEQ ID NO: 1191417 - RNA, 19 nt, Artificial Sequence
  Description of Artificial Sequence: Synthetic oligonucleotide
  Antisense strand to SEQ ID NO: 1191416
uaccuuggcucuaacugga

SEQ ID NO: 1191418 - RNA, 19 nt, Artificial Sequence
  Description of Artificial Sequence: Synthetic oligonucleotide
  Sense strand starting at position 3724 of SEQ ID NO: 916881
aucuauguguauuaaccaa

SEQ ID NO: 1191419 - RNA, 19 nt, Artificial Sequence
  Description of Artificial Sequence: Synthetic oligonucleotide
  Antisense strand to SEQ ID NO: 1191418
uugguuaauacacauagau

SEQ ID NO: 1191420 - RNA, 19 nt, Artificial Sequence
  Description of Artificial Sequence: Synthetic oligonucleotide
  Sense strand starting at position 106 of SEQ ID NO: 916882
aggguauauuuguagugca

SEQ ID NO: 1191421 - RNA, 19 nt, Artificial Sequence
  Description of Artificial Sequence: Synthetic oligonucleotide
  Antisense strand to SEQ ID NO: 1191420
ugcacuacaaauauacccu

SEQ ID NO: 1191422 - RNA, 19 nt, Artificial Sequence
  Description of Artificial Sequence: Synthetic oligonucleotide
  Sense strand starting at position 114 of SEQ ID NO: 916882
uuuguagugcaagagacau

SEQ ID NO: 1191423 - RNA, 19 nt, Artificial Sequence
  Description of Artificial Sequence: Synthetic oligonucleotide
  Antisense strand to SEQ ID NO: 1191422
augucucuugcacuacaaa

SEQ ID NO: 1191424 - RNA, 19 nt, Artificial Sequence
  Description of Artificial Sequence: Synthetic oligonucleotide
  Sense strand starting at position 150 of SEQ ID NO: 916882
uugccauucuguucuuauc

SEQ ID NO: 1191425 - RNA, 19 nt, Artificial Sequence
  Description of Artificial Sequence: Synthetic oligonucleotide
  Antisense strand to SEQ ID NO: 1191424
gauaagaacagaauggcaa

SEQ ID NO: 1191426 - RNA, 19 nt, Artificial Sequence
  Description of Artificial Sequence: Synthetic oligonucleotide
  Sense strand starting at position 175 of SEQ ID NO: 916882
auguaauucucaguuugua

SEQ ID NO: 1191427 - RNA, 19 nt, Artificial Sequence
  Description of Artificial Sequence: Synthetic oligonucleotide
  Antisense strand to SEQ ID NO: 1191426
uacaaacugagaauuacau

SEQ ID NO: 1191428 - RNA, 19 nt, Artificial Sequence
  Description of Artificial Sequence: Synthetic oligonucleotide
  Sense strand starting at position 227 of SEQ ID NO: 916882
gagaguugugcugugccuu

SEQ ID NO: 1191429 - RNA, 19 nt, Artificial Sequence
  Description of Artificial Sequence: Synthetic oligonucleotide
  Antisense strand to SEQ ID NO: 1191428
aaggcacagcacaacucuc

SEQ ID NO: 1191430 - RNA, 19 nt, Artificial Sequence
  Description of Artificial Sequence: Synthetic oligonucleotide
  Sense strand starting at position 232 of SEQ ID NO: 916882
uugugcugugccuuugauu

SEQ ID NO: 1191431 - RNA, 19 nt, Artificial Sequence
  Description of Artificial Sequence: Synthetic oligonucleotide
  Antisense strand to SEQ ID NO: 1191430
aaucaaaggcacagcacaa

SEQ ID NO: 1191432 - RNA, 19 nt, Artificial Sequence
  Description of Artificial Sequence: Synthetic oligonucleotide
  Sense strand starting at position 257 of SEQ ID NO: 916882
ccuaauucugcugaagguu

SEQ ID NO: 1191433 - RNA, 19 nt, Artificial Sequence
  Description of Artificial Sequence: Synthetic oligonucleotide
  Antisense strand to SEQ ID NO: 1191432
aaccuucagcagaauuagg

SEQ ID NO: 1191434 - RNA, 19 nt, Artificial Sequence
  Description of Artificial Sequence: Synthetic oligonucleotide
  Sense strand starting at position 314 of SEQ ID NO: 916882
cuguguuaccuugauggga

SEQ ID NO: 1191435 - RNA, 19 nt, Artificial Sequence
  Description of Artificial Sequence: Synthetic oligonucleotide
  Antisense strand to SEQ ID NO: 1191434
ucccaucaagguaacacag

SEQ ID NO: 1191436 - RNA, 19 nt, Artificial Sequence
  Description of Artificial Sequence: Synthetic oligonucleotide
  Sense strand starting at position 439 of SEQ ID NO: 916882
cacgaaucuuaggaacaga

SEQ ID NO: 1191437 - RNA, 19 nt, Artificial Sequence
  Description of Artificial Sequence: Synthetic oligonucleotide
  Antisense strand to SEQ ID NO: 1191436
ucuguuccuaagauucgug

SEQ ID NO: 1191438 - RNA, 19 nt, Artificial Sequence
  Description of Artificial Sequence: Synthetic oligonucleotide
  Sense strand starting at position 465 of SEQ ID NO: 916882
auugaaaucuaggaugauc

SEQ ID NO: 1191439 - RNA, 19 nt, Artificial Sequence
  Description of Artificial Sequence: Synthetic oligonucleotide
  Antisense strand to SEQ ID NO: 1191438
gaucauccuagauuucaau

SEQ ID NO: 1191440 - RNA, 19 nt, Artificial Sequence
  Description of Artificial Sequence: Synthetic oligonucleotide
  Sense strand starting at position 473 of SEQ ID NO: 916882
cuaggaugaucaucucuau

SEQ ID NO: 1191441 - RNA, 19 nt, Artificial Sequence
  Description of Artificial Sequence: Synthetic oligonucleotide
  Antisense strand to SEQ ID NO: 1191440
auagagaugaucauccuag

SEQ ID NO: 1191442 - RNA, 19 nt, Artificial Sequence
  Description of Artificial Sequence: Synthetic oligonucleotide
  Sense strand starting at position 476 of SEQ ID NO: 916882
ggaugaucaucucuauacu

SEQ ID NO: 1191443 - RNA, 19 nt, Artificial Sequence
  Description of Artificial Sequence: Synthetic oligonucleotide
  Antisense strand to SEQ ID NO: 1191442
aguauagagaugaucaucc

SEQ ID NO: 1191444 - RNA, 19 nt, Artificial Sequence
  Description of Artificial Sequence: Synthetic oligonucleotide
  Sense strand starting at position 518 of SEQ ID NO: 916882
gacauauagccuggacuca

SEQ ID NO: 1191445 - RNA, 19 nt, Artificial Sequence
  Description of Artificial Sequence: Synthetic oligonucleotide
  Antisense strand to SEQ ID NO: 1191444
ugaguccaggcuauauguc

SEQ ID NO: 1191446 - RNA, 19 nt, Artificial Sequence
  Description of Artificial Sequence: Synthetic oligonucleotide
  Sense strand starting at position 530 of SEQ ID NO: 916882
ggacucacccuuugaggua

SEQ ID NO: 1191447 - RNA, 19 nt, Artificial Sequence
  Description of Artificial Sequence: Synthetic oligonucleotide
  Antisense strand to SEQ ID NO: 1191446
uaccucaaagggugagucc

SEQ ID NO: 1191448 - RNA, 19 nt, Artificial Sequence
  Description of Artificial Sequence: Synthetic oligonucleotide
  Sense strand starting at position 574 of SEQ ID NO: 916882
cuuugcacuguugggaaua

SEQ ID NO: 1191449 - RNA, 19 nt, Artificial Sequence
  Description of Artificial Sequence: Synthetic oligonucleotide
  Antisense strand to SEQ ID NO: 1191448
uauucccaacagugcaaag

SEQ ID NO: 1191450 - RNA, 19 nt, Artificial Sequence
  Description of Artificial Sequence: Synthetic oligonucleotide
  Sense strand starting at position 586 of SEQ ID NO: 916882
gggaauaaauacuauuauc

SEQ ID NO: 1191451 - RNA, 19 nt, Artificial Sequence
  Description of Artificial Sequence: Synthetic oligonucleotide
  Antisense strand to SEQ ID NO: 1191450
gauaauaguauuuauuccc

SEQ ID NO: 1191452 - RNA, 19 nt, Artificial Sequence
  Description of Artificial Sequence: Synthetic oligonucleotide
  Sense strand starting at position 597 of SEQ ID NO: 916882
cuauuaucagguugggaca

SEQ ID NO: 1191453 - RNA, 19 nt, Artificial Sequence
  Description of Artificial Sequence: Synthetic oligonucleotide
  Antisense strand to SEQ ID NO: 1191452
ugucccaaccugauaauag

SEQ ID NO: 1191454 - RNA, 19 nt, Artificial Sequence
  Description of Artificial Sequence: Synthetic oligonucleotide
  Sense strand starting at position 651 of SEQ ID NO: 916882
guccauuuauaguaaugug

SEQ ID NO: 1191455 - RNA, 19 nt, Artificial Sequence
  Description of Artificial Sequence: Synthetic oligonucleotide
  Antisense strand to SEQ ID NO: 1191454
cacauuacuauaaauggac

SEQ ID NO: 1191456 - RNA, 19 nt, Artificial Sequence
  Description of Artificial Sequence: Synthetic oligonucleotide
  Sense strand starting at position 654 of SEQ ID NO: 916882
cauuuauaguaaugugaag

SEQ ID NO: 1191457 - RNA, 19 nt, Artificial Sequence
  Description of Artificial Sequence: Synthetic oligonucleotide
  Antisense strand to SEQ ID NO: 1191456
cuucacauuacuauaaaug

SEQ ID NO: 1191458 - RNA, 19 nt, Artificial Sequence
  Description of Artificial Sequence: Synthetic oligonucleotide
  Sense strand starting at position 677 of SEQ ID NO: 916882
ugcaaagcuucucucaaag

SEQ ID NO: 1191459 - RNA, 19 nt, Artificial Sequence
  Description of Artificial Sequence: Synthetic oligonucleotide
  Antisense strand to SEQ ID NO: 1191458
cuuugagagaagcuuugca

SEQ ID NO: 1191460 - RNA, 19 nt, Artificial Sequence
  Description of Artificial Sequence: Synthetic oligonucleotide
  Sense strand starting at position 722 of SEQ ID NO: 916882
agcauucucaaggaugagu

SEQ ID NO: 1191461 - RNA, 19 nt, Artificial Sequence
  Description of Artificial Sequence: Synthetic oligonucleotide
  Antisense strand to SEQ ID NO: 1191460
acucauccuugagaaugcu

SEQ ID NO: 1191462 - RNA, 19 nt, Artificial Sequence
  Description of Artificial Sequence: Synthetic oligonucleotide
  Sense strand starting at position 733 of SEQ ID NO: 916882
ggaugaguucuguagcacc

SEQ ID NO: 1191463 - RNA, 19 nt, Artificial Sequence
  Description of Artificial Sequence: Synthetic oligonucleotide
  Antisense strand to SEQ ID NO: 1191462
ggugcuacagaacucaucc

SEQ ID NO: 1191464 - RNA, 19 nt, Artificial Sequence
  Description of Artificial Sequence: Synthetic oligonucleotide
  Sense strand starting at position 841 of SEQ ID NO: 916882
ggaucaucuuacuuguggu

SEQ ID NO: 1191465 - RNA, 19 nt, Artificial Sequence
  Description of Artificial Sequence: Synthetic oligonucleotide
  Antisense strand to SEQ ID NO: 1191464
accacaaguaagaugaucc

SEQ ID NO: 1191466 - RNA, 19 nt, Artificial Sequence
  Description of Artificial Sequence: Synthetic oligonucleotide
  Sense strand starting at position 847 of SEQ ID NO: 916882
ucuuacuugugguuucgau

SEQ ID NO: 1191467 - RNA, 19 nt, Artificial Sequence
  Description of Artificial Sequence: Synthetic oligonucleotide
  Antisense strand to SEQ ID NO: 1191466
aucgaaaccacaaguaaga

SEQ ID NO: 1191468 - RNA, 19 nt, Artificial Sequence
  Description of Artificial Sequence: Synthetic oligonucleotide
  Sense strand starting at position 1107 of SEQ ID NO: 916882
cagggaacgccugagaucu

SEQ ID NO: 1191469 - RNA, 19 nt, Artificial Sequence
  Description of Artificial Sequence: Synthetic oligonucleotide
  Antisense strand to SEQ ID NO: 1191468
agaucucaggcguucccug

SEQ ID NO: 1191470 - RNA, 19 nt, Artificial Sequence
  Description of Artificial Sequence: Synthetic oligonucleotide
  Sense strand starting at position 1115 of SEQ ID NO: 916882
gccugagaucuuugaauga

SEQ ID NO: 1191471 - RNA, 19 nt, Artificial Sequence
  Description of Artificial Sequence: Synthetic oligonucleotide
  Antisense strand to SEQ ID NO: 1191470
ucauucaaagaucucaggc

SEQ ID NO: 1191472 - RNA, 19 nt, Artificial Sequence
  Description of Artificial Sequence: Synthetic oligonucleotide
  Sense strand starting at position 1168 of SEQ ID NO: 916882
aggagaacccuuugcucca

SEQ ID NO: 1191473 - RNA, 19 nt, Artificial Sequence
  Description of Artificial Sequence: Synthetic oligonucleotide
  Antisense strand to SEQ ID NO: 1191472
uggagcaaaggguucuccu

SEQ ID NO: 1191474 - RNA, 19 nt, Artificial Sequence
  Description of Artificial Sequence: Synthetic oligonucleotide
  Sense strand starting at position 1222 of SEQ ID NO: 916882
aagcgagagccagauuaua

SEQ ID NO: 1191475 - RNA, 19 nt, Artificial Sequence
  Description of Artificial Sequence: Synthetic oligonucleotide
  Antisense strand to SEQ ID NO: 1191474
uauaaucuggcucucgcuu

SEQ ID NO: 1191476 - RNA, 19 nt, Artificial Sequence
  Description of Artificial Sequence: Synthetic oligonucleotide
  Sense strand starting at position 1307 of SEQ ID NO: 916882
gcuacuaucucuuuagaag

SEQ ID NO: 1191477 - RNA, 19 nt, Artificial Sequence
  Description of Artificial Sequence: Synthetic oligonucleotide
  Antisense strand to SEQ ID NO: 1191476
cuucuaaagagauaguagc

SEQ ID NO: 1191478 - RNA, 19 nt, Artificial Sequence
  Description of Artificial Sequence: Synthetic oligonucleotide
  Sense strand starting at position 1318 of SEQ ID NO: 916882
uuuagaagcugaccucaau

SEQ ID NO: 1191479 - RNA, 19 nt, Artificial Sequence
  Description of Artificial Sequence: Synthetic oligonucleotide
  Antisense strand to SEQ ID NO: 1191478
auugaggucagcuucuaaa

SEQ ID NO: 1191480 - RNA, 19 nt, Artificial Sequence
  Description of Artificial Sequence: Synthetic oligonucleotide
  Sense strand starting at position 2044 of SEQ ID NO: 916882
agagaagagcucugcaaua

SEQ ID NO: 1191481 - RNA, 19 nt, Artificial Sequence
  Description of Artificial Sequence: Synthetic oligonucleotide
  Antisense strand to SEQ ID NO: 1191480
uauugcagagcucuucucu

SEQ ID NO: 1191482 - RNA, 19 nt, Artificial Sequence
  Description of Artificial Sequence: Synthetic oligonucleotide
  Sense strand starting at position 2160 of SEQ ID NO: 916882
acucgagcccucugaugaa

SEQ ID NO: 1191483 - RNA, 19 nt, Artificial Sequence
  Description of Artificial Sequence: Synthetic oligonucleotide
  Antisense strand to SEQ ID NO: 1191482
uucaucagagggcucgagu

SEQ ID NO: 1191484 - RNA, 19 nt, Artificial Sequence
  Description of Artificial Sequence: Synthetic oligonucleotide
  Sense strand starting at position 2336 of SEQ ID NO: 916882
aggugaaugacuuggcaaa

SEQ ID NO: 1191485 - RNA, 19 nt, Artificial Sequence
  Description of Artificial Sequence: Synthetic oligonucleotide
  Antisense strand to SEQ ID NO: 1191484
uuugccaagucauucaccu

SEQ ID NO: 1191486 - RNA, 19 nt, Artificial Sequence
  Description of Artificial Sequence: Synthetic oligonucleotide
  Sense strand starting at position 2337 of SEQ ID NO: 916882
ggugaaugacuuggcaaag

SEQ ID NO: 1191487 - RNA, 19 nt, Artificial Sequence
  Description of Artificial Sequence: Synthetic oligonucleotide
  Antisense strand to SEQ ID NO: 1191486
cuuugccaagucauucacc

SEQ ID NO: 1191488 - RNA, 19 nt, Artificial Sequence
  Description of Artificial Sequence: Synthetic oligonucleotide
  Sense strand starting at position 2361 of SEQ ID NO: 916882
ccagcaaguuagccauaaa

SEQ ID NO: 1191489 - RNA, 19 nt, Artificial Sequence
  Description of Artificial Sequence: Synthetic oligonucleotide
  Antisense strand to SEQ ID NO: 1191488
uuuauggcuaacuugcugg

SEQ ID NO: 1191490 - RNA, 19 nt, Artificial Sequence
  Description of Artificial Sequence: Synthetic oligonucleotide
  Sense strand starting at position 2496 of SEQ ID NO: 916882
cugcuuccggauuauuauu

SEQ ID NO: 1191491 - RNA, 19 nt, Artificial Sequence
  Description of Artificial Sequence: Synthetic oligonucleotide
  Antisense strand to SEQ ID NO: 1191490
aauaauaauccggaagcag

SEQ ID NO: 1191492 - RNA, 19 nt, Artificial Sequence
  Description of Artificial Sequence: Synthetic oligonucleotide
  Sense strand starting at position 3295 of SEQ ID NO: 916882
aguuccaguuuaucuugaa

SEQ ID NO: 1191493 - RNA, 19 nt, Artificial Sequence
  Description of Artificial Sequence: Synthetic oligonucleotide
  Antisense strand to SEQ ID NO: 1191492
uucaagauaaacuggaacu

SEQ ID NO: 1191494 - RNA, 19 nt, Artificial Sequence
  Description of Artificial Sequence: Synthetic oligonucleotide
  Sense strand starting at position 3296 of SEQ ID NO: 916882
guuccaguuuaucuugaau

SEQ ID NO: 1191495 - RNA, 19 nt, Artificial Sequence
  Description of Artificial Sequence: Synthetic oligonucleotide
  Antisense strand to SEQ ID NO: 1191494
auucaagauaaacuggaac

SEQ ID NO: 1191496 - RNA, 19 nt, Artificial Sequence
  Description of Artificial Sequence: Synthetic oligonucleotide
  Sense strand starting at position 3368 of SEQ ID NO: 916882
ggaacuuuguugccuuuga

SEQ ID NO: 1191497 - RNA, 19 nt, Artificial Sequence
  Description of Artificial Sequence: Synthetic oligonucleotide
  Antisense strand to SEQ ID NO: 1191496
ucaaaggcaacaaaguucc

SEQ ID NO: 1191498 - RNA, 19 nt, Artificial Sequence
  Description of Artificial Sequence: Synthetic oligonucleotide
  Sense strand starting at position 3425 of SEQ ID NO: 916882
cugauauaauggucagccu

SEQ ID NO: 1191499 - RNA, 19 nt, Artificial Sequence
  Description of Artificial Sequence: Synthetic oligonucleotide
  Antisense strand to SEQ ID NO: 1191498
aggcugaccauuauaucag

SEQ ID NO: 1191500 - RNA, 19 nt, Artificial Sequence
  Description of Artificial Sequence: Synthetic oligonucleotide
  Sense strand starting at position 9 of SEQ ID NO: 916883
gggagaugaugugauuuac

SEQ ID NO: 1191501 - RNA, 19 nt, Artificial Sequence
  Description of Artificial Sequence: Synthetic oligonucleotide
  Antisense strand to SEQ ID NO: 1191500
guaaaucacaucaucuccc

SEQ ID NO: 1191502 - RNA, 19 nt, Artificial Sequence
  Description of Artificial Sequence: Synthetic oligonucleotide
  Sense strand starting at position 148 of SEQ ID NO: 916883
agaacuuccuguguugaug

SEQ ID NO: 1191503 - RNA, 19 nt, Artificial Sequence
  Description of Artificial Sequence: Synthetic oligonucleotide
  Antisense strand to SEQ ID NO: 1191502
caucaacacaggaaguucu

SEQ ID NO: 1191504 - RNA, 19 nt, Artificial Sequence
  Description of Artificial Sequence: Synthetic oligonucleotide
  Sense strand starting at position 211 of SEQ ID NO: 916883
guuucuauugaguacuuga

SEQ ID NO: 1191505 - RNA, 19 nt, Artificial Sequence
  Description of Artificial Sequence: Synthetic oligonucleotide
  Antisense strand to SEQ ID NO: 1191504
ucaaguacucaauagaaac

SEQ ID NO: 1191506 - RNA, 19 nt, Artificial Sequence
  Description of Artificial Sequence: Synthetic oligonucleotide
  Sense strand starting at position 311 of SEQ ID NO: 916883
uagagcaacggucaucaaa

SEQ ID NO: 1191507 - RNA, 19 nt, Artificial Sequence
  Description of Artificial Sequence: Synthetic oligonucleotide
  Antisense strand to SEQ ID NO: 1191506
uuugaugaccguugcucua

SEQ ID NO: 1191508 - RNA, 19 nt, Artificial Sequence
  Description of Artificial Sequence: Synthetic oligonucleotide
  Sense strand starting at position 313 of SEQ ID NO: 916883
gagcaacggucaucaaacu

SEQ ID NO: 1191509 - RNA, 19 nt, Artificial Sequence
  Description of Artificial Sequence: Synthetic oligonucleotide
  Antisense strand to SEQ ID NO: 1191508
aguuugaugaccguugcuc

SEQ ID NO: 1191510 - RNA, 19 nt, Artificial Sequence
  Description of Artificial Sequence: Synthetic oligonucleotide
  Sense strand starting at position 446 of SEQ ID NO: 916883
agagaauugaaugguugca

SEQ ID NO: 1191511 - RNA, 19 nt, Artificial Sequence
  Description of Artificial Sequence: Synthetic oligonucleotide
  Antisense strand to SEQ ID NO: 1191510
ugcaaccauucaauucucu

SEQ ID NO: 1191512 - RNA, 19 nt, Artificial Sequence
  Description of Artificial Sequence: Synthetic oligonucleotide
  Sense strand starting at position 579 of SEQ ID NO: 916883
uacgauccaucaguugaau

SEQ ID NO: 1191513 - RNA, 19 nt, Artificial Sequence
  Description of Artificial Sequence: Synthetic oligonucleotide
  Antisense strand to SEQ ID NO: 1191512
auucaacugauggaucgua

SEQ ID NO: 1191514 - RNA, 19 nt, Artificial Sequence
  Description of Artificial Sequence: Synthetic oligonucleotide
  Sense strand starting at position 582 of SEQ ID NO: 916883
gauccaucaguugaaugca

SEQ ID NO: 1191515 - RNA, 19 nt, Artificial Sequence
  Description of Artificial Sequence: Synthetic oligonucleotide
  Antisense strand to SEQ ID NO: 1191514
ugcauucaacugauggauc

SEQ ID NO: 1191516 - RNA, 19 nt, Artificial Sequence
  Description of Artificial Sequence: Synthetic oligonucleotide
  Sense strand starting at position 590 of SEQ ID NO: 916883
aguugaaugcaguaaauaa

SEQ ID NO: 1191517 - RNA, 19 nt, Artificial Sequence
  Description of Artificial Sequence: Synthetic oligonucleotide
  Antisense strand to SEQ ID NO: 1191516
uuauuuacugcauucaacu

SEQ ID NO: 1191518 - RNA, 19 nt, Artificial Sequence
  Description of Artificial Sequence: Synthetic oligonucleotide
  Sense strand starting at position 621 of SEQ ID NO: 916883
ggagaaucaagcugaguuc

SEQ ID NO: 1191519 - RNA, 19 nt, Artificial Sequence
  Description of Artificial Sequence: Synthetic oligonucleotide
  Antisense strand to SEQ ID NO: 1191518
gaacucagcuugauucucc

SEQ ID NO: 1191520 - RNA, 19 nt, Artificial Sequence
  Description of Artificial Sequence: Synthetic oligonucleotide
  Sense strand starting at position 661 of SEQ ID NO: 916883
acagcugggccuuaucuua

SEQ ID NO: 1191521 - RNA, 19 nt, Artificial Sequence
  Description of Artificial Sequence: Synthetic oligonucleotide
  Antisense strand to SEQ ID NO: 1191520
uaagauaaggcccagcugu

SEQ ID NO: 1191522 - RNA, 19 nt, Artificial Sequence
  Description of Artificial Sequence: Synthetic oligonucleotide
  Sense strand starting at position 1039 of SEQ ID NO: 916883
ugaccugggacuuguccaa

SEQ ID NO: 1191523 - RNA, 19 nt, Artificial Sequence
  Description of Artificial Sequence: Synthetic oligonucleotide
  Antisense strand to SEQ ID NO: 1191522
uuggacaagucccagguca

SEQ ID NO: 1191524 - RNA, 19 nt, Artificial Sequence
  Description of Artificial Sequence: Synthetic oligonucleotide
  Sense strand starting at position 1043 of SEQ ID NO: 916883
cugggacuuguccaaaguu

SEQ ID NO: 1191525 - RNA, 19 nt, Artificial Sequence
  Description of Artificial Sequence: Synthetic oligonucleotide
  Antisense strand to SEQ ID NO: 1191524
aacuuuggacaagucccag

SEQ ID NO: 1191526 - RNA, 19 nt, Artificial Sequence
  Description of Artificial Sequence: Synthetic oligonucleotide
  Sense strand starting at position 1078 of SEQ ID NO: 916883
guagaaucagcauggaaac

SEQ ID NO: 1191527 - RNA, 19 nt, Artificial Sequence
  Description of Artificial Sequence: Synthetic oligonucleotide
  Antisense strand to SEQ ID NO: 1191526
guuuccaugcugauucuac

SEQ ID NO: 1191528 - RNA, 19 nt, Artificial Sequence
  Description of Artificial Sequence: Synthetic oligonucleotide
  Sense strand starting at position 1098 of SEQ ID NO: 916883
ugcaaauucugacuauaag

SEQ ID NO: 1191529 - RNA, 19 nt, Artificial Sequence
  Description of Artificial Sequence: Synthetic oligonucleotide
  Antisense strand to SEQ ID NO: 1191528
cuuauagucagaauuugca

SEQ ID NO: 1191530 - RNA, 19 nt, Artificial Sequence
  Description of Artificial Sequence: Synthetic oligonucleotide
  Sense strand starting at position 1226 of SEQ ID NO: 916883
ugacuagugacauagugca

SEQ ID NO: 1191531 - RNA, 19 nt, Artificial Sequence
  Description of Artificial Sequence: Synthetic oligonucleotide
  Antisense strand to SEQ ID NO: 1191530
ugcacuaugucacuaguca

SEQ ID NO: 1191532 - RNA, 19 nt, Artificial Sequence
  Description of Artificial Sequence: Synthetic oligonucleotide
  Sense strand starting at position 1506 of SEQ ID NO: 916883
uaggauuguuugguacaaa

SEQ ID NO: 1191533 - RNA, 19 nt, Artificial Sequence
  Description of Artificial Sequence: Synthetic oligonucleotide
  Antisense strand to SEQ ID NO: 1191532
uuuguaccaaacaauccua

SEQ ID NO: 1191534 - RNA, 19 nt, Artificial Sequence
  Description of Artificial Sequence: Synthetic oligonucleotide
  Sense strand starting at position 1716 of SEQ ID NO: 916883
uggacaauuugggaucuca

SEQ ID NO: 1191535 - RNA, 19 nt, Artificial Sequence
  Description of Artificial Sequence: Synthetic oligonucleotide
  Antisense strand to SEQ ID NO: 1191534
ugagaucccaaauugucca

SEQ ID NO: 1191536 - RNA, 19 nt, Artificial Sequence
  Description of Artificial Sequence: Synthetic oligonucleotide
  Sense strand starting at position 1767 of SEQ ID NO: 916883
gggauucgacgucacuaua

SEQ ID NO: 1191537 - RNA, 19 nt, Artificial Sequence
  Description of Artificial Sequence: Synthetic oligonucleotide
  Antisense strand to SEQ ID NO: 1191536
uauagugacgucgaauccc

SEQ ID NO: 1191538 - RNA, 19 nt, Artificial Sequence
  Description of Artificial Sequence: Synthetic oligonucleotide
  Sense strand starting at position 1786 of SEQ ID NO: 916883
ggcuccugacaaggucaua

SEQ ID NO: 1191539 - RNA, 19 nt, Artificial Sequence
  Description of Artificial Sequence: Synthetic oligonucleotide
  Antisense strand to SEQ ID NO: 1191538
uaugaccuugucaggagcc

SEQ ID NO: 1191540 - RNA, 19 nt, Artificial Sequence
  Description of Artificial Sequence: Synthetic oligonucleotide
  Sense strand starting at position 1811 of SEQ ID NO: 916883
cgguacgcugugaaauagu

SEQ ID NO: 1191541 - RNA, 19 nt, Artificial Sequence
  Description of Artificial Sequence: Synthetic oligonucleotide
  Antisense strand to SEQ ID NO: 1191540
acuauuucacagcguaccg

SEQ ID NO: 1191542 - RNA, 19 nt, Artificial Sequence
  Description of Artificial Sequence: Synthetic oligonucleotide
  Sense strand starting at position 1819 of SEQ ID NO: 916883
ugugaaauaguauauaccu

SEQ ID NO: 1191543 - RNA, 19 nt, Artificial Sequence
  Description of Artificial Sequence: Synthetic oligonucleotide
  Antisense strand to SEQ ID NO: 1191542
agguauauacuauuucaca

SEQ ID NO: 1191544 - RNA, 19 nt, Artificial Sequence
  Description of Artificial Sequence: Synthetic oligonucleotide
  Sense strand starting at position 1826 of SEQ ID NO: 916883
uaguauauaccuggagaua

SEQ ID NO: 1191545 - RNA, 19 nt, Artificial Sequence
  Description of Artificial Sequence: Synthetic oligonucleotide
  Antisense strand to SEQ ID NO: 1191544
uaucuccagguauauacua

SEQ ID NO: 1191546 - RNA, 19 nt, Artificial Sequence
  Description of Artificial Sequence: Synthetic oligonucleotide
  Sense strand starting at position 2149 of SEQ ID NO: 916883
uugcuaacucuggagacua

SEQ ID NO: 1191547 - RNA, 19 nt, Artificial Sequence
  Description of Artificial Sequence: Synthetic oligonucleotide
  Antisense strand to SEQ ID NO: 1191546
uagucuccagaguuagcaa

SEQ ID NO: 1191548 - RNA, 19 nt, Artificial Sequence
  Description of Artificial Sequence: Synthetic oligonucleotide
  Sense strand starting at position 2213 of SEQ ID NO: 916883
cugauaugguguucuggga

SEQ ID NO: 1191549 - RNA, 19 nt, Artificial Sequence
  Description of Artificial Sequence: Synthetic oligonucleotide
  Antisense strand to SEQ ID NO: 1191548
ucccagaacaccauaucag

SEQ ID NO: 1191550 - RNA, 19 nt, Artificial Sequence
  Description of Artificial Sequence: Synthetic oligonucleotide
  Sense strand starting at position 2226 of SEQ ID NO: 916883
cugggaugcucuuccaauc

SEQ ID NO: 1191551 - RNA, 19 nt, Artificial Sequence
  Description of Artificial Sequence: Synthetic oligonucleotide
  Antisense strand to SEQ ID NO: 1191550
gauuggaagagcaucccag

SEQ ID NO: 1191552 - RNA, 19 nt, Artificial Sequence
  Description of Artificial Sequence: Synthetic oligonucleotide
  Sense strand starting at position 2274 of SEQ ID NO: 916883
cgucucucacuugaacaga

SEQ ID NO: 1191553 - RNA, 19 nt, Artificial Sequence
  Description of Artificial Sequence: Synthetic oligonucleotide
  Antisense strand to SEQ ID NO: 1191552
ucuguucaagugagagacg

SEQ ID NO: 1191554 - RNA, 19 nt, Artificial Sequence
  Description of Artificial Sequence: Synthetic oligonucleotide
  Sense strand starting at position 2340 of SEQ ID NO: 916883
gucuucuaccaguaacaag

SEQ ID NO: 1191555 - RNA, 19 nt, Artificial Sequence
  Description of Artificial Sequence: Synthetic oligonucleotide
  Antisense strand to SEQ ID NO: 1191554
cuuguuacugguagaagac

SEQ ID NO: 1191556 - RNA, 19 nt, Artificial Sequence
  Description of Artificial Sequence: Synthetic oligonucleotide
  Sense strand starting at position 2674 of SEQ ID NO: 916883
agcauuugaucuucuugca

SEQ ID NO: 1191557 - RNA, 19 nt, Artificial Sequence
  Description of Artificial Sequence: Synthetic oligonucleotide
  Antisense strand to SEQ ID NO: 1191556
ugcaagaagaucaaaugcu

SEQ ID NO: 1191558 - RNA, 19 nt, Artificial Sequence
  Description of Artificial Sequence: Synthetic oligonucleotide
  Sense strand starting at position 2818 of SEQ ID NO: 916883
cucccauuauucuugguga

SEQ ID NO: 1191559 - RNA, 19 nt, Artificial Sequence
  Description of Artificial Sequence: Synthetic oligonucleotide
  Antisense strand to SEQ ID NO: 1191558
ucaccaagaauaaugggag

SEQ ID NO: 1191560 - RNA, 19 nt, Artificial Sequence
  Description of Artificial Sequence: Synthetic oligonucleotide
  Sense strand starting at position 2820 of SEQ ID NO: 916883
cccauuauucuuggugaac

SEQ ID NO: 1191561 - RNA, 19 nt, Artificial Sequence
  Description of Artificial Sequence: Synthetic oligonucleotide
  Antisense strand to SEQ ID NO: 1191560
guucaccaagaauaauggg

SEQ ID NO: 1191562 - RNA, 19 nt, Artificial Sequence
  Description of Artificial Sequence: Synthetic oligonucleotide
  Sense strand starting at position 2821 of SEQ ID NO: 916883
ccauuauucuuggugaacu

SEQ ID NO: 1191563 - RNA, 19 nt, Artificial Sequence
  Description of Artificial Sequence: Synthetic oligonucleotide
  Antisense strand to SEQ ID NO: 1191562
aguucaccaagaauaaugg

SEQ ID NO: 1191564 - RNA, 19 nt, Artificial Sequence
  Description of Artificial Sequence: Synthetic oligonucleotide
  Sense strand starting at position 2831 of SEQ ID NO: 916883
uggugaacucggcacccau

SEQ ID NO: 1191565 - RNA, 19 nt, Artificial Sequence
  Description of Artificial Sequence: Synthetic oligonucleotide
  Antisense strand to SEQ ID NO: 1191564
augggugccgaguucacca

SEQ ID NO: 1191566 - RNA, 19 nt, Artificial Sequence
  Description of Artificial Sequence: Synthetic oligonucleotide
  Sense strand starting at position 2862 of SEQ ID NO: 916883
acagucugaccuuacaagu

SEQ ID NO: 1191567 - RNA, 19 nt, Artificial Sequence
  Description of Artificial Sequence: Synthetic oligonucleotide
  Antisense strand to SEQ ID NO: 1191566
acuuguaaggucagacugu

SEQ ID NO: 1191568 - RNA, 19 nt, Artificial Sequence
  Description of Artificial Sequence: Synthetic oligonucleotide
  Sense strand starting at position 2979 of SEQ ID NO: 916883
gaaucacaucagugucuga

SEQ ID NO: 1191569 - RNA, 19 nt, Artificial Sequence
  Description of Artificial Sequence: Synthetic oligonucleotide
  Antisense strand to SEQ ID NO: 1191568
ucagacacugaugugauuc

SEQ ID NO: 1191570 - RNA, 19 nt, Artificial Sequence
  Description of Artificial Sequence: Synthetic oligonucleotide
  Sense strand starting at position 3082 of SEQ ID NO: 916883
cuaauuggcuuguugagaa

SEQ ID NO: 1191571 - RNA, 19 nt, Artificial Sequence
  Description of Artificial Sequence: Synthetic oligonucleotide
  Antisense strand to SEQ ID NO: 1191570
uucucaacaagccaauuag

SEQ ID NO: 1191572 - RNA, 19 nt, Artificial Sequence
  Description of Artificial Sequence: Synthetic oligonucleotide
  Sense strand starting at position 3122 of SEQ ID NO: 916883
aggaguuucagguagagug

SEQ ID NO: 1191573 - RNA, 19 nt, Artificial Sequence
  Description of Artificial Sequence: Synthetic oligonucleotide
  Antisense strand to SEQ ID NO: 1191572
cacucuaccugaaacuccu

SEQ ID NO: 1191574 - RNA, 19 nt, Artificial Sequence
  Description of Artificial Sequence: Synthetic oligonucleotide
  Sense strand starting at position 3194 of SEQ ID NO: 916883
auacaugguaggcaugauu

SEQ ID NO: 1191575 - RNA, 19 nt, Artificial Sequence
  Description of Artificial Sequence: Synthetic oligonucleotide
  Antisense strand to SEQ ID NO: 1191574
aaucaugccuaccauguau

SEQ ID NO: 1191576 - RNA, 19 nt, Artificial Sequence
  Description of Artificial Sequence: Synthetic oligonucleotide
  Sense strand starting at position 3310 of SEQ ID NO: 916883
ugcccuaccuaguuaggaa

SEQ ID NO: 1191577 - RNA, 19 nt, Artificial Sequence
  Description of Artificial Sequence: Synthetic oligonucleotide
  Antisense strand to SEQ ID NO: 1191576
uuccuaacuagguagggca

SEQ ID NO: 1191578 - RNA, 19 nt, Artificial Sequence
  Description of Artificial Sequence: Synthetic oligonucleotide
  Sense strand starting at position 3527 of SEQ ID NO: 916883
guuacuaaugcgcuaggca

SEQ ID NO: 1191579 - RNA, 19 nt, Artificial Sequence
  Description of Artificial Sequence: Synthetic oligonucleotide
  Antisense strand to SEQ ID NO: 1191578
ugccuagcgcauuaguaac

SEQ ID NO: 1191580 - RNA, 19 nt, Artificial Sequence
  Description of Artificial Sequence: Synthetic oligonucleotide
  Sense strand starting at position 438 of SEQ ID NO: 916884
uaauuaguggcauaaguaa

SEQ ID NO: 1191581 - RNA, 19 nt, Artificial Sequence
  Description of Artificial Sequence: Synthetic oligonucleotide
  Antisense strand to SEQ ID NO: 1191580
uuacuuaugccacuaauua

SEQ ID NO: 1191582 - RNA, 19 nt, Artificial Sequence
  Description of Artificial Sequence: Synthetic oligonucleotide
  Sense strand starting at position 446 of SEQ ID NO: 916884
ggcauaaguaaugggaauu

SEQ ID NO: 1191583 - RNA, 19 nt, Artificial Sequence
  Description of Artificial Sequence: Synthetic oligonucleotide
  Antisense strand to SEQ ID NO: 1191582
aauucccauuacuuaugcc

SEQ ID NO: 1191584 - RNA, 19 nt, Artificial Sequence
  Description of Artificial Sequence: Synthetic oligonucleotide
  Sense strand starting at position 447 of SEQ ID NO: 916884
gcauaaguaaugggaauua

SEQ ID NO: 1191585 - RNA, 19 nt, Artificial Sequence
  Description of Artificial Sequence: Synthetic oligonucleotide
  Antisense strand to SEQ ID NO: 1191584
uaauucccauuacuuaugc

SEQ ID NO: 1191586 - RNA, 19 nt, Artificial Sequence
  Description of Artificial Sequence: Synthetic oligonucleotide
  Sense strand starting at position 643 of SEQ ID NO: 916884
ugagguuuacugugaauga

SEQ ID NO: 1191587 - RNA, 19 nt, Artificial Sequence
  Description of Artificial Sequence: Synthetic oligonucleotide
  Antisense strand to SEQ ID NO: 1191586
ucauucacaguaaaccuca

SEQ ID NO: 1191588 - RNA, 19 nt, Artificial Sequence
  Description of Artificial Sequence: Synthetic oligonucleotide
  Sense strand starting at position 711 of SEQ ID NO: 916884
gaugguccuguuuaaauau

SEQ ID NO: 1191589 - RNA, 19 nt, Artificial Sequence
  Description of Artificial Sequence: Synthetic oligonucleotide
  Antisense strand to SEQ ID NO: 1191588
auauuuaaacaggaccauc

SEQ ID NO: 1191590 - RNA, 19 nt, Artificial Sequence
  Description of Artificial Sequence: Synthetic oligonucleotide
  Sense strand starting at position 1127 of SEQ ID NO: 916884
acaguuuccuuaucuggga

SEQ ID NO: 1191591 - RNA, 19 nt, Artificial Sequence
  Description of Artificial Sequence: Synthetic oligonucleotide
  Antisense strand to SEQ ID NO: 1191590
ucccagauaaggaaacugu

SEQ ID NO: 1191592 - RNA, 19 nt, Artificial Sequence
  Description of Artificial Sequence: Synthetic oligonucleotide
  Sense strand starting at position 1238 of SEQ ID NO: 916884
aucuguggccuuuaauuaa

SEQ ID NO: 1191593 - RNA, 19 nt, Artificial Sequence
  Description of Artificial Sequence: Synthetic oligonucleotide
  Antisense strand to SEQ ID NO: 1191592
uuaauuaaaggccacagau

SEQ ID NO: 1191594 - RNA, 19 nt, Artificial Sequence
  Description of Artificial Sequence: Synthetic oligonucleotide
  Sense strand starting at position 1265 of SEQ ID NO: 916884
uugaucaugaugugaugau

SEQ ID NO: 1191595 - RNA, 19 nt, Artificial Sequence
  Description of Artificial Sequence: Synthetic oligonucleotide
  Antisense strand to SEQ ID NO: 1191594
aucaucacaucaugaucaa

SEQ ID NO: 1191596 - RNA, 19 nt, Artificial Sequence
  Description of Artificial Sequence: Synthetic oligonucleotide
  Sense strand starting at position 1460 of SEQ ID NO: 916884
acagcaaaugcucagagau

SEQ ID NO: 1191597 - RNA, 19 nt, Artificial Sequence
  Description of Artificial Sequence: Synthetic oligonucleotide
  Antisense strand to SEQ ID NO: 1191596
aucucugagcauuugcugu

SEQ ID NO: 1191598 - RNA, 19 nt, Artificial Sequence
  Description of Artificial Sequence: Synthetic oligonucleotide
  Sense strand starting at position 1501 of SEQ ID NO: 916884
gaaggaguauaaguacuau

SEQ ID NO: 1191599 - RNA, 19 nt, Artificial Sequence
  Description of Artificial Sequence: Synthetic oligonucleotide
  Antisense strand to SEQ ID NO: 1191598
auaguacuuauacuccuuc

SEQ ID NO: 1191600 - RNA, 19 nt, Artificial Sequence
  Description of Artificial Sequence: Synthetic oligonucleotide
  Sense strand starting at position 1763 of SEQ ID NO: 916884
caggaaagguuccuuccaa

SEQ ID NO: 1191601 - RNA, 19 nt, Artificial Sequence
  Description of Artificial Sequence: Synthetic oligonucleotide
  Antisense strand to SEQ ID NO: 1191600
uuggaaggaaccuuuccug

SEQ ID NO: 1191602 - RNA, 19 nt, Artificial Sequence
  Description of Artificial Sequence: Synthetic oligonucleotide
  Sense strand starting at position 1764 of SEQ ID NO: 916884
aggaaagguuccuuccaaa

SEQ ID NO: 1191603 - RNA, 19 nt, Artificial Sequence
  Description of Artificial Sequence: Synthetic oligonucleotide
  Antisense strand to SEQ ID NO: 1191602
uuuggaaggaaccuuuccu

SEQ ID NO: 1191604 - RNA, 19 nt, Artificial Sequence
  Description of Artificial Sequence: Synthetic oligonucleotide
  Sense strand starting at position 1856 of SEQ ID NO: 916884
ucaagacugacgggcuaau

SEQ ID NO: 1191605 - RNA, 19 nt, Artificial Sequence
  Description of Artificial Sequence: Synthetic oligonucleotide
  Antisense strand to SEQ ID NO: 1191604
auuagcccgucagucuuga

SEQ ID NO: 1191606 - RNA, 19 nt, Artificial Sequence
  Description of Artificial Sequence: Synthetic oligonucleotide
  Sense strand starting at position 2021 of SEQ ID NO: 916884
cuggauauuucugauggaa

SEQ ID NO: 1191607 - RNA, 19 nt, Artificial Sequence
  Description of Artificial Sequence: Synthetic oligonucleotide
  Antisense strand to SEQ ID NO: 1191606
uuccaucagaaauauccag

SEQ ID NO: 1191608 - RNA, 19 nt, Artificial Sequence
  Description of Artificial Sequence: Synthetic oligonucleotide
  Sense strand starting at position 2023 of SEQ ID NO: 916884
ggauauuucugauggaaug

SEQ ID NO: 1191609 - RNA, 19 nt, Artificial Sequence
  Description of Artificial Sequence: Synthetic oligonucleotide
  Antisense strand to SEQ ID NO: 1191608
cauuccaucagaaauaucc

SEQ ID NO: 1191610 - RNA, 19 nt, Artificial Sequence
  Description of Artificial Sequence: Synthetic oligonucleotide
  Sense strand starting at position 2154 of SEQ ID NO: 916884
cuuaguauacaguauuaag

SEQ ID NO: 1191611 - RNA, 19 nt, Artificial Sequence
  Description of Artificial Sequence: Synthetic oligonucleotide
  Antisense strand to SEQ ID NO: 1191610
cuuaauacuguauacuaag

SEQ ID NO: 1191612 - RNA, 19 nt, Artificial Sequence
  Description of Artificial Sequence: Synthetic oligonucleotide
  Sense strand starting at position 2247 of SEQ ID NO: 916884
ugagaagcgcuauauaacu

SEQ ID NO: 1191613 - RNA, 19 nt, Artificial Sequence
  Description of Artificial Sequence: Synthetic oligonucleotide
  Antisense strand to SEQ ID NO: 1191612
aguuauauagcgcuucuca

SEQ ID NO: 1191614 - RNA, 19 nt, Artificial Sequence
  Description of Artificial Sequence: Synthetic oligonucleotide
  Sense strand starting at position 2287 of SEQ ID NO: 916884
gaagauggcucuuugauug

SEQ ID NO: 1191615 - RNA, 19 nt, Artificial Sequence
  Description of Artificial Sequence: Synthetic oligonucleotide
  Antisense strand to SEQ ID NO: 1191614
caaucaaagagccaucuuc

SEQ ID NO: 1191616 - RNA, 19 nt, Artificial Sequence
  Description of Artificial Sequence: Synthetic oligonucleotide
  Sense strand starting at position 2386 of SEQ ID NO: 916884
cuaacuguugcugauuauu

SEQ ID NO: 1191617 - RNA, 19 nt, Artificial Sequence
  Description of Artificial Sequence: Synthetic oligonucleotide
  Antisense strand to SEQ ID NO: 1191616
aauaaucagcaacaguuag

SEQ ID NO: 1191618 - RNA, 19 nt, Artificial Sequence
  Description of Artificial Sequence: Synthetic oligonucleotide
  Sense strand starting at position 2509 of SEQ ID NO: 916884
guaaauugucuugacaaua

SEQ ID NO: 1191619 - RNA, 19 nt, Artificial Sequence
  Description of Artificial Sequence: Synthetic oligonucleotide
  Antisense strand to SEQ ID NO: 1191618
uauugucaagacaauuuac

SEQ ID NO: 1191620 - RNA, 19 nt, Artificial Sequence
  Description of Artificial Sequence: Synthetic oligonucleotide
  Sense strand starting at position 2641 of SEQ ID NO: 916884
accugaguggcagggaaau

SEQ ID NO: 1191621 - RNA, 19 nt, Artificial Sequence
  Description of Artificial Sequence: Synthetic oligonucleotide
  Antisense strand to SEQ ID NO: 1191620
auuucccugccacucaggu

SEQ ID NO: 1191622 - RNA, 19 nt, Artificial Sequence
  Description of Artificial Sequence: Synthetic oligonucleotide
  Sense strand starting at position 2670 of SEQ ID NO: 916884
caguguaacuuagugaaag

SEQ ID NO: 1191623 - RNA, 19 nt, Artificial Sequence
  Description of Artificial Sequence: Synthetic oligonucleotide
  Antisense strand to SEQ ID NO: 1191622
cuuucacuaaguuacacug

SEQ ID NO: 1191624 - RNA, 19 nt, Artificial Sequence
  Description of Artificial Sequence: Synthetic oligonucleotide
  Sense strand starting at position 2672 of SEQ ID NO: 916884
guguaacuuagugaaagac

SEQ ID NO: 1191625 - RNA, 19 nt, Artificial Sequence
  Description of Artificial Sequence: Synthetic oligonucleotide
  Antisense strand to SEQ ID NO: 1191624
gucuuucacuaaguuacac

SEQ ID NO: 1191626 - RNA, 19 nt, Artificial Sequence
  Description of Artificial Sequence: Synthetic oligonucleotide
  Sense strand starting at position 2783 of SEQ ID NO: 916884
uucccauugguguaauaug

SEQ ID NO: 1191627 - RNA, 19 nt, Artificial Sequence
  Description of Artificial Sequence: Synthetic oligonucleotide
  Antisense strand to SEQ ID NO: 1191626
cauauuacaccaaugggaa

SEQ ID NO: 1191628 - RNA, 19 nt, Artificial Sequence
  Description of Artificial Sequence: Synthetic oligonucleotide
  Sense strand starting at position 2791 of SEQ ID NO: 916884
gguguaauaugaguauuag

SEQ ID NO: 1191629 - RNA, 19 nt, Artificial Sequence
  Description of Artificial Sequence: Synthetic oligonucleotide
  Antisense strand to SEQ ID NO: 1191628
cuaauacucauauuacacc

SEQ ID NO: 1191630 - RNA, 19 nt, Artificial Sequence
  Description of Artificial Sequence: Synthetic oligonucleotide
  Sense strand starting at position 2792 of SEQ ID NO: 916884
guguaauaugaguauuagu

SEQ ID NO: 1191631 - RNA, 19 nt, Artificial Sequence
  Description of Artificial Sequence: Synthetic oligonucleotide
  Antisense strand to SEQ ID NO: 1191630
acuaauacucauauuacac

SEQ ID NO: 1191632 - RNA, 19 nt, Artificial Sequence
  Description of Artificial Sequence: Synthetic oligonucleotide
  Sense strand starting at position 2829 of SEQ ID NO: 916884
augggauaguguuuauaaa

SEQ ID NO: 1191633 - RNA, 19 nt, Artificial Sequence
  Description of Artificial Sequence: Synthetic oligonucleotide
  Antisense strand to SEQ ID NO: 1191632
uuuauaaacacuaucccau

SEQ ID NO: 1191634 - RNA, 19 nt, Artificial Sequence
  Description of Artificial Sequence: Synthetic oligonucleotide
  Sense strand starting at position 3112 of SEQ ID NO: 916884
ggauguguggccaguguau

SEQ ID NO: 1191635 - RNA, 19 nt, Artificial Sequence
  Description of Artificial Sequence: Synthetic oligonucleotide
  Antisense strand to SEQ ID NO: 1191634
auacacuggccacacaucc

SEQ ID NO: 1191636 - RNA, 19 nt, Artificial Sequence
  Description of Artificial Sequence: Synthetic oligonucleotide
  Sense strand starting at position 3125 of SEQ ID NO: 916884
guguaucugaacuagguau

SEQ ID NO: 1191637 - RNA, 19 nt, Artificial Sequence
  Description of Artificial Sequence: Synthetic oligonucleotide
  Antisense strand to SEQ ID NO: 1191636
auaccuaguucagauacac

SEQ ID NO: 1191638 - RNA, 19 nt, Artificial Sequence
  Description of Artificial Sequence: Synthetic oligonucleotide
  Sense strand starting at position 3141 of SEQ ID NO: 916884
uauggauguuaaguaggau

SEQ ID NO: 1191639 - RNA, 19 nt, Artificial Sequence
  Description of Artificial Sequence: Synthetic oligonucleotide
  Antisense strand to SEQ ID NO: 1191638
auccuacuuaacauccaua

SEQ ID NO: 1191640 - RNA, 19 nt, Artificial Sequence
  Description of Artificial Sequence: Synthetic oligonucleotide
  Sense strand starting at position 3271 of SEQ ID NO: 916884
aaccaaccugcuggugaua

SEQ ID NO: 1191641 - RNA, 19 nt, Artificial Sequence
  Description of Artificial Sequence: Synthetic oligonucleotide
  Antisense strand to SEQ ID NO: 1191640
uaucaccagcagguugguu

SEQ ID NO: 1191642 - RNA, 19 nt, Artificial Sequence
  Description of Artificial Sequence: Synthetic oligonucleotide
  Sense strand starting at position 3293 of SEQ ID NO: 916884
gguguaagugggagcaguu

SEQ ID NO: 1191643 - RNA, 19 nt, Artificial Sequence
  Description of Artificial Sequence: Synthetic oligonucleotide
  Antisense strand to SEQ ID NO: 1191642
aacugcucccacuuacacc

SEQ ID NO: 1191644 - RNA, 19 nt, Artificial Sequence
  Description of Artificial Sequence: Synthetic oligonucleotide
  Sense strand starting at position 3347 of SEQ ID NO: 916884
uguagauagccuuagaugu

SEQ ID NO: 1191645 - RNA, 19 nt, Artificial Sequence
  Description of Artificial Sequence: Synthetic oligonucleotide
  Antisense strand to SEQ ID NO: 1191644
acaucuaaggcuaucuaca

SEQ ID NO: 1191646 - RNA, 19 nt, Artificial Sequence
  Description of Artificial Sequence: Synthetic oligonucleotide
  Sense strand starting at position 3361 of SEQ ID NO: 916884
gaugucaugcuaggaaauu

SEQ ID NO: 1191647 - RNA, 19 nt, Artificial Sequence
  Description of Artificial Sequence: Synthetic oligonucleotide
  Antisense strand to SEQ ID NO: 1191646
aauuuccuagcaugacauc

SEQ ID NO: 1191648 - RNA, 19 nt, Artificial Sequence
  Description of Artificial Sequence: Synthetic oligonucleotide
  Sense strand starting at position 3472 of SEQ ID NO: 916884
auguaaacuugauuaguag

SEQ ID NO: 1191649 - RNA, 19 nt, Artificial Sequence
  Description of Artificial Sequence: Synthetic oligonucleotide
  Antisense strand to SEQ ID NO: 1191648
cuacuaaucaaguuuacau

SEQ ID NO: 1191650 - RNA, 19 nt, Artificial Sequence
  Description of Artificial Sequence: Synthetic oligonucleotide
  Sense strand starting at position 3475 of SEQ ID NO: 916884
uaaacuugauuaguaggua

SEQ ID NO: 1191651 - RNA, 19 nt, Artificial Sequence
  Description of Artificial Sequence: Synthetic oligonucleotide
  Antisense strand to SEQ ID NO: 1191650
uaccuacuaaucaaguuua

SEQ ID NO: 1191652 - RNA, 19 nt, Artificial Sequence
  Description of Artificial Sequence: Synthetic oligonucleotide
  Sense strand starting at position 3479 of SEQ ID NO: 916884
cuugauuaguagguaugga

SEQ ID NO: 1191653 - RNA, 19 nt, Artificial Sequence
  Description of Artificial Sequence: Synthetic oligonucleotide
  Antisense strand to SEQ ID NO: 1191652
uccauaccuacuaaucaag

SEQ ID NO: 1191654 - RNA, 19 nt, Artificial Sequence
  Description of Artificial Sequence: Synthetic oligonucleotide
  Sense strand starting at position 3596 of SEQ ID NO: 916884
gaggcuauuguugaagagu

SEQ ID NO: 1191655 - RNA, 19 nt, Artificial Sequence
  Description of Artificial Sequence: Synthetic oligonucleotide
  Antisense strand to SEQ ID NO: 1191654
acucuucaacaauagccuc

SEQ ID NO: 1191656 - RNA, 19 nt, Artificial Sequence
  Description of Artificial Sequence: Synthetic oligonucleotide
  Sense strand starting at position 3602 of SEQ ID NO: 916884
auuguugaagaguaccauu

SEQ ID NO: 1191657 - RNA, 19 nt, Artificial Sequence
  Description of Artificial Sequence: Synthetic oligonucleotide
  Antisense strand to SEQ ID NO: 1191656
aaugguacucuucaacaau

SEQ ID NO: 1191658 - RNA, 19 nt, Artificial Sequence
  Description of Artificial Sequence: Synthetic oligonucleotide
  Sense strand starting at position 3642 of SEQ ID NO: 916884
guuuguuucucuccuauuu

SEQ ID NO: 1191659 - RNA, 19 nt, Artificial Sequence
  Description of Artificial Sequence: Synthetic oligonucleotide
  Antisense strand to SEQ ID NO: 1191658
aaauaggagagaaacaaac

SEQ ID NO: 1191660 - RNA, 19 nt, Artificial Sequence
  Description of Artificial Sequence: Synthetic oligonucleotide
  Sense strand starting at position 267 of SEQ ID NO: 916885
acaacagcucgauaaaccu

SEQ ID NO: 1191661 - RNA, 19 nt, Artificial Sequence
  Description of Artificial Sequence: Synthetic oligonucleotide
  Antisense strand to SEQ ID NO: 1191660
agguuuaucgagcuguugu

SEQ ID NO: 1191662 - RNA, 19 nt, Artificial Sequence
  Description of Artificial Sequence: Synthetic oligonucleotide
  Sense strand starting at position 364 of SEQ ID NO: 916885
cucaguagucuuuaacuga

SEQ ID NO: 1191663 - RNA, 19 nt, Artificial Sequence
  Description of Artificial Sequence: Synthetic oligonucleotide
  Antisense strand to SEQ ID NO: 1191662
ucaguuaaagacuacugag

SEQ ID NO: 1191664 - RNA, 19 nt, Artificial Sequence
  Description of Artificial Sequence: Synthetic oligonucleotide
  Sense strand starting at position 405 of SEQ ID NO: 916885
aggacaaacugggcucaua

SEQ ID NO: 1191665 - RNA, 19 nt, Artificial Sequence
  Description of Artificial Sequence: Synthetic oligonucleotide
  Antisense strand to SEQ ID NO: 1191664
uaugagcccaguuuguccu

SEQ ID NO: 1191666 - RNA, 19 nt, Artificial Sequence
  Description of Artificial Sequence: Synthetic oligonucleotide
  Sense strand starting at position 526 of SEQ ID NO: 916885
cuagaaucucgagaagucu

SEQ ID NO: 1191667 - RNA, 19 nt, Artificial Sequence
  Description of Artificial Sequence: Synthetic oligonucleotide
  Antisense strand to SEQ ID NO: 1191666
agacuucucgagauucuag

SEQ ID NO: 1191668 - RNA, 19 nt, Artificial Sequence
  Description of Artificial Sequence: Synthetic oligonucleotide
  Sense strand starting at position 566 of SEQ ID NO: 916885
gacaccuguguuggaaaca

SEQ ID NO: 1191669 - RNA, 19 nt, Artificial Sequence
  Description of Artificial Sequence: Synthetic oligonucleotide
  Antisense strand to SEQ ID NO: 1191668
uguuuccaacacagguguc

SEQ ID NO: 1191670 - RNA, 19 nt, Artificial Sequence
  Description of Artificial Sequence: Synthetic oligonucleotide
  Sense strand starting at position 708 of SEQ ID NO: 916885
cuaagaagguucucuugag

SEQ ID NO: 1191671 - RNA, 19 nt, Artificial Sequence
  Description of Artificial Sequence: Synthetic oligonucleotide
  Antisense strand to SEQ ID NO: 1191670
cucaagagaaccuucuuag

SEQ ID NO: 1191672 - RNA, 19 nt, Artificial Sequence
  Description of Artificial Sequence: Synthetic oligonucleotide
  Sense strand starting at position 712 of SEQ ID NO: 916885
gaagguucucuugagcaac

SEQ ID NO: 1191673 - RNA, 19 nt, Artificial Sequence
  Description of Artificial Sequence: Synthetic oligonucleotide
  Antisense strand to SEQ ID NO: 1191672
guugcucaagagaaccuuc

SEQ ID NO: 1191674 - RNA, 19 nt, Artificial Sequence
  Description of Artificial Sequence: Synthetic oligonucleotide
  Sense strand starting at position 949 of SEQ ID NO: 916885
ugaugugagcuuuaauacc

SEQ ID NO: 1191675 - RNA, 19 nt, Artificial Sequence
  Description of Artificial Sequence: Synthetic oligonucleotide
  Antisense strand to SEQ ID NO: 1191674
gguauuaaagcucacauca

SEQ ID NO: 1191676 - RNA, 19 nt, Artificial Sequence
  Description of Artificial Sequence: Synthetic oligonucleotide
  Sense strand starting at position 1038 of SEQ ID NO: 916885
aggcuuaagaaauguagau

SEQ ID NO: 1191677 - RNA, 19 nt, Artificial Sequence
  Description of Artificial Sequence: Synthetic oligonucleotide
  Antisense strand to SEQ ID NO: 1191676
aucuacauuucuuaagccu

SEQ ID NO: 1191678 - RNA, 19 nt, Artificial Sequence
  Description of Artificial Sequence: Synthetic oligonucleotide
  Sense strand starting at position 1071 of SEQ ID NO: 916885
ggugucauacuacauuaag

SEQ ID NO: 1191679 - RNA, 19 nt, Artificial Sequence
  Description of Artificial Sequence: Synthetic oligonucleotide
  Antisense strand to SEQ ID NO: 1191678
cuuaauguaguaugacacc

SEQ ID NO: 1191680 - RNA, 19 nt, Artificial Sequence
  Description of Artificial Sequence: Synthetic oligonucleotide
  Sense strand starting at position 1152 of SEQ ID NO: 916885
augucagacuucucugaca

SEQ ID NO: 1191681 - RNA, 19 nt, Artificial Sequence
  Description of Artificial Sequence: Synthetic oligonucleotide
  Antisense strand to SEQ ID NO: 1191680
ugucagagaagucugacau

SEQ ID NO: 1191682 - RNA, 19 nt, Artificial Sequence
  Description of Artificial Sequence: Synthetic oligonucleotide
  Sense strand starting at position 1236 of SEQ ID NO: 916885
ccgggaguccagggacaau

SEQ ID NO: 1191683 - RNA, 19 nt, Artificial Sequence
  Description of Artificial Sequence: Synthetic oligonucleotide
  Antisense strand to SEQ ID NO: 1191682
auugucccuggacucccgg

SEQ ID NO: 1191684 - RNA, 19 nt, Artificial Sequence
  Description of Artificial Sequence: Synthetic oligonucleotide
  Sense strand starting at position 1760 of SEQ ID NO: 916885
acuggaaagccuugauccu

SEQ ID NO: 1191685 - RNA, 19 nt, Artificial Sequence
  Description of Artificial Sequence: Synthetic oligonucleotide
  Antisense strand to SEQ ID NO: 1191684
aggaucaaggcuuuccagu

SEQ ID NO: 1191686 - RNA, 19 nt, Artificial Sequence
  Description of Artificial Sequence: Synthetic oligonucleotide
  Sense strand starting at position 2039 of SEQ ID NO: 916885
agucuacauuguuuaggga

SEQ ID NO: 1191687 - RNA, 19 nt, Artificial Sequence
  Description of Artificial Sequence: Synthetic oligonucleotide
  Antisense strand to SEQ ID NO: 1191686
ucccuaaacaauguagacu

SEQ ID NO: 1191688 - RNA, 19 nt, Artificial Sequence
  Description of Artificial Sequence: Synthetic oligonucleotide
  Sense strand starting at position 2040 of SEQ ID NO: 916885
gucuacauuguuuagggaa

SEQ ID NO: 1191689 - RNA, 19 nt, Artificial Sequence
  Description of Artificial Sequence: Synthetic oligonucleotide
  Antisense strand to SEQ ID NO: 1191688
uucccuaaacaauguagac

SEQ ID NO: 1191690 - RNA, 19 nt, Artificial Sequence
  Description of Artificial Sequence: Synthetic oligonucleotide
  Sense strand starting at position 2047 of SEQ ID NO: 916885
uuguuuagggaaggagauu

SEQ ID NO: 1191691 - RNA, 19 nt, Artificial Sequence
  Description of Artificial Sequence: Synthetic oligonucleotide
  Antisense strand to SEQ ID NO: 1191690
aaucuccuucccuaaacaa

SEQ ID NO: 1191692 - RNA, 19 nt, Artificial Sequence
  Description of Artificial Sequence: Synthetic oligonucleotide
  Sense strand starting at position 2126 of SEQ ID NO: 916885
cccuaaagaucgcugggaa

SEQ ID NO: 1191693 - RNA, 19 nt, Artificial Sequence
  Description of Artificial Sequence: Synthetic oligonucleotide
  Antisense strand to SEQ ID NO: 1191692
uucccagcgaucuuuaggg

SEQ ID NO: 1191694 - RNA, 19 nt, Artificial Sequence
  Description of Artificial Sequence: Synthetic oligonucleotide
  Sense strand starting at position 2129 of SEQ ID NO: 916885
uaaagaucgcugggaauug

SEQ ID NO: 1191695 - RNA, 19 nt, Artificial Sequence
  Description of Artificial Sequence: Synthetic oligonucleotide
  Antisense strand to SEQ ID NO: 1191694
caauucccagcgaucuuua

SEQ ID NO: 1191696 - RNA, 19 nt, Artificial Sequence
  Description of Artificial Sequence: Synthetic oligonucleotide
  Sense strand starting at position 2139 of SEQ ID NO: 916885
ugggaauuguaguuuaauc

SEQ ID NO: 1191697 - RNA, 19 nt, Artificial Sequence
  Description of Artificial Sequence: Synthetic oligonucleotide
  Antisense strand to SEQ ID NO: 1191696
gauuaaacuacaauuccca

SEQ ID NO: 1191698 - RNA, 19 nt, Artificial Sequence
  Description of Artificial Sequence: Synthetic oligonucleotide
  Sense strand starting at position 2141 of SEQ ID NO: 916885
ggaauuguaguuuaaucuu

SEQ ID NO: 1191699 - RNA, 19 nt, Artificial Sequence
  Description of Artificial Sequence: Synthetic oligonucleotide
  Antisense strand to SEQ ID NO: 1191698
aagauuaaacuacaauucc

SEQ ID NO: 1191700 - RNA, 19 nt, Artificial Sequence
  Description of Artificial Sequence: Synthetic oligonucleotide
  Sense strand starting at position 2217 of SEQ ID NO: 916885
cuaggaaauccuggguucu

SEQ ID NO: 1191701 - RNA, 19 nt, Artificial Sequence
  Description of Artificial Sequence: Synthetic oligonucleotide
  Antisense strand to SEQ ID NO: 1191700
agaacccaggauuuccuag

SEQ ID NO: 1191702 - RNA, 19 nt, Artificial Sequence
  Description of Artificial Sequence: Synthetic oligonucleotide
  Sense strand starting at position 2218 of SEQ ID NO: 916885
uaggaaauccuggguucua

SEQ ID NO: 1191703 - RNA, 19 nt, Artificial Sequence
  Description of Artificial Sequence: Synthetic oligonucleotide
  Antisense strand to SEQ ID NO: 1191702
uagaacccaggauuuccua

SEQ ID NO: 1191704 - RNA, 19 nt, Artificial Sequence
  Description of Artificial Sequence: Synthetic oligonucleotide
  Sense strand starting at position 2219 of SEQ ID NO: 916885
aggaaauccuggguucuau

SEQ ID NO: 1191705 - RNA, 19 nt, Artificial Sequence
  Description of Artificial Sequence: Synthetic oligonucleotide
  Antisense strand to SEQ ID NO: 1191704
auagaacccaggauuuccu

SEQ ID NO: 1191706 - RNA, 19 nt, Artificial Sequence
  Description of Artificial Sequence: Synthetic oligonucleotide
  Sense strand starting at position 2279 of SEQ ID NO: 916885
ucccaaagggauugcaaau

SEQ ID NO: 1191707 - RNA, 19 nt, Artificial Sequence
  Description of Artificial Sequence: Synthetic oligonucleotide
  Antisense strand to SEQ ID NO: 1191706
auuugcaaucccuuuggga

SEQ ID NO: 1191708 - RNA, 19 nt, Artificial Sequence
  Description of Artificial Sequence: Synthetic oligonucleotide
  Sense strand starting at position 2559 of SEQ ID NO: 916885
cuauaaccucaguauuagu

SEQ ID NO: 1191709 - RNA, 19 nt, Artificial Sequence
  Description of Artificial Sequence: Synthetic oligonucleotide
  Antisense strand to SEQ ID NO: 1191708
acuaauacugagguuauag

SEQ ID NO: 1191710 - RNA, 19 nt, Artificial Sequence
  Description of Artificial Sequence: Synthetic oligonucleotide
  Sense strand starting at position 2564 of SEQ ID NO: 916885
accucaguauuagucaaga

SEQ ID NO: 1191711 - RNA, 19 nt, Artificial Sequence
  Description of Artificial Sequence: Synthetic oligonucleotide
  Antisense strand to SEQ ID NO: 1191710
ucuugacuaauacugaggu

SEQ ID NO: 1191712 - RNA, 19 nt, Artificial Sequence
  Description of Artificial Sequence: Synthetic oligonucleotide
  Sense strand starting at position 2566 of SEQ ID NO: 916885
cucaguauuagucaagagu

SEQ ID NO: 1191713 - RNA, 19 nt, Artificial Sequence
  Description of Artificial Sequence: Synthetic oligonucleotide
  Antisense strand to SEQ ID NO: 1191712
acucuugacuaauacugag

SEQ ID NO: 1191714 - RNA, 19 nt, Artificial Sequence
  Description of Artificial Sequence: Synthetic oligonucleotide
  Sense strand starting at position 2625 of SEQ ID NO: 916885
cgagauuuauuccaagaau

SEQ ID NO: 1191715 - RNA, 19 nt, Artificial Sequence
  Description of Artificial Sequence: Synthetic oligonucleotide
  Antisense strand to SEQ ID NO: 1191714
auucuuggaauaaaucucg

SEQ ID NO: 1191716 - RNA, 19 nt, Artificial Sequence
  Description of Artificial Sequence: Synthetic oligonucleotide
  Sense strand starting at position 2693 of SEQ ID NO: 916885
cugucuauacacuggagaa

SEQ ID NO: 1191717 - RNA, 19 nt, Artificial Sequence
  Description of Artificial Sequence: Synthetic oligonucleotide
  Antisense strand to SEQ ID NO: 1191716
uucuccaguguauagacag

SEQ ID NO: 1191718 - RNA, 19 nt, Artificial Sequence
  Description of Artificial Sequence: Synthetic oligonucleotide
  Sense strand starting at position 2838 of SEQ ID NO: 916885
gucccagcucaugaagaaa

SEQ ID NO: 1191719 - RNA, 19 nt, Artificial Sequence
  Description of Artificial Sequence: Synthetic oligonucleotide
  Antisense strand to SEQ ID NO: 1191718
uuucuucaugagcugggac

SEQ ID NO: 1191720 - RNA, 19 nt, Artificial Sequence
  Description of Artificial Sequence: Synthetic oligonucleotide
  Sense strand starting at position 2920 of SEQ ID NO: 916885
cauauuaaugagggugauc

SEQ ID NO: 1191721 - RNA, 19 nt, Artificial Sequence
  Description of Artificial Sequence: Synthetic oligonucleotide
  Antisense strand to SEQ ID NO: 1191720
gaucacccucauuaauaug

SEQ ID NO: 1191722 - RNA, 19 nt, Artificial Sequence
  Description of Artificial Sequence: Synthetic oligonucleotide
  Sense strand starting at position 2922 of SEQ ID NO: 916885
uauuaaugagggugaucuu

SEQ ID NO: 1191723 - RNA, 19 nt, Artificial Sequence
  Description of Artificial Sequence: Synthetic oligonucleotide
  Antisense strand to SEQ ID NO: 1191722
aagaucacccucauuaaua

SEQ ID NO: 1191724 - RNA, 19 nt, Artificial Sequence
  Description of Artificial Sequence: Synthetic oligonucleotide
  Sense strand starting at position 2925 of SEQ ID NO: 916885
uaaugagggugaucuucuu

SEQ ID NO: 1191725 - RNA, 19 nt, Artificial Sequence
  Description of Artificial Sequence: Synthetic oligonucleotide
  Antisense strand to SEQ ID NO: 1191724
aagaagaucacccucauua

SEQ ID NO: 1191726 - RNA, 19 nt, Artificial Sequence
  Description of Artificial Sequence: Synthetic oligonucleotide
  Sense strand starting at position 3020 of SEQ ID NO: 916885
cugggugucccuuagacca

SEQ ID NO: 1191727 - RNA, 19 nt, Artificial Sequence
  Description of Artificial Sequence: Synthetic oligonucleotide
  Antisense strand to SEQ ID NO: 1191726
uggucuaagggacacccag

SEQ ID NO: 1191728 - RNA, 19 nt, Artificial Sequence
  Description of Artificial Sequence: Synthetic oligonucleotide
  Sense strand starting at position 3368 of SEQ ID NO: 916885
ggucucccugugaguggua

SEQ ID NO: 1191729 - RNA, 19 nt, Artificial Sequence
  Description of Artificial Sequence: Synthetic oligonucleotide
  Antisense strand to SEQ ID NO: 1191728
uaccacucacagggagacc

SEQ ID NO: 1191730 - RNA, 19 nt, Artificial Sequence
  Description of Artificial Sequence: Synthetic oligonucleotide
  Sense strand starting at position 3528 of SEQ ID NO: 916885
gcugacaucaagggugaga

SEQ ID NO: 1191731 - RNA, 19 nt, Artificial Sequence
  Description of Artificial Sequence: Synthetic oligonucleotide
  Antisense strand to SEQ ID NO: 1191730
ucucacccuugaugucagc

SEQ ID NO: 1191732 - RNA, 19 nt, Artificial Sequence
  Description of Artificial Sequence: Synthetic oligonucleotide
  Sense strand starting at position 3560 of SEQ ID NO: 916885
cuugcaagacuuuggaaau

SEQ ID NO: 1191733 - RNA, 19 nt, Artificial Sequence
  Description of Artificial Sequence: Synthetic oligonucleotide
  Antisense strand to SEQ ID NO: 1191732
auuuccaaagucuugcaag

SEQ ID NO: 1191734 - RNA, 19 nt, Artificial Sequence
  Description of Artificial Sequence: Synthetic oligonucleotide
  Sense strand starting at position 3603 of SEQ ID NO: 916885
gcccauaauuuccugagcu

SEQ ID NO: 1191735 - RNA, 19 nt, Artificial Sequence
  Description of Artificial Sequence: Synthetic oligonucleotide
  Antisense strand to SEQ ID NO: 1191734
agcucaggaaauuaugggc

SEQ ID NO: 1191736 - RNA, 19 nt, Artificial Sequence
  Description of Artificial Sequence: Synthetic oligonucleotide
  Sense strand starting at position 3781 of SEQ ID NO: 916885
ugcuucuuacccuagaaug

SEQ ID NO: 1191737 - RNA, 19 nt, Artificial Sequence
  Description of Artificial Sequence: Synthetic oligonucleotide
  Antisense strand to SEQ ID NO: 1191736
cauucuaggguaagaagca

SEQ ID NO: 1191738 - RNA, 19 nt, Artificial Sequence
  Description of Artificial Sequence: Synthetic oligonucleotide
  Sense strand starting at position 3857 of SEQ ID NO: 916885
guauuucuguguuucugac

SEQ ID NO: 1191739 - RNA, 19 nt, Artificial Sequence
  Description of Artificial Sequence: Synthetic oligonucleotide
  Antisense strand to SEQ ID NO: 1191738
gucagaaacacagaaauac

SEQ ID NO: 1191740 - RNA, 19 nt, Artificial Sequence
  Description of Artificial Sequence: Synthetic oligonucleotide
  Sense strand starting at position 304 of SEQ ID NO: 916886
acaacagcucgauaaaccu

SEQ ID NO: 1191741 - RNA, 19 nt, Artificial Sequence
  Description of Artificial Sequence: Synthetic oligonucleotide
  Antisense strand to SEQ ID NO: 1191740
agguuuaucgagcuguugu

SEQ ID NO: 1191742 - RNA, 19 nt, Artificial Sequence
  Description of Artificial Sequence: Synthetic oligonucleotide
  Sense strand starting at position 401 of SEQ ID NO: 916886
cucaguagucuuuaacuga

SEQ ID NO: 1191743 - RNA, 19 nt, Artificial Sequence
  Description of Artificial Sequence: Synthetic oligonucleotide
  Antisense strand to SEQ ID NO: 1191742
ucaguuaaagacuacugag

SEQ ID NO: 1191744 - RNA, 19 nt, Artificial Sequence
  Description of Artificial Sequence: Synthetic oligonucleotide
  Sense strand starting at position 442 of SEQ ID NO: 916886
aggacaaacugggcucaua

SEQ ID NO: 1191745 - RNA, 19 nt, Artificial Sequence
  Description of Artificial Sequence: Synthetic oligonucleotide
  Antisense strand to SEQ ID NO: 1191744
uaugagcccaguuuguccu

SEQ ID NO: 1191746 - RNA, 19 nt, Artificial Sequence
  Description of Artificial Sequence: Synthetic oligonucleotide
  Sense strand starting at position 563 of SEQ ID NO: 916886
cuagaaucucgagaagucu

SEQ ID NO: 1191747 - RNA, 19 nt, Artificial Sequence
  Description of Artificial Sequence: Synthetic oligonucleotide
  Antisense strand to SEQ ID NO: 1191746
agacuucucgagauucuag

SEQ ID NO: 1191748 - RNA, 19 nt, Artificial Sequence
  Description of Artificial Sequence: Synthetic oligonucleotide
  Sense strand starting at position 603 of SEQ ID NO: 916886
gacaccuguguuggaaaca

SEQ ID NO: 1191749 - RNA, 19 nt, Artificial Sequence
  Description of Artificial Sequence: Synthetic oligonucleotide
  Antisense strand to SEQ ID NO: 1191748
uguuuccaacacagguguc

SEQ ID NO: 1191750 - RNA, 19 nt, Artificial Sequence
  Description of Artificial Sequence: Synthetic oligonucleotide
  Sense strand starting at position 745 of SEQ ID NO: 916886
cuaagaagguucucuugag

SEQ ID NO: 1191751 - RNA, 19 nt, Artificial Sequence
  Description of Artificial Sequence: Synthetic oligonucleotide
  Antisense strand to SEQ ID NO: 1191750
cucaagagaaccuucuuag

SEQ ID NO: 1191752 - RNA, 19 nt, Artificial Sequence
  Description of Artificial Sequence: Synthetic oligonucleotide
  Sense strand starting at position 749 of SEQ ID NO: 916886
gaagguucucuugagcaac

SEQ ID NO: 1191753 - RNA, 19 nt, Artificial Sequence
  Description of Artificial Sequence: Synthetic oligonucleotide
  Antisense strand to SEQ ID NO: 1191752
guugcucaagagaaccuuc

SEQ ID NO: 1191754 - RNA, 19 nt, Artificial Sequence
  Description of Artificial Sequence: Synthetic oligonucleotide
  Sense strand starting at position 986 of SEQ ID NO: 916886
ugaugugagcuuuaauacc

SEQ ID NO: 1191755 - RNA, 19 nt, Artificial Sequence
  Description of Artificial Sequence: Synthetic oligonucleotide
  Antisense strand to SEQ ID NO: 1191754
gguauuaaagcucacauca

SEQ ID NO: 1191756 - RNA, 19 nt, Artificial Sequence
  Description of Artificial Sequence: Synthetic oligonucleotide
  Sense strand starting at position 1075 of SEQ ID NO: 916886
aggcuuaagaaauguagau

SEQ ID NO: 1191757 - RNA, 19 nt, Artificial Sequence
  Description of Artificial Sequence: Synthetic oligonucleotide
  Antisense strand to SEQ ID NO: 1191756
aucuacauuucuuaagccu

SEQ ID NO: 1191758 - RNA, 19 nt, Artificial Sequence
  Description of Artificial Sequence: Synthetic oligonucleotide
  Sense strand starting at position 1108 of SEQ ID NO: 916886
ggugucauacuacauuaag

SEQ ID NO: 1191759 - RNA, 19 nt, Artificial Sequence
  Description of Artificial Sequence: Synthetic oligonucleotide
  Antisense strand to SEQ ID NO: 1191758
cuuaauguaguaugacacc

SEQ ID NO: 1191760 - RNA, 19 nt, Artificial Sequence
  Description of Artificial Sequence: Synthetic oligonucleotide
  Sense strand starting at position 1189 of SEQ ID NO: 916886
augucagacuucucugaca

SEQ ID NO: 1191761 - RNA, 19 nt, Artificial Sequence
  Description of Artificial Sequence: Synthetic oligonucleotide
  Antisense strand to SEQ ID NO: 1191760
ugucagagaagucugacau

SEQ ID NO: 1191762 - RNA, 19 nt, Artificial Sequence
  Description of Artificial Sequence: Synthetic oligonucleotide
  Sense strand starting at position 1273 of SEQ ID NO: 916886
ccgggaguccagggacaau

SEQ ID NO: 1191763 - RNA, 19 nt, Artificial Sequence
  Description of Artificial Sequence: Synthetic oligonucleotide
  Antisense strand to SEQ ID NO: 1191762
auugucccuggacucccgg

SEQ ID NO: 1191764 - RNA, 19 nt, Artificial Sequence
  Description of Artificial Sequence: Synthetic oligonucleotide
  Sense strand starting at position 1797 of SEQ ID NO: 916886
acuggaaagccuugauccu

SEQ ID NO: 1191765 - RNA, 19 nt, Artificial Sequence
  Description of Artificial Sequence: Synthetic oligonucleotide
  Antisense strand to SEQ ID NO: 1191764
aggaucaaggcuuuccagu

SEQ ID NO: 1191766 - RNA, 19 nt, Artificial Sequence
  Description of Artificial Sequence: Synthetic oligonucleotide
  Sense strand starting at position 2076 of SEQ ID NO: 916886
agucuacauuguuuaggga

SEQ ID NO: 1191767 - RNA, 19 nt, Artificial Sequence
  Description of Artificial Sequence: Synthetic oligonucleotide
  Antisense strand to SEQ ID NO: 1191766
ucccuaaacaauguagacu

SEQ ID NO: 1191768 - RNA, 19 nt, Artificial Sequence
  Description of Artificial Sequence: Synthetic oligonucleotide
  Sense strand starting at position 2077 of SEQ ID NO: 916886
gucuacauuguuuagggaa

SEQ ID NO: 1191769 - RNA, 19 nt, Artificial Sequence
  Description of Artificial Sequence: Synthetic oligonucleotide
  Antisense strand to SEQ ID NO: 1191768
uucccuaaacaauguagac

SEQ ID NO: 1191770 - RNA, 19 nt, Artificial Sequence
  Description of Artificial Sequence: Synthetic oligonucleotide
  Sense strand starting at position 2084 of SEQ ID NO: 916886
uuguuuagggaaggagauu

SEQ ID NO: 1191771 - RNA, 19 nt, Artificial Sequence
  Description of Artificial Sequence: Synthetic oligonucleotide
  Antisense strand to SEQ ID NO: 1191770
aaucuccuucccuaaacaa

SEQ ID NO: 1191772 - RNA, 19 nt, Artificial Sequence
  Description of Artificial Sequence: Synthetic oligonucleotide
  Sense strand starting at position 2163 of SEQ ID NO: 916886
cccuaaagaucgcugggaa

SEQ ID NO: 1191773 - RNA, 19 nt, Artificial Sequence
  Description of Artificial Sequence: Synthetic oligonucleotide
  Antisense strand to SEQ ID NO: 1191772
uucccagcgaucuuuaggg

SEQ ID NO: 1191774 - RNA, 19 nt, Artificial Sequence
  Description of Artificial Sequence: Synthetic oligonucleotide
  Sense strand starting at position 2166 of SEQ ID NO: 916886
uaaagaucgcugggaauug

SEQ ID NO: 1191775 - RNA, 19 nt, Artificial Sequence
  Description of Artificial Sequence: Synthetic oligonucleotide
  Antisense strand to SEQ ID NO: 1191774
caauucccagcgaucuuua

SEQ ID NO: 1191776 - RNA, 19 nt, Artificial Sequence
  Description of Artificial Sequence: Synthetic oligonucleotide
  Sense strand starting at position 2176 of SEQ ID NO: 916886
ugggaauuguaguuuaauc

SEQ ID NO: 1191777 - RNA, 19 nt, Artificial Sequence
  Description of Artificial Sequence: Synthetic oligonucleotide
  Antisense strand to SEQ ID NO: 1191776
gauuaaacuacaauuccca

SEQ ID NO: 1191778 - RNA, 19 nt, Artificial Sequence
  Description of Artificial Sequence: Synthetic oligonucleotide
  Sense strand starting at position 2178 of SEQ ID NO: 916886
ggaauuguaguuuaaucuu

SEQ ID NO: 1191779 - RNA, 19 nt, Artificial Sequence
  Description of Artificial Sequence: Synthetic oligonucleotide
  Antisense strand to SEQ ID NO: 1191778
aagauuaaacuacaauucc

SEQ ID NO: 1191780 - RNA, 19 nt, Artificial Sequence
  Description of Artificial Sequence: Synthetic oligonucleotide
  Sense strand starting at position 2254 of SEQ ID NO: 916886
cuaggaaauccuggguucu

SEQ ID NO: 1191781 - RNA, 19 nt, Artificial Sequence
  Description of Artificial Sequence: Synthetic oligonucleotide
  Antisense strand to SEQ ID NO: 1191780
agaacccaggauuuccuag

SEQ ID NO: 1191782 - RNA, 19 nt, Artificial Sequence
  Description of Artificial Sequence: Synthetic oligonucleotide
  Sense strand starting at position 2255 of SEQ ID NO: 916886
uaggaaauccuggguucua

SEQ ID NO: 1191783 - RNA, 19 nt, Artificial Sequence
  Description of Artificial Sequence: Synthetic oligonucleotide
  Antisense strand to SEQ ID NO: 1191782
uagaacccaggauuuccua

SEQ ID NO: 1191784 - RNA, 19 nt, Artificial Sequence
  Description of Artificial Sequence: Synthetic oligonucleotide
  Sense strand starting at position 2256 of SEQ ID NO: 916886
aggaaauccuggguucuau

SEQ ID NO: 1191785 - RNA, 19 nt, Artificial Sequence
  Description of Artificial Sequence: Synthetic oligonucleotide
  Antisense strand to SEQ ID NO: 1191784
auagaacccaggauuuccu

SEQ ID NO: 1191786 - RNA, 19 nt, Artificial Sequence
  Description of Artificial Sequence: Synthetic oligonucleotide
  Sense strand starting at position 2316 of SEQ ID NO: 916886
ucccaaagggauugcaaau

SEQ ID NO: 1191787 - RNA, 19 nt, Artificial Sequence
  Description of Artificial Sequence: Synthetic oligonucleotide
  Antisense strand to SEQ ID NO: 1191786
auuugcaaucccuuuggga

SEQ ID NO: 1191788 - RNA, 19 nt, Artificial Sequence
  Description of Artificial Sequence: Synthetic oligonucleotide
  Sense strand starting at position 2596 of SEQ ID NO: 916886
cuauaaccucaguauuagu

SEQ ID NO: 1191789 - RNA, 19 nt, Artificial Sequence
  Description of Artificial Sequence: Synthetic oligonucleotide
  Antisense strand to SEQ ID NO: 1191788
acuaauacugagguuauag

SEQ ID NO: 1191790 - RNA, 19 nt, Artificial Sequence
  Description of Artificial Sequence: Synthetic oligonucleotide
  Sense strand starting at position 2601 of SEQ ID NO: 916886
accucaguauuagucaaga

SEQ ID NO: 1191791 - RNA, 19 nt, Artificial Sequence
  Description of Artificial Sequence: Synthetic oligonucleotide
  Antisense strand to SEQ ID NO: 1191790
ucuugacuaauacugaggu

SEQ ID NO: 1191792 - RNA, 19 nt, Artificial Sequence
  Description of Artificial Sequence: Synthetic oligonucleotide
  Sense strand starting at position 2603 of SEQ ID NO: 916886
cucaguauuagucaagagu

SEQ ID NO: 1191793 - RNA, 19 nt, Artificial Sequence
  Description of Artificial Sequence: Synthetic oligonucleotide
  Antisense strand to SEQ ID NO: 1191792
acucuugacuaauacugag

SEQ ID NO: 1191794 - RNA, 19 nt, Artificial Sequence
  Description of Artificial Sequence: Synthetic oligonucleotide
  Sense strand starting at position 2662 of SEQ ID NO: 916886
cgagauuuauuccaagaau

SEQ ID NO: 1191795 - RNA, 19 nt, Artificial Sequence
  Description of Artificial Sequence: Synthetic oligonucleotide
  Antisense strand to SEQ ID NO: 1191794
auucuuggaauaaaucucg

SEQ ID NO: 1191796 - RNA, 19 nt, Artificial Sequence
  Description of Artificial Sequence: Synthetic oligonucleotide
  Sense strand starting at position 2730 of SEQ ID NO: 916886
cugucuauacacuggagaa

SEQ ID NO: 1191797 - RNA, 19 nt, Artificial Sequence
  Description of Artificial Sequence: Synthetic oligonucleotide
  Antisense strand to SEQ ID NO: 1191796
uucuccaguguauagacag

SEQ ID NO: 1191798 - RNA, 19 nt, Artificial Sequence
  Description of Artificial Sequence: Synthetic oligonucleotide
  Sense strand starting at position 2875 of SEQ ID NO: 916886
gucccagcucaugaagaaa

SEQ ID NO: 1191799 - RNA, 19 nt, Artificial Sequence
  Description of Artificial Sequence: Synthetic oligonucleotide
  Antisense strand to SEQ ID NO: 1191798
uuucuucaugagcugggac

SEQ ID NO: 1191800 - RNA, 19 nt, Artificial Sequence
  Description of Artificial Sequence: Synthetic oligonucleotide
  Sense strand starting at position 2957 of SEQ ID NO: 916886
cauauuaaugagggugauc

SEQ ID NO: 1191801 - RNA, 19 nt, Artificial Sequence
  Description of Artificial Sequence: Synthetic oligonucleotide
  Antisense strand to SEQ ID NO: 1191800
gaucacccucauuaauaug

SEQ ID NO: 1191802 - RNA, 19 nt, Artificial Sequence
  Description of Artificial Sequence: Synthetic oligonucleotide
  Sense strand starting at position 2959 of SEQ ID NO: 916886
uauuaaugagggugaucuu

SEQ ID NO: 1191803 - RNA, 19 nt, Artificial Sequence
  Description of Artificial Sequence: Synthetic oligonucleotide
  Antisense strand to SEQ ID NO: 1191802
aagaucacccucauuaaua

SEQ ID NO: 1191804 - RNA, 19 nt, Artificial Sequence
  Description of Artificial Sequence: Synthetic oligonucleotide
  Sense strand starting at position 2962 of SEQ ID NO: 916886
uaaugagggugaucuucuu

SEQ ID NO: 1191805 - RNA, 19 nt, Artificial Sequence
  Description of Artificial Sequence: Synthetic oligonucleotide
  Antisense strand to SEQ ID NO: 1191804
aagaagaucacccucauua

SEQ ID NO: 1191806 - RNA, 19 nt, Artificial Sequence
  Description of Artificial Sequence: Synthetic oligonucleotide
  Sense strand starting at position 3057 of SEQ ID NO: 916886
cugggugucccuuagacca

SEQ ID NO: 1191807 - RNA, 19 nt, Artificial Sequence
  Description of Artificial Sequence: Synthetic oligonucleotide
  Antisense strand to SEQ ID NO: 1191806
uggucuaagggacacccag

SEQ ID NO: 1191808 - RNA, 19 nt, Artificial Sequence
  Description of Artificial Sequence: Synthetic oligonucleotide
  Sense strand starting at position 3405 of SEQ ID NO: 916886
ggucucccugugaguggua

SEQ ID NO: 1191809 - RNA, 19 nt, Artificial Sequence
  Description of Artificial Sequence: Synthetic oligonucleotide
  Antisense strand to SEQ ID NO: 1191808
uaccacucacagggagacc

SEQ ID NO: 1191810 - RNA, 19 nt, Artificial Sequence
  Description of Artificial Sequence: Synthetic oligonucleotide
  Sense strand starting at position 3565 of SEQ ID NO: 916886
gcugacaucaagggugaga

SEQ ID NO: 1191811 - RNA, 19 nt, Artificial Sequence
  Description of Artificial Sequence: Synthetic oligonucleotide
  Antisense strand to SEQ ID NO: 1191810
ucucacccuugaugucagc

SEQ ID NO: 1191812 - RNA, 19 nt, Artificial Sequence
  Description of Artificial Sequence: Synthetic oligonucleotide
  Sense strand starting at position 3597 of SEQ ID NO: 916886
cuugcaagacuuuggaaau

SEQ ID NO: 1191813 - RNA, 19 nt, Artificial Sequence
  Description of Artificial Sequence: Synthetic oligonucleotide
  Antisense strand to SEQ ID NO: 1191812
auuuccaaagucuugcaag

SEQ ID NO: 1191814 - RNA, 19 nt, Artificial Sequence
  Description of Artificial Sequence: Synthetic oligonucleotide
  Sense strand starting at position 3640 of SEQ ID NO: 916886
gcccauaauuuccugagcu

SEQ ID NO: 1191815 - RNA, 19 nt, Artificial Sequence
  Description of Artificial Sequence: Synthetic oligonucleotide
  Antisense strand to SEQ ID NO: 1191814
agcucaggaaauuaugggc

SEQ ID NO: 1191816 - RNA, 19 nt, Artificial Sequence
  Description of Artificial Sequence: Synthetic oligonucleotide
  Sense strand starting at position 3818 of SEQ ID NO: 916886
ugcuucuuacccuagaaug

SEQ ID NO: 1191817 - RNA, 19 nt, Artificial Sequence
  Description of Artificial Sequence: Synthetic oligonucleotide
  Antisense strand to SEQ ID NO: 1191816
cauucuaggguaagaagca

SEQ ID NO: 1191818 - RNA, 19 nt, Artificial Sequence
  Description of Artificial Sequence: Synthetic oligonucleotide
  Sense strand starting at position 3894 of SEQ ID NO: 916886
guauuucuguguuucugac

SEQ ID NO: 1191819 - RNA, 19 nt, Artificial Sequence
  Description of Artificial Sequence: Synthetic oligonucleotide
  Antisense strand to SEQ ID NO: 1191818
gucagaaacacagaaauac

SEQ ID NO: 1191820 - RNA, 19 nt, Artificial Sequence
  Description of Artificial Sequence: Synthetic oligonucleotide
  Sense strand starting at position 20 of SEQ ID NO: 916887
ccaagaugagcggaucauu

SEQ ID NO: 1191821 - RNA, 19 nt, Artificial Sequence
  Description of Artificial Sequence: Synthetic oligonucleotide
  Antisense strand to SEQ ID NO: 1191820
aaugauccgcucaucuugg

SEQ ID NO: 1191822 - RNA, 19 nt, Artificial Sequence
  Description of Artificial Sequence: Synthetic oligonucleotide
  Sense strand starting at position 180 of SEQ ID NO: 916887
ucugcaugcuucuauagau

SEQ ID NO: 1191823 - RNA, 19 nt, Artificial Sequence
  Description of Artificial Sequence: Synthetic oligonucleotide
  Antisense strand to SEQ ID NO: 1191822
aucuauagaagcaugcaga

SEQ ID NO: 1191824 - RNA, 19 nt, Artificial Sequence
  Description of Artificial Sequence: Synthetic oligonucleotide
  Sense strand starting at position 741 of SEQ ID NO: 916887
ucaggauucuuauugugaa

SEQ ID NO: 1191825 - RNA, 19 nt, Artificial Sequence
  Description of Artificial Sequence: Synthetic oligonucleotide
  Antisense strand to SEQ ID NO: 1191824
uucacaauaagaauccuga

SEQ ID NO: 1191826 - RNA, 19 nt, Artificial Sequence
  Description of Artificial Sequence: Synthetic oligonucleotide
  Sense strand starting at position 742 of SEQ ID NO: 916887
caggauucuuauugugaaa

SEQ ID NO: 1191827 - RNA, 19 nt, Artificial Sequence
  Description of Artificial Sequence: Synthetic oligonucleotide
  Antisense strand to SEQ ID NO: 1191826
uuucacaauaagaauccug

SEQ ID NO: 1191828 - RNA, 19 nt, Artificial Sequence
  Description of Artificial Sequence: Synthetic oligonucleotide
  Sense strand starting at position 744 of SEQ ID NO: 916887
ggauucuuauugugaaaug

SEQ ID NO: 1191829 - RNA, 19 nt, Artificial Sequence
  Description of Artificial Sequence: Synthetic oligonucleotide
  Antisense strand to SEQ ID NO: 1191828
cauuucacaauaagaaucc

SEQ ID NO: 1191830 - RNA, 19 nt, Artificial Sequence
  Description of Artificial Sequence: Synthetic oligonucleotide
  Sense strand starting at position 745 of SEQ ID NO: 916887
gauucuuauugugaaaugu

SEQ ID NO: 1191831 - RNA, 19 nt, Artificial Sequence
  Description of Artificial Sequence: Synthetic oligonucleotide
  Antisense strand to SEQ ID NO: 1191830
acauuucacaauaagaauc

SEQ ID NO: 1191832 - RNA, 19 nt, Artificial Sequence
  Description of Artificial Sequence: Synthetic oligonucleotide
  Sense strand starting at position 754 of SEQ ID NO: 916887
ugugaaauguagcuaaaug

SEQ ID NO: 1191833 - RNA, 19 nt, Artificial Sequence
  Description of Artificial Sequence: Synthetic oligonucleotide
  Antisense strand to SEQ ID NO: 1191832
cauuuagcuacauuucaca

SEQ ID NO: 1191834 - RNA, 19 nt, Artificial Sequence
  Description of Artificial Sequence: Synthetic oligonucleotide
  Sense strand starting at position 755 of SEQ ID NO: 916887
gugaaauguagcuaaaugu

SEQ ID NO: 1191835 - RNA, 19 nt, Artificial Sequence
  Description of Artificial Sequence: Synthetic oligonucleotide
  Antisense strand to SEQ ID NO: 1191834
acauuuagcuacauuucac

SEQ ID NO: 1191836 - RNA, 19 nt, Artificial Sequence
  Description of Artificial Sequence: Synthetic oligonucleotide
  Sense strand starting at position 799 of SEQ ID NO: 916887
uagaucauauggugucuau

SEQ ID NO: 1191837 - RNA, 19 nt, Artificial Sequence
  Description of Artificial Sequence: Synthetic oligonucleotide
  Antisense strand to SEQ ID NO: 1191836
auagacaccauaugaucua

SEQ ID NO: 1191838 - RNA, 19 nt, Artificial Sequence
  Description of Artificial Sequence: Synthetic oligonucleotide
  Sense strand starting at position 1061 of SEQ ID NO: 916887
aggacugcuugacccgaaa

SEQ ID NO: 1191839 - RNA, 19 nt, Artificial Sequence
  Description of Artificial Sequence: Synthetic oligonucleotide
  Antisense strand to SEQ ID NO: 1191838
uuucgggucaagcaguccu

SEQ ID NO: 1191840 - RNA, 19 nt, Artificial Sequence
  Description of Artificial Sequence: Synthetic oligonucleotide
  Sense strand starting at position 1064 of SEQ ID NO: 916887
acugcuugacccgaaaugu

SEQ ID NO: 1191841 - RNA, 19 nt, Artificial Sequence
  Description of Artificial Sequence: Synthetic oligonucleotide
  Antisense strand to SEQ ID NO: 1191840
acauuucgggucaagcagu

SEQ ID NO: 1191842 - RNA, 19 nt, Artificial Sequence
  Description of Artificial Sequence: Synthetic oligonucleotide
  Sense strand starting at position 1074 of SEQ ID NO: 916887
ccgaaaugucgacgcugca

SEQ ID NO: 1191843 - RNA, 19 nt, Artificial Sequence
  Description of Artificial Sequence: Synthetic oligonucleotide
  Antisense strand to SEQ ID NO: 1191842
ugcagcgucgacauuucgg

SEQ ID NO: 1191844 - RNA, 19 nt, Artificial Sequence
  Description of Artificial Sequence: Synthetic oligonucleotide
  Sense strand starting at position 1598 of SEQ ID NO: 916887
caccuaaguuucuguggaa

SEQ ID NO: 1191845 - RNA, 19 nt, Artificial Sequence
  Description of Artificial Sequence: Synthetic oligonucleotide
  Antisense strand to SEQ ID NO: 1191844
uuccacagaaacuuaggug

SEQ ID NO: 1191846 - RNA, 19 nt, Artificial Sequence
  Description of Artificial Sequence: Synthetic oligonucleotide
  Sense strand starting at position 1599 of SEQ ID NO: 916887
accuaaguuucuguggaaa

SEQ ID NO: 1191847 - RNA, 19 nt, Artificial Sequence
  Description of Artificial Sequence: Synthetic oligonucleotide
  Antisense strand to SEQ ID NO: 1191846
uuuccacagaaacuuaggu

SEQ ID NO: 1191848 - RNA, 19 nt, Artificial Sequence
  Description of Artificial Sequence: Synthetic oligonucleotide
  Sense strand starting at position 1703 of SEQ ID NO: 916887
ggaguaaggcgccauccuu

SEQ ID NO: 1191849 - RNA, 19 nt, Artificial Sequence
  Description of Artificial Sequence: Synthetic oligonucleotide
  Antisense strand to SEQ ID NO: 1191848
aaggauggcgccuuacucc

SEQ ID NO: 1191850 - RNA, 19 nt, Artificial Sequence
  Description of Artificial Sequence: Synthetic oligonucleotide
  Sense strand starting at position 2051 of SEQ ID NO: 916887
caacgaggguguuaucauc

SEQ ID NO: 1191851 - RNA, 19 nt, Artificial Sequence
  Description of Artificial Sequence: Synthetic oligonucleotide
  Antisense strand to SEQ ID NO: 1191850
gaugauaacacccucguug

SEQ ID NO: 1191852 - RNA, 19 nt, Artificial Sequence
  Description of Artificial Sequence: Synthetic oligonucleotide
  Sense strand starting at position 2059 of SEQ ID NO: 916887
guguuaucaucuccgaaga

SEQ ID NO: 1191853 - RNA, 19 nt, Artificial Sequence
  Description of Artificial Sequence: Synthetic oligonucleotide
  Antisense strand to SEQ ID NO: 1191852
ucuucggagaugauaacac

SEQ ID NO: 1191854 - RNA, 19 nt, Artificial Sequence
  Description of Artificial Sequence: Synthetic oligonucleotide
  Sense strand starting at position 2060 of SEQ ID NO: 916887
uguuaucaucuccgaagac

SEQ ID NO: 1191855 - RNA, 19 nt, Artificial Sequence
  Description of Artificial Sequence: Synthetic oligonucleotide
  Antisense strand to SEQ ID NO: 1191854
gucuucggagaugauaaca

SEQ ID NO: 1191856 - RNA, 19 nt, Artificial Sequence
  Description of Artificial Sequence: Synthetic oligonucleotide
  Sense strand starting at position 2061 of SEQ ID NO: 916887
guuaucaucuccgaagaca

SEQ ID NO: 1191857 - RNA, 19 nt, Artificial Sequence
  Description of Artificial Sequence: Synthetic oligonucleotide
  Antisense strand to SEQ ID NO: 1191856
ugucuucggagaugauaac

SEQ ID NO: 1191858 - RNA, 19 nt, Artificial Sequence
  Description of Artificial Sequence: Synthetic oligonucleotide
  Sense strand starting at position 2155 of SEQ ID NO: 916887
ugcaguuaccugggacauu

SEQ ID NO: 1191859 - RNA, 19 nt, Artificial Sequence
  Description of Artificial Sequence: Synthetic oligonucleotide
  Antisense strand to SEQ ID NO: 1191858
aaugucccagguaacugca

SEQ ID NO: 1191860 - RNA, 19 nt, Artificial Sequence
  Description of Artificial Sequence: Synthetic oligonucleotide
  Sense strand starting at position 2156 of SEQ ID NO: 916887
gcaguuaccugggacauuu

SEQ ID NO: 1191861 - RNA, 19 nt, Artificial Sequence
  Description of Artificial Sequence: Synthetic oligonucleotide
  Antisense strand to SEQ ID NO: 1191860
aaaugucccagguaacugc

SEQ ID NO: 1191862 - RNA, 19 nt, Artificial Sequence
  Description of Artificial Sequence: Synthetic oligonucleotide
  Sense strand starting at position 2741 of SEQ ID NO: 916887
ggcagagguuucgaugaac

SEQ ID NO: 1191863 - RNA, 19 nt, Artificial Sequence
  Description of Artificial Sequence: Synthetic oligonucleotide
  Antisense strand to SEQ ID NO: 1191862
guucaucgaaaccucugcc

SEQ ID NO: 1191864 - RNA, 19 nt, Artificial Sequence
  Description of Artificial Sequence: Synthetic oligonucleotide
  Sense strand starting at position 3035 of SEQ ID NO: 916887
ucuuguugcccauauugga

SEQ ID NO: 1191865 - RNA, 19 nt, Artificial Sequence
  Description of Artificial Sequence: Synthetic oligonucleotide
  Antisense strand to SEQ ID NO: 1191864
uccaauaugggcaacaaga

SEQ ID NO: 1191866 - RNA, 19 nt, Artificial Sequence
  Description of Artificial Sequence: Synthetic oligonucleotide
  Sense strand starting at position 3043 of SEQ ID NO: 916887
cccauauuggagugcaaug

SEQ ID NO: 1191867 - RNA, 19 nt, Artificial Sequence
  Description of Artificial Sequence: Synthetic oligonucleotide
  Antisense strand to SEQ ID NO: 1191866
cauugcacuccaauauggg

SEQ ID NO: 1191868 - RNA, 19 nt, Artificial Sequence
  Description of Artificial Sequence: Synthetic oligonucleotide
  Sense strand starting at position 3432 of SEQ ID NO: 916887
gcuacaacaucaugaauga

SEQ ID NO: 1191869 - RNA, 19 nt, Artificial Sequence
  Description of Artificial Sequence: Synthetic oligonucleotide
  Antisense strand to SEQ ID NO: 1191868
ucauucaugauguuguagc

SEQ ID NO: 1191870 - RNA, 19 nt, Artificial Sequence
  Description of Artificial Sequence: Synthetic oligonucleotide
  Sense strand starting at position 3463 of SEQ ID NO: 916887
gaugaaccaugcuaaguga

SEQ ID NO: 1191871 - RNA, 19 nt, Artificial Sequence
  Description of Artificial Sequence: Synthetic oligonucleotide
  Antisense strand to SEQ ID NO: 1191870
ucacuuagcaugguucauc

SEQ ID NO: 1191872 - RNA, 19 nt, Artificial Sequence
  Description of Artificial Sequence: Synthetic oligonucleotide
  Sense strand starting at position 3466 of SEQ ID NO: 916887
gaaccaugcuaagugaaag

SEQ ID NO: 1191873 - RNA, 19 nt, Artificial Sequence
  Description of Artificial Sequence: Synthetic oligonucleotide
  Antisense strand to SEQ ID NO: 1191872
cuuucacuuagcaugguuc

SEQ ID NO: 1191874 - RNA, 19 nt, Artificial Sequence
  Description of Artificial Sequence: Synthetic oligonucleotide
  Sense strand starting at position 3509 of SEQ ID NO: 916887
guuccacuuauaugaggga

SEQ ID NO: 1191875 - RNA, 19 nt, Artificial Sequence
  Description of Artificial Sequence: Synthetic oligonucleotide
  Antisense strand to SEQ ID NO: 1191874
ucccucauauaaguggaac

SEQ ID NO: 1191876 - RNA, 19 nt, Artificial Sequence
  Description of Artificial Sequence: Synthetic oligonucleotide
  Sense strand starting at position 3526 of SEQ ID NO: 916887
gaccuaggauagucaaauu

SEQ ID NO: 1191877 - RNA, 19 nt, Artificial Sequence
  Description of Artificial Sequence: Synthetic oligonucleotide
  Antisense strand to SEQ ID NO: 1191876
aauuugacuauccuagguc

SEQ ID NO: 1191878 - RNA, 19 nt, Artificial Sequence
  Description of Artificial Sequence: Synthetic oligonucleotide
  Sense strand starting at position 3594 of SEQ ID NO: 916887
ggaagauggcgagguauug

SEQ ID NO: 1191879 - RNA, 19 nt, Artificial Sequence
  Description of Artificial Sequence: Synthetic oligonucleotide
  Antisense strand to SEQ ID NO: 1191878
caauaccucgccaucuucc

SEQ ID NO: 1191880 - RNA, 19 nt, Artificial Sequence
  Description of Artificial Sequence: Synthetic oligonucleotide
  Sense strand starting at position 3603 of SEQ ID NO: 916887
cgagguauuguuuaacaga

SEQ ID NO: 1191881 - RNA, 19 nt, Artificial Sequence
  Description of Artificial Sequence: Synthetic oligonucleotide
  Antisense strand to SEQ ID NO: 1191880
ucuguuaaacaauaccucg

SEQ ID NO: 1191882 - RNA, 19 nt, Artificial Sequence
  Description of Artificial Sequence: Synthetic oligonucleotide
  Sense strand starting at position 3606 of SEQ ID NO: 916887
gguauuguuuaacagauac

SEQ ID NO: 1191883 - RNA, 19 nt, Artificial Sequence
  Description of Artificial Sequence: Synthetic oligonucleotide
  Antisense strand to SEQ ID NO: 1191882
guaucuguuaaacaauacc

SEQ ID NO: 1191884 - RNA, 19 nt, Artificial Sequence
  Description of Artificial Sequence: Synthetic oligonucleotide
  Sense strand starting at position 3628 of SEQ ID NO: 916887
gguucaauuugagaugaug

SEQ ID NO: 1191885 - RNA, 19 nt, Artificial Sequence
  Description of Artificial Sequence: Synthetic oligonucleotide
  Antisense strand to SEQ ID NO: 1191884
caucaucucaaauugaacc

SEQ ID NO: 1191886 - RNA, 19 nt, Artificial Sequence
  Description of Artificial Sequence: Synthetic oligonucleotide
  Sense strand starting at position 3688 of SEQ ID NO: 916887
augugaaucuaccuaaugu

SEQ ID NO: 1191887 - RNA, 19 nt, Artificial Sequence
  Description of Artificial Sequence: Synthetic oligonucleotide
  Antisense strand to SEQ ID NO: 1191886
acauuagguagauucacau

SEQ ID NO: 1191888 - RNA, 19 nt, Artificial Sequence
  Description of Artificial Sequence: Synthetic oligonucleotide
  Sense strand starting at position 3740 of SEQ ID NO: 916887
gaggcuaaggccuguaauc

SEQ ID NO: 1191889 - RNA, 19 nt, Artificial Sequence
  Description of Artificial Sequence: Synthetic oligonucleotide
  Antisense strand to SEQ ID NO: 1191888
gauuacaggccuuagccuc

SEQ ID NO: 1191890 - RNA, 19 nt, Artificial Sequence
  Description of Artificial Sequence: Synthetic oligonucleotide
  Sense strand starting at position 7 of SEQ ID NO: 916888
ucaggcaaaccugaucauu

SEQ ID NO: 1191891 - RNA, 19 nt, Artificial Sequence
  Description of Artificial Sequence: Synthetic oligonucleotide
  Antisense strand to SEQ ID NO: 1191890
aaugaucagguuugccuga

SEQ ID NO: 1191892 - RNA, 19 nt, Artificial Sequence
  Description of Artificial Sequence: Synthetic oligonucleotide
  Sense strand starting at position 9 of SEQ ID NO: 916888
aggcaaaccugaucauuga

SEQ ID NO: 1191893 - RNA, 19 nt, Artificial Sequence
  Description of Artificial Sequence: Synthetic oligonucleotide
  Antisense strand to SEQ ID NO: 1191892
ucaaugaucagguuugccu

SEQ ID NO: 1191894 - RNA, 19 nt, Artificial Sequence
  Description of Artificial Sequence: Synthetic oligonucleotide
  Sense strand starting at position 16 of SEQ ID NO: 916888
ccugaucauugagaaacaa

SEQ ID NO: 1191895 - RNA, 19 nt, Artificial Sequence
  Description of Artificial Sequence: Synthetic oligonucleotide
  Antisense strand to SEQ ID NO: 1191894
uuguuucucaaugaucagg

SEQ ID NO: 1191896 - RNA, 19 nt, Artificial Sequence
  Description of Artificial Sequence: Synthetic oligonucleotide
  Sense strand starting at position 75 of SEQ ID NO: 916888
agggcaauaugucugucau

SEQ ID NO: 1191897 - RNA, 19 nt, Artificial Sequence
  Description of Artificial Sequence: Synthetic oligonucleotide
  Antisense strand to SEQ ID NO: 1191896
augacagacauauugcccu

SEQ ID NO: 1191898 - RNA, 19 nt, Artificial Sequence
  Description of Artificial Sequence: Synthetic oligonucleotide
  Sense strand starting at position 76 of SEQ ID NO: 916888
gggcaauaugucugucauc

SEQ ID NO: 1191899 - RNA, 19 nt, Artificial Sequence
  Description of Artificial Sequence: Synthetic oligonucleotide
  Antisense strand to SEQ ID NO: 1191898
gaugacagacauauugccc

SEQ ID NO: 1191900 - RNA, 19 nt, Artificial Sequence
  Description of Artificial Sequence: Synthetic oligonucleotide
  Sense strand starting at position 77 of SEQ ID NO: 916888
ggcaauaugucugucauca

SEQ ID NO: 1191901 - RNA, 19 nt, Artificial Sequence
  Description of Artificial Sequence: Synthetic oligonucleotide
  Antisense strand to SEQ ID NO: 1191900
ugaugacagacauauugcc

SEQ ID NO: 1191902 - RNA, 19 nt, Artificial Sequence
  Description of Artificial Sequence: Synthetic oligonucleotide
  Sense strand starting at position 81 of SEQ ID NO: 916888
auaugucugucaucaucaa

SEQ ID NO: 1191903 - RNA, 19 nt, Artificial Sequence
  Description of Artificial Sequence: Synthetic oligonucleotide
  Antisense strand to SEQ ID NO: 1191902
uugaugaugacagacauau

SEQ ID NO: 1191904 - RNA, 19 nt, Artificial Sequence
  Description of Artificial Sequence: Synthetic oligonucleotide
  Sense strand starting at position 85 of SEQ ID NO: 916888
gucugucaucaucaacaag

SEQ ID NO: 1191905 - RNA, 19 nt, Artificial Sequence
  Description of Artificial Sequence: Synthetic oligonucleotide
  Antisense strand to SEQ ID NO: 1191904
cuuguugaugaugacagac

SEQ ID NO: 1191906 - RNA, 19 nt, Artificial Sequence
  Description of Artificial Sequence: Synthetic oligonucleotide
  Sense strand starting at position 120 of SEQ ID NO: 916888
gccucucugcugucaguaa

SEQ ID NO: 1191907 - RNA, 19 nt, Artificial Sequence
  Description of Artificial Sequence: Synthetic oligonucleotide
  Antisense strand to SEQ ID NO: 1191906
uuacugacagcagagaggc

SEQ ID NO: 1191908 - RNA, 19 nt, Artificial Sequence
  Description of Artificial Sequence: Synthetic oligonucleotide
  Sense strand starting at position 121 of SEQ ID NO: 916888
ccucucugcugucaguaaa

SEQ ID NO: 1191909 - RNA, 19 nt, Artificial Sequence
  Description of Artificial Sequence: Synthetic oligonucleotide
  Antisense strand to SEQ ID NO: 1191908
uuuacugacagcagagagg

SEQ ID NO: 1191910 - RNA, 19 nt, Artificial Sequence
  Description of Artificial Sequence: Synthetic oligonucleotide
  Sense strand starting at position 246 of SEQ ID NO: 916888
gcuggaauuucuccacgug

SEQ ID NO: 1191911 - RNA, 19 nt, Artificial Sequence
  Description of Artificial Sequence: Synthetic oligonucleotide
  Antisense strand to SEQ ID NO: 1191910
cacguggagaaauuccagc

SEQ ID NO: 1191912 - RNA, 19 nt, Artificial Sequence
  Description of Artificial Sequence: Synthetic oligonucleotide
  Sense strand starting at position 1263 of SEQ ID NO: 916888
ggacuuagguacuauauua

SEQ ID NO: 1191913 - RNA, 19 nt, Artificial Sequence
  Description of Artificial Sequence: Synthetic oligonucleotide
  Antisense strand to SEQ ID NO: 1191912
uaauauaguaccuaagucc

SEQ ID NO: 1191914 - RNA, 19 nt, Artificial Sequence
  Description of Artificial Sequence: Synthetic oligonucleotide
  Sense strand starting at position 1398 of SEQ ID NO: 916888
agcuaaagcucuuaaucgu

SEQ ID NO: 1191915 - RNA, 19 nt, Artificial Sequence
  Description of Artificial Sequence: Synthetic oligonucleotide
  Antisense strand to SEQ ID NO: 1191914
acgauuaagagcuuuagcu

SEQ ID NO: 1191916 - RNA, 19 nt, Artificial Sequence
  Description of Artificial Sequence: Synthetic oligonucleotide
  Sense strand starting at position 1407 of SEQ ID NO: 916888
ucuuaaucguuuccucuga

SEQ ID NO: 1191917 - RNA, 19 nt, Artificial Sequence
  Description of Artificial Sequence: Synthetic oligonucleotide
  Antisense strand to SEQ ID NO: 1191916
ucagaggaaacgauuaaga

SEQ ID NO: 1191918 - RNA, 19 nt, Artificial Sequence
  Description of Artificial Sequence: Synthetic oligonucleotide
  Sense strand starting at position 1411 of SEQ ID NO: 916888
aaucguuuccucugaugcu

SEQ ID NO: 1191919 - RNA, 19 nt, Artificial Sequence
  Description of Artificial Sequence: Synthetic oligonucleotide
  Antisense strand to SEQ ID NO: 1191918
agcaucagaggaaacgauu

SEQ ID NO: 1191920 - RNA, 19 nt, Artificial Sequence
  Description of Artificial Sequence: Synthetic oligonucleotide
  Sense strand starting at position 1412 of SEQ ID NO: 916888
aucguuuccucugaugcuu

SEQ ID NO: 1191921 - RNA, 19 nt, Artificial Sequence
  Description of Artificial Sequence: Synthetic oligonucleotide
  Antisense strand to SEQ ID NO: 1191920
aagcaucagaggaaacgau

SEQ ID NO: 1191922 - RNA, 19 nt, Artificial Sequence
  Description of Artificial Sequence: Synthetic oligonucleotide
  Sense strand starting at position 1483 of SEQ ID NO: 916888
accaguauucugggugucu

SEQ ID NO: 1191923 - RNA, 19 nt, Artificial Sequence
  Description of Artificial Sequence: Synthetic oligonucleotide
  Antisense strand to SEQ ID NO: 1191922
agacacccagaauacuggu

SEQ ID NO: 1191924 - RNA, 19 nt, Artificial Sequence
  Description of Artificial Sequence: Synthetic oligonucleotide
  Sense strand starting at position 1485 of SEQ ID NO: 916888
caguauucugggugucuga

SEQ ID NO: 1191925 - RNA, 19 nt, Artificial Sequence
  Description of Artificial Sequence: Synthetic oligonucleotide
  Antisense strand to SEQ ID NO: 1191924
ucagacacccagaauacug

SEQ ID NO: 1191926 - RNA, 19 nt, Artificial Sequence
  Description of Artificial Sequence: Synthetic oligonucleotide
  Sense strand starting at position 1620 of SEQ ID NO: 916888
ccaagaugagcggaucauu

SEQ ID NO: 1191927 - RNA, 19 nt, Artificial Sequence
  Description of Artificial Sequence: Synthetic oligonucleotide
  Antisense strand to SEQ ID NO: 1191926
aaugauccgcucaucuugg

SEQ ID NO: 1191928 - RNA, 19 nt, Artificial Sequence
  Description of Artificial Sequence: Synthetic oligonucleotide
  Sense strand starting at position 1780 of SEQ ID NO: 916888
ucugcaugcuucuauagau

SEQ ID NO: 1191929 - RNA, 19 nt, Artificial Sequence
  Description of Artificial Sequence: Synthetic oligonucleotide
  Antisense strand to SEQ ID NO: 1191928
aucuauagaagcaugcaga

SEQ ID NO: 1191930 - RNA, 19 nt, Artificial Sequence
  Description of Artificial Sequence: Synthetic oligonucleotide
  Sense strand starting at position 2341 of SEQ ID NO: 916888
ucaggauucuuauugugaa

SEQ ID NO: 1191931 - RNA, 19 nt, Artificial Sequence
  Description of Artificial Sequence: Synthetic oligonucleotide
  Antisense strand to SEQ ID NO: 1191930
uucacaauaagaauccuga

SEQ ID NO: 1191932 - RNA, 19 nt, Artificial Sequence
  Description of Artificial Sequence: Synthetic oligonucleotide
  Sense strand starting at position 2342 of SEQ ID NO: 916888
caggauucuuauugugaaa

SEQ ID NO: 1191933 - RNA, 19 nt, Artificial Sequence
  Description of Artificial Sequence: Synthetic oligonucleotide
  Antisense strand to SEQ ID NO: 1191932
uuucacaauaagaauccug

SEQ ID NO: 1191934 - RNA, 19 nt, Artificial Sequence
  Description of Artificial Sequence: Synthetic oligonucleotide
  Sense strand starting at position 2344 of SEQ ID NO: 916888
ggauucuuauugugaaaug

SEQ ID NO: 1191935 - RNA, 19 nt, Artificial Sequence
  Description of Artificial Sequence: Synthetic oligonucleotide
  Antisense strand to SEQ ID NO: 1191934
cauuucacaauaagaaucc

SEQ ID NO: 1191936 - RNA, 19 nt, Artificial Sequence
  Description of Artificial Sequence: Synthetic oligonucleotide
  Sense strand starting at position 2345 of SEQ ID NO: 916888
gauucuuauugugaaaugu

SEQ ID NO: 1191937 - RNA, 19 nt, Artificial Sequence
  Description of Artificial Sequence: Synthetic oligonucleotide
  Antisense strand to SEQ ID NO: 1191936
acauuucacaauaagaauc

SEQ ID NO: 1191938 - RNA, 19 nt, Artificial Sequence
  Description of Artificial Sequence: Synthetic oligonucleotide
  Sense strand starting at position 2354 of SEQ ID NO: 916888
ugugaaauguagcuaaaug

SEQ ID NO: 1191939 - RNA, 19 nt, Artificial Sequence
  Description of Artificial Sequence: Synthetic oligonucleotide
  Antisense strand to SEQ ID NO: 1191938
cauuuagcuacauuucaca

SEQ ID NO: 1191940 - RNA, 19 nt, Artificial Sequence
  Description of Artificial Sequence: Synthetic oligonucleotide
  Sense strand starting at position 2355 of SEQ ID NO: 916888
gugaaauguagcuaaaugu

SEQ ID NO: 1191941 - RNA, 19 nt, Artificial Sequence
  Description of Artificial Sequence: Synthetic oligonucleotide
  Antisense strand to SEQ ID NO: 1191940
acauuuagcuacauuucac

SEQ ID NO: 1191942 - RNA, 19 nt, Artificial Sequence
  Description of Artificial Sequence: Synthetic oligonucleotide
  Sense strand starting at position 2399 of SEQ ID NO: 916888
uagaucauauggugucuau

SEQ ID NO: 1191943 - RNA, 19 nt, Artificial Sequence
  Description of Artificial Sequence: Synthetic oligonucleotide
  Antisense strand to SEQ ID NO: 1191942
auagacaccauaugaucua

SEQ ID NO: 1191944 - RNA, 19 nt, Artificial Sequence
  Description of Artificial Sequence: Synthetic oligonucleotide
  Sense strand starting at position 2661 of SEQ ID NO: 916888
aggacugcuugacccgaaa

SEQ ID NO: 1191945 - RNA, 19 nt, Artificial Sequence
  Description of Artificial Sequence: Synthetic oligonucleotide
  Antisense strand to SEQ ID NO: 1191944
uuucgggucaagcaguccu

SEQ ID NO: 1191946 - RNA, 19 nt, Artificial Sequence
  Description of Artificial Sequence: Synthetic oligonucleotide
  Sense strand starting at position 2664 of SEQ ID NO: 916888
acugcuugacccgaaaugu

SEQ ID NO: 1191947 - RNA, 19 nt, Artificial Sequence
  Description of Artificial Sequence: Synthetic oligonucleotide
  Antisense strand to SEQ ID NO: 1191946
acauuucgggucaagcagu

SEQ ID NO: 1191948 - RNA, 19 nt, Artificial Sequence
  Description of Artificial Sequence: Synthetic oligonucleotide
  Sense strand starting at position 2674 of SEQ ID NO: 916888
ccgaaaugucgacgcugca

SEQ ID NO: 1191949 - RNA, 19 nt, Artificial Sequence
  Description of Artificial Sequence: Synthetic oligonucleotide
  Antisense strand to SEQ ID NO: 1191948
ugcagcgucgacauuucgg

SEQ ID NO: 1191950 - RNA, 19 nt, Artificial Sequence
  Description of Artificial Sequence: Synthetic oligonucleotide
  Sense strand starting at position 3198 of SEQ ID NO: 916888
caccuaaguuucuguggaa

SEQ ID NO: 1191951 - RNA, 19 nt, Artificial Sequence
  Description of Artificial Sequence: Synthetic oligonucleotide
  Antisense strand to SEQ ID NO: 1191950
uuccacagaaacuuaggug

SEQ ID NO: 1191952 - RNA, 19 nt, Artificial Sequence
  Description of Artificial Sequence: Synthetic oligonucleotide
  Sense strand starting at position 3199 of SEQ ID NO: 916888
accuaaguuucuguggaaa

SEQ ID NO: 1191953 - RNA, 19 nt, Artificial Sequence
  Description of Artificial Sequence: Synthetic oligonucleotide
  Antisense strand to SEQ ID NO: 1191952
uuuccacagaaacuuaggu

SEQ ID NO: 1191954 - RNA, 19 nt, Artificial Sequence
  Description of Artificial Sequence: Synthetic oligonucleotide
  Sense strand starting at position 3303 of SEQ ID NO: 916888
ggaguaaggcgccauccuu

SEQ ID NO: 1191955 - RNA, 19 nt, Artificial Sequence
  Description of Artificial Sequence: Synthetic oligonucleotide
  Antisense strand to SEQ ID NO: 1191954
aaggauggcgccuuacucc

SEQ ID NO: 1191956 - RNA, 19 nt, Artificial Sequence
  Description of Artificial Sequence: Synthetic oligonucleotide
  Sense strand starting at position 3651 of SEQ ID NO: 916888
caacgaggguguuaucauc

SEQ ID NO: 1191957 - RNA, 19 nt, Artificial Sequence
  Description of Artificial Sequence: Synthetic oligonucleotide
  Antisense strand to SEQ ID NO: 1191956
gaugauaacacccucguug

SEQ ID NO: 1191958 - RNA, 19 nt, Artificial Sequence
  Description of Artificial Sequence: Synthetic oligonucleotide
  Sense strand starting at position 3659 of SEQ ID NO: 916888
guguuaucaucuccgaaga

SEQ ID NO: 1191959 - RNA, 19 nt, Artificial Sequence
  Description of Artificial Sequence: Synthetic oligonucleotide
  Antisense strand to SEQ ID NO: 1191958
ucuucggagaugauaacac

SEQ ID NO: 1191960 - RNA, 19 nt, Artificial Sequence
  Description of Artificial Sequence: Synthetic oligonucleotide
  Sense strand starting at position 3660 of SEQ ID NO: 916888
uguuaucaucuccgaagac

SEQ ID NO: 1191961 - RNA, 19 nt, Artificial Sequence
  Description of Artificial Sequence: Synthetic oligonucleotide
  Antisense strand to SEQ ID NO: 1191960
gucuucggagaugauaaca

SEQ ID NO: 1191962 - RNA, 19 nt, Artificial Sequence
  Description of Artificial Sequence: Synthetic oligonucleotide
  Sense strand starting at position 3661 of SEQ ID NO: 916888
guuaucaucuccgaagaca

SEQ ID NO: 1191963 - RNA, 19 nt, Artificial Sequence
  Description of Artificial Sequence: Synthetic oligonucleotide
  Antisense strand to SEQ ID NO: 1191962
ugucuucggagaugauaac

SEQ ID NO: 1191964 - RNA, 19 nt, Artificial Sequence
  Description of Artificial Sequence: Synthetic oligonucleotide
  Sense strand starting at position 3755 of SEQ ID NO: 916888
ugcaguuaccugggacauu

SEQ ID NO: 1191965 - RNA, 19 nt, Artificial Sequence
  Description of Artificial Sequence: Synthetic oligonucleotide
  Antisense strand to SEQ ID NO: 1191964
aaugucccagguaacugca

SEQ ID NO: 1191966 - RNA, 19 nt, Artificial Sequence
  Description of Artificial Sequence: Synthetic oligonucleotide
  Sense strand starting at position 3756 of SEQ ID NO: 916888
gcaguuaccugggacauuu

SEQ ID NO: 1191967 - RNA, 19 nt, Artificial Sequence
  Description of Artificial Sequence: Synthetic oligonucleotide
  Antisense strand to SEQ ID NO: 1191966
aaaugucccagguaacugc

SEQ ID NO: 1191968 - RNA, 19 nt, Artificial Sequence
  Description of Artificial Sequence: Synthetic oligonucleotide
  Sense strand starting at position 105 of SEQ ID NO: 916889
cuguaauuccaguaaucug

SEQ ID NO: 1191969 - RNA, 19 nt, Artificial Sequence
  Description of Artificial Sequence: Synthetic oligonucleotide
  Antisense strand to SEQ ID NO: 1191968
cagauuacuggaauuacag

SEQ ID NO: 1191970 - RNA, 19 nt, Artificial Sequence
  Description of Artificial Sequence: Synthetic oligonucleotide
  Sense strand starting at position 371 of SEQ ID NO: 916889
auaaaugagucccugucaa

SEQ ID NO: 1191971 - RNA, 19 nt, Artificial Sequence
  Description of Artificial Sequence: Synthetic oligonucleotide
  Antisense strand to SEQ ID NO: 1191970
uugacagggacucauuuau

SEQ ID NO: 1191972 - RNA, 19 nt, Artificial Sequence
  Description of Artificial Sequence: Synthetic oligonucleotide
  Sense strand starting at position 383 of SEQ ID NO: 916889
cugucaagaaguuggagau

SEQ ID NO: 1191973 - RNA, 19 nt, Artificial Sequence
  Description of Artificial Sequence: Synthetic oligonucleotide
  Antisense strand to SEQ ID NO: 1191972
aucuccaacuucuugacag

SEQ ID NO: 1191974 - RNA, 19 nt, Artificial Sequence
  Description of Artificial Sequence: Synthetic oligonucleotide
  Sense strand starting at position 438 of SEQ ID NO: 916889
gcaugcugcacuguaguaa

SEQ ID NO: 1191975 - RNA, 19 nt, Artificial Sequence
  Description of Artificial Sequence: Synthetic oligonucleotide
  Antisense strand to SEQ ID NO: 1191974
uuacuacagugcagcaugc

SEQ ID NO: 1191976 - RNA, 19 nt, Artificial Sequence
  Description of Artificial Sequence: Synthetic oligonucleotide
  Sense strand starting at position 503 of SEQ ID NO: 916889
aaggaaagguugccugaaa

SEQ ID NO: 1191977 - RNA, 19 nt, Artificial Sequence
  Description of Artificial Sequence: Synthetic oligonucleotide
  Antisense strand to SEQ ID NO: 1191976
uuucaggcaaccuuuccuu

SEQ ID NO: 1191978 - RNA, 19 nt, Artificial Sequence
  Description of Artificial Sequence: Synthetic oligonucleotide
  Sense strand starting at position 504 of SEQ ID NO: 916889
aggaaagguugccugaaau

SEQ ID NO: 1191979 - RNA, 19 nt, Artificial Sequence
  Description of Artificial Sequence: Synthetic oligonucleotide
  Antisense strand to SEQ ID NO: 1191978
auuucaggcaaccuuuccu

SEQ ID NO: 1191980 - RNA, 19 nt, Artificial Sequence
  Description of Artificial Sequence: Synthetic oligonucleotide
  Sense strand starting at position 510 of SEQ ID NO: 916889
gguugccugaaauaaguaa

SEQ ID NO: 1191981 - RNA, 19 nt, Artificial Sequence
  Description of Artificial Sequence: Synthetic oligonucleotide
  Antisense strand to SEQ ID NO: 1191980
uuacuuauuucaggcaacc

SEQ ID NO: 1191982 - RNA, 19 nt, Artificial Sequence
  Description of Artificial Sequence: Synthetic oligonucleotide
  Sense strand starting at position 708 of SEQ ID NO: 916889
cagaucacgcuugacagua

SEQ ID NO: 1191983 - RNA, 19 nt, Artificial Sequence
  Description of Artificial Sequence: Synthetic oligonucleotide
  Antisense strand to SEQ ID NO: 1191982
uacugucaagcgugaucug

SEQ ID NO: 1191984 - RNA, 19 nt, Artificial Sequence
  Description of Artificial Sequence: Synthetic oligonucleotide
  Sense strand starting at position 893 of SEQ ID NO: 916889
cuaagaaacuuggcuacua

SEQ ID NO: 1191985 - RNA, 19 nt, Artificial Sequence
  Description of Artificial Sequence: Synthetic oligonucleotide
  Antisense strand to SEQ ID NO: 1191984
uaguagccaaguuucuuag

SEQ ID NO: 1191986 - RNA, 19 nt, Artificial Sequence
  Description of Artificial Sequence: Synthetic oligonucleotide
  Sense strand starting at position 935 of SEQ ID NO: 916889
cggagugaucuugauaugg

SEQ ID NO: 1191987 - RNA, 19 nt, Artificial Sequence
  Description of Artificial Sequence: Synthetic oligonucleotide
  Antisense strand to SEQ ID NO: 1191986
ccauaucaagaucacuccg

SEQ ID NO: 1191988 - RNA, 19 nt, Artificial Sequence
  Description of Artificial Sequence: Synthetic oligonucleotide
  Sense strand starting at position 943 of SEQ ID NO: 916889
ucuugauauggcgauuacu

SEQ ID NO: 1191989 - RNA, 19 nt, Artificial Sequence
  Description of Artificial Sequence: Synthetic oligonucleotide
  Antisense strand to SEQ ID NO: 1191988
aguaaucgccauaucaaga

SEQ ID NO: 1191990 - RNA, 19 nt, Artificial Sequence
  Description of Artificial Sequence: Synthetic oligonucleotide
  Sense strand starting at position 951 of SEQ ID NO: 916889
uggcgauuacuccaauaac

SEQ ID NO: 1191991 - RNA, 19 nt, Artificial Sequence
  Description of Artificial Sequence: Synthetic oligonucleotide
  Antisense strand to SEQ ID NO: 1191990
guuauuggaguaaucgcca

SEQ ID NO: 1191992 - RNA, 19 nt, Artificial Sequence
  Description of Artificial Sequence: Synthetic oligonucleotide
  Sense strand starting at position 999 of SEQ ID NO: 916889
uuuguuauccaccacagua

SEQ ID NO: 1191993 - RNA, 19 nt, Artificial Sequence
  Description of Artificial Sequence: Synthetic oligonucleotide
  Antisense strand to SEQ ID NO: 1191992
uacugugguggauaacaaa

SEQ ID NO: 1191994 - RNA, 19 nt, Artificial Sequence
  Description of Artificial Sequence: Synthetic oligonucleotide
  Sense strand starting at position 1096 of SEQ ID NO: 916889
uaaauugauuuggaguaca

SEQ ID NO: 1191995 - RNA, 19 nt, Artificial Sequence
  Description of Artificial Sequence: Synthetic oligonucleotide
  Antisense strand to SEQ ID NO: 1191994
uguacuccaaaucaauuua

SEQ ID NO: 1191996 - RNA, 19 nt, Artificial Sequence
  Description of Artificial Sequence: Synthetic oligonucleotide
  Sense strand starting at position 1299 of SEQ ID NO: 916889
ucuuuaaagggucguauuu

SEQ ID NO: 1191997 - RNA, 19 nt, Artificial Sequence
  Description of Artificial Sequence: Synthetic oligonucleotide
  Antisense strand to SEQ ID NO: 1191996
aaauacgacccuuuaaaga

SEQ ID NO: 1191998 - RNA, 19 nt, Artificial Sequence
  Description of Artificial Sequence: Synthetic oligonucleotide
  Sense strand starting at position 1356 of SEQ ID NO: 916889
ggaggccaucucugacuaa

SEQ ID NO: 1191999 - RNA, 19 nt, Artificial Sequence
  Description of Artificial Sequence: Synthetic oligonucleotide
  Antisense strand to SEQ ID NO: 1191998
uuagucagagauggccucc

SEQ ID NO: 1192000 - RNA, 19 nt, Artificial Sequence
  Description of Artificial Sequence: Synthetic oligonucleotide
  Sense strand starting at position 1368 of SEQ ID NO: 916889
ugacuaagccucuaauguc

SEQ ID NO: 1192001 - RNA, 19 nt, Artificial Sequence
  Description of Artificial Sequence: Synthetic oligonucleotide
  Antisense strand to SEQ ID NO: 1192000
gacauuagaggcuuaguca

SEQ ID NO: 1192002 - RNA, 19 nt, Artificial Sequence
  Description of Artificial Sequence: Synthetic oligonucleotide
  Sense strand starting at position 1411 of SEQ ID NO: 916889
gucugcauuguucuuagca

SEQ ID NO: 1192003 - RNA, 19 nt, Artificial Sequence
  Description of Artificial Sequence: Synthetic oligonucleotide
  Antisense strand to SEQ ID NO: 1192002
ugcuaagaacaaugcagac

SEQ ID NO: 1192004 - RNA, 19 nt, Artificial Sequence
  Description of Artificial Sequence: Synthetic oligonucleotide
  Sense strand starting at position 1491 of SEQ ID NO: 916889
ugaguuaaucuagagcaug

SEQ ID NO: 1192005 - RNA, 19 nt, Artificial Sequence
  Description of Artificial Sequence: Synthetic oligonucleotide
  Antisense strand to SEQ ID NO: 1192004
caugcucuagauuaacuca

SEQ ID NO: 1192006 - RNA, 19 nt, Artificial Sequence
  Description of Artificial Sequence: Synthetic oligonucleotide
  Sense strand starting at position 1536 of SEQ ID NO: 916889
aagugaauucuggagugug

SEQ ID NO: 1192007 - RNA, 19 nt, Artificial Sequence
  Description of Artificial Sequence: Synthetic oligonucleotide
  Antisense strand to SEQ ID NO: 1192006
cacacuccagaauucacuu

SEQ ID NO: 1192008 - RNA, 19 nt, Artificial Sequence
  Description of Artificial Sequence: Synthetic oligonucleotide
  Sense strand starting at position 1548 of SEQ ID NO: 916889
gagugugguuaagugggaa

SEQ ID NO: 1192009 - RNA, 19 nt, Artificial Sequence
  Description of Artificial Sequence: Synthetic oligonucleotide
  Antisense strand to SEQ ID NO: 1192008
uucccacuuaaccacacuc

SEQ ID NO: 1192010 - RNA, 19 nt, Artificial Sequence
  Description of Artificial Sequence: Synthetic oligonucleotide
  Sense strand starting at position 2022 of SEQ ID NO: 916889
ugugauuggacgcaaagag

SEQ ID NO: 1192011 - RNA, 19 nt, Artificial Sequence
  Description of Artificial Sequence: Synthetic oligonucleotide
  Antisense strand to SEQ ID NO: 1192010
cucuuugcguccaaucaca

SEQ ID NO: 1192012 - RNA, 19 nt, Artificial Sequence
  Description of Artificial Sequence: Synthetic oligonucleotide
  Sense strand starting at position 2512 of SEQ ID NO: 916889
ggucgaguugcgucuggga

SEQ ID NO: 1192013 - RNA, 19 nt, Artificial Sequence
  Description of Artificial Sequence: Synthetic oligonucleotide
  Antisense strand to SEQ ID NO: 1192012
ucccagacgcaacucgacc

SEQ ID NO: 1192014 - RNA, 19 nt, Artificial Sequence
  Description of Artificial Sequence: Synthetic oligonucleotide
  Sense strand starting at position 2513 of SEQ ID NO: 916889
gucgaguugcgucugggau

SEQ ID NO: 1192015 - RNA, 19 nt, Artificial Sequence
  Description of Artificial Sequence: Synthetic oligonucleotide
  Antisense strand to SEQ ID NO: 1192014
aucccagacgcaacucgac

SEQ ID NO: 1192016 - RNA, 19 nt, Artificial Sequence
  Description of Artificial Sequence: Synthetic oligonucleotide
  Sense strand starting at position 2673 of SEQ ID NO: 916889
aaacuuucgauguaacggu

SEQ ID NO: 1192017 - RNA, 19 nt, Artificial Sequence
  Description of Artificial Sequence: Synthetic oligonucleotide
  Antisense strand to SEQ ID NO: 1192016
accguuacaucgaaaguuu

SEQ ID NO: 1192018 - RNA, 19 nt, Artificial Sequence
  Description of Artificial Sequence: Synthetic oligonucleotide
  Sense strand starting at position 2736 of SEQ ID NO: 916889
gggucacucugaucugaaa

SEQ ID NO: 1192019 - RNA, 19 nt, Artificial Sequence
  Description of Artificial Sequence: Synthetic oligonucleotide
  Antisense strand to SEQ ID NO: 1192018
uuucagaucagagugaccc

SEQ ID NO: 1192020 - RNA, 19 nt, Artificial Sequence
  Description of Artificial Sequence: Synthetic oligonucleotide
  Sense strand starting at position 2760 of SEQ ID NO: 916889
aaugcaguucuuggagaac

SEQ ID NO: 1192021 - RNA, 19 nt, Artificial Sequence
  Description of Artificial Sequence: Synthetic oligonucleotide
  Antisense strand to SEQ ID NO: 1192020
guucuccaagaacugcauu

SEQ ID NO: 1192022 - RNA, 19 nt, Artificial Sequence
  Description of Artificial Sequence: Synthetic oligonucleotide
  Sense strand starting at position 2838 of SEQ ID NO: 916889
augaaauguuggguguuga

SEQ ID NO: 1192023 - RNA, 19 nt, Artificial Sequence
  Description of Artificial Sequence: Synthetic oligonucleotide
  Antisense strand to SEQ ID NO: 1192022
ucaacacccaacauuucau

SEQ ID NO: 1192024 - RNA, 19 nt, Artificial Sequence
  Description of Artificial Sequence: Synthetic oligonucleotide
  Sense strand starting at position 2839 of SEQ ID NO: 916889
ugaaauguuggguguugag

SEQ ID NO: 1192025 - RNA, 19 nt, Artificial Sequence
  Description of Artificial Sequence: Synthetic oligonucleotide
  Antisense strand to SEQ ID NO: 1192024
cucaacacccaacauuuca

SEQ ID NO: 1192026 - RNA, 19 nt, Artificial Sequence
  Description of Artificial Sequence: Synthetic oligonucleotide
  Sense strand starting at position 3085 of SEQ ID NO: 916889
ccagacaaugauugucagu

SEQ ID NO: 1192027 - RNA, 19 nt, Artificial Sequence
  Description of Artificial Sequence: Synthetic oligonucleotide
  Antisense strand to SEQ ID NO: 1192026
acugacaaucauugucugg

SEQ ID NO: 1192028 - RNA, 19 nt, Artificial Sequence
  Description of Artificial Sequence: Synthetic oligonucleotide
  Sense strand starting at position 3087 of SEQ ID NO: 916889
agacaaugauugucagugu

SEQ ID NO: 1192029 - RNA, 19 nt, Artificial Sequence
  Description of Artificial Sequence: Synthetic oligonucleotide
  Antisense strand to SEQ ID NO: 1192028
acacugacaaucauugucu

SEQ ID NO: 1192030 - RNA, 19 nt, Artificial Sequence
  Description of Artificial Sequence: Synthetic oligonucleotide
  Sense strand starting at position 3149 of SEQ ID NO: 916889
aguggauuucuccguuugu

SEQ ID NO: 1192031 - RNA, 19 nt, Artificial Sequence
  Description of Artificial Sequence: Synthetic oligonucleotide
  Antisense strand to SEQ ID NO: 1192030
acaaacggagaaauccacu

SEQ ID NO: 1192032 - RNA, 19 nt, Artificial Sequence
  Description of Artificial Sequence: Synthetic oligonucleotide
  Sense strand starting at position 3153 of SEQ ID NO: 916889
gauuucuccguuugucuau

SEQ ID NO: 1192033 - RNA, 19 nt, Artificial Sequence
  Description of Artificial Sequence: Synthetic oligonucleotide
  Antisense strand to SEQ ID NO: 1192032
auagacaaacggagaaauc

SEQ ID NO: 1192034 - RNA, 19 nt, Artificial Sequence
  Description of Artificial Sequence: Synthetic oligonucleotide
  Sense strand starting at position 3183 of SEQ ID NO: 916889
cuuuaagucuuuguauaga

SEQ ID NO: 1192035 - RNA, 19 nt, Artificial Sequence
  Description of Artificial Sequence: Synthetic oligonucleotide
  Antisense strand to SEQ ID NO: 1192034
ucuauacaaagacuuaaag

SEQ ID NO: 1192036 - RNA, 19 nt, Artificial Sequence
  Description of Artificial Sequence: Synthetic oligonucleotide
  Sense strand starting at position 3232 of SEQ ID NO: 916889
ucaacaaucguggaaaucu

SEQ ID NO: 1192037 - RNA, 19 nt, Artificial Sequence
  Description of Artificial Sequence: Synthetic oligonucleotide
  Antisense strand to SEQ ID NO: 1192036
agauuuccacgauuguuga

SEQ ID NO: 1192038 - RNA, 19 nt, Artificial Sequence
  Description of Artificial Sequence: Synthetic oligonucleotide
  Sense strand starting at position 3241 of SEQ ID NO: 916889
guggaaaucuuaccuuacu

SEQ ID NO: 1192039 - RNA, 19 nt, Artificial Sequence
  Description of Artificial Sequence: Synthetic oligonucleotide
  Antisense strand to SEQ ID NO: 1192038
aguaagguaagauuuccac

SEQ ID NO: 1192040 - RNA, 19 nt, Artificial Sequence
  Description of Artificial Sequence: Synthetic oligonucleotide
  Sense strand starting at position 3281 of SEQ ID NO: 916889
ccguuuaagagaugaggaa

SEQ ID NO: 1192041 - RNA, 19 nt, Artificial Sequence
  Description of Artificial Sequence: Synthetic oligonucleotide
  Antisense strand to SEQ ID NO: 1192040
uuccucaucucuuaaacgg

SEQ ID NO: 1192042 - RNA, 19 nt, Artificial Sequence
  Description of Artificial Sequence: Synthetic oligonucleotide
  Sense strand starting at position 3810 of SEQ ID NO: 916889
agugaagugaaacgaaaua

SEQ ID NO: 1192043 - RNA, 19 nt, Artificial Sequence
  Description of Artificial Sequence: Synthetic oligonucleotide
  Antisense strand to SEQ ID NO: 1192042
uauuucguuucacuucacu

SEQ ID NO: 1192044 - RNA, 19 nt, Artificial Sequence
  Description of Artificial Sequence: Synthetic oligonucleotide
  Sense strand starting at position 3934 of SEQ ID NO: 916889
cuggauuguagaggugaga

SEQ ID NO: 1192045 - RNA, 19 nt, Artificial Sequence
  Description of Artificial Sequence: Synthetic oligonucleotide
  Antisense strand to SEQ ID NO: 1192044
ucucaccucuacaauccag

SEQ ID NO: 1192046 - RNA, 19 nt, Artificial Sequence
  Description of Artificial Sequence: Synthetic oligonucleotide
  Sense strand starting at position 3945 of SEQ ID NO: 916889
aggugagaucuuggcuuac

SEQ ID NO: 1192047 - RNA, 19 nt, Artificial Sequence
  Description of Artificial Sequence: Synthetic oligonucleotide
  Antisense strand to SEQ ID NO: 1192046
guaagccaagaucucaccu

SEQ ID NO: 1192048 - RNA, 19 nt, Artificial Sequence
  Description of Artificial Sequence: Synthetic oligonucleotide
  Sense strand starting at position 175 of SEQ ID NO: 916890
ggcacauaacgugauguuu

SEQ ID NO: 1192049 - RNA, 19 nt, Artificial Sequence
  Description of Artificial Sequence: Synthetic oligonucleotide
  Antisense strand to SEQ ID NO: 1192048
aaacaucacguuaugugcc

SEQ ID NO: 1192050 - RNA, 19 nt, Artificial Sequence
  Description of Artificial Sequence: Synthetic oligonucleotide
  Sense strand starting at position 186 of SEQ ID NO: 916890
ugauguuucuagcucauga

SEQ ID NO: 1192051 - RNA, 19 nt, Artificial Sequence
  Description of Artificial Sequence: Synthetic oligonucleotide
  Antisense strand to SEQ ID NO: 1192050
ucaugagcuagaaacauca

SEQ ID NO: 1192052 - RNA, 19 nt, Artificial Sequence
  Description of Artificial Sequence: Synthetic oligonucleotide
  Sense strand starting at position 197 of SEQ ID NO: 916890
gcucaugauccuugcuaca

SEQ ID NO: 1192053 - RNA, 19 nt, Artificial Sequence
  Description of Artificial Sequence: Synthetic oligonucleotide
  Antisense strand to SEQ ID NO: 1192052
uguagcaaggaucaugagc

SEQ ID NO: 1192054 - RNA, 19 nt, Artificial Sequence
  Description of Artificial Sequence: Synthetic oligonucleotide
  Sense strand starting at position 199 of SEQ ID NO: 916890
ucaugauccuugcuacaga

SEQ ID NO: 1192055 - RNA, 19 nt, Artificial Sequence
  Description of Artificial Sequence: Synthetic oligonucleotide
  Antisense strand to SEQ ID NO: 1192054
ucuguagcaaggaucauga

SEQ ID NO: 1192056 - RNA, 19 nt, Artificial Sequence
  Description of Artificial Sequence: Synthetic oligonucleotide
  Sense strand starting at position 612 of SEQ ID NO: 916890
gugcuaagugcugugguaa

SEQ ID NO: 1192057 - RNA, 19 nt, Artificial Sequence
  Description of Artificial Sequence: Synthetic oligonucleotide
  Antisense strand to SEQ ID NO: 1192056
uuaccacagcacuuagcac

SEQ ID NO: 1192058 - RNA, 19 nt, Artificial Sequence
  Description of Artificial Sequence: Synthetic oligonucleotide
  Sense strand starting at position 761 of SEQ ID NO: 916890
cuccgauugucacuccuca

SEQ ID NO: 1192059 - RNA, 19 nt, Artificial Sequence
  Description of Artificial Sequence: Synthetic oligonucleotide
  Antisense strand to SEQ ID NO: 1192058
ugaggagugacaaucggag

SEQ ID NO: 1192060 - RNA, 19 nt, Artificial Sequence
  Description of Artificial Sequence: Synthetic oligonucleotide
  Sense strand starting at position 1332 of SEQ ID NO: 916890
caguguuuccugugaggag

SEQ ID NO: 1192061 - RNA, 19 nt, Artificial Sequence
  Description of Artificial Sequence: Synthetic oligonucleotide
  Antisense strand to SEQ ID NO: 1192060
cuccucacaggaaacacug

SEQ ID NO: 1192062 - RNA, 19 nt, Artificial Sequence
  Description of Artificial Sequence: Synthetic oligonucleotide
  Sense strand starting at position 1400 of SEQ ID NO: 916890
ggcauccuguggucaggaa

SEQ ID NO: 1192063 - RNA, 19 nt, Artificial Sequence
  Description of Artificial Sequence: Synthetic oligonucleotide
  Antisense strand to SEQ ID NO: 1192062
uuccugaccacaggaugcc

SEQ ID NO: 1192064 - RNA, 19 nt, Artificial Sequence
  Description of Artificial Sequence: Synthetic oligonucleotide
  Sense strand starting at position 1401 of SEQ ID NO: 916890
gcauccuguggucaggaaa

SEQ ID NO: 1192065 - RNA, 19 nt, Artificial Sequence
  Description of Artificial Sequence: Synthetic oligonucleotide
  Antisense strand to SEQ ID NO: 1192064
uuuccugaccacaggaugc

SEQ ID NO: 1192066 - RNA, 19 nt, Artificial Sequence
  Description of Artificial Sequence: Synthetic oligonucleotide
  Sense strand starting at position 1630 of SEQ ID NO: 916890
aggccacagcucugacaua

SEQ ID NO: 1192067 - RNA, 19 nt, Artificial Sequence
  Description of Artificial Sequence: Synthetic oligonucleotide
  Antisense strand to SEQ ID NO: 1192066
uaugucagagcuguggccu

SEQ ID NO: 1192068 - RNA, 19 nt, Artificial Sequence
  Description of Artificial Sequence: Synthetic oligonucleotide
  Sense strand starting at position 2057 of SEQ ID NO: 916890
cugggagugcgauagguua

SEQ ID NO: 1192069 - RNA, 19 nt, Artificial Sequence
  Description of Artificial Sequence: Synthetic oligonucleotide
  Antisense strand to SEQ ID NO: 1192068
uaaccuaucgcacucccag

SEQ ID NO: 1192070 - RNA, 19 nt, Artificial Sequence
  Description of Artificial Sequence: Synthetic oligonucleotide
  Sense strand starting at position 2059 of SEQ ID NO: 916890
gggagugcgauagguuauc

SEQ ID NO: 1192071 - RNA, 19 nt, Artificial Sequence
  Description of Artificial Sequence: Synthetic oligonucleotide
  Antisense strand to SEQ ID NO: 1192070
gauaaccuaucgcacuccc

SEQ ID NO: 1192072 - RNA, 19 nt, Artificial Sequence
  Description of Artificial Sequence: Synthetic oligonucleotide
  Sense strand starting at position 2064 of SEQ ID NO: 916890
ugcgauagguuaucugauc

SEQ ID NO: 1192073 - RNA, 19 nt, Artificial Sequence
  Description of Artificial Sequence: Synthetic oligonucleotide
  Antisense strand to SEQ ID NO: 1192072
gaucagauaaccuaucgca

SEQ ID NO: 1192074 - RNA, 19 nt, Artificial Sequence
  Description of Artificial Sequence: Synthetic oligonucleotide
  Sense strand starting at position 2065 of SEQ ID NO: 916890
gcgauagguuaucugaucu

SEQ ID NO: 1192075 - RNA, 19 nt, Artificial Sequence
  Description of Artificial Sequence: Synthetic oligonucleotide
  Antisense strand to SEQ ID NO: 1192074
agaucagauaaccuaucgc

SEQ ID NO: 1192076 - RNA, 19 nt, Artificial Sequence
  Description of Artificial Sequence: Synthetic oligonucleotide
  Sense strand starting at position 2069 of SEQ ID NO: 916890
uagguuaucugaucuggag

SEQ ID NO: 1192077 - RNA, 19 nt, Artificial Sequence
  Description of Artificial Sequence: Synthetic oligonucleotide
  Antisense strand to SEQ ID NO: 1192076
cuccagaucagauaaccua

SEQ ID NO: 1192078 - RNA, 19 nt, Artificial Sequence
  Description of Artificial Sequence: Synthetic oligonucleotide
  Sense strand starting at position 2257 of SEQ ID NO: 916890
cucagaagcuugucaccua

SEQ ID NO: 1192079 - RNA, 19 nt, Artificial Sequence
  Description of Artificial Sequence: Synthetic oligonucleotide
  Antisense strand to SEQ ID NO: 1192078
uaggugacaagcuucugag

SEQ ID NO: 1192080 - RNA, 19 nt, Artificial Sequence
  Description of Artificial Sequence: Synthetic oligonucleotide
  Sense strand starting at position 2368 of SEQ ID NO: 916890
caccacaaggugugugauu

SEQ ID NO: 1192081 - RNA, 19 nt, Artificial Sequence
  Description of Artificial Sequence: Synthetic oligonucleotide
  Antisense strand to SEQ ID NO: 1192080
aaucacacaccuuguggug

SEQ ID NO: 1192082 - RNA, 19 nt, Artificial Sequence
  Description of Artificial Sequence: Synthetic oligonucleotide
  Sense strand starting at position 2370 of SEQ ID NO: 916890
ccacaaggugugugauuga

SEQ ID NO: 1192083 - RNA, 19 nt, Artificial Sequence
  Description of Artificial Sequence: Synthetic oligonucleotide
  Antisense strand to SEQ ID NO: 1192082
ucaaucacacaccuugugg

SEQ ID NO: 1192084 - RNA, 19 nt, Artificial Sequence
  Description of Artificial Sequence: Synthetic oligonucleotide
  Sense strand starting at position 2373 of SEQ ID NO: 916890
caaggugugugauugacac

SEQ ID NO: 1192085 - RNA, 19 nt, Artificial Sequence
  Description of Artificial Sequence: Synthetic oligonucleotide
  Antisense strand to SEQ ID NO: 1192084
gugucaaucacacaccuug

SEQ ID NO: 1192086 - RNA, 19 nt, Artificial Sequence
  Description of Artificial Sequence: Synthetic oligonucleotide
  Sense strand starting at position 2375 of SEQ ID NO: 916890
aggugugugauugacacau

SEQ ID NO: 1192087 - RNA, 19 nt, Artificial Sequence
  Description of Artificial Sequence: Synthetic oligonucleotide
  Antisense strand to SEQ ID NO: 1192086
augugucaaucacacaccu

SEQ ID NO: 1192088 - RNA, 19 nt, Artificial Sequence
  Description of Artificial Sequence: Synthetic oligonucleotide
  Sense strand starting at position 2381 of SEQ ID NO: 916890
gugauugacacauguggua

SEQ ID NO: 1192089 - RNA, 19 nt, Artificial Sequence
  Description of Artificial Sequence: Synthetic oligonucleotide
  Antisense strand to SEQ ID NO: 1192088
uaccacaugugucaaucac

SEQ ID NO: 1192090 - RNA, 19 nt, Artificial Sequence
  Description of Artificial Sequence: Synthetic oligonucleotide
  Sense strand starting at position 2560 of SEQ ID NO: 916890
gggaauaccagguauuguc

SEQ ID NO: 1192091 - RNA, 19 nt, Artificial Sequence
  Description of Artificial Sequence: Synthetic oligonucleotide
  Antisense strand to SEQ ID NO: 1192090
gacaauaccugguauuccc

SEQ ID NO: 1192092 - RNA, 19 nt, Artificial Sequence
  Description of Artificial Sequence: Synthetic oligonucleotide
  Sense strand starting at position 2608 of SEQ ID NO: 916890
cucugucauuuaccagcua

SEQ ID NO: 1192093 - RNA, 19 nt, Artificial Sequence
  Description of Artificial Sequence: Synthetic oligonucleotide
  Antisense strand to SEQ ID NO: 1192092
uagcugguaaaugacagag

SEQ ID NO: 1192094 - RNA, 19 nt, Artificial Sequence
  Description of Artificial Sequence: Synthetic oligonucleotide
  Sense strand starting at position 2698 of SEQ ID NO: 916890
auaucacaagguuaucgua

SEQ ID NO: 1192095 - RNA, 19 nt, Artificial Sequence
  Description of Artificial Sequence: Synthetic oligonucleotide
  Antisense strand to SEQ ID NO: 1192094
uacgauaaccuugugauau

SEQ ID NO: 1192096 - RNA, 19 nt, Artificial Sequence
  Description of Artificial Sequence: Synthetic oligonucleotide
  Sense strand starting at position 2706 of SEQ ID NO: 916890
agguuaucguaagcucaaa

SEQ ID NO: 1192097 - RNA, 19 nt, Artificial Sequence
  Description of Artificial Sequence: Synthetic oligonucleotide
  Antisense strand to SEQ ID NO: 1192096
uuugagcuuacgauaaccu

SEQ ID NO: 1192098 - RNA, 19 nt, Artificial Sequence
  Description of Artificial Sequence: Synthetic oligonucleotide
  Sense strand starting at position 2723 of SEQ ID NO: 916890
aaaugagguuguccaggua

SEQ ID NO: 1192099 - RNA, 19 nt, Artificial Sequence
  Description of Artificial Sequence: Synthetic oligonucleotide
  Antisense strand to SEQ ID NO: 1192098
uaccuggacaaccucauuu

SEQ ID NO: 1192100 - RNA, 19 nt, Artificial Sequence
  Description of Artificial Sequence: Synthetic oligonucleotide
  Sense strand starting at position 2820 of SEQ ID NO: 916890
aaggguaugugcuuugaga

SEQ ID NO: 1192101 - RNA, 19 nt, Artificial Sequence
  Description of Artificial Sequence: Synthetic oligonucleotide
  Antisense strand to SEQ ID NO: 1192100
ucucaaagcacauacccuu

SEQ ID NO: 1192102 - RNA, 19 nt, Artificial Sequence
  Description of Artificial Sequence: Synthetic oligonucleotide
  Sense strand starting at position 2856 of SEQ ID NO: 916890
uccugcugggauuaacuau

SEQ ID NO: 1192103 - RNA, 19 nt, Artificial Sequence
  Description of Artificial Sequence: Synthetic oligonucleotide
  Antisense strand to SEQ ID NO: 1192102
auaguuaaucccagcagga

SEQ ID NO: 1192104 - RNA, 19 nt, Artificial Sequence
  Description of Artificial Sequence: Synthetic oligonucleotide
  Sense strand starting at position 2886 of SEQ ID NO: 916890
cucccuuuguguccaaaga

SEQ ID NO: 1192105 - RNA, 19 nt, Artificial Sequence
  Description of Artificial Sequence: Synthetic oligonucleotide
  Antisense strand to SEQ ID NO: 1192104
ucuuuggacacaaagggag

SEQ ID NO: 1192106 - RNA, 19 nt, Artificial Sequence
  Description of Artificial Sequence: Synthetic oligonucleotide
  Sense strand starting at position 2887 of SEQ ID NO: 916890
ucccuuuguguccaaagau

SEQ ID NO: 1192107 - RNA, 19 nt, Artificial Sequence
  Description of Artificial Sequence: Synthetic oligonucleotide
  Antisense strand to SEQ ID NO: 1192106
aucuuuggacacaaaggga

SEQ ID NO: 1192108 - RNA, 19 nt, Artificial Sequence
  Description of Artificial Sequence: Synthetic oligonucleotide
  Sense strand starting at position 2896 of SEQ ID NO: 916890
guccaaagaucaguguuag

SEQ ID NO: 1192109 - RNA, 19 nt, Artificial Sequence
  Description of Artificial Sequence: Synthetic oligonucleotide
  Antisense strand to SEQ ID NO: 1192108
cuaacacugaucuuuggac

SEQ ID NO: 1192110 - RNA, 19 nt, Artificial Sequence
  Description of Artificial Sequence: Synthetic oligonucleotide
  Sense strand starting at position 2897 of SEQ ID NO: 916890
uccaaagaucaguguuaga

SEQ ID NO: 1192111 - RNA, 19 nt, Artificial Sequence
  Description of Artificial Sequence: Synthetic oligonucleotide
  Antisense strand to SEQ ID NO: 1192110
ucuaacacugaucuuugga

SEQ ID NO: 1192112 - RNA, 19 nt, Artificial Sequence
  Description of Artificial Sequence: Synthetic oligonucleotide
  Sense strand starting at position 2933 of SEQ ID NO: 916890
agauuaaggccaugaucuc

SEQ ID NO: 1192113 - RNA, 19 nt, Artificial Sequence
  Description of Artificial Sequence: Synthetic oligonucleotide
  Antisense strand to SEQ ID NO: 1192112
gagaucauggccuuaaucu

SEQ ID NO: 1192114 - RNA, 19 nt, Artificial Sequence
  Description of Artificial Sequence: Synthetic oligonucleotide
  Sense strand starting at position 2999 of SEQ ID NO: 916890
gcuugauggcuugaagcuu

SEQ ID NO: 1192115 - RNA, 19 nt, Artificial Sequence
  Description of Artificial Sequence: Synthetic oligonucleotide
  Antisense strand to SEQ ID NO: 1192114
aagcuucaagccaucaagc

SEQ ID NO: 1192116 - RNA, 19 nt, Artificial Sequence
  Description of Artificial Sequence: Synthetic oligonucleotide
  Sense strand starting at position 3061 of SEQ ID NO: 916890
ggagaaaugcugugaguga

SEQ ID NO: 1192117 - RNA, 19 nt, Artificial Sequence
  Description of Artificial Sequence: Synthetic oligonucleotide
  Antisense strand to SEQ ID NO: 1192116
ucacucacagcauuucucc

SEQ ID NO: 1192118 - RNA, 19 nt, Artificial Sequence
  Description of Artificial Sequence: Synthetic oligonucleotide
  Sense strand starting at position 3482 of SEQ ID NO: 916890
agaggcuuccagcaggaga

SEQ ID NO: 1192119 - RNA, 19 nt, Artificial Sequence
  Description of Artificial Sequence: Synthetic oligonucleotide
  Antisense strand to SEQ ID NO: 1192118
ucuccugcuggaagccucu

SEQ ID NO: 1192120 - RNA, 19 nt, Artificial Sequence
  Description of Artificial Sequence: Synthetic oligonucleotide
  Sense strand starting at position 3484 of SEQ ID NO: 916890
aggcuuccagcaggagaau

SEQ ID NO: 1192121 - RNA, 19 nt, Artificial Sequence
  Description of Artificial Sequence: Synthetic oligonucleotide
  Antisense strand to SEQ ID NO: 1192120
auucuccugcuggaagccu

SEQ ID NO: 1192122 - RNA, 19 nt, Artificial Sequence
  Description of Artificial Sequence: Synthetic oligonucleotide
  Sense strand starting at position 3510 of SEQ ID NO: 916890
gacaucugagucugaggau

SEQ ID NO: 1192123 - RNA, 19 nt, Artificial Sequence
  Description of Artificial Sequence: Synthetic oligonucleotide
  Antisense strand to SEQ ID NO: 1192122
auccucagacucagauguc

SEQ ID NO: 1192124 - RNA, 19 nt, Artificial Sequence
  Description of Artificial Sequence: Synthetic oligonucleotide
  Sense strand starting at position 3907 of SEQ ID NO: 916890
ccaauaaauugugugcauu

SEQ ID NO: 1192125 - RNA, 19 nt, Artificial Sequence
  Description of Artificial Sequence: Synthetic oligonucleotide
  Antisense strand to SEQ ID NO: 1192124
aaugcacacaauuuauugg

SEQ ID NO: 1192126 - RNA, 19 nt, Artificial Sequence
  Description of Artificial Sequence: Synthetic oligonucleotide
  Sense strand starting at position 3978 of SEQ ID NO: 916890
gagggaacauguuagaaau

SEQ ID NO: 1192127 - RNA, 19 nt, Artificial Sequence
  Description of Artificial Sequence: Synthetic oligonucleotide
  Antisense strand to SEQ ID NO: 1192126
auuucuaacauguucccuc

SEQ ID NO: 1192128 - RNA, 19 nt, Artificial Sequence
  Description of Artificial Sequence: Synthetic oligonucleotide
  Sense strand starting at position 26 of SEQ ID NO: 916891
ugcagauccagugggaaua

SEQ ID NO: 1192129 - RNA, 19 nt, Artificial Sequence
  Description of Artificial Sequence: Synthetic oligonucleotide
  Antisense strand to SEQ ID NO: 1192128
uauucccacuggaucugca

SEQ ID NO: 1192130 - RNA, 19 nt, Artificial Sequence
  Description of Artificial Sequence: Synthetic oligonucleotide
  Sense strand starting at position 39 of SEQ ID NO: 916891
ggaauaggcccuugucaag

SEQ ID NO: 1192131 - RNA, 19 nt, Artificial Sequence
  Description of Artificial Sequence: Synthetic oligonucleotide
  Antisense strand to SEQ ID NO: 1192130
cuugacaagggccuauucc

SEQ ID NO: 1192132 - RNA, 19 nt, Artificial Sequence
  Description of Artificial Sequence: Synthetic oligonucleotide
  Sense strand starting at position 46 of SEQ ID NO: 916891
gcccuugucaaggacaagu

SEQ ID NO: 1192133 - RNA, 19 nt, Artificial Sequence
  Description of Artificial Sequence: Synthetic oligonucleotide
  Antisense strand to SEQ ID NO: 1192132
acuuguccuugacaagggc

SEQ ID NO: 1192134 - RNA, 19 nt, Artificial Sequence
  Description of Artificial Sequence: Synthetic oligonucleotide
  Sense strand starting at position 906 of SEQ ID NO: 916891
ucagguuauuaggaggauu

SEQ ID NO: 1192135 - RNA, 19 nt, Artificial Sequence
  Description of Artificial Sequence: Synthetic oligonucleotide
  Antisense strand to SEQ ID NO: 1192134
aauccuccuaauaaccuga

SEQ ID NO: 1192136 - RNA, 19 nt, Artificial Sequence
  Description of Artificial Sequence: Synthetic oligonucleotide
  Sense strand starting at position 1478 of SEQ ID NO: 916891
ggcggcuuuccaggaacuu

SEQ ID NO: 1192137 - RNA, 19 nt, Artificial Sequence
  Description of Artificial Sequence: Synthetic oligonucleotide
  Antisense strand to SEQ ID NO: 1192136
aaguuccuggaaagccgcc

SEQ ID NO: 1192138 - RNA, 19 nt, Artificial Sequence
  Description of Artificial Sequence: Synthetic oligonucleotide
  Sense strand starting at position 1479 of SEQ ID NO: 916891
gcggcuuuccaggaacuuu

SEQ ID NO: 1192139 - RNA, 19 nt, Artificial Sequence
  Description of Artificial Sequence: Synthetic oligonucleotide
  Antisense strand to SEQ ID NO: 1192138
aaaguuccuggaaagccgc

SEQ ID NO: 1192140 - RNA, 19 nt, Artificial Sequence
  Description of Artificial Sequence: Synthetic oligonucleotide
  Sense strand starting at position 1487 of SEQ ID NO: 916891
ccaggaacuuuccaggaau

SEQ ID NO: 1192141 - RNA, 19 nt, Artificial Sequence
  Description of Artificial Sequence: Synthetic oligonucleotide
  Antisense strand to SEQ ID NO: 1192140
auuccuggaaaguuccugg

SEQ ID NO: 1192142 - RNA, 19 nt, Artificial Sequence
  Description of Artificial Sequence: Synthetic oligonucleotide
  Sense strand starting at position 1528 of SEQ ID NO: 916891
ccgcuacugcuuuaaagag

SEQ ID NO: 1192143 - RNA, 19 nt, Artificial Sequence
  Description of Artificial Sequence: Synthetic oligonucleotide
  Antisense strand to SEQ ID NO: 1192142
cucuuuaaagcaguagcgg

SEQ ID NO: 1192144 - RNA, 19 nt, Artificial Sequence
  Description of Artificial Sequence: Synthetic oligonucleotide
  Sense strand starting at position 2746 of SEQ ID NO: 916891
acauaauucuaugcagaug

SEQ ID NO: 1192145 - RNA, 19 nt, Artificial Sequence
  Description of Artificial Sequence: Synthetic oligonucleotide
  Antisense strand to SEQ ID NO: 1192144
caucugcauagaauuaugu

SEQ ID NO: 1192146 - RNA, 19 nt, Artificial Sequence
  Description of Artificial Sequence: Synthetic oligonucleotide
  Sense strand starting at position 2809 of SEQ ID NO: 916891
gagcuuuguuaacgcugga

SEQ ID NO: 1192147 - RNA, 19 nt, Artificial Sequence
  Description of Artificial Sequence: Synthetic oligonucleotide
  Antisense strand to SEQ ID NO: 1192146
uccagcguuaacaaagcuc

SEQ ID NO: 1192148 - RNA, 19 nt, Artificial Sequence
  Description of Artificial Sequence: Synthetic oligonucleotide
  Sense strand starting at position 2825 of SEQ ID NO: 916891
ggagccgugugcccuuaau

SEQ ID NO: 1192149 - RNA, 19 nt, Artificial Sequence
  Description of Artificial Sequence: Synthetic oligonucleotide
  Antisense strand to SEQ ID NO: 1192148
auuaagggcacacggcucc

SEQ ID NO: 1192150 - RNA, 19 nt, Artificial Sequence
  Description of Artificial Sequence: Synthetic oligonucleotide
  Sense strand starting at position 2827 of SEQ ID NO: 916891
agccgugugcccuuaauca

SEQ ID NO: 1192151 - RNA, 19 nt, Artificial Sequence
  Description of Artificial Sequence: Synthetic oligonucleotide
  Antisense strand to SEQ ID NO: 1192150
ugauuaagggcacacggcu

SEQ ID NO: 1192152 - RNA, 19 nt, Artificial Sequence
  Description of Artificial Sequence: Synthetic oligonucleotide
  Sense strand starting at position 2837 of SEQ ID NO: 916891
ccuuaaucauguuucguuu

SEQ ID NO: 1192153 - RNA, 19 nt, Artificial Sequence
  Description of Artificial Sequence: Synthetic oligonucleotide
  Antisense strand to SEQ ID NO: 1192152
aaacgaaacaugauuaagg

SEQ ID NO: 1192154 - RNA, 19 nt, Artificial Sequence
  Description of Artificial Sequence: Synthetic oligonucleotide
  Sense strand starting at position 3086 of SEQ ID NO: 916891
cacuaugucuacuaggguu

SEQ ID NO: 1192155 - RNA, 19 nt, Artificial Sequence
  Description of Artificial Sequence: Synthetic oligonucleotide
  Antisense strand to SEQ ID NO: 1192154
aacccuaguagacauagug

SEQ ID NO: 1192156 - RNA, 19 nt, Artificial Sequence
  Description of Artificial Sequence: Synthetic oligonucleotide
  Sense strand starting at position 3088 of SEQ ID NO: 916891
cuaugucuacuaggguuaa

SEQ ID NO: 1192157 - RNA, 19 nt, Artificial Sequence
  Description of Artificial Sequence: Synthetic oligonucleotide
  Antisense strand to SEQ ID NO: 1192156
uuaacccuaguagacauag

SEQ ID NO: 1192158 - RNA, 19 nt, Artificial Sequence
  Description of Artificial Sequence: Synthetic oligonucleotide
  Sense strand starting at position 3099 of SEQ ID NO: 916891
aggguuaacugcccucuaa

SEQ ID NO: 1192159 - RNA, 19 nt, Artificial Sequence
  Description of Artificial Sequence: Synthetic oligonucleotide
  Antisense strand to SEQ ID NO: 1192158
uuagagggcaguuaacccu

SEQ ID NO: 1192160 - RNA, 19 nt, Artificial Sequence
  Description of Artificial Sequence: Synthetic oligonucleotide
  Sense strand starting at position 3121 of SEQ ID NO: 916891
guccuaauauggcuucuua

SEQ ID NO: 1192161 - RNA, 19 nt, Artificial Sequence
  Description of Artificial Sequence: Synthetic oligonucleotide
  Antisense strand to SEQ ID NO: 1192160
uaagaagccauauuaggac

SEQ ID NO: 1192162 - RNA, 19 nt, Artificial Sequence
  Description of Artificial Sequence: Synthetic oligonucleotide
  Sense strand starting at position 3133 of SEQ ID NO: 916891
cuucuuauuccuugaugga

SEQ ID NO: 1192163 - RNA, 19 nt, Artificial Sequence
  Description of Artificial Sequence: Synthetic oligonucleotide
  Antisense strand to SEQ ID NO: 1192162
uccaucaaggaauaagaag

SEQ ID NO: 1192164 - RNA, 19 nt, Artificial Sequence
  Description of Artificial Sequence: Synthetic oligonucleotide
  Sense strand starting at position 3136 of SEQ ID NO: 916891
cuuauuccuugauggagaa

SEQ ID NO: 1192165 - RNA, 19 nt, Artificial Sequence
  Description of Artificial Sequence: Synthetic oligonucleotide
  Antisense strand to SEQ ID NO: 1192164
uucuccaucaaggaauaag

SEQ ID NO: 1192166 - RNA, 19 nt, Artificial Sequence
  Description of Artificial Sequence: Synthetic oligonucleotide
  Sense strand starting at position 3137 of SEQ ID NO: 916891
uuauuccuugauggagaau

SEQ ID NO: 1192167 - RNA, 19 nt, Artificial Sequence
  Description of Artificial Sequence: Synthetic oligonucleotide
  Antisense strand to SEQ ID NO: 1192166
auucuccaucaaggaauaa

SEQ ID NO: 1192168 - RNA, 19 nt, Artificial Sequence
  Description of Artificial Sequence: Synthetic oligonucleotide
  Sense strand starting at position 3146 of SEQ ID NO: 916891
gauggagaauccuagagga

SEQ ID NO: 1192169 - RNA, 19 nt, Artificial Sequence
  Description of Artificial Sequence: Synthetic oligonucleotide
  Antisense strand to SEQ ID NO: 1192168
uccucuaggauucuccauc

SEQ ID NO: 1192170 - RNA, 19 nt, Artificial Sequence
  Description of Artificial Sequence: Synthetic oligonucleotide
  Sense strand starting at position 3549 of SEQ ID NO: 916891
acuugauaguggguugaaa

SEQ ID NO: 1192171 - RNA, 19 nt, Artificial Sequence
  Description of Artificial Sequence: Synthetic oligonucleotide
  Antisense strand to SEQ ID NO: 1192170
uuucaacccacuaucaagu

SEQ ID NO: 1192172 - RNA, 19 nt, Artificial Sequence
  Description of Artificial Sequence: Synthetic oligonucleotide
  Sense strand starting at position 3551 of SEQ ID NO: 916891
uugauaguggguugaaaug

SEQ ID NO: 1192173 - RNA, 19 nt, Artificial Sequence
  Description of Artificial Sequence: Synthetic oligonucleotide
  Antisense strand to SEQ ID NO: 1192172
cauuucaacccacuaucaa

SEQ ID NO: 1192174 - RNA, 19 nt, Artificial Sequence
  Description of Artificial Sequence: Synthetic oligonucleotide
  Sense strand starting at position 3557 of SEQ ID NO: 916891
guggguugaaaugaaucuu

SEQ ID NO: 1192175 - RNA, 19 nt, Artificial Sequence
  Description of Artificial Sequence: Synthetic oligonucleotide
  Antisense strand to SEQ ID NO: 1192174
aagauucauuucaacccac

SEQ ID NO: 1192176 - RNA, 19 nt, Artificial Sequence
  Description of Artificial Sequence: Synthetic oligonucleotide
  Sense strand starting at position 3563 of SEQ ID NO: 916891
ugaaaugaaucuuccagca

SEQ ID NO: 1192177 - RNA, 19 nt, Artificial Sequence
  Description of Artificial Sequence: Synthetic oligonucleotide
  Antisense strand to SEQ ID NO: 1192176
ugcuggaagauucauuuca

SEQ ID NO: 1192178 - RNA, 19 nt, Artificial Sequence
  Description of Artificial Sequence: Synthetic oligonucleotide
  Sense strand starting at position 3648 of SEQ ID NO: 916891
cccugauggcugcaucaua

SEQ ID NO: 1192179 - RNA, 19 nt, Artificial Sequence
  Description of Artificial Sequence: Synthetic oligonucleotide
  Antisense strand to SEQ ID NO: 1192178
uaugaugcagccaucaggg

SEQ ID NO: 1192180 - RNA, 19 nt, Artificial Sequence
  Description of Artificial Sequence: Synthetic oligonucleotide
  Sense strand starting at position 3656 of SEQ ID NO: 916891
gcugcaucauacuugauua

SEQ ID NO: 1192181 - RNA, 19 nt, Artificial Sequence
  Description of Artificial Sequence: Synthetic oligonucleotide
  Antisense strand to SEQ ID NO: 1192180
uaaucaaguaugaugcagc

SEQ ID NO: 1192182 - RNA, 19 nt, Artificial Sequence
  Description of Artificial Sequence: Synthetic oligonucleotide
  Sense strand starting at position 3968 of SEQ ID NO: 916891
cugcucuguucuuugauca

SEQ ID NO: 1192183 - RNA, 19 nt, Artificial Sequence
  Description of Artificial Sequence: Synthetic oligonucleotide
  Antisense strand to SEQ ID NO: 1192182
ugaucaaagaacagagcag

SEQ ID NO: 1192184 - RNA, 19 nt, Artificial Sequence
  Description of Artificial Sequence: Synthetic oligonucleotide
  Sense strand starting at position 3975 of SEQ ID NO: 916891
guucuuugaucacucuguu

SEQ ID NO: 1192185 - RNA, 19 nt, Artificial Sequence
  Description of Artificial Sequence: Synthetic oligonucleotide
  Antisense strand to SEQ ID NO: 1192184
aacagagugaucaaagaac

SEQ ID NO: 1192186 - RNA, 19 nt, Artificial Sequence
  Description of Artificial Sequence: Synthetic oligonucleotide
  Sense strand starting at position 483 of SEQ ID NO: 916892
ccaagauaaaguuggcuga

SEQ ID NO: 1192187 - RNA, 19 nt, Artificial Sequence
  Description of Artificial Sequence: Synthetic oligonucleotide
  Antisense strand to SEQ ID NO: 1192186
ucagccaacuuuaucuugg

SEQ ID NO: 1192188 - RNA, 19 nt, Artificial Sequence
  Description of Artificial Sequence: Synthetic oligonucleotide
  Sense strand starting at position 486 of SEQ ID NO: 916892
agauaaaguuggcugaaga

SEQ ID NO: 1192189 - RNA, 19 nt, Artificial Sequence
  Description of Artificial Sequence: Synthetic oligonucleotide
  Antisense strand to SEQ ID NO: 1192188
ucuucagccaacuuuaucu

SEQ ID NO: 1192190 - RNA, 19 nt, Artificial Sequence
  Description of Artificial Sequence: Synthetic oligonucleotide
  Sense strand starting at position 487 of SEQ ID NO: 916892
gauaaaguuggcugaagag

SEQ ID NO: 1192191 - RNA, 19 nt, Artificial Sequence
  Description of Artificial Sequence: Synthetic oligonucleotide
  Antisense strand to SEQ ID NO: 1192190
cucuucagccaacuuuauc

SEQ ID NO: 1192192 - RNA, 19 nt, Artificial Sequence
  Description of Artificial Sequence: Synthetic oligonucleotide
  Sense strand starting at position 553 of SEQ ID NO: 916892
cagggucacuagcugaaau

SEQ ID NO: 1192193 - RNA, 19 nt, Artificial Sequence
  Description of Artificial Sequence: Synthetic oligonucleotide
  Antisense strand to SEQ ID NO: 1192192
auuucagcuagugacccug

SEQ ID NO: 1192194 - RNA, 19 nt, Artificial Sequence
  Description of Artificial Sequence: Synthetic oligonucleotide
  Sense strand starting at position 555 of SEQ ID NO: 916892
gggucacuagcugaaauca

SEQ ID NO: 1192195 - RNA, 19 nt, Artificial Sequence
  Description of Artificial Sequence: Synthetic oligonucleotide
  Antisense strand to SEQ ID NO: 1192194
ugauuucagcuagugaccc

SEQ ID NO: 1192196 - RNA, 19 nt, Artificial Sequence
  Description of Artificial Sequence: Synthetic oligonucleotide
  Sense strand starting at position 608 of SEQ ID NO: 916892
ugcagauccagugggaaua

SEQ ID NO: 1192197 - RNA, 19 nt, Artificial Sequence
  Description of Artificial Sequence: Synthetic oligonucleotide
  Antisense strand to SEQ ID NO: 1192196
uauucccacuggaucugca

SEQ ID NO: 1192198 - RNA, 19 nt, Artificial Sequence
  Description of Artificial Sequence: Synthetic oligonucleotide
  Sense strand starting at position 621 of SEQ ID NO: 916892
ggaauaggcccuugucaag

SEQ ID NO: 1192199 - RNA, 19 nt, Artificial Sequence
  Description of Artificial Sequence: Synthetic oligonucleotide
  Antisense strand to SEQ ID NO: 1192198
cuugacaagggccuauucc

SEQ ID NO: 1192200 - RNA, 19 nt, Artificial Sequence
  Description of Artificial Sequence: Synthetic oligonucleotide
  Sense strand starting at position 628 of SEQ ID NO: 916892
gcccuugucaaggacaagu

SEQ ID NO: 1192201 - RNA, 19 nt, Artificial Sequence
  Description of Artificial Sequence: Synthetic oligonucleotide
  Antisense strand to SEQ ID NO: 1192200
acuuguccuugacaagggc

SEQ ID NO: 1192202 - RNA, 19 nt, Artificial Sequence
  Description of Artificial Sequence: Synthetic oligonucleotide
  Sense strand starting at position 1488 of SEQ ID NO: 916892
ucagguuauuaggaggauu

SEQ ID NO: 1192203 - RNA, 19 nt, Artificial Sequence
  Description of Artificial Sequence: Synthetic oligonucleotide
  Antisense strand to SEQ ID NO: 1192202
aauccuccuaauaaccuga

SEQ ID NO: 1192204 - RNA, 19 nt, Artificial Sequence
  Description of Artificial Sequence: Synthetic oligonucleotide
  Sense strand starting at position 2060 of SEQ ID NO: 916892
ggcggcuuuccaggaacuu

SEQ ID NO: 1192205 - RNA, 19 nt, Artificial Sequence
  Description of Artificial Sequence: Synthetic oligonucleotide
  Antisense strand to SEQ ID NO: 1192204
aaguuccuggaaagccgcc

SEQ ID NO: 1192206 - RNA, 19 nt, Artificial Sequence
  Description of Artificial Sequence: Synthetic oligonucleotide
  Sense strand starting at position 2061 of SEQ ID NO: 916892
gcggcuuuccaggaacuuu

SEQ ID NO: 1192207 - RNA, 19 nt, Artificial Sequence
  Description of Artificial Sequence: Synthetic oligonucleotide
  Antisense strand to SEQ ID NO: 1192206
aaaguuccuggaaagccgc

SEQ ID NO: 1192208 - RNA, 19 nt, Artificial Sequence
  Description of Artificial Sequence: Synthetic oligonucleotide
  Sense strand starting at position 2069 of SEQ ID NO: 916892
ccaggaacuuuccaggaau

SEQ ID NO: 1192209 - RNA, 19 nt, Artificial Sequence
  Description of Artificial Sequence: Synthetic oligonucleotide
  Antisense strand to SEQ ID NO: 1192208
auuccuggaaaguuccugg

SEQ ID NO: 1192210 - RNA, 19 nt, Artificial Sequence
  Description of Artificial Sequence: Synthetic oligonucleotide
  Sense strand starting at position 2110 of SEQ ID NO: 916892
ccgcuacugcuuuaaagag

SEQ ID NO: 1192211 - RNA, 19 nt, Artificial Sequence
  Description of Artificial Sequence: Synthetic oligonucleotide
  Antisense strand to SEQ ID NO: 1192210
cucuuuaaagcaguagcgg

SEQ ID NO: 1192212 - RNA, 19 nt, Artificial Sequence
  Description of Artificial Sequence: Synthetic oligonucleotide
  Sense strand starting at position 3328 of SEQ ID NO: 916892
acauaauucuaugcagaug

SEQ ID NO: 1192213 - RNA, 19 nt, Artificial Sequence
  Description of Artificial Sequence: Synthetic oligonucleotide
  Antisense strand to SEQ ID NO: 1192212
caucugcauagaauuaugu

SEQ ID NO: 1192214 - RNA, 19 nt, Artificial Sequence
  Description of Artificial Sequence: Synthetic oligonucleotide
  Sense strand starting at position 3391 of SEQ ID NO: 916892
gagcuuuguuaacgcugga

SEQ ID NO: 1192215 - RNA, 19 nt, Artificial Sequence
  Description of Artificial Sequence: Synthetic oligonucleotide
  Antisense strand to SEQ ID NO: 1192214
uccagcguuaacaaagcuc

SEQ ID NO: 1192216 - RNA, 19 nt, Artificial Sequence
  Description of Artificial Sequence: Synthetic oligonucleotide
  Sense strand starting at position 3407 of SEQ ID NO: 916892
ggagccgugugcccuuaau

SEQ ID NO: 1192217 - RNA, 19 nt, Artificial Sequence
  Description of Artificial Sequence: Synthetic oligonucleotide
  Antisense strand to SEQ ID NO: 1192216
auuaagggcacacggcucc

SEQ ID NO: 1192218 - RNA, 19 nt, Artificial Sequence
  Description of Artificial Sequence: Synthetic oligonucleotide
  Sense strand starting at position 3409 of SEQ ID NO: 916892
agccgugugcccuuaauca

SEQ ID NO: 1192219 - RNA, 19 nt, Artificial Sequence
  Description of Artificial Sequence: Synthetic oligonucleotide
  Antisense strand to SEQ ID NO: 1192218
ugauuaagggcacacggcu

SEQ ID NO: 1192220 - RNA, 19 nt, Artificial Sequence
  Description of Artificial Sequence: Synthetic oligonucleotide
  Sense strand starting at position 3419 of SEQ ID NO: 916892
ccuuaaucauguuucguuu

SEQ ID NO: 1192221 - RNA, 19 nt, Artificial Sequence
  Description of Artificial Sequence: Synthetic oligonucleotide
  Antisense strand to SEQ ID NO: 1192220
aaacgaaacaugauuaagg

SEQ ID NO: 1192222 - RNA, 19 nt, Artificial Sequence
  Description of Artificial Sequence: Synthetic oligonucleotide
  Sense strand starting at position 3668 of SEQ ID NO: 916892
cacuaugucuacuaggguu

SEQ ID NO: 1192223 - RNA, 19 nt, Artificial Sequence
  Description of Artificial Sequence: Synthetic oligonucleotide
  Antisense strand to SEQ ID NO: 1192222
aacccuaguagacauagug

SEQ ID NO: 1192224 - RNA, 19 nt, Artificial Sequence
  Description of Artificial Sequence: Synthetic oligonucleotide
  Sense strand starting at position 3670 of SEQ ID NO: 916892
cuaugucuacuaggguuaa

SEQ ID NO: 1192225 - RNA, 19 nt, Artificial Sequence
  Description of Artificial Sequence: Synthetic oligonucleotide
  Antisense strand to SEQ ID NO: 1192224
uuaacccuaguagacauag

SEQ ID NO: 1192226 - RNA, 19 nt, Artificial Sequence
  Description of Artificial Sequence: Synthetic oligonucleotide
  Sense strand starting at position 3681 of SEQ ID NO: 916892
aggguuaacugcccucuaa

SEQ ID NO: 1192227 - RNA, 19 nt, Artificial Sequence
  Description of Artificial Sequence: Synthetic oligonucleotide
  Antisense strand to SEQ ID NO: 1192226
uuagagggcaguuaacccu

SEQ ID NO: 1192228 - RNA, 19 nt, Artificial Sequence
  Description of Artificial Sequence: Synthetic oligonucleotide
  Sense strand starting at position 3703 of SEQ ID NO: 916892
guccuaauauggcuucuua

SEQ ID NO: 1192229 - RNA, 19 nt, Artificial Sequence
  Description of Artificial Sequence: Synthetic oligonucleotide
  Antisense strand to SEQ ID NO: 1192228
uaagaagccauauuaggac

SEQ ID NO: 1192230 - RNA, 19 nt, Artificial Sequence
  Description of Artificial Sequence: Synthetic oligonucleotide
  Sense strand starting at position 3715 of SEQ ID NO: 916892
cuucuuauuccuugaugga

SEQ ID NO: 1192231 - RNA, 19 nt, Artificial Sequence
  Description of Artificial Sequence: Synthetic oligonucleotide
  Antisense strand to SEQ ID NO: 1192230
uccaucaaggaauaagaag

SEQ ID NO: 1192232 - RNA, 19 nt, Artificial Sequence
  Description of Artificial Sequence: Synthetic oligonucleotide
  Sense strand starting at position 3718 of SEQ ID NO: 916892
cuuauuccuugauggagaa

SEQ ID NO: 1192233 - RNA, 19 nt, Artificial Sequence
  Description of Artificial Sequence: Synthetic oligonucleotide
  Antisense strand to SEQ ID NO: 1192232
uucuccaucaaggaauaag

SEQ ID NO: 1192234 - RNA, 19 nt, Artificial Sequence
  Description of Artificial Sequence: Synthetic oligonucleotide
  Sense strand starting at position 3719 of SEQ ID NO: 916892
uuauuccuugauggagaau

SEQ ID NO: 1192235 - RNA, 19 nt, Artificial Sequence
  Description of Artificial Sequence: Synthetic oligonucleotide
  Antisense strand to SEQ ID NO: 1192234
auucuccaucaaggaauaa

SEQ ID NO: 1192236 - RNA, 19 nt, Artificial Sequence
  Description of Artificial Sequence: Synthetic oligonucleotide
  Sense strand starting at position 3728 of SEQ ID NO: 916892
gauggagaauccuagagga

SEQ ID NO: 1192237 - RNA, 19 nt, Artificial Sequence
  Description of Artificial Sequence: Synthetic oligonucleotide
  Antisense strand to SEQ ID NO: 1192236
uccucuaggauucuccauc

SEQ ID NO: 1192238 - RNA, 19 nt, Artificial Sequence
  Description of Artificial Sequence: Synthetic oligonucleotide
  Sense strand starting at position 69 of SEQ ID NO: 916893
gcgcgaauugccugacugu

SEQ ID NO: 1192239 - RNA, 19 nt, Artificial Sequence
  Description of Artificial Sequence: Synthetic oligonucleotide
  Antisense strand to SEQ ID NO: 1192238
acagucaggcaauucgcgc

SEQ ID NO: 1192240 - RNA, 19 nt, Artificial Sequence
  Description of Artificial Sequence: Synthetic oligonucleotide
  Sense strand starting at position 70 of SEQ ID NO: 916893
cgcgaauugccugacugua

SEQ ID NO: 1192241 - RNA, 19 nt, Artificial Sequence
  Description of Artificial Sequence: Synthetic oligonucleotide
  Antisense strand to SEQ ID NO: 1192240
uacagucaggcaauucgcg

SEQ ID NO: 1192242 - RNA, 19 nt, Artificial Sequence
  Description of Artificial Sequence: Synthetic oligonucleotide
  Sense strand starting at position 78 of SEQ ID NO: 916893
gccugacuguacuugaaag

SEQ ID NO: 1192243 - RNA, 19 nt, Artificial Sequence
  Description of Artificial Sequence: Synthetic oligonucleotide
  Antisense strand to SEQ ID NO: 1192242
cuuucaaguacagucaggc

SEQ ID NO: 1192244 - RNA, 19 nt, Artificial Sequence
  Description of Artificial Sequence: Synthetic oligonucleotide
  Sense strand starting at position 188 of SEQ ID NO: 916893
agugucagucccugaacuu

SEQ ID NO: 1192245 - RNA, 19 nt, Artificial Sequence
  Description of Artificial Sequence: Synthetic oligonucleotide
  Antisense strand to SEQ ID NO: 1192244
aaguucagggacugacacu

SEQ ID NO: 1192246 - RNA, 19 nt, Artificial Sequence
  Description of Artificial Sequence: Synthetic oligonucleotide
  Sense strand starting at position 189 of SEQ ID NO: 916893
gugucagucccugaacuug

SEQ ID NO: 1192247 - RNA, 19 nt, Artificial Sequence
  Description of Artificial Sequence: Synthetic oligonucleotide
  Antisense strand to SEQ ID NO: 1192246
caaguucagggacugacac

SEQ ID NO: 1192248 - RNA, 19 nt, Artificial Sequence
  Description of Artificial Sequence: Synthetic oligonucleotide
  Sense strand starting at position 384 of SEQ ID NO: 916893
uaaaucuuccagcgugcua

SEQ ID NO: 1192249 - RNA, 19 nt, Artificial Sequence
  Description of Artificial Sequence: Synthetic oligonucleotide
  Antisense strand to SEQ ID NO: 1192248
uagcacgcuggaagauuua

SEQ ID NO: 1192250 - RNA, 19 nt, Artificial Sequence
  Description of Artificial Sequence: Synthetic oligonucleotide
  Sense strand starting at position 403 of SEQ ID NO: 916893
agaagcuauuuccaagaag

SEQ ID NO: 1192251 - RNA, 19 nt, Artificial Sequence
  Description of Artificial Sequence: Synthetic oligonucleotide
  Antisense strand to SEQ ID NO: 1192250
cuucuuggaaauagcuucu

SEQ ID NO: 1192252 - RNA, 19 nt, Artificial Sequence
  Description of Artificial Sequence: Synthetic oligonucleotide
  Sense strand starting at position 449 of SEQ ID NO: 916893
gccugagucccuggagaac

SEQ ID NO: 1192253 - RNA, 19 nt, Artificial Sequence
  Description of Artificial Sequence: Synthetic oligonucleotide
  Antisense strand to SEQ ID NO: 1192252
guucuccagggacucaggc

SEQ ID NO: 1192254 - RNA, 19 nt, Artificial Sequence
  Description of Artificial Sequence: Synthetic oligonucleotide
  Sense strand starting at position 1183 of SEQ ID NO: 916893
ccaagauaaaguuggcuga

SEQ ID NO: 1192255 - RNA, 19 nt, Artificial Sequence
  Description of Artificial Sequence: Synthetic oligonucleotide
  Antisense strand to SEQ ID NO: 1192254
ucagccaacuuuaucuugg

SEQ ID NO: 1192256 - RNA, 19 nt, Artificial Sequence
  Description of Artificial Sequence: Synthetic oligonucleotide
  Sense strand starting at position 1186 of SEQ ID NO: 916893
agauaaaguuggcugaaga

SEQ ID NO: 1192257 - RNA, 19 nt, Artificial Sequence
  Description of Artificial Sequence: Synthetic oligonucleotide
  Antisense strand to SEQ ID NO: 1192256
ucuucagccaacuuuaucu

SEQ ID NO: 1192258 - RNA, 19 nt, Artificial Sequence
  Description of Artificial Sequence: Synthetic oligonucleotide
  Sense strand starting at position 1187 of SEQ ID NO: 916893
gauaaaguuggcugaagag

SEQ ID NO: 1192259 - RNA, 19 nt, Artificial Sequence
  Description of Artificial Sequence: Synthetic oligonucleotide
  Antisense strand to SEQ ID NO: 1192258
cucuucagccaacuuuauc

SEQ ID NO: 1192260 - RNA, 19 nt, Artificial Sequence
  Description of Artificial Sequence: Synthetic oligonucleotide
  Sense strand starting at position 1253 of SEQ ID NO: 916893
cagggucacuagcugaaau

SEQ ID NO: 1192261 - RNA, 19 nt, Artificial Sequence
  Description of Artificial Sequence: Synthetic oligonucleotide
  Antisense strand to SEQ ID NO: 1192260
auuucagcuagugacccug

SEQ ID NO: 1192262 - RNA, 19 nt, Artificial Sequence
  Description of Artificial Sequence: Synthetic oligonucleotide
  Sense strand starting at position 1255 of SEQ ID NO: 916893
gggucacuagcugaaauca

SEQ ID NO: 1192263 - RNA, 19 nt, Artificial Sequence
  Description of Artificial Sequence: Synthetic oligonucleotide
  Antisense strand to SEQ ID NO: 1192262
ugauuucagcuagugaccc

SEQ ID NO: 1192264 - RNA, 19 nt, Artificial Sequence
  Description of Artificial Sequence: Synthetic oligonucleotide
  Sense strand starting at position 1308 of SEQ ID NO: 916893
ugcagauccagugggaaua

SEQ ID NO: 1192265 - RNA, 19 nt, Artificial Sequence
  Description of Artificial Sequence: Synthetic oligonucleotide
  Antisense strand to SEQ ID NO: 1192264
uauucccacuggaucugca

SEQ ID NO: 1192266 - RNA, 19 nt, Artificial Sequence
  Description of Artificial Sequence: Synthetic oligonucleotide
  Sense strand starting at position 1321 of SEQ ID NO: 916893
ggaauaggcccuugucaag

SEQ ID NO: 1192267 - RNA, 19 nt, Artificial Sequence
  Description of Artificial Sequence: Synthetic oligonucleotide
  Antisense strand to SEQ ID NO: 1192266
cuugacaagggccuauucc

SEQ ID NO: 1192268 - RNA, 19 nt, Artificial Sequence
  Description of Artificial Sequence: Synthetic oligonucleotide
  Sense strand starting at position 1328 of SEQ ID NO: 916893
gcccuugucaaggacaagu

SEQ ID NO: 1192269 - RNA, 19 nt, Artificial Sequence
  Description of Artificial Sequence: Synthetic oligonucleotide
  Antisense strand to SEQ ID NO: 1192268
acuuguccuugacaagggc

SEQ ID NO: 1192270 - RNA, 19 nt, Artificial Sequence
  Description of Artificial Sequence: Synthetic oligonucleotide
  Sense strand starting at position 2188 of SEQ ID NO: 916893
ucagguuauuaggaggauu

SEQ ID NO: 1192271 - RNA, 19 nt, Artificial Sequence
  Description of Artificial Sequence: Synthetic oligonucleotide
  Antisense strand to SEQ ID NO: 1192270
aauccuccuaauaaccuga

SEQ ID NO: 1192272 - RNA, 19 nt, Artificial Sequence
  Description of Artificial Sequence: Synthetic oligonucleotide
  Sense strand starting at position 2760 of SEQ ID NO: 916893
ggcggcuuuccaggaacuu

SEQ ID NO: 1192273 - RNA, 19 nt, Artificial Sequence
  Description of Artificial Sequence: Synthetic oligonucleotide
  Antisense strand to SEQ ID NO: 1192272
aaguuccuggaaagccgcc

SEQ ID NO: 1192274 - RNA, 19 nt, Artificial Sequence
  Description of Artificial Sequence: Synthetic oligonucleotide
  Sense strand starting at position 2761 of SEQ ID NO: 916893
gcggcuuuccaggaacuuu

SEQ ID NO: 1192275 - RNA, 19 nt, Artificial Sequence
  Description of Artificial Sequence: Synthetic oligonucleotide
  Antisense strand to SEQ ID NO: 1192274
aaaguuccuggaaagccgc

SEQ ID NO: 1192276 - RNA, 19 nt, Artificial Sequence
  Description of Artificial Sequence: Synthetic oligonucleotide
  Sense strand starting at position 2769 of SEQ ID NO: 916893
ccaggaacuuuccaggaau

SEQ ID NO: 1192277 - RNA, 19 nt, Artificial Sequence
  Description of Artificial Sequence: Synthetic oligonucleotide
  Antisense strand to SEQ ID NO: 1192276
auuccuggaaaguuccugg

SEQ ID NO: 1192278 - RNA, 19 nt, Artificial Sequence
  Description of Artificial Sequence: Synthetic oligonucleotide
  Sense strand starting at position 2810 of SEQ ID NO: 916893
ccgcuacugcuuuaaagag

SEQ ID NO: 1192279 - RNA, 19 nt, Artificial Sequence
  Description of Artificial Sequence: Synthetic oligonucleotide
  Antisense strand to SEQ ID NO: 1192278
cucuuuaaagcaguagcgg

SEQ ID NO: 1192280 - RNA, 19 nt, Artificial Sequence
  Description of Artificial Sequence: Synthetic oligonucleotide
  Sense strand starting at position 52 of SEQ ID NO: 916894
uucugaagcucuucuuaag

SEQ ID NO: 1192281 - RNA, 19 nt, Artificial Sequence
  Description of Artificial Sequence: Synthetic oligonucleotide
  Antisense strand to SEQ ID NO: 1192280
cuuaagaagagcuucagaa

SEQ ID NO: 1192282 - RNA, 19 nt, Artificial Sequence
  Description of Artificial Sequence: Synthetic oligonucleotide
  Sense strand starting at position 55 of SEQ ID NO: 916894
ugaagcucuucuuaagauu

SEQ ID NO: 1192283 - RNA, 19 nt, Artificial Sequence
  Description of Artificial Sequence: Synthetic oligonucleotide
  Antisense strand to SEQ ID NO: 1192282
aaucuuaagaagagcuuca

SEQ ID NO: 1192284 - RNA, 19 nt, Artificial Sequence
  Description of Artificial Sequence: Synthetic oligonucleotide
  Sense strand starting at position 117 of SEQ ID NO: 916894
gcugaugaagcaugacacu

SEQ ID NO: 1192285 - RNA, 19 nt, Artificial Sequence
  Description of Artificial Sequence: Synthetic oligonucleotide
  Antisense strand to SEQ ID NO: 1192284
agugucaugcuucaucagc

SEQ ID NO: 1192286 - RNA, 19 nt, Artificial Sequence
  Description of Artificial Sequence: Synthetic oligonucleotide
  Sense strand starting at position 345 of SEQ ID NO: 916894
acagccuucuauguagaaa

SEQ ID NO: 1192287 - RNA, 19 nt, Artificial Sequence
  Description of Artificial Sequence: Synthetic oligonucleotide
  Antisense strand to SEQ ID NO: 1192286
uuucuacauagaaggcugu

SEQ ID NO: 1192288 - RNA, 19 nt, Artificial Sequence
  Description of Artificial Sequence: Synthetic oligonucleotide
  Sense strand starting at position 348 of SEQ ID NO: 916894
gccuucuauguagaaagca

SEQ ID NO: 1192289 - RNA, 19 nt, Artificial Sequence
  Description of Artificial Sequence: Synthetic oligonucleotide
  Antisense strand to SEQ ID NO: 1192288
ugcuuucuacauagaaggc

SEQ ID NO: 1192290 - RNA, 19 nt, Artificial Sequence
  Description of Artificial Sequence: Synthetic oligonucleotide
  Sense strand starting at position 367 of SEQ ID NO: 916894
cugcuauguacuuguugua

SEQ ID NO: 1192291 - RNA, 19 nt, Artificial Sequence
  Description of Artificial Sequence: Synthetic oligonucleotide
  Antisense strand to SEQ ID NO: 1192290
uacaacaaguacauagcag

SEQ ID NO: 1192292 - RNA, 19 nt, Artificial Sequence
  Description of Artificial Sequence: Synthetic oligonucleotide
  Sense strand starting at position 408 of SEQ ID NO: 916894
gcuucuguucgcugcuuua

SEQ ID NO: 1192293 - RNA, 19 nt, Artificial Sequence
  Description of Artificial Sequence: Synthetic oligonucleotide
  Antisense strand to SEQ ID NO: 1192292
uaaagcagcgaacagaagc

SEQ ID NO: 1192294 - RNA, 19 nt, Artificial Sequence
  Description of Artificial Sequence: Synthetic oligonucleotide
  Sense strand starting at position 411 of SEQ ID NO: 916894
ucuguucgcugcuuuauga

SEQ ID NO: 1192295 - RNA, 19 nt, Artificial Sequence
  Description of Artificial Sequence: Synthetic oligonucleotide
  Antisense strand to SEQ ID NO: 1192294
ucauaaagcagcgaacaga

SEQ ID NO: 1192296 - RNA, 19 nt, Artificial Sequence
  Description of Artificial Sequence: Synthetic oligonucleotide
  Sense strand starting at position 592 of SEQ ID NO: 916894
ggcccacucugcuuucuaa

SEQ ID NO: 1192297 - RNA, 19 nt, Artificial Sequence
  Description of Artificial Sequence: Synthetic oligonucleotide
  Antisense strand to SEQ ID NO: 1192296
uuagaaagcagagugggcc

SEQ ID NO: 1192298 - RNA, 19 nt, Artificial Sequence
  Description of Artificial Sequence: Synthetic oligonucleotide
  Sense strand starting at position 599 of SEQ ID NO: 916894
ucugcuuucuaagaaggcu

SEQ ID NO: 1192299 - RNA, 19 nt, Artificial Sequence
  Description of Artificial Sequence: Synthetic oligonucleotide
  Antisense strand to SEQ ID NO: 1192298
agccuucuuagaaagcaga

SEQ ID NO: 1192300 - RNA, 19 nt, Artificial Sequence
  Description of Artificial Sequence: Synthetic oligonucleotide
  Sense strand starting at position 618 of SEQ ID NO: 916894
cagagaccguccguauuua

SEQ ID NO: 1192301 - RNA, 19 nt, Artificial Sequence
  Description of Artificial Sequence: Synthetic oligonucleotide
  Antisense strand to SEQ ID NO: 1192300
uaaauacggacggucucug

SEQ ID NO: 1192302 - RNA, 19 nt, Artificial Sequence
  Description of Artificial Sequence: Synthetic oligonucleotide
  Sense strand starting at position 622 of SEQ ID NO: 916894
gaccguccguauuuaagaa

SEQ ID NO: 1192303 - RNA, 19 nt, Artificial Sequence
  Description of Artificial Sequence: Synthetic oligonucleotide
  Antisense strand to SEQ ID NO: 1192302
uucuuaaauacggacgguc

SEQ ID NO: 1192304 - RNA, 19 nt, Artificial Sequence
  Description of Artificial Sequence: Synthetic oligonucleotide
  Sense strand starting at position 626 of SEQ ID NO: 916894
guccguauuuaagaagucu

SEQ ID NO: 1192305 - RNA, 19 nt, Artificial Sequence
  Description of Artificial Sequence: Synthetic oligonucleotide
  Antisense strand to SEQ ID NO: 1192304
agacuucuuaaauacggac

SEQ ID NO: 1192306 - RNA, 19 nt, Artificial Sequence
  Description of Artificial Sequence: Synthetic oligonucleotide
  Sense strand starting at position 668 of SEQ ID NO: 916894
ccacaauuaccgggauacu

SEQ ID NO: 1192307 - RNA, 19 nt, Artificial Sequence
  Description of Artificial Sequence: Synthetic oligonucleotide
  Antisense strand to SEQ ID NO: 1192306
aguaucccgguaauugugg

SEQ ID NO: 1192308 - RNA, 19 nt, Artificial Sequence
  Description of Artificial Sequence: Synthetic oligonucleotide
  Sense strand starting at position 677 of SEQ ID NO: 916894
ccgggauacuugcaaucug

SEQ ID NO: 1192309 - RNA, 19 nt, Artificial Sequence
  Description of Artificial Sequence: Synthetic oligonucleotide
  Antisense strand to SEQ ID NO: 1192308
cagauugcaaguaucccgg

SEQ ID NO: 1192310 - RNA, 19 nt, Artificial Sequence
  Description of Artificial Sequence: Synthetic oligonucleotide
  Sense strand starting at position 914 of SEQ ID NO: 916894
gcgcgaauugccugacugu

SEQ ID NO: 1192311 - RNA, 19 nt, Artificial Sequence
  Description of Artificial Sequence: Synthetic oligonucleotide
  Antisense strand to SEQ ID NO: 1192310
acagucaggcaauucgcgc

SEQ ID NO: 1192312 - RNA, 19 nt, Artificial Sequence
  Description of Artificial Sequence: Synthetic oligonucleotide
  Sense strand starting at position 915 of SEQ ID NO: 916894
cgcgaauugccugacugua

SEQ ID NO: 1192313 - RNA, 19 nt, Artificial Sequence
  Description of Artificial Sequence: Synthetic oligonucleotide
  Antisense strand to SEQ ID NO: 1192312
uacagucaggcaauucgcg

SEQ ID NO: 1192314 - RNA, 19 nt, Artificial Sequence
  Description of Artificial Sequence: Synthetic oligonucleotide
  Sense strand starting at position 923 of SEQ ID NO: 916894
gccugacuguacuugaaag

SEQ ID NO: 1192315 - RNA, 19 nt, Artificial Sequence
  Description of Artificial Sequence: Synthetic oligonucleotide
  Antisense strand to SEQ ID NO: 1192314
cuuucaaguacagucaggc

SEQ ID NO: 1192316 - RNA, 19 nt, Artificial Sequence
  Description of Artificial Sequence: Synthetic oligonucleotide
  Sense strand starting at position 1033 of SEQ ID NO: 916894
agugucagucccugaacuu

SEQ ID NO: 1192317 - RNA, 19 nt, Artificial Sequence
  Description of Artificial Sequence: Synthetic oligonucleotide
  Antisense strand to SEQ ID NO: 1192316
aaguucagggacugacacu

SEQ ID NO: 1192318 - RNA, 19 nt, Artificial Sequence
  Description of Artificial Sequence: Synthetic oligonucleotide
  Sense strand starting at position 1034 of SEQ ID NO: 916894
gugucagucccugaacuug

SEQ ID NO: 1192319 - RNA, 19 nt, Artificial Sequence
  Description of Artificial Sequence: Synthetic oligonucleotide
  Antisense strand to SEQ ID NO: 1192318
caaguucagggacugacac

SEQ ID NO: 1192320 - RNA, 19 nt, Artificial Sequence
  Description of Artificial Sequence: Synthetic oligonucleotide
  Sense strand starting at position 1229 of SEQ ID NO: 916894
uaaaucuuccagcgugcua

SEQ ID NO: 1192321 - RNA, 19 nt, Artificial Sequence
  Description of Artificial Sequence: Synthetic oligonucleotide
  Antisense strand to SEQ ID NO: 1192320
uagcacgcuggaagauuua

SEQ ID NO: 1192322 - RNA, 19 nt, Artificial Sequence
  Description of Artificial Sequence: Synthetic oligonucleotide
  Sense strand starting at position 1248 of SEQ ID NO: 916894
agaagcuauuuccaagaag

SEQ ID NO: 1192323 - RNA, 19 nt, Artificial Sequence
  Description of Artificial Sequence: Synthetic oligonucleotide
  Antisense strand to SEQ ID NO: 1192322
cuucuuggaaauagcuucu

SEQ ID NO: 1192324 - RNA, 19 nt, Artificial Sequence
  Description of Artificial Sequence: Synthetic oligonucleotide
  Sense strand starting at position 1294 of SEQ ID NO: 916894
gccugagucccuggagaac

SEQ ID NO: 1192325 - RNA, 19 nt, Artificial Sequence
  Description of Artificial Sequence: Synthetic oligonucleotide
  Antisense strand to SEQ ID NO: 1192324
guucuccagggacucaggc

SEQ ID NO: 1192326 - RNA, 19 nt, Artificial Sequence
  Description of Artificial Sequence: Synthetic oligonucleotide
  Sense strand starting at position 2028 of SEQ ID NO: 916894
ccaagauaaaguuggcuga

SEQ ID NO: 1192327 - RNA, 19 nt, Artificial Sequence
  Description of Artificial Sequence: Synthetic oligonucleotide
  Antisense strand to SEQ ID NO: 1192326
ucagccaacuuuaucuugg

SEQ ID NO: 1192328 - RNA, 19 nt, Artificial Sequence
  Description of Artificial Sequence: Synthetic oligonucleotide
  Sense strand starting at position 2031 of SEQ ID NO: 916894
agauaaaguuggcugaaga

SEQ ID NO: 1192329 - RNA, 19 nt, Artificial Sequence
  Description of Artificial Sequence: Synthetic oligonucleotide
  Antisense strand to SEQ ID NO: 1192328
ucuucagccaacuuuaucu

SEQ ID NO: 1192330 - RNA, 19 nt, Artificial Sequence
  Description of Artificial Sequence: Synthetic oligonucleotide
  Sense strand starting at position 2032 of SEQ ID NO: 916894
gauaaaguuggcugaagag

SEQ ID NO: 1192331 - RNA, 19 nt, Artificial Sequence
  Description of Artificial Sequence: Synthetic oligonucleotide
  Antisense strand to SEQ ID NO: 1192330
cucuucagccaacuuuauc

SEQ ID NO: 1192332 - RNA, 19 nt, Artificial Sequence
  Description of Artificial Sequence: Synthetic oligonucleotide
  Sense strand starting at position 2098 of SEQ ID NO: 916894
cagggucacuagcugaaau

SEQ ID NO: 1192333 - RNA, 19 nt, Artificial Sequence
  Description of Artificial Sequence: Synthetic oligonucleotide
  Antisense strand to SEQ ID NO: 1192332
auuucagcuagugacccug

SEQ ID NO: 1192334 - RNA, 19 nt, Artificial Sequence
  Description of Artificial Sequence: Synthetic oligonucleotide
  Sense strand starting at position 2100 of SEQ ID NO: 916894
gggucacuagcugaaauca

SEQ ID NO: 1192335 - RNA, 19 nt, Artificial Sequence
  Description of Artificial Sequence: Synthetic oligonucleotide
  Antisense strand to SEQ ID NO: 1192334
ugauuucagcuagugaccc

SEQ ID NO: 1192336 - RNA, 19 nt, Artificial Sequence
  Description of Artificial Sequence: Synthetic oligonucleotide
  Sense strand starting at position 2153 of SEQ ID NO: 916894
ugcagauccagugggaaua

SEQ ID NO: 1192337 - RNA, 19 nt, Artificial Sequence
  Description of Artificial Sequence: Synthetic oligonucleotide
  Antisense strand to SEQ ID NO: 1192336
uauucccacuggaucugca

SEQ ID NO: 1192338 - RNA, 19 nt, Artificial Sequence
  Description of Artificial Sequence: Synthetic oligonucleotide
  Sense strand starting at position 2166 of SEQ ID NO: 916894
ggaauaggcccuugucaag

SEQ ID NO: 1192339 - RNA, 19 nt, Artificial Sequence
  Description of Artificial Sequence: Synthetic oligonucleotide
  Antisense strand to SEQ ID NO: 1192338
cuugacaagggccuauucc

SEQ ID NO: 1192340 - RNA, 19 nt, Artificial Sequence
  Description of Artificial Sequence: Synthetic oligonucleotide
  Sense strand starting at position 2173 of SEQ ID NO: 916894
gcccuugucaaggacaagu

SEQ ID NO: 1192341 - RNA, 19 nt, Artificial Sequence
  Description of Artificial Sequence: Synthetic oligonucleotide
  Antisense strand to SEQ ID NO: 1192340
acuuguccuugacaagggc

SEQ ID NO: 1192342 - RNA, 19 nt, Artificial Sequence
  Description of Artificial Sequence: Synthetic oligonucleotide
  Sense strand starting at position 3033 of SEQ ID NO: 916894
ucagguuauuaggaggauu

SEQ ID NO: 1192343 - RNA, 19 nt, Artificial Sequence
  Description of Artificial Sequence: Synthetic oligonucleotide
  Antisense strand to SEQ ID NO: 1192342
aauccuccuaauaaccuga

SEQ ID NO: 1192344 - RNA, 19 nt, Artificial Sequence
  Description of Artificial Sequence: Synthetic oligonucleotide
  Sense strand starting at position 3605 of SEQ ID NO: 916894
ggcggcuuuccaggaacuu

SEQ ID NO: 1192345 - RNA, 19 nt, Artificial Sequence
  Description of Artificial Sequence: Synthetic oligonucleotide
  Antisense strand to SEQ ID NO: 1192344
aaguuccuggaaagccgcc

SEQ ID NO: 1192346 - RNA, 19 nt, Artificial Sequence
  Description of Artificial Sequence: Synthetic oligonucleotide
  Sense strand starting at position 3606 of SEQ ID NO: 916894
gcggcuuuccaggaacuuu

SEQ ID NO: 1192347 - RNA, 19 nt, Artificial Sequence
  Description of Artificial Sequence: Synthetic oligonucleotide
  Antisense strand to SEQ ID NO: 1192346
aaaguuccuggaaagccgc

SEQ ID NO: 1192348 - RNA, 19 nt, Artificial Sequence
  Description of Artificial Sequence: Synthetic oligonucleotide
  Sense strand starting at position 3614 of SEQ ID NO: 916894
ccaggaacuuuccaggaau

SEQ ID NO: 1192349 - RNA, 19 nt, Artificial Sequence
  Description of Artificial Sequence: Synthetic oligonucleotide
  Antisense strand to SEQ ID NO: 1192348
auuccuggaaaguuccugg

SEQ ID NO: 1192350 - RNA, 19 nt, Artificial Sequence
  Description of Artificial Sequence: Synthetic oligonucleotide
  Sense strand starting at position 3655 of SEQ ID NO: 916894
ccgcuacugcuuuaaagag

SEQ ID NO: 1192351 - RNA, 19 nt, Artificial Sequence
  Description of Artificial Sequence: Synthetic oligonucleotide
  Antisense strand to SEQ ID NO: 1192350
cucuuuaaagcaguagcgg

SEQ ID NO: 1192352 - RNA, 19 nt, Artificial Sequence
  Description of Artificial Sequence: Synthetic oligonucleotide
  Sense strand starting at position 329 of SEQ ID NO: 916895
ucagguuauuaggaggauu

SEQ ID NO: 1192353 - RNA, 19 nt, Artificial Sequence
  Description of Artificial Sequence: Synthetic oligonucleotide
  Antisense strand to SEQ ID NO: 1192352
aauccuccuaauaaccuga

SEQ ID NO: 1192354 - RNA, 19 nt, Artificial Sequence
  Description of Artificial Sequence: Synthetic oligonucleotide
  Sense strand starting at position 901 of SEQ ID NO: 916895
ggcggcuuuccaggaacuu

SEQ ID NO: 1192355 - RNA, 19 nt, Artificial Sequence
  Description of Artificial Sequence: Synthetic oligonucleotide
  Antisense strand to SEQ ID NO: 1192354
aaguuccuggaaagccgcc

SEQ ID NO: 1192356 - RNA, 19 nt, Artificial Sequence
  Description of Artificial Sequence: Synthetic oligonucleotide
  Sense strand starting at position 902 of SEQ ID NO: 916895
gcggcuuuccaggaacuuu

SEQ ID NO: 1192357 - RNA, 19 nt, Artificial Sequence
  Description of Artificial Sequence: Synthetic oligonucleotide
  Antisense strand to SEQ ID NO: 1192356
aaaguuccuggaaagccgc

SEQ ID NO: 1192358 - RNA, 19 nt, Artificial Sequence
  Description of Artificial Sequence: Synthetic oligonucleotide
  Sense strand starting at position 910 of SEQ ID NO: 916895
ccaggaacuuuccaggaau

SEQ ID NO: 1192359 - RNA, 19 nt, Artificial Sequence
  Description of Artificial Sequence: Synthetic oligonucleotide
  Antisense strand to SEQ ID NO: 1192358
auuccuggaaaguuccugg

SEQ ID NO: 1192360 - RNA, 19 nt, Artificial Sequence
  Description of Artificial Sequence: Synthetic oligonucleotide
  Sense strand starting at position 951 of SEQ ID NO: 916895
ccgcuacugcuuuaaagag

SEQ ID NO: 1192361 - RNA, 19 nt, Artificial Sequence
  Description of Artificial Sequence: Synthetic oligonucleotide
  Antisense strand to SEQ ID NO: 1192360
cucuuuaaagcaguagcgg

SEQ ID NO: 1192362 - RNA, 19 nt, Artificial Sequence
  Description of Artificial Sequence: Synthetic oligonucleotide
  Sense strand starting at position 2169 of SEQ ID NO: 916895
acauaauucuaugcagaug

SEQ ID NO: 1192363 - RNA, 19 nt, Artificial Sequence
  Description of Artificial Sequence: Synthetic oligonucleotide
  Antisense strand to SEQ ID NO: 1192362
caucugcauagaauuaugu

SEQ ID NO: 1192364 - RNA, 19 nt, Artificial Sequence
  Description of Artificial Sequence: Synthetic oligonucleotide
  Sense strand starting at position 2250 of SEQ ID NO: 916895
agccgugugcccuuaauca

SEQ ID NO: 1192365 - RNA, 19 nt, Artificial Sequence
  Description of Artificial Sequence: Synthetic oligonucleotide
  Antisense strand to SEQ ID NO: 1192364
ugauuaagggcacacggcu

SEQ ID NO: 1192366 - RNA, 19 nt, Artificial Sequence
  Description of Artificial Sequence: Synthetic oligonucleotide
  Sense strand starting at position 2260 of SEQ ID NO: 916895
ccuuaaucauguuucguuu

SEQ ID NO: 1192367 - RNA, 19 nt, Artificial Sequence
  Description of Artificial Sequence: Synthetic oligonucleotide
  Antisense strand to SEQ ID NO: 1192366
aaacgaaacaugauuaagg

SEQ ID NO: 1192368 - RNA, 19 nt, Artificial Sequence
  Description of Artificial Sequence: Synthetic oligonucleotide
  Sense strand starting at position 2511 of SEQ ID NO: 916895
cuaugucuacuaggguuaa

SEQ ID NO: 1192369 - RNA, 19 nt, Artificial Sequence
  Description of Artificial Sequence: Synthetic oligonucleotide
  Antisense strand to SEQ ID NO: 1192368
uuaacccuaguagacauag

SEQ ID NO: 1192370 - RNA, 19 nt, Artificial Sequence
  Description of Artificial Sequence: Synthetic oligonucleotide
  Sense strand starting at position 2522 of SEQ ID NO: 916895
aggguuaacugcccucuaa

SEQ ID NO: 1192371 - RNA, 19 nt, Artificial Sequence
  Description of Artificial Sequence: Synthetic oligonucleotide
  Antisense strand to SEQ ID NO: 1192370
uuagagggcaguuaacccu

SEQ ID NO: 1192372 - RNA, 19 nt, Artificial Sequence
  Description of Artificial Sequence: Synthetic oligonucleotide
  Sense strand starting at position 2544 of SEQ ID NO: 916895
guccuaauauggcuucuua

SEQ ID NO: 1192373 - RNA, 19 nt, Artificial Sequence
  Description of Artificial Sequence: Synthetic oligonucleotide
  Antisense strand to SEQ ID NO: 1192372
uaagaagccauauuaggac

SEQ ID NO: 1192374 - RNA, 19 nt, Artificial Sequence
  Description of Artificial Sequence: Synthetic oligonucleotide
  Sense strand starting at position 2556 of SEQ ID NO: 916895
cuucuuauuccuugaugga

SEQ ID NO: 1192375 - RNA, 19 nt, Artificial Sequence
  Description of Artificial Sequence: Synthetic oligonucleotide
  Antisense strand to SEQ ID NO: 1192374
uccaucaaggaauaagaag

SEQ ID NO: 1192376 - RNA, 19 nt, Artificial Sequence
  Description of Artificial Sequence: Synthetic oligonucleotide
  Sense strand starting at position 2559 of SEQ ID NO: 916895
cuuauuccuugauggagaa

SEQ ID NO: 1192377 - RNA, 19 nt, Artificial Sequence
  Description of Artificial Sequence: Synthetic oligonucleotide
  Antisense strand to SEQ ID NO: 1192376
uucuccaucaaggaauaag

SEQ ID NO: 1192378 - RNA, 19 nt, Artificial Sequence
  Description of Artificial Sequence: Synthetic oligonucleotide
  Sense strand starting at position 2560 of SEQ ID NO: 916895
uuauuccuugauggagaau

SEQ ID NO: 1192379 - RNA, 19 nt, Artificial Sequence
  Description of Artificial Sequence: Synthetic oligonucleotide
  Antisense strand to SEQ ID NO: 1192378
auucuccaucaaggaauaa

SEQ ID NO: 1192380 - RNA, 19 nt, Artificial Sequence
  Description of Artificial Sequence: Synthetic oligonucleotide
  Sense strand starting at position 2569 of SEQ ID NO: 916895
gauggagaauccuagagga

SEQ ID NO: 1192381 - RNA, 19 nt, Artificial Sequence
  Description of Artificial Sequence: Synthetic oligonucleotide
  Antisense strand to SEQ ID NO: 1192380
uccucuaggauucuccauc

SEQ ID NO: 1192382 - RNA, 19 nt, Artificial Sequence
  Description of Artificial Sequence: Synthetic oligonucleotide
  Sense strand starting at position 2972 of SEQ ID NO: 916895
acuugauaguggguugaaa

SEQ ID NO: 1192383 - RNA, 19 nt, Artificial Sequence
  Description of Artificial Sequence: Synthetic oligonucleotide
  Antisense strand to SEQ ID NO: 1192382
uuucaacccacuaucaagu

SEQ ID NO: 1192384 - RNA, 19 nt, Artificial Sequence
  Description of Artificial Sequence: Synthetic oligonucleotide
  Sense strand starting at position 2974 of SEQ ID NO: 916895
uugauaguggguugaaaug

SEQ ID NO: 1192385 - RNA, 19 nt, Artificial Sequence
  Description of Artificial Sequence: Synthetic oligonucleotide
  Antisense strand to SEQ ID NO: 1192384
cauuucaacccacuaucaa

SEQ ID NO: 1192386 - RNA, 19 nt, Artificial Sequence
  Description of Artificial Sequence: Synthetic oligonucleotide
  Sense strand starting at position 2980 of SEQ ID NO: 916895
guggguugaaaugaaucuu

SEQ ID NO: 1192387 - RNA, 19 nt, Artificial Sequence
  Description of Artificial Sequence: Synthetic oligonucleotide
  Antisense strand to SEQ ID NO: 1192386
aagauucauuucaacccac

SEQ ID NO: 1192388 - RNA, 19 nt, Artificial Sequence
  Description of Artificial Sequence: Synthetic oligonucleotide
  Sense strand starting at position 2986 of SEQ ID NO: 916895
ugaaaugaaucuuccagca

SEQ ID NO: 1192389 - RNA, 19 nt, Artificial Sequence
  Description of Artificial Sequence: Synthetic oligonucleotide
  Antisense strand to SEQ ID NO: 1192388
ugcuggaagauucauuuca

SEQ ID NO: 1192390 - RNA, 19 nt, Artificial Sequence
  Description of Artificial Sequence: Synthetic oligonucleotide
  Sense strand starting at position 3071 of SEQ ID NO: 916895
cccugauggcugcaucaua

SEQ ID NO: 1192391 - RNA, 19 nt, Artificial Sequence
  Description of Artificial Sequence: Synthetic oligonucleotide
  Antisense strand to SEQ ID NO: 1192390
uaugaugcagccaucaggg

SEQ ID NO: 1192392 - RNA, 19 nt, Artificial Sequence
  Description of Artificial Sequence: Synthetic oligonucleotide
  Sense strand starting at position 3079 of SEQ ID NO: 916895
gcugcaucauacuugauua

SEQ ID NO: 1192393 - RNA, 19 nt, Artificial Sequence
  Description of Artificial Sequence: Synthetic oligonucleotide
  Antisense strand to SEQ ID NO: 1192392
uaaucaaguaugaugcagc

SEQ ID NO: 1192394 - RNA, 19 nt, Artificial Sequence
  Description of Artificial Sequence: Synthetic oligonucleotide
  Sense strand starting at position 3391 of SEQ ID NO: 916895
cugcucuguucuuugauca

SEQ ID NO: 1192395 - RNA, 19 nt, Artificial Sequence
  Description of Artificial Sequence: Synthetic oligonucleotide
  Antisense strand to SEQ ID NO: 1192394
ugaucaaagaacagagcag

SEQ ID NO: 1192396 - RNA, 19 nt, Artificial Sequence
  Description of Artificial Sequence: Synthetic oligonucleotide
  Sense strand starting at position 3398 of SEQ ID NO: 916895
guucuuugaucacucuguu

SEQ ID NO: 1192397 - RNA, 19 nt, Artificial Sequence
  Description of Artificial Sequence: Synthetic oligonucleotide
  Antisense strand to SEQ ID NO: 1192396
aacagagugaucaaagaac

SEQ ID NO: 1192398 - RNA, 19 nt, Artificial Sequence
  Description of Artificial Sequence: Synthetic oligonucleotide
  Sense strand starting at position 3517 of SEQ ID NO: 916895
uuuagauagcugcaagguu

SEQ ID NO: 1192399 - RNA, 19 nt, Artificial Sequence
  Description of Artificial Sequence: Synthetic oligonucleotide
  Antisense strand to SEQ ID NO: 1192398
aaccuugcagcuaucuaaa

SEQ ID NO: 1192400 - RNA, 19 nt, Artificial Sequence
  Description of Artificial Sequence: Synthetic oligonucleotide
  Sense strand starting at position 3568 of SEQ ID NO: 916895
gccgcuuucuuagugagac

SEQ ID NO: 1192401 - RNA, 19 nt, Artificial Sequence
  Description of Artificial Sequence: Synthetic oligonucleotide
  Antisense strand to SEQ ID NO: 1192400
gucucacuaagaaagcggc

SEQ ID NO: 1192402 - RNA, 19 nt, Artificial Sequence
  Description of Artificial Sequence: Synthetic oligonucleotide
  Sense strand starting at position 3570 of SEQ ID NO: 916895
cgcuuucuuagugagaccu

SEQ ID NO: 1192403 - RNA, 19 nt, Artificial Sequence
  Description of Artificial Sequence: Synthetic oligonucleotide
  Antisense strand to SEQ ID NO: 1192402
aggucucacuaagaaagcg

SEQ ID NO: 1192404 - RNA, 19 nt, Artificial Sequence
  Description of Artificial Sequence: Synthetic oligonucleotide
  Sense strand starting at position 3591 of SEQ ID NO: 916895
ccuguuggcucacucagaa

SEQ ID NO: 1192405 - RNA, 19 nt, Artificial Sequence
  Description of Artificial Sequence: Synthetic oligonucleotide
  Antisense strand to SEQ ID NO: 1192404
uucugagugagccaacagg

SEQ ID NO: 1192406 - RNA, 19 nt, Artificial Sequence
  Description of Artificial Sequence: Synthetic oligonucleotide
  Sense strand starting at position 3595 of SEQ ID NO: 916895
uuggcucacucagaauuga

SEQ ID NO: 1192407 - RNA, 19 nt, Artificial Sequence
  Description of Artificial Sequence: Synthetic oligonucleotide
  Antisense strand to SEQ ID NO: 1192406
ucaauucugagugagccaa

SEQ ID NO: 1192408 - RNA, 19 nt, Artificial Sequence
  Description of Artificial Sequence: Synthetic oligonucleotide
  Sense strand starting at position 3731 of SEQ ID NO: 916895
auguauuuguacuugcauu

SEQ ID NO: 1192409 - RNA, 19 nt, Artificial Sequence
  Description of Artificial Sequence: Synthetic oligonucleotide
  Antisense strand to SEQ ID NO: 1192408
aaugcaaguacaaauacau

SEQ ID NO: 1192410 - RNA, 19 nt, Artificial Sequence
  Description of Artificial Sequence: Synthetic oligonucleotide
  Sense strand starting at position 3774 of SEQ ID NO: 916895
ugaacauaguucuuagcau

SEQ ID NO: 1192411 - RNA, 19 nt, Artificial Sequence
  Description of Artificial Sequence: Synthetic oligonucleotide
  Antisense strand to SEQ ID NO: 1192410
augcuaagaacuauguuca

SEQ ID NO: 1192412 - RNA, 19 nt, Artificial Sequence
  Description of Artificial Sequence: Synthetic oligonucleotide
  Sense strand starting at position 3780 of SEQ ID NO: 916895
uaguucuuagcauguagua

SEQ ID NO: 1192413 - RNA, 19 nt, Artificial Sequence
  Description of Artificial Sequence: Synthetic oligonucleotide
  Antisense strand to SEQ ID NO: 1192412
uacuacaugcuaagaacua

SEQ ID NO: 1192414 - RNA, 19 nt, Artificial Sequence
  Description of Artificial Sequence: Synthetic oligonucleotide
  Sense strand starting at position 3796 of SEQ ID NO: 916895
guaggcauccaauauaauc

SEQ ID NO: 1192415 - RNA, 19 nt, Artificial Sequence
  Description of Artificial Sequence: Synthetic oligonucleotide
  Antisense strand to SEQ ID NO: 1192414
gauuauauuggaugccuac

SEQ ID NO: 1192416 - RNA, 19 nt, Artificial Sequence
  Description of Artificial Sequence: Synthetic oligonucleotide
  Sense strand starting at position 3868 of SEQ ID NO: 916895
gcaccauggcuuuaaaguu

SEQ ID NO: 1192417 - RNA, 19 nt, Artificial Sequence
  Description of Artificial Sequence: Synthetic oligonucleotide
  Antisense strand to SEQ ID NO: 1192416
aacuuuaaagccauggugc

SEQ ID NO: 1192418 - RNA, 19 nt, Artificial Sequence
  Description of Artificial Sequence: Synthetic oligonucleotide
  Sense strand starting at position 3882 of SEQ ID NO: 916895
aaguuaagcuguccaggua

SEQ ID NO: 1192419 - RNA, 19 nt, Artificial Sequence
  Description of Artificial Sequence: Synthetic oligonucleotide
  Antisense strand to SEQ ID NO: 1192418
uaccuggacagcuuaacuu

SEQ ID NO: 1192420 - RNA, 19 nt, Artificial Sequence
  Description of Artificial Sequence: Synthetic oligonucleotide
  Sense strand starting at position 3883 of SEQ ID NO: 916895
aguuaagcuguccagguau

SEQ ID NO: 1192421 - RNA, 19 nt, Artificial Sequence
  Description of Artificial Sequence: Synthetic oligonucleotide
  Antisense strand to SEQ ID NO: 1192420
auaccuggacagcuuaacu

SEQ ID NO: 1192422 - RNA, 19 nt, Artificial Sequence
  Description of Artificial Sequence: Synthetic oligonucleotide
  Sense strand starting at position 3885 of SEQ ID NO: 916895
uuaagcuguccagguauga

SEQ ID NO: 1192423 - RNA, 19 nt, Artificial Sequence
  Description of Artificial Sequence: Synthetic oligonucleotide
  Antisense strand to SEQ ID NO: 1192422
ucauaccuggacagcuuaa

SEQ ID NO: 1192424 - RNA, 19 nt, Artificial Sequence
  Description of Artificial Sequence: Synthetic oligonucleotide
  Sense strand starting at position 3896 of SEQ ID NO: 916895
agguaugaauccucacucu

SEQ ID NO: 1192425 - RNA, 19 nt, Artificial Sequence
  Description of Artificial Sequence: Synthetic oligonucleotide
  Antisense strand to SEQ ID NO: 1192424
agagugaggauucauaccu

SEQ ID NO: 1192426 - RNA, 19 nt, Artificial Sequence
  Description of Artificial Sequence: Synthetic oligonucleotide
  Sense strand starting at position 3930 of SEQ ID NO: 916895
auaugugaucuuuggcaau

SEQ ID NO: 1192427 - RNA, 19 nt, Artificial Sequence
  Description of Artificial Sequence: Synthetic oligonucleotide
  Antisense strand to SEQ ID NO: 1192426
auugccaaagaucacauau

SEQ ID NO: 1192428 - RNA, 19 nt, Artificial Sequence
  Description of Artificial Sequence: Synthetic oligonucleotide
  Sense strand starting at position 3954 of SEQ ID NO: 916895
uagccucuucuggagauga

SEQ ID NO: 1192429 - RNA, 19 nt, Artificial Sequence
  Description of Artificial Sequence: Synthetic oligonucleotide
  Antisense strand to SEQ ID NO: 1192428
ucaucuccagaagaggcua

SEQ ID NO: 1192430 - RNA, 19 nt, Artificial Sequence
  Description of Artificial Sequence: Synthetic oligonucleotide
  Sense strand starting at position 3956 of SEQ ID NO: 916895
gccucuucuggagaugauc

SEQ ID NO: 1192431 - RNA, 19 nt, Artificial Sequence
  Description of Artificial Sequence: Synthetic oligonucleotide
  Antisense strand to SEQ ID NO: 1192430
gaucaucuccagaagaggc

SEQ ID NO: 1192432 - RNA, 19 nt, Artificial Sequence
  Description of Artificial Sequence: Synthetic oligonucleotide
  Sense strand starting at position 46 of SEQ ID NO: 916896
aaaucauuguggcugaauu

SEQ ID NO: 1192433 - RNA, 19 nt, Artificial Sequence
  Description of Artificial Sequence: Synthetic oligonucleotide
  Antisense strand to SEQ ID NO: 1192432
aauucagccacaaugauuu

SEQ ID NO: 1192434 - RNA, 19 nt, Artificial Sequence
  Description of Artificial Sequence: Synthetic oligonucleotide
  Sense strand starting at position 114 of SEQ ID NO: 916896
cuagaaacuuuguuccaug

SEQ ID NO: 1192435 - RNA, 19 nt, Artificial Sequence
  Description of Artificial Sequence: Synthetic oligonucleotide
  Antisense strand to SEQ ID NO: 1192434
cauggaacaaaguuucuag

SEQ ID NO: 1192436 - RNA, 19 nt, Artificial Sequence
  Description of Artificial Sequence: Synthetic oligonucleotide
  Sense strand starting at position 349 of SEQ ID NO: 916896
gccucacucccguaauccu

SEQ ID NO: 1192437 - RNA, 19 nt, Artificial Sequence
  Description of Artificial Sequence: Synthetic oligonucleotide
  Antisense strand to SEQ ID NO: 1192436
aggauuacgggagugaggc

SEQ ID NO: 1192438 - RNA, 19 nt, Artificial Sequence
  Description of Artificial Sequence: Synthetic oligonucleotide
  Sense strand starting at position 356 of SEQ ID NO: 916896
ucccguaauccugaucaaa

SEQ ID NO: 1192439 - RNA, 19 nt, Artificial Sequence
  Description of Artificial Sequence: Synthetic oligonucleotide
  Antisense strand to SEQ ID NO: 1192438
uuugaucaggauuacggga

SEQ ID NO: 1192440 - RNA, 19 nt, Artificial Sequence
  Description of Artificial Sequence: Synthetic oligonucleotide
  Sense strand starting at position 398 of SEQ ID NO: 916896
ggaaauguccauugccuac

SEQ ID NO: 1192441 - RNA, 19 nt, Artificial Sequence
  Description of Artificial Sequence: Synthetic oligonucleotide
  Antisense strand to SEQ ID NO: 1192440
guaggcaauggacauuucc

SEQ ID NO: 1192442 - RNA, 19 nt, Artificial Sequence
  Description of Artificial Sequence: Synthetic oligonucleotide
  Sense strand starting at position 648 of SEQ ID NO: 916896
gacaaaguccuuuggcuau

SEQ ID NO: 1192443 - RNA, 19 nt, Artificial Sequence
  Description of Artificial Sequence: Synthetic oligonucleotide
  Antisense strand to SEQ ID NO: 1192442
auagccaaaggacuuuguc

SEQ ID NO: 1192444 - RNA, 19 nt, Artificial Sequence
  Description of Artificial Sequence: Synthetic oligonucleotide
  Sense strand starting at position 660 of SEQ ID NO: 916896
uggcuaucuggguauguga

SEQ ID NO: 1192445 - RNA, 19 nt, Artificial Sequence
  Description of Artificial Sequence: Synthetic oligonucleotide
  Antisense strand to SEQ ID NO: 1192444
ucacauacccagauagcca

SEQ ID NO: 1192446 - RNA, 19 nt, Artificial Sequence
  Description of Artificial Sequence: Synthetic oligonucleotide
  Sense strand starting at position 790 of SEQ ID NO: 916896
caggauuccucgucuugac

SEQ ID NO: 1192447 - RNA, 19 nt, Artificial Sequence
  Description of Artificial Sequence: Synthetic oligonucleotide
  Antisense strand to SEQ ID NO: 1192446
gucaagacgaggaauccug

SEQ ID NO: 1192448 - RNA, 19 nt, Artificial Sequence
  Description of Artificial Sequence: Synthetic oligonucleotide
  Sense strand starting at position 807 of SEQ ID NO: 916896
accugcuuuagcugagaag

SEQ ID NO: 1192449 - RNA, 19 nt, Artificial Sequence
  Description of Artificial Sequence: Synthetic oligonucleotide
  Antisense strand to SEQ ID NO: 1192448
cuucucagcuaaagcaggu

SEQ ID NO: 1192450 - RNA, 19 nt, Artificial Sequence
  Description of Artificial Sequence: Synthetic oligonucleotide
  Sense strand starting at position 865 of SEQ ID NO: 916896
ugaauuuagucacagaaac

SEQ ID NO: 1192451 - RNA, 19 nt, Artificial Sequence
  Description of Artificial Sequence: Synthetic oligonucleotide
  Antisense strand to SEQ ID NO: 1192450
guuucugugacuaaauuca

SEQ ID NO: 1192452 - RNA, 19 nt, Artificial Sequence
  Description of Artificial Sequence: Synthetic oligonucleotide
  Sense strand starting at position 984 of SEQ ID NO: 916896
ugugcauccgaucaauacu

SEQ ID NO: 1192453 - RNA, 19 nt, Artificial Sequence
  Description of Artificial Sequence: Synthetic oligonucleotide
  Antisense strand to SEQ ID NO: 1192452
aguauugaucggaugcaca

SEQ ID NO: 1192454 - RNA, 19 nt, Artificial Sequence
  Description of Artificial Sequence: Synthetic oligonucleotide
  Sense strand starting at position 987 of SEQ ID NO: 916896
gcauccgaucaauacucaa

SEQ ID NO: 1192455 - RNA, 19 nt, Artificial Sequence
  Description of Artificial Sequence: Synthetic oligonucleotide
  Antisense strand to SEQ ID NO: 1192454
uugaguauugaucggaugc

SEQ ID NO: 1192456 - RNA, 19 nt, Artificial Sequence
  Description of Artificial Sequence: Synthetic oligonucleotide
  Sense strand starting at position 1211 of SEQ ID NO: 916896
agcuuccggucucugaaau

SEQ ID NO: 1192457 - RNA, 19 nt, Artificial Sequence
  Description of Artificial Sequence: Synthetic oligonucleotide
  Antisense strand to SEQ ID NO: 1192456
auuucagagaccggaagcu

SEQ ID NO: 1192458 - RNA, 19 nt, Artificial Sequence
  Description of Artificial Sequence: Synthetic oligonucleotide
  Sense strand starting at position 1245 of SEQ ID NO: 916896
ggaugagacuuguuucaga

SEQ ID NO: 1192459 - RNA, 19 nt, Artificial Sequence
  Description of Artificial Sequence: Synthetic oligonucleotide
  Antisense strand to SEQ ID NO: 1192458
ucugaaacaagucucaucc

SEQ ID NO: 1192460 - RNA, 19 nt, Artificial Sequence
  Description of Artificial Sequence: Synthetic oligonucleotide
  Sense strand starting at position 1377 of SEQ ID NO: 916896
ucgcucugauauccuagaa

SEQ ID NO: 1192461 - RNA, 19 nt, Artificial Sequence
  Description of Artificial Sequence: Synthetic oligonucleotide
  Antisense strand to SEQ ID NO: 1192460
uucuaggauaucagagcga

SEQ ID NO: 1192462 - RNA, 19 nt, Artificial Sequence
  Description of Artificial Sequence: Synthetic oligonucleotide
  Sense strand starting at position 1423 of SEQ ID NO: 916896
gggucuggccuuggacauu

SEQ ID NO: 1192463 - RNA, 19 nt, Artificial Sequence
  Description of Artificial Sequence: Synthetic oligonucleotide
  Antisense strand to SEQ ID NO: 1192462
aauguccaaggccagaccc

SEQ ID NO: 1192464 - RNA, 19 nt, Artificial Sequence
  Description of Artificial Sequence: Synthetic oligonucleotide
  Sense strand starting at position 2129 of SEQ ID NO: 916896
gugaaaucccuuugcuggu

SEQ ID NO: 1192465 - RNA, 19 nt, Artificial Sequence
  Description of Artificial Sequence: Synthetic oligonucleotide
  Antisense strand to SEQ ID NO: 1192464
accagcaaagggauuucac

SEQ ID NO: 1192466 - RNA, 19 nt, Artificial Sequence
  Description of Artificial Sequence: Synthetic oligonucleotide
  Sense strand starting at position 2173 of SEQ ID NO: 916896
acacaaugcgagugcaaau

SEQ ID NO: 1192467 - RNA, 19 nt, Artificial Sequence
  Description of Artificial Sequence: Synthetic oligonucleotide
  Antisense strand to SEQ ID NO: 1192466
auuugcacucgcauugugu

SEQ ID NO: 1192468 - RNA, 19 nt, Artificial Sequence
  Description of Artificial Sequence: Synthetic oligonucleotide
  Sense strand starting at position 2454 of SEQ ID NO: 916896
gcugcagaguaacuagauu

SEQ ID NO: 1192469 - RNA, 19 nt, Artificial Sequence
  Description of Artificial Sequence: Synthetic oligonucleotide
  Antisense strand to SEQ ID NO: 1192468
aaucuaguuacucugcagc

SEQ ID NO: 1192470 - RNA, 19 nt, Artificial Sequence
  Description of Artificial Sequence: Synthetic oligonucleotide
  Sense strand starting at position 2460 of SEQ ID NO: 916896
gaguaacuagauuguaaau

SEQ ID NO: 1192471 - RNA, 19 nt, Artificial Sequence
  Description of Artificial Sequence: Synthetic oligonucleotide
  Antisense strand to SEQ ID NO: 1192470
auuuacaaucuaguuacuc

SEQ ID NO: 1192472 - RNA, 19 nt, Artificial Sequence
  Description of Artificial Sequence: Synthetic oligonucleotide
  Sense strand starting at position 2529 of SEQ ID NO: 916896
cacuuaaaggagcgauaaa

SEQ ID NO: 1192473 - RNA, 19 nt, Artificial Sequence
  Description of Artificial Sequence: Synthetic oligonucleotide
  Antisense strand to SEQ ID NO: 1192472
uuuaucgcuccuuuaagug

SEQ ID NO: 1192474 - RNA, 19 nt, Artificial Sequence
  Description of Artificial Sequence: Synthetic oligonucleotide
  Sense strand starting at position 2582 of SEQ ID NO: 916896
gcgggauaucucuagaucu

SEQ ID NO: 1192475 - RNA, 19 nt, Artificial Sequence
  Description of Artificial Sequence: Synthetic oligonucleotide
  Antisense strand to SEQ ID NO: 1192474
agaucuagagauaucccgc

SEQ ID NO: 1192476 - RNA, 19 nt, Artificial Sequence
  Description of Artificial Sequence: Synthetic oligonucleotide
  Sense strand starting at position 2592 of SEQ ID NO: 916896
ucuagaucucgauggagcu

SEQ ID NO: 1192477 - RNA, 19 nt, Artificial Sequence
  Description of Artificial Sequence: Synthetic oligonucleotide
  Antisense strand to SEQ ID NO: 1192476
agcuccaucgagaucuaga

SEQ ID NO: 1192478 - RNA, 19 nt, Artificial Sequence
  Description of Artificial Sequence: Synthetic oligonucleotide
  Sense strand starting at position 2605 of SEQ ID NO: 916896
ggagcucgcaucuauaaau

SEQ ID NO: 1192479 - RNA, 19 nt, Artificial Sequence
  Description of Artificial Sequence: Synthetic oligonucleotide
  Antisense strand to SEQ ID NO: 1192478
auuuauagaugcgagcucc

SEQ ID NO: 1192480 - RNA, 19 nt, Artificial Sequence
  Description of Artificial Sequence: Synthetic oligonucleotide
  Sense strand starting at position 2923 of SEQ ID NO: 916896
ccaccuacuccucggagau

SEQ ID NO: 1192481 - RNA, 19 nt, Artificial Sequence
  Description of Artificial Sequence: Synthetic oligonucleotide
  Antisense strand to SEQ ID NO: 1192480
aucuccgaggaguaggugg

SEQ ID NO: 1192482 - RNA, 19 nt, Artificial Sequence
  Description of Artificial Sequence: Synthetic oligonucleotide
  Sense strand starting at position 2924 of SEQ ID NO: 916896
caccuacuccucggagauu

SEQ ID NO: 1192483 - RNA, 19 nt, Artificial Sequence
  Description of Artificial Sequence: Synthetic oligonucleotide
  Antisense strand to SEQ ID NO: 1192482
aaucuccgaggaguaggug

SEQ ID NO: 1192484 - RNA, 19 nt, Artificial Sequence
  Description of Artificial Sequence: Synthetic oligonucleotide
  Sense strand starting at position 3135 of SEQ ID NO: 916896
uagugauauuuagggagaa

SEQ ID NO: 1192485 - RNA, 19 nt, Artificial Sequence
  Description of Artificial Sequence: Synthetic oligonucleotide
  Antisense strand to SEQ ID NO: 1192484
uucucccuaaauaucacua

SEQ ID NO: 1192486 - RNA, 19 nt, Artificial Sequence
  Description of Artificial Sequence: Synthetic oligonucleotide
  Sense strand starting at position 3248 of SEQ ID NO: 916896
aagaaacuccgucggugau

SEQ ID NO: 1192487 - RNA, 19 nt, Artificial Sequence
  Description of Artificial Sequence: Synthetic oligonucleotide
  Antisense strand to SEQ ID NO: 1192486
aucaccgacggaguuucuu

SEQ ID NO: 1192488 - RNA, 19 nt, Artificial Sequence
  Description of Artificial Sequence: Synthetic oligonucleotide
  Sense strand starting at position 3260 of SEQ ID NO: 916896
cggugaugcccugagcaga

SEQ ID NO: 1192489 - RNA, 19 nt, Artificial Sequence
  Description of Artificial Sequence: Synthetic oligonucleotide
  Antisense strand to SEQ ID NO: 1192488
ucugcucagggcaucaccg

SEQ ID NO: 1192490 - RNA, 19 nt, Artificial Sequence
  Description of Artificial Sequence: Synthetic oligonucleotide
  Sense strand starting at position 3292 of SEQ ID NO: 916896
auuuaagugugugcucuga

SEQ ID NO: 1192491 - RNA, 19 nt, Artificial Sequence
  Description of Artificial Sequence: Synthetic oligonucleotide
  Antisense strand to SEQ ID NO: 1192490
ucagagcacacacuuaaau

SEQ ID NO: 1192492 - RNA, 19 nt, Artificial Sequence
  Description of Artificial Sequence: Synthetic oligonucleotide
  Sense strand starting at position 3294 of SEQ ID NO: 916896
uuaagugugugcucugaca

SEQ ID NO: 1192493 - RNA, 19 nt, Artificial Sequence
  Description of Artificial Sequence: Synthetic oligonucleotide
  Antisense strand to SEQ ID NO: 1192492
ugucagagcacacacuuaa

SEQ ID NO: 1192494 - RNA, 19 nt, Artificial Sequence
  Description of Artificial Sequence: Synthetic oligonucleotide
  Sense strand starting at position 3435 of SEQ ID NO: 916896
gguuccugacagugaucuu

SEQ ID NO: 1192495 - RNA, 19 nt, Artificial Sequence
  Description of Artificial Sequence: Synthetic oligonucleotide
  Antisense strand to SEQ ID NO: 1192494
aagaucacugucaggaacc

SEQ ID NO: 1192496 - RNA, 19 nt, Artificial Sequence
  Description of Artificial Sequence: Synthetic oligonucleotide
  Sense strand starting at position 3446 of SEQ ID NO: 916896
gugaucuucccagagcuag

SEQ ID NO: 1192497 - RNA, 19 nt, Artificial Sequence
  Description of Artificial Sequence: Synthetic oligonucleotide
  Antisense strand to SEQ ID NO: 1192496
cuagcucugggaagaucac

SEQ ID NO: 1192498 - RNA, 19 nt, Artificial Sequence
  Description of Artificial Sequence: Synthetic oligonucleotide
  Sense strand starting at position 3456 of SEQ ID NO: 916896
cagagcuaguguccagaaa

SEQ ID NO: 1192499 - RNA, 19 nt, Artificial Sequence
  Description of Artificial Sequence: Synthetic oligonucleotide
  Antisense strand to SEQ ID NO: 1192498
uuucuggacacuagcucug

SEQ ID NO: 1192500 - RNA, 19 nt, Artificial Sequence
  Description of Artificial Sequence: Synthetic oligonucleotide
  Sense strand starting at position 3636 of SEQ ID NO: 916896
cucuguaauucucugcaga

SEQ ID NO: 1192501 - RNA, 19 nt, Artificial Sequence
  Description of Artificial Sequence: Synthetic oligonucleotide
  Antisense strand to SEQ ID NO: 1192500
ucugcagagaauuacagag

SEQ ID NO: 1192502 - RNA, 19 nt, Artificial Sequence
  Description of Artificial Sequence: Synthetic oligonucleotide
  Sense strand starting at position 3637 of SEQ ID NO: 916896
ucuguaauucucugcagac

SEQ ID NO: 1192503 - RNA, 19 nt, Artificial Sequence
  Description of Artificial Sequence: Synthetic oligonucleotide
  Antisense strand to SEQ ID NO: 1192502
gucugcagagaauuacaga

SEQ ID NO: 1192504 - RNA, 19 nt, Artificial Sequence
  Description of Artificial Sequence: Synthetic oligonucleotide
  Sense strand starting at position 3693 of SEQ ID NO: 916896
cagcauuacccagagugca

SEQ ID NO: 1192505 - RNA, 19 nt, Artificial Sequence
  Description of Artificial Sequence: Synthetic oligonucleotide
  Antisense strand to SEQ ID NO: 1192504
ugcacucuggguaaugcug

SEQ ID NO: 1192506 - RNA, 19 nt, Artificial Sequence
  Description of Artificial Sequence: Synthetic oligonucleotide
  Sense strand starting at position 3847 of SEQ ID NO: 916896
cugauuucuaaacggcagu

SEQ ID NO: 1192507 - RNA, 19 nt, Artificial Sequence
  Description of Artificial Sequence: Synthetic oligonucleotide
  Antisense strand to SEQ ID NO: 1192506
acugccguuuagaaaucag

SEQ ID NO: 1192508 - RNA, 19 nt, Artificial Sequence
  Description of Artificial Sequence: Synthetic oligonucleotide
  Sense strand starting at position 3848 of SEQ ID NO: 916896
ugauuucuaaacggcaguu

SEQ ID NO: 1192509 - RNA, 19 nt, Artificial Sequence
  Description of Artificial Sequence: Synthetic oligonucleotide
  Antisense strand to SEQ ID NO: 1192508
aacugccguuuagaaauca

SEQ ID NO: 1192510 - RNA, 19 nt, Artificial Sequence
  Description of Artificial Sequence: Synthetic oligonucleotide
  Sense strand starting at position 3953 of SEQ ID NO: 916896
uuuccacccuugguagauu

SEQ ID NO: 1192511 - RNA, 19 nt, Artificial Sequence
  Description of Artificial Sequence: Synthetic oligonucleotide
  Antisense strand to SEQ ID NO: 1192510
aaucuaccaaggguggaaa

SEQ ID NO: 1192512 - RNA, 19 nt, Artificial Sequence
  Description of Artificial Sequence: Synthetic oligonucleotide
  Sense strand starting at position 30 of SEQ ID NO: 916897
ggucaugugcuuuacugag

SEQ ID NO: 1192513 - RNA, 19 nt, Artificial Sequence
  Description of Artificial Sequence: Synthetic oligonucleotide
  Antisense strand to SEQ ID NO: 1192512
cucaguaaagcacaugacc

SEQ ID NO: 1192514 - RNA, 19 nt, Artificial Sequence
  Description of Artificial Sequence: Synthetic oligonucleotide
  Sense strand starting at position 96 of SEQ ID NO: 916897
cguuuaaagcaccacuaaa

SEQ ID NO: 1192515 - RNA, 19 nt, Artificial Sequence
  Description of Artificial Sequence: Synthetic oligonucleotide
  Antisense strand to SEQ ID NO: 1192514
uuuaguggugcuuuaaacg

SEQ ID NO: 1192516 - RNA, 19 nt, Artificial Sequence
  Description of Artificial Sequence: Synthetic oligonucleotide
  Sense strand starting at position 160 of SEQ ID NO: 916897
ugguaacauucugcacaaa

SEQ ID NO: 1192517 - RNA, 19 nt, Artificial Sequence
  Description of Artificial Sequence: Synthetic oligonucleotide
  Antisense strand to SEQ ID NO: 1192516
uuugugcagaauguuacca

SEQ ID NO: 1192518 - RNA, 19 nt, Artificial Sequence
  Description of Artificial Sequence: Synthetic oligonucleotide
  Sense strand starting at position 301 of SEQ ID NO: 916897
uguuauaggacgcaaccua

SEQ ID NO: 1192519 - RNA, 19 nt, Artificial Sequence
  Description of Artificial Sequence: Synthetic oligonucleotide
  Antisense strand to SEQ ID NO: 1192518
uagguugcguccuauaaca

SEQ ID NO: 1192520 - RNA, 19 nt, Artificial Sequence
  Description of Artificial Sequence: Synthetic oligonucleotide
  Sense strand starting at position 328 of SEQ ID NO: 916897
agcagaaaucucggagacu

SEQ ID NO: 1192521 - RNA, 19 nt, Artificial Sequence
  Description of Artificial Sequence: Synthetic oligonucleotide
  Antisense strand to SEQ ID NO: 1192520
agucuccgagauuucugcu

SEQ ID NO: 1192522 - RNA, 19 nt, Artificial Sequence
  Description of Artificial Sequence: Synthetic oligonucleotide
  Sense strand starting at position 337 of SEQ ID NO: 916897
cucggagacuuugcaaauc

SEQ ID NO: 1192523 - RNA, 19 nt, Artificial Sequence
  Description of Artificial Sequence: Synthetic oligonucleotide
  Antisense strand to SEQ ID NO: 1192522
gauuugcaaagucuccgag

SEQ ID NO: 1192524 - RNA, 19 nt, Artificial Sequence
  Description of Artificial Sequence: Synthetic oligonucleotide
  Sense strand starting at position 417 of SEQ ID NO: 916897
gcuaaaggcuucucuaaca

SEQ ID NO: 1192525 - RNA, 19 nt, Artificial Sequence
  Description of Artificial Sequence: Synthetic oligonucleotide
  Antisense strand to SEQ ID NO: 1192524
uguuagagaagccuuuagc

SEQ ID NO: 1192526 - RNA, 19 nt, Artificial Sequence
  Description of Artificial Sequence: Synthetic oligonucleotide
  Sense strand starting at position 545 of SEQ ID NO: 916897
gagguaaaucagggucagu

SEQ ID NO: 1192527 - RNA, 19 nt, Artificial Sequence
  Description of Artificial Sequence: Synthetic oligonucleotide
  Antisense strand to SEQ ID NO: 1192526
acugacccugauuuaccuc

SEQ ID NO: 1192528 - RNA, 19 nt, Artificial Sequence
  Description of Artificial Sequence: Synthetic oligonucleotide
  Sense strand starting at position 609 of SEQ ID NO: 916897
uaugaucgucuccaacuga

SEQ ID NO: 1192529 - RNA, 19 nt, Artificial Sequence
  Description of Artificial Sequence: Synthetic oligonucleotide
  Antisense strand to SEQ ID NO: 1192528
ucaguuggagacgaucaua

SEQ ID NO: 1192530 - RNA, 19 nt, Artificial Sequence
  Description of Artificial Sequence: Synthetic oligonucleotide
  Sense strand starting at position 629 of SEQ ID NO: 916897
ccugucaagugaguccaaa

SEQ ID NO: 1192531 - RNA, 19 nt, Artificial Sequence
  Description of Artificial Sequence: Synthetic oligonucleotide
  Antisense strand to SEQ ID NO: 1192530
uuuggacucacuugacagg

SEQ ID NO: 1192532 - RNA, 19 nt, Artificial Sequence
  Description of Artificial Sequence: Synthetic oligonucleotide
  Sense strand starting at position 883 of SEQ ID NO: 916897
gcugcaaggcucuagacaa

SEQ ID NO: 1192533 - RNA, 19 nt, Artificial Sequence
  Description of Artificial Sequence: Synthetic oligonucleotide
  Antisense strand to SEQ ID NO: 1192532
uugucuagagccuugcagc

SEQ ID NO: 1192534 - RNA, 19 nt, Artificial Sequence
  Description of Artificial Sequence: Synthetic oligonucleotide
  Sense strand starting at position 938 of SEQ ID NO: 916897
ucuagacaucacugaaugu

SEQ ID NO: 1192535 - RNA, 19 nt, Artificial Sequence
  Description of Artificial Sequence: Synthetic oligonucleotide
  Antisense strand to SEQ ID NO: 1192534
acauucagugaugucuaga

SEQ ID NO: 1192536 - RNA, 19 nt, Artificial Sequence
  Description of Artificial Sequence: Synthetic oligonucleotide
  Sense strand starting at position 1029 of SEQ ID NO: 916897
cacgcagaacaguaugauu

SEQ ID NO: 1192537 - RNA, 19 nt, Artificial Sequence
  Description of Artificial Sequence: Synthetic oligonucleotide
  Antisense strand to SEQ ID NO: 1192536
aaucauacuguucugcgug

SEQ ID NO: 1192538 - RNA, 19 nt, Artificial Sequence
  Description of Artificial Sequence: Synthetic oligonucleotide
  Sense strand starting at position 1091 of SEQ ID NO: 916897
auaacagaagcucgauuaa

SEQ ID NO: 1192539 - RNA, 19 nt, Artificial Sequence
  Description of Artificial Sequence: Synthetic oligonucleotide
  Antisense strand to SEQ ID NO: 1192538
uuaaucgagcuucuguuau

SEQ ID NO: 1192540 - RNA, 19 nt, Artificial Sequence
  Description of Artificial Sequence: Synthetic oligonucleotide
  Sense strand starting at position 1341 of SEQ ID NO: 916897
guaaacaacuugucacuca

SEQ ID NO: 1192541 - RNA, 19 nt, Artificial Sequence
  Description of Artificial Sequence: Synthetic oligonucleotide
  Antisense strand to SEQ ID NO: 1192540
ugagugacaaguuguuuac

SEQ ID NO: 1192542 - RNA, 19 nt, Artificial Sequence
  Description of Artificial Sequence: Synthetic oligonucleotide
  Sense strand starting at position 1372 of SEQ ID NO: 916897
cacuguuagcucgugcuuu

SEQ ID NO: 1192543 - RNA, 19 nt, Artificial Sequence
  Description of Artificial Sequence: Synthetic oligonucleotide
  Antisense strand to SEQ ID NO: 1192542
aaagcacgagcuaacagug

SEQ ID NO: 1192544 - RNA, 19 nt, Artificial Sequence
  Description of Artificial Sequence: Synthetic oligonucleotide
  Sense strand starting at position 1562 of SEQ ID NO: 916897
cuaacaaacuguccuguuu

SEQ ID NO: 1192545 - RNA, 19 nt, Artificial Sequence
  Description of Artificial Sequence: Synthetic oligonucleotide
  Antisense strand to SEQ ID NO: 1192544
aaacaggacaguuuguuag

SEQ ID NO: 1192546 - RNA, 19 nt, Artificial Sequence
  Description of Artificial Sequence: Synthetic oligonucleotide
  Sense strand starting at position 1761 of SEQ ID NO: 916897
cgagaaagguaaucaggua

SEQ ID NO: 1192547 - RNA, 19 nt, Artificial Sequence
  Description of Artificial Sequence: Synthetic oligonucleotide
  Antisense strand to SEQ ID NO: 1192546
uaccugauuaccuuucucg

SEQ ID NO: 1192548 - RNA, 19 nt, Artificial Sequence
  Description of Artificial Sequence: Synthetic oligonucleotide
  Sense strand starting at position 1782 of SEQ ID NO: 916897
guaccuuugacacgaaaug

SEQ ID NO: 1192549 - RNA, 19 nt, Artificial Sequence
  Description of Artificial Sequence: Synthetic oligonucleotide
  Antisense strand to SEQ ID NO: 1192548
cauuucgugucaaagguac

SEQ ID NO: 1192550 - RNA, 19 nt, Artificial Sequence
  Description of Artificial Sequence: Synthetic oligonucleotide
  Sense strand starting at position 1879 of SEQ ID NO: 916897
gcaucuggucagggaguaa

SEQ ID NO: 1192551 - RNA, 19 nt, Artificial Sequence
  Description of Artificial Sequence: Synthetic oligonucleotide
  Antisense strand to SEQ ID NO: 1192550
uuacucccugaccagaugc

SEQ ID NO: 1192552 - RNA, 19 nt, Artificial Sequence
  Description of Artificial Sequence: Synthetic oligonucleotide
  Sense strand starting at position 1914 of SEQ ID NO: 916897
aggagauagugugcauucu

SEQ ID NO: 1192553 - RNA, 19 nt, Artificial Sequence
  Description of Artificial Sequence: Synthetic oligonucleotide
  Antisense strand to SEQ ID NO: 1192552
agaaugcacacuaucuccu

SEQ ID NO: 1192554 - RNA, 19 nt, Artificial Sequence
  Description of Artificial Sequence: Synthetic oligonucleotide
  Sense strand starting at position 1915 of SEQ ID NO: 916897
ggagauagugugcauucuu

SEQ ID NO: 1192555 - RNA, 19 nt, Artificial Sequence
  Description of Artificial Sequence: Synthetic oligonucleotide
  Antisense strand to SEQ ID NO: 1192554
aagaaugcacacuaucucc

SEQ ID NO: 1192556 - RNA, 19 nt, Artificial Sequence
  Description of Artificial Sequence: Synthetic oligonucleotide
  Sense strand starting at position 2087 of SEQ ID NO: 916897
gagggcaggucaguugauu

SEQ ID NO: 1192557 - RNA, 19 nt, Artificial Sequence
  Description of Artificial Sequence: Synthetic oligonucleotide
  Antisense strand to SEQ ID NO: 1192556
aaucaacugaccugcccuc

SEQ ID NO: 1192558 - RNA, 19 nt, Artificial Sequence
  Description of Artificial Sequence: Synthetic oligonucleotide
  Sense strand starting at position 2092 of SEQ ID NO: 916897
caggucaguugauuagauu

SEQ ID NO: 1192559 - RNA, 19 nt, Artificial Sequence
  Description of Artificial Sequence: Synthetic oligonucleotide
  Antisense strand to SEQ ID NO: 1192558
aaucuaaucaacugaccug

SEQ ID NO: 1192560 - RNA, 19 nt, Artificial Sequence
  Description of Artificial Sequence: Synthetic oligonucleotide
  Sense strand starting at position 2183 of SEQ ID NO: 916897
agcagacaauggcucaaua

SEQ ID NO: 1192561 - RNA, 19 nt, Artificial Sequence
  Description of Artificial Sequence: Synthetic oligonucleotide
  Antisense strand to SEQ ID NO: 1192560
uauugagccauugucugcu

SEQ ID NO: 1192562 - RNA, 19 nt, Artificial Sequence
  Description of Artificial Sequence: Synthetic oligonucleotide
  Sense strand starting at position 2185 of SEQ ID NO: 916897
cagacaauggcucaauagu

SEQ ID NO: 1192563 - RNA, 19 nt, Artificial Sequence
  Description of Artificial Sequence: Synthetic oligonucleotide
  Antisense strand to SEQ ID NO: 1192562
acuauugagccauugucug

SEQ ID NO: 1192564 - RNA, 19 nt, Artificial Sequence
  Description of Artificial Sequence: Synthetic oligonucleotide
  Sense strand starting at position 2993 of SEQ ID NO: 916897
uguuaaugguuguuaugag

SEQ ID NO: 1192565 - RNA, 19 nt, Artificial Sequence
  Description of Artificial Sequence: Synthetic oligonucleotide
  Antisense strand to SEQ ID NO: 1192564
cucauaacaaccauuaaca

SEQ ID NO: 1192566 - RNA, 19 nt, Artificial Sequence
  Description of Artificial Sequence: Synthetic oligonucleotide
  Sense strand starting at position 3363 of SEQ ID NO: 916897
gaaagaguaugaguguuug

SEQ ID NO: 1192567 - RNA, 19 nt, Artificial Sequence
  Description of Artificial Sequence: Synthetic oligonucleotide
  Antisense strand to SEQ ID NO: 1192566
caaacacucauacucuuuc

SEQ ID NO: 1192568 - RNA, 19 nt, Artificial Sequence
  Description of Artificial Sequence: Synthetic oligonucleotide
  Sense strand starting at position 3374 of SEQ ID NO: 916897
aguguuugaggccaacuau

SEQ ID NO: 1192569 - RNA, 19 nt, Artificial Sequence
  Description of Artificial Sequence: Synthetic oligonucleotide
  Antisense strand to SEQ ID NO: 1192568
auaguuggccucaaacacu

SEQ ID NO: 1192570 - RNA, 19 nt, Artificial Sequence
  Description of Artificial Sequence: Synthetic oligonucleotide
  Sense strand starting at position 3463 of SEQ ID NO: 916897
auguauacaucuguacaua

SEQ ID NO: 1192571 - RNA, 19 nt, Artificial Sequence
  Description of Artificial Sequence: Synthetic oligonucleotide
  Antisense strand to SEQ ID NO: 1192570
uauguacagauguauacau

SEQ ID NO: 1192572 - RNA, 19 nt, Artificial Sequence
  Description of Artificial Sequence: Synthetic oligonucleotide
  Sense strand starting at position 3612 of SEQ ID NO: 916897
ugcugaaggaguugaaaua

SEQ ID NO: 1192573 - RNA, 19 nt, Artificial Sequence
  Description of Artificial Sequence: Synthetic oligonucleotide
  Antisense strand to SEQ ID NO: 1192572
uauuucaacuccuucagca

SEQ ID NO: 1192574 - RNA, 19 nt, Artificial Sequence
  Description of Artificial Sequence: Synthetic oligonucleotide
  Sense strand starting at position 3702 of SEQ ID NO: 916897
cuaagaucauaaggaauuu

SEQ ID NO: 1192575 - RNA, 19 nt, Artificial Sequence
  Description of Artificial Sequence: Synthetic oligonucleotide
  Antisense strand to SEQ ID NO: 1192574
aaauuccuuaugaucuuag

SEQ ID NO: 1192576 - RNA, 19 nt, Artificial Sequence
  Description of Artificial Sequence: Synthetic oligonucleotide
  Sense strand starting at position 3764 of SEQ ID NO: 916897
guagguauguauuucccua

SEQ ID NO: 1192577 - RNA, 19 nt, Artificial Sequence
  Description of Artificial Sequence: Synthetic oligonucleotide
  Antisense strand to SEQ ID NO: 1192576
uagggaaauacauaccuac

SEQ ID NO: 1192578 - RNA, 19 nt, Artificial Sequence
  Description of Artificial Sequence: Synthetic oligonucleotide
  Sense strand starting at position 3791 of SEQ ID NO: 916897
acuguuuaacuugggcaaa

SEQ ID NO: 1192579 - RNA, 19 nt, Artificial Sequence
  Description of Artificial Sequence: Synthetic oligonucleotide
  Antisense strand to SEQ ID NO: 1192578
uuugcccaaguuaaacagu

SEQ ID NO: 1192580 - RNA, 19 nt, Artificial Sequence
  Description of Artificial Sequence: Synthetic oligonucleotide
  Sense strand starting at position 3793 of SEQ ID NO: 916897
uguuuaacuugggcaaaca

SEQ ID NO: 1192581 - RNA, 19 nt, Artificial Sequence
  Description of Artificial Sequence: Synthetic oligonucleotide
  Antisense strand to SEQ ID NO: 1192580
uguuugcccaaguuaaaca

SEQ ID NO: 1192582 - RNA, 19 nt, Artificial Sequence
  Description of Artificial Sequence: Synthetic oligonucleotide
  Sense strand starting at position 3840 of SEQ ID NO: 916897
gcccauuuguugcuugaag

SEQ ID NO: 1192583 - RNA, 19 nt, Artificial Sequence
  Description of Artificial Sequence: Synthetic oligonucleotide
  Antisense strand to SEQ ID NO: 1192582
cuucaagcaacaaaugggc

SEQ ID NO: 1192584 - RNA, 19 nt, Artificial Sequence
  Description of Artificial Sequence: Synthetic oligonucleotide
  Sense strand starting at position 3937 of SEQ ID NO: 916897
ccaagaugguacucauacu

SEQ ID NO: 1192585 - RNA, 19 nt, Artificial Sequence
  Description of Artificial Sequence: Synthetic oligonucleotide
  Antisense strand to SEQ ID NO: 1192584
aguaugaguaccaucuugg

SEQ ID NO: 1192586 - RNA, 19 nt, Artificial Sequence
  Description of Artificial Sequence: Synthetic oligonucleotide
  Sense strand starting at position 3943 of SEQ ID NO: 916897
ugguacucauacuuuaagu

SEQ ID NO: 1192587 - RNA, 19 nt, Artificial Sequence
  Description of Artificial Sequence: Synthetic oligonucleotide
  Antisense strand to SEQ ID NO: 1192586
acuuaaaguaugaguacca

SEQ ID NO: 1192588 - RNA, 19 nt, Artificial Sequence
  Description of Artificial Sequence: Synthetic oligonucleotide
  Sense strand starting at position 3945 of SEQ ID NO: 916897
guacucauacuuuaaguga

SEQ ID NO: 1192589 - RNA, 19 nt, Artificial Sequence
  Description of Artificial Sequence: Synthetic oligonucleotide
  Antisense strand to SEQ ID NO: 1192588
ucacuuaaaguaugaguac

SEQ ID NO: 1192590 - RNA, 19 nt, Artificial Sequence
  Description of Artificial Sequence: Synthetic oligonucleotide
  Sense strand starting at position 3954 of SEQ ID NO: 916897
cuuuaagugaccugaaagg

SEQ ID NO: 1192591 - RNA, 19 nt, Artificial Sequence
  Description of Artificial Sequence: Synthetic oligonucleotide
  Antisense strand to SEQ ID NO: 1192590
ccuuucaggucacuuaaag

SEQ ID NO: 1192592 - RNA, 19 nt, Artificial Sequence
  Description of Artificial Sequence: Synthetic oligonucleotide
  Sense strand starting at position 129 of SEQ ID NO: 916898
gaagcuugccuauauagag

SEQ ID NO: 1192593 - RNA, 19 nt, Artificial Sequence
  Description of Artificial Sequence: Synthetic oligonucleotide
  Antisense strand to SEQ ID NO: 1192592
cucuauauaggcaagcuuc

SEQ ID NO: 1192594 - RNA, 19 nt, Artificial Sequence
  Description of Artificial Sequence: Synthetic oligonucleotide
  Sense strand starting at position 198 of SEQ ID NO: 916898
uguuaacaggcuuacaaau

SEQ ID NO: 1192595 - RNA, 19 nt, Artificial Sequence
  Description of Artificial Sequence: Synthetic oligonucleotide
  Antisense strand to SEQ ID NO: 1192594
auuuguaagccuguuaaca

SEQ ID NO: 1192596 - RNA, 19 nt, Artificial Sequence
  Description of Artificial Sequence: Synthetic oligonucleotide
  Sense strand starting at position 211 of SEQ ID NO: 916898
acaaaucagccucagaguu

SEQ ID NO: 1192597 - RNA, 19 nt, Artificial Sequence
  Description of Artificial Sequence: Synthetic oligonucleotide
  Antisense strand to SEQ ID NO: 1192596
aacucugaggcugauuugu

SEQ ID NO: 1192598 - RNA, 19 nt, Artificial Sequence
  Description of Artificial Sequence: Synthetic oligonucleotide
  Sense strand starting at position 307 of SEQ ID NO: 916898
uguguuaaauuagcaaauc

SEQ ID NO: 1192599 - RNA, 19 nt, Artificial Sequence
  Description of Artificial Sequence: Synthetic oligonucleotide
  Antisense strand to SEQ ID NO: 1192598
gauuugcuaauuuaacaca

SEQ ID NO: 1192600 - RNA, 19 nt, Artificial Sequence
  Description of Artificial Sequence: Synthetic oligonucleotide
  Sense strand starting at position 316 of SEQ ID NO: 916898
uuagcaaaucgcuacauua

SEQ ID NO: 1192601 - RNA, 19 nt, Artificial Sequence
  Description of Artificial Sequence: Synthetic oligonucleotide
  Antisense strand to SEQ ID NO: 1192600
uaauguagcgauuugcuaa

SEQ ID NO: 1192602 - RNA, 19 nt, Artificial Sequence
  Description of Artificial Sequence: Synthetic oligonucleotide
  Sense strand starting at position 325 of SEQ ID NO: 916898
cgcuacauuagguaaugua

SEQ ID NO: 1192603 - RNA, 19 nt, Artificial Sequence
  Description of Artificial Sequence: Synthetic oligonucleotide
  Antisense strand to SEQ ID NO: 1192602
uacauuaccuaauguagcg

SEQ ID NO: 1192604 - RNA, 19 nt, Artificial Sequence
  Description of Artificial Sequence: Synthetic oligonucleotide
  Sense strand starting at position 472 of SEQ ID NO: 916898
cucaaacauucgcuggaau

SEQ ID NO: 1192605 - RNA, 19 nt, Artificial Sequence
  Description of Artificial Sequence: Synthetic oligonucleotide
  Antisense strand to SEQ ID NO: 1192604
auuccagcgaauguuugag

SEQ ID NO: 1192606 - RNA, 19 nt, Artificial Sequence
  Description of Artificial Sequence: Synthetic oligonucleotide
  Sense strand starting at position 473 of SEQ ID NO: 916898
ucaaacauucgcuggaauu

SEQ ID NO: 1192607 - RNA, 19 nt, Artificial Sequence
  Description of Artificial Sequence: Synthetic oligonucleotide
  Antisense strand to SEQ ID NO: 1192606
aauuccagcgaauguuuga

SEQ ID NO: 1192608 - RNA, 19 nt, Artificial Sequence
  Description of Artificial Sequence: Synthetic oligonucleotide
  Sense strand starting at position 565 of SEQ ID NO: 916898
guauauguguuggcuauuu

SEQ ID NO: 1192609 - RNA, 19 nt, Artificial Sequence
  Description of Artificial Sequence: Synthetic oligonucleotide
  Antisense strand to SEQ ID NO: 1192608
aaauagccaacacauauac

SEQ ID NO: 1192610 - RNA, 19 nt, Artificial Sequence
  Description of Artificial Sequence: Synthetic oligonucleotide
  Sense strand starting at position 747 of SEQ ID NO: 916898
cgaugaacagcuugacuua

SEQ ID NO: 1192611 - RNA, 19 nt, Artificial Sequence
  Description of Artificial Sequence: Synthetic oligonucleotide
  Antisense strand to SEQ ID NO: 1192610
uaagucaagcuguucaucg

SEQ ID NO: 1192612 - RNA, 19 nt, Artificial Sequence
  Description of Artificial Sequence: Synthetic oligonucleotide
  Sense strand starting at position 983 of SEQ ID NO: 916898
ugaacuuaugcugggauaa

SEQ ID NO: 1192613 - RNA, 19 nt, Artificial Sequence
  Description of Artificial Sequence: Synthetic oligonucleotide
  Antisense strand to SEQ ID NO: 1192612
uuaucccagcauaaguuca

SEQ ID NO: 1192614 - RNA, 19 nt, Artificial Sequence
  Description of Artificial Sequence: Synthetic oligonucleotide
  Sense strand starting at position 984 of SEQ ID NO: 916898
gaacuuaugcugggauaag

SEQ ID NO: 1192615 - RNA, 19 nt, Artificial Sequence
  Description of Artificial Sequence: Synthetic oligonucleotide
  Antisense strand to SEQ ID NO: 1192614
cuuaucccagcauaaguuc

SEQ ID NO: 1192616 - RNA, 19 nt, Artificial Sequence
  Description of Artificial Sequence: Synthetic oligonucleotide
  Sense strand starting at position 1294 of SEQ ID NO: 916898
aucuaauauagcgaugaug

SEQ ID NO: 1192617 - RNA, 19 nt, Artificial Sequence
  Description of Artificial Sequence: Synthetic oligonucleotide
  Antisense strand to SEQ ID NO: 1192616
caucaucgcuauauuagau

SEQ ID NO: 1192618 - RNA, 19 nt, Artificial Sequence
  Description of Artificial Sequence: Synthetic oligonucleotide
  Sense strand starting at position 1297 of SEQ ID NO: 916898
uaauauagcgaugauguua

SEQ ID NO: 1192619 - RNA, 19 nt, Artificial Sequence
  Description of Artificial Sequence: Synthetic oligonucleotide
  Antisense strand to SEQ ID NO: 1192618
uaacaucaucgcuauauua

SEQ ID NO: 1192620 - RNA, 19 nt, Artificial Sequence
  Description of Artificial Sequence: Synthetic oligonucleotide
  Sense strand starting at position 1359 of SEQ ID NO: 916898
ggucaugugcuuuacugag

SEQ ID NO: 1192621 - RNA, 19 nt, Artificial Sequence
  Description of Artificial Sequence: Synthetic oligonucleotide
  Antisense strand to SEQ ID NO: 1192620
cucaguaaagcacaugacc

SEQ ID NO: 1192622 - RNA, 19 nt, Artificial Sequence
  Description of Artificial Sequence: Synthetic oligonucleotide
  Sense strand starting at position 1425 of SEQ ID NO: 916898
cguuuaaagcaccacuaaa

SEQ ID NO: 1192623 - RNA, 19 nt, Artificial Sequence
  Description of Artificial Sequence: Synthetic oligonucleotide
  Antisense strand to SEQ ID NO: 1192622
uuuaguggugcuuuaaacg

SEQ ID NO: 1192624 - RNA, 19 nt, Artificial Sequence
  Description of Artificial Sequence: Synthetic oligonucleotide
  Sense strand starting at position 1489 of SEQ ID NO: 916898
ugguaacauucugcacaaa

SEQ ID NO: 1192625 - RNA, 19 nt, Artificial Sequence
  Description of Artificial Sequence: Synthetic oligonucleotide
  Antisense strand to SEQ ID NO: 1192624
uuugugcagaauguuacca

SEQ ID NO: 1192626 - RNA, 19 nt, Artificial Sequence
  Description of Artificial Sequence: Synthetic oligonucleotide
  Sense strand starting at position 1630 of SEQ ID NO: 916898
uguuauaggacgcaaccua

SEQ ID NO: 1192627 - RNA, 19 nt, Artificial Sequence
  Description of Artificial Sequence: Synthetic oligonucleotide
  Antisense strand to SEQ ID NO: 1192626
uagguugcguccuauaaca

SEQ ID NO: 1192628 - RNA, 19 nt, Artificial Sequence
  Description of Artificial Sequence: Synthetic oligonucleotide
  Sense strand starting at position 1657 of SEQ ID NO: 916898
agcagaaaucucggagacu

SEQ ID NO: 1192629 - RNA, 19 nt, Artificial Sequence
  Description of Artificial Sequence: Synthetic oligonucleotide
  Antisense strand to SEQ ID NO: 1192628
agucuccgagauuucugcu

SEQ ID NO: 1192630 - RNA, 19 nt, Artificial Sequence
  Description of Artificial Sequence: Synthetic oligonucleotide
  Sense strand starting at position 1666 of SEQ ID NO: 916898
cucggagacuuugcaaauc

SEQ ID NO: 1192631 - RNA, 19 nt, Artificial Sequence
  Description of Artificial Sequence: Synthetic oligonucleotide
  Antisense strand to SEQ ID NO: 1192630
gauuugcaaagucuccgag

SEQ ID NO: 1192632 - RNA, 19 nt, Artificial Sequence
  Description of Artificial Sequence: Synthetic oligonucleotide
  Sense strand starting at position 1746 of SEQ ID NO: 916898
gcuaaaggcuucucuaaca

SEQ ID NO: 1192633 - RNA, 19 nt, Artificial Sequence
  Description of Artificial Sequence: Synthetic oligonucleotide
  Antisense strand to SEQ ID NO: 1192632
uguuagagaagccuuuagc

SEQ ID NO: 1192634 - RNA, 19 nt, Artificial Sequence
  Description of Artificial Sequence: Synthetic oligonucleotide
  Sense strand starting at position 1874 of SEQ ID NO: 916898
gagguaaaucagggucagu

SEQ ID NO: 1192635 - RNA, 19 nt, Artificial Sequence
  Description of Artificial Sequence: Synthetic oligonucleotide
  Antisense strand to SEQ ID NO: 1192634
acugacccugauuuaccuc

SEQ ID NO: 1192636 - RNA, 19 nt, Artificial Sequence
  Description of Artificial Sequence: Synthetic oligonucleotide
  Sense strand starting at position 1938 of SEQ ID NO: 916898
uaugaucgucuccaacuga

SEQ ID NO: 1192637 - RNA, 19 nt, Artificial Sequence
  Description of Artificial Sequence: Synthetic oligonucleotide
  Antisense strand to SEQ ID NO: 1192636
ucaguuggagacgaucaua

SEQ ID NO: 1192638 - RNA, 19 nt, Artificial Sequence
  Description of Artificial Sequence: Synthetic oligonucleotide
  Sense strand starting at position 1958 of SEQ ID NO: 916898
ccugucaagugaguccaaa

SEQ ID NO: 1192639 - RNA, 19 nt, Artificial Sequence
  Description of Artificial Sequence: Synthetic oligonucleotide
  Antisense strand to SEQ ID NO: 1192638
uuuggacucacuugacagg

SEQ ID NO: 1192640 - RNA, 19 nt, Artificial Sequence
  Description of Artificial Sequence: Synthetic oligonucleotide
  Sense strand starting at position 2212 of SEQ ID NO: 916898
gcugcaaggcucuagacaa

SEQ ID NO: 1192641 - RNA, 19 nt, Artificial Sequence
  Description of Artificial Sequence: Synthetic oligonucleotide
  Antisense strand to SEQ ID NO: 1192640
uugucuagagccuugcagc

SEQ ID NO: 1192642 - RNA, 19 nt, Artificial Sequence
  Description of Artificial Sequence: Synthetic oligonucleotide
  Sense strand starting at position 2267 of SEQ ID NO: 916898
ucuagacaucacugaaugu

SEQ ID NO: 1192643 - RNA, 19 nt, Artificial Sequence
  Description of Artificial Sequence: Synthetic oligonucleotide
  Antisense strand to SEQ ID NO: 1192642
acauucagugaugucuaga

SEQ ID NO: 1192644 - RNA, 19 nt, Artificial Sequence
  Description of Artificial Sequence: Synthetic oligonucleotide
  Sense strand starting at position 2358 of SEQ ID NO: 916898
cacgcagaacaguaugauu

SEQ ID NO: 1192645 - RNA, 19 nt, Artificial Sequence
  Description of Artificial Sequence: Synthetic oligonucleotide
  Antisense strand to SEQ ID NO: 1192644
aaucauacuguucugcgug

SEQ ID NO: 1192646 - RNA, 19 nt, Artificial Sequence
  Description of Artificial Sequence: Synthetic oligonucleotide
  Sense strand starting at position 2420 of SEQ ID NO: 916898
auaacagaagcucgauuaa

SEQ ID NO: 1192647 - RNA, 19 nt, Artificial Sequence
  Description of Artificial Sequence: Synthetic oligonucleotide
  Antisense strand to SEQ ID NO: 1192646
uuaaucgagcuucuguuau

SEQ ID NO: 1192648 - RNA, 19 nt, Artificial Sequence
  Description of Artificial Sequence: Synthetic oligonucleotide
  Sense strand starting at position 2670 of SEQ ID NO: 916898
guaaacaacuugucacuca

SEQ ID NO: 1192649 - RNA, 19 nt, Artificial Sequence
  Description of Artificial Sequence: Synthetic oligonucleotide
  Antisense strand to SEQ ID NO: 1192648
ugagugacaaguuguuuac

SEQ ID NO: 1192650 - RNA, 19 nt, Artificial Sequence
  Description of Artificial Sequence: Synthetic oligonucleotide
  Sense strand starting at position 2701 of SEQ ID NO: 916898
cacuguuagcucgugcuuu

SEQ ID NO: 1192651 - RNA, 19 nt, Artificial Sequence
  Description of Artificial Sequence: Synthetic oligonucleotide
  Antisense strand to SEQ ID NO: 1192650
aaagcacgagcuaacagug

SEQ ID NO: 1192652 - RNA, 19 nt, Artificial Sequence
  Description of Artificial Sequence: Synthetic oligonucleotide
  Sense strand starting at position 2891 of SEQ ID NO: 916898
cuaacaaacuguccuguuu

SEQ ID NO: 1192653 - RNA, 19 nt, Artificial Sequence
  Description of Artificial Sequence: Synthetic oligonucleotide
  Antisense strand to SEQ ID NO: 1192652
aaacaggacaguuuguuag

SEQ ID NO: 1192654 - RNA, 19 nt, Artificial Sequence
  Description of Artificial Sequence: Synthetic oligonucleotide
  Sense strand starting at position 3090 of SEQ ID NO: 916898
cgagaaagguaaucaggua

SEQ ID NO: 1192655 - RNA, 19 nt, Artificial Sequence
  Description of Artificial Sequence: Synthetic oligonucleotide
  Antisense strand to SEQ ID NO: 1192654
uaccugauuaccuuucucg

SEQ ID NO: 1192656 - RNA, 19 nt, Artificial Sequence
  Description of Artificial Sequence: Synthetic oligonucleotide
  Sense strand starting at position 3111 of SEQ ID NO: 916898
guaccuuugacacgaaaug

SEQ ID NO: 1192657 - RNA, 19 nt, Artificial Sequence
  Description of Artificial Sequence: Synthetic oligonucleotide
  Antisense strand to SEQ ID NO: 1192656
cauuucgugucaaagguac

SEQ ID NO: 1192658 - RNA, 19 nt, Artificial Sequence
  Description of Artificial Sequence: Synthetic oligonucleotide
  Sense strand starting at position 3208 of SEQ ID NO: 916898
gcaucuggucagggaguaa

SEQ ID NO: 1192659 - RNA, 19 nt, Artificial Sequence
  Description of Artificial Sequence: Synthetic oligonucleotide
  Antisense strand to SEQ ID NO: 1192658
uuacucccugaccagaugc

SEQ ID NO: 1192660 - RNA, 19 nt, Artificial Sequence
  Description of Artificial Sequence: Synthetic oligonucleotide
  Sense strand starting at position 3243 of SEQ ID NO: 916898
aggagauagugugcauucu

SEQ ID NO: 1192661 - RNA, 19 nt, Artificial Sequence
  Description of Artificial Sequence: Synthetic oligonucleotide
  Antisense strand to SEQ ID NO: 1192660
agaaugcacacuaucuccu

SEQ ID NO: 1192662 - RNA, 19 nt, Artificial Sequence
  Description of Artificial Sequence: Synthetic oligonucleotide
  Sense strand starting at position 3244 of SEQ ID NO: 916898
ggagauagugugcauucuu

SEQ ID NO: 1192663 - RNA, 19 nt, Artificial Sequence
  Description of Artificial Sequence: Synthetic oligonucleotide
  Antisense strand to SEQ ID NO: 1192662
aagaaugcacacuaucucc

SEQ ID NO: 1192664 - RNA, 19 nt, Artificial Sequence
  Description of Artificial Sequence: Synthetic oligonucleotide
  Sense strand starting at position 3416 of SEQ ID NO: 916898
gagggcaggucaguugauu

SEQ ID NO: 1192665 - RNA, 19 nt, Artificial Sequence
  Description of Artificial Sequence: Synthetic oligonucleotide
  Antisense strand to SEQ ID NO: 1192664
aaucaacugaccugcccuc

SEQ ID NO: 1192666 - RNA, 19 nt, Artificial Sequence
  Description of Artificial Sequence: Synthetic oligonucleotide
  Sense strand starting at position 3421 of SEQ ID NO: 916898
caggucaguugauuagauu

SEQ ID NO: 1192667 - RNA, 19 nt, Artificial Sequence
  Description of Artificial Sequence: Synthetic oligonucleotide
  Antisense strand to SEQ ID NO: 1192666
aaucuaaucaacugaccug

SEQ ID NO: 1192668 - RNA, 19 nt, Artificial Sequence
  Description of Artificial Sequence: Synthetic oligonucleotide
  Sense strand starting at position 3512 of SEQ ID NO: 916898
agcagacaauggcucaaua

SEQ ID NO: 1192669 - RNA, 19 nt, Artificial Sequence
  Description of Artificial Sequence: Synthetic oligonucleotide
  Antisense strand to SEQ ID NO: 1192668
uauugagccauugucugcu

SEQ ID NO: 1192670 - RNA, 19 nt, Artificial Sequence
  Description of Artificial Sequence: Synthetic oligonucleotide
  Sense strand starting at position 3514 of SEQ ID NO: 916898
cagacaauggcucaauagu

SEQ ID NO: 1192671 - RNA, 19 nt, Artificial Sequence
  Description of Artificial Sequence: Synthetic oligonucleotide
  Antisense strand to SEQ ID NO: 1192670
acuauugagccauugucug

SEQ ID NO: 1192672 - RNA, 19 nt, Artificial Sequence
  Description of Artificial Sequence: Synthetic oligonucleotide
  Sense strand starting at position 5 of SEQ ID NO: 916899
gaaagagcuccaggaauuc

SEQ ID NO: 1192673 - RNA, 19 nt, Artificial Sequence
  Description of Artificial Sequence: Synthetic oligonucleotide
  Antisense strand to SEQ ID NO: 1192672
gaauuccuggagcucuuuc

SEQ ID NO: 1192674 - RNA, 19 nt, Artificial Sequence
  Description of Artificial Sequence: Synthetic oligonucleotide
  Sense strand starting at position 81 of SEQ ID NO: 916899
auguaagucuuauuuagcu

SEQ ID NO: 1192675 - RNA, 19 nt, Artificial Sequence
  Description of Artificial Sequence: Synthetic oligonucleotide
  Antisense strand to SEQ ID NO: 1192674
agcuaaauaagacuuacau

SEQ ID NO: 1192676 - RNA, 19 nt, Artificial Sequence
  Description of Artificial Sequence: Synthetic oligonucleotide
  Sense strand starting at position 87 of SEQ ID NO: 916899
gucuuauuuagcugagggu

SEQ ID NO: 1192677 - RNA, 19 nt, Artificial Sequence
  Description of Artificial Sequence: Synthetic oligonucleotide
  Antisense strand to SEQ ID NO: 1192676
acccucagcuaaauaagac

SEQ ID NO: 1192678 - RNA, 19 nt, Artificial Sequence
  Description of Artificial Sequence: Synthetic oligonucleotide
  Sense strand starting at position 249 of SEQ ID NO: 916899
uuaauuugcuggcccuuaa

SEQ ID NO: 1192679 - RNA, 19 nt, Artificial Sequence
  Description of Artificial Sequence: Synthetic oligonucleotide
  Antisense strand to SEQ ID NO: 1192678
uuaagggccagcaaauuaa

SEQ ID NO: 1192680 - RNA, 19 nt, Artificial Sequence
  Description of Artificial Sequence: Synthetic oligonucleotide
  Sense strand starting at position 365 of SEQ ID NO: 916899
uccgacuuuguugaauuaa

SEQ ID NO: 1192681 - RNA, 19 nt, Artificial Sequence
  Description of Artificial Sequence: Synthetic oligonucleotide
  Antisense strand to SEQ ID NO: 1192680
uuaauucaacaaagucgga

SEQ ID NO: 1192682 - RNA, 19 nt, Artificial Sequence
  Description of Artificial Sequence: Synthetic oligonucleotide
  Sense strand starting at position 835 of SEQ ID NO: 916899
caacaauaaugugugauga

SEQ ID NO: 1192683 - RNA, 19 nt, Artificial Sequence
  Description of Artificial Sequence: Synthetic oligonucleotide
  Antisense strand to SEQ ID NO: 1192682
ucaucacacauuauuguug

SEQ ID NO: 1192684 - RNA, 19 nt, Artificial Sequence
  Description of Artificial Sequence: Synthetic oligonucleotide
  Sense strand starting at position 845 of SEQ ID NO: 916899
gugugaugagaacaguuau

SEQ ID NO: 1192685 - RNA, 19 nt, Artificial Sequence
  Description of Artificial Sequence: Synthetic oligonucleotide
  Antisense strand to SEQ ID NO: 1192684
auaacuguucucaucacac

SEQ ID NO: 1192686 - RNA, 19 nt, Artificial Sequence
  Description of Artificial Sequence: Synthetic oligonucleotide
  Sense strand starting at position 974 of SEQ ID NO: 916899
ucauuacggcuggaugauu

SEQ ID NO: 1192687 - RNA, 19 nt, Artificial Sequence
  Description of Artificial Sequence: Synthetic oligonucleotide
  Antisense strand to SEQ ID NO: 1192686
aaucauccagccguaauga

SEQ ID NO: 1192688 - RNA, 19 nt, Artificial Sequence
  Description of Artificial Sequence: Synthetic oligonucleotide
  Sense strand starting at position 1045 of SEQ ID NO: 916899
agcauagagcaguaagaau

SEQ ID NO: 1192689 - RNA, 19 nt, Artificial Sequence
  Description of Artificial Sequence: Synthetic oligonucleotide
  Antisense strand to SEQ ID NO: 1192688
auucuuacugcucuaugcu

SEQ ID NO: 1192690 - RNA, 19 nt, Artificial Sequence
  Description of Artificial Sequence: Synthetic oligonucleotide
  Sense strand starting at position 1053 of SEQ ID NO: 916899
gcaguaagaauugauguua

SEQ ID NO: 1192691 - RNA, 19 nt, Artificial Sequence
  Description of Artificial Sequence: Synthetic oligonucleotide
  Antisense strand to SEQ ID NO: 1192690
uaacaucaauucuuacugc

SEQ ID NO: 1192692 - RNA, 19 nt, Artificial Sequence
  Description of Artificial Sequence: Synthetic oligonucleotide
  Sense strand starting at position 1240 of SEQ ID NO: 916899
uguugcuuuccuguuaguu

SEQ ID NO: 1192693 - RNA, 19 nt, Artificial Sequence
  Description of Artificial Sequence: Synthetic oligonucleotide
  Antisense strand to SEQ ID NO: 1192692
aacuaacaggaaagcaaca

SEQ ID NO: 1192694 - RNA, 19 nt, Artificial Sequence
  Description of Artificial Sequence: Synthetic oligonucleotide
  Sense strand starting at position 1241 of SEQ ID NO: 916899
guugcuuuccuguuaguuc

SEQ ID NO: 1192695 - RNA, 19 nt, Artificial Sequence
  Description of Artificial Sequence: Synthetic oligonucleotide
  Antisense strand to SEQ ID NO: 1192694
gaacuaacaggaaagcaac

SEQ ID NO: 1192696 - RNA, 19 nt, Artificial Sequence
  Description of Artificial Sequence: Synthetic oligonucleotide
  Sense strand starting at position 1262 of SEQ ID NO: 916899
cuggaagauuuguauacaa

SEQ ID NO: 1192697 - RNA, 19 nt, Artificial Sequence
  Description of Artificial Sequence: Synthetic oligonucleotide
  Antisense strand to SEQ ID NO: 1192696
uuguauacaaaucuuccag

SEQ ID NO: 1192698 - RNA, 19 nt, Artificial Sequence
  Description of Artificial Sequence: Synthetic oligonucleotide
  Sense strand starting at position 1303 of SEQ ID NO: 916899
cuguuuaaugauggaauag

SEQ ID NO: 1192699 - RNA, 19 nt, Artificial Sequence
  Description of Artificial Sequence: Synthetic oligonucleotide
  Antisense strand to SEQ ID NO: 1192698
cuauuccaucauuaaacag

SEQ ID NO: 1192700 - RNA, 19 nt, Artificial Sequence
  Description of Artificial Sequence: Synthetic oligonucleotide
  Sense strand starting at position 1411 of SEQ ID NO: 916899
caucucuauguuggaaaug

SEQ ID NO: 1192701 - RNA, 19 nt, Artificial Sequence
  Description of Artificial Sequence: Synthetic oligonucleotide
  Antisense strand to SEQ ID NO: 1192700
cauuuccaacauagagaug

SEQ ID NO: 1192702 - RNA, 19 nt, Artificial Sequence
  Description of Artificial Sequence: Synthetic oligonucleotide
  Sense strand starting at position 1471 of SEQ ID NO: 916899
gcaucucuacuggaaucua

SEQ ID NO: 1192703 - RNA, 19 nt, Artificial Sequence
  Description of Artificial Sequence: Synthetic oligonucleotide
  Antisense strand to SEQ ID NO: 1192702
uagauuccaguagagaugc

SEQ ID NO: 1192704 - RNA, 19 nt, Artificial Sequence
  Description of Artificial Sequence: Synthetic oligonucleotide
  Sense strand starting at position 1537 of SEQ ID NO: 916899
aaagcaaaucagugguaga

SEQ ID NO: 1192705 - RNA, 19 nt, Artificial Sequence
  Description of Artificial Sequence: Synthetic oligonucleotide
  Antisense strand to SEQ ID NO: 1192704
ucuaccacugauuugcuuu

SEQ ID NO: 1192706 - RNA, 19 nt, Artificial Sequence
  Description of Artificial Sequence: Synthetic oligonucleotide
  Sense strand starting at position 1542 of SEQ ID NO: 916899
aaaucagugguagaagguu

SEQ ID NO: 1192707 - RNA, 19 nt, Artificial Sequence
  Description of Artificial Sequence: Synthetic oligonucleotide
  Antisense strand to SEQ ID NO: 1192706
aaccuucuaccacugauuu

SEQ ID NO: 1192708 - RNA, 19 nt, Artificial Sequence
  Description of Artificial Sequence: Synthetic oligonucleotide
  Sense strand starting at position 1954 of SEQ ID NO: 916899
ggcacaaaucuccaacagu

SEQ ID NO: 1192709 - RNA, 19 nt, Artificial Sequence
  Description of Artificial Sequence: Synthetic oligonucleotide
  Antisense strand to SEQ ID NO: 1192708
acuguuggagauuugugcc

SEQ ID NO: 1192710 - RNA, 19 nt, Artificial Sequence
  Description of Artificial Sequence: Synthetic oligonucleotide
  Sense strand starting at position 1987 of SEQ ID NO: 916899
auaacugacuguuuaauga

SEQ ID NO: 1192711 - RNA, 19 nt, Artificial Sequence
  Description of Artificial Sequence: Synthetic oligonucleotide
  Antisense strand to SEQ ID NO: 1192710
ucauuaaacagucaguuau

SEQ ID NO: 1192712 - RNA, 19 nt, Artificial Sequence
  Description of Artificial Sequence: Synthetic oligonucleotide
  Sense strand starting at position 1995 of SEQ ID NO: 916899
cuguuuaaugaguaaugac

SEQ ID NO: 1192713 - RNA, 19 nt, Artificial Sequence
  Description of Artificial Sequence: Synthetic oligonucleotide
  Antisense strand to SEQ ID NO: 1192712
gucauuacucauuaaacag

SEQ ID NO: 1192714 - RNA, 19 nt, Artificial Sequence
  Description of Artificial Sequence: Synthetic oligonucleotide
  Sense strand starting at position 2005 of SEQ ID NO: 916899
aguaaugacaguuacgaca

SEQ ID NO: 1192715 - RNA, 19 nt, Artificial Sequence
  Description of Artificial Sequence: Synthetic oligonucleotide
  Antisense strand to SEQ ID NO: 1192714
ugucguaacugucauuacu

SEQ ID NO: 1192716 - RNA, 19 nt, Artificial Sequence
  Description of Artificial Sequence: Synthetic oligonucleotide
  Sense strand starting at position 2017 of SEQ ID NO: 916899
uacgacaguuaacugauau

SEQ ID NO: 1192717 - RNA, 19 nt, Artificial Sequence
  Description of Artificial Sequence: Synthetic oligonucleotide
  Antisense strand to SEQ ID NO: 1192716
auaucaguuaacugucgua

SEQ ID NO: 1192718 - RNA, 19 nt, Artificial Sequence
  Description of Artificial Sequence: Synthetic oligonucleotide
  Sense strand starting at position 2030 of SEQ ID NO: 916899
ugauauaaaccaugcauug

SEQ ID NO: 1192719 - RNA, 19 nt, Artificial Sequence
  Description of Artificial Sequence: Synthetic oligonucleotide
  Antisense strand to SEQ ID NO: 1192718
caaugcaugguuuauauca

SEQ ID NO: 1192720 - RNA, 19 nt, Artificial Sequence
  Description of Artificial Sequence: Synthetic oligonucleotide
  Sense strand starting at position 2143 of SEQ ID NO: 916899
guguguuuaauggauuaaa

SEQ ID NO: 1192721 - RNA, 19 nt, Artificial Sequence
  Description of Artificial Sequence: Synthetic oligonucleotide
  Antisense strand to SEQ ID NO: 1192720
uuuaauccauuaaacacac

SEQ ID NO: 1192722 - RNA, 19 nt, Artificial Sequence
  Description of Artificial Sequence: Synthetic oligonucleotide
  Sense strand starting at position 2284 of SEQ ID NO: 916899
guggcuaaauaaucaaauu

SEQ ID NO: 1192723 - RNA, 19 nt, Artificial Sequence
  Description of Artificial Sequence: Synthetic oligonucleotide
  Antisense strand to SEQ ID NO: 1192722
aauuugauuauuuagccac

SEQ ID NO: 1192724 - RNA, 19 nt, Artificial Sequence
  Description of Artificial Sequence: Synthetic oligonucleotide
  Sense strand starting at position 2333 of SEQ ID NO: 916899
aagugaucugaguacucuc

SEQ ID NO: 1192725 - RNA, 19 nt, Artificial Sequence
  Description of Artificial Sequence: Synthetic oligonucleotide
  Antisense strand to SEQ ID NO: 1192724
gagaguacucagaucacuu

SEQ ID NO: 1192726 - RNA, 19 nt, Artificial Sequence
  Description of Artificial Sequence: Synthetic oligonucleotide
  Sense strand starting at position 2750 of SEQ ID NO: 916899
agccauugucaggaacuau

SEQ ID NO: 1192727 - RNA, 19 nt, Artificial Sequence
  Description of Artificial Sequence: Synthetic oligonucleotide
  Antisense strand to SEQ ID NO: 1192726
auaguuccugacaauggcu

SEQ ID NO: 1192728 - RNA, 19 nt, Artificial Sequence
  Description of Artificial Sequence: Synthetic oligonucleotide
  Sense strand starting at position 2787 of SEQ ID NO: 916899
cuauuaacguaacuugaga

SEQ ID NO: 1192729 - RNA, 19 nt, Artificial Sequence
  Description of Artificial Sequence: Synthetic oligonucleotide
  Antisense strand to SEQ ID NO: 1192728
ucucaaguuacguuaauag

SEQ ID NO: 1192730 - RNA, 19 nt, Artificial Sequence
  Description of Artificial Sequence: Synthetic oligonucleotide
  Sense strand starting at position 2803 of SEQ ID NO: 916899
agacuugacuaggucagua

SEQ ID NO: 1192731 - RNA, 19 nt, Artificial Sequence
  Description of Artificial Sequence: Synthetic oligonucleotide
  Antisense strand to SEQ ID NO: 1192730
uacugaccuagucaagucu

SEQ ID NO: 1192732 - RNA, 19 nt, Artificial Sequence
  Description of Artificial Sequence: Synthetic oligonucleotide
  Sense strand starting at position 2990 of SEQ ID NO: 916899
uuaagagcaguacaguaau

SEQ ID NO: 1192733 - RNA, 19 nt, Artificial Sequence
  Description of Artificial Sequence: Synthetic oligonucleotide
  Antisense strand to SEQ ID NO: 1192732
auuacuguacugcucuuaa

SEQ ID NO: 1192734 - RNA, 19 nt, Artificial Sequence
  Description of Artificial Sequence: Synthetic oligonucleotide
  Sense strand starting at position 2993 of SEQ ID NO: 916899
agagcaguacaguaauagu

SEQ ID NO: 1192735 - RNA, 19 nt, Artificial Sequence
  Description of Artificial Sequence: Synthetic oligonucleotide
  Antisense strand to SEQ ID NO: 1192734
acuauuacuguacugcucu

SEQ ID NO: 1192736 - RNA, 19 nt, Artificial Sequence
  Description of Artificial Sequence: Synthetic oligonucleotide
  Sense strand starting at position 3004 of SEQ ID NO: 916899
guaauagugauauaggagu

SEQ ID NO: 1192737 - RNA, 19 nt, Artificial Sequence
  Description of Artificial Sequence: Synthetic oligonucleotide
  Antisense strand to SEQ ID NO: 1192736
acuccuauaucacuauuac

SEQ ID NO: 1192738 - RNA, 19 nt, Artificial Sequence
  Description of Artificial Sequence: Synthetic oligonucleotide
  Sense strand starting at position 3148 of SEQ ID NO: 916899
agauaagcaagcuagaagu

SEQ ID NO: 1192739 - RNA, 19 nt, Artificial Sequence
  Description of Artificial Sequence: Synthetic oligonucleotide
  Antisense strand to SEQ ID NO: 1192738
acuucuagcuugcuuaucu

SEQ ID NO: 1192740 - RNA, 19 nt, Artificial Sequence
  Description of Artificial Sequence: Synthetic oligonucleotide
  Sense strand starting at position 3302 of SEQ ID NO: 916899
agauucacgggcuauguaa

SEQ ID NO: 1192741 - RNA, 19 nt, Artificial Sequence
  Description of Artificial Sequence: Synthetic oligonucleotide
  Antisense strand to SEQ ID NO: 1192740
uuacauagcccgugaaucu

SEQ ID NO: 1192742 - RNA, 19 nt, Artificial Sequence
  Description of Artificial Sequence: Synthetic oligonucleotide
  Sense strand starting at position 3427 of SEQ ID NO: 916899
agaaauccgcuugaacauc

SEQ ID NO: 1192743 - RNA, 19 nt, Artificial Sequence
  Description of Artificial Sequence: Synthetic oligonucleotide
  Antisense strand to SEQ ID NO: 1192742
gauguucaagcggauuucu

SEQ ID NO: 1192744 - RNA, 19 nt, Artificial Sequence
  Description of Artificial Sequence: Synthetic oligonucleotide
  Sense strand starting at position 3782 of SEQ ID NO: 916899
caauguaagugacuaggaa

SEQ ID NO: 1192745 - RNA, 19 nt, Artificial Sequence
  Description of Artificial Sequence: Synthetic oligonucleotide
  Antisense strand to SEQ ID NO: 1192744
uuccuagucacuuacauug

SEQ ID NO: 1192746 - RNA, 19 nt, Artificial Sequence
  Description of Artificial Sequence: Synthetic oligonucleotide
  Sense strand starting at position 3895 of SEQ ID NO: 916899
ucguucggauuauuuagau

SEQ ID NO: 1192747 - RNA, 19 nt, Artificial Sequence
  Description of Artificial Sequence: Synthetic oligonucleotide
  Antisense strand to SEQ ID NO: 1192746
aucuaaauaauccgaacga

SEQ ID NO: 1192748 - RNA, 19 nt, Artificial Sequence
  Description of Artificial Sequence: Synthetic oligonucleotide
  Sense strand starting at position 3925 of SEQ ID NO: 916899
ucacuaaagugauugauuc

SEQ ID NO: 1192749 - RNA, 19 nt, Artificial Sequence
  Description of Artificial Sequence: Synthetic oligonucleotide
  Antisense strand to SEQ ID NO: 1192748
gaaucaaucacuuuaguga

SEQ ID NO: 1192750 - RNA, 19 nt, Artificial Sequence
  Description of Artificial Sequence: Synthetic oligonucleotide
  Sense strand starting at position 3932 of SEQ ID NO: 916899
agugauugauucuuggauu

SEQ ID NO: 1192751 - RNA, 19 nt, Artificial Sequence
  Description of Artificial Sequence: Synthetic oligonucleotide
  Antisense strand to SEQ ID NO: 1192750
aauccaagaaucaaucacu

SEQ ID NO: 1192752 - RNA, 19 nt, Artificial Sequence
  Description of Artificial Sequence: Synthetic oligonucleotide
  Sense strand starting at position 213 of SEQ ID NO: 916900
cuaucuguauugcugaaac

SEQ ID NO: 1192753 - RNA, 19 nt, Artificial Sequence
  Description of Artificial Sequence: Synthetic oligonucleotide
  Antisense strand to SEQ ID NO: 1192752
guuucagcaauacagauag

SEQ ID NO: 1192754 - RNA, 19 nt, Artificial Sequence
  Description of Artificial Sequence: Synthetic oligonucleotide
  Sense strand starting at position 215 of SEQ ID NO: 916900
aucuguauugcugaaacuc

SEQ ID NO: 1192755 - RNA, 19 nt, Artificial Sequence
  Description of Artificial Sequence: Synthetic oligonucleotide
  Antisense strand to SEQ ID NO: 1192754
gaguuucagcaauacagau

SEQ ID NO: 1192756 - RNA, 19 nt, Artificial Sequence
  Description of Artificial Sequence: Synthetic oligonucleotide
  Sense strand starting at position 223 of SEQ ID NO: 916900
ugcugaaacuccuuugucu

SEQ ID NO: 1192757 - RNA, 19 nt, Artificial Sequence
  Description of Artificial Sequence: Synthetic oligonucleotide
  Antisense strand to SEQ ID NO: 1192756
agacaaaggaguuucagca

SEQ ID NO: 1192758 - RNA, 19 nt, Artificial Sequence
  Description of Artificial Sequence: Synthetic oligonucleotide
  Sense strand starting at position 279 of SEQ ID NO: 916900
augguuuagucucucccua

SEQ ID NO: 1192759 - RNA, 19 nt, Artificial Sequence
  Description of Artificial Sequence: Synthetic oligonucleotide
  Antisense strand to SEQ ID NO: 1192758
uagggagagacuaaaccau

SEQ ID NO: 1192760 - RNA, 19 nt, Artificial Sequence
  Description of Artificial Sequence: Synthetic oligonucleotide
  Sense strand starting at position 281 of SEQ ID NO: 916900
gguuuagucucucccuaaa

SEQ ID NO: 1192761 - RNA, 19 nt, Artificial Sequence
  Description of Artificial Sequence: Synthetic oligonucleotide
  Antisense strand to SEQ ID NO: 1192760
uuuagggagagacuaaacc

SEQ ID NO: 1192762 - RNA, 19 nt, Artificial Sequence
  Description of Artificial Sequence: Synthetic oligonucleotide
  Sense strand starting at position 298 of SEQ ID NO: 916900
aaacgcuuucugugaagag

SEQ ID NO: 1192763 - RNA, 19 nt, Artificial Sequence
  Description of Artificial Sequence: Synthetic oligonucleotide
  Antisense strand to SEQ ID NO: 1192762
cucuucacagaaagcguuu

SEQ ID NO: 1192764 - RNA, 19 nt, Artificial Sequence
  Description of Artificial Sequence: Synthetic oligonucleotide
  Sense strand starting at position 302 of SEQ ID NO: 916900
gcuuucugugaagaguaag

SEQ ID NO: 1192765 - RNA, 19 nt, Artificial Sequence
  Description of Artificial Sequence: Synthetic oligonucleotide
  Antisense strand to SEQ ID NO: 1192764
cuuacucuucacagaaagc

SEQ ID NO: 1192766 - RNA, 19 nt, Artificial Sequence
  Description of Artificial Sequence: Synthetic oligonucleotide
  Sense strand starting at position 523 of SEQ ID NO: 916900
uggagugaucuuggucuaa

SEQ ID NO: 1192767 - RNA, 19 nt, Artificial Sequence
  Description of Artificial Sequence: Synthetic oligonucleotide
  Antisense strand to SEQ ID NO: 1192766
uuagaccaagaucacucca

SEQ ID NO: 1192768 - RNA, 19 nt, Artificial Sequence
  Description of Artificial Sequence: Synthetic oligonucleotide
  Sense strand starting at position 641 of SEQ ID NO: 916900
ggcgaaagccaccaguaua

SEQ ID NO: 1192769 - RNA, 19 nt, Artificial Sequence
  Description of Artificial Sequence: Synthetic oligonucleotide
  Antisense strand to SEQ ID NO: 1192768
uauacugguggcuuucgcc

SEQ ID NO: 1192770 - RNA, 19 nt, Artificial Sequence
  Description of Artificial Sequence: Synthetic oligonucleotide
  Sense strand starting at position 821 of SEQ ID NO: 916900
uggugagaguuucuaaaua

SEQ ID NO: 1192771 - RNA, 19 nt, Artificial Sequence
  Description of Artificial Sequence: Synthetic oligonucleotide
  Antisense strand to SEQ ID NO: 1192770
uauuuagaaacucucacca

SEQ ID NO: 1192772 - RNA, 19 nt, Artificial Sequence
  Description of Artificial Sequence: Synthetic oligonucleotide
  Sense strand starting at position 1345 of SEQ ID NO: 916900
aagggaucuacagguuagu

SEQ ID NO: 1192773 - RNA, 19 nt, Artificial Sequence
  Description of Artificial Sequence: Synthetic oligonucleotide
  Antisense strand to SEQ ID NO: 1192772
acuaaccuguagaucccuu

SEQ ID NO: 1192774 - RNA, 19 nt, Artificial Sequence
  Description of Artificial Sequence: Synthetic oligonucleotide
  Sense strand starting at position 1348 of SEQ ID NO: 916900
ggaucuacagguuaguagu

SEQ ID NO: 1192775 - RNA, 19 nt, Artificial Sequence
  Description of Artificial Sequence: Synthetic oligonucleotide
  Antisense strand to SEQ ID NO: 1192774
acuacuaaccuguagaucc

SEQ ID NO: 1192776 - RNA, 19 nt, Artificial Sequence
  Description of Artificial Sequence: Synthetic oligonucleotide
  Sense strand starting at position 1354 of SEQ ID NO: 916900
acagguuaguagucagaag

SEQ ID NO: 1192777 - RNA, 19 nt, Artificial Sequence
  Description of Artificial Sequence: Synthetic oligonucleotide
  Antisense strand to SEQ ID NO: 1192776
cuucugacuacuaaccugu

SEQ ID NO: 1192778 - RNA, 19 nt, Artificial Sequence
  Description of Artificial Sequence: Synthetic oligonucleotide
  Sense strand starting at position 2129 of SEQ ID NO: 916900
ggaauuauccaauggcaag

SEQ ID NO: 1192779 - RNA, 19 nt, Artificial Sequence
  Description of Artificial Sequence: Synthetic oligonucleotide
  Antisense strand to SEQ ID NO: 1192778
cuugccauuggauaauucc

SEQ ID NO: 1192780 - RNA, 19 nt, Artificial Sequence
  Description of Artificial Sequence: Synthetic oligonucleotide
  Sense strand starting at position 2259 of SEQ ID NO: 916900
gcgggagcuggagaugauu

SEQ ID NO: 1192781 - RNA, 19 nt, Artificial Sequence
  Description of Artificial Sequence: Synthetic oligonucleotide
  Antisense strand to SEQ ID NO: 1192780
aaucaucuccagcucccgc

SEQ ID NO: 1192782 - RNA, 19 nt, Artificial Sequence
  Description of Artificial Sequence: Synthetic oligonucleotide
  Sense strand starting at position 2268 of SEQ ID NO: 916900
ggagaugauuggcuuggaa

SEQ ID NO: 1192783 - RNA, 19 nt, Artificial Sequence
  Description of Artificial Sequence: Synthetic oligonucleotide
  Antisense strand to SEQ ID NO: 1192782
uuccaagccaaucaucucc

SEQ ID NO: 1192784 - RNA, 19 nt, Artificial Sequence
  Description of Artificial Sequence: Synthetic oligonucleotide
  Sense strand starting at position 2271 of SEQ ID NO: 916900
gaugauuggcuuggaagga

SEQ ID NO: 1192785 - RNA, 19 nt, Artificial Sequence
  Description of Artificial Sequence: Synthetic oligonucleotide
  Antisense strand to SEQ ID NO: 1192784
uccuuccaagccaaucauc

SEQ ID NO: 1192786 - RNA, 19 nt, Artificial Sequence
  Description of Artificial Sequence: Synthetic oligonucleotide
  Sense strand starting at position 2307 of SEQ ID NO: 916900
gcgggcucccugagacgua

SEQ ID NO: 1192787 - RNA, 19 nt, Artificial Sequence
  Description of Artificial Sequence: Synthetic oligonucleotide
  Antisense strand to SEQ ID NO: 1192786
uacgucucagggagcccgc

SEQ ID NO: 1192788 - RNA, 19 nt, Artificial Sequence
  Description of Artificial Sequence: Synthetic oligonucleotide
  Sense strand starting at position 2370 of SEQ ID NO: 916900
cagaauccgggauaugcuu

SEQ ID NO: 1192789 - RNA, 19 nt, Artificial Sequence
  Description of Artificial Sequence: Synthetic oligonucleotide
  Antisense strand to SEQ ID NO: 1192788
aagcauaucccggauucug

SEQ ID NO: 1192790 - RNA, 19 nt, Artificial Sequence
  Description of Artificial Sequence: Synthetic oligonucleotide
  Sense strand starting at position 2376 of SEQ ID NO: 916900
ccgggauaugcuugggcaa

SEQ ID NO: 1192791 - RNA, 19 nt, Artificial Sequence
  Description of Artificial Sequence: Synthetic oligonucleotide
  Antisense strand to SEQ ID NO: 1192790
uugcccaagcauaucccgg

SEQ ID NO: 1192792 - RNA, 19 nt, Artificial Sequence
  Description of Artificial Sequence: Synthetic oligonucleotide
  Sense strand starting at position 2377 of SEQ ID NO: 916900
cgggauaugcuugggcaaa

SEQ ID NO: 1192793 - RNA, 19 nt, Artificial Sequence
  Description of Artificial Sequence: Synthetic oligonucleotide
  Antisense strand to SEQ ID NO: 1192792
uuugcccaagcauaucccg

SEQ ID NO: 1192794 - RNA, 19 nt, Artificial Sequence
  Description of Artificial Sequence: Synthetic oligonucleotide
  Sense strand starting at position 2484 of SEQ ID NO: 916900
gaacguuaugauuggaguu

SEQ ID NO: 1192795 - RNA, 19 nt, Artificial Sequence
  Description of Artificial Sequence: Synthetic oligonucleotide
  Antisense strand to SEQ ID NO: 1192794
aacuccaaucauaacguuc

SEQ ID NO: 1192796 - RNA, 19 nt, Artificial Sequence
  Description of Artificial Sequence: Synthetic oligonucleotide
  Sense strand starting at position 2485 of SEQ ID NO: 916900
aacguuaugauuggaguua

SEQ ID NO: 1192797 - RNA, 19 nt, Artificial Sequence
  Description of Artificial Sequence: Synthetic oligonucleotide
  Antisense strand to SEQ ID NO: 1192796
uaacuccaaucauaacguu

SEQ ID NO: 1192798 - RNA, 19 nt, Artificial Sequence
  Description of Artificial Sequence: Synthetic oligonucleotide
  Sense strand starting at position 2528 of SEQ ID NO: 916900
gcauauugacgugaacuaa

SEQ ID NO: 1192799 - RNA, 19 nt, Artificial Sequence
  Description of Artificial Sequence: Synthetic oligonucleotide
  Antisense strand to SEQ ID NO: 1192798
uuaguucacgucaauaugc

SEQ ID NO: 1192800 - RNA, 19 nt, Artificial Sequence
  Description of Artificial Sequence: Synthetic oligonucleotide
  Sense strand starting at position 2550 of SEQ ID NO: 916900
ccaauuaaacgccgaauua

SEQ ID NO: 1192801 - RNA, 19 nt, Artificial Sequence
  Description of Artificial Sequence: Synthetic oligonucleotide
  Antisense strand to SEQ ID NO: 1192800
uaauucggcguuuaauugg

SEQ ID NO: 1192802 - RNA, 19 nt, Artificial Sequence
  Description of Artificial Sequence: Synthetic oligonucleotide
  Sense strand starting at position 2725 of SEQ ID NO: 916900
agaggagaccgucgccaua

SEQ ID NO: 1192803 - RNA, 19 nt, Artificial Sequence
  Description of Artificial Sequence: Synthetic oligonucleotide
  Antisense strand to SEQ ID NO: 1192802
uauggcgacggucuccucu

SEQ ID NO: 1192804 - RNA, 19 nt, Artificial Sequence
  Description of Artificial Sequence: Synthetic oligonucleotide
  Sense strand starting at position 2986 of SEQ ID NO: 916900
acgagaucuggugacagca

SEQ ID NO: 1192805 - RNA, 19 nt, Artificial Sequence
  Description of Artificial Sequence: Synthetic oligonucleotide
  Antisense strand to SEQ ID NO: 1192804
ugcugucaccagaucucgu

SEQ ID NO: 1192806 - RNA, 19 nt, Artificial Sequence
  Description of Artificial Sequence: Synthetic oligonucleotide
  Sense strand starting at position 3002 of SEQ ID NO: 916900
gcacucaccgaauaaguua

SEQ ID NO: 1192807 - RNA, 19 nt, Artificial Sequence
  Description of Artificial Sequence: Synthetic oligonucleotide
  Antisense strand to SEQ ID NO: 1192806
uaacuuauucggugagugc

SEQ ID NO: 1192808 - RNA, 19 nt, Artificial Sequence
  Description of Artificial Sequence: Synthetic oligonucleotide
  Sense strand starting at position 3105 of SEQ ID NO: 916900
cacuuaaacgacugguuaa

SEQ ID NO: 1192809 - RNA, 19 nt, Artificial Sequence
  Description of Artificial Sequence: Synthetic oligonucleotide
  Antisense strand to SEQ ID NO: 1192808
uuaaccagucguuuaagug

SEQ ID NO: 1192810 - RNA, 19 nt, Artificial Sequence
  Description of Artificial Sequence: Synthetic oligonucleotide
  Sense strand starting at position 3108 of SEQ ID NO: 916900
uuaaacgacugguuaacuu

SEQ ID NO: 1192811 - RNA, 19 nt, Artificial Sequence
  Description of Artificial Sequence: Synthetic oligonucleotide
  Antisense strand to SEQ ID NO: 1192810
aaguuaaccagucguuuaa

SEQ ID NO: 1192812 - RNA, 19 nt, Artificial Sequence
  Description of Artificial Sequence: Synthetic oligonucleotide
  Sense strand starting at position 3139 of SEQ ID NO: 916900
ggcuaaagugcggauaagu

SEQ ID NO: 1192813 - RNA, 19 nt, Artificial Sequence
  Description of Artificial Sequence: Synthetic oligonucleotide
  Antisense strand to SEQ ID NO: 1192812
acuuauccgcacuuuagcc

SEQ ID NO: 1192814 - RNA, 19 nt, Artificial Sequence
  Description of Artificial Sequence: Synthetic oligonucleotide
  Sense strand starting at position 3148 of SEQ ID NO: 916900
gcggauaagucacuuccau

SEQ ID NO: 1192815 - RNA, 19 nt, Artificial Sequence
  Description of Artificial Sequence: Synthetic oligonucleotide
  Antisense strand to SEQ ID NO: 1192814
auggaagugacuuauccgc

SEQ ID NO: 1192816 - RNA, 19 nt, Artificial Sequence
  Description of Artificial Sequence: Synthetic oligonucleotide
  Sense strand starting at position 3183 of SEQ ID NO: 916900
guaaauaccgccuaugcau

SEQ ID NO: 1192817 - RNA, 19 nt, Artificial Sequence
  Description of Artificial Sequence: Synthetic oligonucleotide
  Antisense strand to SEQ ID NO: 1192816
augcauaggcgguauuuac

SEQ ID NO: 1192818 - RNA, 19 nt, Artificial Sequence
  Description of Artificial Sequence: Synthetic oligonucleotide
  Sense strand starting at position 3312 of SEQ ID NO: 916900
cuuaauagcuugucaauga

SEQ ID NO: 1192819 - RNA, 19 nt, Artificial Sequence
  Description of Artificial Sequence: Synthetic oligonucleotide
  Antisense strand to SEQ ID NO: 1192818
ucauugacaagcuauuaag

SEQ ID NO: 1192820 - RNA, 19 nt, Artificial Sequence
  Description of Artificial Sequence: Synthetic oligonucleotide
  Sense strand starting at position 3485 of SEQ ID NO: 916900
agugauugcugacugccua

SEQ ID NO: 1192821 - RNA, 19 nt, Artificial Sequence
  Description of Artificial Sequence: Synthetic oligonucleotide
  Antisense strand to SEQ ID NO: 1192820
uaggcagucagcaaucacu

SEQ ID NO: 1192822 - RNA, 19 nt, Artificial Sequence
  Description of Artificial Sequence: Synthetic oligonucleotide
  Sense strand starting at position 3504 of SEQ ID NO: 916900
ccguguuaggugccuaagu

SEQ ID NO: 1192823 - RNA, 19 nt, Artificial Sequence
  Description of Artificial Sequence: Synthetic oligonucleotide
  Antisense strand to SEQ ID NO: 1192822
acuuaggcaccuaacacgg

SEQ ID NO: 1192824 - RNA, 19 nt, Artificial Sequence
  Description of Artificial Sequence: Synthetic oligonucleotide
  Sense strand starting at position 3506 of SEQ ID NO: 916900
guguuaggugccuaaguca

SEQ ID NO: 1192825 - RNA, 19 nt, Artificial Sequence
  Description of Artificial Sequence: Synthetic oligonucleotide
  Antisense strand to SEQ ID NO: 1192824
ugacuuaggcaccuaacac

SEQ ID NO: 1192826 - RNA, 19 nt, Artificial Sequence
  Description of Artificial Sequence: Synthetic oligonucleotide
  Sense strand starting at position 3523 of SEQ ID NO: 916900
cagggaggcaguuaguauu

SEQ ID NO: 1192827 - RNA, 19 nt, Artificial Sequence
  Description of Artificial Sequence: Synthetic oligonucleotide
  Antisense strand to SEQ ID NO: 1192826
aauacuaacugccucccug

SEQ ID NO: 1192828 - RNA, 19 nt, Artificial Sequence
  Description of Artificial Sequence: Synthetic oligonucleotide
  Sense strand starting at position 3608 of SEQ ID NO: 916900
cauuuaggcugagaaguga

SEQ ID NO: 1192829 - RNA, 19 nt, Artificial Sequence
  Description of Artificial Sequence: Synthetic oligonucleotide
  Antisense strand to SEQ ID NO: 1192828
ucacuucucagccuaaaug

SEQ ID NO: 1192830 - RNA, 19 nt, Artificial Sequence
  Description of Artificial Sequence: Synthetic oligonucleotide
  Sense strand starting at position 3643 of SEQ ID NO: 916900
aagcaaaugaguuguagug

SEQ ID NO: 1192831 - RNA, 19 nt, Artificial Sequence
  Description of Artificial Sequence: Synthetic oligonucleotide
  Antisense strand to SEQ ID NO: 1192830
cacuacaacucauuugcuu

SEQ ID NO: 1192832 - RNA, 19 nt, Artificial Sequence
  Description of Artificial Sequence: Synthetic oligonucleotide
  Sense strand starting at position 662 of SEQ ID NO: 916901
cuaucuguauugcugaaac

SEQ ID NO: 1192833 - RNA, 19 nt, Artificial Sequence
  Description of Artificial Sequence: Synthetic oligonucleotide
  Antisense strand to SEQ ID NO: 1192832
guuucagcaauacagauag

SEQ ID NO: 1192834 - RNA, 19 nt, Artificial Sequence
  Description of Artificial Sequence: Synthetic oligonucleotide
  Sense strand starting at position 664 of SEQ ID NO: 916901
aucuguauugcugaaacuc

SEQ ID NO: 1192835 - RNA, 19 nt, Artificial Sequence
  Description of Artificial Sequence: Synthetic oligonucleotide
  Antisense strand to SEQ ID NO: 1192834
gaguuucagcaauacagau

SEQ ID NO: 1192836 - RNA, 19 nt, Artificial Sequence
  Description of Artificial Sequence: Synthetic oligonucleotide
  Sense strand starting at position 672 of SEQ ID NO: 916901
ugcugaaacuccuuugucu

SEQ ID NO: 1192837 - RNA, 19 nt, Artificial Sequence
  Description of Artificial Sequence: Synthetic oligonucleotide
  Antisense strand to SEQ ID NO: 1192836
agacaaaggaguuucagca

SEQ ID NO: 1192838 - RNA, 19 nt, Artificial Sequence
  Description of Artificial Sequence: Synthetic oligonucleotide
  Sense strand starting at position 728 of SEQ ID NO: 916901
augguuuagucucucccua

SEQ ID NO: 1192839 - RNA, 19 nt, Artificial Sequence
  Description of Artificial Sequence: Synthetic oligonucleotide
  Antisense strand to SEQ ID NO: 1192838
uagggagagacuaaaccau

SEQ ID NO: 1192840 - RNA, 19 nt, Artificial Sequence
  Description of Artificial Sequence: Synthetic oligonucleotide
  Sense strand starting at position 730 of SEQ ID NO: 916901
gguuuagucucucccuaaa

SEQ ID NO: 1192841 - RNA, 19 nt, Artificial Sequence
  Description of Artificial Sequence: Synthetic oligonucleotide
  Antisense strand to SEQ ID NO: 1192840
uuuagggagagacuaaacc

SEQ ID NO: 1192842 - RNA, 19 nt, Artificial Sequence
  Description of Artificial Sequence: Synthetic oligonucleotide
  Sense strand starting at position 747 of SEQ ID NO: 916901
aaacgcuuucugugaagag

SEQ ID NO: 1192843 - RNA, 19 nt, Artificial Sequence
  Description of Artificial Sequence: Synthetic oligonucleotide
  Antisense strand to SEQ ID NO: 1192842
cucuucacagaaagcguuu

SEQ ID NO: 1192844 - RNA, 19 nt, Artificial Sequence
  Description of Artificial Sequence: Synthetic oligonucleotide
  Sense strand starting at position 751 of SEQ ID NO: 916901
gcuuucugugaagaguaag

SEQ ID NO: 1192845 - RNA, 19 nt, Artificial Sequence
  Description of Artificial Sequence: Synthetic oligonucleotide
  Antisense strand to SEQ ID NO: 1192844
cuuacucuucacagaaagc

SEQ ID NO: 1192846 - RNA, 19 nt, Artificial Sequence
  Description of Artificial Sequence: Synthetic oligonucleotide
  Sense strand starting at position 972 of SEQ ID NO: 916901
uggagugaucuuggucuaa

SEQ ID NO: 1192847 - RNA, 19 nt, Artificial Sequence
  Description of Artificial Sequence: Synthetic oligonucleotide
  Antisense strand to SEQ ID NO: 1192846
uuagaccaagaucacucca

SEQ ID NO: 1192848 - RNA, 19 nt, Artificial Sequence
  Description of Artificial Sequence: Synthetic oligonucleotide
  Sense strand starting at position 1090 of SEQ ID NO: 916901
ggcgaaagccaccaguaua

SEQ ID NO: 1192849 - RNA, 19 nt, Artificial Sequence
  Description of Artificial Sequence: Synthetic oligonucleotide
  Antisense strand to SEQ ID NO: 1192848
uauacugguggcuuucgcc

SEQ ID NO: 1192850 - RNA, 19 nt, Artificial Sequence
  Description of Artificial Sequence: Synthetic oligonucleotide
  Sense strand starting at position 1270 of SEQ ID NO: 916901
uggugagaguuucuaaaua

SEQ ID NO: 1192851 - RNA, 19 nt, Artificial Sequence
  Description of Artificial Sequence: Synthetic oligonucleotide
  Antisense strand to SEQ ID NO: 1192850
uauuuagaaacucucacca

SEQ ID NO: 1192852 - RNA, 19 nt, Artificial Sequence
  Description of Artificial Sequence: Synthetic oligonucleotide
  Sense strand starting at position 1794 of SEQ ID NO: 916901
aagggaucuacagguuagu

SEQ ID NO: 1192853 - RNA, 19 nt, Artificial Sequence
  Description of Artificial Sequence: Synthetic oligonucleotide
  Antisense strand to SEQ ID NO: 1192852
acuaaccuguagaucccuu

SEQ ID NO: 1192854 - RNA, 19 nt, Artificial Sequence
  Description of Artificial Sequence: Synthetic oligonucleotide
  Sense strand starting at position 1797 of SEQ ID NO: 916901
ggaucuacagguuaguagu

SEQ ID NO: 1192855 - RNA, 19 nt, Artificial Sequence
  Description of Artificial Sequence: Synthetic oligonucleotide
  Antisense strand to SEQ ID NO: 1192854
acuacuaaccuguagaucc

SEQ ID NO: 1192856 - RNA, 19 nt, Artificial Sequence
  Description of Artificial Sequence: Synthetic oligonucleotide
  Sense strand starting at position 1803 of SEQ ID NO: 916901
acagguuaguagucagaag

SEQ ID NO: 1192857 - RNA, 19 nt, Artificial Sequence
  Description of Artificial Sequence: Synthetic oligonucleotide
  Antisense strand to SEQ ID NO: 1192856
cuucugacuacuaaccugu

SEQ ID NO: 1192858 - RNA, 19 nt, Artificial Sequence
  Description of Artificial Sequence: Synthetic oligonucleotide
  Sense strand starting at position 2578 of SEQ ID NO: 916901
ggaauuauccaauggcaag

SEQ ID NO: 1192859 - RNA, 19 nt, Artificial Sequence
  Description of Artificial Sequence: Synthetic oligonucleotide
  Antisense strand to SEQ ID NO: 1192858
cuugccauuggauaauucc

SEQ ID NO: 1192860 - RNA, 19 nt, Artificial Sequence
  Description of Artificial Sequence: Synthetic oligonucleotide
  Sense strand starting at position 2708 of SEQ ID NO: 916901
gcgggagcuggagaugauu

SEQ ID NO: 1192861 - RNA, 19 nt, Artificial Sequence
  Description of Artificial Sequence: Synthetic oligonucleotide
  Antisense strand to SEQ ID NO: 1192860
aaucaucuccagcucccgc

SEQ ID NO: 1192862 - RNA, 19 nt, Artificial Sequence
  Description of Artificial Sequence: Synthetic oligonucleotide
  Sense strand starting at position 2717 of SEQ ID NO: 916901
ggagaugauuggcuuggaa

SEQ ID NO: 1192863 - RNA, 19 nt, Artificial Sequence
  Description of Artificial Sequence: Synthetic oligonucleotide
  Antisense strand to SEQ ID NO: 1192862
uuccaagccaaucaucucc

SEQ ID NO: 1192864 - RNA, 19 nt, Artificial Sequence
  Description of Artificial Sequence: Synthetic oligonucleotide
  Sense strand starting at position 2720 of SEQ ID NO: 916901
gaugauuggcuuggaagga

SEQ ID NO: 1192865 - RNA, 19 nt, Artificial Sequence
  Description of Artificial Sequence: Synthetic oligonucleotide
  Antisense strand to SEQ ID NO: 1192864
uccuuccaagccaaucauc

SEQ ID NO: 1192866 - RNA, 19 nt, Artificial Sequence
  Description of Artificial Sequence: Synthetic oligonucleotide
  Sense strand starting at position 2756 of SEQ ID NO: 916901
gcgggcucccugagacgua

SEQ ID NO: 1192867 - RNA, 19 nt, Artificial Sequence
  Description of Artificial Sequence: Synthetic oligonucleotide
  Antisense strand to SEQ ID NO: 1192866
uacgucucagggagcccgc

SEQ ID NO: 1192868 - RNA, 19 nt, Artificial Sequence
  Description of Artificial Sequence: Synthetic oligonucleotide
  Sense strand starting at position 2819 of SEQ ID NO: 916901
cagaauccgggauaugcuu

SEQ ID NO: 1192869 - RNA, 19 nt, Artificial Sequence
  Description of Artificial Sequence: Synthetic oligonucleotide
  Antisense strand to SEQ ID NO: 1192868
aagcauaucccggauucug

SEQ ID NO: 1192870 - RNA, 19 nt, Artificial Sequence
  Description of Artificial Sequence: Synthetic oligonucleotide
  Sense strand starting at position 2825 of SEQ ID NO: 916901
ccgggauaugcuugggcaa

SEQ ID NO: 1192871 - RNA, 19 nt, Artificial Sequence
  Description of Artificial Sequence: Synthetic oligonucleotide
  Antisense strand to SEQ ID NO: 1192870
uugcccaagcauaucccgg

SEQ ID NO: 1192872 - RNA, 19 nt, Artificial Sequence
  Description of Artificial Sequence: Synthetic oligonucleotide
  Sense strand starting at position 2826 of SEQ ID NO: 916901
cgggauaugcuugggcaaa

SEQ ID NO: 1192873 - RNA, 19 nt, Artificial Sequence
  Description of Artificial Sequence: Synthetic oligonucleotide
  Antisense strand to SEQ ID NO: 1192872
uuugcccaagcauaucccg

SEQ ID NO: 1192874 - RNA, 19 nt, Artificial Sequence
  Description of Artificial Sequence: Synthetic oligonucleotide
  Sense strand starting at position 2933 of SEQ ID NO: 916901
gaacguuaugauuggaguu

SEQ ID NO: 1192875 - RNA, 19 nt, Artificial Sequence
  Description of Artificial Sequence: Synthetic oligonucleotide
  Antisense strand to SEQ ID NO: 1192874
aacuccaaucauaacguuc

SEQ ID NO: 1192876 - RNA, 19 nt, Artificial Sequence
  Description of Artificial Sequence: Synthetic oligonucleotide
  Sense strand starting at position 2934 of SEQ ID NO: 916901
aacguuaugauuggaguua

SEQ ID NO: 1192877 - RNA, 19 nt, Artificial Sequence
  Description of Artificial Sequence: Synthetic oligonucleotide
  Antisense strand to SEQ ID NO: 1192876
uaacuccaaucauaacguu

SEQ ID NO: 1192878 - RNA, 19 nt, Artificial Sequence
  Description of Artificial Sequence: Synthetic oligonucleotide
  Sense strand starting at position 2976 of SEQ ID NO: 916901
cgcauauugacgugaacua

SEQ ID NO: 1192879 - RNA, 19 nt, Artificial Sequence
  Description of Artificial Sequence: Synthetic oligonucleotide
  Antisense strand to SEQ ID NO: 1192878
uaguucacgucaauaugcg

SEQ ID NO: 1192880 - RNA, 19 nt, Artificial Sequence
  Description of Artificial Sequence: Synthetic oligonucleotide
  Sense strand starting at position 2977 of SEQ ID NO: 916901
gcauauugacgugaacuaa

SEQ ID NO: 1192881 - RNA, 19 nt, Artificial Sequence
  Description of Artificial Sequence: Synthetic oligonucleotide
  Antisense strand to SEQ ID NO: 1192880
uuaguucacgucaauaugc

SEQ ID NO: 1192882 - RNA, 19 nt, Artificial Sequence
  Description of Artificial Sequence: Synthetic oligonucleotide
  Sense strand starting at position 2999 of SEQ ID NO: 916901
ccaauuaaacgccgaauua

SEQ ID NO: 1192883 - RNA, 19 nt, Artificial Sequence
  Description of Artificial Sequence: Synthetic oligonucleotide
  Antisense strand to SEQ ID NO: 1192882
uaauucggcguuuaauugg

SEQ ID NO: 1192884 - RNA, 19 nt, Artificial Sequence
  Description of Artificial Sequence: Synthetic oligonucleotide
  Sense strand starting at position 3174 of SEQ ID NO: 916901
agaggagaccgucgccaua

SEQ ID NO: 1192885 - RNA, 19 nt, Artificial Sequence
  Description of Artificial Sequence: Synthetic oligonucleotide
  Antisense strand to SEQ ID NO: 1192884
uauggcgacggucuccucu

SEQ ID NO: 1192886 - RNA, 19 nt, Artificial Sequence
  Description of Artificial Sequence: Synthetic oligonucleotide
  Sense strand starting at position 3435 of SEQ ID NO: 916901
acgagaucuggugacagca

SEQ ID NO: 1192887 - RNA, 19 nt, Artificial Sequence
  Description of Artificial Sequence: Synthetic oligonucleotide
  Antisense strand to SEQ ID NO: 1192886
ugcugucaccagaucucgu

SEQ ID NO: 1192888 - RNA, 19 nt, Artificial Sequence
  Description of Artificial Sequence: Synthetic oligonucleotide
  Sense strand starting at position 3451 of SEQ ID NO: 916901
gcacucaccgaauaaguua

SEQ ID NO: 1192889 - RNA, 19 nt, Artificial Sequence
  Description of Artificial Sequence: Synthetic oligonucleotide
  Antisense strand to SEQ ID NO: 1192888
uaacuuauucggugagugc

SEQ ID NO: 1192890 - RNA, 19 nt, Artificial Sequence
  Description of Artificial Sequence: Synthetic oligonucleotide
  Sense strand starting at position 3554 of SEQ ID NO: 916901
cacuuaaacgacugguuaa

SEQ ID NO: 1192891 - RNA, 19 nt, Artificial Sequence
  Description of Artificial Sequence: Synthetic oligonucleotide
  Antisense strand to SEQ ID NO: 1192890
uuaaccagucguuuaagug

SEQ ID NO: 1192892 - RNA, 19 nt, Artificial Sequence
  Description of Artificial Sequence: Synthetic oligonucleotide
  Sense strand starting at position 3557 of SEQ ID NO: 916901
uuaaacgacugguuaacuu

SEQ ID NO: 1192893 - RNA, 19 nt, Artificial Sequence
  Description of Artificial Sequence: Synthetic oligonucleotide
  Antisense strand to SEQ ID NO: 1192892
aaguuaaccagucguuuaa

SEQ ID NO: 1192894 - RNA, 19 nt, Artificial Sequence
  Description of Artificial Sequence: Synthetic oligonucleotide
  Sense strand starting at position 3588 of SEQ ID NO: 916901
ggcuaaagugcggauaagu

SEQ ID NO: 1192895 - RNA, 19 nt, Artificial Sequence
  Description of Artificial Sequence: Synthetic oligonucleotide
  Antisense strand to SEQ ID NO: 1192894
acuuauccgcacuuuagcc

SEQ ID NO: 1192896 - RNA, 19 nt, Artificial Sequence
  Description of Artificial Sequence: Synthetic oligonucleotide
  Sense strand starting at position 3597 of SEQ ID NO: 916901
gcggauaagucacuuccau

SEQ ID NO: 1192897 - RNA, 19 nt, Artificial Sequence
  Description of Artificial Sequence: Synthetic oligonucleotide
  Antisense strand to SEQ ID NO: 1192896
auggaagugacuuauccgc

SEQ ID NO: 1192898 - RNA, 19 nt, Artificial Sequence
  Description of Artificial Sequence: Synthetic oligonucleotide
  Sense strand starting at position 3632 of SEQ ID NO: 916901
guaaauaccgccuaugcau

SEQ ID NO: 1192899 - RNA, 19 nt, Artificial Sequence
  Description of Artificial Sequence: Synthetic oligonucleotide
  Antisense strand to SEQ ID NO: 1192898
augcauaggcgguauuuac

SEQ ID NO: 1192900 - RNA, 19 nt, Artificial Sequence
  Description of Artificial Sequence: Synthetic oligonucleotide
  Sense strand starting at position 3761 of SEQ ID NO: 916901
cuuaauagcuugucaauga

SEQ ID NO: 1192901 - RNA, 19 nt, Artificial Sequence
  Description of Artificial Sequence: Synthetic oligonucleotide
  Antisense strand to SEQ ID NO: 1192900
ucauugacaagcuauuaag

SEQ ID NO: 1192902 - RNA, 19 nt, Artificial Sequence
  Description of Artificial Sequence: Synthetic oligonucleotide
  Sense strand starting at position 3934 of SEQ ID NO: 916901
agugauugcugacugccua

SEQ ID NO: 1192903 - RNA, 19 nt, Artificial Sequence
  Description of Artificial Sequence: Synthetic oligonucleotide
  Antisense strand to SEQ ID NO: 1192902
uaggcagucagcaaucacu

SEQ ID NO: 1192904 - RNA, 19 nt, Artificial Sequence
  Description of Artificial Sequence: Synthetic oligonucleotide
  Sense strand starting at position 3953 of SEQ ID NO: 916901
ccguguuaggugccuaagu

SEQ ID NO: 1192905 - RNA, 19 nt, Artificial Sequence
  Description of Artificial Sequence: Synthetic oligonucleotide
  Antisense strand to SEQ ID NO: 1192904
acuuaggcaccuaacacgg

SEQ ID NO: 1192906 - RNA, 19 nt, Artificial Sequence
  Description of Artificial Sequence: Synthetic oligonucleotide
  Sense strand starting at position 3955 of SEQ ID NO: 916901
guguuaggugccuaaguca

SEQ ID NO: 1192907 - RNA, 19 nt, Artificial Sequence
  Description of Artificial Sequence: Synthetic oligonucleotide
  Antisense strand to SEQ ID NO: 1192906
ugacuuaggcaccuaacac

SEQ ID NO: 1192908 - RNA, 19 nt, Artificial Sequence
  Description of Artificial Sequence: Synthetic oligonucleotide
  Sense strand starting at position 3972 of SEQ ID NO: 916901
cagggaggcaguuaguauu

SEQ ID NO: 1192909 - RNA, 19 nt, Artificial Sequence
  Description of Artificial Sequence: Synthetic oligonucleotide
  Antisense strand to SEQ ID NO: 1192908
aauacuaacugccucccug

SEQ ID NO: 1192910 - RNA, 19 nt, Artificial Sequence
  Description of Artificial Sequence: Synthetic oligonucleotide
  Sense strand starting at position 3982 of SEQ ID NO: 916901
guuaguauuccaugucauc

SEQ ID NO: 1192911 - RNA, 19 nt, Artificial Sequence
  Description of Artificial Sequence: Synthetic oligonucleotide
  Antisense strand to SEQ ID NO: 1192910
gaugacauggaauacuaac

SEQ ID NO: 1192912 - RNA, 19 nt, Artificial Sequence
  Description of Artificial Sequence: Synthetic oligonucleotide
  Sense strand starting at position 239 of SEQ ID NO: 916902
ggcccuaaauuccugcaga

SEQ ID NO: 1192913 - RNA, 19 nt, Artificial Sequence
  Description of Artificial Sequence: Synthetic oligonucleotide
  Antisense strand to SEQ ID NO: 1192912
ucugcaggaauuuagggcc

SEQ ID NO: 1192914 - RNA, 19 nt, Artificial Sequence
  Description of Artificial Sequence: Synthetic oligonucleotide
  Sense strand starting at position 319 of SEQ ID NO: 916902
ggaggaaucuggcccugag

SEQ ID NO: 1192915 - RNA, 19 nt, Artificial Sequence
  Description of Artificial Sequence: Synthetic oligonucleotide
  Antisense strand to SEQ ID NO: 1192914
cucagggccagauuccucc

SEQ ID NO: 1192916 - RNA, 19 nt, Artificial Sequence
  Description of Artificial Sequence: Synthetic oligonucleotide
  Sense strand starting at position 389 of SEQ ID NO: 916902
agaguagagucagaaauuu

SEQ ID NO: 1192917 - RNA, 19 nt, Artificial Sequence
  Description of Artificial Sequence: Synthetic oligonucleotide
  Antisense strand to SEQ ID NO: 1192916
aaauuucugacucuacucu

SEQ ID NO: 1192918 - RNA, 19 nt, Artificial Sequence
  Description of Artificial Sequence: Synthetic oligonucleotide
  Sense strand starting at position 546 of SEQ ID NO: 916902
ugaguuugucuuuggcuga

SEQ ID NO: 1192919 - RNA, 19 nt, Artificial Sequence
  Description of Artificial Sequence: Synthetic oligonucleotide
  Antisense strand to SEQ ID NO: 1192918
ucagccaaagacaaacuca

SEQ ID NO: 1192920 - RNA, 19 nt, Artificial Sequence
  Description of Artificial Sequence: Synthetic oligonucleotide
  Sense strand starting at position 549 of SEQ ID NO: 916902
guuugucuuuggcugaaag

SEQ ID NO: 1192921 - RNA, 19 nt, Artificial Sequence
  Description of Artificial Sequence: Synthetic oligonucleotide
  Antisense strand to SEQ ID NO: 1192920
cuuucagccaaagacaaac

SEQ ID NO: 1192922 - RNA, 19 nt, Artificial Sequence
  Description of Artificial Sequence: Synthetic oligonucleotide
  Sense strand starting at position 551 of SEQ ID NO: 916902
uugucuuuggcugaaagcu

SEQ ID NO: 1192923 - RNA, 19 nt, Artificial Sequence
  Description of Artificial Sequence: Synthetic oligonucleotide
  Antisense strand to SEQ ID NO: 1192922
agcuuucagccaaagacaa

SEQ ID NO: 1192924 - RNA, 19 nt, Artificial Sequence
  Description of Artificial Sequence: Synthetic oligonucleotide
  Sense strand starting at position 1148 of SEQ ID NO: 916902
agcuacuaucuaugugagu

SEQ ID NO: 1192925 - RNA, 19 nt, Artificial Sequence
  Description of Artificial Sequence: Synthetic oligonucleotide
  Antisense strand to SEQ ID NO: 1192924
acucacauagauaguagcu

SEQ ID NO: 1192926 - RNA, 19 nt, Artificial Sequence
  Description of Artificial Sequence: Synthetic oligonucleotide
  Sense strand starting at position 1149 of SEQ ID NO: 916902
gcuacuaucuaugugaguu

SEQ ID NO: 1192927 - RNA, 19 nt, Artificial Sequence
  Description of Artificial Sequence: Synthetic oligonucleotide
  Antisense strand to SEQ ID NO: 1192926
aacucacauagauaguagc

SEQ ID NO: 1192928 - RNA, 19 nt, Artificial Sequence
  Description of Artificial Sequence: Synthetic oligonucleotide
  Sense strand starting at position 1155 of SEQ ID NO: 916902
aucuaugugaguuggagga

SEQ ID NO: 1192929 - RNA, 19 nt, Artificial Sequence
  Description of Artificial Sequence: Synthetic oligonucleotide
  Antisense strand to SEQ ID NO: 1192928
uccuccaacucacauagau

SEQ ID NO: 1192930 - RNA, 19 nt, Artificial Sequence
  Description of Artificial Sequence: Synthetic oligonucleotide
  Sense strand starting at position 1383 of SEQ ID NO: 916902
gaucuaaaguuagaaggga

SEQ ID NO: 1192931 - RNA, 19 nt, Artificial Sequence
  Description of Artificial Sequence: Synthetic oligonucleotide
  Antisense strand to SEQ ID NO: 1192930
ucccuucuaacuuuagauc

SEQ ID NO: 1192932 - RNA, 19 nt, Artificial Sequence
  Description of Artificial Sequence: Synthetic oligonucleotide
  Sense strand starting at position 1417 of SEQ ID NO: 916902
gcucucugucuguagggau

SEQ ID NO: 1192933 - RNA, 19 nt, Artificial Sequence
  Description of Artificial Sequence: Synthetic oligonucleotide
  Antisense strand to SEQ ID NO: 1192932
aucccuacagacagagagc

SEQ ID NO: 1192934 - RNA, 19 nt, Artificial Sequence
  Description of Artificial Sequence: Synthetic oligonucleotide
  Sense strand starting at position 1450 of SEQ ID NO: 916902
cagcuuucccagcggagaa

SEQ ID NO: 1192935 - RNA, 19 nt, Artificial Sequence
  Description of Artificial Sequence: Synthetic oligonucleotide
  Antisense strand to SEQ ID NO: 1192934
uucuccgcugggaaagcug

SEQ ID NO: 1192936 - RNA, 19 nt, Artificial Sequence
  Description of Artificial Sequence: Synthetic oligonucleotide
  Sense strand starting at position 1625 of SEQ ID NO: 916902
gggcaaguugucagggcuu

SEQ ID NO: 1192937 - RNA, 19 nt, Artificial Sequence
  Description of Artificial Sequence: Synthetic oligonucleotide
  Antisense strand to SEQ ID NO: 1192936
aagcccugacaacuugccc

SEQ ID NO: 1192938 - RNA, 19 nt, Artificial Sequence
  Description of Artificial Sequence: Synthetic oligonucleotide
  Sense strand starting at position 1705 of SEQ ID NO: 916902
gcagcagucccauaggcau

SEQ ID NO: 1192939 - RNA, 19 nt, Artificial Sequence
  Description of Artificial Sequence: Synthetic oligonucleotide
  Antisense strand to SEQ ID NO: 1192938
augccuaugggacugcugc

SEQ ID NO: 1192940 - RNA, 19 nt, Artificial Sequence
  Description of Artificial Sequence: Synthetic oligonucleotide
  Sense strand starting at position 2103 of SEQ ID NO: 916902
acuggaacgcacugacaua

SEQ ID NO: 1192941 - RNA, 19 nt, Artificial Sequence
  Description of Artificial Sequence: Synthetic oligonucleotide
  Antisense strand to SEQ ID NO: 1192940
uaugucagugcguuccagu

SEQ ID NO: 1192942 - RNA, 19 nt, Artificial Sequence
  Description of Artificial Sequence: Synthetic oligonucleotide
  Sense strand starting at position 2320 of SEQ ID NO: 916902
ucaggagagcaguguguau

SEQ ID NO: 1192943 - RNA, 19 nt, Artificial Sequence
  Description of Artificial Sequence: Synthetic oligonucleotide
  Antisense strand to SEQ ID NO: 1192942
auacacacugcucuccuga

SEQ ID NO: 1192944 - RNA, 19 nt, Artificial Sequence
  Description of Artificial Sequence: Synthetic oligonucleotide
  Sense strand starting at position 2422 of SEQ ID NO: 916902
gguuucugcugccuaaacu

SEQ ID NO: 1192945 - RNA, 19 nt, Artificial Sequence
  Description of Artificial Sequence: Synthetic oligonucleotide
  Antisense strand to SEQ ID NO: 1192944
aguuuaggcagcagaaacc

SEQ ID NO: 1192946 - RNA, 19 nt, Artificial Sequence
  Description of Artificial Sequence: Synthetic oligonucleotide
  Sense strand starting at position 2423 of SEQ ID NO: 916902
guuucugcugccuaaacuu

SEQ ID NO: 1192947 - RNA, 19 nt, Artificial Sequence
  Description of Artificial Sequence: Synthetic oligonucleotide
  Antisense strand to SEQ ID NO: 1192946
aaguuuaggcagcagaaac

SEQ ID NO: 1192948 - RNA, 19 nt, Artificial Sequence
  Description of Artificial Sequence: Synthetic oligonucleotide
  Sense strand starting at position 2449 of SEQ ID NO: 916902
cacugagguugguuccaga

SEQ ID NO: 1192949 - RNA, 19 nt, Artificial Sequence
  Description of Artificial Sequence: Synthetic oligonucleotide
  Antisense strand to SEQ ID NO: 1192948
ucuggaaccaaccucagug

SEQ ID NO: 1192950 - RNA, 19 nt, Artificial Sequence
  Description of Artificial Sequence: Synthetic oligonucleotide
  Sense strand starting at position 2603 of SEQ ID NO: 916902
ccuggaucuucugaugaag

SEQ ID NO: 1192951 - RNA, 19 nt, Artificial Sequence
  Description of Artificial Sequence: Synthetic oligonucleotide
  Antisense strand to SEQ ID NO: 1192950
cuucaucagaagauccagg

SEQ ID NO: 1192952 - RNA, 19 nt, Artificial Sequence
  Description of Artificial Sequence: Synthetic oligonucleotide
  Sense strand starting at position 2661 of SEQ ID NO: 916902
aggucauugggucaacuca

SEQ ID NO: 1192953 - RNA, 19 nt, Artificial Sequence
  Description of Artificial Sequence: Synthetic oligonucleotide
  Antisense strand to SEQ ID NO: 1192952
ugaguugacccaaugaccu

SEQ ID NO: 1192954 - RNA, 19 nt, Artificial Sequence
  Description of Artificial Sequence: Synthetic oligonucleotide
  Sense strand starting at position 2736 of SEQ ID NO: 916902
cuccauauuccuugucagu

SEQ ID NO: 1192955 - RNA, 19 nt, Artificial Sequence
  Description of Artificial Sequence: Synthetic oligonucleotide
  Antisense strand to SEQ ID NO: 1192954
acugacaaggaauauggag

SEQ ID NO: 1192956 - RNA, 19 nt, Artificial Sequence
  Description of Artificial Sequence: Synthetic oligonucleotide
  Sense strand starting at position 2738 of SEQ ID NO: 916902
ccauauuccuugucaguua

SEQ ID NO: 1192957 - RNA, 19 nt, Artificial Sequence
  Description of Artificial Sequence: Synthetic oligonucleotide
  Antisense strand to SEQ ID NO: 1192956
uaacugacaaggaauaugg

SEQ ID NO: 1192958 - RNA, 19 nt, Artificial Sequence
  Description of Artificial Sequence: Synthetic oligonucleotide
  Sense strand starting at position 2752 of SEQ ID NO: 916902
aguuaccaucccuggguaa

SEQ ID NO: 1192959 - RNA, 19 nt, Artificial Sequence
  Description of Artificial Sequence: Synthetic oligonucleotide
  Antisense strand to SEQ ID NO: 1192958
uuacccagggaugguaacu

SEQ ID NO: 1192960 - RNA, 19 nt, Artificial Sequence
  Description of Artificial Sequence: Synthetic oligonucleotide
  Sense strand starting at position 2785 of SEQ ID NO: 916902
cuuagagaccauggguuua

SEQ ID NO: 1192961 - RNA, 19 nt, Artificial Sequence
  Description of Artificial Sequence: Synthetic oligonucleotide
  Antisense strand to SEQ ID NO: 1192960
uaaacccauggucucuaag

SEQ ID NO: 1192962 - RNA, 19 nt, Artificial Sequence
  Description of Artificial Sequence: Synthetic oligonucleotide
  Sense strand starting at position 2787 of SEQ ID NO: 916902
uagagaccauggguuuaau

SEQ ID NO: 1192963 - RNA, 19 nt, Artificial Sequence
  Description of Artificial Sequence: Synthetic oligonucleotide
  Antisense strand to SEQ ID NO: 1192962
auuaaacccauggucucua

SEQ ID NO: 1192964 - RNA, 19 nt, Artificial Sequence
  Description of Artificial Sequence: Synthetic oligonucleotide
  Sense strand starting at position 2797 of SEQ ID NO: 916902
ggguuuaaucuccauccuu

SEQ ID NO: 1192965 - RNA, 19 nt, Artificial Sequence
  Description of Artificial Sequence: Synthetic oligonucleotide
  Antisense strand to SEQ ID NO: 1192964
aaggauggagauuaaaccc

SEQ ID NO: 1192966 - RNA, 19 nt, Artificial Sequence
  Description of Artificial Sequence: Synthetic oligonucleotide
  Sense strand starting at position 2818 of SEQ ID NO: 916902
guggacaguucuccagagu

SEQ ID NO: 1192967 - RNA, 19 nt, Artificial Sequence
  Description of Artificial Sequence: Synthetic oligonucleotide
  Antisense strand to SEQ ID NO: 1192966
acucuggagaacuguccac

SEQ ID NO: 1192968 - RNA, 19 nt, Artificial Sequence
  Description of Artificial Sequence: Synthetic oligonucleotide
  Sense strand starting at position 2821 of SEQ ID NO: 916902
gacaguucuccagagugau

SEQ ID NO: 1192969 - RNA, 19 nt, Artificial Sequence
  Description of Artificial Sequence: Synthetic oligonucleotide
  Antisense strand to SEQ ID NO: 1192968
aucacucuggagaacuguc

SEQ ID NO: 1192970 - RNA, 19 nt, Artificial Sequence
  Description of Artificial Sequence: Synthetic oligonucleotide
  Sense strand starting at position 2827 of SEQ ID NO: 916902
ucuccagagugaucugacu

SEQ ID NO: 1192971 - RNA, 19 nt, Artificial Sequence
  Description of Artificial Sequence: Synthetic oligonucleotide
  Antisense strand to SEQ ID NO: 1192970
agucagaucacucuggaga

SEQ ID NO: 1192972 - RNA, 19 nt, Artificial Sequence
  Description of Artificial Sequence: Synthetic oligonucleotide
  Sense strand starting at position 2839 of SEQ ID NO: 916902
ucugacuuuccugggaacu

SEQ ID NO: 1192973 - RNA, 19 nt, Artificial Sequence
  Description of Artificial Sequence: Synthetic oligonucleotide
  Antisense strand to SEQ ID NO: 1192972
aguucccaggaaagucaga

SEQ ID NO: 1192974 - RNA, 19 nt, Artificial Sequence
  Description of Artificial Sequence: Synthetic oligonucleotide
  Sense strand starting at position 2840 of SEQ ID NO: 916902
cugacuuuccugggaacuc

SEQ ID NO: 1192975 - RNA, 19 nt, Artificial Sequence
  Description of Artificial Sequence: Synthetic oligonucleotide
  Antisense strand to SEQ ID NO: 1192974
gaguucccaggaaagucag

SEQ ID NO: 1192976 - RNA, 19 nt, Artificial Sequence
  Description of Artificial Sequence: Synthetic oligonucleotide
  Sense strand starting at position 3027 of SEQ ID NO: 916902
ugagguauuuaugggagag

SEQ ID NO: 1192977 - RNA, 19 nt, Artificial Sequence
  Description of Artificial Sequence: Synthetic oligonucleotide
  Antisense strand to SEQ ID NO: 1192976
cucucccauaaauaccuca

SEQ ID NO: 1192978 - RNA, 19 nt, Artificial Sequence
  Description of Artificial Sequence: Synthetic oligonucleotide
  Sense strand starting at position 3029 of SEQ ID NO: 916902
agguauuuaugggagagag

SEQ ID NO: 1192979 - RNA, 19 nt, Artificial Sequence
  Description of Artificial Sequence: Synthetic oligonucleotide
  Antisense strand to SEQ ID NO: 1192978
cucucucccauaaauaccu

SEQ ID NO: 1192980 - RNA, 19 nt, Artificial Sequence
  Description of Artificial Sequence: Synthetic oligonucleotide
  Sense strand starting at position 3325 of SEQ ID NO: 916902
gcaguuucgccagcaggua

SEQ ID NO: 1192981 - RNA, 19 nt, Artificial Sequence
  Description of Artificial Sequence: Synthetic oligonucleotide
  Antisense strand to SEQ ID NO: 1192980
uaccugcuggcgaaacugc

SEQ ID NO: 1192982 - RNA, 19 nt, Artificial Sequence
  Description of Artificial Sequence: Synthetic oligonucleotide
  Sense strand starting at position 3803 of SEQ ID NO: 916902
acauaauuguguccgcuga

SEQ ID NO: 1192983 - RNA, 19 nt, Artificial Sequence
  Description of Artificial Sequence: Synthetic oligonucleotide
  Antisense strand to SEQ ID NO: 1192982
ucagcggacacaauuaugu

SEQ ID NO: 1192984 - RNA, 19 nt, Artificial Sequence
  Description of Artificial Sequence: Synthetic oligonucleotide
  Sense strand starting at position 3804 of SEQ ID NO: 916902
cauaauuguguccgcugau

SEQ ID NO: 1192985 - RNA, 19 nt, Artificial Sequence
  Description of Artificial Sequence: Synthetic oligonucleotide
  Antisense strand to SEQ ID NO: 1192984
aucagcggacacaauuaug

SEQ ID NO: 1192986 - RNA, 19 nt, Artificial Sequence
  Description of Artificial Sequence: Synthetic oligonucleotide
  Sense strand starting at position 3805 of SEQ ID NO: 916902
auaauuguguccgcugauu

SEQ ID NO: 1192987 - RNA, 19 nt, Artificial Sequence
  Description of Artificial Sequence: Synthetic oligonucleotide
  Antisense strand to SEQ ID NO: 1192986
aaucagcggacacaauuau

SEQ ID NO: 1192988 - RNA, 19 nt, Artificial Sequence
  Description of Artificial Sequence: Synthetic oligonucleotide
  Sense strand starting at position 3807 of SEQ ID NO: 916902
aauuguguccgcugauuac

SEQ ID NO: 1192989 - RNA, 19 nt, Artificial Sequence
  Description of Artificial Sequence: Synthetic oligonucleotide
  Antisense strand to SEQ ID NO: 1192988
guaaucagcggacacaauu

SEQ ID NO: 1192990 - RNA, 19 nt, Artificial Sequence
  Description of Artificial Sequence: Synthetic oligonucleotide
  Sense strand starting at position 3969 of SEQ ID NO: 916902
agagaagcuuuagagaaau

SEQ ID NO: 1192991 - RNA, 19 nt, Artificial Sequence
  Description of Artificial Sequence: Synthetic oligonucleotide
  Antisense strand to SEQ ID NO: 1192990
auuucucuaaagcuucucu

SEQ ID NO: 1192992 - RNA, 19 nt, Artificial Sequence
  Description of Artificial Sequence: Synthetic oligonucleotide
  Sense strand starting at position 76 of SEQ ID NO: 916903
auaaguacuggauguuaua

SEQ ID NO: 1192993 - RNA, 19 nt, Artificial Sequence
  Description of Artificial Sequence: Synthetic oligonucleotide
  Antisense strand to SEQ ID NO: 1192992
uauaacauccaguacuuau

SEQ ID NO: 1192994 - RNA, 19 nt, Artificial Sequence
  Description of Artificial Sequence: Synthetic oligonucleotide
  Sense strand starting at position 105 of SEQ ID NO: 916903
gaguaaaucuaagccagug

SEQ ID NO: 1192995 - RNA, 19 nt, Artificial Sequence
  Description of Artificial Sequence: Synthetic oligonucleotide
  Antisense strand to SEQ ID NO: 1192994
cacuggcuuagauuuacuc

SEQ ID NO: 1192996 - RNA, 19 nt, Artificial Sequence
  Description of Artificial Sequence: Synthetic oligonucleotide
  Sense strand starting at position 157 of SEQ ID NO: 916903
cagcaugacuaaguaaaga

SEQ ID NO: 1192997 - RNA, 19 nt, Artificial Sequence
  Description of Artificial Sequence: Synthetic oligonucleotide
  Antisense strand to SEQ ID NO: 1192996
ucuuuacuuagucaugcug

SEQ ID NO: 1192998 - RNA, 19 nt, Artificial Sequence
  Description of Artificial Sequence: Synthetic oligonucleotide
  Sense strand starting at position 359 of SEQ ID NO: 916903
aaacauagucugggugaca

SEQ ID NO: 1192999 - RNA, 19 nt, Artificial Sequence
  Description of Artificial Sequence: Synthetic oligonucleotide
  Antisense strand to SEQ ID NO: 1192998
ugucacccagacuauguuu

SEQ ID NO: 1193000 - RNA, 19 nt, Artificial Sequence
  Description of Artificial Sequence: Synthetic oligonucleotide
  Sense strand starting at position 409 of SEQ ID NO: 916903
ggaagaguguuguaggaag

SEQ ID NO: 1193001 - RNA, 19 nt, Artificial Sequence
  Description of Artificial Sequence: Synthetic oligonucleotide
  Antisense strand to SEQ ID NO: 1193000
cuuccuacaacacucuucc

SEQ ID NO: 1193002 - RNA, 19 nt, Artificial Sequence
  Description of Artificial Sequence: Synthetic oligonucleotide
  Sense strand starting at position 515 of SEQ ID NO: 916903
ggaggcugauggagaaguu

SEQ ID NO: 1193003 - RNA, 19 nt, Artificial Sequence
  Description of Artificial Sequence: Synthetic oligonucleotide
  Antisense strand to SEQ ID NO: 1193002
aacuucuccaucagccucc

SEQ ID NO: 1193004 - RNA, 19 nt, Artificial Sequence
  Description of Artificial Sequence: Synthetic oligonucleotide
  Sense strand starting at position 571 of SEQ ID NO: 916903
ggcaauauaugagaauacu

SEQ ID NO: 1193005 - RNA, 19 nt, Artificial Sequence
  Description of Artificial Sequence: Synthetic oligonucleotide
  Antisense strand to SEQ ID NO: 1193004
aguauucucauauauugcc

SEQ ID NO: 1193006 - RNA, 19 nt, Artificial Sequence
  Description of Artificial Sequence: Synthetic oligonucleotide
  Sense strand starting at position 577 of SEQ ID NO: 916903
auaugagaauacucguaua

SEQ ID NO: 1193007 - RNA, 19 nt, Artificial Sequence
  Description of Artificial Sequence: Synthetic oligonucleotide
  Antisense strand to SEQ ID NO: 1193006
uauacgaguauucucauau

SEQ ID NO: 1193008 - RNA, 19 nt, Artificial Sequence
  Description of Artificial Sequence: Synthetic oligonucleotide
  Sense strand starting at position 648 of SEQ ID NO: 916903
ggcgguucuggguaaauca

SEQ ID NO: 1193009 - RNA, 19 nt, Artificial Sequence
  Description of Artificial Sequence: Synthetic oligonucleotide
  Antisense strand to SEQ ID NO: 1193008
ugauuuacccagaaccgcc

SEQ ID NO: 1193010 - RNA, 19 nt, Artificial Sequence
  Description of Artificial Sequence: Synthetic oligonucleotide
  Sense strand starting at position 655 of SEQ ID NO: 916903
cuggguaaaucaggcauuu

SEQ ID NO: 1193011 - RNA, 19 nt, Artificial Sequence
  Description of Artificial Sequence: Synthetic oligonucleotide
  Antisense strand to SEQ ID NO: 1193010
aaaugccugauuuacccag

SEQ ID NO: 1193012 - RNA, 19 nt, Artificial Sequence
  Description of Artificial Sequence: Synthetic oligonucleotide
  Sense strand starting at position 682 of SEQ ID NO: 916903
gcaagcuugggugagcuau

SEQ ID NO: 1193013 - RNA, 19 nt, Artificial Sequence
  Description of Artificial Sequence: Synthetic oligonucleotide
  Antisense strand to SEQ ID NO: 1193012
auagcucacccaagcuugc

SEQ ID NO: 1193014 - RNA, 19 nt, Artificial Sequence
  Description of Artificial Sequence: Synthetic oligonucleotide
  Sense strand starting at position 684 of SEQ ID NO: 916903
aagcuugggugagcuauuu

SEQ ID NO: 1193015 - RNA, 19 nt, Artificial Sequence
  Description of Artificial Sequence: Synthetic oligonucleotide
  Antisense strand to SEQ ID NO: 1193014
aaauagcucacccaagcuu

SEQ ID NO: 1193016 - RNA, 19 nt, Artificial Sequence
  Description of Artificial Sequence: Synthetic oligonucleotide
  Sense strand starting at position 704 of SEQ ID NO: 916903
accuuugaggccuaagauu

SEQ ID NO: 1193017 - RNA, 19 nt, Artificial Sequence
  Description of Artificial Sequence: Synthetic oligonucleotide
  Antisense strand to SEQ ID NO: 1193016
aaucuuaggccucaaaggu

SEQ ID NO: 1193018 - RNA, 19 nt, Artificial Sequence
  Description of Artificial Sequence: Synthetic oligonucleotide
  Sense strand starting at position 713 of SEQ ID NO: 916903
gccuaagauuccucuccug

SEQ ID NO: 1193019 - RNA, 19 nt, Artificial Sequence
  Description of Artificial Sequence: Synthetic oligonucleotide
  Antisense strand to SEQ ID NO: 1193018
caggagaggaaucuuaggc

SEQ ID NO: 1193020 - RNA, 19 nt, Artificial Sequence
  Description of Artificial Sequence: Synthetic oligonucleotide
  Sense strand starting at position 769 of SEQ ID NO: 916903
uguuacaaggauuagcaau

SEQ ID NO: 1193021 - RNA, 19 nt, Artificial Sequence
  Description of Artificial Sequence: Synthetic oligonucleotide
  Antisense strand to SEQ ID NO: 1193020
auugcuaauccuuguaaca

SEQ ID NO: 1193022 - RNA, 19 nt, Artificial Sequence
  Description of Artificial Sequence: Synthetic oligonucleotide
  Sense strand starting at position 792 of SEQ ID NO: 916903
aguguugaguucuuagcac

SEQ ID NO: 1193023 - RNA, 19 nt, Artificial Sequence
  Description of Artificial Sequence: Synthetic oligonucleotide
  Antisense strand to SEQ ID NO: 1193022
gugcuaagaacucaacacu

SEQ ID NO: 1193024 - RNA, 19 nt, Artificial Sequence
  Description of Artificial Sequence: Synthetic oligonucleotide
  Sense strand starting at position 812 of SEQ ID NO: 916903
gugucuggcacuuaguagu

SEQ ID NO: 1193025 - RNA, 19 nt, Artificial Sequence
  Description of Artificial Sequence: Synthetic oligonucleotide
  Antisense strand to SEQ ID NO: 1193024
acuacuaagugccagacac

SEQ ID NO: 1193026 - RNA, 19 nt, Artificial Sequence
  Description of Artificial Sequence: Synthetic oligonucleotide
  Sense strand starting at position 822 of SEQ ID NO: 916903
cuuaguaguugcuccauaa

SEQ ID NO: 1193027 - RNA, 19 nt, Artificial Sequence
  Description of Artificial Sequence: Synthetic oligonucleotide
  Antisense strand to SEQ ID NO: 1193026
uuauggagcaacuacuaag

SEQ ID NO: 1193028 - RNA, 19 nt, Artificial Sequence
  Description of Artificial Sequence: Synthetic oligonucleotide
  Sense strand starting at position 826 of SEQ ID NO: 916903
guaguugcuccauaaaugg

SEQ ID NO: 1193029 - RNA, 19 nt, Artificial Sequence
  Description of Artificial Sequence: Synthetic oligonucleotide
  Antisense strand to SEQ ID NO: 1193028
ccauuuauggagcaacuac

SEQ ID NO: 1193030 - RNA, 19 nt, Artificial Sequence
  Description of Artificial Sequence: Synthetic oligonucleotide
  Sense strand starting at position 848 of SEQ ID NO: 916903
cuagcaguauugucacagu

SEQ ID NO: 1193031 - RNA, 19 nt, Artificial Sequence
  Description of Artificial Sequence: Synthetic oligonucleotide
  Antisense strand to SEQ ID NO: 1193030
acugugacaauacugcuag

SEQ ID NO: 1193032 - RNA, 19 nt, Artificial Sequence
  Description of Artificial Sequence: Synthetic oligonucleotide
  Sense strand starting at position 855 of SEQ ID NO: 916903
uauugucacaguugggaga

SEQ ID NO: 1193033 - RNA, 19 nt, Artificial Sequence
  Description of Artificial Sequence: Synthetic oligonucleotide
  Antisense strand to SEQ ID NO: 1193032
ucucccaacugugacaaua

SEQ ID NO: 1193034 - RNA, 19 nt, Artificial Sequence
  Description of Artificial Sequence: Synthetic oligonucleotide
  Sense strand starting at position 930 of SEQ ID NO: 916903
gaagguguggccugcagua

SEQ ID NO: 1193035 - RNA, 19 nt, Artificial Sequence
  Description of Artificial Sequence: Synthetic oligonucleotide
  Antisense strand to SEQ ID NO: 1193034
uacugcaggccacaccuuc

SEQ ID NO: 1193036 - RNA, 19 nt, Artificial Sequence
  Description of Artificial Sequence: Synthetic oligonucleotide
  Sense strand starting at position 1360 of SEQ ID NO: 916903
augacuucccuugaucugu

SEQ ID NO: 1193037 - RNA, 19 nt, Artificial Sequence
  Description of Artificial Sequence: Synthetic oligonucleotide
  Antisense strand to SEQ ID NO: 1193036
acagaucaagggaagucau

SEQ ID NO: 1193038 - RNA, 19 nt, Artificial Sequence
  Description of Artificial Sequence: Synthetic oligonucleotide
  Sense strand starting at position 1368 of SEQ ID NO: 916903
ccuugaucuguguguugau

SEQ ID NO: 1193039 - RNA, 19 nt, Artificial Sequence
  Description of Artificial Sequence: Synthetic oligonucleotide
  Antisense strand to SEQ ID NO: 1193038
aucaacacacagaucaagg

SEQ ID NO: 1193040 - RNA, 19 nt, Artificial Sequence
  Description of Artificial Sequence: Synthetic oligonucleotide
  Sense strand starting at position 1461 of SEQ ID NO: 916903
gcuggauccggccaacagu

SEQ ID NO: 1193041 - RNA, 19 nt, Artificial Sequence
  Description of Artificial Sequence: Synthetic oligonucleotide
  Antisense strand to SEQ ID NO: 1193040
acuguuggccggauccagc

SEQ ID NO: 1193042 - RNA, 19 nt, Artificial Sequence
  Description of Artificial Sequence: Synthetic oligonucleotide
  Sense strand starting at position 1628 of SEQ ID NO: 916903
auaggaacccgcuguaagu

SEQ ID NO: 1193043 - RNA, 19 nt, Artificial Sequence
  Description of Artificial Sequence: Synthetic oligonucleotide
  Antisense strand to SEQ ID NO: 1193042
acuuacagcggguuccuau

SEQ ID NO: 1193044 - RNA, 19 nt, Artificial Sequence
  Description of Artificial Sequence: Synthetic oligonucleotide
  Sense strand starting at position 1685 of SEQ ID NO: 916903
aaugaagguccuugggacu

SEQ ID NO: 1193045 - RNA, 19 nt, Artificial Sequence
  Description of Artificial Sequence: Synthetic oligonucleotide
  Antisense strand to SEQ ID NO: 1193044
agucccaaggaccuucauu

SEQ ID NO: 1193046 - RNA, 19 nt, Artificial Sequence
  Description of Artificial Sequence: Synthetic oligonucleotide
  Sense strand starting at position 2536 of SEQ ID NO: 916903
agccguuccaagcgaagaa

SEQ ID NO: 1193047 - RNA, 19 nt, Artificial Sequence
  Description of Artificial Sequence: Synthetic oligonucleotide
  Antisense strand to SEQ ID NO: 1193046
uucuucgcuuggaacggcu

SEQ ID NO: 1193048 - RNA, 19 nt, Artificial Sequence
  Description of Artificial Sequence: Synthetic oligonucleotide
  Sense strand starting at position 2872 of SEQ ID NO: 916903
ccagcuuguguacaugaua

SEQ ID NO: 1193049 - RNA, 19 nt, Artificial Sequence
  Description of Artificial Sequence: Synthetic oligonucleotide
  Antisense strand to SEQ ID NO: 1193048
uaucauguacacaagcugg

SEQ ID NO: 1193050 - RNA, 19 nt, Artificial Sequence
  Description of Artificial Sequence: Synthetic oligonucleotide
  Sense strand starting at position 2875 of SEQ ID NO: 916903
gcuuguguacaugauagca

SEQ ID NO: 1193051 - RNA, 19 nt, Artificial Sequence
  Description of Artificial Sequence: Synthetic oligonucleotide
  Antisense strand to SEQ ID NO: 1193050
ugcuaucauguacacaagc

SEQ ID NO: 1193052 - RNA, 19 nt, Artificial Sequence
  Description of Artificial Sequence: Synthetic oligonucleotide
  Sense strand starting at position 3067 of SEQ ID NO: 916903
agcuuuauccuguggaaag

SEQ ID NO: 1193053 - RNA, 19 nt, Artificial Sequence
  Description of Artificial Sequence: Synthetic oligonucleotide
  Antisense strand to SEQ ID NO: 1193052
cuuuccacaggauaaagcu

SEQ ID NO: 1193054 - RNA, 19 nt, Artificial Sequence
  Description of Artificial Sequence: Synthetic oligonucleotide
  Sense strand starting at position 3196 of SEQ ID NO: 916903
ggccgcuuccuggaacauu

SEQ ID NO: 1193055 - RNA, 19 nt, Artificial Sequence
  Description of Artificial Sequence: Synthetic oligonucleotide
  Antisense strand to SEQ ID NO: 1193054
aauguuccaggaagcggcc

SEQ ID NO: 1193056 - RNA, 19 nt, Artificial Sequence
  Description of Artificial Sequence: Synthetic oligonucleotide
  Sense strand starting at position 3517 of SEQ ID NO: 916903
aggccuuucuugccagaua

SEQ ID NO: 1193057 - RNA, 19 nt, Artificial Sequence
  Description of Artificial Sequence: Synthetic oligonucleotide
  Antisense strand to SEQ ID NO: 1193056
uaucuggcaagaaaggccu

SEQ ID NO: 1193058 - RNA, 19 nt, Artificial Sequence
  Description of Artificial Sequence: Synthetic oligonucleotide
  Sense strand starting at position 3614 of SEQ ID NO: 916903
ucuaaugugcccugccaga

SEQ ID NO: 1193059 - RNA, 19 nt, Artificial Sequence
  Description of Artificial Sequence: Synthetic oligonucleotide
  Antisense strand to SEQ ID NO: 1193058
ucuggcagggcacauuaga

SEQ ID NO: 1193060 - RNA, 19 nt, Artificial Sequence
  Description of Artificial Sequence: Synthetic oligonucleotide
  Sense strand starting at position 3653 of SEQ ID NO: 916903
auuccaauucuagauggca

SEQ ID NO: 1193061 - RNA, 19 nt, Artificial Sequence
  Description of Artificial Sequence: Synthetic oligonucleotide
  Antisense strand to SEQ ID NO: 1193060
ugccaucuagaauuggaau

SEQ ID NO: 1193062 - RNA, 19 nt, Artificial Sequence
  Description of Artificial Sequence: Synthetic oligonucleotide
  Sense strand starting at position 3732 of SEQ ID NO: 916903
gugggagcuucuucucaag

SEQ ID NO: 1193063 - RNA, 19 nt, Artificial Sequence
  Description of Artificial Sequence: Synthetic oligonucleotide
  Antisense strand to SEQ ID NO: 1193062
cuugagaagaagcucccac

SEQ ID NO: 1193064 - RNA, 19 nt, Artificial Sequence
  Description of Artificial Sequence: Synthetic oligonucleotide
  Sense strand starting at position 3767 of SEQ ID NO: 916903
cuuucuaguugcuuccaga

SEQ ID NO: 1193065 - RNA, 19 nt, Artificial Sequence
  Description of Artificial Sequence: Synthetic oligonucleotide
  Antisense strand to SEQ ID NO: 1193064
ucuggaagcaacuagaaag

SEQ ID NO: 1193066 - RNA, 19 nt, Artificial Sequence
  Description of Artificial Sequence: Synthetic oligonucleotide
  Sense strand starting at position 3777 of SEQ ID NO: 916903
gcuuccagauucuuggaga

SEQ ID NO: 1193067 - RNA, 19 nt, Artificial Sequence
  Description of Artificial Sequence: Synthetic oligonucleotide
  Antisense strand to SEQ ID NO: 1193066
ucuccaagaaucuggaagc

SEQ ID NO: 1193068 - RNA, 19 nt, Artificial Sequence
  Description of Artificial Sequence: Synthetic oligonucleotide
  Sense strand starting at position 3780 of SEQ ID NO: 916903
uccagauucuuggagaaga

SEQ ID NO: 1193069 - RNA, 19 nt, Artificial Sequence
  Description of Artificial Sequence: Synthetic oligonucleotide
  Antisense strand to SEQ ID NO: 1193068
ucuucuccaagaaucugga

SEQ ID NO: 1193070 - RNA, 19 nt, Artificial Sequence
  Description of Artificial Sequence: Synthetic oligonucleotide
  Sense strand starting at position 3793 of SEQ ID NO: 916903
agaagaugcauaugauguc

SEQ ID NO: 1193071 - RNA, 19 nt, Artificial Sequence
  Description of Artificial Sequence: Synthetic oligonucleotide
  Antisense strand to SEQ ID NO: 1193070
gacaucauaugcaucuucu

SEQ ID NO: 1193072 - RNA, 19 nt, Artificial Sequence
  Description of Artificial Sequence: Synthetic oligonucleotide
  Sense strand starting at position 391 of SEQ ID NO: 916904
augacagucugcucccauu

SEQ ID NO: 1193073 - RNA, 19 nt, Artificial Sequence
  Description of Artificial Sequence: Synthetic oligonucleotide
  Antisense strand to SEQ ID NO: 1193072
aaugggagcagacugucau

SEQ ID NO: 1193074 - RNA, 19 nt, Artificial Sequence
  Description of Artificial Sequence: Synthetic oligonucleotide
  Sense strand starting at position 658 of SEQ ID NO: 916904
cgauuacacucaggccaau

SEQ ID NO: 1193075 - RNA, 19 nt, Artificial Sequence
  Description of Artificial Sequence: Synthetic oligonucleotide
  Antisense strand to SEQ ID NO: 1193074
auuggccugaguguaaucg

SEQ ID NO: 1193076 - RNA, 19 nt, Artificial Sequence
  Description of Artificial Sequence: Synthetic oligonucleotide
  Sense strand starting at position 869 of SEQ ID NO: 916904
ggcccuaaauuccugcaga

SEQ ID NO: 1193077 - RNA, 19 nt, Artificial Sequence
  Description of Artificial Sequence: Synthetic oligonucleotide
  Antisense strand to SEQ ID NO: 1193076
ucugcaggaauuuagggcc

SEQ ID NO: 1193078 - RNA, 19 nt, Artificial Sequence
  Description of Artificial Sequence: Synthetic oligonucleotide
  Sense strand starting at position 949 of SEQ ID NO: 916904
ggaggaaucuggcccugag

SEQ ID NO: 1193079 - RNA, 19 nt, Artificial Sequence
  Description of Artificial Sequence: Synthetic oligonucleotide
  Antisense strand to SEQ ID NO: 1193078
cucagggccagauuccucc

SEQ ID NO: 1193080 - RNA, 19 nt, Artificial Sequence
  Description of Artificial Sequence: Synthetic oligonucleotide
  Sense strand starting at position 1019 of SEQ ID NO: 916904
agaguagagucagaaauuu

SEQ ID NO: 1193081 - RNA, 19 nt, Artificial Sequence
  Description of Artificial Sequence: Synthetic oligonucleotide
  Antisense strand to SEQ ID NO: 1193080
aaauuucugacucuacucu

SEQ ID NO: 1193082 - RNA, 19 nt, Artificial Sequence
  Description of Artificial Sequence: Synthetic oligonucleotide
  Sense strand starting at position 1176 of SEQ ID NO: 916904
ugaguuugucuuuggcuga

SEQ ID NO: 1193083 - RNA, 19 nt, Artificial Sequence
  Description of Artificial Sequence: Synthetic oligonucleotide
  Antisense strand to SEQ ID NO: 1193082
ucagccaaagacaaacuca

SEQ ID NO: 1193084 - RNA, 19 nt, Artificial Sequence
  Description of Artificial Sequence: Synthetic oligonucleotide
  Sense strand starting at position 1179 of SEQ ID NO: 916904
guuugucuuuggcugaaag

SEQ ID NO: 1193085 - RNA, 19 nt, Artificial Sequence
  Description of Artificial Sequence: Synthetic oligonucleotide
  Antisense strand to SEQ ID NO: 1193084
cuuucagccaaagacaaac

SEQ ID NO: 1193086 - RNA, 19 nt, Artificial Sequence
  Description of Artificial Sequence: Synthetic oligonucleotide
  Sense strand starting at position 1181 of SEQ ID NO: 916904
uugucuuuggcugaaagcu

SEQ ID NO: 1193087 - RNA, 19 nt, Artificial Sequence
  Description of Artificial Sequence: Synthetic oligonucleotide
  Antisense strand to SEQ ID NO: 1193086
agcuuucagccaaagacaa

SEQ ID NO: 1193088 - RNA, 19 nt, Artificial Sequence
  Description of Artificial Sequence: Synthetic oligonucleotide
  Sense strand starting at position 1778 of SEQ ID NO: 916904
agcuacuaucuaugugagu

SEQ ID NO: 1193089 - RNA, 19 nt, Artificial Sequence
  Description of Artificial Sequence: Synthetic oligonucleotide
  Antisense strand to SEQ ID NO: 1193088
acucacauagauaguagcu

SEQ ID NO: 1193090 - RNA, 19 nt, Artificial Sequence
  Description of Artificial Sequence: Synthetic oligonucleotide
  Sense strand starting at position 1779 of SEQ ID NO: 916904
gcuacuaucuaugugaguu

SEQ ID NO: 1193091 - RNA, 19 nt, Artificial Sequence
  Description of Artificial Sequence: Synthetic oligonucleotide
  Antisense strand to SEQ ID NO: 1193090
aacucacauagauaguagc

SEQ ID NO: 1193092 - RNA, 19 nt, Artificial Sequence
  Description of Artificial Sequence: Synthetic oligonucleotide
  Sense strand starting at position 1785 of SEQ ID NO: 916904
aucuaugugaguuggagga

SEQ ID NO: 1193093 - RNA, 19 nt, Artificial Sequence
  Description of Artificial Sequence: Synthetic oligonucleotide
  Antisense strand to SEQ ID NO: 1193092
uccuccaacucacauagau

SEQ ID NO: 1193094 - RNA, 19 nt, Artificial Sequence
  Description of Artificial Sequence: Synthetic oligonucleotide
  Sense strand starting at position 2013 of SEQ ID NO: 916904
gaucuaaaguuagaaggga

SEQ ID NO: 1193095 - RNA, 19 nt, Artificial Sequence
  Description of Artificial Sequence: Synthetic oligonucleotide
  Antisense strand to SEQ ID NO: 1193094
ucccuucuaacuuuagauc

SEQ ID NO: 1193096 - RNA, 19 nt, Artificial Sequence
  Description of Artificial Sequence: Synthetic oligonucleotide
  Sense strand starting at position 2047 of SEQ ID NO: 916904
gcucucugucuguagggau

SEQ ID NO: 1193097 - RNA, 19 nt, Artificial Sequence
  Description of Artificial Sequence: Synthetic oligonucleotide
  Antisense strand to SEQ ID NO: 1193096
aucccuacagacagagagc

SEQ ID NO: 1193098 - RNA, 19 nt, Artificial Sequence
  Description of Artificial Sequence: Synthetic oligonucleotide
  Sense strand starting at position 2080 of SEQ ID NO: 916904
cagcuuucccagcggagaa

SEQ ID NO: 1193099 - RNA, 19 nt, Artificial Sequence
  Description of Artificial Sequence: Synthetic oligonucleotide
  Antisense strand to SEQ ID NO: 1193098
uucuccgcugggaaagcug

SEQ ID NO: 1193100 - RNA, 19 nt, Artificial Sequence
  Description of Artificial Sequence: Synthetic oligonucleotide
  Sense strand starting at position 2255 of SEQ ID NO: 916904
gggcaaguugucagggcuu

SEQ ID NO: 1193101 - RNA, 19 nt, Artificial Sequence
  Description of Artificial Sequence: Synthetic oligonucleotide
  Antisense strand to SEQ ID NO: 1193100
aagcccugacaacuugccc

SEQ ID NO: 1193102 - RNA, 19 nt, Artificial Sequence
  Description of Artificial Sequence: Synthetic oligonucleotide
  Sense strand starting at position 2335 of SEQ ID NO: 916904
gcagcagucccauaggcau

SEQ ID NO: 1193103 - RNA, 19 nt, Artificial Sequence
  Description of Artificial Sequence: Synthetic oligonucleotide
  Antisense strand to SEQ ID NO: 1193102
augccuaugggacugcugc

SEQ ID NO: 1193104 - RNA, 19 nt, Artificial Sequence
  Description of Artificial Sequence: Synthetic oligonucleotide
  Sense strand starting at position 2733 of SEQ ID NO: 916904
acuggaacgcacugacaua

SEQ ID NO: 1193105 - RNA, 19 nt, Artificial Sequence
  Description of Artificial Sequence: Synthetic oligonucleotide
  Antisense strand to SEQ ID NO: 1193104
uaugucagugcguuccagu

SEQ ID NO: 1193106 - RNA, 19 nt, Artificial Sequence
  Description of Artificial Sequence: Synthetic oligonucleotide
  Sense strand starting at position 2950 of SEQ ID NO: 916904
ucaggagagcaguguguau

SEQ ID NO: 1193107 - RNA, 19 nt, Artificial Sequence
  Description of Artificial Sequence: Synthetic oligonucleotide
  Antisense strand to SEQ ID NO: 1193106
auacacacugcucuccuga

SEQ ID NO: 1193108 - RNA, 19 nt, Artificial Sequence
  Description of Artificial Sequence: Synthetic oligonucleotide
  Sense strand starting at position 3052 of SEQ ID NO: 916904
gguuucugcugccuaaacu

SEQ ID NO: 1193109 - RNA, 19 nt, Artificial Sequence
  Description of Artificial Sequence: Synthetic oligonucleotide
  Antisense strand to SEQ ID NO: 1193108
aguuuaggcagcagaaacc

SEQ ID NO: 1193110 - RNA, 19 nt, Artificial Sequence
  Description of Artificial Sequence: Synthetic oligonucleotide
  Sense strand starting at position 3053 of SEQ ID NO: 916904
guuucugcugccuaaacuu

SEQ ID NO: 1193111 - RNA, 19 nt, Artificial Sequence
  Description of Artificial Sequence: Synthetic oligonucleotide
  Antisense strand to SEQ ID NO: 1193110
aaguuuaggcagcagaaac

SEQ ID NO: 1193112 - RNA, 19 nt, Artificial Sequence
  Description of Artificial Sequence: Synthetic oligonucleotide
  Sense strand starting at position 3079 of SEQ ID NO: 916904
cacugagguugguuccaga

SEQ ID NO: 1193113 - RNA, 19 nt, Artificial Sequence
  Description of Artificial Sequence: Synthetic oligonucleotide
  Antisense strand to SEQ ID NO: 1193112
ucuggaaccaaccucagug

SEQ ID NO: 1193114 - RNA, 19 nt, Artificial Sequence
  Description of Artificial Sequence: Synthetic oligonucleotide
  Sense strand starting at position 3233 of SEQ ID NO: 916904
ccuggaucuucugaugaag

SEQ ID NO: 1193115 - RNA, 19 nt, Artificial Sequence
  Description of Artificial Sequence: Synthetic oligonucleotide
  Antisense strand to SEQ ID NO: 1193114
cuucaucagaagauccagg

SEQ ID NO: 1193116 - RNA, 19 nt, Artificial Sequence
  Description of Artificial Sequence: Synthetic oligonucleotide
  Sense strand starting at position 3235 of SEQ ID NO: 916904
uggaucuucugaugaagag

SEQ ID NO: 1193117 - RNA, 19 nt, Artificial Sequence
  Description of Artificial Sequence: Synthetic oligonucleotide
  Antisense strand to SEQ ID NO: 1193116
cucuucaucagaagaucca

SEQ ID NO: 1193118 - RNA, 19 nt, Artificial Sequence
  Description of Artificial Sequence: Synthetic oligonucleotide
  Sense strand starting at position 3291 of SEQ ID NO: 916904
aggucauugggucaacuca

SEQ ID NO: 1193119 - RNA, 19 nt, Artificial Sequence
  Description of Artificial Sequence: Synthetic oligonucleotide
  Antisense strand to SEQ ID NO: 1193118
ugaguugacccaaugaccu

SEQ ID NO: 1193120 - RNA, 19 nt, Artificial Sequence
  Description of Artificial Sequence: Synthetic oligonucleotide
  Sense strand starting at position 3366 of SEQ ID NO: 916904
cuccauauuccuugucagu

SEQ ID NO: 1193121 - RNA, 19 nt, Artificial Sequence
  Description of Artificial Sequence: Synthetic oligonucleotide
  Antisense strand to SEQ ID NO: 1193120
acugacaaggaauauggag

SEQ ID NO: 1193122 - RNA, 19 nt, Artificial Sequence
  Description of Artificial Sequence: Synthetic oligonucleotide
  Sense strand starting at position 3368 of SEQ ID NO: 916904
ccauauuccuugucaguua

SEQ ID NO: 1193123 - RNA, 19 nt, Artificial Sequence
  Description of Artificial Sequence: Synthetic oligonucleotide
  Antisense strand to SEQ ID NO: 1193122
uaacugacaaggaauaugg

SEQ ID NO: 1193124 - RNA, 19 nt, Artificial Sequence
  Description of Artificial Sequence: Synthetic oligonucleotide
  Sense strand starting at position 3382 of SEQ ID NO: 916904
aguuaccaucccuggguaa

SEQ ID NO: 1193125 - RNA, 19 nt, Artificial Sequence
  Description of Artificial Sequence: Synthetic oligonucleotide
  Antisense strand to SEQ ID NO: 1193124
uuacccagggaugguaacu

SEQ ID NO: 1193126 - RNA, 19 nt, Artificial Sequence
  Description of Artificial Sequence: Synthetic oligonucleotide
  Sense strand starting at position 3405 of SEQ ID NO: 916904
guuaccaucucuuagagac

SEQ ID NO: 1193127 - RNA, 19 nt, Artificial Sequence
  Description of Artificial Sequence: Synthetic oligonucleotide
  Antisense strand to SEQ ID NO: 1193126
gucucuaagagaugguaac

SEQ ID NO: 1193128 - RNA, 19 nt, Artificial Sequence
  Description of Artificial Sequence: Synthetic oligonucleotide
  Sense strand starting at position 3415 of SEQ ID NO: 916904
cuuagagaccauggguuua

SEQ ID NO: 1193129 - RNA, 19 nt, Artificial Sequence
  Description of Artificial Sequence: Synthetic oligonucleotide
  Antisense strand to SEQ ID NO: 1193128
uaaacccauggucucuaag

SEQ ID NO: 1193130 - RNA, 19 nt, Artificial Sequence
  Description of Artificial Sequence: Synthetic oligonucleotide
  Sense strand starting at position 3417 of SEQ ID NO: 916904
uagagaccauggguuuaau

SEQ ID NO: 1193131 - RNA, 19 nt, Artificial Sequence
  Description of Artificial Sequence: Synthetic oligonucleotide
  Antisense strand to SEQ ID NO: 1193130
auuaaacccauggucucua

SEQ ID NO: 1193132 - RNA, 19 nt, Artificial Sequence
  Description of Artificial Sequence: Synthetic oligonucleotide
  Sense strand starting at position 3427 of SEQ ID NO: 916904
ggguuuaaucuccauccuu

SEQ ID NO: 1193133 - RNA, 19 nt, Artificial Sequence
  Description of Artificial Sequence: Synthetic oligonucleotide
  Antisense strand to SEQ ID NO: 1193132
aaggauggagauuaaaccc

SEQ ID NO: 1193134 - RNA, 19 nt, Artificial Sequence
  Description of Artificial Sequence: Synthetic oligonucleotide
  Sense strand starting at position 3448 of SEQ ID NO: 916904
guggacaguucuccagagu

SEQ ID NO: 1193135 - RNA, 19 nt, Artificial Sequence
  Description of Artificial Sequence: Synthetic oligonucleotide
  Antisense strand to SEQ ID NO: 1193134
acucuggagaacuguccac

SEQ ID NO: 1193136 - RNA, 19 nt, Artificial Sequence
  Description of Artificial Sequence: Synthetic oligonucleotide
  Sense strand starting at position 3451 of SEQ ID NO: 916904
gacaguucuccagagugau

SEQ ID NO: 1193137 - RNA, 19 nt, Artificial Sequence
  Description of Artificial Sequence: Synthetic oligonucleotide
  Antisense strand to SEQ ID NO: 1193136
aucacucuggagaacuguc

SEQ ID NO: 1193138 - RNA, 19 nt, Artificial Sequence
  Description of Artificial Sequence: Synthetic oligonucleotide
  Sense strand starting at position 3457 of SEQ ID NO: 916904
ucuccagagugaucugacu

SEQ ID NO: 1193139 - RNA, 19 nt, Artificial Sequence
  Description of Artificial Sequence: Synthetic oligonucleotide
  Antisense strand to SEQ ID NO: 1193138
agucagaucacucuggaga

SEQ ID NO: 1193140 - RNA, 19 nt, Artificial Sequence
  Description of Artificial Sequence: Synthetic oligonucleotide
  Sense strand starting at position 3468 of SEQ ID NO: 916904
aucugacuuuccugggaac

SEQ ID NO: 1193141 - RNA, 19 nt, Artificial Sequence
  Description of Artificial Sequence: Synthetic oligonucleotide
  Antisense strand to SEQ ID NO: 1193140
guucccaggaaagucagau

SEQ ID NO: 1193142 - RNA, 19 nt, Artificial Sequence
  Description of Artificial Sequence: Synthetic oligonucleotide
  Sense strand starting at position 3469 of SEQ ID NO: 916904
ucugacuuuccugggaacu

SEQ ID NO: 1193143 - RNA, 19 nt, Artificial Sequence
  Description of Artificial Sequence: Synthetic oligonucleotide
  Antisense strand to SEQ ID NO: 1193142
aguucccaggaaagucaga

SEQ ID NO: 1193144 - RNA, 19 nt, Artificial Sequence
  Description of Artificial Sequence: Synthetic oligonucleotide
  Sense strand starting at position 3470 of SEQ ID NO: 916904
cugacuuuccugggaacuc

SEQ ID NO: 1193145 - RNA, 19 nt, Artificial Sequence
  Description of Artificial Sequence: Synthetic oligonucleotide
  Antisense strand to SEQ ID NO: 1193144
gaguucccaggaaagucag

SEQ ID NO: 1193146 - RNA, 19 nt, Artificial Sequence
  Description of Artificial Sequence: Synthetic oligonucleotide
  Sense strand starting at position 3657 of SEQ ID NO: 916904
ugagguauuuaugggagag

SEQ ID NO: 1193147 - RNA, 19 nt, Artificial Sequence
  Description of Artificial Sequence: Synthetic oligonucleotide
  Antisense strand to SEQ ID NO: 1193146
cucucccauaaauaccuca

SEQ ID NO: 1193148 - RNA, 19 nt, Artificial Sequence
  Description of Artificial Sequence: Synthetic oligonucleotide
  Sense strand starting at position 3659 of SEQ ID NO: 916904
agguauuuaugggagagag

SEQ ID NO: 1193149 - RNA, 19 nt, Artificial Sequence
  Description of Artificial Sequence: Synthetic oligonucleotide
  Antisense strand to SEQ ID NO: 1193148
cucucucccauaaauaccu

SEQ ID NO: 1193150 - RNA, 19 nt, Artificial Sequence
  Description of Artificial Sequence: Synthetic oligonucleotide
  Sense strand starting at position 3955 of SEQ ID NO: 916904
gcaguuucgccagcaggua

SEQ ID NO: 1193151 - RNA, 19 nt, Artificial Sequence
  Description of Artificial Sequence: Synthetic oligonucleotide
  Antisense strand to SEQ ID NO: 1193150
uaccugcuggcgaaacugc

SEQ ID NO: 1193152 - RNA, 19 nt, Artificial Sequence
  Description of Artificial Sequence: Synthetic oligonucleotide
  Sense strand starting at position 8 of SEQ ID NO: 916905
agaccuagcugagaaauac

SEQ ID NO: 1193153 - RNA, 19 nt, Artificial Sequence
  Description of Artificial Sequence: Synthetic oligonucleotide
  Antisense strand to SEQ ID NO: 1193152
guauuucucagcuaggucu

SEQ ID NO: 1193154 - RNA, 19 nt, Artificial Sequence
  Description of Artificial Sequence: Synthetic oligonucleotide
  Sense strand starting at position 112 of SEQ ID NO: 916905
gcacacaauggucauuaca

SEQ ID NO: 1193155 - RNA, 19 nt, Artificial Sequence
  Description of Artificial Sequence: Synthetic oligonucleotide
  Antisense strand to SEQ ID NO: 1193154
uguaaugaccauugugugc

SEQ ID NO: 1193156 - RNA, 19 nt, Artificial Sequence
  Description of Artificial Sequence: Synthetic oligonucleotide
  Sense strand starting at position 257 of SEQ ID NO: 916905
ggcagccuauuugaaguua

SEQ ID NO: 1193157 - RNA, 19 nt, Artificial Sequence
  Description of Artificial Sequence: Synthetic oligonucleotide
  Antisense strand to SEQ ID NO: 1193156
uaacuucaaauaggcugcc

SEQ ID NO: 1193158 - RNA, 19 nt, Artificial Sequence
  Description of Artificial Sequence: Synthetic oligonucleotide
  Sense strand starting at position 352 of SEQ ID NO: 916905
auuucucagugagaaauug

SEQ ID NO: 1193159 - RNA, 19 nt, Artificial Sequence
  Description of Artificial Sequence: Synthetic oligonucleotide
  Antisense strand to SEQ ID NO: 1193158
caauuucucacugagaaau

SEQ ID NO: 1193160 - RNA, 19 nt, Artificial Sequence
  Description of Artificial Sequence: Synthetic oligonucleotide
  Sense strand starting at position 531 of SEQ ID NO: 916905
ucauuaaccguagguaaau

SEQ ID NO: 1193161 - RNA, 19 nt, Artificial Sequence
  Description of Artificial Sequence: Synthetic oligonucleotide
  Antisense strand to SEQ ID NO: 1193160
auuuaccuacgguuaauga

SEQ ID NO: 1193162 - RNA, 19 nt, Artificial Sequence
  Description of Artificial Sequence: Synthetic oligonucleotide
  Sense strand starting at position 532 of SEQ ID NO: 916905
cauuaaccguagguaaauu

SEQ ID NO: 1193163 - RNA, 19 nt, Artificial Sequence
  Description of Artificial Sequence: Synthetic oligonucleotide
  Antisense strand to SEQ ID NO: 1193162
aauuuaccuacgguuaaug

SEQ ID NO: 1193164 - RNA, 19 nt, Artificial Sequence
  Description of Artificial Sequence: Synthetic oligonucleotide
  Sense strand starting at position 541 of SEQ ID NO: 916905
uagguaaauuaggaacagu

SEQ ID NO: 1193165 - RNA, 19 nt, Artificial Sequence
  Description of Artificial Sequence: Synthetic oligonucleotide
  Antisense strand to SEQ ID NO: 1193164
acuguuccuaauuuaccua

SEQ ID NO: 1193166 - RNA, 19 nt, Artificial Sequence
  Description of Artificial Sequence: Synthetic oligonucleotide
  Sense strand starting at position 552 of SEQ ID NO: 916905
ggaacaguagccugcuaaa

SEQ ID NO: 1193167 - RNA, 19 nt, Artificial Sequence
  Description of Artificial Sequence: Synthetic oligonucleotide
  Antisense strand to SEQ ID NO: 1193166
uuuagcaggcuacuguucc

SEQ ID NO: 1193168 - RNA, 19 nt, Artificial Sequence
  Description of Artificial Sequence: Synthetic oligonucleotide
  Sense strand starting at position 642 of SEQ ID NO: 916905
aacggcuuguacuccuuaa

SEQ ID NO: 1193169 - RNA, 19 nt, Artificial Sequence
  Description of Artificial Sequence: Synthetic oligonucleotide
  Antisense strand to SEQ ID NO: 1193168
uuaaggaguacaagccguu

SEQ ID NO: 1193170 - RNA, 19 nt, Artificial Sequence
  Description of Artificial Sequence: Synthetic oligonucleotide
  Sense strand starting at position 646 of SEQ ID NO: 916905
gcuuguacuccuuaacaga

SEQ ID NO: 1193171 - RNA, 19 nt, Artificial Sequence
  Description of Artificial Sequence: Synthetic oligonucleotide
  Antisense strand to SEQ ID NO: 1193170
ucuguuaaggaguacaagc

SEQ ID NO: 1193172 - RNA, 19 nt, Artificial Sequence
  Description of Artificial Sequence: Synthetic oligonucleotide
  Sense strand starting at position 666 of SEQ ID NO: 916905
ggacaagcuugagaaagau

SEQ ID NO: 1193173 - RNA, 19 nt, Artificial Sequence
  Description of Artificial Sequence: Synthetic oligonucleotide
  Antisense strand to SEQ ID NO: 1193172
aucuuucucaagcuugucc

SEQ ID NO: 1193174 - RNA, 19 nt, Artificial Sequence
  Description of Artificial Sequence: Synthetic oligonucleotide
  Sense strand starting at position 711 of SEQ ID NO: 916905
cuggaugaauuaugagaaa

SEQ ID NO: 1193175 - RNA, 19 nt, Artificial Sequence
  Description of Artificial Sequence: Synthetic oligonucleotide
  Antisense strand to SEQ ID NO: 1193174
uuucucauaauucauccag

SEQ ID NO: 1193176 - RNA, 19 nt, Artificial Sequence
  Description of Artificial Sequence: Synthetic oligonucleotide
  Sense strand starting at position 988 of SEQ ID NO: 916905
uccuauucuuucguucuau

SEQ ID NO: 1193177 - RNA, 19 nt, Artificial Sequence
  Description of Artificial Sequence: Synthetic oligonucleotide
  Antisense strand to SEQ ID NO: 1193176
auagaacgaaagaauagga

SEQ ID NO: 1193178 - RNA, 19 nt, Artificial Sequence
  Description of Artificial Sequence: Synthetic oligonucleotide
  Sense strand starting at position 1008 of SEQ ID NO: 916905
ucgcucguuguuucuuaaa

SEQ ID NO: 1193179 - RNA, 19 nt, Artificial Sequence
  Description of Artificial Sequence: Synthetic oligonucleotide
  Antisense strand to SEQ ID NO: 1193178
uuuaagaaacaacgagcga

SEQ ID NO: 1193180 - RNA, 19 nt, Artificial Sequence
  Description of Artificial Sequence: Synthetic oligonucleotide
  Sense strand starting at position 1084 of SEQ ID NO: 916905
ggccuauccgucuggaaac

SEQ ID NO: 1193181 - RNA, 19 nt, Artificial Sequence
  Description of Artificial Sequence: Synthetic oligonucleotide
  Antisense strand to SEQ ID NO: 1193180
guuuccagacggauaggcc

SEQ ID NO: 1193182 - RNA, 19 nt, Artificial Sequence
  Description of Artificial Sequence: Synthetic oligonucleotide
  Sense strand starting at position 2360 of SEQ ID NO: 916905
ucgucagucggguuucuga

SEQ ID NO: 1193183 - RNA, 19 nt, Artificial Sequence
  Description of Artificial Sequence: Synthetic oligonucleotide
  Antisense strand to SEQ ID NO: 1193182
ucagaaacccgacugacga

SEQ ID NO: 1193184 - RNA, 19 nt, Artificial Sequence
  Description of Artificial Sequence: Synthetic oligonucleotide
  Sense strand starting at position 2448 of SEQ ID NO: 916905
guuaaauacucucuucgac

SEQ ID NO: 1193185 - RNA, 19 nt, Artificial Sequence
  Description of Artificial Sequence: Synthetic oligonucleotide
  Antisense strand to SEQ ID NO: 1193184
gucgaagagaguauuuaac

SEQ ID NO: 1193186 - RNA, 19 nt, Artificial Sequence
  Description of Artificial Sequence: Synthetic oligonucleotide
  Sense strand starting at position 2493 of SEQ ID NO: 916905
ggaacuaacuaguauuugu

SEQ ID NO: 1193187 - RNA, 19 nt, Artificial Sequence
  Description of Artificial Sequence: Synthetic oligonucleotide
  Antisense strand to SEQ ID NO: 1193186
acaaauacuaguuaguucc

SEQ ID NO: 1193188 - RNA, 19 nt, Artificial Sequence
  Description of Artificial Sequence: Synthetic oligonucleotide
  Sense strand starting at position 2588 of SEQ ID NO: 916905
uuagacagucagcauugaa

SEQ ID NO: 1193189 - RNA, 19 nt, Artificial Sequence
  Description of Artificial Sequence: Synthetic oligonucleotide
  Antisense strand to SEQ ID NO: 1193188
uucaaugcugacugucuaa

SEQ ID NO: 1193190 - RNA, 19 nt, Artificial Sequence
  Description of Artificial Sequence: Synthetic oligonucleotide
  Sense strand starting at position 2987 of SEQ ID NO: 916905
gucaguguauagcuagaca

SEQ ID NO: 1193191 - RNA, 19 nt, Artificial Sequence
  Description of Artificial Sequence: Synthetic oligonucleotide
  Antisense strand to SEQ ID NO: 1193190
ugucuagcuauacacugac

SEQ ID NO: 1193192 - RNA, 19 nt, Artificial Sequence
  Description of Artificial Sequence: Synthetic oligonucleotide
  Sense strand starting at position 3024 of SEQ ID NO: 916905
uugguuuccacguauguua

SEQ ID NO: 1193193 - RNA, 19 nt, Artificial Sequence
  Description of Artificial Sequence: Synthetic oligonucleotide
  Antisense strand to SEQ ID NO: 1193192
uaacauacguggaaaccaa

SEQ ID NO: 1193194 - RNA, 19 nt, Artificial Sequence
  Description of Artificial Sequence: Synthetic oligonucleotide
  Sense strand starting at position 3054 of SEQ ID NO: 916905
guacauguaacugaguagu

SEQ ID NO: 1193195 - RNA, 19 nt, Artificial Sequence
  Description of Artificial Sequence: Synthetic oligonucleotide
  Antisense strand to SEQ ID NO: 1193194
acuacucaguuacauguac

SEQ ID NO: 1193196 - RNA, 19 nt, Artificial Sequence
  Description of Artificial Sequence: Synthetic oligonucleotide
  Sense strand starting at position 3057 of SEQ ID NO: 916905
cauguaacugaguaguaua

SEQ ID NO: 1193197 - RNA, 19 nt, Artificial Sequence
  Description of Artificial Sequence: Synthetic oligonucleotide
  Antisense strand to SEQ ID NO: 1193196
uauacuacucaguuacaug

SEQ ID NO: 1193198 - RNA, 19 nt, Artificial Sequence
  Description of Artificial Sequence: Synthetic oligonucleotide
  Sense strand starting at position 3073 of SEQ ID NO: 916905
auaguagagcuuugccaag

SEQ ID NO: 1193199 - RNA, 19 nt, Artificial Sequence
  Description of Artificial Sequence: Synthetic oligonucleotide
  Antisense strand to SEQ ID NO: 1193198
cuuggcaaagcucuacuau

SEQ ID NO: 1193200 - RNA, 19 nt, Artificial Sequence
  Description of Artificial Sequence: Synthetic oligonucleotide
  Sense strand starting at position 3092 of SEQ ID NO: 916905
ccaucugauccuugugguu

SEQ ID NO: 1193201 - RNA, 19 nt, Artificial Sequence
  Description of Artificial Sequence: Synthetic oligonucleotide
  Antisense strand to SEQ ID NO: 1193200
aaccacaaggaucagaugg

SEQ ID NO: 1193202 - RNA, 19 nt, Artificial Sequence
  Description of Artificial Sequence: Synthetic oligonucleotide
  Sense strand starting at position 3111 of SEQ ID NO: 916905
uuuaacguugcuugaggua

SEQ ID NO: 1193203 - RNA, 19 nt, Artificial Sequence
  Description of Artificial Sequence: Synthetic oligonucleotide
  Antisense strand to SEQ ID NO: 1193202
uaccucaagcaacguuaaa

SEQ ID NO: 1193204 - RNA, 19 nt, Artificial Sequence
  Description of Artificial Sequence: Synthetic oligonucleotide
  Sense strand starting at position 3150 of SEQ ID NO: 916905
aguccaaugaccugugguu

SEQ ID NO: 1193205 - RNA, 19 nt, Artificial Sequence
  Description of Artificial Sequence: Synthetic oligonucleotide
  Antisense strand to SEQ ID NO: 1193204
aaccacaggucauuggacu

SEQ ID NO: 1193206 - RNA, 19 nt, Artificial Sequence
  Description of Artificial Sequence: Synthetic oligonucleotide
  Sense strand starting at position 3155 of SEQ ID NO: 916905
aaugaccugugguuaguaa

SEQ ID NO: 1193207 - RNA, 19 nt, Artificial Sequence
  Description of Artificial Sequence: Synthetic oligonucleotide
  Antisense strand to SEQ ID NO: 1193206
uuacuaaccacaggucauu

SEQ ID NO: 1193208 - RNA, 19 nt, Artificial Sequence
  Description of Artificial Sequence: Synthetic oligonucleotide
  Sense strand starting at position 3156 of SEQ ID NO: 916905
augaccugugguuaguaau

SEQ ID NO: 1193209 - RNA, 19 nt, Artificial Sequence
  Description of Artificial Sequence: Synthetic oligonucleotide
  Antisense strand to SEQ ID NO: 1193208
auuacuaaccacaggucau

SEQ ID NO: 1193210 - RNA, 19 nt, Artificial Sequence
  Description of Artificial Sequence: Synthetic oligonucleotide
  Sense strand starting at position 3169 of SEQ ID NO: 916905
aguaaugucucaucuacuc

SEQ ID NO: 1193211 - RNA, 19 nt, Artificial Sequence
  Description of Artificial Sequence: Synthetic oligonucleotide
  Antisense strand to SEQ ID NO: 1193210
gaguagaugagacauuacu

SEQ ID NO: 1193212 - RNA, 19 nt, Artificial Sequence
  Description of Artificial Sequence: Synthetic oligonucleotide
  Sense strand starting at position 3344 of SEQ ID NO: 916905
gcaccuacucaaugauggu

SEQ ID NO: 1193213 - RNA, 19 nt, Artificial Sequence
  Description of Artificial Sequence: Synthetic oligonucleotide
  Antisense strand to SEQ ID NO: 1193212
accaucauugaguaggugc

SEQ ID NO: 1193214 - RNA, 19 nt, Artificial Sequence
  Description of Artificial Sequence: Synthetic oligonucleotide
  Sense strand starting at position 3351 of SEQ ID NO: 916905
cucaaugaugguggguauu

SEQ ID NO: 1193215 - RNA, 19 nt, Artificial Sequence
  Description of Artificial Sequence: Synthetic oligonucleotide
  Antisense strand to SEQ ID NO: 1193214
aauacccaccaucauugag

SEQ ID NO: 1193216 - RNA, 19 nt, Artificial Sequence
  Description of Artificial Sequence: Synthetic oligonucleotide
  Sense strand starting at position 3353 of SEQ ID NO: 916905
caaugaugguggguauugu

SEQ ID NO: 1193217 - RNA, 19 nt, Artificial Sequence
  Description of Artificial Sequence: Synthetic oligonucleotide
  Antisense strand to SEQ ID NO: 1193216
acaauacccaccaucauug

SEQ ID NO: 1193218 - RNA, 19 nt, Artificial Sequence
  Description of Artificial Sequence: Synthetic oligonucleotide
  Sense strand starting at position 3364 of SEQ ID NO: 916905
gguauuguucuagguauuc

SEQ ID NO: 1193219 - RNA, 19 nt, Artificial Sequence
  Description of Artificial Sequence: Synthetic oligonucleotide
  Antisense strand to SEQ ID NO: 1193218
gaauaccuagaacaauacc

SEQ ID NO: 1193220 - RNA, 19 nt, Artificial Sequence
  Description of Artificial Sequence: Synthetic oligonucleotide
  Sense strand starting at position 3369 of SEQ ID NO: 916905
uguucuagguauucgaaca

SEQ ID NO: 1193221 - RNA, 19 nt, Artificial Sequence
  Description of Artificial Sequence: Synthetic oligonucleotide
  Antisense strand to SEQ ID NO: 1193220
uguucgaauaccuagaaca

SEQ ID NO: 1193222 - RNA, 19 nt, Artificial Sequence
  Description of Artificial Sequence: Synthetic oligonucleotide
  Sense strand starting at position 3370 of SEQ ID NO: 916905
guucuagguauucgaacau

SEQ ID NO: 1193223 - RNA, 19 nt, Artificial Sequence
  Description of Artificial Sequence: Synthetic oligonucleotide
  Antisense strand to SEQ ID NO: 1193222
auguucgaauaccuagaac

SEQ ID NO: 1193224 - RNA, 19 nt, Artificial Sequence
  Description of Artificial Sequence: Synthetic oligonucleotide
  Sense strand starting at position 3380 of SEQ ID NO: 916905
uucgaacauuuacaaagaa

SEQ ID NO: 1193225 - RNA, 19 nt, Artificial Sequence
  Description of Artificial Sequence: Synthetic oligonucleotide
  Antisense strand to SEQ ID NO: 1193224
uucuuuguaaauguucgaa

SEQ ID NO: 1193226 - RNA, 19 nt, Artificial Sequence
  Description of Artificial Sequence: Synthetic oligonucleotide
  Sense strand starting at position 3640 of SEQ ID NO: 916905
aguacaaagugguuuagga

SEQ ID NO: 1193227 - RNA, 19 nt, Artificial Sequence
  Description of Artificial Sequence: Synthetic oligonucleotide
  Antisense strand to SEQ ID NO: 1193226
uccuaaaccacuuuguacu

SEQ ID NO: 1193228 - RNA, 19 nt, Artificial Sequence
  Description of Artificial Sequence: Synthetic oligonucleotide
  Sense strand starting at position 3672 of SEQ ID NO: 916905
agugacuaauucuugcaca

SEQ ID NO: 1193229 - RNA, 19 nt, Artificial Sequence
  Description of Artificial Sequence: Synthetic oligonucleotide
  Antisense strand to SEQ ID NO: 1193228
ugugcaagaauuagucacu

SEQ ID NO: 1193230 - RNA, 19 nt, Artificial Sequence
  Description of Artificial Sequence: Synthetic oligonucleotide
  Sense strand starting at position 3726 of SEQ ID NO: 916905
ggauaugacccugguaaau

SEQ ID NO: 1193231 - RNA, 19 nt, Artificial Sequence
  Description of Artificial Sequence: Synthetic oligonucleotide
  Antisense strand to SEQ ID NO: 1193230
auuuaccagggucauaucc

SEQ ID NO: 1193232 - RNA, 19 nt, Artificial Sequence
  Description of Artificial Sequence: Synthetic oligonucleotide
  Sense strand starting at position 43 of SEQ ID NO: 916906
cuuggaacacccuguaaua

SEQ ID NO: 1193233 - RNA, 19 nt, Artificial Sequence
  Description of Artificial Sequence: Synthetic oligonucleotide
  Antisense strand to SEQ ID NO: 1193232
uauuacaggguguuccaag

SEQ ID NO: 1193234 - RNA, 19 nt, Artificial Sequence
  Description of Artificial Sequence: Synthetic oligonucleotide
  Sense strand starting at position 274 of SEQ ID NO: 916906
agauauuucuaauagcaga

SEQ ID NO: 1193235 - RNA, 19 nt, Artificial Sequence
  Description of Artificial Sequence: Synthetic oligonucleotide
  Antisense strand to SEQ ID NO: 1193234
ucugcuauuagaaauaucu

SEQ ID NO: 1193236 - RNA, 19 nt, Artificial Sequence
  Description of Artificial Sequence: Synthetic oligonucleotide
  Sense strand starting at position 304 of SEQ ID NO: 916906
cuuuguauuucugugugga

SEQ ID NO: 1193237 - RNA, 19 nt, Artificial Sequence
  Description of Artificial Sequence: Synthetic oligonucleotide
  Antisense strand to SEQ ID NO: 1193236
uccacacagaaauacaaag

SEQ ID NO: 1193238 - RNA, 19 nt, Artificial Sequence
  Description of Artificial Sequence: Synthetic oligonucleotide
  Sense strand starting at position 305 of SEQ ID NO: 916906
uuuguauuucuguguggaa

SEQ ID NO: 1193239 - RNA, 19 nt, Artificial Sequence
  Description of Artificial Sequence: Synthetic oligonucleotide
  Antisense strand to SEQ ID NO: 1193238
uuccacacagaaauacaaa

SEQ ID NO: 1193240 - RNA, 19 nt, Artificial Sequence
  Description of Artificial Sequence: Synthetic oligonucleotide
  Sense strand starting at position 306 of SEQ ID NO: 916906
uuguauuucuguguggaau

SEQ ID NO: 1193241 - RNA, 19 nt, Artificial Sequence
  Description of Artificial Sequence: Synthetic oligonucleotide
  Antisense strand to SEQ ID NO: 1193240
auuccacacagaaauacaa

SEQ ID NO: 1193242 - RNA, 19 nt, Artificial Sequence
  Description of Artificial Sequence: Synthetic oligonucleotide
  Sense strand starting at position 307 of SEQ ID NO: 916906
uguauuucuguguggaaug

SEQ ID NO: 1193243 - RNA, 19 nt, Artificial Sequence
  Description of Artificial Sequence: Synthetic oligonucleotide
  Antisense strand to SEQ ID NO: 1193242
cauuccacacagaaauaca

SEQ ID NO: 1193244 - RNA, 19 nt, Artificial Sequence
  Description of Artificial Sequence: Synthetic oligonucleotide
  Sense strand starting at position 379 of SEQ ID NO: 916906
cuagauacuccuggacaua

SEQ ID NO: 1193245 - RNA, 19 nt, Artificial Sequence
  Description of Artificial Sequence: Synthetic oligonucleotide
  Antisense strand to SEQ ID NO: 1193244
uauguccaggaguaucuag

SEQ ID NO: 1193246 - RNA, 19 nt, Artificial Sequence
  Description of Artificial Sequence: Synthetic oligonucleotide
  Sense strand starting at position 400 of SEQ ID NO: 916906
uugccuuugcuagaauuaa

SEQ ID NO: 1193247 - RNA, 19 nt, Artificial Sequence
  Description of Artificial Sequence: Synthetic oligonucleotide
  Antisense strand to SEQ ID NO: 1193246
uuaauucuagcaaaggcaa

SEQ ID NO: 1193248 - RNA, 19 nt, Artificial Sequence
  Description of Artificial Sequence: Synthetic oligonucleotide
  Sense strand starting at position 411 of SEQ ID NO: 916906
agaauuaauccuggaugcu

SEQ ID NO: 1193249 - RNA, 19 nt, Artificial Sequence
  Description of Artificial Sequence: Synthetic oligonucleotide
  Antisense strand to SEQ ID NO: 1193248
agcauccaggauuaauucu

SEQ ID NO: 1193250 - RNA, 19 nt, Artificial Sequence
  Description of Artificial Sequence: Synthetic oligonucleotide
  Sense strand starting at position 876 of SEQ ID NO: 916906
cucuguucugaucauuauc

SEQ ID NO: 1193251 - RNA, 19 nt, Artificial Sequence
  Description of Artificial Sequence: Synthetic oligonucleotide
  Antisense strand to SEQ ID NO: 1193250
gauaaugaucagaacagag

SEQ ID NO: 1193252 - RNA, 19 nt, Artificial Sequence
  Description of Artificial Sequence: Synthetic oligonucleotide
  Sense strand starting at position 882 of SEQ ID NO: 916906
ucugaucauuauccuggaa

SEQ ID NO: 1193253 - RNA, 19 nt, Artificial Sequence
  Description of Artificial Sequence: Synthetic oligonucleotide
  Antisense strand to SEQ ID NO: 1193252
uuccaggauaaugaucaga

SEQ ID NO: 1193254 - RNA, 19 nt, Artificial Sequence
  Description of Artificial Sequence: Synthetic oligonucleotide
  Sense strand starting at position 1141 of SEQ ID NO: 916906
uggucagcugaucauuauu

SEQ ID NO: 1193255 - RNA, 19 nt, Artificial Sequence
  Description of Artificial Sequence: Synthetic oligonucleotide
  Antisense strand to SEQ ID NO: 1193254
aauaaugaucagcugacca

SEQ ID NO: 1193256 - RNA, 19 nt, Artificial Sequence
  Description of Artificial Sequence: Synthetic oligonucleotide
  Sense strand starting at position 1165 of SEQ ID NO: 916906
auguguaugugaccaacaa

SEQ ID NO: 1193257 - RNA, 19 nt, Artificial Sequence
  Description of Artificial Sequence: Synthetic oligonucleotide
  Antisense strand to SEQ ID NO: 1193256
uuguuggucacauacacau

SEQ ID NO: 1193258 - RNA, 19 nt, Artificial Sequence
  Description of Artificial Sequence: Synthetic oligonucleotide
  Sense strand starting at position 1166 of SEQ ID NO: 916906
uguguaugugaccaacaag

SEQ ID NO: 1193259 - RNA, 19 nt, Artificial Sequence
  Description of Artificial Sequence: Synthetic oligonucleotide
  Antisense strand to SEQ ID NO: 1193258
cuuguuggucacauacaca

SEQ ID NO: 1193260 - RNA, 19 nt, Artificial Sequence
  Description of Artificial Sequence: Synthetic oligonucleotide
  Sense strand starting at position 1405 of SEQ ID NO: 916906
aaaggaggguuucucaauc

SEQ ID NO: 1193261 - RNA, 19 nt, Artificial Sequence
  Description of Artificial Sequence: Synthetic oligonucleotide
  Antisense strand to SEQ ID NO: 1193260
gauugagaaacccuccuuu

SEQ ID NO: 1193262 - RNA, 19 nt, Artificial Sequence
  Description of Artificial Sequence: Synthetic oligonucleotide
  Sense strand starting at position 1628 of SEQ ID NO: 916906
guauacuauuuagagaaug

SEQ ID NO: 1193263 - RNA, 19 nt, Artificial Sequence
  Description of Artificial Sequence: Synthetic oligonucleotide
  Antisense strand to SEQ ID NO: 1193262
cauucucuaaauaguauac

SEQ ID NO: 1193264 - RNA, 19 nt, Artificial Sequence
  Description of Artificial Sequence: Synthetic oligonucleotide
  Sense strand starting at position 1693 of SEQ ID NO: 916906
caaggaguuguagagcaga

SEQ ID NO: 1193265 - RNA, 19 nt, Artificial Sequence
  Description of Artificial Sequence: Synthetic oligonucleotide
  Antisense strand to SEQ ID NO: 1193264
ucugcucuacaacuccuug

SEQ ID NO: 1193266 - RNA, 19 nt, Artificial Sequence
  Description of Artificial Sequence: Synthetic oligonucleotide
  Sense strand starting at position 1991 of SEQ ID NO: 916906
ugacaauucuguuccuuag

SEQ ID NO: 1193267 - RNA, 19 nt, Artificial Sequence
  Description of Artificial Sequence: Synthetic oligonucleotide
  Antisense strand to SEQ ID NO: 1193266
cuaaggaacagaauuguca

SEQ ID NO: 1193268 - RNA, 19 nt, Artificial Sequence
  Description of Artificial Sequence: Synthetic oligonucleotide
  Sense strand starting at position 2088 of SEQ ID NO: 916906
ugcagucucuaauuugauu

SEQ ID NO: 1193269 - RNA, 19 nt, Artificial Sequence
  Description of Artificial Sequence: Synthetic oligonucleotide
  Antisense strand to SEQ ID NO: 1193268
aaucaaauuagagacugca

SEQ ID NO: 1193270 - RNA, 19 nt, Artificial Sequence
  Description of Artificial Sequence: Synthetic oligonucleotide
  Sense strand starting at position 2159 of SEQ ID NO: 916906
agaguaccuccugaauucu

SEQ ID NO: 1193271 - RNA, 19 nt, Artificial Sequence
  Description of Artificial Sequence: Synthetic oligonucleotide
  Antisense strand to SEQ ID NO: 1193270
agaauucaggagguacucu

SEQ ID NO: 1193272 - RNA, 19 nt, Artificial Sequence
  Description of Artificial Sequence: Synthetic oligonucleotide
  Sense strand starting at position 2168 of SEQ ID NO: 916906
ccugaauucucuuugauga

SEQ ID NO: 1193273 - RNA, 19 nt, Artificial Sequence
  Description of Artificial Sequence: Synthetic oligonucleotide
  Antisense strand to SEQ ID NO: 1193272
ucaucaaagagaauucagg

SEQ ID NO: 1193274 - RNA, 19 nt, Artificial Sequence
  Description of Artificial Sequence: Synthetic oligonucleotide
  Sense strand starting at position 2169 of SEQ ID NO: 916906
cugaauucucuuugaugag

SEQ ID NO: 1193275 - RNA, 19 nt, Artificial Sequence
  Description of Artificial Sequence: Synthetic oligonucleotide
  Antisense strand to SEQ ID NO: 1193274
cucaucaaagagaauucag

SEQ ID NO: 1193276 - RNA, 19 nt, Artificial Sequence
  Description of Artificial Sequence: Synthetic oligonucleotide
  Sense strand starting at position 2173 of SEQ ID NO: 916906
auucucuuugaugaguaca

SEQ ID NO: 1193277 - RNA, 19 nt, Artificial Sequence
  Description of Artificial Sequence: Synthetic oligonucleotide
  Antisense strand to SEQ ID NO: 1193276
uguacucaucaaagagaau

SEQ ID NO: 1193278 - RNA, 19 nt, Artificial Sequence
  Description of Artificial Sequence: Synthetic oligonucleotide
  Sense strand starting at position 2175 of SEQ ID NO: 916906
ucucuuugaugaguacaaa

SEQ ID NO: 1193279 - RNA, 19 nt, Artificial Sequence
  Description of Artificial Sequence: Synthetic oligonucleotide
  Antisense strand to SEQ ID NO: 1193278
uuuguacucaucaaagaga

SEQ ID NO: 1193280 - RNA, 19 nt, Artificial Sequence
  Description of Artificial Sequence: Synthetic oligonucleotide
  Sense strand starting at position 2290 of SEQ ID NO: 916906
agcugcuugauugauaaga

SEQ ID NO: 1193281 - RNA, 19 nt, Artificial Sequence
  Description of Artificial Sequence: Synthetic oligonucleotide
  Antisense strand to SEQ ID NO: 1193280
ucuuaucaaucaagcagcu

SEQ ID NO: 1193282 - RNA, 19 nt, Artificial Sequence
  Description of Artificial Sequence: Synthetic oligonucleotide
  Sense strand starting at position 2528 of SEQ ID NO: 916906
gccugugaagacuauccuu

SEQ ID NO: 1193283 - RNA, 19 nt, Artificial Sequence
  Description of Artificial Sequence: Synthetic oligonucleotide
  Antisense strand to SEQ ID NO: 1193282
aaggauagucuucacaggc

SEQ ID NO: 1193284 - RNA, 19 nt, Artificial Sequence
  Description of Artificial Sequence: Synthetic oligonucleotide
  Sense strand starting at position 2531 of SEQ ID NO: 916906
ugugaagacuauccuugga

SEQ ID NO: 1193285 - RNA, 19 nt, Artificial Sequence
  Description of Artificial Sequence: Synthetic oligonucleotide
  Antisense strand to SEQ ID NO: 1193284
uccaaggauagucuucaca

SEQ ID NO: 1193286 - RNA, 19 nt, Artificial Sequence
  Description of Artificial Sequence: Synthetic oligonucleotide
  Sense strand starting at position 2533 of SEQ ID NO: 916906
ugaagacuauccuuggacu

SEQ ID NO: 1193287 - RNA, 19 nt, Artificial Sequence
  Description of Artificial Sequence: Synthetic oligonucleotide
  Antisense strand to SEQ ID NO: 1193286
aguccaaggauagucuuca

SEQ ID NO: 1193288 - RNA, 19 nt, Artificial Sequence
  Description of Artificial Sequence: Synthetic oligonucleotide
  Sense strand starting at position 2554 of SEQ ID NO: 916906
cuugaauccuaggcuaaga

SEQ ID NO: 1193289 - RNA, 19 nt, Artificial Sequence
  Description of Artificial Sequence: Synthetic oligonucleotide
  Antisense strand to SEQ ID NO: 1193288
ucuuagccuaggauucaag

SEQ ID NO: 1193290 - RNA, 19 nt, Artificial Sequence
  Description of Artificial Sequence: Synthetic oligonucleotide
  Sense strand starting at position 2815 of SEQ ID NO: 916906
cuuaguauuuacccgcaaa

SEQ ID NO: 1193291 - RNA, 19 nt, Artificial Sequence
  Description of Artificial Sequence: Synthetic oligonucleotide
  Antisense strand to SEQ ID NO: 1193290
uuugcggguaaauacuaag

SEQ ID NO: 1193292 - RNA, 19 nt, Artificial Sequence
  Description of Artificial Sequence: Synthetic oligonucleotide
  Sense strand starting at position 2833 of SEQ ID NO: 916906
acacaauguguuuacucuu

SEQ ID NO: 1193293 - RNA, 19 nt, Artificial Sequence
  Description of Artificial Sequence: Synthetic oligonucleotide
  Antisense strand to SEQ ID NO: 1193292
aagaguaaacacauugugu

SEQ ID NO: 1193294 - RNA, 19 nt, Artificial Sequence
  Description of Artificial Sequence: Synthetic oligonucleotide
  Sense strand starting at position 3032 of SEQ ID NO: 916906
gucuuuagugaauauuauc

SEQ ID NO: 1193295 - RNA, 19 nt, Artificial Sequence
  Description of Artificial Sequence: Synthetic oligonucleotide
  Antisense strand to SEQ ID NO: 1193294
gauaauauucacuaaagac

SEQ ID NO: 1193296 - RNA, 19 nt, Artificial Sequence
  Description of Artificial Sequence: Synthetic oligonucleotide
  Sense strand starting at position 3037 of SEQ ID NO: 916906
uagugaauauuaucaguag

SEQ ID NO: 1193297 - RNA, 19 nt, Artificial Sequence
  Description of Artificial Sequence: Synthetic oligonucleotide
  Antisense strand to SEQ ID NO: 1193296
cuacugauaauauucacua

SEQ ID NO: 1193298 - RNA, 19 nt, Artificial Sequence
  Description of Artificial Sequence: Synthetic oligonucleotide
  Sense strand starting at position 3040 of SEQ ID NO: 916906
ugaauauuaucaguagcac

SEQ ID NO: 1193299 - RNA, 19 nt, Artificial Sequence
  Description of Artificial Sequence: Synthetic oligonucleotide
  Antisense strand to SEQ ID NO: 1193298
gugcuacugauaauauuca

SEQ ID NO: 1193300 - RNA, 19 nt, Artificial Sequence
  Description of Artificial Sequence: Synthetic oligonucleotide
  Sense strand starting at position 3113 of SEQ ID NO: 916906
ugcagaagcacugaauguu

SEQ ID NO: 1193301 - RNA, 19 nt, Artificial Sequence
  Description of Artificial Sequence: Synthetic oligonucleotide
  Antisense strand to SEQ ID NO: 1193300
aacauucagugcuucugca

SEQ ID NO: 1193302 - RNA, 19 nt, Artificial Sequence
  Description of Artificial Sequence: Synthetic oligonucleotide
  Sense strand starting at position 3156 of SEQ ID NO: 916906
augaacauguucucuuuga

SEQ ID NO: 1193303 - RNA, 19 nt, Artificial Sequence
  Description of Artificial Sequence: Synthetic oligonucleotide
  Antisense strand to SEQ ID NO: 1193302
ucaaagagaacauguucau

SEQ ID NO: 1193304 - RNA, 19 nt, Artificial Sequence
  Description of Artificial Sequence: Synthetic oligonucleotide
  Sense strand starting at position 3157 of SEQ ID NO: 916906
ugaacauguucucuuugac

SEQ ID NO: 1193305 - RNA, 19 nt, Artificial Sequence
  Description of Artificial Sequence: Synthetic oligonucleotide
  Antisense strand to SEQ ID NO: 1193304
gucaaagagaacauguuca

SEQ ID NO: 1193306 - RNA, 19 nt, Artificial Sequence
  Description of Artificial Sequence: Synthetic oligonucleotide
  Sense strand starting at position 3251 of SEQ ID NO: 916906
ugauuacuaugauugcuua

SEQ ID NO: 1193307 - RNA, 19 nt, Artificial Sequence
  Description of Artificial Sequence: Synthetic oligonucleotide
  Antisense strand to SEQ ID NO: 1193306
uaagcaaucauaguaauca

SEQ ID NO: 1193308 - RNA, 19 nt, Artificial Sequence
  Description of Artificial Sequence: Synthetic oligonucleotide
  Sense strand starting at position 3414 of SEQ ID NO: 916906
uuaauaucagaacgguaaa

SEQ ID NO: 1193309 - RNA, 19 nt, Artificial Sequence
  Description of Artificial Sequence: Synthetic oligonucleotide
  Antisense strand to SEQ ID NO: 1193308
uuuaccguucugauauuaa

SEQ ID NO: 1193310 - RNA, 19 nt, Artificial Sequence
  Description of Artificial Sequence: Synthetic oligonucleotide
  Sense strand starting at position 3970 of SEQ ID NO: 916906
cacugaucgccuuagagag

SEQ ID NO: 1193311 - RNA, 19 nt, Artificial Sequence
  Description of Artificial Sequence: Synthetic oligonucleotide
  Antisense strand to SEQ ID NO: 1193310
cucucuaaggcgaucagug

SEQ ID NO: 1193312 - RNA, 19 nt, Artificial Sequence
  Description of Artificial Sequence: Synthetic oligonucleotide
  Sense strand starting at position 67 of SEQ ID NO: 916907
uuacccauuucuuagaugu

SEQ ID NO: 1193313 - RNA, 19 nt, Artificial Sequence
  Description of Artificial Sequence: Synthetic oligonucleotide
  Antisense strand to SEQ ID NO: 1193312
acaucuaagaaauggguaa

SEQ ID NO: 1193314 - RNA, 19 nt, Artificial Sequence
  Description of Artificial Sequence: Synthetic oligonucleotide
  Sense strand starting at position 69 of SEQ ID NO: 916907
acccauuucuuagauguuu

SEQ ID NO: 1193315 - RNA, 19 nt, Artificial Sequence
  Description of Artificial Sequence: Synthetic oligonucleotide
  Antisense strand to SEQ ID NO: 1193314
aaacaucuaagaaaugggu

SEQ ID NO: 1193316 - RNA, 19 nt, Artificial Sequence
  Description of Artificial Sequence: Synthetic oligonucleotide
  Sense strand starting at position 74 of SEQ ID NO: 916907
uuucuuagauguuucucua

SEQ ID NO: 1193317 - RNA, 19 nt, Artificial Sequence
  Description of Artificial Sequence: Synthetic oligonucleotide
  Antisense strand to SEQ ID NO: 1193316
uagagaaacaucuaagaaa

SEQ ID NO: 1193318 - RNA, 19 nt, Artificial Sequence
  Description of Artificial Sequence: Synthetic oligonucleotide
  Sense strand starting at position 77 of SEQ ID NO: 916907
cuuagauguuucucuagga

SEQ ID NO: 1193319 - RNA, 19 nt, Artificial Sequence
  Description of Artificial Sequence: Synthetic oligonucleotide
  Antisense strand to SEQ ID NO: 1193318
uccuagagaaacaucuaag

SEQ ID NO: 1193320 - RNA, 19 nt, Artificial Sequence
  Description of Artificial Sequence: Synthetic oligonucleotide
  Sense strand starting at position 78 of SEQ ID NO: 916907
uuagauguuucucuaggau

SEQ ID NO: 1193321 - RNA, 19 nt, Artificial Sequence
  Description of Artificial Sequence: Synthetic oligonucleotide
  Antisense strand to SEQ ID NO: 1193320
auccuagagaaacaucuaa

SEQ ID NO: 1193322 - RNA, 19 nt, Artificial Sequence
  Description of Artificial Sequence: Synthetic oligonucleotide
  Sense strand starting at position 81 of SEQ ID NO: 916907
gauguuucucuaggauaau

SEQ ID NO: 1193323 - RNA, 19 nt, Artificial Sequence
  Description of Artificial Sequence: Synthetic oligonucleotide
  Antisense strand to SEQ ID NO: 1193322
auuauccuagagaaacauc

SEQ ID NO: 1193324 - RNA, 19 nt, Artificial Sequence
  Description of Artificial Sequence: Synthetic oligonucleotide
  Sense strand starting at position 82 of SEQ ID NO: 916907
auguuucucuaggauaauu

SEQ ID NO: 1193325 - RNA, 19 nt, Artificial Sequence
  Description of Artificial Sequence: Synthetic oligonucleotide
  Antisense strand to SEQ ID NO: 1193324
aauuauccuagagaaacau

SEQ ID NO: 1193326 - RNA, 19 nt, Artificial Sequence
  Description of Artificial Sequence: Synthetic oligonucleotide
  Sense strand starting at position 84 of SEQ ID NO: 916907
guuucucuaggauaauuau

SEQ ID NO: 1193327 - RNA, 19 nt, Artificial Sequence
  Description of Artificial Sequence: Synthetic oligonucleotide
  Antisense strand to SEQ ID NO: 1193326
auaauuauccuagagaaac

SEQ ID NO: 1193328 - RNA, 19 nt, Artificial Sequence
  Description of Artificial Sequence: Synthetic oligonucleotide
  Sense strand starting at position 109 of SEQ ID NO: 916907
uguaguaagaucuguggca

SEQ ID NO: 1193329 - RNA, 19 nt, Artificial Sequence
  Description of Artificial Sequence: Synthetic oligonucleotide
  Antisense strand to SEQ ID NO: 1193328
ugccacagaucuuacuaca

SEQ ID NO: 1193330 - RNA, 19 nt, Artificial Sequence
  Description of Artificial Sequence: Synthetic oligonucleotide
  Sense strand starting at position 111 of SEQ ID NO: 916907
uaguaagaucuguggcacu

SEQ ID NO: 1193331 - RNA, 19 nt, Artificial Sequence
  Description of Artificial Sequence: Synthetic oligonucleotide
  Antisense strand to SEQ ID NO: 1193330
agugccacagaucuuacua

SEQ ID NO: 1193332 - RNA, 19 nt, Artificial Sequence
  Description of Artificial Sequence: Synthetic oligonucleotide
  Sense strand starting at position 136 of SEQ ID NO: 916907
uuugccaagugcuuucuaa

SEQ ID NO: 1193333 - RNA, 19 nt, Artificial Sequence
  Description of Artificial Sequence: Synthetic oligonucleotide
  Antisense strand to SEQ ID NO: 1193332
uuagaaagcacuuggcaaa

SEQ ID NO: 1193334 - RNA, 19 nt, Artificial Sequence
  Description of Artificial Sequence: Synthetic oligonucleotide
  Sense strand starting at position 283 of SEQ ID NO: 916907
cgaaauaggucuuccaacu

SEQ ID NO: 1193335 - RNA, 19 nt, Artificial Sequence
  Description of Artificial Sequence: Synthetic oligonucleotide
  Antisense strand to SEQ ID NO: 1193334
aguuggaagaccuauuucg

SEQ ID NO: 1193336 - RNA, 19 nt, Artificial Sequence
  Description of Artificial Sequence: Synthetic oligonucleotide
  Sense strand starting at position 346 of SEQ ID NO: 916907
agggaaugucuacaguucu

SEQ ID NO: 1193337 - RNA, 19 nt, Artificial Sequence
  Description of Artificial Sequence: Synthetic oligonucleotide
  Antisense strand to SEQ ID NO: 1193336
agaacuguagacauucccu

SEQ ID NO: 1193338 - RNA, 19 nt, Artificial Sequence
  Description of Artificial Sequence: Synthetic oligonucleotide
  Sense strand starting at position 611 of SEQ ID NO: 916907
cucccuucuccggauaugu

SEQ ID NO: 1193339 - RNA, 19 nt, Artificial Sequence
  Description of Artificial Sequence: Synthetic oligonucleotide
  Antisense strand to SEQ ID NO: 1193338
acauauccggagaagggag

SEQ ID NO: 1193340 - RNA, 19 nt, Artificial Sequence
  Description of Artificial Sequence: Synthetic oligonucleotide
  Sense strand starting at position 620 of SEQ ID NO: 916907
ccggauauguagguuguca

SEQ ID NO: 1193341 - RNA, 19 nt, Artificial Sequence
  Description of Artificial Sequence: Synthetic oligonucleotide
  Antisense strand to SEQ ID NO: 1193340
ugacaaccuacauauccgg

SEQ ID NO: 1193342 - RNA, 19 nt, Artificial Sequence
  Description of Artificial Sequence: Synthetic oligonucleotide
  Sense strand starting at position 757 of SEQ ID NO: 916907
gggcgccauuccucugaaa

SEQ ID NO: 1193343 - RNA, 19 nt, Artificial Sequence
  Description of Artificial Sequence: Synthetic oligonucleotide
  Antisense strand to SEQ ID NO: 1193342
uuucagaggaauggcgccc

SEQ ID NO: 1193344 - RNA, 19 nt, Artificial Sequence
  Description of Artificial Sequence: Synthetic oligonucleotide
  Sense strand starting at position 1047 of SEQ ID NO: 916907
accuguucucacuagagcu

SEQ ID NO: 1193345 - RNA, 19 nt, Artificial Sequence
  Description of Artificial Sequence: Synthetic oligonucleotide
  Antisense strand to SEQ ID NO: 1193344
agcucuagugagaacaggu

SEQ ID NO: 1193346 - RNA, 19 nt, Artificial Sequence
  Description of Artificial Sequence: Synthetic oligonucleotide
  Sense strand starting at position 2300 of SEQ ID NO: 916907
gcugucaaccgucagucaa

SEQ ID NO: 1193347 - RNA, 19 nt, Artificial Sequence
  Description of Artificial Sequence: Synthetic oligonucleotide
  Antisense strand to SEQ ID NO: 1193346
uugacugacgguugacagc

SEQ ID NO: 1193348 - RNA, 19 nt, Artificial Sequence
  Description of Artificial Sequence: Synthetic oligonucleotide
  Sense strand starting at position 2393 of SEQ ID NO: 916907
ucguauguuccuugguuca

SEQ ID NO: 1193349 - RNA, 19 nt, Artificial Sequence
  Description of Artificial Sequence: Synthetic oligonucleotide
  Antisense strand to SEQ ID NO: 1193348
ugaaccaaggaacauacga

SEQ ID NO: 1193350 - RNA, 19 nt, Artificial Sequence
  Description of Artificial Sequence: Synthetic oligonucleotide
  Sense strand starting at position 2512 of SEQ ID NO: 916907
agauauuuguugggugcca

SEQ ID NO: 1193351 - RNA, 19 nt, Artificial Sequence
  Description of Artificial Sequence: Synthetic oligonucleotide
  Antisense strand to SEQ ID NO: 1193350
uggcacccaacaaauaucu

SEQ ID NO: 1193352 - RNA, 19 nt, Artificial Sequence
  Description of Artificial Sequence: Synthetic oligonucleotide
  Sense strand starting at position 2548 of SEQ ID NO: 916907
ucugccuuccuagagcuua

SEQ ID NO: 1193353 - RNA, 19 nt, Artificial Sequence
  Description of Artificial Sequence: Synthetic oligonucleotide
  Antisense strand to SEQ ID NO: 1193352
uaagcucuaggaaggcaga

SEQ ID NO: 1193354 - RNA, 19 nt, Artificial Sequence
  Description of Artificial Sequence: Synthetic oligonucleotide
  Sense strand starting at position 2678 of SEQ ID NO: 916907
agagguguggguuacuuua

SEQ ID NO: 1193355 - RNA, 19 nt, Artificial Sequence
  Description of Artificial Sequence: Synthetic oligonucleotide
  Antisense strand to SEQ ID NO: 1193354
uaaaguaacccacaccucu

SEQ ID NO: 1193356 - RNA, 19 nt, Artificial Sequence
  Description of Artificial Sequence: Synthetic oligonucleotide
  Sense strand starting at position 2680 of SEQ ID NO: 916907
agguguggguuacuuuaga

SEQ ID NO: 1193357 - RNA, 19 nt, Artificial Sequence
  Description of Artificial Sequence: Synthetic oligonucleotide
  Antisense strand to SEQ ID NO: 1193356
ucuaaaguaacccacaccu

SEQ ID NO: 1193358 - RNA, 19 nt, Artificial Sequence
  Description of Artificial Sequence: Synthetic oligonucleotide
  Sense strand starting at position 2719 of SEQ ID NO: 916907
ucgcuuaggaggugacauu

SEQ ID NO: 1193359 - RNA, 19 nt, Artificial Sequence
  Description of Artificial Sequence: Synthetic oligonucleotide
  Antisense strand to SEQ ID NO: 1193358
aaugucaccuccuaagcga

SEQ ID NO: 1193360 - RNA, 19 nt, Artificial Sequence
  Description of Artificial Sequence: Synthetic oligonucleotide
  Sense strand starting at position 2741 of SEQ ID NO: 916907
gcugauauugaaugaugac

SEQ ID NO: 1193361 - RNA, 19 nt, Artificial Sequence
  Description of Artificial Sequence: Synthetic oligonucleotide
  Antisense strand to SEQ ID NO: 1193360
gucaucauucaauaucagc

SEQ ID NO: 1193362 - RNA, 19 nt, Artificial Sequence
  Description of Artificial Sequence: Synthetic oligonucleotide
  Sense strand starting at position 2744 of SEQ ID NO: 916907
gauauugaaugaugacaga

SEQ ID NO: 1193363 - RNA, 19 nt, Artificial Sequence
  Description of Artificial Sequence: Synthetic oligonucleotide
  Antisense strand to SEQ ID NO: 1193362
ucugucaucauucaauauc

SEQ ID NO: 1193364 - RNA, 19 nt, Artificial Sequence
  Description of Artificial Sequence: Synthetic oligonucleotide
  Sense strand starting at position 3005 of SEQ ID NO: 916907
gugagaggcuuaucaaaga

SEQ ID NO: 1193365 - RNA, 19 nt, Artificial Sequence
  Description of Artificial Sequence: Synthetic oligonucleotide
  Antisense strand to SEQ ID NO: 1193364
ucuuugauaagccucucac

SEQ ID NO: 1193366 - RNA, 19 nt, Artificial Sequence
  Description of Artificial Sequence: Synthetic oligonucleotide
  Sense strand starting at position 3413 of SEQ ID NO: 916907
ugagcuugaauccgagagu

SEQ ID NO: 1193367 - RNA, 19 nt, Artificial Sequence
  Description of Artificial Sequence: Synthetic oligonucleotide
  Antisense strand to SEQ ID NO: 1193366
acucucggauucaagcuca

SEQ ID NO: 1193368 - RNA, 19 nt, Artificial Sequence
  Description of Artificial Sequence: Synthetic oligonucleotide
  Sense strand starting at position 3426 of SEQ ID NO: 916907
gagagugggaugggugauu

SEQ ID NO: 1193369 - RNA, 19 nt, Artificial Sequence
  Description of Artificial Sequence: Synthetic oligonucleotide
  Antisense strand to SEQ ID NO: 1193368
aaucacccaucccacucuc

SEQ ID NO: 1193370 - RNA, 19 nt, Artificial Sequence
  Description of Artificial Sequence: Synthetic oligonucleotide
  Sense strand starting at position 3435 of SEQ ID NO: 916907
augggugauuugugcugga

SEQ ID NO: 1193371 - RNA, 19 nt, Artificial Sequence
  Description of Artificial Sequence: Synthetic oligonucleotide
  Antisense strand to SEQ ID NO: 1193370
uccagcacaaaucacccau

SEQ ID NO: 1193372 - RNA, 19 nt, Artificial Sequence
  Description of Artificial Sequence: Synthetic oligonucleotide
  Sense strand starting at position 3439 of SEQ ID NO: 916907
gugauuugugcuggagugu

SEQ ID NO: 1193373 - RNA, 19 nt, Artificial Sequence
  Description of Artificial Sequence: Synthetic oligonucleotide
  Antisense strand to SEQ ID NO: 1193372
acacuccagcacaaaucac

SEQ ID NO: 1193374 - RNA, 19 nt, Artificial Sequence
  Description of Artificial Sequence: Synthetic oligonucleotide
  Sense strand starting at position 3440 of SEQ ID NO: 916907
ugauuugugcuggaguguu

SEQ ID NO: 1193375 - RNA, 19 nt, Artificial Sequence
  Description of Artificial Sequence: Synthetic oligonucleotide
  Antisense strand to SEQ ID NO: 1193374
aacacuccagcacaaauca

SEQ ID NO: 1193376 - RNA, 19 nt, Artificial Sequence
  Description of Artificial Sequence: Synthetic oligonucleotide
  Sense strand starting at position 3573 of SEQ ID NO: 916907
uagaaacaugccugggcaa

SEQ ID NO: 1193377 - RNA, 19 nt, Artificial Sequence
  Description of Artificial Sequence: Synthetic oligonucleotide
  Antisense strand to SEQ ID NO: 1193376
uugcccaggcauguuucua

SEQ ID NO: 1193378 - RNA, 19 nt, Artificial Sequence
  Description of Artificial Sequence: Synthetic oligonucleotide
  Sense strand starting at position 3640 of SEQ ID NO: 916907
cccuguuucucugcagaag

SEQ ID NO: 1193379 - RNA, 19 nt, Artificial Sequence
  Description of Artificial Sequence: Synthetic oligonucleotide
  Antisense strand to SEQ ID NO: 1193378
cuucugcagagaaacaggg

SEQ ID NO: 1193380 - RNA, 19 nt, Artificial Sequence
  Description of Artificial Sequence: Synthetic oligonucleotide
  Sense strand starting at position 3710 of SEQ ID NO: 916907
ccaacuuuaggccagaauu

SEQ ID NO: 1193381 - RNA, 19 nt, Artificial Sequence
  Description of Artificial Sequence: Synthetic oligonucleotide
  Antisense strand to SEQ ID NO: 1193380
aauucuggccuaaaguugg

SEQ ID NO: 1193382 - RNA, 19 nt, Artificial Sequence
  Description of Artificial Sequence: Synthetic oligonucleotide
  Sense strand starting at position 3720 of SEQ ID NO: 916907
gccagaauuuagcucugcu

SEQ ID NO: 1193383 - RNA, 19 nt, Artificial Sequence
  Description of Artificial Sequence: Synthetic oligonucleotide
  Antisense strand to SEQ ID NO: 1193382
agcagagcuaaauucuggc

SEQ ID NO: 1193384 - RNA, 19 nt, Artificial Sequence
  Description of Artificial Sequence: Synthetic oligonucleotide
  Sense strand starting at position 3723 of SEQ ID NO: 916907
agaauuuagcucugcucca

SEQ ID NO: 1193385 - RNA, 19 nt, Artificial Sequence
  Description of Artificial Sequence: Synthetic oligonucleotide
  Antisense strand to SEQ ID NO: 1193384
uggagcagagcuaaauucu

SEQ ID NO: 1193386 - RNA, 19 nt, Artificial Sequence
  Description of Artificial Sequence: Synthetic oligonucleotide
  Sense strand starting at position 3810 of SEQ ID NO: 916907
ggccauugcccauacaucu

SEQ ID NO: 1193387 - RNA, 19 nt, Artificial Sequence
  Description of Artificial Sequence: Synthetic oligonucleotide
  Antisense strand to SEQ ID NO: 1193386
agauguaugggcaauggcc

SEQ ID NO: 1193388 - RNA, 19 nt, Artificial Sequence
  Description of Artificial Sequence: Synthetic oligonucleotide
  Sense strand starting at position 3946 of SEQ ID NO: 916907
uuccaaguguuuccuccaa

SEQ ID NO: 1193389 - RNA, 19 nt, Artificial Sequence
  Description of Artificial Sequence: Synthetic oligonucleotide
  Antisense strand to SEQ ID NO: 1193388
uuggaggaaacacuuggaa

SEQ ID NO: 1193390 - RNA, 19 nt, Artificial Sequence
  Description of Artificial Sequence: Synthetic oligonucleotide
  Sense strand starting at position 3948 of SEQ ID NO: 916907
ccaaguguuuccuccaaag

SEQ ID NO: 1193391 - RNA, 19 nt, Artificial Sequence
  Description of Artificial Sequence: Synthetic oligonucleotide
  Antisense strand to SEQ ID NO: 1193390
cuuuggaggaaacacuugg

SEQ ID NO: 1193392 - RNA, 19 nt, Artificial Sequence
  Description of Artificial Sequence: Synthetic oligonucleotide
  Sense strand starting at position 137 of SEQ ID NO: 916908
agaacagggugauaugaua

SEQ ID NO: 1193393 - RNA, 19 nt, Artificial Sequence
  Description of Artificial Sequence: Synthetic oligonucleotide
  Antisense strand to SEQ ID NO: 1193392
uaucauaucacccuguucu

SEQ ID NO: 1193394 - RNA, 19 nt, Artificial Sequence
  Description of Artificial Sequence: Synthetic oligonucleotide
  Sense strand starting at position 383 of SEQ ID NO: 916908
gagucagaucauggcccua

SEQ ID NO: 1193395 - RNA, 19 nt, Artificial Sequence
  Description of Artificial Sequence: Synthetic oligonucleotide
  Antisense strand to SEQ ID NO: 1193394
uagggccaugaucugacuc

SEQ ID NO: 1193396 - RNA, 19 nt, Artificial Sequence
  Description of Artificial Sequence: Synthetic oligonucleotide
  Sense strand starting at position 385 of SEQ ID NO: 916908
gucagaucauggcccuaca

SEQ ID NO: 1193397 - RNA, 19 nt, Artificial Sequence
  Description of Artificial Sequence: Synthetic oligonucleotide
  Antisense strand to SEQ ID NO: 1193396
uguagggccaugaucugac

SEQ ID NO: 1193398 - RNA, 19 nt, Artificial Sequence
  Description of Artificial Sequence: Synthetic oligonucleotide
  Sense strand starting at position 442 of SEQ ID NO: 916908
auggaaauuucuggagggu

SEQ ID NO: 1193399 - RNA, 19 nt, Artificial Sequence
  Description of Artificial Sequence: Synthetic oligonucleotide
  Antisense strand to SEQ ID NO: 1193398
acccuccagaaauuuccau

SEQ ID NO: 1193400 - RNA, 19 nt, Artificial Sequence
  Description of Artificial Sequence: Synthetic oligonucleotide
  Sense strand starting at position 458 of SEQ ID NO: 916908
gguuguaagcaaggaaaug

SEQ ID NO: 1193401 - RNA, 19 nt, Artificial Sequence
  Description of Artificial Sequence: Synthetic oligonucleotide
  Antisense strand to SEQ ID NO: 1193400
cauuuccuugcuuacaacc

SEQ ID NO: 1193402 - RNA, 19 nt, Artificial Sequence
  Description of Artificial Sequence: Synthetic oligonucleotide
  Sense strand starting at position 475 of SEQ ID NO: 916908
ugccaugauuggcugggua

SEQ ID NO: 1193403 - RNA, 19 nt, Artificial Sequence
  Description of Artificial Sequence: Synthetic oligonucleotide
  Antisense strand to SEQ ID NO: 1193402
uacccagccaaucauggca

SEQ ID NO: 1193404 - RNA, 19 nt, Artificial Sequence
  Description of Artificial Sequence: Synthetic oligonucleotide
  Sense strand starting at position 477 of SEQ ID NO: 916908
ccaugauuggcuggguaug

SEQ ID NO: 1193405 - RNA, 19 nt, Artificial Sequence
  Description of Artificial Sequence: Synthetic oligonucleotide
  Antisense strand to SEQ ID NO: 1193404
cauacccagccaaucaugg

SEQ ID NO: 1193406 - RNA, 19 nt, Artificial Sequence
  Description of Artificial Sequence: Synthetic oligonucleotide
  Sense strand starting at position 478 of SEQ ID NO: 916908
caugauuggcuggguauga

SEQ ID NO: 1193407 - RNA, 19 nt, Artificial Sequence
  Description of Artificial Sequence: Synthetic oligonucleotide
  Antisense strand to SEQ ID NO: 1193406
ucauacccagccaaucaug

SEQ ID NO: 1193408 - RNA, 19 nt, Artificial Sequence
  Description of Artificial Sequence: Synthetic oligonucleotide
  Sense strand starting at position 479 of SEQ ID NO: 916908
augauuggcuggguaugau

SEQ ID NO: 1193409 - RNA, 19 nt, Artificial Sequence
  Description of Artificial Sequence: Synthetic oligonucleotide
  Antisense strand to SEQ ID NO: 1193408
aucauacccagccaaucau

SEQ ID NO: 1193410 - RNA, 19 nt, Artificial Sequence
  Description of Artificial Sequence: Synthetic oligonucleotide
  Sense strand starting at position 663 of SEQ ID NO: 916908
gacugaagauggcuugagu

SEQ ID NO: 1193411 - RNA, 19 nt, Artificial Sequence
  Description of Artificial Sequence: Synthetic oligonucleotide
  Antisense strand to SEQ ID NO: 1193410
acucaagccaucuucaguc

SEQ ID NO: 1193412 - RNA, 19 nt, Artificial Sequence
  Description of Artificial Sequence: Synthetic oligonucleotide
  Sense strand starting at position 704 of SEQ ID NO: 916908
aguucugauugugccacua

SEQ ID NO: 1193413 - RNA, 19 nt, Artificial Sequence
  Description of Artificial Sequence: Synthetic oligonucleotide
  Antisense strand to SEQ ID NO: 1193412
uaguggcacaaucagaacu

SEQ ID NO: 1193414 - RNA, 19 nt, Artificial Sequence
  Description of Artificial Sequence: Synthetic oligonucleotide
  Sense strand starting at position 1082 of SEQ ID NO: 916908
ccacgaucuuaaucaguuc

SEQ ID NO: 1193415 - RNA, 19 nt, Artificial Sequence
  Description of Artificial Sequence: Synthetic oligonucleotide
  Antisense strand to SEQ ID NO: 1193414
gaacugauuaagaucgugg

SEQ ID NO: 1193416 - RNA, 19 nt, Artificial Sequence
  Description of Artificial Sequence: Synthetic oligonucleotide
  Sense strand starting at position 1085 of SEQ ID NO: 916908
cgaucuuaaucaguuccua

SEQ ID NO: 1193417 - RNA, 19 nt, Artificial Sequence
  Description of Artificial Sequence: Synthetic oligonucleotide
  Antisense strand to SEQ ID NO: 1193416
uaggaacugauuaagaucg

SEQ ID NO: 1193418 - RNA, 19 nt, Artificial Sequence
  Description of Artificial Sequence: Synthetic oligonucleotide
  Sense strand starting at position 1320 of SEQ ID NO: 916908
gugagaaagaggugaagua

SEQ ID NO: 1193419 - RNA, 19 nt, Artificial Sequence
  Description of Artificial Sequence: Synthetic oligonucleotide
  Antisense strand to SEQ ID NO: 1193418
uacuucaccucuuucucac

SEQ ID NO: 1193420 - RNA, 19 nt, Artificial Sequence
  Description of Artificial Sequence: Synthetic oligonucleotide
  Sense strand starting at position 1377 of SEQ ID NO: 916908
uuucuugaggccugacauu

SEQ ID NO: 1193421 - RNA, 19 nt, Artificial Sequence
  Description of Artificial Sequence: Synthetic oligonucleotide
  Antisense strand to SEQ ID NO: 1193420
aaugucaggccucaagaaa

SEQ ID NO: 1193422 - RNA, 19 nt, Artificial Sequence
  Description of Artificial Sequence: Synthetic oligonucleotide
  Sense strand starting at position 1653 of SEQ ID NO: 916908
acggccugaucacugagau

SEQ ID NO: 1193423 - RNA, 19 nt, Artificial Sequence
  Description of Artificial Sequence: Synthetic oligonucleotide
  Antisense strand to SEQ ID NO: 1193422
aucucagugaucaggccgu

SEQ ID NO: 1193424 - RNA, 19 nt, Artificial Sequence
  Description of Artificial Sequence: Synthetic oligonucleotide
  Sense strand starting at position 1654 of SEQ ID NO: 916908
cggccugaucacugagaug

SEQ ID NO: 1193425 - RNA, 19 nt, Artificial Sequence
  Description of Artificial Sequence: Synthetic oligonucleotide
  Antisense strand to SEQ ID NO: 1193424
caucucagugaucaggccg

SEQ ID NO: 1193426 - RNA, 19 nt, Artificial Sequence
  Description of Artificial Sequence: Synthetic oligonucleotide
  Sense strand starting at position 1657 of SEQ ID NO: 916908
ccugaucacugagaugaga

SEQ ID NO: 1193427 - RNA, 19 nt, Artificial Sequence
  Description of Artificial Sequence: Synthetic oligonucleotide
  Antisense strand to SEQ ID NO: 1193426
ucucaucucagugaucagg

SEQ ID NO: 1193428 - RNA, 19 nt, Artificial Sequence
  Description of Artificial Sequence: Synthetic oligonucleotide
  Sense strand starting at position 2283 of SEQ ID NO: 916908
aaacguugcgaguauuacu

SEQ ID NO: 1193429 - RNA, 19 nt, Artificial Sequence
  Description of Artificial Sequence: Synthetic oligonucleotide
  Antisense strand to SEQ ID NO: 1193428
aguaauacucgcaacguuu

SEQ ID NO: 1193430 - RNA, 19 nt, Artificial Sequence
  Description of Artificial Sequence: Synthetic oligonucleotide
  Sense strand starting at position 2314 of SEQ ID NO: 916908
ccgcgcuggacugaaauaa

SEQ ID NO: 1193431 - RNA, 19 nt, Artificial Sequence
  Description of Artificial Sequence: Synthetic oligonucleotide
  Antisense strand to SEQ ID NO: 1193430
uuauuucaguccagcgcgg

SEQ ID NO: 1193432 - RNA, 19 nt, Artificial Sequence
  Description of Artificial Sequence: Synthetic oligonucleotide
  Sense strand starting at position 2335 of SEQ ID NO: 916908
gcuuuaccggaauguccau

SEQ ID NO: 1193433 - RNA, 19 nt, Artificial Sequence
  Description of Artificial Sequence: Synthetic oligonucleotide
  Antisense strand to SEQ ID NO: 1193432
auggacauuccgguaaagc

SEQ ID NO: 1193434 - RNA, 19 nt, Artificial Sequence
  Description of Artificial Sequence: Synthetic oligonucleotide
  Sense strand starting at position 2350 of SEQ ID NO: 916908
ccauuuaauccacggugca

SEQ ID NO: 1193435 - RNA, 19 nt, Artificial Sequence
  Description of Artificial Sequence: Synthetic oligonucleotide
  Antisense strand to SEQ ID NO: 1193434
ugcaccguggauuaaaugg

SEQ ID NO: 1193436 - RNA, 19 nt, Artificial Sequence
  Description of Artificial Sequence: Synthetic oligonucleotide
  Sense strand starting at position 2485 of SEQ ID NO: 916908
ucgcucauuauuggcaaga

SEQ ID NO: 1193437 - RNA, 19 nt, Artificial Sequence
  Description of Artificial Sequence: Synthetic oligonucleotide
  Antisense strand to SEQ ID NO: 1193436
ucuugccaauaaugagcga

SEQ ID NO: 1193438 - RNA, 19 nt, Artificial Sequence
  Description of Artificial Sequence: Synthetic oligonucleotide
  Sense strand starting at position 2486 of SEQ ID NO: 916908
cgcucauuauuggcaagaa

SEQ ID NO: 1193439 - RNA, 19 nt, Artificial Sequence
  Description of Artificial Sequence: Synthetic oligonucleotide
  Antisense strand to SEQ ID NO: 1193438
uucuugccaauaaugagcg

SEQ ID NO: 1193440 - RNA, 19 nt, Artificial Sequence
  Description of Artificial Sequence: Synthetic oligonucleotide
  Sense strand starting at position 3103 of SEQ ID NO: 916908
uaccgucuugcuuucguua

SEQ ID NO: 1193441 - RNA, 19 nt, Artificial Sequence
  Description of Artificial Sequence: Synthetic oligonucleotide
  Antisense strand to SEQ ID NO: 1193440
uaacgaaagcaagacggua

SEQ ID NO: 1193442 - RNA, 19 nt, Artificial Sequence
  Description of Artificial Sequence: Synthetic oligonucleotide
  Sense strand starting at position 3104 of SEQ ID NO: 916908
accgucuugcuuucguuau

SEQ ID NO: 1193443 - RNA, 19 nt, Artificial Sequence
  Description of Artificial Sequence: Synthetic oligonucleotide
  Antisense strand to SEQ ID NO: 1193442
auaacgaaagcaagacggu

SEQ ID NO: 1193444 - RNA, 19 nt, Artificial Sequence
  Description of Artificial Sequence: Synthetic oligonucleotide
  Sense strand starting at position 3108 of SEQ ID NO: 916908
ucuugcuuucguuauugga

SEQ ID NO: 1193445 - RNA, 19 nt, Artificial Sequence
  Description of Artificial Sequence: Synthetic oligonucleotide
  Antisense strand to SEQ ID NO: 1193444
uccaauaacgaaagcaaga

SEQ ID NO: 1193446 - RNA, 19 nt, Artificial Sequence
  Description of Artificial Sequence: Synthetic oligonucleotide
  Sense strand starting at position 3333 of SEQ ID NO: 916908
cccaauucugugugacuaa

SEQ ID NO: 1193447 - RNA, 19 nt, Artificial Sequence
  Description of Artificial Sequence: Synthetic oligonucleotide
  Antisense strand to SEQ ID NO: 1193446
uuagucacacagaauuggg

SEQ ID NO: 1193448 - RNA, 19 nt, Artificial Sequence
  Description of Artificial Sequence: Synthetic oligonucleotide
  Sense strand starting at position 3367 of SEQ ID NO: 916908
guguucucaucccuaaaca

SEQ ID NO: 1193449 - RNA, 19 nt, Artificial Sequence
  Description of Artificial Sequence: Synthetic oligonucleotide
  Antisense strand to SEQ ID NO: 1193448
uguuuagggaugagaacac

SEQ ID NO: 1193450 - RNA, 19 nt, Artificial Sequence
  Description of Artificial Sequence: Synthetic oligonucleotide
  Sense strand starting at position 3392 of SEQ ID NO: 916908
auugaaguauguguucuuu

SEQ ID NO: 1193451 - RNA, 19 nt, Artificial Sequence
  Description of Artificial Sequence: Synthetic oligonucleotide
  Antisense strand to SEQ ID NO: 1193450
aaagaacacauacuucaau

SEQ ID NO: 1193452 - RNA, 19 nt, Artificial Sequence
  Description of Artificial Sequence: Synthetic oligonucleotide
  Sense strand starting at position 3428 of SEQ ID NO: 916908
cuggaugacucaguucuga

SEQ ID NO: 1193453 - RNA, 19 nt, Artificial Sequence
  Description of Artificial Sequence: Synthetic oligonucleotide
  Antisense strand to SEQ ID NO: 1193452
ucagaacugagucauccag

SEQ ID NO: 1193454 - RNA, 19 nt, Artificial Sequence
  Description of Artificial Sequence: Synthetic oligonucleotide
  Sense strand starting at position 3505 of SEQ ID NO: 916908
gcuccucuucuuguguuau

SEQ ID NO: 1193455 - RNA, 19 nt, Artificial Sequence
  Description of Artificial Sequence: Synthetic oligonucleotide
  Antisense strand to SEQ ID NO: 1193454
auaacacaagaagaggagc

SEQ ID NO: 1193456 - RNA, 19 nt, Artificial Sequence
  Description of Artificial Sequence: Synthetic oligonucleotide
  Sense strand starting at position 3507 of SEQ ID NO: 916908
uccucuucuuguguuauga

SEQ ID NO: 1193457 - RNA, 19 nt, Artificial Sequence
  Description of Artificial Sequence: Synthetic oligonucleotide
  Antisense strand to SEQ ID NO: 1193456
ucauaacacaagaagagga

SEQ ID NO: 1193458 - RNA, 19 nt, Artificial Sequence
  Description of Artificial Sequence: Synthetic oligonucleotide
  Sense strand starting at position 3697 of SEQ ID NO: 916908
guuacugaugguuggugau

SEQ ID NO: 1193459 - RNA, 19 nt, Artificial Sequence
  Description of Artificial Sequence: Synthetic oligonucleotide
  Antisense strand to SEQ ID NO: 1193458
aucaccaaccaucaguaac

SEQ ID NO: 1193460 - RNA, 19 nt, Artificial Sequence
  Description of Artificial Sequence: Synthetic oligonucleotide
  Sense strand starting at position 3703 of SEQ ID NO: 916908
gaugguuggugauuccacu

SEQ ID NO: 1193461 - RNA, 19 nt, Artificial Sequence
  Description of Artificial Sequence: Synthetic oligonucleotide
  Antisense strand to SEQ ID NO: 1193460
aguggaaucaccaaccauc

SEQ ID NO: 1193462 - RNA, 19 nt, Artificial Sequence
  Description of Artificial Sequence: Synthetic oligonucleotide
  Sense strand starting at position 3710 of SEQ ID NO: 916908
ggugauuccacucgggauu

SEQ ID NO: 1193463 - RNA, 19 nt, Artificial Sequence
  Description of Artificial Sequence: Synthetic oligonucleotide
  Antisense strand to SEQ ID NO: 1193462
aaucccgaguggaaucacc

SEQ ID NO: 1193464 - RNA, 19 nt, Artificial Sequence
  Description of Artificial Sequence: Synthetic oligonucleotide
  Sense strand starting at position 3767 of SEQ ID NO: 916908
uggcgaauucuccauccau

SEQ ID NO: 1193465 - RNA, 19 nt, Artificial Sequence
  Description of Artificial Sequence: Synthetic oligonucleotide
  Antisense strand to SEQ ID NO: 1193464
auggauggagaauucgcca

SEQ ID NO: 1193466 - RNA, 19 nt, Artificial Sequence
  Description of Artificial Sequence: Synthetic oligonucleotide
  Sense strand starting at position 3794 of SEQ ID NO: 916908
ucaggacccaguugguaau

SEQ ID NO: 1193467 - RNA, 19 nt, Artificial Sequence
  Description of Artificial Sequence: Synthetic oligonucleotide
  Antisense strand to SEQ ID NO: 1193466
auuaccaacuggguccuga

SEQ ID NO: 1193468 - RNA, 19 nt, Artificial Sequence
  Description of Artificial Sequence: Synthetic oligonucleotide
  Sense strand starting at position 3805 of SEQ ID NO: 916908
uugguaauuuguguuuggu

SEQ ID NO: 1193469 - RNA, 19 nt, Artificial Sequence
  Description of Artificial Sequence: Synthetic oligonucleotide
  Antisense strand to SEQ ID NO: 1193468
accaaacacaaauuaccaa

SEQ ID NO: 1193470 - RNA, 19 nt, Artificial Sequence
  Description of Artificial Sequence: Synthetic oligonucleotide
  Sense strand starting at position 3807 of SEQ ID NO: 916908
gguaauuuguguuuggugu

SEQ ID NO: 1193471 - RNA, 19 nt, Artificial Sequence
  Description of Artificial Sequence: Synthetic oligonucleotide
  Antisense strand to SEQ ID NO: 1193470
acaccaaacacaaauuacc

SEQ ID NO: 1193472 - RNA, 19 nt, Artificial Sequence
  Description of Artificial Sequence: Synthetic oligonucleotide
  Sense strand starting at position 1521 of SEQ ID NO: 916909
aacccuagggcuggugaua

SEQ ID NO: 1193473 - RNA, 19 nt, Artificial Sequence
  Description of Artificial Sequence: Synthetic oligonucleotide
  Antisense strand to SEQ ID NO: 1193472
uaucaccagcccuaggguu

SEQ ID NO: 1193474 - RNA, 19 nt, Artificial Sequence
  Description of Artificial Sequence: Synthetic oligonucleotide
  Sense strand starting at position 1560 of SEQ ID NO: 916909
agccaugauacacgagcaa

SEQ ID NO: 1193475 - RNA, 19 nt, Artificial Sequence
  Description of Artificial Sequence: Synthetic oligonucleotide
  Antisense strand to SEQ ID NO: 1193474
uugcucguguaucauggcu

SEQ ID NO: 1193476 - RNA, 19 nt, Artificial Sequence
  Description of Artificial Sequence: Synthetic oligonucleotide
  Sense strand starting at position 1615 of SEQ ID NO: 916909
ucgcgaggucgcuuuacua

SEQ ID NO: 1193477 - RNA, 19 nt, Artificial Sequence
  Description of Artificial Sequence: Synthetic oligonucleotide
  Antisense strand to SEQ ID NO: 1193476
uaguaaagcgaccucgcga

SEQ ID NO: 1193478 - RNA, 19 nt, Artificial Sequence
  Description of Artificial Sequence: Synthetic oligonucleotide
  Sense strand starting at position 1664 of SEQ ID NO: 916909
uugaguaagucccggaauu

SEQ ID NO: 1193479 - RNA, 19 nt, Artificial Sequence
  Description of Artificial Sequence: Synthetic oligonucleotide
  Antisense strand to SEQ ID NO: 1193478
aauuccgggacuuacucaa

SEQ ID NO: 1193480 - RNA, 19 nt, Artificial Sequence
  Description of Artificial Sequence: Synthetic oligonucleotide
  Sense strand starting at position 1759 of SEQ ID NO: 916909
uggaguugcuucucggagu

SEQ ID NO: 1193481 - RNA, 19 nt, Artificial Sequence
  Description of Artificial Sequence: Synthetic oligonucleotide
  Antisense strand to SEQ ID NO: 1193480
acuccgagaagcaacucca

SEQ ID NO: 1193482 - RNA, 19 nt, Artificial Sequence
  Description of Artificial Sequence: Synthetic oligonucleotide
  Sense strand starting at position 2019 of SEQ ID NO: 916909
cgcgcaguguuaugacgua

SEQ ID NO: 1193483 - RNA, 19 nt, Artificial Sequence
  Description of Artificial Sequence: Synthetic oligonucleotide
  Antisense strand to SEQ ID NO: 1193482
uacgucauaacacugcgcg

SEQ ID NO: 1193484 - RNA, 19 nt, Artificial Sequence
  Description of Artificial Sequence: Synthetic oligonucleotide
  Sense strand starting at position 2024 of SEQ ID NO: 916909
aguguuaugacguaggcga

SEQ ID NO: 1193485 - RNA, 19 nt, Artificial Sequence
  Description of Artificial Sequence: Synthetic oligonucleotide
  Antisense strand to SEQ ID NO: 1193484
ucgccuacgucauaacacu

SEQ ID NO: 1193486 - RNA, 19 nt, Artificial Sequence
  Description of Artificial Sequence: Synthetic oligonucleotide
  Sense strand starting at position 2070 of SEQ ID NO: 916909
agugguuucuguucuguuu

SEQ ID NO: 1193487 - RNA, 19 nt, Artificial Sequence
  Description of Artificial Sequence: Synthetic oligonucleotide
  Antisense strand to SEQ ID NO: 1193486
aaacagaacagaaaccacu

SEQ ID NO: 1193488 - RNA, 19 nt, Artificial Sequence
  Description of Artificial Sequence: Synthetic oligonucleotide
  Sense strand starting at position 2085 of SEQ ID NO: 916909
guuucugcccgcgguuaau

SEQ ID NO: 1193489 - RNA, 19 nt, Artificial Sequence
  Description of Artificial Sequence: Synthetic oligonucleotide
  Antisense strand to SEQ ID NO: 1193488
auuaaccgcgggcagaaac

SEQ ID NO: 1193490 - RNA, 19 nt, Artificial Sequence
  Description of Artificial Sequence: Synthetic oligonucleotide
  Sense strand starting at position 2094 of SEQ ID NO: 916909
cgcgguuaaugcugcuuau

SEQ ID NO: 1193491 - RNA, 19 nt, Artificial Sequence
  Description of Artificial Sequence: Synthetic oligonucleotide
  Antisense strand to SEQ ID NO: 1193490
auaagcagcauuaaccgcg

SEQ ID NO: 1193492 - RNA, 19 nt, Artificial Sequence
  Description of Artificial Sequence: Synthetic oligonucleotide
  Sense strand starting at position 2095 of SEQ ID NO: 916909
gcgguuaaugcugcuuauu

SEQ ID NO: 1193493 - RNA, 19 nt, Artificial Sequence
  Description of Artificial Sequence: Synthetic oligonucleotide
  Antisense strand to SEQ ID NO: 1193492
aauaagcagcauuaaccgc

SEQ ID NO: 1193494 - RNA, 19 nt, Artificial Sequence
  Description of Artificial Sequence: Synthetic oligonucleotide
  Sense strand starting at position 2129 of SEQ ID NO: 916909
gacgaacgcugcucacauu

SEQ ID NO: 1193495 - RNA, 19 nt, Artificial Sequence
  Description of Artificial Sequence: Synthetic oligonucleotide
  Antisense strand to SEQ ID NO: 1193494
aaugugagcagcguucguc

SEQ ID NO: 1193496 - RNA, 19 nt, Artificial Sequence
  Description of Artificial Sequence: Synthetic oligonucleotide
  Sense strand starting at position 2132 of SEQ ID NO: 916909
gaacgcugcucacauuuga

SEQ ID NO: 1193497 - RNA, 19 nt, Artificial Sequence
  Description of Artificial Sequence: Synthetic oligonucleotide
  Antisense strand to SEQ ID NO: 1193496
ucaaaugugagcagcguuc

SEQ ID NO: 1193498 - RNA, 19 nt, Artificial Sequence
  Description of Artificial Sequence: Synthetic oligonucleotide
  Sense strand starting at position 2170 of SEQ ID NO: 916909
gauauaguguagccagaug

SEQ ID NO: 1193499 - RNA, 19 nt, Artificial Sequence
  Description of Artificial Sequence: Synthetic oligonucleotide
  Antisense strand to SEQ ID NO: 1193498
caucuggcuacacuauauc

SEQ ID NO: 1193500 - RNA, 19 nt, Artificial Sequence
  Description of Artificial Sequence: Synthetic oligonucleotide
  Sense strand starting at position 2179 of SEQ ID NO: 916909
uagccagaugcuuagaagu

SEQ ID NO: 1193501 - RNA, 19 nt, Artificial Sequence
  Description of Artificial Sequence: Synthetic oligonucleotide
  Antisense strand to SEQ ID NO: 1193500
acuucuaagcaucuggcua

SEQ ID NO: 1193502 - RNA, 19 nt, Artificial Sequence
  Description of Artificial Sequence: Synthetic oligonucleotide
  Sense strand starting at position 2181 of SEQ ID NO: 916909
gccagaugcuuagaaguau

SEQ ID NO: 1193503 - RNA, 19 nt, Artificial Sequence
  Description of Artificial Sequence: Synthetic oligonucleotide
  Antisense strand to SEQ ID NO: 1193502
auacuucuaagcaucuggc

SEQ ID NO: 1193504 - RNA, 19 nt, Artificial Sequence
  Description of Artificial Sequence: Synthetic oligonucleotide
  Sense strand starting at position 2210 of SEQ ID NO: 916909
auuagacaguacuguaauu

SEQ ID NO: 1193505 - RNA, 19 nt, Artificial Sequence
  Description of Artificial Sequence: Synthetic oligonucleotide
  Antisense strand to SEQ ID NO: 1193504
aauuacaguacugucuaau

SEQ ID NO: 1193506 - RNA, 19 nt, Artificial Sequence
  Description of Artificial Sequence: Synthetic oligonucleotide
  Sense strand starting at position 2239 of SEQ ID NO: 916909
ccggcuucacugugugagu

SEQ ID NO: 1193507 - RNA, 19 nt, Artificial Sequence
  Description of Artificial Sequence: Synthetic oligonucleotide
  Antisense strand to SEQ ID NO: 1193506
acucacacagugaagccgg

SEQ ID NO: 1193508 - RNA, 19 nt, Artificial Sequence
  Description of Artificial Sequence: Synthetic oligonucleotide
  Sense strand starting at position 2240 of SEQ ID NO: 916909
cggcuucacugugugaguu

SEQ ID NO: 1193509 - RNA, 19 nt, Artificial Sequence
  Description of Artificial Sequence: Synthetic oligonucleotide
  Antisense strand to SEQ ID NO: 1193508
aacucacacagugaagccg

SEQ ID NO: 1193510 - RNA, 19 nt, Artificial Sequence
  Description of Artificial Sequence: Synthetic oligonucleotide
  Sense strand starting at position 2241 of SEQ ID NO: 916909
ggcuucacugugugaguuu

SEQ ID NO: 1193511 - RNA, 19 nt, Artificial Sequence
  Description of Artificial Sequence: Synthetic oligonucleotide
  Antisense strand to SEQ ID NO: 1193510
aaacucacacagugaagcc

SEQ ID NO: 1193512 - RNA, 19 nt, Artificial Sequence
  Description of Artificial Sequence: Synthetic oligonucleotide
  Sense strand starting at position 2282 of SEQ ID NO: 916909
gagccuuaguguucuaauu

SEQ ID NO: 1193513 - RNA, 19 nt, Artificial Sequence
  Description of Artificial Sequence: Synthetic oligonucleotide
  Antisense strand to SEQ ID NO: 1193512
aauuagaacacuaaggcuc

SEQ ID NO: 1193514 - RNA, 19 nt, Artificial Sequence
  Description of Artificial Sequence: Synthetic oligonucleotide
  Sense strand starting at position 2284 of SEQ ID NO: 916909
gccuuaguguucuaauuua

SEQ ID NO: 1193515 - RNA, 19 nt, Artificial Sequence
  Description of Artificial Sequence: Synthetic oligonucleotide
  Antisense strand to SEQ ID NO: 1193514
uaaauuagaacacuaaggc

SEQ ID NO: 1193516 - RNA, 19 nt, Artificial Sequence
  Description of Artificial Sequence: Synthetic oligonucleotide
  Sense strand starting at position 2673 of SEQ ID NO: 916909
uagcaaccauuggguaauu

SEQ ID NO: 1193517 - RNA, 19 nt, Artificial Sequence
  Description of Artificial Sequence: Synthetic oligonucleotide
  Antisense strand to SEQ ID NO: 1193516
aauuacccaaugguugcua

SEQ ID NO: 1193518 - RNA, 19 nt, Artificial Sequence
  Description of Artificial Sequence: Synthetic oligonucleotide
  Sense strand starting at position 2757 of SEQ ID NO: 916909
cuaggaacggaugguuuaa

SEQ ID NO: 1193519 - RNA, 19 nt, Artificial Sequence
  Description of Artificial Sequence: Synthetic oligonucleotide
  Antisense strand to SEQ ID NO: 1193518
uuaaaccauccguuccuag

SEQ ID NO: 1193520 - RNA, 19 nt, Artificial Sequence
  Description of Artificial Sequence: Synthetic oligonucleotide
  Sense strand starting at position 2827 of SEQ ID NO: 916909
ggguaugagguaggagauu

SEQ ID NO: 1193521 - RNA, 19 nt, Artificial Sequence
  Description of Artificial Sequence: Synthetic oligonucleotide
  Antisense strand to SEQ ID NO: 1193520
aaucuccuaccucauaccc

SEQ ID NO: 1193522 - RNA, 19 nt, Artificial Sequence
  Description of Artificial Sequence: Synthetic oligonucleotide
  Sense strand starting at position 3074 of SEQ ID NO: 916909
ucgcuuuguugaccaaguu

SEQ ID NO: 1193523 - RNA, 19 nt, Artificial Sequence
  Description of Artificial Sequence: Synthetic oligonucleotide
  Antisense strand to SEQ ID NO: 1193522
aacuuggucaacaaagcga

SEQ ID NO: 1193524 - RNA, 19 nt, Artificial Sequence
  Description of Artificial Sequence: Synthetic oligonucleotide
  Sense strand starting at position 3086 of SEQ ID NO: 916909
ccaaguuguucucgaauuc

SEQ ID NO: 1193525 - RNA, 19 nt, Artificial Sequence
  Description of Artificial Sequence: Synthetic oligonucleotide
  Antisense strand to SEQ ID NO: 1193524
gaauucgagaacaacuugg

SEQ ID NO: 1193526 - RNA, 19 nt, Artificial Sequence
  Description of Artificial Sequence: Synthetic oligonucleotide
  Sense strand starting at position 3087 of SEQ ID NO: 916909
caaguuguucucgaauucu

SEQ ID NO: 1193527 - RNA, 19 nt, Artificial Sequence
  Description of Artificial Sequence: Synthetic oligonucleotide
  Antisense strand to SEQ ID NO: 1193526
agaauucgagaacaacuug

SEQ ID NO: 1193528 - RNA, 19 nt, Artificial Sequence
  Description of Artificial Sequence: Synthetic oligonucleotide
  Sense strand starting at position 3222 of SEQ ID NO: 916909
gugcaauagcaacauacau

SEQ ID NO: 1193529 - RNA, 19 nt, Artificial Sequence
  Description of Artificial Sequence: Synthetic oligonucleotide
  Antisense strand to SEQ ID NO: 1193528
auguauguugcuauugcac

SEQ ID NO: 1193530 - RNA, 19 nt, Artificial Sequence
  Description of Artificial Sequence: Synthetic oligonucleotide
  Sense strand starting at position 3296 of SEQ ID NO: 916909
uguauauucugagacggag

SEQ ID NO: 1193531 - RNA, 19 nt, Artificial Sequence
  Description of Artificial Sequence: Synthetic oligonucleotide
  Antisense strand to SEQ ID NO: 1193530
cuccgucucagaauauaca

SEQ ID NO: 1193532 - RNA, 19 nt, Artificial Sequence
  Description of Artificial Sequence: Synthetic oligonucleotide
  Sense strand starting at position 3875 of SEQ ID NO: 916909
ccuggcuucuggccuagau

SEQ ID NO: 1193533 - RNA, 19 nt, Artificial Sequence
  Description of Artificial Sequence: Synthetic oligonucleotide
  Antisense strand to SEQ ID NO: 1193532
aucuaggccagaagccagg

SEQ ID NO: 1193534 - RNA, 19 nt, Artificial Sequence
  Description of Artificial Sequence: Synthetic oligonucleotide
  Sense strand starting at position 3877 of SEQ ID NO: 916909
uggcuucuggccuagauau

SEQ ID NO: 1193535 - RNA, 19 nt, Artificial Sequence
  Description of Artificial Sequence: Synthetic oligonucleotide
  Antisense strand to SEQ ID NO: 1193534
auaucuaggccagaagcca

SEQ ID NO: 1193536 - RNA, 19 nt, Artificial Sequence
  Description of Artificial Sequence: Synthetic oligonucleotide
  Sense strand starting at position 3941 of SEQ ID NO: 916909
agugguaacugccuugaau

SEQ ID NO: 1193537 - RNA, 19 nt, Artificial Sequence
  Description of Artificial Sequence: Synthetic oligonucleotide
  Antisense strand to SEQ ID NO: 1193536
auucaaggcaguuaccacu

SEQ ID NO: 1193538 - RNA, 19 nt, Artificial Sequence
  Description of Artificial Sequence: Synthetic oligonucleotide
  Sense strand starting at position 3950 of SEQ ID NO: 916909
ugccuugaaugaugcacau

SEQ ID NO: 1193539 - RNA, 19 nt, Artificial Sequence
  Description of Artificial Sequence: Synthetic oligonucleotide
  Antisense strand to SEQ ID NO: 1193538
augugcaucauucaaggca

SEQ ID NO: 1193540 - RNA, 19 nt, Artificial Sequence
  Description of Artificial Sequence: Synthetic oligonucleotide
  Sense strand starting at position 77 of SEQ ID NO: 916910
ccagccagauguccucaaa

SEQ ID NO: 1193541 - RNA, 19 nt, Artificial Sequence
  Description of Artificial Sequence: Synthetic oligonucleotide
  Antisense strand to SEQ ID NO: 1193540
uuugaggacaucuggcugg

SEQ ID NO: 1193542 - RNA, 19 nt, Artificial Sequence
  Description of Artificial Sequence: Synthetic oligonucleotide
  Sense strand starting at position 80 of SEQ ID NO: 916910
gccagauguccucaaacua

SEQ ID NO: 1193543 - RNA, 19 nt, Artificial Sequence
  Description of Artificial Sequence: Synthetic oligonucleotide
  Antisense strand to SEQ ID NO: 1193542
uaguuugaggacaucuggc

SEQ ID NO: 1193544 - RNA, 19 nt, Artificial Sequence
  Description of Artificial Sequence: Synthetic oligonucleotide
  Sense strand starting at position 166 of SEQ ID NO: 916910
uugagauacccggaaguuc

SEQ ID NO: 1193545 - RNA, 19 nt, Artificial Sequence
  Description of Artificial Sequence: Synthetic oligonucleotide
  Antisense strand to SEQ ID NO: 1193544
gaacuuccggguaucucaa

SEQ ID NO: 1193546 - RNA, 19 nt, Artificial Sequence
  Description of Artificial Sequence: Synthetic oligonucleotide
  Sense strand starting at position 738 of SEQ ID NO: 916910
ugagaaaguugcuuucuca

SEQ ID NO: 1193547 - RNA, 19 nt, Artificial Sequence
  Description of Artificial Sequence: Synthetic oligonucleotide
  Antisense strand to SEQ ID NO: 1193546
ugagaaagcaacuuucuca

SEQ ID NO: 1193548 - RNA, 19 nt, Artificial Sequence
  Description of Artificial Sequence: Synthetic oligonucleotide
  Sense strand starting at position 741 of SEQ ID NO: 916910
gaaaguugcuuucucaagc

SEQ ID NO: 1193549 - RNA, 19 nt, Artificial Sequence
  Description of Artificial Sequence: Synthetic oligonucleotide
  Antisense strand to SEQ ID NO: 1193548
gcuugagaaagcaacuuuc

SEQ ID NO: 1193550 - RNA, 19 nt, Artificial Sequence
  Description of Artificial Sequence: Synthetic oligonucleotide
  Sense strand starting at position 770 of SEQ ID NO: 916910
ucuauugcuguuggguuaa

SEQ ID NO: 1193551 - RNA, 19 nt, Artificial Sequence
  Description of Artificial Sequence: Synthetic oligonucleotide
  Antisense strand to SEQ ID NO: 1193550
uuaacccaacagcaauaga

SEQ ID NO: 1193552 - RNA, 19 nt, Artificial Sequence
  Description of Artificial Sequence: Synthetic oligonucleotide
  Sense strand starting at position 772 of SEQ ID NO: 916910
uauugcuguuggguuaaau

SEQ ID NO: 1193553 - RNA, 19 nt, Artificial Sequence
  Description of Artificial Sequence: Synthetic oligonucleotide
  Antisense strand to SEQ ID NO: 1193552
auuuaacccaacagcaaua

SEQ ID NO: 1193554 - RNA, 19 nt, Artificial Sequence
  Description of Artificial Sequence: Synthetic oligonucleotide
  Sense strand starting at position 815 of SEQ ID NO: 916910
agccuuucccagcacugaa

SEQ ID NO: 1193555 - RNA, 19 nt, Artificial Sequence
  Description of Artificial Sequence: Synthetic oligonucleotide
  Antisense strand to SEQ ID NO: 1193554
uucagugcugggaaaggcu

SEQ ID NO: 1193556 - RNA, 19 nt, Artificial Sequence
  Description of Artificial Sequence: Synthetic oligonucleotide
  Sense strand starting at position 1001 of SEQ ID NO: 916910
cagcgcuuacugccggaua

SEQ ID NO: 1193557 - RNA, 19 nt, Artificial Sequence
  Description of Artificial Sequence: Synthetic oligonucleotide
  Antisense strand to SEQ ID NO: 1193556
uauccggcaguaagcgcug

SEQ ID NO: 1193558 - RNA, 19 nt, Artificial Sequence
  Description of Artificial Sequence: Synthetic oligonucleotide
  Sense strand starting at position 1146 of SEQ ID NO: 916910
cugaguucccgcuggauac

SEQ ID NO: 1193559 - RNA, 19 nt, Artificial Sequence
  Description of Artificial Sequence: Synthetic oligonucleotide
  Antisense strand to SEQ ID NO: 1193558
guauccagcgggaacucag

SEQ ID NO: 1193560 - RNA, 19 nt, Artificial Sequence
  Description of Artificial Sequence: Synthetic oligonucleotide
  Sense strand starting at position 1147 of SEQ ID NO: 916910
ugaguucccgcuggauacu

SEQ ID NO: 1193561 - RNA, 19 nt, Artificial Sequence
  Description of Artificial Sequence: Synthetic oligonucleotide
  Antisense strand to SEQ ID NO: 1193560
aguauccagcgggaacuca

SEQ ID NO: 1193562 - RNA, 19 nt, Artificial Sequence
  Description of Artificial Sequence: Synthetic oligonucleotide
  Sense strand starting at position 1442 of SEQ ID NO: 916910
ccucgauguucucugaaca

SEQ ID NO: 1193563 - RNA, 19 nt, Artificial Sequence
  Description of Artificial Sequence: Synthetic oligonucleotide
  Antisense strand to SEQ ID NO: 1193562
uguucagagaacaucgagg

SEQ ID NO: 1193564 - RNA, 19 nt, Artificial Sequence
  Description of Artificial Sequence: Synthetic oligonucleotide
  Sense strand starting at position 1443 of SEQ ID NO: 916910
cucgauguucucugaacag

SEQ ID NO: 1193565 - RNA, 19 nt, Artificial Sequence
  Description of Artificial Sequence: Synthetic oligonucleotide
  Antisense strand to SEQ ID NO: 1193564
cuguucagagaacaucgag

SEQ ID NO: 1193566 - RNA, 19 nt, Artificial Sequence
  Description of Artificial Sequence: Synthetic oligonucleotide
  Sense strand starting at position 2545 of SEQ ID NO: 916910
ucuacuucccugugauucu

SEQ ID NO: 1193567 - RNA, 19 nt, Artificial Sequence
  Description of Artificial Sequence: Synthetic oligonucleotide
  Antisense strand to SEQ ID NO: 1193566
agaaucacagggaaguaga

SEQ ID NO: 1193568 - RNA, 19 nt, Artificial Sequence
  Description of Artificial Sequence: Synthetic oligonucleotide
  Sense strand starting at position 2620 of SEQ ID NO: 916910
caccucugaggcugugaaa

SEQ ID NO: 1193569 - RNA, 19 nt, Artificial Sequence
  Description of Artificial Sequence: Synthetic oligonucleotide
  Antisense strand to SEQ ID NO: 1193568
uuucacagccucagaggug

SEQ ID NO: 1193570 - RNA, 19 nt, Artificial Sequence
  Description of Artificial Sequence: Synthetic oligonucleotide
  Sense strand starting at position 2652 of SEQ ID NO: 916910
cuaggcuguacgcaucaua

SEQ ID NO: 1193571 - RNA, 19 nt, Artificial Sequence
  Description of Artificial Sequence: Synthetic oligonucleotide
  Antisense strand to SEQ ID NO: 1193570
uaugaugcguacagccuag

SEQ ID NO: 1193572 - RNA, 19 nt, Artificial Sequence
  Description of Artificial Sequence: Synthetic oligonucleotide
  Sense strand starting at position 2710 of SEQ ID NO: 916910
ccauuacugagccguugau

SEQ ID NO: 1193573 - RNA, 19 nt, Artificial Sequence
  Description of Artificial Sequence: Synthetic oligonucleotide
  Antisense strand to SEQ ID NO: 1193572
aucaacggcucaguaaugg

SEQ ID NO: 1193574 - RNA, 19 nt, Artificial Sequence
  Description of Artificial Sequence: Synthetic oligonucleotide
  Sense strand starting at position 2734 of SEQ ID NO: 916910
uugguagaguguccugauu

SEQ ID NO: 1193575 - RNA, 19 nt, Artificial Sequence
  Description of Artificial Sequence: Synthetic oligonucleotide
  Antisense strand to SEQ ID NO: 1193574
aaucaggacacucuaccaa

SEQ ID NO: 1193576 - RNA, 19 nt, Artificial Sequence
  Description of Artificial Sequence: Synthetic oligonucleotide
  Sense strand starting at position 2740 of SEQ ID NO: 916910
gaguguccugauuaagacu

SEQ ID NO: 1193577 - RNA, 19 nt, Artificial Sequence
  Description of Artificial Sequence: Synthetic oligonucleotide
  Antisense strand to SEQ ID NO: 1193576
agucuuaaucaggacacuc

SEQ ID NO: 1193578 - RNA, 19 nt, Artificial Sequence
  Description of Artificial Sequence: Synthetic oligonucleotide
  Sense strand starting at position 2748 of SEQ ID NO: 916910
ugauuaagacuucgaguuu

SEQ ID NO: 1193579 - RNA, 19 nt, Artificial Sequence
  Description of Artificial Sequence: Synthetic oligonucleotide
  Antisense strand to SEQ ID NO: 1193578
aaacucgaagucuuaauca

SEQ ID NO: 1193580 - RNA, 19 nt, Artificial Sequence
  Description of Artificial Sequence: Synthetic oligonucleotide
  Sense strand starting at position 2754 of SEQ ID NO: 916910
agacuucgaguuugaguga

SEQ ID NO: 1193581 - RNA, 19 nt, Artificial Sequence
  Description of Artificial Sequence: Synthetic oligonucleotide
  Antisense strand to SEQ ID NO: 1193580
ucacucaaacucgaagucu

SEQ ID NO: 1193582 - RNA, 19 nt, Artificial Sequence
  Description of Artificial Sequence: Synthetic oligonucleotide
  Sense strand starting at position 2759 of SEQ ID NO: 916910
ucgaguuugagugaagcua

SEQ ID NO: 1193583 - RNA, 19 nt, Artificial Sequence
  Description of Artificial Sequence: Synthetic oligonucleotide
  Antisense strand to SEQ ID NO: 1193582
uagcuucacucaaacucga

SEQ ID NO: 1193584 - RNA, 19 nt, Artificial Sequence
  Description of Artificial Sequence: Synthetic oligonucleotide
  Sense strand starting at position 2767 of SEQ ID NO: 916910
gagugaagcuaugccacua

SEQ ID NO: 1193585 - RNA, 19 nt, Artificial Sequence
  Description of Artificial Sequence: Synthetic oligonucleotide
  Antisense strand to SEQ ID NO: 1193584
uaguggcauagcuucacuc

SEQ ID NO: 1193586 - RNA, 19 nt, Artificial Sequence
  Description of Artificial Sequence: Synthetic oligonucleotide
  Sense strand starting at position 3442 of SEQ ID NO: 916910
uguugugcaguugaaauaa

SEQ ID NO: 1193587 - RNA, 19 nt, Artificial Sequence
  Description of Artificial Sequence: Synthetic oligonucleotide
  Antisense strand to SEQ ID NO: 1193586
uuauuucaacugcacaaca

SEQ ID NO: 1193588 - RNA, 19 nt, Artificial Sequence
  Description of Artificial Sequence: Synthetic oligonucleotide
  Sense strand starting at position 3518 of SEQ ID NO: 916910
cugucaaugugcuuaauga

SEQ ID NO: 1193589 - RNA, 19 nt, Artificial Sequence
  Description of Artificial Sequence: Synthetic oligonucleotide
  Antisense strand to SEQ ID NO: 1193588
ucauuaagcacauugacag

SEQ ID NO: 1193590 - RNA, 19 nt, Artificial Sequence
  Description of Artificial Sequence: Synthetic oligonucleotide
  Sense strand starting at position 3519 of SEQ ID NO: 916910
ugucaaugugcuuaaugag

SEQ ID NO: 1193591 - RNA, 19 nt, Artificial Sequence
  Description of Artificial Sequence: Synthetic oligonucleotide
  Antisense strand to SEQ ID NO: 1193590
cucauuaagcacauugaca

SEQ ID NO: 1193592 - RNA, 19 nt, Artificial Sequence
  Description of Artificial Sequence: Synthetic oligonucleotide
  Sense strand starting at position 3630 of SEQ ID NO: 916910
guguaugaccuugggcaaa

SEQ ID NO: 1193593 - RNA, 19 nt, Artificial Sequence
  Description of Artificial Sequence: Synthetic oligonucleotide
  Antisense strand to SEQ ID NO: 1193592
uuugcccaaggucauacac

SEQ ID NO: 1193594 - RNA, 19 nt, Artificial Sequence
  Description of Artificial Sequence: Synthetic oligonucleotide
  Sense strand starting at position 3669 of SEQ ID NO: 916910
uguuucuuccucuguaaga

SEQ ID NO: 1193595 - RNA, 19 nt, Artificial Sequence
  Description of Artificial Sequence: Synthetic oligonucleotide
  Antisense strand to SEQ ID NO: 1193594
ucuuacagaggaagaaaca

SEQ ID NO: 1193596 - RNA, 19 nt, Artificial Sequence
  Description of Artificial Sequence: Synthetic oligonucleotide
  Sense strand starting at position 3670 of SEQ ID NO: 916910
guuucuuccucuguaagac

SEQ ID NO: 1193597 - RNA, 19 nt, Artificial Sequence
  Description of Artificial Sequence: Synthetic oligonucleotide
  Antisense strand to SEQ ID NO: 1193596
gucuuacagaggaagaaac

SEQ ID NO: 1193598 - RNA, 19 nt, Artificial Sequence
  Description of Artificial Sequence: Synthetic oligonucleotide
  Sense strand starting at position 3725 of SEQ ID NO: 916910
gugagaauccaaugagguu

SEQ ID NO: 1193599 - RNA, 19 nt, Artificial Sequence
  Description of Artificial Sequence: Synthetic oligonucleotide
  Antisense strand to SEQ ID NO: 1193598
aaccucauuggauucucac

SEQ ID NO: 1193600 - RNA, 19 nt, Artificial Sequence
  Description of Artificial Sequence: Synthetic oligonucleotide
  Sense strand starting at position 3737 of SEQ ID NO: 916910
ugagguuauagauguaaca

SEQ ID NO: 1193601 - RNA, 19 nt, Artificial Sequence
  Description of Artificial Sequence: Synthetic oligonucleotide
  Antisense strand to SEQ ID NO: 1193600
uguuacaucuauaaccuca

SEQ ID NO: 1193602 - RNA, 19 nt, Artificial Sequence
  Description of Artificial Sequence: Synthetic oligonucleotide
  Sense strand starting at position 3750 of SEQ ID NO: 916910
guaacacauuuggaagagu

SEQ ID NO: 1193603 - RNA, 19 nt, Artificial Sequence
  Description of Artificial Sequence: Synthetic oligonucleotide
  Antisense strand to SEQ ID NO: 1193602
acucuuccaaauguguuac

SEQ ID NO: 1193604 - RNA, 19 nt, Artificial Sequence
  Description of Artificial Sequence: Synthetic oligonucleotide
  Sense strand starting at position 3765 of SEQ ID NO: 916910
gaguuucugguucgcauuu

SEQ ID NO: 1193605 - RNA, 19 nt, Artificial Sequence
  Description of Artificial Sequence: Synthetic oligonucleotide
  Antisense strand to SEQ ID NO: 1193604
aaaugcgaaccagaaacuc

SEQ ID NO: 1193606 - RNA, 19 nt, Artificial Sequence
  Description of Artificial Sequence: Synthetic oligonucleotide
  Sense strand starting at position 3766 of SEQ ID NO: 916910
aguuucugguucgcauuua

SEQ ID NO: 1193607 - RNA, 19 nt, Artificial Sequence
  Description of Artificial Sequence: Synthetic oligonucleotide
  Antisense strand to SEQ ID NO: 1193606
uaaaugcgaaccagaaacu

SEQ ID NO: 1193608 - RNA, 19 nt, Artificial Sequence
  Description of Artificial Sequence: Synthetic oligonucleotide
  Sense strand starting at position 3792 of SEQ ID NO: 916910
gugcuaagcacuggagauu

SEQ ID NO: 1193609 - RNA, 19 nt, Artificial Sequence
  Description of Artificial Sequence: Synthetic oligonucleotide
  Antisense strand to SEQ ID NO: 1193608
aaucuccagugcuuagcac

SEQ ID NO: 1193610 - RNA, 19 nt, Artificial Sequence
  Description of Artificial Sequence: Synthetic oligonucleotide
  Sense strand starting at position 3793 of SEQ ID NO: 916910
ugcuaagcacuggagauua

SEQ ID NO: 1193611 - RNA, 19 nt, Artificial Sequence
  Description of Artificial Sequence: Synthetic oligonucleotide
  Antisense strand to SEQ ID NO: 1193610
uaaucuccagugcuuagca

SEQ ID NO: 1193612 - RNA, 19 nt, Artificial Sequence
  Description of Artificial Sequence: Synthetic oligonucleotide
  Sense strand starting at position 3812 of SEQ ID NO: 916910
agcagugaauccuuaagga

SEQ ID NO: 1193613 - RNA, 19 nt, Artificial Sequence
  Description of Artificial Sequence: Synthetic oligonucleotide
  Antisense strand to SEQ ID NO: 1193612
uccuuaaggauucacugcu

SEQ ID NO: 1193614 - RNA, 19 nt, Artificial Sequence
  Description of Artificial Sequence: Synthetic oligonucleotide
  Sense strand starting at position 3819 of SEQ ID NO: 916910
aauccuuaaggagguuaca

SEQ ID NO: 1193615 - RNA, 19 nt, Artificial Sequence
  Description of Artificial Sequence: Synthetic oligonucleotide
  Antisense strand to SEQ ID NO: 1193614
uguaaccuccuuaaggauu

SEQ ID NO: 1193616 - RNA, 19 nt, Artificial Sequence
  Description of Artificial Sequence: Synthetic oligonucleotide
  Sense strand starting at position 3894 of SEQ ID NO: 916910
uaaagaaaguacuauagga

SEQ ID NO: 1193617 - RNA, 19 nt, Artificial Sequence
  Description of Artificial Sequence: Synthetic oligonucleotide
  Antisense strand to SEQ ID NO: 1193616
uccuauaguacuuucuuua

SEQ ID NO: 1193618 - RNA, 19 nt, Artificial Sequence
  Description of Artificial Sequence: Synthetic oligonucleotide
  Sense strand starting at position 3899 of SEQ ID NO: 916910
aaaguacuauaggaguaaa

SEQ ID NO: 1193619 - RNA, 19 nt, Artificial Sequence
  Description of Artificial Sequence: Synthetic oligonucleotide
  Antisense strand to SEQ ID NO: 1193618
uuuacuccuauaguacuuu

SEQ ID NO: 1193620 - RNA, 19 nt, Artificial Sequence
  Description of Artificial Sequence: Synthetic oligonucleotide
  Sense strand starting at position 5 of SEQ ID NO: 916911
ccagccagauguccucaaa

SEQ ID NO: 1193621 - RNA, 19 nt, Artificial Sequence
  Description of Artificial Sequence: Synthetic oligonucleotide
  Antisense strand to SEQ ID NO: 1193620
uuugaggacaucuggcugg

SEQ ID NO: 1193622 - RNA, 19 nt, Artificial Sequence
  Description of Artificial Sequence: Synthetic oligonucleotide
  Sense strand starting at position 8 of SEQ ID NO: 916911
gccagauguccucaaacua

SEQ ID NO: 1193623 - RNA, 19 nt, Artificial Sequence
  Description of Artificial Sequence: Synthetic oligonucleotide
  Antisense strand to SEQ ID NO: 1193622
uaguuugaggacaucuggc

SEQ ID NO: 1193624 - RNA, 19 nt, Artificial Sequence
  Description of Artificial Sequence: Synthetic oligonucleotide
  Sense strand starting at position 94 of SEQ ID NO: 916911
uugagauacccggaaguuc

SEQ ID NO: 1193625 - RNA, 19 nt, Artificial Sequence
  Description of Artificial Sequence: Synthetic oligonucleotide
  Antisense strand to SEQ ID NO: 1193624
gaacuuccggguaucucaa

SEQ ID NO: 1193626 - RNA, 19 nt, Artificial Sequence
  Description of Artificial Sequence: Synthetic oligonucleotide
  Sense strand starting at position 666 of SEQ ID NO: 916911
ugagaaaguugcuuucuca

SEQ ID NO: 1193627 - RNA, 19 nt, Artificial Sequence
  Description of Artificial Sequence: Synthetic oligonucleotide
  Antisense strand to SEQ ID NO: 1193626
ugagaaagcaacuuucuca

SEQ ID NO: 1193628 - RNA, 19 nt, Artificial Sequence
  Description of Artificial Sequence: Synthetic oligonucleotide
  Sense strand starting at position 669 of SEQ ID NO: 916911
gaaaguugcuuucucaagc

SEQ ID NO: 1193629 - RNA, 19 nt, Artificial Sequence
  Description of Artificial Sequence: Synthetic oligonucleotide
  Antisense strand to SEQ ID NO: 1193628
gcuugagaaagcaacuuuc

SEQ ID NO: 1193630 - RNA, 19 nt, Artificial Sequence
  Description of Artificial Sequence: Synthetic oligonucleotide
  Sense strand starting at position 698 of SEQ ID NO: 916911
ucuauugcuguuggguuaa

SEQ ID NO: 1193631 - RNA, 19 nt, Artificial Sequence
  Description of Artificial Sequence: Synthetic oligonucleotide
  Antisense strand to SEQ ID NO: 1193630
uuaacccaacagcaauaga

SEQ ID NO: 1193632 - RNA, 19 nt, Artificial Sequence
  Description of Artificial Sequence: Synthetic oligonucleotide
  Sense strand starting at position 700 of SEQ ID NO: 916911
uauugcuguuggguuaaau

SEQ ID NO: 1193633 - RNA, 19 nt, Artificial Sequence
  Description of Artificial Sequence: Synthetic oligonucleotide
  Antisense strand to SEQ ID NO: 1193632
auuuaacccaacagcaaua

SEQ ID NO: 1193634 - RNA, 19 nt, Artificial Sequence
  Description of Artificial Sequence: Synthetic oligonucleotide
  Sense strand starting at position 743 of SEQ ID NO: 916911
agccuuucccagcacugaa

SEQ ID NO: 1193635 - RNA, 19 nt, Artificial Sequence
  Description of Artificial Sequence: Synthetic oligonucleotide
  Antisense strand to SEQ ID NO: 1193634
uucagugcugggaaaggcu

SEQ ID NO: 1193636 - RNA, 19 nt, Artificial Sequence
  Description of Artificial Sequence: Synthetic oligonucleotide
  Sense strand starting at position 929 of SEQ ID NO: 916911
cagcgcuuacugccggaua

SEQ ID NO: 1193637 - RNA, 19 nt, Artificial Sequence
  Description of Artificial Sequence: Synthetic oligonucleotide
  Antisense strand to SEQ ID NO: 1193636
uauccggcaguaagcgcug

SEQ ID NO: 1193638 - RNA, 19 nt, Artificial Sequence
  Description of Artificial Sequence: Synthetic oligonucleotide
  Sense strand starting at position 1074 of SEQ ID NO: 916911
cugaguucccgcuggauac

SEQ ID NO: 1193639 - RNA, 19 nt, Artificial Sequence
  Description of Artificial Sequence: Synthetic oligonucleotide
  Antisense strand to SEQ ID NO: 1193638
guauccagcgggaacucag

SEQ ID NO: 1193640 - RNA, 19 nt, Artificial Sequence
  Description of Artificial Sequence: Synthetic oligonucleotide
  Sense strand starting at position 1075 of SEQ ID NO: 916911
ugaguucccgcuggauacu

SEQ ID NO: 1193641 - RNA, 19 nt, Artificial Sequence
  Description of Artificial Sequence: Synthetic oligonucleotide
  Antisense strand to SEQ ID NO: 1193640
aguauccagcgggaacuca

SEQ ID NO: 1193642 - RNA, 19 nt, Artificial Sequence
  Description of Artificial Sequence: Synthetic oligonucleotide
  Sense strand starting at position 1370 of SEQ ID NO: 916911
ccucgauguucucugaaca

SEQ ID NO: 1193643 - RNA, 19 nt, Artificial Sequence
  Description of Artificial Sequence: Synthetic oligonucleotide
  Antisense strand to SEQ ID NO: 1193642
uguucagagaacaucgagg

SEQ ID NO: 1193644 - RNA, 19 nt, Artificial Sequence
  Description of Artificial Sequence: Synthetic oligonucleotide
  Sense strand starting at position 1371 of SEQ ID NO: 916911
cucgauguucucugaacag

SEQ ID NO: 1193645 - RNA, 19 nt, Artificial Sequence
  Description of Artificial Sequence: Synthetic oligonucleotide
  Antisense strand to SEQ ID NO: 1193644
cuguucagagaacaucgag

SEQ ID NO: 1193646 - RNA, 19 nt, Artificial Sequence
  Description of Artificial Sequence: Synthetic oligonucleotide
  Sense strand starting at position 2473 of SEQ ID NO: 916911
ucuacuucccugugauucu

SEQ ID NO: 1193647 - RNA, 19 nt, Artificial Sequence
  Description of Artificial Sequence: Synthetic oligonucleotide
  Antisense strand to SEQ ID NO: 1193646
agaaucacagggaaguaga

SEQ ID NO: 1193648 - RNA, 19 nt, Artificial Sequence
  Description of Artificial Sequence: Synthetic oligonucleotide
  Sense strand starting at position 2548 of SEQ ID NO: 916911
caccucugaggcugugaaa

SEQ ID NO: 1193649 - RNA, 19 nt, Artificial Sequence
  Description of Artificial Sequence: Synthetic oligonucleotide
  Antisense strand to SEQ ID NO: 1193648
uuucacagccucagaggug

SEQ ID NO: 1193650 - RNA, 19 nt, Artificial Sequence
  Description of Artificial Sequence: Synthetic oligonucleotide
  Sense strand starting at position 2580 of SEQ ID NO: 916911
cuaggcuguacgcaucaua

SEQ ID NO: 1193651 - RNA, 19 nt, Artificial Sequence
  Description of Artificial Sequence: Synthetic oligonucleotide
  Antisense strand to SEQ ID NO: 1193650
uaugaugcguacagccuag

SEQ ID NO: 1193652 - RNA, 19 nt, Artificial Sequence
  Description of Artificial Sequence: Synthetic oligonucleotide
  Sense strand starting at position 2638 of SEQ ID NO: 916911
ccauuacugagccguugau

SEQ ID NO: 1193653 - RNA, 19 nt, Artificial Sequence
  Description of Artificial Sequence: Synthetic oligonucleotide
  Antisense strand to SEQ ID NO: 1193652
aucaacggcucaguaaugg

SEQ ID NO: 1193654 - RNA, 19 nt, Artificial Sequence
  Description of Artificial Sequence: Synthetic oligonucleotide
  Sense strand starting at position 2662 of SEQ ID NO: 916911
uugguagaguguccugauu

SEQ ID NO: 1193655 - RNA, 19 nt, Artificial Sequence
  Description of Artificial Sequence: Synthetic oligonucleotide
  Antisense strand to SEQ ID NO: 1193654
aaucaggacacucuaccaa

SEQ ID NO: 1193656 - RNA, 19 nt, Artificial Sequence
  Description of Artificial Sequence: Synthetic oligonucleotide
  Sense strand starting at position 2668 of SEQ ID NO: 916911
gaguguccugauuaagacu

SEQ ID NO: 1193657 - RNA, 19 nt, Artificial Sequence
  Description of Artificial Sequence: Synthetic oligonucleotide
  Antisense strand to SEQ ID NO: 1193656
agucuuaaucaggacacuc

SEQ ID NO: 1193658 - RNA, 19 nt, Artificial Sequence
  Description of Artificial Sequence: Synthetic oligonucleotide
  Sense strand starting at position 2676 of SEQ ID NO: 916911
ugauuaagacuucgaguuu

SEQ ID NO: 1193659 - RNA, 19 nt, Artificial Sequence
  Description of Artificial Sequence: Synthetic oligonucleotide
  Antisense strand to SEQ ID NO: 1193658
aaacucgaagucuuaauca

SEQ ID NO: 1193660 - RNA, 19 nt, Artificial Sequence
  Description of Artificial Sequence: Synthetic oligonucleotide
  Sense strand starting at position 2682 of SEQ ID NO: 916911
agacuucgaguuugaguga

SEQ ID NO: 1193661 - RNA, 19 nt, Artificial Sequence
  Description of Artificial Sequence: Synthetic oligonucleotide
  Antisense strand to SEQ ID NO: 1193660
ucacucaaacucgaagucu

SEQ ID NO: 1193662 - RNA, 19 nt, Artificial Sequence
  Description of Artificial Sequence: Synthetic oligonucleotide
  Sense strand starting at position 2687 of SEQ ID NO: 916911
ucgaguuugagugaagcua

SEQ ID NO: 1193663 - RNA, 19 nt, Artificial Sequence
  Description of Artificial Sequence: Synthetic oligonucleotide
  Antisense strand to SEQ ID NO: 1193662
uagcuucacucaaacucga

SEQ ID NO: 1193664 - RNA, 19 nt, Artificial Sequence
  Description of Artificial Sequence: Synthetic oligonucleotide
  Sense strand starting at position 2695 of SEQ ID NO: 916911
gagugaagcuaugccacua

SEQ ID NO: 1193665 - RNA, 19 nt, Artificial Sequence
  Description of Artificial Sequence: Synthetic oligonucleotide
  Antisense strand to SEQ ID NO: 1193664
uaguggcauagcuucacuc

SEQ ID NO: 1193666 - RNA, 19 nt, Artificial Sequence
  Description of Artificial Sequence: Synthetic oligonucleotide
  Sense strand starting at position 3370 of SEQ ID NO: 916911
uguugugcaguugaaauaa

SEQ ID NO: 1193667 - RNA, 19 nt, Artificial Sequence
  Description of Artificial Sequence: Synthetic oligonucleotide
  Antisense strand to SEQ ID NO: 1193666
uuauuucaacugcacaaca

SEQ ID NO: 1193668 - RNA, 19 nt, Artificial Sequence
  Description of Artificial Sequence: Synthetic oligonucleotide
  Sense strand starting at position 3446 of SEQ ID NO: 916911
cugucaaugugcuuaauga

SEQ ID NO: 1193669 - RNA, 19 nt, Artificial Sequence
  Description of Artificial Sequence: Synthetic oligonucleotide
  Antisense strand to SEQ ID NO: 1193668
ucauuaagcacauugacag

SEQ ID NO: 1193670 - RNA, 19 nt, Artificial Sequence
  Description of Artificial Sequence: Synthetic oligonucleotide
  Sense strand starting at position 3447 of SEQ ID NO: 916911
ugucaaugugcuuaaugag

SEQ ID NO: 1193671 - RNA, 19 nt, Artificial Sequence
  Description of Artificial Sequence: Synthetic oligonucleotide
  Antisense strand to SEQ ID NO: 1193670
cucauuaagcacauugaca

SEQ ID NO: 1193672 - RNA, 19 nt, Artificial Sequence
  Description of Artificial Sequence: Synthetic oligonucleotide
  Sense strand starting at position 3558 of SEQ ID NO: 916911
guguaugaccuugggcaaa

SEQ ID NO: 1193673 - RNA, 19 nt, Artificial Sequence
  Description of Artificial Sequence: Synthetic oligonucleotide
  Antisense strand to SEQ ID NO: 1193672
uuugcccaaggucauacac

SEQ ID NO: 1193674 - RNA, 19 nt, Artificial Sequence
  Description of Artificial Sequence: Synthetic oligonucleotide
  Sense strand starting at position 3597 of SEQ ID NO: 916911
uguuucuuccucuguaaga

SEQ ID NO: 1193675 - RNA, 19 nt, Artificial Sequence
  Description of Artificial Sequence: Synthetic oligonucleotide
  Antisense strand to SEQ ID NO: 1193674
ucuuacagaggaagaaaca

SEQ ID NO: 1193676 - RNA, 19 nt, Artificial Sequence
  Description of Artificial Sequence: Synthetic oligonucleotide
  Sense strand starting at position 3598 of SEQ ID NO: 916911
guuucuuccucuguaagac

SEQ ID NO: 1193677 - RNA, 19 nt, Artificial Sequence
  Description of Artificial Sequence: Synthetic oligonucleotide
  Antisense strand to SEQ ID NO: 1193676
gucuuacagaggaagaaac

SEQ ID NO: 1193678 - RNA, 19 nt, Artificial Sequence
  Description of Artificial Sequence: Synthetic oligonucleotide
  Sense strand starting at position 3653 of SEQ ID NO: 916911
gugagaauccaaugagguu

SEQ ID NO: 1193679 - RNA, 19 nt, Artificial Sequence
  Description of Artificial Sequence: Synthetic oligonucleotide
  Antisense strand to SEQ ID NO: 1193678
aaccucauuggauucucac

SEQ ID NO: 1193680 - RNA, 19 nt, Artificial Sequence
  Description of Artificial Sequence: Synthetic oligonucleotide
  Sense strand starting at position 3665 of SEQ ID NO: 916911
ugagguuauagauguaaca

SEQ ID NO: 1193681 - RNA, 19 nt, Artificial Sequence
  Description of Artificial Sequence: Synthetic oligonucleotide
  Antisense strand to SEQ ID NO: 1193680
uguuacaucuauaaccuca

SEQ ID NO: 1193682 - RNA, 19 nt, Artificial Sequence
  Description of Artificial Sequence: Synthetic oligonucleotide
  Sense strand starting at position 3678 of SEQ ID NO: 916911
guaacacauuuggaagagu

SEQ ID NO: 1193683 - RNA, 19 nt, Artificial Sequence
  Description of Artificial Sequence: Synthetic oligonucleotide
  Antisense strand to SEQ ID NO: 1193682
acucuuccaaauguguuac

SEQ ID NO: 1193684 - RNA, 19 nt, Artificial Sequence
  Description of Artificial Sequence: Synthetic oligonucleotide
  Sense strand starting at position 3693 of SEQ ID NO: 916911
gaguuucugguucgcauuu

SEQ ID NO: 1193685 - RNA, 19 nt, Artificial Sequence
  Description of Artificial Sequence: Synthetic oligonucleotide
  Antisense strand to SEQ ID NO: 1193684
aaaugcgaaccagaaacuc

SEQ ID NO: 1193686 - RNA, 19 nt, Artificial Sequence
  Description of Artificial Sequence: Synthetic oligonucleotide
  Sense strand starting at position 3694 of SEQ ID NO: 916911
aguuucugguucgcauuua

SEQ ID NO: 1193687 - RNA, 19 nt, Artificial Sequence
  Description of Artificial Sequence: Synthetic oligonucleotide
  Antisense strand to SEQ ID NO: 1193686
uaaaugcgaaccagaaacu

SEQ ID NO: 1193688 - RNA, 19 nt, Artificial Sequence
  Description of Artificial Sequence: Synthetic oligonucleotide
  Sense strand starting at position 3720 of SEQ ID NO: 916911
gugcuaagcacuggagauu

SEQ ID NO: 1193689 - RNA, 19 nt, Artificial Sequence
  Description of Artificial Sequence: Synthetic oligonucleotide
  Antisense strand to SEQ ID NO: 1193688
aaucuccagugcuuagcac

SEQ ID NO: 1193690 - RNA, 19 nt, Artificial Sequence
  Description of Artificial Sequence: Synthetic oligonucleotide
  Sense strand starting at position 3721 of SEQ ID NO: 916911
ugcuaagcacuggagauua

SEQ ID NO: 1193691 - RNA, 19 nt, Artificial Sequence
  Description of Artificial Sequence: Synthetic oligonucleotide
  Antisense strand to SEQ ID NO: 1193690
uaaucuccagugcuuagca

SEQ ID NO: 1193692 - RNA, 19 nt, Artificial Sequence
  Description of Artificial Sequence: Synthetic oligonucleotide
  Sense strand starting at position 3740 of SEQ ID NO: 916911
agcagugaauccuuaagga

SEQ ID NO: 1193693 - RNA, 19 nt, Artificial Sequence
  Description of Artificial Sequence: Synthetic oligonucleotide
  Antisense strand to SEQ ID NO: 1193692
uccuuaaggauucacugcu

SEQ ID NO: 1193694 - RNA, 19 nt, Artificial Sequence
  Description of Artificial Sequence: Synthetic oligonucleotide
  Sense strand starting at position 3747 of SEQ ID NO: 916911
aauccuuaaggagguuaca

SEQ ID NO: 1193695 - RNA, 19 nt, Artificial Sequence
  Description of Artificial Sequence: Synthetic oligonucleotide
  Antisense strand to SEQ ID NO: 1193694
uguaaccuccuuaaggauu

SEQ ID NO: 1193696 - RNA, 19 nt, Artificial Sequence
  Description of Artificial Sequence: Synthetic oligonucleotide
  Sense strand starting at position 3822 of SEQ ID NO: 916911
uaaagaaaguacuauagga

SEQ ID NO: 1193697 - RNA, 19 nt, Artificial Sequence
  Description of Artificial Sequence: Synthetic oligonucleotide
  Antisense strand to SEQ ID NO: 1193696
uccuauaguacuuucuuua

SEQ ID NO: 1193698 - RNA, 19 nt, Artificial Sequence
  Description of Artificial Sequence: Synthetic oligonucleotide
  Sense strand starting at position 3827 of SEQ ID NO: 916911
aaaguacuauaggaguaaa

SEQ ID NO: 1193699 - RNA, 19 nt, Artificial Sequence
  Description of Artificial Sequence: Synthetic oligonucleotide
  Antisense strand to SEQ ID NO: 1193698
uuuacuccuauaguacuuu

SEQ ID NO: 1193700 - RNA, 19 nt, Artificial Sequence
  Description of Artificial Sequence: Synthetic oligonucleotide
  Sense strand starting at position 7 of SEQ ID NO: 916912
cuuugauaguucuuucuag

SEQ ID NO: 1193701 - RNA, 19 nt, Artificial Sequence
  Description of Artificial Sequence: Synthetic oligonucleotide
  Antisense strand to SEQ ID NO: 1193700
cuagaaagaacuaucaaag

SEQ ID NO: 1193702 - RNA, 19 nt, Artificial Sequence
  Description of Artificial Sequence: Synthetic oligonucleotide
  Sense strand starting at position 14 of SEQ ID NO: 916912
aguucuuucuagucaaaca

SEQ ID NO: 1193703 - RNA, 19 nt, Artificial Sequence
  Description of Artificial Sequence: Synthetic oligonucleotide
  Antisense strand to SEQ ID NO: 1193702
uguuugacuagaaagaacu

SEQ ID NO: 1193704 - RNA, 19 nt, Artificial Sequence
  Description of Artificial Sequence: Synthetic oligonucleotide
  Sense strand starting at position 89 of SEQ ID NO: 916912
agaggaggcugaguaaagu

SEQ ID NO: 1193705 - RNA, 19 nt, Artificial Sequence
  Description of Artificial Sequence: Synthetic oligonucleotide
  Antisense strand to SEQ ID NO: 1193704
acuuuacucagccuccucu

SEQ ID NO: 1193706 - RNA, 19 nt, Artificial Sequence
  Description of Artificial Sequence: Synthetic oligonucleotide
  Sense strand starting at position 419 of SEQ ID NO: 916912
cgcgucuuuccggugagga

SEQ ID NO: 1193707 - RNA, 19 nt, Artificial Sequence
  Description of Artificial Sequence: Synthetic oligonucleotide
  Antisense strand to SEQ ID NO: 1193706
uccucaccggaaagacgcg

SEQ ID NO: 1193708 - RNA, 19 nt, Artificial Sequence
  Description of Artificial Sequence: Synthetic oligonucleotide
  Sense strand starting at position 855 of SEQ ID NO: 916912
ugagauauuucccaggcaa

SEQ ID NO: 1193709 - RNA, 19 nt, Artificial Sequence
  Description of Artificial Sequence: Synthetic oligonucleotide
  Antisense strand to SEQ ID NO: 1193708
uugccugggaaauaucuca

SEQ ID NO: 1193710 - RNA, 19 nt, Artificial Sequence
  Description of Artificial Sequence: Synthetic oligonucleotide
  Sense strand starting at position 1003 of SEQ ID NO: 916912
uuugauggccucgaugauu

SEQ ID NO: 1193711 - RNA, 19 nt, Artificial Sequence
  Description of Artificial Sequence: Synthetic oligonucleotide
  Antisense strand to SEQ ID NO: 1193710
aaucaucgaggccaucaaa

SEQ ID NO: 1193712 - RNA, 19 nt, Artificial Sequence
  Description of Artificial Sequence: Synthetic oligonucleotide
  Sense strand starting at position 1231 of SEQ ID NO: 916912
agcucaguccucuauuaca

SEQ ID NO: 1193713 - RNA, 19 nt, Artificial Sequence
  Description of Artificial Sequence: Synthetic oligonucleotide
  Antisense strand to SEQ ID NO: 1193712
uguaauagaggacugagcu

SEQ ID NO: 1193714 - RNA, 19 nt, Artificial Sequence
  Description of Artificial Sequence: Synthetic oligonucleotide
  Sense strand starting at position 1345 of SEQ ID NO: 916912
gcauuugauuaccugcgga

SEQ ID NO: 1193715 - RNA, 19 nt, Artificial Sequence
  Description of Artificial Sequence: Synthetic oligonucleotide
  Antisense strand to SEQ ID NO: 1193714
uccgcagguaaucaaaugc

SEQ ID NO: 1193716 - RNA, 19 nt, Artificial Sequence
  Description of Artificial Sequence: Synthetic oligonucleotide
  Sense strand starting at position 1426 of SEQ ID NO: 916912
acuucugagucccuauaug

SEQ ID NO: 1193717 - RNA, 19 nt, Artificial Sequence
  Description of Artificial Sequence: Synthetic oligonucleotide
  Antisense strand to SEQ ID NO: 1193716
cauauagggacucagaagu

SEQ ID NO: 1193718 - RNA, 19 nt, Artificial Sequence
  Description of Artificial Sequence: Synthetic oligonucleotide
  Sense strand starting at position 1461 of SEQ ID NO: 916912
agggucauuucugugccaa

SEQ ID NO: 1193719 - RNA, 19 nt, Artificial Sequence
  Description of Artificial Sequence: Synthetic oligonucleotide
  Antisense strand to SEQ ID NO: 1193718
uuggcacagaaaugacccu

SEQ ID NO: 1193720 - RNA, 19 nt, Artificial Sequence
  Description of Artificial Sequence: Synthetic oligonucleotide
  Sense strand starting at position 1462 of SEQ ID NO: 916912
gggucauuucugugccaau

SEQ ID NO: 1193721 - RNA, 19 nt, Artificial Sequence
  Description of Artificial Sequence: Synthetic oligonucleotide
  Antisense strand to SEQ ID NO: 1193720
auuggcacagaaaugaccc

SEQ ID NO: 1193722 - RNA, 19 nt, Artificial Sequence
  Description of Artificial Sequence: Synthetic oligonucleotide
  Sense strand starting at position 1463 of SEQ ID NO: 916912
ggucauuucugugccaaua

SEQ ID NO: 1193723 - RNA, 19 nt, Artificial Sequence
  Description of Artificial Sequence: Synthetic oligonucleotide
  Antisense strand to SEQ ID NO: 1193722
uauuggcacagaaaugacc

SEQ ID NO: 1193724 - RNA, 19 nt, Artificial Sequence
  Description of Artificial Sequence: Synthetic oligonucleotide
  Sense strand starting at position 1476 of SEQ ID NO: 916912
ccaauaggaucuucugcuu

SEQ ID NO: 1193725 - RNA, 19 nt, Artificial Sequence
  Description of Artificial Sequence: Synthetic oligonucleotide
  Antisense strand to SEQ ID NO: 1193724
aagcagaagauccuauugg

SEQ ID NO: 1193726 - RNA, 19 nt, Artificial Sequence
  Description of Artificial Sequence: Synthetic oligonucleotide
  Sense strand starting at position 1499 of SEQ ID NO: 916912
ccuugacgccuggacaauu

SEQ ID NO: 1193727 - RNA, 19 nt, Artificial Sequence
  Description of Artificial Sequence: Synthetic oligonucleotide
  Antisense strand to SEQ ID NO: 1193726
aauuguccaggcgucaagg

SEQ ID NO: 1193728 - RNA, 19 nt, Artificial Sequence
  Description of Artificial Sequence: Synthetic oligonucleotide
  Sense strand starting at position 1986 of SEQ ID NO: 916912
agggacaucuugucagucu

SEQ ID NO: 1193729 - RNA, 19 nt, Artificial Sequence
  Description of Artificial Sequence: Synthetic oligonucleotide
  Antisense strand to SEQ ID NO: 1193728
agacugacaagaugucccu

SEQ ID NO: 1193730 - RNA, 19 nt, Artificial Sequence
  Description of Artificial Sequence: Synthetic oligonucleotide
  Sense strand starting at position 2205 of SEQ ID NO: 916912
ucaauaguccaaggcagaa

SEQ ID NO: 1193731 - RNA, 19 nt, Artificial Sequence
  Description of Artificial Sequence: Synthetic oligonucleotide
  Antisense strand to SEQ ID NO: 1193730
uucugccuuggacuauuga

SEQ ID NO: 1193732 - RNA, 19 nt, Artificial Sequence
  Description of Artificial Sequence: Synthetic oligonucleotide
  Sense strand starting at position 2258 of SEQ ID NO: 916912
uggguaacuagccaucagu

SEQ ID NO: 1193733 - RNA, 19 nt, Artificial Sequence
  Description of Artificial Sequence: Synthetic oligonucleotide
  Antisense strand to SEQ ID NO: 1193732
acugauggcuaguuaccca

SEQ ID NO: 1193734 - RNA, 19 nt, Artificial Sequence
  Description of Artificial Sequence: Synthetic oligonucleotide
  Sense strand starting at position 2261 of SEQ ID NO: 916912
guaacuagccaucagucua

SEQ ID NO: 1193735 - RNA, 19 nt, Artificial Sequence
  Description of Artificial Sequence: Synthetic oligonucleotide
  Antisense strand to SEQ ID NO: 1193734
uagacugauggcuaguuac

SEQ ID NO: 1193736 - RNA, 19 nt, Artificial Sequence
  Description of Artificial Sequence: Synthetic oligonucleotide
  Sense strand starting at position 2276 of SEQ ID NO: 916912
ucuaucacugauggcuaaa

SEQ ID NO: 1193737 - RNA, 19 nt, Artificial Sequence
  Description of Artificial Sequence: Synthetic oligonucleotide
  Antisense strand to SEQ ID NO: 1193736
uuuagccaucagugauaga

SEQ ID NO: 1193738 - RNA, 19 nt, Artificial Sequence
  Description of Artificial Sequence: Synthetic oligonucleotide
  Sense strand starting at position 2321 of SEQ ID NO: 916912
aauggaauuugacaucagu

SEQ ID NO: 1193739 - RNA, 19 nt, Artificial Sequence
  Description of Artificial Sequence: Synthetic oligonucleotide
  Antisense strand to SEQ ID NO: 1193738
acugaugucaaauuccauu

SEQ ID NO: 1193740 - RNA, 19 nt, Artificial Sequence
  Description of Artificial Sequence: Synthetic oligonucleotide
  Sense strand starting at position 2557 of SEQ ID NO: 916912
ggaggagcauguuucaaga

SEQ ID NO: 1193741 - RNA, 19 nt, Artificial Sequence
  Description of Artificial Sequence: Synthetic oligonucleotide
  Antisense strand to SEQ ID NO: 1193740
ucuugaaacaugcuccucc

SEQ ID NO: 1193742 - RNA, 19 nt, Artificial Sequence
  Description of Artificial Sequence: Synthetic oligonucleotide
  Sense strand starting at position 2604 of SEQ ID NO: 916912
acguauaugccuuauuaua

SEQ ID NO: 1193743 - RNA, 19 nt, Artificial Sequence
  Description of Artificial Sequence: Synthetic oligonucleotide
  Antisense strand to SEQ ID NO: 1193742
uauaauaaggcauauacgu

SEQ ID NO: 1193744 - RNA, 19 nt, Artificial Sequence
  Description of Artificial Sequence: Synthetic oligonucleotide
  Sense strand starting at position 2648 of SEQ ID NO: 916912
gaugguuacuaacugauua

SEQ ID NO: 1193745 - RNA, 19 nt, Artificial Sequence
  Description of Artificial Sequence: Synthetic oligonucleotide
  Antisense strand to SEQ ID NO: 1193744
uaaucaguuaguaaccauc

SEQ ID NO: 1193746 - RNA, 19 nt, Artificial Sequence
  Description of Artificial Sequence: Synthetic oligonucleotide
  Sense strand starting at position 2671 of SEQ ID NO: 916912
gagagugguguuuacauau

SEQ ID NO: 1193747 - RNA, 19 nt, Artificial Sequence
  Description of Artificial Sequence: Synthetic oligonucleotide
  Antisense strand to SEQ ID NO: 1193746
auauguaaacaccacucuc

SEQ ID NO: 1193748 - RNA, 19 nt, Artificial Sequence
  Description of Artificial Sequence: Synthetic oligonucleotide
  Sense strand starting at position 2677 of SEQ ID NO: 916912
gguguuuacauauggacau

SEQ ID NO: 1193749 - RNA, 19 nt, Artificial Sequence
  Description of Artificial Sequence: Synthetic oligonucleotide
  Antisense strand to SEQ ID NO: 1193748
auguccauauguaaacacc

SEQ ID NO: 1193750 - RNA, 19 nt, Artificial Sequence
  Description of Artificial Sequence: Synthetic oligonucleotide
  Sense strand starting at position 2883 of SEQ ID NO: 916912
ggacuacuguaacuacaga

SEQ ID NO: 1193751 - RNA, 19 nt, Artificial Sequence
  Description of Artificial Sequence: Synthetic oligonucleotide
  Antisense strand to SEQ ID NO: 1193750
ucuguaguuacaguagucc

SEQ ID NO: 1193752 - RNA, 19 nt, Artificial Sequence
  Description of Artificial Sequence: Synthetic oligonucleotide
  Sense strand starting at position 2933 of SEQ ID NO: 916912
ggugaugugauaggauaag

SEQ ID NO: 1193753 - RNA, 19 nt, Artificial Sequence
  Description of Artificial Sequence: Synthetic oligonucleotide
  Antisense strand to SEQ ID NO: 1193752
cuuauccuaucacaucacc

SEQ ID NO: 1193754 - RNA, 19 nt, Artificial Sequence
  Description of Artificial Sequence: Synthetic oligonucleotide
  Sense strand starting at position 2957 of SEQ ID NO: 916912
ggcuacuuuagggaagguu

SEQ ID NO: 1193755 - RNA, 19 nt, Artificial Sequence
  Description of Artificial Sequence: Synthetic oligonucleotide
  Antisense strand to SEQ ID NO: 1193754
aaccuucccuaaaguagcc

SEQ ID NO: 1193756 - RNA, 19 nt, Artificial Sequence
  Description of Artificial Sequence: Synthetic oligonucleotide
  Sense strand starting at position 2979 of SEQ ID NO: 916912
aacagaggguagucuugaa

SEQ ID NO: 1193757 - RNA, 19 nt, Artificial Sequence
  Description of Artificial Sequence: Synthetic oligonucleotide
  Antisense strand to SEQ ID NO: 1193756
uucaagacuacccucuguu

SEQ ID NO: 1193758 - RNA, 19 nt, Artificial Sequence
  Description of Artificial Sequence: Synthetic oligonucleotide
  Sense strand starting at position 2986 of SEQ ID NO: 916912
gguagucuugaaggauaag

SEQ ID NO: 1193759 - RNA, 19 nt, Artificial Sequence
  Description of Artificial Sequence: Synthetic oligonucleotide
  Antisense strand to SEQ ID NO: 1193758
cuuauccuucaagacuacc

SEQ ID NO: 1193760 - RNA, 19 nt, Artificial Sequence
  Description of Artificial Sequence: Synthetic oligonucleotide
  Sense strand starting at position 3155 of SEQ ID NO: 916912
ggaggugcuuugaaaugag

SEQ ID NO: 1193761 - RNA, 19 nt, Artificial Sequence
  Description of Artificial Sequence: Synthetic oligonucleotide
  Antisense strand to SEQ ID NO: 1193760
cucauuucaaagcaccucc

SEQ ID NO: 1193762 - RNA, 19 nt, Artificial Sequence
  Description of Artificial Sequence: Synthetic oligonucleotide
  Sense strand starting at position 3158 of SEQ ID NO: 916912
ggugcuuugaaaugagauu

SEQ ID NO: 1193763 - RNA, 19 nt, Artificial Sequence
  Description of Artificial Sequence: Synthetic oligonucleotide
  Antisense strand to SEQ ID NO: 1193762
aaucucauuucaaagcacc

SEQ ID NO: 1193764 - RNA, 19 nt, Artificial Sequence
  Description of Artificial Sequence: Synthetic oligonucleotide
  Sense strand starting at position 3292 of SEQ ID NO: 916912
acauguuguggagguagaa

SEQ ID NO: 1193765 - RNA, 19 nt, Artificial Sequence
  Description of Artificial Sequence: Synthetic oligonucleotide
  Antisense strand to SEQ ID NO: 1193764
uucuaccuccacaacaugu

SEQ ID NO: 1193766 - RNA, 19 nt, Artificial Sequence
  Description of Artificial Sequence: Synthetic oligonucleotide
  Sense strand starting at position 3365 of SEQ ID NO: 916912
gaugauucuuagguuuaug

SEQ ID NO: 1193767 - RNA, 19 nt, Artificial Sequence
  Description of Artificial Sequence: Synthetic oligonucleotide
  Antisense strand to SEQ ID NO: 1193766
cauaaaccuaagaaucauc

SEQ ID NO: 1193768 - RNA, 19 nt, Artificial Sequence
  Description of Artificial Sequence: Synthetic oligonucleotide
  Sense strand starting at position 3471 of SEQ ID NO: 916912
gccauauaggcauauuaaa

SEQ ID NO: 1193769 - RNA, 19 nt, Artificial Sequence
  Description of Artificial Sequence: Synthetic oligonucleotide
  Antisense strand to SEQ ID NO: 1193768
uuuaauaugccuauauggc

SEQ ID NO: 1193770 - RNA, 19 nt, Artificial Sequence
  Description of Artificial Sequence: Synthetic oligonucleotide
  Sense strand starting at position 3607 of SEQ ID NO: 916912
ggcagaaaugauuagcuuu

SEQ ID NO: 1193771 - RNA, 19 nt, Artificial Sequence
  Description of Artificial Sequence: Synthetic oligonucleotide
  Antisense strand to SEQ ID NO: 1193770
aaagcuaaucauuucugcc

SEQ ID NO: 1193772 - RNA, 19 nt, Artificial Sequence
  Description of Artificial Sequence: Synthetic oligonucleotide
  Sense strand starting at position 3852 of SEQ ID NO: 916912
guaguauugggaggucaag

SEQ ID NO: 1193773 - RNA, 19 nt, Artificial Sequence
  Description of Artificial Sequence: Synthetic oligonucleotide
  Antisense strand to SEQ ID NO: 1193772
cuugaccucccaauacuac

SEQ ID NO: 1193774 - RNA, 19 nt, Artificial Sequence
  Description of Artificial Sequence: Synthetic oligonucleotide
  Sense strand starting at position 3931 of SEQ ID NO: 916912
caagauuggaguugguuga

SEQ ID NO: 1193775 - RNA, 19 nt, Artificial Sequence
  Description of Artificial Sequence: Synthetic oligonucleotide
  Antisense strand to SEQ ID NO: 1193774
ucaaccaacuccaaucuug

SEQ ID NO: 1193776 - RNA, 19 nt, Artificial Sequence
  Description of Artificial Sequence: Synthetic oligonucleotide
  Sense strand starting at position 3932 of SEQ ID NO: 916912
aagauuggaguugguugaa

SEQ ID NO: 1193777 - RNA, 19 nt, Artificial Sequence
  Description of Artificial Sequence: Synthetic oligonucleotide
  Antisense strand to SEQ ID NO: 1193776
uucaaccaacuccaaucuu

SEQ ID NO: 1193778 - RNA, 19 nt, Artificial Sequence
  Description of Artificial Sequence: Synthetic oligonucleotide
  Sense strand starting at position 3935 of SEQ ID NO: 916912
auuggaguugguugaauag

SEQ ID NO: 1193779 - RNA, 19 nt, Artificial Sequence
  Description of Artificial Sequence: Synthetic oligonucleotide
  Antisense strand to SEQ ID NO: 1193778
cuauucaaccaacuccaau

SEQ ID NO: 1193780 - RNA, 19 nt, Artificial Sequence
  Description of Artificial Sequence: Synthetic oligonucleotide
  Sense strand starting at position 120 of SEQ ID NO: 916913
aaggucauucucuguggga

SEQ ID NO: 1193781 - RNA, 19 nt, Artificial Sequence
  Description of Artificial Sequence: Synthetic oligonucleotide
  Antisense strand to SEQ ID NO: 1193780
ucccacagagaaugaccuu

SEQ ID NO: 1193782 - RNA, 19 nt, Artificial Sequence
  Description of Artificial Sequence: Synthetic oligonucleotide
  Sense strand starting at position 122 of SEQ ID NO: 916913
ggucauucucugugggaca

SEQ ID NO: 1193783 - RNA, 19 nt, Artificial Sequence
  Description of Artificial Sequence: Synthetic oligonucleotide
  Antisense strand to SEQ ID NO: 1193782
ugucccacagagaaugacc

SEQ ID NO: 1193784 - RNA, 19 nt, Artificial Sequence
  Description of Artificial Sequence: Synthetic oligonucleotide
  Sense strand starting at position 124 of SEQ ID NO: 916913
ucauucucugugggacaga

SEQ ID NO: 1193785 - RNA, 19 nt, Artificial Sequence
  Description of Artificial Sequence: Synthetic oligonucleotide
  Antisense strand to SEQ ID NO: 1193784
ucugucccacagagaauga

SEQ ID NO: 1193786 - RNA, 19 nt, Artificial Sequence
  Description of Artificial Sequence: Synthetic oligonucleotide
  Sense strand starting at position 188 of SEQ ID NO: 916913
guuugaauuugauagacac

SEQ ID NO: 1193787 - RNA, 19 nt, Artificial Sequence
  Description of Artificial Sequence: Synthetic oligonucleotide
  Antisense strand to SEQ ID NO: 1193786
gugucuaucaaauucaaac

SEQ ID NO: 1193788 - RNA, 19 nt, Artificial Sequence
  Description of Artificial Sequence: Synthetic oligonucleotide
  Sense strand starting at position 242 of SEQ ID NO: 916913
aggacuugaucacuggcaa

SEQ ID NO: 1193789 - RNA, 19 nt, Artificial Sequence
  Description of Artificial Sequence: Synthetic oligonucleotide
  Antisense strand to SEQ ID NO: 1193788
uugccagugaucaaguccu

SEQ ID NO: 1193790 - RNA, 19 nt, Artificial Sequence
  Description of Artificial Sequence: Synthetic oligonucleotide
  Sense strand starting at position 243 of SEQ ID NO: 916913
ggacuugaucacuggcaag

SEQ ID NO: 1193791 - RNA, 19 nt, Artificial Sequence
  Description of Artificial Sequence: Synthetic oligonucleotide
  Antisense strand to SEQ ID NO: 1193790
cuugccagugaucaagucc

SEQ ID NO: 1193792 - RNA, 19 nt, Artificial Sequence
  Description of Artificial Sequence: Synthetic oligonucleotide
  Sense strand starting at position 261 of SEQ ID NO: 916913
gugaccuuacagcaaacau

SEQ ID NO: 1193793 - RNA, 19 nt, Artificial Sequence
  Description of Artificial Sequence: Synthetic oligonucleotide
  Antisense strand to SEQ ID NO: 1193792
auguuugcuguaaggucac

SEQ ID NO: 1193794 - RNA, 19 nt, Artificial Sequence
  Description of Artificial Sequence: Synthetic oligonucleotide
  Sense strand starting at position 296 of SEQ ID NO: 916913
ggaagugcauuugccaauu

SEQ ID NO: 1193795 - RNA, 19 nt, Artificial Sequence
  Description of Artificial Sequence: Synthetic oligonucleotide
  Antisense strand to SEQ ID NO: 1193794
aauuggcaaaugcacuucc

SEQ ID NO: 1193796 - RNA, 19 nt, Artificial Sequence
  Description of Artificial Sequence: Synthetic oligonucleotide
  Sense strand starting at position 364 of SEQ ID NO: 916913
cacaaagagccauguggaa

SEQ ID NO: 1193797 - RNA, 19 nt, Artificial Sequence
  Description of Artificial Sequence: Synthetic oligonucleotide
  Antisense strand to SEQ ID NO: 1193796
uuccacauggcucuuugug

SEQ ID NO: 1193798 - RNA, 19 nt, Artificial Sequence
  Description of Artificial Sequence: Synthetic oligonucleotide
  Sense strand starting at position 393 of SEQ ID NO: 916913
gagaaauggugguugugaa

SEQ ID NO: 1193799 - RNA, 19 nt, Artificial Sequence
  Description of Artificial Sequence: Synthetic oligonucleotide
  Antisense strand to SEQ ID NO: 1193798
uucacaaccaccauuucuc

SEQ ID NO: 1193800 - RNA, 19 nt, Artificial Sequence
  Description of Artificial Sequence: Synthetic oligonucleotide
  Sense strand starting at position 394 of SEQ ID NO: 916913
agaaauggugguugugaac

SEQ ID NO: 1193801 - RNA, 19 nt, Artificial Sequence
  Description of Artificial Sequence: Synthetic oligonucleotide
  Antisense strand to SEQ ID NO: 1193800
guucacaaccaccauuucu

SEQ ID NO: 1193802 - RNA, 19 nt, Artificial Sequence
  Description of Artificial Sequence: Synthetic oligonucleotide
  Sense strand starting at position 400 of SEQ ID NO: 916913
ggugguugugaacaagagu

SEQ ID NO: 1193803 - RNA, 19 nt, Artificial Sequence
  Description of Artificial Sequence: Synthetic oligonucleotide
  Antisense strand to SEQ ID NO: 1193802
acucuuguucacaaccacc

SEQ ID NO: 1193804 - RNA, 19 nt, Artificial Sequence
  Description of Artificial Sequence: Synthetic oligonucleotide
  Sense strand starting at position 403 of SEQ ID NO: 916913
gguugugaacaagaguacu

SEQ ID NO: 1193805 - RNA, 19 nt, Artificial Sequence
  Description of Artificial Sequence: Synthetic oligonucleotide
  Antisense strand to SEQ ID NO: 1193804
aguacucuuguucacaacc

SEQ ID NO: 1193806 - RNA, 19 nt, Artificial Sequence
  Description of Artificial Sequence: Synthetic oligonucleotide
  Sense strand starting at position 414 of SEQ ID NO: 916913
agaguacugcccuggaaug

SEQ ID NO: 1193807 - RNA, 19 nt, Artificial Sequence
  Description of Artificial Sequence: Synthetic oligonucleotide
  Antisense strand to SEQ ID NO: 1193806
cauuccagggcaguacucu

SEQ ID NO: 1193808 - RNA, 19 nt, Artificial Sequence
  Description of Artificial Sequence: Synthetic oligonucleotide
  Sense strand starting at position 415 of SEQ ID NO: 916913
gaguacugcccuggaauga

SEQ ID NO: 1193809 - RNA, 19 nt, Artificial Sequence
  Description of Artificial Sequence: Synthetic oligonucleotide
  Antisense strand to SEQ ID NO: 1193808
ucauuccagggcaguacuc

SEQ ID NO: 1193810 - RNA, 19 nt, Artificial Sequence
  Description of Artificial Sequence: Synthetic oligonucleotide
  Sense strand starting at position 416 of SEQ ID NO: 916913
aguacugcccuggaaugaa

SEQ ID NO: 1193811 - RNA, 19 nt, Artificial Sequence
  Description of Artificial Sequence: Synthetic oligonucleotide
  Antisense strand to SEQ ID NO: 1193810
uucauuccagggcaguacu

SEQ ID NO: 1193812 - RNA, 19 nt, Artificial Sequence
  Description of Artificial Sequence: Synthetic oligonucleotide
  Sense strand starting at position 465 of SEQ ID NO: 916913
aaagaaagguuagucucau

SEQ ID NO: 1193813 - RNA, 19 nt, Artificial Sequence
  Description of Artificial Sequence: Synthetic oligonucleotide
  Antisense strand to SEQ ID NO: 1193812
augagacuaaccuuucuuu

SEQ ID NO: 1193814 - RNA, 19 nt, Artificial Sequence
  Description of Artificial Sequence: Synthetic oligonucleotide
  Sense strand starting at position 466 of SEQ ID NO: 916913
aagaaagguuagucucauu

SEQ ID NO: 1193815 - RNA, 19 nt, Artificial Sequence
  Description of Artificial Sequence: Synthetic oligonucleotide
  Antisense strand to SEQ ID NO: 1193814
aaugagacuaaccuuucuu

SEQ ID NO: 1193816 - RNA, 19 nt, Artificial Sequence
  Description of Artificial Sequence: Synthetic oligonucleotide
  Sense strand starting at position 471 of SEQ ID NO: 916913
agguuagucucauuagaaa

SEQ ID NO: 1193817 - RNA, 19 nt, Artificial Sequence
  Description of Artificial Sequence: Synthetic oligonucleotide
  Antisense strand to SEQ ID NO: 1193816
uuucuaaugagacuaaccu

SEQ ID NO: 1193818 - RNA, 19 nt, Artificial Sequence
  Description of Artificial Sequence: Synthetic oligonucleotide
  Sense strand starting at position 486 of SEQ ID NO: 916913
gaaaguuuaccuggcucua

SEQ ID NO: 1193819 - RNA, 19 nt, Artificial Sequence
  Description of Artificial Sequence: Synthetic oligonucleotide
  Antisense strand to SEQ ID NO: 1193818
uagagccagguaaacuuuc

SEQ ID NO: 1193820 - RNA, 19 nt, Artificial Sequence
  Description of Artificial Sequence: Synthetic oligonucleotide
  Sense strand starting at position 491 of SEQ ID NO: 916913
uuuaccuggcucuaagaaa

SEQ ID NO: 1193821 - RNA, 19 nt, Artificial Sequence
  Description of Artificial Sequence: Synthetic oligonucleotide
  Antisense strand to SEQ ID NO: 1193820
uuucuuagagccagguaaa

SEQ ID NO: 1193822 - RNA, 19 nt, Artificial Sequence
  Description of Artificial Sequence: Synthetic oligonucleotide
  Sense strand starting at position 600 of SEQ ID NO: 916913
gugucuccugaacacauua

SEQ ID NO: 1193823 - RNA, 19 nt, Artificial Sequence
  Description of Artificial Sequence: Synthetic oligonucleotide
  Antisense strand to SEQ ID NO: 1193822
uaauguguucaggagacac

SEQ ID NO: 1193824 - RNA, 19 nt, Artificial Sequence
  Description of Artificial Sequence: Synthetic oligonucleotide
  Sense strand starting at position 703 of SEQ ID NO: 916913
cacaaugaguuggucugua

SEQ ID NO: 1193825 - RNA, 19 nt, Artificial Sequence
  Description of Artificial Sequence: Synthetic oligonucleotide
  Antisense strand to SEQ ID NO: 1193824
uacagaccaacucauugug

SEQ ID NO: 1193826 - RNA, 19 nt, Artificial Sequence
  Description of Artificial Sequence: Synthetic oligonucleotide
  Sense strand starting at position 866 of SEQ ID NO: 916913
ucauaagacugugcauaga

SEQ ID NO: 1193827 - RNA, 19 nt, Artificial Sequence
  Description of Artificial Sequence: Synthetic oligonucleotide
  Antisense strand to SEQ ID NO: 1193826
ucuaugcacagucuuauga

SEQ ID NO: 1193828 - RNA, 19 nt, Artificial Sequence
  Description of Artificial Sequence: Synthetic oligonucleotide
  Sense strand starting at position 915 of SEQ ID NO: 916913
ugaacuuugcauugaaugu

SEQ ID NO: 1193829 - RNA, 19 nt, Artificial Sequence
  Description of Artificial Sequence: Synthetic oligonucleotide
  Antisense strand to SEQ ID NO: 1193828
acauucaaugcaaaguuca

SEQ ID NO: 1193830 - RNA, 19 nt, Artificial Sequence
  Description of Artificial Sequence: Synthetic oligonucleotide
  Sense strand starting at position 922 of SEQ ID NO: 916913
ugcauugaaugugucaaag

SEQ ID NO: 1193831 - RNA, 19 nt, Artificial Sequence
  Description of Artificial Sequence: Synthetic oligonucleotide
  Antisense strand to SEQ ID NO: 1193830
cuuugacacauucaaugca

SEQ ID NO: 1193832 - RNA, 19 nt, Artificial Sequence
  Description of Artificial Sequence: Synthetic oligonucleotide
  Sense strand starting at position 970 of SEQ ID NO: 916913
ugucucaaucaggaaagcu

SEQ ID NO: 1193833 - RNA, 19 nt, Artificial Sequence
  Description of Artificial Sequence: Synthetic oligonucleotide
  Antisense strand to SEQ ID NO: 1193832
agcuuuccugauugagaca

SEQ ID NO: 1193834 - RNA, 19 nt, Artificial Sequence
  Description of Artificial Sequence: Synthetic oligonucleotide
  Sense strand starting at position 1256 of SEQ ID NO: 916913
gagugugaaagauggcaau

SEQ ID NO: 1193835 - RNA, 19 nt, Artificial Sequence
  Description of Artificial Sequence: Synthetic oligonucleotide
  Antisense strand to SEQ ID NO: 1193834
auugccaucuuucacacuc

SEQ ID NO: 1193836 - RNA, 19 nt, Artificial Sequence
  Description of Artificial Sequence: Synthetic oligonucleotide
  Sense strand starting at position 1274 of SEQ ID NO: 916913
ugaauucuggcccauuaua

SEQ ID NO: 1193837 - RNA, 19 nt, Artificial Sequence
  Description of Artificial Sequence: Synthetic oligonucleotide
  Antisense strand to SEQ ID NO: 1193836
uauaaugggccagaauuca

SEQ ID NO: 1193838 - RNA, 19 nt, Artificial Sequence
  Description of Artificial Sequence: Synthetic oligonucleotide
  Sense strand starting at position 1301 of SEQ ID NO: 916913
gucagauuccacuagucac

SEQ ID NO: 1193839 - RNA, 19 nt, Artificial Sequence
  Description of Artificial Sequence: Synthetic oligonucleotide
  Antisense strand to SEQ ID NO: 1193838
gugacuaguggaaucugac

SEQ ID NO: 1193840 - RNA, 19 nt, Artificial Sequence
  Description of Artificial Sequence: Synthetic oligonucleotide
  Sense strand starting at position 1395 of SEQ ID NO: 916913
uaaauaggugaguggugua

SEQ ID NO: 1193841 - RNA, 19 nt, Artificial Sequence
  Description of Artificial Sequence: Synthetic oligonucleotide
  Antisense strand to SEQ ID NO: 1193840
uacaccacucaccuauuua

SEQ ID NO: 1193842 - RNA, 19 nt, Artificial Sequence
  Description of Artificial Sequence: Synthetic oligonucleotide
  Sense strand starting at position 1400 of SEQ ID NO: 916913
aggugagugguguaaauau

SEQ ID NO: 1193843 - RNA, 19 nt, Artificial Sequence
  Description of Artificial Sequence: Synthetic oligonucleotide
  Antisense strand to SEQ ID NO: 1193842
auauuuacaccacucaccu

SEQ ID NO: 1193844 - RNA, 19 nt, Artificial Sequence
  Description of Artificial Sequence: Synthetic oligonucleotide
  Sense strand starting at position 1407 of SEQ ID NO: 916913
ugguguaaauaucugaaau

SEQ ID NO: 1193845 - RNA, 19 nt, Artificial Sequence
  Description of Artificial Sequence: Synthetic oligonucleotide
  Antisense strand to SEQ ID NO: 1193844
auuucagauauuuacacca

SEQ ID NO: 1193846 - RNA, 19 nt, Artificial Sequence
  Description of Artificial Sequence: Synthetic oligonucleotide
  Sense strand starting at position 1420 of SEQ ID NO: 916913
ugaaauagccugcacucaa

SEQ ID NO: 1193847 - RNA, 19 nt, Artificial Sequence
  Description of Artificial Sequence: Synthetic oligonucleotide
  Antisense strand to SEQ ID NO: 1193846
uugagugcaggcuauuuca

SEQ ID NO: 1193848 - RNA, 19 nt, Artificial Sequence
  Description of Artificial Sequence: Synthetic oligonucleotide
  Sense strand starting at position 1597 of SEQ ID NO: 916913
gcugaaggugguuaaguua

SEQ ID NO: 1193849 - RNA, 19 nt, Artificial Sequence
  Description of Artificial Sequence: Synthetic oligonucleotide
  Antisense strand to SEQ ID NO: 1193848
uaacuuaaccaccuucagc

SEQ ID NO: 1193850 - RNA, 19 nt, Artificial Sequence
  Description of Artificial Sequence: Synthetic oligonucleotide
  Sense strand starting at position 3233 of SEQ ID NO: 916913
guuggauguauccaugaca

SEQ ID NO: 1193851 - RNA, 19 nt, Artificial Sequence
  Description of Artificial Sequence: Synthetic oligonucleotide
  Antisense strand to SEQ ID NO: 1193850
ugucauggauacauccaac

SEQ ID NO: 1193852 - RNA, 19 nt, Artificial Sequence
  Description of Artificial Sequence: Synthetic oligonucleotide
  Sense strand starting at position 3254 of SEQ ID NO: 916913
aagggauguuacuccgaga

SEQ ID NO: 1193853 - RNA, 19 nt, Artificial Sequence
  Description of Artificial Sequence: Synthetic oligonucleotide
  Antisense strand to SEQ ID NO: 1193852
ucucggaguaacaucccuu

SEQ ID NO: 1193854 - RNA, 19 nt, Artificial Sequence
  Description of Artificial Sequence: Synthetic oligonucleotide
  Sense strand starting at position 3310 of SEQ ID NO: 916913
gaaugaccuggcuguuaau

SEQ ID NO: 1193855 - RNA, 19 nt, Artificial Sequence
  Description of Artificial Sequence: Synthetic oligonucleotide
  Antisense strand to SEQ ID NO: 1193854
auuaacagccaggucauuc

SEQ ID NO: 1193856 - RNA, 19 nt, Artificial Sequence
  Description of Artificial Sequence: Synthetic oligonucleotide
  Sense strand starting at position 3389 of SEQ ID NO: 916913
ccucuauuccuacaguaga

SEQ ID NO: 1193857 - RNA, 19 nt, Artificial Sequence
  Description of Artificial Sequence: Synthetic oligonucleotide
  Antisense strand to SEQ ID NO: 1193856
ucuacuguaggaauagagg

SEQ ID NO: 1193858 - RNA, 19 nt, Artificial Sequence
  Description of Artificial Sequence: Synthetic oligonucleotide
  Sense strand starting at position 3424 of SEQ ID NO: 916913
guaggaaagcgaugguaug

SEQ ID NO: 1193859 - RNA, 19 nt, Artificial Sequence
  Description of Artificial Sequence: Synthetic oligonucleotide
  Antisense strand to SEQ ID NO: 1193858
cauaccaucgcuuuccuac

SEQ ID NO: 1193860 - RNA, 19 nt, Artificial Sequence
  Description of Artificial Sequence: Synthetic oligonucleotide
  Sense strand starting at position 41 of SEQ ID NO: 916914
agagaagcaucagccuuua

SEQ ID NO: 1193861 - RNA, 19 nt, Artificial Sequence
  Description of Artificial Sequence: Synthetic oligonucleotide
  Antisense strand to SEQ ID NO: 1193860
uaaaggcugaugcuucucu

SEQ ID NO: 1193862 - RNA, 19 nt, Artificial Sequence
  Description of Artificial Sequence: Synthetic oligonucleotide
  Sense strand starting at position 59 of SEQ ID NO: 916914
aauggcauuugguauuauu

SEQ ID NO: 1193863 - RNA, 19 nt, Artificial Sequence
  Description of Artificial Sequence: Synthetic oligonucleotide
  Antisense strand to SEQ ID NO: 1193862
aauaauaccaaaugccauu

SEQ ID NO: 1193864 - RNA, 19 nt, Artificial Sequence
  Description of Artificial Sequence: Synthetic oligonucleotide
  Sense strand starting at position 62 of SEQ ID NO: 916914
ggcauuugguauuauuguu

SEQ ID NO: 1193865 - RNA, 19 nt, Artificial Sequence
  Description of Artificial Sequence: Synthetic oligonucleotide
  Antisense strand to SEQ ID NO: 1193864
aacaauaauaccaaaugcc

SEQ ID NO: 1193866 - RNA, 19 nt, Artificial Sequence
  Description of Artificial Sequence: Synthetic oligonucleotide
  Sense strand starting at position 237 of SEQ ID NO: 916914
agaccuguaugauccucaa

SEQ ID NO: 1193867 - RNA, 19 nt, Artificial Sequence
  Description of Artificial Sequence: Synthetic oligonucleotide
  Antisense strand to SEQ ID NO: 1193866
uugaggaucauacaggucu

SEQ ID NO: 1193868 - RNA, 19 nt, Artificial Sequence
  Description of Artificial Sequence: Synthetic oligonucleotide
  Sense strand starting at position 278 of SEQ ID NO: 916914
ucuccaaucuggcuuugau

SEQ ID NO: 1193869 - RNA, 19 nt, Artificial Sequence
  Description of Artificial Sequence: Synthetic oligonucleotide
  Antisense strand to SEQ ID NO: 1193868
aucaaagccagauuggaga

SEQ ID NO: 1193870 - RNA, 19 nt, Artificial Sequence
  Description of Artificial Sequence: Synthetic oligonucleotide
  Sense strand starting at position 350 of SEQ ID NO: 916914
agaaucaguugugccagaa

SEQ ID NO: 1193871 - RNA, 19 nt, Artificial Sequence
  Description of Artificial Sequence: Synthetic oligonucleotide
  Antisense strand to SEQ ID NO: 1193870
uucuggcacaacugauucu

SEQ ID NO: 1193872 - RNA, 19 nt, Artificial Sequence
  Description of Artificial Sequence: Synthetic oligonucleotide
  Sense strand starting at position 354 of SEQ ID NO: 916914
ucaguugugccagaacaga

SEQ ID NO: 1193873 - RNA, 19 nt, Artificial Sequence
  Description of Artificial Sequence: Synthetic oligonucleotide
  Antisense strand to SEQ ID NO: 1193872
ucuguucuggcacaacuga

SEQ ID NO: 1193874 - RNA, 19 nt, Artificial Sequence
  Description of Artificial Sequence: Synthetic oligonucleotide
  Sense strand starting at position 370 of SEQ ID NO: 916914
agacguucagucuguccua

SEQ ID NO: 1193875 - RNA, 19 nt, Artificial Sequence
  Description of Artificial Sequence: Synthetic oligonucleotide
  Antisense strand to SEQ ID NO: 1193874
uaggacagacugaacgucu

SEQ ID NO: 1193876 - RNA, 19 nt, Artificial Sequence
  Description of Artificial Sequence: Synthetic oligonucleotide
  Sense strand starting at position 426 of SEQ ID NO: 916914
ugcagacugccaggauuaa

SEQ ID NO: 1193877 - RNA, 19 nt, Artificial Sequence
  Description of Artificial Sequence: Synthetic oligonucleotide
  Antisense strand to SEQ ID NO: 1193876
uuaauccuggcagucugca

SEQ ID NO: 1193878 - RNA, 19 nt, Artificial Sequence
  Description of Artificial Sequence: Synthetic oligonucleotide
  Sense strand starting at position 427 of SEQ ID NO: 916914
gcagacugccaggauuaau

SEQ ID NO: 1193879 - RNA, 19 nt, Artificial Sequence
  Description of Artificial Sequence: Synthetic oligonucleotide
  Antisense strand to SEQ ID NO: 1193878
auuaauccuggcagucugc

SEQ ID NO: 1193880 - RNA, 19 nt, Artificial Sequence
  Description of Artificial Sequence: Synthetic oligonucleotide
  Sense strand starting at position 759 of SEQ ID NO: 916914
cgguucucaucccugaguu

SEQ ID NO: 1193881 - RNA, 19 nt, Artificial Sequence
  Description of Artificial Sequence: Synthetic oligonucleotide
  Antisense strand to SEQ ID NO: 1193880
aacucagggaugagaaccg

SEQ ID NO: 1193882 - RNA, 19 nt, Artificial Sequence
  Description of Artificial Sequence: Synthetic oligonucleotide
  Sense strand starting at position 977 of SEQ ID NO: 916914
uuggguguauuugagggaa

SEQ ID NO: 1193883 - RNA, 19 nt, Artificial Sequence
  Description of Artificial Sequence: Synthetic oligonucleotide
  Antisense strand to SEQ ID NO: 1193882
uucccucaaauacacccaa

SEQ ID NO: 1193884 - RNA, 19 nt, Artificial Sequence
  Description of Artificial Sequence: Synthetic oligonucleotide
  Sense strand starting at position 979 of SEQ ID NO: 916914
ggguguauuugagggaaca

SEQ ID NO: 1193885 - RNA, 19 nt, Artificial Sequence
  Description of Artificial Sequence: Synthetic oligonucleotide
  Antisense strand to SEQ ID NO: 1193884
uguucccucaaauacaccc

SEQ ID NO: 1193886 - RNA, 19 nt, Artificial Sequence
  Description of Artificial Sequence: Synthetic oligonucleotide
  Sense strand starting at position 1050 of SEQ ID NO: 916914
gauggaaaugugugcuauc

SEQ ID NO: 1193887 - RNA, 19 nt, Artificial Sequence
  Description of Artificial Sequence: Synthetic oligonucleotide
  Antisense strand to SEQ ID NO: 1193886
gauagcacacauuuccauc

SEQ ID NO: 1193888 - RNA, 19 nt, Artificial Sequence
  Description of Artificial Sequence: Synthetic oligonucleotide
  Sense strand starting at position 1051 of SEQ ID NO: 916914
auggaaaugugugcuaucu

SEQ ID NO: 1193889 - RNA, 19 nt, Artificial Sequence
  Description of Artificial Sequence: Synthetic oligonucleotide
  Antisense strand to SEQ ID NO: 1193888
agauagcacacauuuccau

SEQ ID NO: 1193890 - RNA, 19 nt, Artificial Sequence
  Description of Artificial Sequence: Synthetic oligonucleotide
  Sense strand starting at position 1261 of SEQ ID NO: 916914
guccaauaagcguugcuuu

SEQ ID NO: 1193891 - RNA, 19 nt, Artificial Sequence
  Description of Artificial Sequence: Synthetic oligonucleotide
  Antisense strand to SEQ ID NO: 1193890
aaagcaacgcuuauuggac

SEQ ID NO: 1193892 - RNA, 19 nt, Artificial Sequence
  Description of Artificial Sequence: Synthetic oligonucleotide
  Sense strand starting at position 1326 of SEQ ID NO: 916914
agcaaugaguucccauguu

SEQ ID NO: 1193893 - RNA, 19 nt, Artificial Sequence
  Description of Artificial Sequence: Synthetic oligonucleotide
  Antisense strand to SEQ ID NO: 1193892
aacaugggaacucauugcu

SEQ ID NO: 1193894 - RNA, 19 nt, Artificial Sequence
  Description of Artificial Sequence: Synthetic oligonucleotide
  Sense strand starting at position 1471 of SEQ ID NO: 916914
ggagaucauuaccuuggca

SEQ ID NO: 1193895 - RNA, 19 nt, Artificial Sequence
  Description of Artificial Sequence: Synthetic oligonucleotide
  Antisense strand to SEQ ID NO: 1193894
ugccaagguaaugaucucc

SEQ ID NO: 1193896 - RNA, 19 nt, Artificial Sequence
  Description of Artificial Sequence: Synthetic oligonucleotide
  Sense strand starting at position 2101 of SEQ ID NO: 916914
ccgccaucugcauaacaaa

SEQ ID NO: 1193897 - RNA, 19 nt, Artificial Sequence
  Description of Artificial Sequence: Synthetic oligonucleotide
  Antisense strand to SEQ ID NO: 1193896
uuuguuaugcagauggcgg

SEQ ID NO: 1193898 - RNA, 19 nt, Artificial Sequence
  Description of Artificial Sequence: Synthetic oligonucleotide
  Sense strand starting at position 2194 of SEQ ID NO: 916914
cgcugaucccucugagaag

SEQ ID NO: 1193899 - RNA, 19 nt, Artificial Sequence
  Description of Artificial Sequence: Synthetic oligonucleotide
  Antisense strand to SEQ ID NO: 1193898
cuucucagagggaucagcg

SEQ ID NO: 1193900 - RNA, 19 nt, Artificial Sequence
  Description of Artificial Sequence: Synthetic oligonucleotide
  Sense strand starting at position 2535 of SEQ ID NO: 916914
cccagaaagugccauuuga

SEQ ID NO: 1193901 - RNA, 19 nt, Artificial Sequence
  Description of Artificial Sequence: Synthetic oligonucleotide
  Antisense strand to SEQ ID NO: 1193900
ucaaauggcacuuucuggg

SEQ ID NO: 1193902 - RNA, 19 nt, Artificial Sequence
  Description of Artificial Sequence: Synthetic oligonucleotide
  Sense strand starting at position 2542 of SEQ ID NO: 916914
agugccauuugauagacaa

SEQ ID NO: 1193903 - RNA, 19 nt, Artificial Sequence
  Description of Artificial Sequence: Synthetic oligonucleotide
  Antisense strand to SEQ ID NO: 1193902
uugucuaucaaauggcacu

SEQ ID NO: 1193904 - RNA, 19 nt, Artificial Sequence
  Description of Artificial Sequence: Synthetic oligonucleotide
  Sense strand starting at position 2642 of SEQ ID NO: 916914
ggagcugucaaggguaucu

SEQ ID NO: 1193905 - RNA, 19 nt, Artificial Sequence
  Description of Artificial Sequence: Synthetic oligonucleotide
  Antisense strand to SEQ ID NO: 1193904
agauacccuugacagcucc

SEQ ID NO: 1193906 - RNA, 19 nt, Artificial Sequence
  Description of Artificial Sequence: Synthetic oligonucleotide
  Sense strand starting at position 2953 of SEQ ID NO: 916914
gguuuagaaucccaaauca

SEQ ID NO: 1193907 - RNA, 19 nt, Artificial Sequence
  Description of Artificial Sequence: Synthetic oligonucleotide
  Antisense strand to SEQ ID NO: 1193906
ugauuugggauucuaaacc

SEQ ID NO: 1193908 - RNA, 19 nt, Artificial Sequence
  Description of Artificial Sequence: Synthetic oligonucleotide
  Sense strand starting at position 3164 of SEQ ID NO: 916914
ggcuguaaauuccuggaag

SEQ ID NO: 1193909 - RNA, 19 nt, Artificial Sequence
  Description of Artificial Sequence: Synthetic oligonucleotide
  Antisense strand to SEQ ID NO: 1193908
cuuccaggaauuuacagcc

SEQ ID NO: 1193910 - RNA, 19 nt, Artificial Sequence
  Description of Artificial Sequence: Synthetic oligonucleotide
  Sense strand starting at position 3166 of SEQ ID NO: 916914
cuguaaauuccuggaagga

SEQ ID NO: 1193911 - RNA, 19 nt, Artificial Sequence
  Description of Artificial Sequence: Synthetic oligonucleotide
  Antisense strand to SEQ ID NO: 1193910
uccuuccaggaauuuacag

SEQ ID NO: 1193912 - RNA, 19 nt, Artificial Sequence
  Description of Artificial Sequence: Synthetic oligonucleotide
  Sense strand starting at position 3184 of SEQ ID NO: 916914
aggccucgcucagucuuaa

SEQ ID NO: 1193913 - RNA, 19 nt, Artificial Sequence
  Description of Artificial Sequence: Synthetic oligonucleotide
  Antisense strand to SEQ ID NO: 1193912
uuaagacugagcgaggccu

SEQ ID NO: 1193914 - RNA, 19 nt, Artificial Sequence
  Description of Artificial Sequence: Synthetic oligonucleotide
  Sense strand starting at position 3229 of SEQ ID NO: 916914
cccagucacagcgagaaua

SEQ ID NO: 1193915 - RNA, 19 nt, Artificial Sequence
  Description of Artificial Sequence: Synthetic oligonucleotide
  Antisense strand to SEQ ID NO: 1193914
uauucucgcugugacuggg

SEQ ID NO: 1193916 - RNA, 19 nt, Artificial Sequence
  Description of Artificial Sequence: Synthetic oligonucleotide
  Sense strand starting at position 3231 of SEQ ID NO: 916914
cagucacagcgagaauaaa

SEQ ID NO: 1193917 - RNA, 19 nt, Artificial Sequence
  Description of Artificial Sequence: Synthetic oligonucleotide
  Antisense strand to SEQ ID NO: 1193916
uuuauucucgcugugacug

SEQ ID NO: 1193918 - RNA, 19 nt, Artificial Sequence
  Description of Artificial Sequence: Synthetic oligonucleotide
  Sense strand starting at position 3362 of SEQ ID NO: 916914
guaacuaggaggugaagau

SEQ ID NO: 1193919 - RNA, 19 nt, Artificial Sequence
  Description of Artificial Sequence: Synthetic oligonucleotide
  Antisense strand to SEQ ID NO: 1193918
aucuucaccuccuaguuac

SEQ ID NO: 1193920 - RNA, 19 nt, Artificial Sequence
  Description of Artificial Sequence: Synthetic oligonucleotide
  Sense strand starting at position 3419 of SEQ ID NO: 916914
gaaagaaccuuggaguaaa

SEQ ID NO: 1193921 - RNA, 19 nt, Artificial Sequence
  Description of Artificial Sequence: Synthetic oligonucleotide
  Antisense strand to SEQ ID NO: 1193920
uuuacuccaagguucuuuc

SEQ ID NO: 1193922 - RNA, 19 nt, Artificial Sequence
  Description of Artificial Sequence: Synthetic oligonucleotide
  Sense strand starting at position 3453 of SEQ ID NO: 916914
aaggguaucuacguuugaa

SEQ ID NO: 1193923 - RNA, 19 nt, Artificial Sequence
  Description of Artificial Sequence: Synthetic oligonucleotide
  Antisense strand to SEQ ID NO: 1193922
uucaaacguagauacccuu

SEQ ID NO: 1193924 - RNA, 19 nt, Artificial Sequence
  Description of Artificial Sequence: Synthetic oligonucleotide
  Sense strand starting at position 3456 of SEQ ID NO: 916914
gguaucuacguuugaagug

SEQ ID NO: 1193925 - RNA, 19 nt, Artificial Sequence
  Description of Artificial Sequence: Synthetic oligonucleotide
  Antisense strand to SEQ ID NO: 1193924
cacuucaaacguagauacc

SEQ ID NO: 1193926 - RNA, 19 nt, Artificial Sequence
  Description of Artificial Sequence: Synthetic oligonucleotide
  Sense strand starting at position 3498 of SEQ ID NO: 916914
cgcuuauuugagugccuga

SEQ ID NO: 1193927 - RNA, 19 nt, Artificial Sequence
  Description of Artificial Sequence: Synthetic oligonucleotide
  Antisense strand to SEQ ID NO: 1193926
ucaggcacucaaauaagcg

SEQ ID NO: 1193928 - RNA, 19 nt, Artificial Sequence
  Description of Artificial Sequence: Synthetic oligonucleotide
  Sense strand starting at position 3564 of SEQ ID NO: 916914
ugcauuugcuggcuucuua

SEQ ID NO: 1193929 - RNA, 19 nt, Artificial Sequence
  Description of Artificial Sequence: Synthetic oligonucleotide
  Antisense strand to SEQ ID NO: 1193928
uaagaagccagcaaaugca

SEQ ID NO: 1193930 - RNA, 19 nt, Artificial Sequence
  Description of Artificial Sequence: Synthetic oligonucleotide
  Sense strand starting at position 3781 of SEQ ID NO: 916914
gcuucuuauagguagcaga

SEQ ID NO: 1193931 - RNA, 19 nt, Artificial Sequence
  Description of Artificial Sequence: Synthetic oligonucleotide
  Antisense strand to SEQ ID NO: 1193930
ucugcuaccuauaagaagc

SEQ ID NO: 1193932 - RNA, 19 nt, Artificial Sequence
  Description of Artificial Sequence: Synthetic oligonucleotide
  Sense strand starting at position 3826 of SEQ ID NO: 916914
caugacauuuaggguauga

SEQ ID NO: 1193933 - RNA, 19 nt, Artificial Sequence
  Description of Artificial Sequence: Synthetic oligonucleotide
  Antisense strand to SEQ ID NO: 1193932
ucauacccuaaaugucaug

SEQ ID NO: 1193934 - RNA, 19 nt, Artificial Sequence
  Description of Artificial Sequence: Synthetic oligonucleotide
  Sense strand starting at position 3835 of SEQ ID NO: 916914
uaggguaugaacugaguca

SEQ ID NO: 1193935 - RNA, 19 nt, Artificial Sequence
  Description of Artificial Sequence: Synthetic oligonucleotide
  Antisense strand to SEQ ID NO: 1193934
ugacucaguucauacccua

SEQ ID NO: 1193936 - RNA, 19 nt, Artificial Sequence
  Description of Artificial Sequence: Synthetic oligonucleotide
  Sense strand starting at position 3848 of SEQ ID NO: 916914
gagucacuugcaggagaga

SEQ ID NO: 1193937 - RNA, 19 nt, Artificial Sequence
  Description of Artificial Sequence: Synthetic oligonucleotide
  Antisense strand to SEQ ID NO: 1193936
ucucuccugcaagugacuc

SEQ ID NO: 1193938 - RNA, 19 nt, Artificial Sequence
  Description of Artificial Sequence: Synthetic oligonucleotide
  Sense strand starting at position 3910 of SEQ ID NO: 916914
aguugugugccugcuccua

SEQ ID NO: 1193939 - RNA, 19 nt, Artificial Sequence
  Description of Artificial Sequence: Synthetic oligonucleotide
  Antisense strand to SEQ ID NO: 1193938
uaggagcaggcacacaacu

SEQ ID NO: 1193940 - RNA, 19 nt, Artificial Sequence
  Description of Artificial Sequence: Synthetic oligonucleotide
  Sense strand starting at position 5 of SEQ ID NO: 916915
auaguaaguuugcauucga

SEQ ID NO: 1193941 - RNA, 19 nt, Artificial Sequence
  Description of Artificial Sequence: Synthetic oligonucleotide
  Antisense strand to SEQ ID NO: 1193940
ucgaaugcaaacuuacuau

SEQ ID NO: 1193942 - RNA, 19 nt, Artificial Sequence
  Description of Artificial Sequence: Synthetic oligonucleotide
  Sense strand starting at position 166 of SEQ ID NO: 916915
cccguaucugcugaacaua

SEQ ID NO: 1193943 - RNA, 19 nt, Artificial Sequence
  Description of Artificial Sequence: Synthetic oligonucleotide
  Antisense strand to SEQ ID NO: 1193942
uauguucagcagauacggg

SEQ ID NO: 1193944 - RNA, 19 nt, Artificial Sequence
  Description of Artificial Sequence: Synthetic oligonucleotide
  Sense strand starting at position 169 of SEQ ID NO: 916915
guaucugcugaacauagaa

SEQ ID NO: 1193945 - RNA, 19 nt, Artificial Sequence
  Description of Artificial Sequence: Synthetic oligonucleotide
  Antisense strand to SEQ ID NO: 1193944
uucuauguucagcagauac

SEQ ID NO: 1193946 - RNA, 19 nt, Artificial Sequence
  Description of Artificial Sequence: Synthetic oligonucleotide
  Sense strand starting at position 598 of SEQ ID NO: 916915
auggcacgguuacuaaaua

SEQ ID NO: 1193947 - RNA, 19 nt, Artificial Sequence
  Description of Artificial Sequence: Synthetic oligonucleotide
  Antisense strand to SEQ ID NO: 1193946
uauuuaguaaccgugccau

SEQ ID NO: 1193948 - RNA, 19 nt, Artificial Sequence
  Description of Artificial Sequence: Synthetic oligonucleotide
  Sense strand starting at position 599 of SEQ ID NO: 916915
uggcacgguuacuaaauaa

SEQ ID NO: 1193949 - RNA, 19 nt, Artificial Sequence
  Description of Artificial Sequence: Synthetic oligonucleotide
  Antisense strand to SEQ ID NO: 1193948
uuauuuaguaaccgugcca

SEQ ID NO: 1193950 - RNA, 19 nt, Artificial Sequence
  Description of Artificial Sequence: Synthetic oligonucleotide
  Sense strand starting at position 835 of SEQ ID NO: 916915
agcaaaugaugcuaggaaa

SEQ ID NO: 1193951 - RNA, 19 nt, Artificial Sequence
  Description of Artificial Sequence: Synthetic oligonucleotide
  Antisense strand to SEQ ID NO: 1193950
uuuccuagcaucauuugcu

SEQ ID NO: 1193952 - RNA, 19 nt, Artificial Sequence
  Description of Artificial Sequence: Synthetic oligonucleotide
  Sense strand starting at position 865 of SEQ ID NO: 916915
gcucuuauuuggccggagu

SEQ ID NO: 1193953 - RNA, 19 nt, Artificial Sequence
  Description of Artificial Sequence: Synthetic oligonucleotide
  Antisense strand to SEQ ID NO: 1193952
acuccggccaaauaagagc

SEQ ID NO: 1193954 - RNA, 19 nt, Artificial Sequence
  Description of Artificial Sequence: Synthetic oligonucleotide
  Sense strand starting at position 932 of SEQ ID NO: 916915
uuugaaaguuccugggcuu

SEQ ID NO: 1193955 - RNA, 19 nt, Artificial Sequence
  Description of Artificial Sequence: Synthetic oligonucleotide
  Antisense strand to SEQ ID NO: 1193954
aagcccaggaacuuucaaa

SEQ ID NO: 1193956 - RNA, 19 nt, Artificial Sequence
  Description of Artificial Sequence: Synthetic oligonucleotide
  Sense strand starting at position 933 of SEQ ID NO: 916915
uugaaaguuccugggcuuu

SEQ ID NO: 1193957 - RNA, 19 nt, Artificial Sequence
  Description of Artificial Sequence: Synthetic oligonucleotide
  Antisense strand to SEQ ID NO: 1193956
aaagcccaggaacuuucaa

SEQ ID NO: 1193958 - RNA, 19 nt, Artificial Sequence
  Description of Artificial Sequence: Synthetic oligonucleotide
  Sense strand starting at position 1126 of SEQ ID NO: 916915
ccgugaucccuuuacaaag

SEQ ID NO: 1193959 - RNA, 19 nt, Artificial Sequence
  Description of Artificial Sequence: Synthetic oligonucleotide
  Antisense strand to SEQ ID NO: 1193958
cuuuguaaagggaucacgg

SEQ ID NO: 1193960 - RNA, 19 nt, Artificial Sequence
  Description of Artificial Sequence: Synthetic oligonucleotide
  Sense strand starting at position 1172 of SEQ ID NO: 916915
gcgcgaacggcgagcuauu

SEQ ID NO: 1193961 - RNA, 19 nt, Artificial Sequence
  Description of Artificial Sequence: Synthetic oligonucleotide
  Antisense strand to SEQ ID NO: 1193960
aauagcucgccguucgcgc

SEQ ID NO: 1193962 - RNA, 19 nt, Artificial Sequence
  Description of Artificial Sequence: Synthetic oligonucleotide
  Sense strand starting at position 1710 of SEQ ID NO: 916915
gccgguucuugagcucgau

SEQ ID NO: 1193963 - RNA, 19 nt, Artificial Sequence
  Description of Artificial Sequence: Synthetic oligonucleotide
  Antisense strand to SEQ ID NO: 1193962
aucgagcucaagaaccggc

SEQ ID NO: 1193964 - RNA, 19 nt, Artificial Sequence
  Description of Artificial Sequence: Synthetic oligonucleotide
  Sense strand starting at position 2382 of SEQ ID NO: 916915
uuuacaguugcucagaacu

SEQ ID NO: 1193965 - RNA, 19 nt, Artificial Sequence
  Description of Artificial Sequence: Synthetic oligonucleotide
  Antisense strand to SEQ ID NO: 1193964
aguucugagcaacuguaaa

SEQ ID NO: 1193966 - RNA, 19 nt, Artificial Sequence
  Description of Artificial Sequence: Synthetic oligonucleotide
  Sense strand starting at position 2384 of SEQ ID NO: 916915
uacaguugcucagaacuga

SEQ ID NO: 1193967 - RNA, 19 nt, Artificial Sequence
  Description of Artificial Sequence: Synthetic oligonucleotide
  Antisense strand to SEQ ID NO: 1193966
ucaguucugagcaacugua

SEQ ID NO: 1193968 - RNA, 19 nt, Artificial Sequence
  Description of Artificial Sequence: Synthetic oligonucleotide
  Sense strand starting at position 2427 of SEQ ID NO: 916915
auagcuuggccuugaguuu

SEQ ID NO: 1193969 - RNA, 19 nt, Artificial Sequence
  Description of Artificial Sequence: Synthetic oligonucleotide
  Antisense strand to SEQ ID NO: 1193968
aaacucaaggccaagcuau

SEQ ID NO: 1193970 - RNA, 19 nt, Artificial Sequence
  Description of Artificial Sequence: Synthetic oligonucleotide
  Sense strand starting at position 2438 of SEQ ID NO: 916915
uugaguuugucggagucga

SEQ ID NO: 1193971 - RNA, 19 nt, Artificial Sequence
  Description of Artificial Sequence: Synthetic oligonucleotide
  Antisense strand to SEQ ID NO: 1193970
ucgacuccgacaaacucaa

SEQ ID NO: 1193972 - RNA, 19 nt, Artificial Sequence
  Description of Artificial Sequence: Synthetic oligonucleotide
  Sense strand starting at position 2439 of SEQ ID NO: 916915
ugaguuugucggagucgag

SEQ ID NO: 1193973 - RNA, 19 nt, Artificial Sequence
  Description of Artificial Sequence: Synthetic oligonucleotide
  Antisense strand to SEQ ID NO: 1193972
cucgacuccgacaaacuca

SEQ ID NO: 1193974 - RNA, 19 nt, Artificial Sequence
  Description of Artificial Sequence: Synthetic oligonucleotide
  Sense strand starting at position 2459 of SEQ ID NO: 916915
gaguaagacucuuaaugag

SEQ ID NO: 1193975 - RNA, 19 nt, Artificial Sequence
  Description of Artificial Sequence: Synthetic oligonucleotide
  Antisense strand to SEQ ID NO: 1193974
cucauuaagagucuuacuc

SEQ ID NO: 1193976 - RNA, 19 nt, Artificial Sequence
  Description of Artificial Sequence: Synthetic oligonucleotide
  Sense strand starting at position 2471 of SEQ ID NO: 916915
uaaugaguaucacagcgau

SEQ ID NO: 1193977 - RNA, 19 nt, Artificial Sequence
  Description of Artificial Sequence: Synthetic oligonucleotide
  Antisense strand to SEQ ID NO: 1193976
aucgcugugauacucauua

SEQ ID NO: 1193978 - RNA, 19 nt, Artificial Sequence
  Description of Artificial Sequence: Synthetic oligonucleotide
  Sense strand starting at position 2474 of SEQ ID NO: 916915
ugaguaucacagcgaucac

SEQ ID NO: 1193979 - RNA, 19 nt, Artificial Sequence
  Description of Artificial Sequence: Synthetic oligonucleotide
  Antisense strand to SEQ ID NO: 1193978
gugaucgcugugauacuca

SEQ ID NO: 1193980 - RNA, 19 nt, Artificial Sequence
  Description of Artificial Sequence: Synthetic oligonucleotide
  Sense strand starting at position 2592 of SEQ ID NO: 916915
aguacugaguccuuaugga

SEQ ID NO: 1193981 - RNA, 19 nt, Artificial Sequence
  Description of Artificial Sequence: Synthetic oligonucleotide
  Antisense strand to SEQ ID NO: 1193980
uccauaaggacucaguacu

SEQ ID NO: 1193982 - RNA, 19 nt, Artificial Sequence
  Description of Artificial Sequence: Synthetic oligonucleotide
  Sense strand starting at position 2695 of SEQ ID NO: 916915
gaggccuugcaccagaaga

SEQ ID NO: 1193983 - RNA, 19 nt, Artificial Sequence
  Description of Artificial Sequence: Synthetic oligonucleotide
  Antisense strand to SEQ ID NO: 1193982
ucuucuggugcaaggccuc

SEQ ID NO: 1193984 - RNA, 19 nt, Artificial Sequence
  Description of Artificial Sequence: Synthetic oligonucleotide
  Sense strand starting at position 2697 of SEQ ID NO: 916915
ggccuugcaccagaagacu

SEQ ID NO: 1193985 - RNA, 19 nt, Artificial Sequence
  Description of Artificial Sequence: Synthetic oligonucleotide
  Antisense strand to SEQ ID NO: 1193984
agucuucuggugcaaggcc

SEQ ID NO: 1193986 - RNA, 19 nt, Artificial Sequence
  Description of Artificial Sequence: Synthetic oligonucleotide
  Sense strand starting at position 2854 of SEQ ID NO: 916915
gcguccagcuaguuuauuu

SEQ ID NO: 1193987 - RNA, 19 nt, Artificial Sequence
  Description of Artificial Sequence: Synthetic oligonucleotide
  Antisense strand to SEQ ID NO: 1193986
aaauaaacuagcuggacgc

SEQ ID NO: 1193988 - RNA, 19 nt, Artificial Sequence
  Description of Artificial Sequence: Synthetic oligonucleotide
  Sense strand starting at position 2886 of SEQ ID NO: 916915
uagagaggcuggucucgaa

SEQ ID NO: 1193989 - RNA, 19 nt, Artificial Sequence
  Description of Artificial Sequence: Synthetic oligonucleotide
  Antisense strand to SEQ ID NO: 1193988
uucgagaccagccucucua

SEQ ID NO: 1193990 - RNA, 19 nt, Artificial Sequence
  Description of Artificial Sequence: Synthetic oligonucleotide
  Sense strand starting at position 3751 of SEQ ID NO: 916915
auauacuacugaguguaua

SEQ ID NO: 1193991 - RNA, 19 nt, Artificial Sequence
  Description of Artificial Sequence: Synthetic oligonucleotide
  Antisense strand to SEQ ID NO: 1193990
uauacacucaguaguauau

SEQ ID NO: 1193992 - RNA, 19 nt, Artificial Sequence
  Description of Artificial Sequence: Synthetic oligonucleotide
  Sense strand starting at position 3777 of SEQ ID NO: 916915
uggaauacaaguugauagu

SEQ ID NO: 1193993 - RNA, 19 nt, Artificial Sequence
  Description of Artificial Sequence: Synthetic oligonucleotide
  Antisense strand to SEQ ID NO: 1193992
acuaucaacuuguauucca

SEQ ID NO: 1193994 - RNA, 19 nt, Artificial Sequence
  Description of Artificial Sequence: Synthetic oligonucleotide
  Sense strand starting at position 3783 of SEQ ID NO: 916915
acaaguugauaguauacau

SEQ ID NO: 1193995 - RNA, 19 nt, Artificial Sequence
  Description of Artificial Sequence: Synthetic oligonucleotide
  Antisense strand to SEQ ID NO: 1193994
auguauacuaucaacuugu

SEQ ID NO: 1193996 - RNA, 19 nt, Artificial Sequence
  Description of Artificial Sequence: Synthetic oligonucleotide
  Sense strand starting at position 3790 of SEQ ID NO: 916915
gauaguauacaucaggcuu

SEQ ID NO: 1193997 - RNA, 19 nt, Artificial Sequence
  Description of Artificial Sequence: Synthetic oligonucleotide
  Antisense strand to SEQ ID NO: 1193996
aagccugauguauacuauc

SEQ ID NO: 1193998 - RNA, 19 nt, Artificial Sequence
  Description of Artificial Sequence: Synthetic oligonucleotide
  Sense strand starting at position 3824 of SEQ ID NO: 916915
acccuucgaucuuguaauu

SEQ ID NO: 1193999 - RNA, 19 nt, Artificial Sequence
  Description of Artificial Sequence: Synthetic oligonucleotide
  Antisense strand to SEQ ID NO: 1193998
aauuacaagaucgaagggu

SEQ ID NO: 1194000 - RNA, 19 nt, Artificial Sequence
  Description of Artificial Sequence: Synthetic oligonucleotide
  Sense strand starting at position 3833 of SEQ ID NO: 916915
ucuuguaauucugcuugua

SEQ ID NO: 1194001 - RNA, 19 nt, Artificial Sequence
  Description of Artificial Sequence: Synthetic oligonucleotide
  Antisense strand to SEQ ID NO: 1194000
uacaagcagaauuacaaga

SEQ ID NO: 1194002 - RNA, 19 nt, Artificial Sequence
  Description of Artificial Sequence: Synthetic oligonucleotide
  Sense strand starting at position 3835 of SEQ ID NO: 916915
uuguaauucugcuuguagg

SEQ ID NO: 1194003 - RNA, 19 nt, Artificial Sequence
  Description of Artificial Sequence: Synthetic oligonucleotide
  Antisense strand to SEQ ID NO: 1194002
ccuacaagcagaauuacaa

SEQ ID NO: 1194004 - RNA, 19 nt, Artificial Sequence
  Description of Artificial Sequence: Synthetic oligonucleotide
  Sense strand starting at position 3836 of SEQ ID NO: 916915
uguaauucugcuuguagga

SEQ ID NO: 1194005 - RNA, 19 nt, Artificial Sequence
  Description of Artificial Sequence: Synthetic oligonucleotide
  Antisense strand to SEQ ID NO: 1194004
uccuacaagcagaauuaca

SEQ ID NO: 1194006 - RNA, 19 nt, Artificial Sequence
  Description of Artificial Sequence: Synthetic oligonucleotide
  Sense strand starting at position 3838 of SEQ ID NO: 916915
uaauucugcuuguaggauu

SEQ ID NO: 1194007 - RNA, 19 nt, Artificial Sequence
  Description of Artificial Sequence: Synthetic oligonucleotide
  Antisense strand to SEQ ID NO: 1194006
aauccuacaagcagaauua

SEQ ID NO: 1194008 - RNA, 19 nt, Artificial Sequence
  Description of Artificial Sequence: Synthetic oligonucleotide
  Sense strand starting at position 67 of SEQ ID NO: 916916
augagaaccugagauuaag

SEQ ID NO: 1194009 - RNA, 19 nt, Artificial Sequence
  Description of Artificial Sequence: Synthetic oligonucleotide
  Antisense strand to SEQ ID NO: 1194008
cuuaaucucagguucucau

SEQ ID NO: 1194010 - RNA, 19 nt, Artificial Sequence
  Description of Artificial Sequence: Synthetic oligonucleotide
  Sense strand starting at position 73 of SEQ ID NO: 916916
accugagauuaagugcaua

SEQ ID NO: 1194011 - RNA, 19 nt, Artificial Sequence
  Description of Artificial Sequence: Synthetic oligonucleotide
  Antisense strand to SEQ ID NO: 1194010
uaugcacuuaaucucaggu

SEQ ID NO: 1194012 - RNA, 19 nt, Artificial Sequence
  Description of Artificial Sequence: Synthetic oligonucleotide
  Sense strand starting at position 85 of SEQ ID NO: 916916
gugcauaaauugccagaca

SEQ ID NO: 1194013 - RNA, 19 nt, Artificial Sequence
  Description of Artificial Sequence: Synthetic oligonucleotide
  Antisense strand to SEQ ID NO: 1194012
ugucuggcaauuuaugcac

SEQ ID NO: 1194014 - RNA, 19 nt, Artificial Sequence
  Description of Artificial Sequence: Synthetic oligonucleotide
  Sense strand starting at position 173 of SEQ ID NO: 916916
ucaguagcaggcuauugau

SEQ ID NO: 1194015 - RNA, 19 nt, Artificial Sequence
  Description of Artificial Sequence: Synthetic oligonucleotide
  Antisense strand to SEQ ID NO: 1194014
aucaauagccugcuacuga

SEQ ID NO: 1194016 - RNA, 19 nt, Artificial Sequence
  Description of Artificial Sequence: Synthetic oligonucleotide
  Sense strand starting at position 209 of SEQ ID NO: 916916
cucuaaucagcguguagag

SEQ ID NO: 1194017 - RNA, 19 nt, Artificial Sequence
  Description of Artificial Sequence: Synthetic oligonucleotide
  Antisense strand to SEQ ID NO: 1194016
cucuacacgcugauuagag

SEQ ID NO: 1194018 - RNA, 19 nt, Artificial Sequence
  Description of Artificial Sequence: Synthetic oligonucleotide
  Sense strand starting at position 238 of SEQ ID NO: 916916
agaaccuucuguguauaga

SEQ ID NO: 1194019 - RNA, 19 nt, Artificial Sequence
  Description of Artificial Sequence: Synthetic oligonucleotide
  Antisense strand to SEQ ID NO: 1194018
ucuauacacagaagguucu

SEQ ID NO: 1194020 - RNA, 19 nt, Artificial Sequence
  Description of Artificial Sequence: Synthetic oligonucleotide
  Sense strand starting at position 239 of SEQ ID NO: 916916
gaaccuucuguguauagau

SEQ ID NO: 1194021 - RNA, 19 nt, Artificial Sequence
  Description of Artificial Sequence: Synthetic oligonucleotide
  Antisense strand to SEQ ID NO: 1194020
aucuauacacagaagguuc

SEQ ID NO: 1194022 - RNA, 19 nt, Artificial Sequence
  Description of Artificial Sequence: Synthetic oligonucleotide
  Sense strand starting at position 241 of SEQ ID NO: 916916
accuucuguguauagauaa

SEQ ID NO: 1194023 - RNA, 19 nt, Artificial Sequence
  Description of Artificial Sequence: Synthetic oligonucleotide
  Antisense strand to SEQ ID NO: 1194022
uuaucuauacacagaaggu

SEQ ID NO: 1194024 - RNA, 19 nt, Artificial Sequence
  Description of Artificial Sequence: Synthetic oligonucleotide
  Sense strand starting at position 248 of SEQ ID NO: 916916
guguauagauaacucauga

SEQ ID NO: 1194025 - RNA, 19 nt, Artificial Sequence
  Description of Artificial Sequence: Synthetic oligonucleotide
  Antisense strand to SEQ ID NO: 1194024
ucaugaguuaucuauacac

SEQ ID NO: 1194026 - RNA, 19 nt, Artificial Sequence
  Description of Artificial Sequence: Synthetic oligonucleotide
  Sense strand starting at position 252 of SEQ ID NO: 916916
auagauaacucaugaaugg

SEQ ID NO: 1194027 - RNA, 19 nt, Artificial Sequence
  Description of Artificial Sequence: Synthetic oligonucleotide
  Antisense strand to SEQ ID NO: 1194026
ccauucaugaguuaucuau

SEQ ID NO: 1194028 - RNA, 19 nt, Artificial Sequence
  Description of Artificial Sequence: Synthetic oligonucleotide
  Sense strand starting at position 442 of SEQ ID NO: 916916
cguguuaucagucaacuuc

SEQ ID NO: 1194029 - RNA, 19 nt, Artificial Sequence
  Description of Artificial Sequence: Synthetic oligonucleotide
  Antisense strand to SEQ ID NO: 1194028
gaaguugacugauaacacg

SEQ ID NO: 1194030 - RNA, 19 nt, Artificial Sequence
  Description of Artificial Sequence: Synthetic oligonucleotide
  Sense strand starting at position 592 of SEQ ID NO: 916916
agccuuguuauagguaaga

SEQ ID NO: 1194031 - RNA, 19 nt, Artificial Sequence
  Description of Artificial Sequence: Synthetic oligonucleotide
  Antisense strand to SEQ ID NO: 1194030
ucuuaccuauaacaaggcu

SEQ ID NO: 1194032 - RNA, 19 nt, Artificial Sequence
  Description of Artificial Sequence: Synthetic oligonucleotide
  Sense strand starting at position 594 of SEQ ID NO: 916916
ccuuguuauagguaagagu

SEQ ID NO: 1194033 - RNA, 19 nt, Artificial Sequence
  Description of Artificial Sequence: Synthetic oligonucleotide
  Antisense strand to SEQ ID NO: 1194032
acucuuaccuauaacaagg

SEQ ID NO: 1194034 - RNA, 19 nt, Artificial Sequence
  Description of Artificial Sequence: Synthetic oligonucleotide
  Sense strand starting at position 626 of SEQ ID NO: 916916
cuugacggguucuucaaga

SEQ ID NO: 1194035 - RNA, 19 nt, Artificial Sequence
  Description of Artificial Sequence: Synthetic oligonucleotide
  Antisense strand to SEQ ID NO: 1194034
ucuugaagaacccgucaag

SEQ ID NO: 1194036 - RNA, 19 nt, Artificial Sequence
  Description of Artificial Sequence: Synthetic oligonucleotide
  Sense strand starting at position 641 of SEQ ID NO: 916916
aagagauggugggcaagau

SEQ ID NO: 1194037 - RNA, 19 nt, Artificial Sequence
  Description of Artificial Sequence: Synthetic oligonucleotide
  Antisense strand to SEQ ID NO: 1194036
aucuugcccaccaucucuu

SEQ ID NO: 1194038 - RNA, 19 nt, Artificial Sequence
  Description of Artificial Sequence: Synthetic oligonucleotide
  Sense strand starting at position 653 of SEQ ID NO: 916916
gcaagauugcgcgaccaga

SEQ ID NO: 1194039 - RNA, 19 nt, Artificial Sequence
  Description of Artificial Sequence: Synthetic oligonucleotide
  Antisense strand to SEQ ID NO: 1194038
ucuggucgcgcaaucuugc

SEQ ID NO: 1194040 - RNA, 19 nt, Artificial Sequence
  Description of Artificial Sequence: Synthetic oligonucleotide
  Sense strand starting at position 761 of SEQ ID NO: 916916
gggcaacagugcccucaau

SEQ ID NO: 1194041 - RNA, 19 nt, Artificial Sequence
  Description of Artificial Sequence: Synthetic oligonucleotide
  Antisense strand to SEQ ID NO: 1194040
auugagggcacuguugccc

SEQ ID NO: 1194042 - RNA, 19 nt, Artificial Sequence
  Description of Artificial Sequence: Synthetic oligonucleotide
  Sense strand starting at position 936 of SEQ ID NO: 916916
acaggccugagugauguua

SEQ ID NO: 1194043 - RNA, 19 nt, Artificial Sequence
  Description of Artificial Sequence: Synthetic oligonucleotide
  Antisense strand to SEQ ID NO: 1194042
uaacaucacucaggccugu

SEQ ID NO: 1194044 - RNA, 19 nt, Artificial Sequence
  Description of Artificial Sequence: Synthetic oligonucleotide
  Sense strand starting at position 1414 of SEQ ID NO: 916916
acacaaucacgaggucaca

SEQ ID NO: 1194045 - RNA, 19 nt, Artificial Sequence
  Description of Artificial Sequence: Synthetic oligonucleotide
  Antisense strand to SEQ ID NO: 1194044
ugugaccucgugauugugu

SEQ ID NO: 1194046 - RNA, 19 nt, Artificial Sequence
  Description of Artificial Sequence: Synthetic oligonucleotide
  Sense strand starting at position 2806 of SEQ ID NO: 916916
cuuucuggguguucugaaa

SEQ ID NO: 1194047 - RNA, 19 nt, Artificial Sequence
  Description of Artificial Sequence: Synthetic oligonucleotide
  Antisense strand to SEQ ID NO: 1194046
uuucagaacacccagaaag

SEQ ID NO: 1194048 - RNA, 19 nt, Artificial Sequence
  Description of Artificial Sequence: Synthetic oligonucleotide
  Sense strand starting at position 2859 of SEQ ID NO: 916916
ccagaagagcuuuauucug

SEQ ID NO: 1194049 - RNA, 19 nt, Artificial Sequence
  Description of Artificial Sequence: Synthetic oligonucleotide
  Antisense strand to SEQ ID NO: 1194048
cagaauaaagcucuucugg

SEQ ID NO: 1194050 - RNA, 19 nt, Artificial Sequence
  Description of Artificial Sequence: Synthetic oligonucleotide
  Sense strand starting at position 2861 of SEQ ID NO: 916916
agaagagcuuuauucugag

SEQ ID NO: 1194051 - RNA, 19 nt, Artificial Sequence
  Description of Artificial Sequence: Synthetic oligonucleotide
  Antisense strand to SEQ ID NO: 1194050
cucagaauaaagcucuucu

SEQ ID NO: 1194052 - RNA, 19 nt, Artificial Sequence
  Description of Artificial Sequence: Synthetic oligonucleotide
  Sense strand starting at position 2877 of SEQ ID NO: 916916
gaggcuugggcuugagcau

SEQ ID NO: 1194053 - RNA, 19 nt, Artificial Sequence
  Description of Artificial Sequence: Synthetic oligonucleotide
  Antisense strand to SEQ ID NO: 1194052
augcucaagcccaagccuc

SEQ ID NO: 1194054 - RNA, 19 nt, Artificial Sequence
  Description of Artificial Sequence: Synthetic oligonucleotide
  Sense strand starting at position 2889 of SEQ ID NO: 916916
ugagcauaagcaggauuaa

SEQ ID NO: 1194055 - RNA, 19 nt, Artificial Sequence
  Description of Artificial Sequence: Synthetic oligonucleotide
  Antisense strand to SEQ ID NO: 1194054
uuaauccugcuuaugcuca

SEQ ID NO: 1194056 - RNA, 19 nt, Artificial Sequence
  Description of Artificial Sequence: Synthetic oligonucleotide
  Sense strand starting at position 2898 of SEQ ID NO: 916916
gcaggauuaacaggugaaa

SEQ ID NO: 1194057 - RNA, 19 nt, Artificial Sequence
  Description of Artificial Sequence: Synthetic oligonucleotide
  Antisense strand to SEQ ID NO: 1194056
uuucaccuguuaauccugc

SEQ ID NO: 1194058 - RNA, 19 nt, Artificial Sequence
  Description of Artificial Sequence: Synthetic oligonucleotide
  Sense strand starting at position 2965 of SEQ ID NO: 916916
caggaagaaguuugucaac

SEQ ID NO: 1194059 - RNA, 19 nt, Artificial Sequence
  Description of Artificial Sequence: Synthetic oligonucleotide
  Antisense strand to SEQ ID NO: 1194058
guugacaaacuucuuccug

SEQ ID NO: 1194060 - RNA, 19 nt, Artificial Sequence
  Description of Artificial Sequence: Synthetic oligonucleotide
  Sense strand starting at position 3014 of SEQ ID NO: 916916
ggaggaauggcuggagucu

SEQ ID NO: 1194061 - RNA, 19 nt, Artificial Sequence
  Description of Artificial Sequence: Synthetic oligonucleotide
  Antisense strand to SEQ ID NO: 1194060
agacuccagccauuccucc

SEQ ID NO: 1194062 - RNA, 19 nt, Artificial Sequence
  Description of Artificial Sequence: Synthetic oligonucleotide
  Sense strand starting at position 3172 of SEQ ID NO: 916916
ggaauaagauaccaagaag

SEQ ID NO: 1194063 - RNA, 19 nt, Artificial Sequence
  Description of Artificial Sequence: Synthetic oligonucleotide
  Antisense strand to SEQ ID NO: 1194062
cuucuugguaucuuauucc

SEQ ID NO: 1194064 - RNA, 19 nt, Artificial Sequence
  Description of Artificial Sequence: Synthetic oligonucleotide
  Sense strand starting at position 3189 of SEQ ID NO: 916916
aggcaauucuggcuugacu

SEQ ID NO: 1194065 - RNA, 19 nt, Artificial Sequence
  Description of Artificial Sequence: Synthetic oligonucleotide
  Antisense strand to SEQ ID NO: 1194064
agucaagccagaauugccu

SEQ ID NO: 1194066 - RNA, 19 nt, Artificial Sequence
  Description of Artificial Sequence: Synthetic oligonucleotide
  Sense strand starting at position 3191 of SEQ ID NO: 916916
gcaauucuggcuugacuua

SEQ ID NO: 1194067 - RNA, 19 nt, Artificial Sequence
  Description of Artificial Sequence: Synthetic oligonucleotide
  Antisense strand to SEQ ID NO: 1194066
uaagucaagccagaauugc

SEQ ID NO: 1194068 - RNA, 19 nt, Artificial Sequence
  Description of Artificial Sequence: Synthetic oligonucleotide
  Sense strand starting at position 3196 of SEQ ID NO: 916916
ucuggcuugacuuaguagu

SEQ ID NO: 1194069 - RNA, 19 nt, Artificial Sequence
  Description of Artificial Sequence: Synthetic oligonucleotide
  Antisense strand to SEQ ID NO: 1194068
acuacuaagucaagccaga

SEQ ID NO: 1194070 - RNA, 19 nt, Artificial Sequence
  Description of Artificial Sequence: Synthetic oligonucleotide
  Sense strand starting at position 3204 of SEQ ID NO: 916916
gacuuaguaguaggaaacu

SEQ ID NO: 1194071 - RNA, 19 nt, Artificial Sequence
  Description of Artificial Sequence: Synthetic oligonucleotide
  Antisense strand to SEQ ID NO: 1194070
aguuuccuacuacuaaguc

SEQ ID NO: 1194072 - RNA, 19 nt, Artificial Sequence
  Description of Artificial Sequence: Synthetic oligonucleotide
  Sense strand starting at position 3402 of SEQ ID NO: 916916
ugugaccuccuccauguua

SEQ ID NO: 1194073 - RNA, 19 nt, Artificial Sequence
  Description of Artificial Sequence: Synthetic oligonucleotide
  Antisense strand to SEQ ID NO: 1194072
uaacauggaggaggucaca

SEQ ID NO: 1194074 - RNA, 19 nt, Artificial Sequence
  Description of Artificial Sequence: Synthetic oligonucleotide
  Sense strand starting at position 3427 of SEQ ID NO: 916916
gggucucagcacgauucau

SEQ ID NO: 1194075 - RNA, 19 nt, Artificial Sequence
  Description of Artificial Sequence: Synthetic oligonucleotide
  Antisense strand to SEQ ID NO: 1194074
augaaucgugcugagaccc

SEQ ID NO: 1194076 - RNA, 19 nt, Artificial Sequence
  Description of Artificial Sequence: Synthetic oligonucleotide
  Sense strand starting at position 3445 of SEQ ID NO: 916916
ucucaaaggugauucuagu

SEQ ID NO: 1194077 - RNA, 19 nt, Artificial Sequence
  Description of Artificial Sequence: Synthetic oligonucleotide
  Antisense strand to SEQ ID NO: 1194076
acuagaaucaccuuugaga

SEQ ID NO: 1194078 - RNA, 19 nt, Artificial Sequence
  Description of Artificial Sequence: Synthetic oligonucleotide
  Sense strand starting at position 3512 of SEQ ID NO: 916916
gaauguuugugguugucuu

SEQ ID NO: 1194079 - RNA, 19 nt, Artificial Sequence
  Description of Artificial Sequence: Synthetic oligonucleotide
  Antisense strand to SEQ ID NO: 1194078
aagacaaccacaaacauuc

SEQ ID NO: 1194080 - RNA, 19 nt, Artificial Sequence
  Description of Artificial Sequence: Synthetic oligonucleotide
  Sense strand starting at position 3568 of SEQ ID NO: 916916
aagagccuuggaugcuaaa

SEQ ID NO: 1194081 - RNA, 19 nt, Artificial Sequence
  Description of Artificial Sequence: Synthetic oligonucleotide
  Antisense strand to SEQ ID NO: 1194080
uuuagcauccaaggcucuu

SEQ ID NO: 1194082 - RNA, 19 nt, Artificial Sequence
  Description of Artificial Sequence: Synthetic oligonucleotide
  Sense strand starting at position 3580 of SEQ ID NO: 916916
ugcuaaaugucuuccaaug

SEQ ID NO: 1194083 - RNA, 19 nt, Artificial Sequence
  Description of Artificial Sequence: Synthetic oligonucleotide
  Antisense strand to SEQ ID NO: 1194082
cauuggaagacauuuagca

SEQ ID NO: 1194084 - RNA, 19 nt, Artificial Sequence
  Description of Artificial Sequence: Synthetic oligonucleotide
  Sense strand starting at position 3640 of SEQ ID NO: 916916
aaauguuuccugggugaaa

SEQ ID NO: 1194085 - RNA, 19 nt, Artificial Sequence
  Description of Artificial Sequence: Synthetic oligonucleotide
  Antisense strand to SEQ ID NO: 1194084
uuucacccaggaaacauuu

SEQ ID NO: 1194086 - RNA, 19 nt, Artificial Sequence
  Description of Artificial Sequence: Synthetic oligonucleotide
  Sense strand starting at position 3957 of SEQ ID NO: 916916
aacuauguugcccaggcaa

SEQ ID NO: 1194087 - RNA, 19 nt, Artificial Sequence
  Description of Artificial Sequence: Synthetic oligonucleotide
  Antisense strand to SEQ ID NO: 1194086
uugccugggcaacauaguu

SEQ ID NO: 1194088 - RNA, 19 nt, Artificial Sequence
  Description of Artificial Sequence: Synthetic oligonucleotide
  Sense strand starting at position 16 of SEQ ID NO: 916917
cucugaauuccaggcaauu

SEQ ID NO: 1194089 - RNA, 19 nt, Artificial Sequence
  Description of Artificial Sequence: Synthetic oligonucleotide
  Antisense strand to SEQ ID NO: 1194088
aauugccuggaauucagag

SEQ ID NO: 1194090 - RNA, 19 nt, Artificial Sequence
  Description of Artificial Sequence: Synthetic oligonucleotide
  Sense strand starting at position 133 of SEQ ID NO: 916917
gcauauauuugugcugcaa

SEQ ID NO: 1194091 - RNA, 19 nt, Artificial Sequence
  Description of Artificial Sequence: Synthetic oligonucleotide
  Antisense strand to SEQ ID NO: 1194090
uugcagcacaaauauaugc

SEQ ID NO: 1194092 - RNA, 19 nt, Artificial Sequence
  Description of Artificial Sequence: Synthetic oligonucleotide
  Sense strand starting at position 137 of SEQ ID NO: 916917
auauuugugcugcaagguu

SEQ ID NO: 1194093 - RNA, 19 nt, Artificial Sequence
  Description of Artificial Sequence: Synthetic oligonucleotide
  Antisense strand to SEQ ID NO: 1194092
aaccuugcagcacaaauau

SEQ ID NO: 1194094 - RNA, 19 nt, Artificial Sequence
  Description of Artificial Sequence: Synthetic oligonucleotide
  Sense strand starting at position 160 of SEQ ID NO: 916917
uguugaggagcucaggauu

SEQ ID NO: 1194095 - RNA, 19 nt, Artificial Sequence
  Description of Artificial Sequence: Synthetic oligonucleotide
  Antisense strand to SEQ ID NO: 1194094
aauccugagcuccucaaca

SEQ ID NO: 1194096 - RNA, 19 nt, Artificial Sequence
  Description of Artificial Sequence: Synthetic oligonucleotide
  Sense strand starting at position 364 of SEQ ID NO: 916917
ucagaacuguucuuagaca

SEQ ID NO: 1194097 - RNA, 19 nt, Artificial Sequence
  Description of Artificial Sequence: Synthetic oligonucleotide
  Antisense strand to SEQ ID NO: 1194096
ugucuaagaacaguucuga

SEQ ID NO: 1194098 - RNA, 19 nt, Artificial Sequence
  Description of Artificial Sequence: Synthetic oligonucleotide
  Sense strand starting at position 412 of SEQ ID NO: 916917
aucugaaacagcuaugcga

SEQ ID NO: 1194099 - RNA, 19 nt, Artificial Sequence
  Description of Artificial Sequence: Synthetic oligonucleotide
  Antisense strand to SEQ ID NO: 1194098
ucgcauagcuguuucagau

SEQ ID NO: 1194100 - RNA, 19 nt, Artificial Sequence
  Description of Artificial Sequence: Synthetic oligonucleotide
  Sense strand starting at position 593 of SEQ ID NO: 916917
ugaccuuugccuuggaaac

SEQ ID NO: 1194101 - RNA, 19 nt, Artificial Sequence
  Description of Artificial Sequence: Synthetic oligonucleotide
  Antisense strand to SEQ ID NO: 1194100
guuuccaaggcaaagguca

SEQ ID NO: 1194102 - RNA, 19 nt, Artificial Sequence
  Description of Artificial Sequence: Synthetic oligonucleotide
  Sense strand starting at position 771 of SEQ ID NO: 916917
gcaugaagucaggauggca

SEQ ID NO: 1194103 - RNA, 19 nt, Artificial Sequence
  Description of Artificial Sequence: Synthetic oligonucleotide
  Antisense strand to SEQ ID NO: 1194102
ugccauccugacuucaugc

SEQ ID NO: 1194104 - RNA, 19 nt, Artificial Sequence
  Description of Artificial Sequence: Synthetic oligonucleotide
  Sense strand starting at position 1130 of SEQ ID NO: 916917
ggcugaccugaauacugua

SEQ ID NO: 1194105 - RNA, 19 nt, Artificial Sequence
  Description of Artificial Sequence: Synthetic oligonucleotide
  Antisense strand to SEQ ID NO: 1194104
uacaguauucaggucagcc

SEQ ID NO: 1194106 - RNA, 19 nt, Artificial Sequence
  Description of Artificial Sequence: Synthetic oligonucleotide
  Sense strand starting at position 1138 of SEQ ID NO: 916917
ugaauacuguaucugacga

SEQ ID NO: 1194107 - RNA, 19 nt, Artificial Sequence
  Description of Artificial Sequence: Synthetic oligonucleotide
  Antisense strand to SEQ ID NO: 1194106
ucgucagauacaguauuca

SEQ ID NO: 1194108 - RNA, 19 nt, Artificial Sequence
  Description of Artificial Sequence: Synthetic oligonucleotide
  Sense strand starting at position 1234 of SEQ ID NO: 916917
agaaauccacauuggugau

SEQ ID NO: 1194109 - RNA, 19 nt, Artificial Sequence
  Description of Artificial Sequence: Synthetic oligonucleotide
  Antisense strand to SEQ ID NO: 1194108
aucaccaauguggauuucu

SEQ ID NO: 1194110 - RNA, 19 nt, Artificial Sequence
  Description of Artificial Sequence: Synthetic oligonucleotide
  Sense strand starting at position 1405 of SEQ ID NO: 916917
acggaaaugucuuccucca

SEQ ID NO: 1194111 - RNA, 19 nt, Artificial Sequence
  Description of Artificial Sequence: Synthetic oligonucleotide
  Antisense strand to SEQ ID NO: 1194110
uggaggaagacauuuccgu

SEQ ID NO: 1194112 - RNA, 19 nt, Artificial Sequence
  Description of Artificial Sequence: Synthetic oligonucleotide
  Sense strand starting at position 1418 of SEQ ID NO: 916917
ccuccaccgcuguaagaaa

SEQ ID NO: 1194113 - RNA, 19 nt, Artificial Sequence
  Description of Artificial Sequence: Synthetic oligonucleotide
  Antisense strand to SEQ ID NO: 1194112
uuucuuacagcgguggagg

SEQ ID NO: 1194114 - RNA, 19 nt, Artificial Sequence
  Description of Artificial Sequence: Synthetic oligonucleotide
  Sense strand starting at position 1514 of SEQ ID NO: 916917
acagaucuguucucggaca

SEQ ID NO: 1194115 - RNA, 19 nt, Artificial Sequence
  Description of Artificial Sequence: Synthetic oligonucleotide
  Antisense strand to SEQ ID NO: 1194114
uguccgagaacagaucugu

SEQ ID NO: 1194116 - RNA, 19 nt, Artificial Sequence
  Description of Artificial Sequence: Synthetic oligonucleotide
  Sense strand starting at position 1516 of SEQ ID NO: 916917
agaucuguucucggacacu

SEQ ID NO: 1194117 - RNA, 19 nt, Artificial Sequence
  Description of Artificial Sequence: Synthetic oligonucleotide
  Antisense strand to SEQ ID NO: 1194116
aguguccgagaacagaucu

SEQ ID NO: 1194118 - RNA, 19 nt, Artificial Sequence
  Description of Artificial Sequence: Synthetic oligonucleotide
  Sense strand starting at position 1519 of SEQ ID NO: 916917
ucuguucucggacacugau

SEQ ID NO: 1194119 - RNA, 19 nt, Artificial Sequence
  Description of Artificial Sequence: Synthetic oligonucleotide
  Antisense strand to SEQ ID NO: 1194118
aucaguguccgagaacaga

SEQ ID NO: 1194120 - RNA, 19 nt, Artificial Sequence
  Description of Artificial Sequence: Synthetic oligonucleotide
  Sense strand starting at position 1687 of SEQ ID NO: 916917
caguaaucaggguggucau

SEQ ID NO: 1194121 - RNA, 19 nt, Artificial Sequence
  Description of Artificial Sequence: Synthetic oligonucleotide
  Antisense strand to SEQ ID NO: 1194120
augaccacccugauuacug

SEQ ID NO: 1194122 - RNA, 19 nt, Artificial Sequence
  Description of Artificial Sequence: Synthetic oligonucleotide
  Sense strand starting at position 1688 of SEQ ID NO: 916917
aguaaucaggguggucaua

SEQ ID NO: 1194123 - RNA, 19 nt, Artificial Sequence
  Description of Artificial Sequence: Synthetic oligonucleotide
  Antisense strand to SEQ ID NO: 1194122
uaugaccacccugauuacu

SEQ ID NO: 1194124 - RNA, 19 nt, Artificial Sequence
  Description of Artificial Sequence: Synthetic oligonucleotide
  Sense strand starting at position 1697 of SEQ ID NO: 916917
gguggucauacguacuaau

SEQ ID NO: 1194125 - RNA, 19 nt, Artificial Sequence
  Description of Artificial Sequence: Synthetic oligonucleotide
  Antisense strand to SEQ ID NO: 1194124
auuaguacguaugaccacc

SEQ ID NO: 1194126 - RNA, 19 nt, Artificial Sequence
  Description of Artificial Sequence: Synthetic oligonucleotide
  Sense strand starting at position 1764 of SEQ ID NO: 916917
agaugcagaagucgguaaa

SEQ ID NO: 1194127 - RNA, 19 nt, Artificial Sequence
  Description of Artificial Sequence: Synthetic oligonucleotide
  Antisense strand to SEQ ID NO: 1194126
uuuaccgacuucugcaucu

SEQ ID NO: 1194128 - RNA, 19 nt, Artificial Sequence
  Description of Artificial Sequence: Synthetic oligonucleotide
  Sense strand starting at position 1853 of SEQ ID NO: 916917
aucugcucccuauggagau

SEQ ID NO: 1194129 - RNA, 19 nt, Artificial Sequence
  Description of Artificial Sequence: Synthetic oligonucleotide
  Antisense strand to SEQ ID NO: 1194128
aucuccauagggagcagau

SEQ ID NO: 1194130 - RNA, 19 nt, Artificial Sequence
  Description of Artificial Sequence: Synthetic oligonucleotide
  Sense strand starting at position 1918 of SEQ ID NO: 916917
gccaacuccuccucagagu

SEQ ID NO: 1194131 - RNA, 19 nt, Artificial Sequence
  Description of Artificial Sequence: Synthetic oligonucleotide
  Antisense strand to SEQ ID NO: 1194130
acucugaggaggaguuggc

SEQ ID NO: 1194132 - RNA, 19 nt, Artificial Sequence
  Description of Artificial Sequence: Synthetic oligonucleotide
  Sense strand starting at position 1967 of SEQ ID NO: 916917
acucuugucuuccucugau

SEQ ID NO: 1194133 - RNA, 19 nt, Artificial Sequence
  Description of Artificial Sequence: Synthetic oligonucleotide
  Antisense strand to SEQ ID NO: 1194132
aucagaggaagacaagagu

SEQ ID NO: 1194134 - RNA, 19 nt, Artificial Sequence
  Description of Artificial Sequence: Synthetic oligonucleotide
  Sense strand starting at position 1970 of SEQ ID NO: 916917
cuugucuuccucugauauu

SEQ ID NO: 1194135 - RNA, 19 nt, Artificial Sequence
  Description of Artificial Sequence: Synthetic oligonucleotide
  Antisense strand to SEQ ID NO: 1194134
aauaucagaggaagacaag

SEQ ID NO: 1194136 - RNA, 19 nt, Artificial Sequence
  Description of Artificial Sequence: Synthetic oligonucleotide
  Sense strand starting at position 2049 of SEQ ID NO: 916917
agcugagguuccucuaauc

SEQ ID NO: 1194137 - RNA, 19 nt, Artificial Sequence
  Description of Artificial Sequence: Synthetic oligonucleotide
  Antisense strand to SEQ ID NO: 1194136
gauuagaggaaccucagcu

SEQ ID NO: 1194138 - RNA, 19 nt, Artificial Sequence
  Description of Artificial Sequence: Synthetic oligonucleotide
  Sense strand starting at position 2280 of SEQ ID NO: 916917
aguuauucugcguacucaa

SEQ ID NO: 1194139 - RNA, 19 nt, Artificial Sequence
  Description of Artificial Sequence: Synthetic oligonucleotide
  Antisense strand to SEQ ID NO: 1194138
uugaguacgcagaauaacu

SEQ ID NO: 1194140 - RNA, 19 nt, Artificial Sequence
  Description of Artificial Sequence: Synthetic oligonucleotide
  Sense strand starting at position 2441 of SEQ ID NO: 916917
aaagguuggaggugugauc

SEQ ID NO: 1194141 - RNA, 19 nt, Artificial Sequence
  Description of Artificial Sequence: Synthetic oligonucleotide
  Antisense strand to SEQ ID NO: 1194140
gaucacaccuccaaccuuu

SEQ ID NO: 1194142 - RNA, 19 nt, Artificial Sequence
  Description of Artificial Sequence: Synthetic oligonucleotide
  Sense strand starting at position 2503 of SEQ ID NO: 916917
cguuucuuucagugagaga

SEQ ID NO: 1194143 - RNA, 19 nt, Artificial Sequence
  Description of Artificial Sequence: Synthetic oligonucleotide
  Antisense strand to SEQ ID NO: 1194142
ucucucacugaaagaaacg

SEQ ID NO: 1194144 - RNA, 19 nt, Artificial Sequence
  Description of Artificial Sequence: Synthetic oligonucleotide
  Sense strand starting at position 2535 of SEQ ID NO: 916917
ugugaauaaccaugacgca

SEQ ID NO: 1194145 - RNA, 19 nt, Artificial Sequence
  Description of Artificial Sequence: Synthetic oligonucleotide
  Antisense strand to SEQ ID NO: 1194144
ugcgucaugguuauucaca

SEQ ID NO: 1194146 - RNA, 19 nt, Artificial Sequence
  Description of Artificial Sequence: Synthetic oligonucleotide
  Sense strand starting at position 2705 of SEQ ID NO: 916917
cgauccucccuacggauua

SEQ ID NO: 1194147 - RNA, 19 nt, Artificial Sequence
  Description of Artificial Sequence: Synthetic oligonucleotide
  Antisense strand to SEQ ID NO: 1194146
uaauccguagggaggaucg

SEQ ID NO: 1194148 - RNA, 19 nt, Artificial Sequence
  Description of Artificial Sequence: Synthetic oligonucleotide
  Sense strand starting at position 3010 of SEQ ID NO: 916917
augcaucaugcgugggaaa

SEQ ID NO: 1194149 - RNA, 19 nt, Artificial Sequence
  Description of Artificial Sequence: Synthetic oligonucleotide
  Antisense strand to SEQ ID NO: 1194148
uuucccacgcaugaugcau

SEQ ID NO: 1194150 - RNA, 19 nt, Artificial Sequence
  Description of Artificial Sequence: Synthetic oligonucleotide
  Sense strand starting at position 3012 of SEQ ID NO: 916917
gcaucaugcgugggaaaga

SEQ ID NO: 1194151 - RNA, 19 nt, Artificial Sequence
  Description of Artificial Sequence: Synthetic oligonucleotide
  Antisense strand to SEQ ID NO: 1194150
ucuuucccacgcaugaugc

SEQ ID NO: 1194152 - RNA, 19 nt, Artificial Sequence
  Description of Artificial Sequence: Synthetic oligonucleotide
  Sense strand starting at position 3262 of SEQ ID NO: 916917
guaaguuucucaucaacag

SEQ ID NO: 1194153 - RNA, 19 nt, Artificial Sequence
  Description of Artificial Sequence: Synthetic oligonucleotide
  Antisense strand to SEQ ID NO: 1194152
cuguugaugagaaacuuac

SEQ ID NO: 1194154 - RNA, 19 nt, Artificial Sequence
  Description of Artificial Sequence: Synthetic oligonucleotide
  Sense strand starting at position 3282 of SEQ ID NO: 916917
acuauuauuuacugaggau

SEQ ID NO: 1194155 - RNA, 19 nt, Artificial Sequence
  Description of Artificial Sequence: Synthetic oligonucleotide
  Antisense strand to SEQ ID NO: 1194154
auccucaguaaauaauagu

SEQ ID NO: 1194156 - RNA, 19 nt, Artificial Sequence
  Description of Artificial Sequence: Synthetic oligonucleotide
  Sense strand starting at position 3344 of SEQ ID NO: 916917
gucauugaacucuggcagu

SEQ ID NO: 1194157 - RNA, 19 nt, Artificial Sequence
  Description of Artificial Sequence: Synthetic oligonucleotide
  Antisense strand to SEQ ID NO: 1194156
acugccagaguucaaugac

SEQ ID NO: 1194158 - RNA, 19 nt, Artificial Sequence
  Description of Artificial Sequence: Synthetic oligonucleotide
  Sense strand starting at position 3357 of SEQ ID NO: 916917
ggcaguucugcaggguaag

SEQ ID NO: 1194159 - RNA, 19 nt, Artificial Sequence
  Description of Artificial Sequence: Synthetic oligonucleotide
  Antisense strand to SEQ ID NO: 1194158
cuuacccugcagaacugcc

SEQ ID NO: 1194160 - RNA, 19 nt, Artificial Sequence
  Description of Artificial Sequence: Synthetic oligonucleotide
  Sense strand starting at position 3399 of SEQ ID NO: 916917
aaggaagcccgucaacaau

SEQ ID NO: 1194161 - RNA, 19 nt, Artificial Sequence
  Description of Artificial Sequence: Synthetic oligonucleotide
  Antisense strand to SEQ ID NO: 1194160
auuguugacgggcuuccuu

SEQ ID NO: 1194162 - RNA, 19 nt, Artificial Sequence
  Description of Artificial Sequence: Synthetic oligonucleotide
  Sense strand starting at position 3470 of SEQ ID NO: 916917
cgcuuuaagguuuaagaaa

SEQ ID NO: 1194163 - RNA, 19 nt, Artificial Sequence
  Description of Artificial Sequence: Synthetic oligonucleotide
  Antisense strand to SEQ ID NO: 1194162
uuucuuaaaccuuaaagcg

SEQ ID NO: 1194164 - RNA, 19 nt, Artificial Sequence
  Description of Artificial Sequence: Synthetic oligonucleotide
  Sense strand starting at position 3502 of SEQ ID NO: 916917
ggugaugacucauuccugu

SEQ ID NO: 1194165 - RNA, 19 nt, Artificial Sequence
  Description of Artificial Sequence: Synthetic oligonucleotide
  Antisense strand to SEQ ID NO: 1194164
acaggaaugagucaucacc

SEQ ID NO: 1194166 - RNA, 19 nt, Artificial Sequence
  Description of Artificial Sequence: Synthetic oligonucleotide
  Sense strand starting at position 3573 of SEQ ID NO: 916917
ucgagacuagcauggucaa

SEQ ID NO: 1194167 - RNA, 19 nt, Artificial Sequence
  Description of Artificial Sequence: Synthetic oligonucleotide
  Antisense strand to SEQ ID NO: 1194166
uugaccaugcuagucucga

SEQ ID NO: 1194168 - RNA, 19 nt, Artificial Sequence
  Description of Artificial Sequence: Synthetic oligonucleotide
  Sense strand starting at position 112 of SEQ ID NO: 916918
augucugucccugauacaa

SEQ ID NO: 1194169 - RNA, 19 nt, Artificial Sequence
  Description of Artificial Sequence: Synthetic oligonucleotide
  Antisense strand to SEQ ID NO: 1194168
uuguaucagggacagacau

SEQ ID NO: 1194170 - RNA, 19 nt, Artificial Sequence
  Description of Artificial Sequence: Synthetic oligonucleotide
  Sense strand starting at position 161 of SEQ ID NO: 916918
aguuccuguggucaguaau

SEQ ID NO: 1194171 - RNA, 19 nt, Artificial Sequence
  Description of Artificial Sequence: Synthetic oligonucleotide
  Antisense strand to SEQ ID NO: 1194170
auuacugaccacaggaacu

SEQ ID NO: 1194172 - RNA, 19 nt, Artificial Sequence
  Description of Artificial Sequence: Synthetic oligonucleotide
  Sense strand starting at position 173 of SEQ ID NO: 916918
caguaauagcaguaaggau

SEQ ID NO: 1194173 - RNA, 19 nt, Artificial Sequence
  Description of Artificial Sequence: Synthetic oligonucleotide
  Antisense strand to SEQ ID NO: 1194172
auccuuacugcuauuacug

SEQ ID NO: 1194174 - RNA, 19 nt, Artificial Sequence
  Description of Artificial Sequence: Synthetic oligonucleotide
  Sense strand starting at position 181 of SEQ ID NO: 916918
gcaguaaggaugcaauaug

SEQ ID NO: 1194175 - RNA, 19 nt, Artificial Sequence
  Description of Artificial Sequence: Synthetic oligonucleotide
  Antisense strand to SEQ ID NO: 1194174
cauauugcauccuuacugc

SEQ ID NO: 1194176 - RNA, 19 nt, Artificial Sequence
  Description of Artificial Sequence: Synthetic oligonucleotide
  Sense strand starting at position 233 of SEQ ID NO: 916918
ucuugauucgaccacauuc

SEQ ID NO: 1194177 - RNA, 19 nt, Artificial Sequence
  Description of Artificial Sequence: Synthetic oligonucleotide
  Antisense strand to SEQ ID NO: 1194176
gaauguggucgaaucaaga

SEQ ID NO: 1194178 - RNA, 19 nt, Artificial Sequence
  Description of Artificial Sequence: Synthetic oligonucleotide
  Sense strand starting at position 252 of SEQ ID NO: 916918
aaucucugggcuugagaau

SEQ ID NO: 1194179 - RNA, 19 nt, Artificial Sequence
  Description of Artificial Sequence: Synthetic oligonucleotide
  Antisense strand to SEQ ID NO: 1194178
auucucaagcccagagauu

SEQ ID NO: 1194180 - RNA, 19 nt, Artificial Sequence
  Description of Artificial Sequence: Synthetic oligonucleotide
  Sense strand starting at position 263 of SEQ ID NO: 916918
uugagaaugucaucuaacu

SEQ ID NO: 1194181 - RNA, 19 nt, Artificial Sequence
  Description of Artificial Sequence: Synthetic oligonucleotide
  Antisense strand to SEQ ID NO: 1194180
aguuagaugacauucucaa

SEQ ID NO: 1194182 - RNA, 19 nt, Artificial Sequence
  Description of Artificial Sequence: Synthetic oligonucleotide
  Sense strand starting at position 335 of SEQ ID NO: 916918
uguuguuucguggcucaaa

SEQ ID NO: 1194183 - RNA, 19 nt, Artificial Sequence
  Description of Artificial Sequence: Synthetic oligonucleotide
  Antisense strand to SEQ ID NO: 1194182
uuugagccacgaaacaaca

SEQ ID NO: 1194184 - RNA, 19 nt, Artificial Sequence
  Description of Artificial Sequence: Synthetic oligonucleotide
  Sense strand starting at position 343 of SEQ ID NO: 916918
cguggcucaaaugaaauaa

SEQ ID NO: 1194185 - RNA, 19 nt, Artificial Sequence
  Description of Artificial Sequence: Synthetic oligonucleotide
  Antisense strand to SEQ ID NO: 1194184
uuauuucauuugagccacg

SEQ ID NO: 1194186 - RNA, 19 nt, Artificial Sequence
  Description of Artificial Sequence: Synthetic oligonucleotide
  Sense strand starting at position 361 of SEQ ID NO: 916918
augcaugugaaagaguuua

SEQ ID NO: 1194187 - RNA, 19 nt, Artificial Sequence
  Description of Artificial Sequence: Synthetic oligonucleotide
  Antisense strand to SEQ ID NO: 1194186
uaaacucuuucacaugcau

SEQ ID NO: 1194188 - RNA, 19 nt, Artificial Sequence
  Description of Artificial Sequence: Synthetic oligonucleotide
  Sense strand starting at position 372 of SEQ ID NO: 916918
agaguuuaauaugcuacaa

SEQ ID NO: 1194189 - RNA, 19 nt, Artificial Sequence
  Description of Artificial Sequence: Synthetic oligonucleotide
  Antisense strand to SEQ ID NO: 1194188
uuguagcauauuaaacucu

SEQ ID NO: 1194190 - RNA, 19 nt, Artificial Sequence
  Description of Artificial Sequence: Synthetic oligonucleotide
  Sense strand starting at position 384 of SEQ ID NO: 916918
gcuacaagacacuguaaua

SEQ ID NO: 1194191 - RNA, 19 nt, Artificial Sequence
  Description of Artificial Sequence: Synthetic oligonucleotide
  Antisense strand to SEQ ID NO: 1194190
uauuacagugucuuguagc

SEQ ID NO: 1194192 - RNA, 19 nt, Artificial Sequence
  Description of Artificial Sequence: Synthetic oligonucleotide
  Sense strand starting at position 437 of SEQ ID NO: 916918
ggcagugugguucaaugag

SEQ ID NO: 1194193 - RNA, 19 nt, Artificial Sequence
  Description of Artificial Sequence: Synthetic oligonucleotide
  Antisense strand to SEQ ID NO: 1194192
cucauugaaccacacugcc

SEQ ID NO: 1194194 - RNA, 19 nt, Artificial Sequence
  Description of Artificial Sequence: Synthetic oligonucleotide
  Sense strand starting at position 462 of SEQ ID NO: 916918
gcagauauagucuagcaua

SEQ ID NO: 1194195 - RNA, 19 nt, Artificial Sequence
  Description of Artificial Sequence: Synthetic oligonucleotide
  Antisense strand to SEQ ID NO: 1194194
uaugcuagacuauaucugc

SEQ ID NO: 1194196 - RNA, 19 nt, Artificial Sequence
  Description of Artificial Sequence: Synthetic oligonucleotide
  Sense strand starting at position 512 of SEQ ID NO: 916918
cacucaugacccuggguga

SEQ ID NO: 1194197 - RNA, 19 nt, Artificial Sequence
  Description of Artificial Sequence: Synthetic oligonucleotide
  Antisense strand to SEQ ID NO: 1194196
ucacccagggucaugagug

SEQ ID NO: 1194198 - RNA, 19 nt, Artificial Sequence
  Description of Artificial Sequence: Synthetic oligonucleotide
  Sense strand starting at position 544 of SEQ ID NO: 916918
ucccucauuugagaaguga

SEQ ID NO: 1194199 - RNA, 19 nt, Artificial Sequence
  Description of Artificial Sequence: Synthetic oligonucleotide
  Antisense strand to SEQ ID NO: 1194198
ucacuucucaaaugaggga

SEQ ID NO: 1194200 - RNA, 19 nt, Artificial Sequence
  Description of Artificial Sequence: Synthetic oligonucleotide
  Sense strand starting at position 697 of SEQ ID NO: 916918
ccaaguaugcuacauguuu

SEQ ID NO: 1194201 - RNA, 19 nt, Artificial Sequence
  Description of Artificial Sequence: Synthetic oligonucleotide
  Antisense strand to SEQ ID NO: 1194200
aaacauguagcauacuugg

SEQ ID NO: 1194202 - RNA, 19 nt, Artificial Sequence
  Description of Artificial Sequence: Synthetic oligonucleotide
  Sense strand starting at position 819 of SEQ ID NO: 916918
uuuagacuccaguggauua

SEQ ID NO: 1194203 - RNA, 19 nt, Artificial Sequence
  Description of Artificial Sequence: Synthetic oligonucleotide
  Antisense strand to SEQ ID NO: 1194202
uaauccacuggagucuaaa

SEQ ID NO: 1194204 - RNA, 19 nt, Artificial Sequence
  Description of Artificial Sequence: Synthetic oligonucleotide
  Sense strand starting at position 897 of SEQ ID NO: 916918
aauggagccucaguuuaaa

SEQ ID NO: 1194205 - RNA, 19 nt, Artificial Sequence
  Description of Artificial Sequence: Synthetic oligonucleotide
  Antisense strand to SEQ ID NO: 1194204
uuuaaacugaggcuccauu

SEQ ID NO: 1194206 - RNA, 19 nt, Artificial Sequence
  Description of Artificial Sequence: Synthetic oligonucleotide
  Sense strand starting at position 1264 of SEQ ID NO: 916918
gcgcgaguuagaagaguga

SEQ ID NO: 1194207 - RNA, 19 nt, Artificial Sequence
  Description of Artificial Sequence: Synthetic oligonucleotide
  Antisense strand to SEQ ID NO: 1194206
ucacucuucuaacucgcgc

SEQ ID NO: 1194208 - RNA, 19 nt, Artificial Sequence
  Description of Artificial Sequence: Synthetic oligonucleotide
  Sense strand starting at position 1334 of SEQ ID NO: 916918
uucgcauuccuguuuggca

SEQ ID NO: 1194209 - RNA, 19 nt, Artificial Sequence
  Description of Artificial Sequence: Synthetic oligonucleotide
  Antisense strand to SEQ ID NO: 1194208
ugccaaacaggaaugcgaa

SEQ ID NO: 1194210 - RNA, 19 nt, Artificial Sequence
  Description of Artificial Sequence: Synthetic oligonucleotide
  Sense strand starting at position 1750 of SEQ ID NO: 916918
ugguauucgaauuauggag

SEQ ID NO: 1194211 - RNA, 19 nt, Artificial Sequence
  Description of Artificial Sequence: Synthetic oligonucleotide
  Antisense strand to SEQ ID NO: 1194210
cuccauaauucgaauacca

SEQ ID NO: 1194212 - RNA, 19 nt, Artificial Sequence
  Description of Artificial Sequence: Synthetic oligonucleotide
  Sense strand starting at position 1756 of SEQ ID NO: 916918
ucgaauuauggaggcugaa

SEQ ID NO: 1194213 - RNA, 19 nt, Artificial Sequence
  Description of Artificial Sequence: Synthetic oligonucleotide
  Antisense strand to SEQ ID NO: 1194212
uucagccuccauaauucga

SEQ ID NO: 1194214 - RNA, 19 nt, Artificial Sequence
  Description of Artificial Sequence: Synthetic oligonucleotide
  Sense strand starting at position 2071 of SEQ ID NO: 916918
caaggugaugaauguugaa

SEQ ID NO: 1194215 - RNA, 19 nt, Artificial Sequence
  Description of Artificial Sequence: Synthetic oligonucleotide
  Antisense strand to SEQ ID NO: 1194214
uucaacauucaucaccuug

SEQ ID NO: 1194216 - RNA, 19 nt, Artificial Sequence
  Description of Artificial Sequence: Synthetic oligonucleotide
  Sense strand starting at position 2087 of SEQ ID NO: 916918
gaaaucguuugagcuuaau

SEQ ID NO: 1194217 - RNA, 19 nt, Artificial Sequence
  Description of Artificial Sequence: Synthetic oligonucleotide
  Antisense strand to SEQ ID NO: 1194216
auuaagcucaaacgauuuc

SEQ ID NO: 1194218 - RNA, 19 nt, Artificial Sequence
  Description of Artificial Sequence: Synthetic oligonucleotide
  Sense strand starting at position 2090 of SEQ ID NO: 916918
aucguuugagcuuaauuaa

SEQ ID NO: 1194219 - RNA, 19 nt, Artificial Sequence
  Description of Artificial Sequence: Synthetic oligonucleotide
  Antisense strand to SEQ ID NO: 1194218
uuaauuaagcucaaacgau

SEQ ID NO: 1194220 - RNA, 19 nt, Artificial Sequence
  Description of Artificial Sequence: Synthetic oligonucleotide
  Sense strand starting at position 2093 of SEQ ID NO: 916918
guuugagcuuaauuaauac

SEQ ID NO: 1194221 - RNA, 19 nt, Artificial Sequence
  Description of Artificial Sequence: Synthetic oligonucleotide
  Antisense strand to SEQ ID NO: 1194220
guauuaauuaagcucaaac

SEQ ID NO: 1194222 - RNA, 19 nt, Artificial Sequence
  Description of Artificial Sequence: Synthetic oligonucleotide
  Sense strand starting at position 2177 of SEQ ID NO: 916918
guuguuacuuuccuacaga

SEQ ID NO: 1194223 - RNA, 19 nt, Artificial Sequence
  Description of Artificial Sequence: Synthetic oligonucleotide
  Antisense strand to SEQ ID NO: 1194222
ucuguaggaaaguaacaac

SEQ ID NO: 1194224 - RNA, 19 nt, Artificial Sequence
  Description of Artificial Sequence: Synthetic oligonucleotide
  Sense strand starting at position 2223 of SEQ ID NO: 916918
uguaauccagcugacaaau

SEQ ID NO: 1194225 - RNA, 19 nt, Artificial Sequence
  Description of Artificial Sequence: Synthetic oligonucleotide
  Antisense strand to SEQ ID NO: 1194224
auuugucagcuggauuaca

SEQ ID NO: 1194226 - RNA, 19 nt, Artificial Sequence
  Description of Artificial Sequence: Synthetic oligonucleotide
  Sense strand starting at position 2527 of SEQ ID NO: 916918
cucauuauguuguccaaac

SEQ ID NO: 1194227 - RNA, 19 nt, Artificial Sequence
  Description of Artificial Sequence: Synthetic oligonucleotide
  Antisense strand to SEQ ID NO: 1194226
guuuggacaacauaaugag

SEQ ID NO: 1194228 - RNA, 19 nt, Artificial Sequence
  Description of Artificial Sequence: Synthetic oligonucleotide
  Sense strand starting at position 2528 of SEQ ID NO: 916918
ucauuauguuguccaaacu

SEQ ID NO: 1194229 - RNA, 19 nt, Artificial Sequence
  Description of Artificial Sequence: Synthetic oligonucleotide
  Antisense strand to SEQ ID NO: 1194228
aguuuggacaacauaauga

SEQ ID NO: 1194230 - RNA, 19 nt, Artificial Sequence
  Description of Artificial Sequence: Synthetic oligonucleotide
  Sense strand starting at position 3038 of SEQ ID NO: 916918
uacaaugugcuaggauaua

SEQ ID NO: 1194231 - RNA, 19 nt, Artificial Sequence
  Description of Artificial Sequence: Synthetic oligonucleotide
  Antisense strand to SEQ ID NO: 1194230
uauauccuagcacauugua

SEQ ID NO: 1194232 - RNA, 19 nt, Artificial Sequence
  Description of Artificial Sequence: Synthetic oligonucleotide
  Sense strand starting at position 3208 of SEQ ID NO: 916918
uuauaucuccuuugguaug

SEQ ID NO: 1194233 - RNA, 19 nt, Artificial Sequence
  Description of Artificial Sequence: Synthetic oligonucleotide
  Antisense strand to SEQ ID NO: 1194232
cauaccaaaggagauauaa

SEQ ID NO: 1194234 - RNA, 19 nt, Artificial Sequence
  Description of Artificial Sequence: Synthetic oligonucleotide
  Sense strand starting at position 3220 of SEQ ID NO: 916918
ugguauggucauuguaaca

SEQ ID NO: 1194235 - RNA, 19 nt, Artificial Sequence
  Description of Artificial Sequence: Synthetic oligonucleotide
  Antisense strand to SEQ ID NO: 1194234
uguuacaaugaccauacca

SEQ ID NO: 1194236 - RNA, 19 nt, Artificial Sequence
  Description of Artificial Sequence: Synthetic oligonucleotide
  Sense strand starting at position 3265 of SEQ ID NO: 916918
ugauguugccaagauguua

SEQ ID NO: 1194237 - RNA, 19 nt, Artificial Sequence
  Description of Artificial Sequence: Synthetic oligonucleotide
  Antisense strand to SEQ ID NO: 1194236
uaacaucuuggcaacauca

SEQ ID NO: 1194238 - RNA, 19 nt, Artificial Sequence
  Description of Artificial Sequence: Synthetic oligonucleotide
  Sense strand starting at position 3824 of SEQ ID NO: 916918
ggaaucaaguauguauugu

SEQ ID NO: 1194239 - RNA, 19 nt, Artificial Sequence
  Description of Artificial Sequence: Synthetic oligonucleotide
  Antisense strand to SEQ ID NO: 1194238
acaauacauacuugauucc

SEQ ID NO: 1194240 - RNA, 19 nt, Artificial Sequence
  Description of Artificial Sequence: Synthetic oligonucleotide
  Sense strand starting at position 3859 of SEQ ID NO: 916918
accuauuacugaguauucu

SEQ ID NO: 1194241 - RNA, 19 nt, Artificial Sequence
  Description of Artificial Sequence: Synthetic oligonucleotide
  Antisense strand to SEQ ID NO: 1194240
agaauacucaguaauaggu

SEQ ID NO: 1194242 - RNA, 19 nt, Artificial Sequence
  Description of Artificial Sequence: Synthetic oligonucleotide
  Sense strand starting at position 3863 of SEQ ID NO: 916918
auuacugaguauucuguaa

SEQ ID NO: 1194243 - RNA, 19 nt, Artificial Sequence
  Description of Artificial Sequence: Synthetic oligonucleotide
  Antisense strand to SEQ ID NO: 1194242
uuacagaauacucaguaau

SEQ ID NO: 1194244 - RNA, 19 nt, Artificial Sequence
  Description of Artificial Sequence: Synthetic oligonucleotide
  Sense strand starting at position 3867 of SEQ ID NO: 916918
cugaguauucuguaacaaa

SEQ ID NO: 1194245 - RNA, 19 nt, Artificial Sequence
  Description of Artificial Sequence: Synthetic oligonucleotide
  Antisense strand to SEQ ID NO: 1194244
uuuguuacagaauacucag

SEQ ID NO: 1194246 - RNA, 19 nt, Artificial Sequence
  Description of Artificial Sequence: Synthetic oligonucleotide
  Sense strand starting at position 3888 of SEQ ID NO: 916918
caugacaggugcuuuacau

SEQ ID NO: 1194247 - RNA, 19 nt, Artificial Sequence
  Description of Artificial Sequence: Synthetic oligonucleotide
  Antisense strand to SEQ ID NO: 1194246
auguaaagcaccugucaug

SEQ ID NO: 1194248 - RNA, 19 nt, Artificial Sequence
  Description of Artificial Sequence: Synthetic oligonucleotide
  Sense strand starting at position 28 of SEQ ID NO: 916919
ggaacacauuugcaaauga

SEQ ID NO: 1194249 - RNA, 19 nt, Artificial Sequence
  Description of Artificial Sequence: Synthetic oligonucleotide
  Antisense strand to SEQ ID NO: 1194248
ucauuugcaaauguguucc

SEQ ID NO: 1194250 - RNA, 19 nt, Artificial Sequence
  Description of Artificial Sequence: Synthetic oligonucleotide
  Sense strand starting at position 146 of SEQ ID NO: 916919
cauugaggugccugaaaua

SEQ ID NO: 1194251 - RNA, 19 nt, Artificial Sequence
  Description of Artificial Sequence: Synthetic oligonucleotide
  Antisense strand to SEQ ID NO: 1194250
uauuucaggcaccucaaug

SEQ ID NO: 1194252 - RNA, 19 nt, Artificial Sequence
  Description of Artificial Sequence: Synthetic oligonucleotide
  Sense strand starting at position 236 of SEQ ID NO: 916919
ugggaauucuuaguacaaa

SEQ ID NO: 1194253 - RNA, 19 nt, Artificial Sequence
  Description of Artificial Sequence: Synthetic oligonucleotide
  Antisense strand to SEQ ID NO: 1194252
uuuguacuaagaauuccca

SEQ ID NO: 1194254 - RNA, 19 nt, Artificial Sequence
  Description of Artificial Sequence: Synthetic oligonucleotide
  Sense strand starting at position 349 of SEQ ID NO: 916919
augucugucccugauacaa

SEQ ID NO: 1194255 - RNA, 19 nt, Artificial Sequence
  Description of Artificial Sequence: Synthetic oligonucleotide
  Antisense strand to SEQ ID NO: 1194254
uuguaucagggacagacau

SEQ ID NO: 1194256 - RNA, 19 nt, Artificial Sequence
  Description of Artificial Sequence: Synthetic oligonucleotide
  Sense strand starting at position 398 of SEQ ID NO: 916919
aguuccuguggucaguaau

SEQ ID NO: 1194257 - RNA, 19 nt, Artificial Sequence
  Description of Artificial Sequence: Synthetic oligonucleotide
  Antisense strand to SEQ ID NO: 1194256
auuacugaccacaggaacu

SEQ ID NO: 1194258 - RNA, 19 nt, Artificial Sequence
  Description of Artificial Sequence: Synthetic oligonucleotide
  Sense strand starting at position 410 of SEQ ID NO: 916919
caguaauagcaguaaggau

SEQ ID NO: 1194259 - RNA, 19 nt, Artificial Sequence
  Description of Artificial Sequence: Synthetic oligonucleotide
  Antisense strand to SEQ ID NO: 1194258
auccuuacugcuauuacug

SEQ ID NO: 1194260 - RNA, 19 nt, Artificial Sequence
  Description of Artificial Sequence: Synthetic oligonucleotide
  Sense strand starting at position 418 of SEQ ID NO: 916919
gcaguaaggaugcaauaug

SEQ ID NO: 1194261 - RNA, 19 nt, Artificial Sequence
  Description of Artificial Sequence: Synthetic oligonucleotide
  Antisense strand to SEQ ID NO: 1194260
cauauugcauccuuacugc

SEQ ID NO: 1194262 - RNA, 19 nt, Artificial Sequence
  Description of Artificial Sequence: Synthetic oligonucleotide
  Sense strand starting at position 470 of SEQ ID NO: 916919
ucuugauucgaccacauuc

SEQ ID NO: 1194263 - RNA, 19 nt, Artificial Sequence
  Description of Artificial Sequence: Synthetic oligonucleotide
  Antisense strand to SEQ ID NO: 1194262
gaauguggucgaaucaaga

SEQ ID NO: 1194264 - RNA, 19 nt, Artificial Sequence
  Description of Artificial Sequence: Synthetic oligonucleotide
  Sense strand starting at position 489 of SEQ ID NO: 916919
aaucucugggcuugagaau

SEQ ID NO: 1194265 - RNA, 19 nt, Artificial Sequence
  Description of Artificial Sequence: Synthetic oligonucleotide
  Antisense strand to SEQ ID NO: 1194264
auucucaagcccagagauu

SEQ ID NO: 1194266 - RNA, 19 nt, Artificial Sequence
  Description of Artificial Sequence: Synthetic oligonucleotide
  Sense strand starting at position 500 of SEQ ID NO: 916919
uugagaaugucaucuaacu

SEQ ID NO: 1194267 - RNA, 19 nt, Artificial Sequence
  Description of Artificial Sequence: Synthetic oligonucleotide
  Antisense strand to SEQ ID NO: 1194266
aguuagaugacauucucaa

SEQ ID NO: 1194268 - RNA, 19 nt, Artificial Sequence
  Description of Artificial Sequence: Synthetic oligonucleotide
  Sense strand starting at position 572 of SEQ ID NO: 916919
uguuguuucguggcucaaa

SEQ ID NO: 1194269 - RNA, 19 nt, Artificial Sequence
  Description of Artificial Sequence: Synthetic oligonucleotide
  Antisense strand to SEQ ID NO: 1194268
uuugagccacgaaacaaca

SEQ ID NO: 1194270 - RNA, 19 nt, Artificial Sequence
  Description of Artificial Sequence: Synthetic oligonucleotide
  Sense strand starting at position 580 of SEQ ID NO: 916919
cguggcucaaaugaaauaa

SEQ ID NO: 1194271 - RNA, 19 nt, Artificial Sequence
  Description of Artificial Sequence: Synthetic oligonucleotide
  Antisense strand to SEQ ID NO: 1194270
uuauuucauuugagccacg

SEQ ID NO: 1194272 - RNA, 19 nt, Artificial Sequence
  Description of Artificial Sequence: Synthetic oligonucleotide
  Sense strand starting at position 598 of SEQ ID NO: 916919
augcaugugaaagaguuua

SEQ ID NO: 1194273 - RNA, 19 nt, Artificial Sequence
  Description of Artificial Sequence: Synthetic oligonucleotide
  Antisense strand to SEQ ID NO: 1194272
uaaacucuuucacaugcau

SEQ ID NO: 1194274 - RNA, 19 nt, Artificial Sequence
  Description of Artificial Sequence: Synthetic oligonucleotide
  Sense strand starting at position 609 of SEQ ID NO: 916919
agaguuuaauaugcuacaa

SEQ ID NO: 1194275 - RNA, 19 nt, Artificial Sequence
  Description of Artificial Sequence: Synthetic oligonucleotide
  Antisense strand to SEQ ID NO: 1194274
uuguagcauauuaaacucu

SEQ ID NO: 1194276 - RNA, 19 nt, Artificial Sequence
  Description of Artificial Sequence: Synthetic oligonucleotide
  Sense strand starting at position 621 of SEQ ID NO: 916919
gcuacaagacacuguaaua

SEQ ID NO: 1194277 - RNA, 19 nt, Artificial Sequence
  Description of Artificial Sequence: Synthetic oligonucleotide
  Antisense strand to SEQ ID NO: 1194276
uauuacagugucuuguagc

SEQ ID NO: 1194278 - RNA, 19 nt, Artificial Sequence
  Description of Artificial Sequence: Synthetic oligonucleotide
  Sense strand starting at position 674 of SEQ ID NO: 916919
ggcagugugguucaaugag

SEQ ID NO: 1194279 - RNA, 19 nt, Artificial Sequence
  Description of Artificial Sequence: Synthetic oligonucleotide
  Antisense strand to SEQ ID NO: 1194278
cucauugaaccacacugcc

SEQ ID NO: 1194280 - RNA, 19 nt, Artificial Sequence
  Description of Artificial Sequence: Synthetic oligonucleotide
  Sense strand starting at position 699 of SEQ ID NO: 916919
gcagauauagucuagcaua

SEQ ID NO: 1194281 - RNA, 19 nt, Artificial Sequence
  Description of Artificial Sequence: Synthetic oligonucleotide
  Antisense strand to SEQ ID NO: 1194280
uaugcuagacuauaucugc

SEQ ID NO: 1194282 - RNA, 19 nt, Artificial Sequence
  Description of Artificial Sequence: Synthetic oligonucleotide
  Sense strand starting at position 749 of SEQ ID NO: 916919
cacucaugacccuggguga

SEQ ID NO: 1194283 - RNA, 19 nt, Artificial Sequence
  Description of Artificial Sequence: Synthetic oligonucleotide
  Antisense strand to SEQ ID NO: 1194282
ucacccagggucaugagug

SEQ ID NO: 1194284 - RNA, 19 nt, Artificial Sequence
  Description of Artificial Sequence: Synthetic oligonucleotide
  Sense strand starting at position 781 of SEQ ID NO: 916919
ucccucauuugagaaguga

SEQ ID NO: 1194285 - RNA, 19 nt, Artificial Sequence
  Description of Artificial Sequence: Synthetic oligonucleotide
  Antisense strand to SEQ ID NO: 1194284
ucacuucucaaaugaggga

SEQ ID NO: 1194286 - RNA, 19 nt, Artificial Sequence
  Description of Artificial Sequence: Synthetic oligonucleotide
  Sense strand starting at position 934 of SEQ ID NO: 916919
ccaaguaugcuacauguuu

SEQ ID NO: 1194287 - RNA, 19 nt, Artificial Sequence
  Description of Artificial Sequence: Synthetic oligonucleotide
  Antisense strand to SEQ ID NO: 1194286
aaacauguagcauacuugg

SEQ ID NO: 1194288 - RNA, 19 nt, Artificial Sequence
  Description of Artificial Sequence: Synthetic oligonucleotide
  Sense strand starting at position 1056 of SEQ ID NO: 916919
uuuagacuccaguggauua

SEQ ID NO: 1194289 - RNA, 19 nt, Artificial Sequence
  Description of Artificial Sequence: Synthetic oligonucleotide
  Antisense strand to SEQ ID NO: 1194288
uaauccacuggagucuaaa

SEQ ID NO: 1194290 - RNA, 19 nt, Artificial Sequence
  Description of Artificial Sequence: Synthetic oligonucleotide
  Sense strand starting at position 1134 of SEQ ID NO: 916919
aauggagccucaguuuaaa

SEQ ID NO: 1194291 - RNA, 19 nt, Artificial Sequence
  Description of Artificial Sequence: Synthetic oligonucleotide
  Antisense strand to SEQ ID NO: 1194290
uuuaaacugaggcuccauu

SEQ ID NO: 1194292 - RNA, 19 nt, Artificial Sequence
  Description of Artificial Sequence: Synthetic oligonucleotide
  Sense strand starting at position 1501 of SEQ ID NO: 916919
gcgcgaguuagaagaguga

SEQ ID NO: 1194293 - RNA, 19 nt, Artificial Sequence
  Description of Artificial Sequence: Synthetic oligonucleotide
  Antisense strand to SEQ ID NO: 1194292
ucacucuucuaacucgcgc

SEQ ID NO: 1194294 - RNA, 19 nt, Artificial Sequence
  Description of Artificial Sequence: Synthetic oligonucleotide
  Sense strand starting at position 1571 of SEQ ID NO: 916919
uucgcauuccuguuuggca

SEQ ID NO: 1194295 - RNA, 19 nt, Artificial Sequence
  Description of Artificial Sequence: Synthetic oligonucleotide
  Antisense strand to SEQ ID NO: 1194294
ugccaaacaggaaugcgaa

SEQ ID NO: 1194296 - RNA, 19 nt, Artificial Sequence
  Description of Artificial Sequence: Synthetic oligonucleotide
  Sense strand starting at position 1987 of SEQ ID NO: 916919
ugguauucgaauuauggag

SEQ ID NO: 1194297 - RNA, 19 nt, Artificial Sequence
  Description of Artificial Sequence: Synthetic oligonucleotide
  Antisense strand to SEQ ID NO: 1194296
cuccauaauucgaauacca

SEQ ID NO: 1194298 - RNA, 19 nt, Artificial Sequence
  Description of Artificial Sequence: Synthetic oligonucleotide
  Sense strand starting at position 1993 of SEQ ID NO: 916919
ucgaauuauggaggcugaa

SEQ ID NO: 1194299 - RNA, 19 nt, Artificial Sequence
  Description of Artificial Sequence: Synthetic oligonucleotide
  Antisense strand to SEQ ID NO: 1194298
uucagccuccauaauucga

SEQ ID NO: 1194300 - RNA, 19 nt, Artificial Sequence
  Description of Artificial Sequence: Synthetic oligonucleotide
  Sense strand starting at position 2308 of SEQ ID NO: 916919
caaggugaugaauguugaa

SEQ ID NO: 1194301 - RNA, 19 nt, Artificial Sequence
  Description of Artificial Sequence: Synthetic oligonucleotide
  Antisense strand to SEQ ID NO: 1194300
uucaacauucaucaccuug

SEQ ID NO: 1194302 - RNA, 19 nt, Artificial Sequence
  Description of Artificial Sequence: Synthetic oligonucleotide
  Sense strand starting at position 2324 of SEQ ID NO: 916919
gaaaucguuugagcuuaau

SEQ ID NO: 1194303 - RNA, 19 nt, Artificial Sequence
  Description of Artificial Sequence: Synthetic oligonucleotide
  Antisense strand to SEQ ID NO: 1194302
auuaagcucaaacgauuuc

SEQ ID NO: 1194304 - RNA, 19 nt, Artificial Sequence
  Description of Artificial Sequence: Synthetic oligonucleotide
  Sense strand starting at position 2327 of SEQ ID NO: 916919
aucguuugagcuuaauuaa

SEQ ID NO: 1194305 - RNA, 19 nt, Artificial Sequence
  Description of Artificial Sequence: Synthetic oligonucleotide
  Antisense strand to SEQ ID NO: 1194304
uuaauuaagcucaaacgau

SEQ ID NO: 1194306 - RNA, 19 nt, Artificial Sequence
  Description of Artificial Sequence: Synthetic oligonucleotide
  Sense strand starting at position 2330 of SEQ ID NO: 916919
guuugagcuuaauuaauac

SEQ ID NO: 1194307 - RNA, 19 nt, Artificial Sequence
  Description of Artificial Sequence: Synthetic oligonucleotide
  Antisense strand to SEQ ID NO: 1194306
guauuaauuaagcucaaac

SEQ ID NO: 1194308 - RNA, 19 nt, Artificial Sequence
  Description of Artificial Sequence: Synthetic oligonucleotide
  Sense strand starting at position 2414 of SEQ ID NO: 916919
guuguuacuuuccuacaga

SEQ ID NO: 1194309 - RNA, 19 nt, Artificial Sequence
  Description of Artificial Sequence: Synthetic oligonucleotide
  Antisense strand to SEQ ID NO: 1194308
ucuguaggaaaguaacaac

SEQ ID NO: 1194310 - RNA, 19 nt, Artificial Sequence
  Description of Artificial Sequence: Synthetic oligonucleotide
  Sense strand starting at position 2460 of SEQ ID NO: 916919
uguaauccagcugacaaau

SEQ ID NO: 1194311 - RNA, 19 nt, Artificial Sequence
  Description of Artificial Sequence: Synthetic oligonucleotide
  Antisense strand to SEQ ID NO: 1194310
auuugucagcuggauuaca

SEQ ID NO: 1194312 - RNA, 19 nt, Artificial Sequence
  Description of Artificial Sequence: Synthetic oligonucleotide
  Sense strand starting at position 2618 of SEQ ID NO: 916919
gugcauugucaccauccua

SEQ ID NO: 1194313 - RNA, 19 nt, Artificial Sequence
  Description of Artificial Sequence: Synthetic oligonucleotide
  Antisense strand to SEQ ID NO: 1194312
uaggauggugacaaugcac

SEQ ID NO: 1194314 - RNA, 19 nt, Artificial Sequence
  Description of Artificial Sequence: Synthetic oligonucleotide
  Sense strand starting at position 2764 of SEQ ID NO: 916919
cucauuauguuguccaaac

SEQ ID NO: 1194315 - RNA, 19 nt, Artificial Sequence
  Description of Artificial Sequence: Synthetic oligonucleotide
  Antisense strand to SEQ ID NO: 1194314
guuuggacaacauaaugag

SEQ ID NO: 1194316 - RNA, 19 nt, Artificial Sequence
  Description of Artificial Sequence: Synthetic oligonucleotide
  Sense strand starting at position 2765 of SEQ ID NO: 916919
ucauuauguuguccaaacu

SEQ ID NO: 1194317 - RNA, 19 nt, Artificial Sequence
  Description of Artificial Sequence: Synthetic oligonucleotide
  Antisense strand to SEQ ID NO: 1194316
aguuuggacaacauaauga

SEQ ID NO: 1194318 - RNA, 19 nt, Artificial Sequence
  Description of Artificial Sequence: Synthetic oligonucleotide
  Sense strand starting at position 3275 of SEQ ID NO: 916919
uacaaugugcuaggauaua

SEQ ID NO: 1194319 - RNA, 19 nt, Artificial Sequence
  Description of Artificial Sequence: Synthetic oligonucleotide
  Antisense strand to SEQ ID NO: 1194318
uauauccuagcacauugua

SEQ ID NO: 1194320 - RNA, 19 nt, Artificial Sequence
  Description of Artificial Sequence: Synthetic oligonucleotide
  Sense strand starting at position 3445 of SEQ ID NO: 916919
uuauaucuccuuugguaug

SEQ ID NO: 1194321 - RNA, 19 nt, Artificial Sequence
  Description of Artificial Sequence: Synthetic oligonucleotide
  Antisense strand to SEQ ID NO: 1194320
cauaccaaaggagauauaa

SEQ ID NO: 1194322 - RNA, 19 nt, Artificial Sequence
  Description of Artificial Sequence: Synthetic oligonucleotide
  Sense strand starting at position 3457 of SEQ ID NO: 916919
ugguauggucauuguaaca

SEQ ID NO: 1194323 - RNA, 19 nt, Artificial Sequence
  Description of Artificial Sequence: Synthetic oligonucleotide
  Antisense strand to SEQ ID NO: 1194322
uguuacaaugaccauacca

SEQ ID NO: 1194324 - RNA, 19 nt, Artificial Sequence
  Description of Artificial Sequence: Synthetic oligonucleotide
  Sense strand starting at position 3502 of SEQ ID NO: 916919
ugauguugccaagauguua

SEQ ID NO: 1194325 - RNA, 19 nt, Artificial Sequence
  Description of Artificial Sequence: Synthetic oligonucleotide
  Antisense strand to SEQ ID NO: 1194324
uaacaucuuggcaacauca

SEQ ID NO: 1194326 - RNA, 19 nt, Artificial Sequence
  Description of Artificial Sequence: Synthetic oligonucleotide
  Sense strand starting at position 3697 of SEQ ID NO: 916919
gaacuuagguguucuccuu

SEQ ID NO: 1194327 - RNA, 19 nt, Artificial Sequence
  Description of Artificial Sequence: Synthetic oligonucleotide
  Antisense strand to SEQ ID NO: 1194326
aaggagaacaccuaaguuc

SEQ ID NO: 1194328 - RNA, 19 nt, Artificial Sequence
  Description of Artificial Sequence: Synthetic oligonucleotide
  Sense strand starting at position 75 of SEQ ID NO: 916920
auguauagaugcuccugaa

SEQ ID NO: 1194329 - RNA, 19 nt, Artificial Sequence
  Description of Artificial Sequence: Synthetic oligonucleotide
  Antisense strand to SEQ ID NO: 1194328
uucaggagcaucuauacau

SEQ ID NO: 1194330 - RNA, 19 nt, Artificial Sequence
  Description of Artificial Sequence: Synthetic oligonucleotide
  Sense strand starting at position 79 of SEQ ID NO: 916920
auagaugcuccugaauauu

SEQ ID NO: 1194331 - RNA, 19 nt, Artificial Sequence
  Description of Artificial Sequence: Synthetic oligonucleotide
  Antisense strand to SEQ ID NO: 1194330
aauauucaggagcaucuau

SEQ ID NO: 1194332 - RNA, 19 nt, Artificial Sequence
  Description of Artificial Sequence: Synthetic oligonucleotide
  Sense strand starting at position 98 of SEQ ID NO: 916920
uguaaauaacugcagugaa

SEQ ID NO: 1194333 - RNA, 19 nt, Artificial Sequence
  Description of Artificial Sequence: Synthetic oligonucleotide
  Antisense strand to SEQ ID NO: 1194332
uucacugcaguuauuuaca

SEQ ID NO: 1194334 - RNA, 19 nt, Artificial Sequence
  Description of Artificial Sequence: Synthetic oligonucleotide
  Sense strand starting at position 430 of SEQ ID NO: 916920
aucuacaaccucugaguga

SEQ ID NO: 1194335 - RNA, 19 nt, Artificial Sequence
  Description of Artificial Sequence: Synthetic oligonucleotide
  Antisense strand to SEQ ID NO: 1194334
ucacucagagguuguagau

SEQ ID NO: 1194336 - RNA, 19 nt, Artificial Sequence
  Description of Artificial Sequence: Synthetic oligonucleotide
  Sense strand starting at position 441 of SEQ ID NO: 916920
cugagugauccucagaguu

SEQ ID NO: 1194337 - RNA, 19 nt, Artificial Sequence
  Description of Artificial Sequence: Synthetic oligonucleotide
  Antisense strand to SEQ ID NO: 1194336
aacucugaggaucacucag

SEQ ID NO: 1194338 - RNA, 19 nt, Artificial Sequence
  Description of Artificial Sequence: Synthetic oligonucleotide
  Sense strand starting at position 527 of SEQ ID NO: 916920
ucccaucuuccagaggcau

SEQ ID NO: 1194339 - RNA, 19 nt, Artificial Sequence
  Description of Artificial Sequence: Synthetic oligonucleotide
  Antisense strand to SEQ ID NO: 1194338
augccucuggaagauggga

SEQ ID NO: 1194340 - RNA, 19 nt, Artificial Sequence
  Description of Artificial Sequence: Synthetic oligonucleotide
  Sense strand starting at position 581 of SEQ ID NO: 916920
uggagcuuuaagugaugaa

SEQ ID NO: 1194341 - RNA, 19 nt, Artificial Sequence
  Description of Artificial Sequence: Synthetic oligonucleotide
  Antisense strand to SEQ ID NO: 1194340
uucaucacuuaaagcucca

SEQ ID NO: 1194342 - RNA, 19 nt, Artificial Sequence
  Description of Artificial Sequence: Synthetic oligonucleotide
  Sense strand starting at position 637 of SEQ ID NO: 916920
ggaaguuacucauccuucu

SEQ ID NO: 1194343 - RNA, 19 nt, Artificial Sequence
  Description of Artificial Sequence: Synthetic oligonucleotide
  Antisense strand to SEQ ID NO: 1194342
agaaggaugaguaacuucc

SEQ ID NO: 1194344 - RNA, 19 nt, Artificial Sequence
  Description of Artificial Sequence: Synthetic oligonucleotide
  Sense strand starting at position 673 of SEQ ID NO: 916920
ucaacaagaugagauaaua

SEQ ID NO: 1194345 - RNA, 19 nt, Artificial Sequence
  Description of Artificial Sequence: Synthetic oligonucleotide
  Antisense strand to SEQ ID NO: 1194344
uauuaucucaucuuguuga

SEQ ID NO: 1194346 - RNA, 19 nt, Artificial Sequence
  Description of Artificial Sequence: Synthetic oligonucleotide
  Sense strand starting at position 936 of SEQ ID NO: 916920
gguaaauucuuauuaagug

SEQ ID NO: 1194347 - RNA, 19 nt, Artificial Sequence
  Description of Artificial Sequence: Synthetic oligonucleotide
  Antisense strand to SEQ ID NO: 1194346
cacuuaauaagaauuuacc

SEQ ID NO: 1194348 - RNA, 19 nt, Artificial Sequence
  Description of Artificial Sequence: Synthetic oligonucleotide
  Sense strand starting at position 943 of SEQ ID NO: 916920
ucuuauuaagugcaagaga

SEQ ID NO: 1194349 - RNA, 19 nt, Artificial Sequence
  Description of Artificial Sequence: Synthetic oligonucleotide
  Antisense strand to SEQ ID NO: 1194348
ucucuugcacuuaauaaga

SEQ ID NO: 1194350 - RNA, 19 nt, Artificial Sequence
  Description of Artificial Sequence: Synthetic oligonucleotide
  Sense strand starting at position 951 of SEQ ID NO: 916920
agugcaagagacuaaguua

SEQ ID NO: 1194351 - RNA, 19 nt, Artificial Sequence
  Description of Artificial Sequence: Synthetic oligonucleotide
  Antisense strand to SEQ ID NO: 1194350
uaacuuagucucuugcacu

SEQ ID NO: 1194352 - RNA, 19 nt, Artificial Sequence
  Description of Artificial Sequence: Synthetic oligonucleotide
  Sense strand starting at position 993 of SEQ ID NO: 916920
uuuguuuauccguaaauug

SEQ ID NO: 1194353 - RNA, 19 nt, Artificial Sequence
  Description of Artificial Sequence: Synthetic oligonucleotide
  Antisense strand to SEQ ID NO: 1194352
caauuuacggauaaacaaa

SEQ ID NO: 1194354 - RNA, 19 nt, Artificial Sequence
  Description of Artificial Sequence: Synthetic oligonucleotide
  Sense strand starting at position 1039 of SEQ ID NO: 916920
augcgucgagucuuuacau

SEQ ID NO: 1194355 - RNA, 19 nt, Artificial Sequence
  Description of Artificial Sequence: Synthetic oligonucleotide
  Antisense strand to SEQ ID NO: 1194354
auguaaagacucgacgcau

SEQ ID NO: 1194356 - RNA, 19 nt, Artificial Sequence
  Description of Artificial Sequence: Synthetic oligonucleotide
  Sense strand starting at position 1111 of SEQ ID NO: 916920
ugacuaaagucuccagguu

SEQ ID NO: 1194357 - RNA, 19 nt, Artificial Sequence
  Description of Artificial Sequence: Synthetic oligonucleotide
  Antisense strand to SEQ ID NO: 1194356
aaccuggagacuuuaguca

SEQ ID NO: 1194358 - RNA, 19 nt, Artificial Sequence
  Description of Artificial Sequence: Synthetic oligonucleotide
  Sense strand starting at position 1174 of SEQ ID NO: 916920
aagggaugccucugcgaga

SEQ ID NO: 1194359 - RNA, 19 nt, Artificial Sequence
  Description of Artificial Sequence: Synthetic oligonucleotide
  Antisense strand to SEQ ID NO: 1194358
ucucgcagaggcaucccuu

SEQ ID NO: 1194360 - RNA, 19 nt, Artificial Sequence
  Description of Artificial Sequence: Synthetic oligonucleotide
  Sense strand starting at position 1344 of SEQ ID NO: 916920
gcacgaucucuuucucguu

SEQ ID NO: 1194361 - RNA, 19 nt, Artificial Sequence
  Description of Artificial Sequence: Synthetic oligonucleotide
  Antisense strand to SEQ ID NO: 1194360
aacgagaaagagaucgugc

SEQ ID NO: 1194362 - RNA, 19 nt, Artificial Sequence
  Description of Artificial Sequence: Synthetic oligonucleotide
  Sense strand starting at position 1743 of SEQ ID NO: 916920
gggugaagucacgaucuau

SEQ ID NO: 1194363 - RNA, 19 nt, Artificial Sequence
  Description of Artificial Sequence: Synthetic oligonucleotide
  Antisense strand to SEQ ID NO: 1194362
auagaucgugacuucaccc

SEQ ID NO: 1194364 - RNA, 19 nt, Artificial Sequence
  Description of Artificial Sequence: Synthetic oligonucleotide
  Sense strand starting at position 2034 of SEQ ID NO: 916920
cgcaccaaguccuuggaaa

SEQ ID NO: 1194365 - RNA, 19 nt, Artificial Sequence
  Description of Artificial Sequence: Synthetic oligonucleotide
  Antisense strand to SEQ ID NO: 1194364
uuuccaaggacuuggugcg

SEQ ID NO: 1194366 - RNA, 19 nt, Artificial Sequence
  Description of Artificial Sequence: Synthetic oligonucleotide
  Sense strand starting at position 2035 of SEQ ID NO: 916920
gcaccaaguccuuggaaau

SEQ ID NO: 1194367 - RNA, 19 nt, Artificial Sequence
  Description of Artificial Sequence: Synthetic oligonucleotide
  Antisense strand to SEQ ID NO: 1194366
auuuccaaggacuuggugc

SEQ ID NO: 1194368 - RNA, 19 nt, Artificial Sequence
  Description of Artificial Sequence: Synthetic oligonucleotide
  Sense strand starting at position 2147 of SEQ ID NO: 916920
acucgcucucaucaguuaa

SEQ ID NO: 1194369 - RNA, 19 nt, Artificial Sequence
  Description of Artificial Sequence: Synthetic oligonucleotide
  Antisense strand to SEQ ID NO: 1194368
uuaacugaugagagcgagu

SEQ ID NO: 1194370 - RNA, 19 nt, Artificial Sequence
  Description of Artificial Sequence: Synthetic oligonucleotide
  Sense strand starting at position 2411 of SEQ ID NO: 916920
ggcggagacuggcuaauau

SEQ ID NO: 1194371 - RNA, 19 nt, Artificial Sequence
  Description of Artificial Sequence: Synthetic oligonucleotide
  Antisense strand to SEQ ID NO: 1194370
auauuagccagucuccgcc

SEQ ID NO: 1194372 - RNA, 19 nt, Artificial Sequence
  Description of Artificial Sequence: Synthetic oligonucleotide
  Sense strand starting at position 2421 of SEQ ID NO: 916920
ggcuaauauccugauccuu

SEQ ID NO: 1194373 - RNA, 19 nt, Artificial Sequence
  Description of Artificial Sequence: Synthetic oligonucleotide
  Antisense strand to SEQ ID NO: 1194372
aaggaucaggauauuagcc

SEQ ID NO: 1194374 - RNA, 19 nt, Artificial Sequence
  Description of Artificial Sequence: Synthetic oligonucleotide
  Sense strand starting at position 2426 of SEQ ID NO: 916920
auauccugauccuucgaca

SEQ ID NO: 1194375 - RNA, 19 nt, Artificial Sequence
  Description of Artificial Sequence: Synthetic oligonucleotide
  Antisense strand to SEQ ID NO: 1194374
ugucgaaggaucaggauau

SEQ ID NO: 1194376 - RNA, 19 nt, Artificial Sequence
  Description of Artificial Sequence: Synthetic oligonucleotide
  Sense strand starting at position 2878 of SEQ ID NO: 916920
ugugauaagcgauaagcuu

SEQ ID NO: 1194377 - RNA, 19 nt, Artificial Sequence
  Description of Artificial Sequence: Synthetic oligonucleotide
  Antisense strand to SEQ ID NO: 1194376
aagcuuaucgcuuaucaca

SEQ ID NO: 1194378 - RNA, 19 nt, Artificial Sequence
  Description of Artificial Sequence: Synthetic oligonucleotide
  Sense strand starting at position 2944 of SEQ ID NO: 916920
gccgagagagucgcuguua

SEQ ID NO: 1194379 - RNA, 19 nt, Artificial Sequence
  Description of Artificial Sequence: Synthetic oligonucleotide
  Antisense strand to SEQ ID NO: 1194378
uaacagcgacucucucggc

SEQ ID NO: 1194380 - RNA, 19 nt, Artificial Sequence
  Description of Artificial Sequence: Synthetic oligonucleotide
  Sense strand starting at position 3011 of SEQ ID NO: 916920
agcggucgccuauucuauu

SEQ ID NO: 1194381 - RNA, 19 nt, Artificial Sequence
  Description of Artificial Sequence: Synthetic oligonucleotide
  Antisense strand to SEQ ID NO: 1194380
aauagaauaggcgaccgcu

SEQ ID NO: 1194382 - RNA, 19 nt, Artificial Sequence
  Description of Artificial Sequence: Synthetic oligonucleotide
  Sense strand starting at position 3017 of SEQ ID NO: 916920
cgccuauucuauuugcuua

SEQ ID NO: 1194383 - RNA, 19 nt, Artificial Sequence
  Description of Artificial Sequence: Synthetic oligonucleotide
  Antisense strand to SEQ ID NO: 1194382
uaagcaaauagaauaggcg

SEQ ID NO: 1194384 - RNA, 19 nt, Artificial Sequence
  Description of Artificial Sequence: Synthetic oligonucleotide
  Sense strand starting at position 3052 of SEQ ID NO: 916920
uaaagugugcaaggacaaa

SEQ ID NO: 1194385 - RNA, 19 nt, Artificial Sequence
  Description of Artificial Sequence: Synthetic oligonucleotide
  Antisense strand to SEQ ID NO: 1194384
uuuguccuugcacacuuua

SEQ ID NO: 1194386 - RNA, 19 nt, Artificial Sequence
  Description of Artificial Sequence: Synthetic oligonucleotide
  Sense strand starting at position 3071 of SEQ ID NO: 916920
gaagaaaccuggucagcuu

SEQ ID NO: 1194387 - RNA, 19 nt, Artificial Sequence
  Description of Artificial Sequence: Synthetic oligonucleotide
  Antisense strand to SEQ ID NO: 1194386
aagcugaccagguuucuuc

SEQ ID NO: 1194388 - RNA, 19 nt, Artificial Sequence
  Description of Artificial Sequence: Synthetic oligonucleotide
  Sense strand starting at position 3072 of SEQ ID NO: 916920
aagaaaccuggucagcuua

SEQ ID NO: 1194389 - RNA, 19 nt, Artificial Sequence
  Description of Artificial Sequence: Synthetic oligonucleotide
  Antisense strand to SEQ ID NO: 1194388
uaagcugaccagguuucuu

SEQ ID NO: 1194390 - RNA, 19 nt, Artificial Sequence
  Description of Artificial Sequence: Synthetic oligonucleotide
  Sense strand starting at position 3084 of SEQ ID NO: 916920
cagcuuagucaucacgaaa

SEQ ID NO: 1194391 - RNA, 19 nt, Artificial Sequence
  Description of Artificial Sequence: Synthetic oligonucleotide
  Antisense strand to SEQ ID NO: 1194390
uuucgugaugacuaagcug

SEQ ID NO: 1194392 - RNA, 19 nt, Artificial Sequence
  Description of Artificial Sequence: Synthetic oligonucleotide
  Sense strand starting at position 3283 of SEQ ID NO: 916920
cucuuaguugagugaccua

SEQ ID NO: 1194393 - RNA, 19 nt, Artificial Sequence
  Description of Artificial Sequence: Synthetic oligonucleotide
  Antisense strand to SEQ ID NO: 1194392
uaggucacucaacuaagag

SEQ ID NO: 1194394 - RNA, 19 nt, Artificial Sequence
  Description of Artificial Sequence: Synthetic oligonucleotide
  Sense strand starting at position 3345 of SEQ ID NO: 916920
uuagguaaaucaguagaga

SEQ ID NO: 1194395 - RNA, 19 nt, Artificial Sequence
  Description of Artificial Sequence: Synthetic oligonucleotide
  Antisense strand to SEQ ID NO: 1194394
ucucuacugauuuaccuaa

SEQ ID NO: 1194396 - RNA, 19 nt, Artificial Sequence
  Description of Artificial Sequence: Synthetic oligonucleotide
  Sense strand starting at position 3438 of SEQ ID NO: 916920
ucuuaaguccugcaaagua

SEQ ID NO: 1194397 - RNA, 19 nt, Artificial Sequence
  Description of Artificial Sequence: Synthetic oligonucleotide
  Antisense strand to SEQ ID NO: 1194396
uacuuugcaggacuuaaga

SEQ ID NO: 1194398 - RNA, 19 nt, Artificial Sequence
  Description of Artificial Sequence: Synthetic oligonucleotide
  Sense strand starting at position 3525 of SEQ ID NO: 916920
uuggauaaaucaucugcca

SEQ ID NO: 1194399 - RNA, 19 nt, Artificial Sequence
  Description of Artificial Sequence: Synthetic oligonucleotide
  Antisense strand to SEQ ID NO: 1194398
uggcagaugauuuauccaa

SEQ ID NO: 1194400 - RNA, 19 nt, Artificial Sequence
  Description of Artificial Sequence: Synthetic oligonucleotide
  Sense strand starting at position 3603 of SEQ ID NO: 916920
aaggacuauuuguagagua

SEQ ID NO: 1194401 - RNA, 19 nt, Artificial Sequence
  Description of Artificial Sequence: Synthetic oligonucleotide
  Antisense strand to SEQ ID NO: 1194400
uacucuacaaauaguccuu

SEQ ID NO: 1194402 - RNA, 19 nt, Artificial Sequence
  Description of Artificial Sequence: Synthetic oligonucleotide
  Sense strand starting at position 3681 of SEQ ID NO: 916920
auguaaauguuucccuaua

SEQ ID NO: 1194403 - RNA, 19 nt, Artificial Sequence
  Description of Artificial Sequence: Synthetic oligonucleotide
  Antisense strand to SEQ ID NO: 1194402
uauagggaaacauuuacau

SEQ ID NO: 1194404 - RNA, 19 nt, Artificial Sequence
  Description of Artificial Sequence: Synthetic oligonucleotide
  Sense strand starting at position 3683 of SEQ ID NO: 916920
guaaauguuucccuauaua

SEQ ID NO: 1194405 - RNA, 19 nt, Artificial Sequence
  Description of Artificial Sequence: Synthetic oligonucleotide
  Antisense strand to SEQ ID NO: 1194404
uauauagggaaacauuuac

SEQ ID NO: 1194406 - RNA, 19 nt, Artificial Sequence
  Description of Artificial Sequence: Synthetic oligonucleotide
  Sense strand starting at position 3940 of SEQ ID NO: 916920
accacugagacuggguaau

SEQ ID NO: 1194407 - RNA, 19 nt, Artificial Sequence
  Description of Artificial Sequence: Synthetic oligonucleotide
  Antisense strand to SEQ ID NO: 1194406
auuacccagucucaguggu

SEQ ID NO: 1194408 - RNA, 19 nt, Artificial Sequence
  Description of Artificial Sequence: Synthetic oligonucleotide
  Sense strand starting at position 4 of SEQ ID NO: 916921
uguauuaucccacagcuca

SEQ ID NO: 1194409 - RNA, 19 nt, Artificial Sequence
  Description of Artificial Sequence: Synthetic oligonucleotide
  Antisense strand to SEQ ID NO: 1194408
ugagcugugggauaauaca

SEQ ID NO: 1194410 - RNA, 19 nt, Artificial Sequence
  Description of Artificial Sequence: Synthetic oligonucleotide
  Sense strand starting at position 123 of SEQ ID NO: 916921
ucagaacgauuauugguua

SEQ ID NO: 1194411 - RNA, 19 nt, Artificial Sequence
  Description of Artificial Sequence: Synthetic oligonucleotide
  Antisense strand to SEQ ID NO: 1194410
uaaccaauaaucguucuga

SEQ ID NO: 1194412 - RNA, 19 nt, Artificial Sequence
  Description of Artificial Sequence: Synthetic oligonucleotide
  Sense strand starting at position 177 of SEQ ID NO: 916921
cacugcucugaagauaagu

SEQ ID NO: 1194413 - RNA, 19 nt, Artificial Sequence
  Description of Artificial Sequence: Synthetic oligonucleotide
  Antisense strand to SEQ ID NO: 1194412
acuuaucuucagagcagug

SEQ ID NO: 1194414 - RNA, 19 nt, Artificial Sequence
  Description of Artificial Sequence: Synthetic oligonucleotide
  Sense strand starting at position 410 of SEQ ID NO: 916921
gaagguucuuuauugagua

SEQ ID NO: 1194415 - RNA, 19 nt, Artificial Sequence
  Description of Artificial Sequence: Synthetic oligonucleotide
  Antisense strand to SEQ ID NO: 1194414
uacucaauaaagaaccuuc

SEQ ID NO: 1194416 - RNA, 19 nt, Artificial Sequence
  Description of Artificial Sequence: Synthetic oligonucleotide
  Sense strand starting at position 730 of SEQ ID NO: 916921
gucugauuucugugugaau

SEQ ID NO: 1194417 - RNA, 19 nt, Artificial Sequence
  Description of Artificial Sequence: Synthetic oligonucleotide
  Antisense strand to SEQ ID NO: 1194416
auucacacagaaaucagac

SEQ ID NO: 1194418 - RNA, 19 nt, Artificial Sequence
  Description of Artificial Sequence: Synthetic oligonucleotide
  Sense strand starting at position 732 of SEQ ID NO: 916921
cugauuucugugugaaugc

SEQ ID NO: 1194419 - RNA, 19 nt, Artificial Sequence
  Description of Artificial Sequence: Synthetic oligonucleotide
  Antisense strand to SEQ ID NO: 1194418
gcauucacacagaaaucag

SEQ ID NO: 1194420 - RNA, 19 nt, Artificial Sequence
  Description of Artificial Sequence: Synthetic oligonucleotide
  Sense strand starting at position 747 of SEQ ID NO: 916921
augcaaacacuuggugaua

SEQ ID NO: 1194421 - RNA, 19 nt, Artificial Sequence
  Description of Artificial Sequence: Synthetic oligonucleotide
  Antisense strand to SEQ ID NO: 1194420
uaucaccaaguguuugcau

SEQ ID NO: 1194422 - RNA, 19 nt, Artificial Sequence
  Description of Artificial Sequence: Synthetic oligonucleotide
  Sense strand starting at position 748 of SEQ ID NO: 916921
ugcaaacacuuggugauaa

SEQ ID NO: 1194423 - RNA, 19 nt, Artificial Sequence
  Description of Artificial Sequence: Synthetic oligonucleotide
  Antisense strand to SEQ ID NO: 1194422
uuaucaccaaguguuugca

SEQ ID NO: 1194424 - RNA, 19 nt, Artificial Sequence
  Description of Artificial Sequence: Synthetic oligonucleotide
  Sense strand starting at position 918 of SEQ ID NO: 916921
agaccuauuuguuaaacag

SEQ ID NO: 1194425 - RNA, 19 nt, Artificial Sequence
  Description of Artificial Sequence: Synthetic oligonucleotide
  Antisense strand to SEQ ID NO: 1194424
cuguuuaacaaauaggucu

SEQ ID NO: 1194426 - RNA, 19 nt, Artificial Sequence
  Description of Artificial Sequence: Synthetic oligonucleotide
  Sense strand starting at position 1042 of SEQ ID NO: 916921
ugcagccaacuguaauaaa

SEQ ID NO: 1194427 - RNA, 19 nt, Artificial Sequence
  Description of Artificial Sequence: Synthetic oligonucleotide
  Antisense strand to SEQ ID NO: 1194426
uuuauuacaguuggcugca

SEQ ID NO: 1194428 - RNA, 19 nt, Artificial Sequence
  Description of Artificial Sequence: Synthetic oligonucleotide
  Sense strand starting at position 1094 of SEQ ID NO: 916921
gcagaaucaugguuaagau

SEQ ID NO: 1194429 - RNA, 19 nt, Artificial Sequence
  Description of Artificial Sequence: Synthetic oligonucleotide
  Antisense strand to SEQ ID NO: 1194428
aucuuaaccaugauucugc

SEQ ID NO: 1194430 - RNA, 19 nt, Artificial Sequence
  Description of Artificial Sequence: Synthetic oligonucleotide
  Sense strand starting at position 1128 of SEQ ID NO: 916921
cagaaaucacauggugucu

SEQ ID NO: 1194431 - RNA, 19 nt, Artificial Sequence
  Description of Artificial Sequence: Synthetic oligonucleotide
  Antisense strand to SEQ ID NO: 1194430
agacaccaugugauuucug

SEQ ID NO: 1194432 - RNA, 19 nt, Artificial Sequence
  Description of Artificial Sequence: Synthetic oligonucleotide
  Sense strand starting at position 1234 of SEQ ID NO: 916921
guaagaccucccugggaac

SEQ ID NO: 1194433 - RNA, 19 nt, Artificial Sequence
  Description of Artificial Sequence: Synthetic oligonucleotide
  Antisense strand to SEQ ID NO: 1194432
guucccagggaggucuuac

SEQ ID NO: 1194434 - RNA, 19 nt, Artificial Sequence
  Description of Artificial Sequence: Synthetic oligonucleotide
  Sense strand starting at position 1290 of SEQ ID NO: 916921
gggugaaggccugaugauu

SEQ ID NO: 1194435 - RNA, 19 nt, Artificial Sequence
  Description of Artificial Sequence: Synthetic oligonucleotide
  Antisense strand to SEQ ID NO: 1194434
aaucaucaggccuucaccc

SEQ ID NO: 1194436 - RNA, 19 nt, Artificial Sequence
  Description of Artificial Sequence: Synthetic oligonucleotide
  Sense strand starting at position 1330 of SEQ ID NO: 916921
guguuccuuagugagauau

SEQ ID NO: 1194437 - RNA, 19 nt, Artificial Sequence
  Description of Artificial Sequence: Synthetic oligonucleotide
  Antisense strand to SEQ ID NO: 1194436
auaucucacuaaggaacac

SEQ ID NO: 1194438 - RNA, 19 nt, Artificial Sequence
  Description of Artificial Sequence: Synthetic oligonucleotide
  Sense strand starting at position 1343 of SEQ ID NO: 916921
agauauccacccuggaauu

SEQ ID NO: 1194439 - RNA, 19 nt, Artificial Sequence
  Description of Artificial Sequence: Synthetic oligonucleotide
  Antisense strand to SEQ ID NO: 1194438
aauuccaggguggauaucu

SEQ ID NO: 1194440 - RNA, 19 nt, Artificial Sequence
  Description of Artificial Sequence: Synthetic oligonucleotide
  Sense strand starting at position 1374 of SEQ ID NO: 916921
ucuccacagccauaguuau

SEQ ID NO: 1194441 - RNA, 19 nt, Artificial Sequence
  Description of Artificial Sequence: Synthetic oligonucleotide
  Antisense strand to SEQ ID NO: 1194440
auaacuauggcuguggaga

SEQ ID NO: 1194442 - RNA, 19 nt, Artificial Sequence
  Description of Artificial Sequence: Synthetic oligonucleotide
  Sense strand starting at position 1483 of SEQ ID NO: 916921
agaggaucguuagcacuaa

SEQ ID NO: 1194443 - RNA, 19 nt, Artificial Sequence
  Description of Artificial Sequence: Synthetic oligonucleotide
  Antisense strand to SEQ ID NO: 1194442
uuagugcuaacgauccucu

SEQ ID NO: 1194444 - RNA, 19 nt, Artificial Sequence
  Description of Artificial Sequence: Synthetic oligonucleotide
  Sense strand starting at position 1487 of SEQ ID NO: 916921
gaucguuagcacuaagauu

SEQ ID NO: 1194445 - RNA, 19 nt, Artificial Sequence
  Description of Artificial Sequence: Synthetic oligonucleotide
  Antisense strand to SEQ ID NO: 1194444
aaucuuagugcuaacgauc

SEQ ID NO: 1194446 - RNA, 19 nt, Artificial Sequence
  Description of Artificial Sequence: Synthetic oligonucleotide
  Sense strand starting at position 1998 of SEQ ID NO: 916921
uggcaaauccaggagucuu

SEQ ID NO: 1194447 - RNA, 19 nt, Artificial Sequence
  Description of Artificial Sequence: Synthetic oligonucleotide
  Antisense strand to SEQ ID NO: 1194446
aagacuccuggauuugcca

SEQ ID NO: 1194448 - RNA, 19 nt, Artificial Sequence
  Description of Artificial Sequence: Synthetic oligonucleotide
  Sense strand starting at position 2006 of SEQ ID NO: 916921
ccaggagucuuggugaaau

SEQ ID NO: 1194449 - RNA, 19 nt, Artificial Sequence
  Description of Artificial Sequence: Synthetic oligonucleotide
  Antisense strand to SEQ ID NO: 1194448
auuucaccaagacuccugg

SEQ ID NO: 1194450 - RNA, 19 nt, Artificial Sequence
  Description of Artificial Sequence: Synthetic oligonucleotide
  Sense strand starting at position 2017 of SEQ ID NO: 916921
ggugaaauuggccacugua

SEQ ID NO: 1194451 - RNA, 19 nt, Artificial Sequence
  Description of Artificial Sequence: Synthetic oligonucleotide
  Antisense strand to SEQ ID NO: 1194450
uacaguggccaauuucacc

SEQ ID NO: 1194452 - RNA, 19 nt, Artificial Sequence
  Description of Artificial Sequence: Synthetic oligonucleotide
  Sense strand starting at position 2020 of SEQ ID NO: 916921
gaaauuggccacuguaaau

SEQ ID NO: 1194453 - RNA, 19 nt, Artificial Sequence
  Description of Artificial Sequence: Synthetic oligonucleotide
  Antisense strand to SEQ ID NO: 1194452
auuuacaguggccaauuuc

SEQ ID NO: 1194454 - RNA, 19 nt, Artificial Sequence
  Description of Artificial Sequence: Synthetic oligonucleotide
  Sense strand starting at position 2031 of SEQ ID NO: 916921
cuguaaauggucuauauau

SEQ ID NO: 1194455 - RNA, 19 nt, Artificial Sequence
  Description of Artificial Sequence: Synthetic oligonucleotide
  Antisense strand to SEQ ID NO: 1194454
auauauagaccauuuacag

SEQ ID NO: 1194456 - RNA, 19 nt, Artificial Sequence
  Description of Artificial Sequence: Synthetic oligonucleotide
  Sense strand starting at position 2052 of SEQ ID NO: 916921
ugcugaaugacaggauauc

SEQ ID NO: 1194457 - RNA, 19 nt, Artificial Sequence
  Description of Artificial Sequence: Synthetic oligonucleotide
  Antisense strand to SEQ ID NO: 1194456
gauauccugucauucagca

SEQ ID NO: 1194458 - RNA, 19 nt, Artificial Sequence
  Description of Artificial Sequence: Synthetic oligonucleotide
  Sense strand starting at position 2088 of SEQ ID NO: 916921
gaggcuuggcccgggauuu

SEQ ID NO: 1194459 - RNA, 19 nt, Artificial Sequence
  Description of Artificial Sequence: Synthetic oligonucleotide
  Antisense strand to SEQ ID NO: 1194458
aaaucccgggccaagccuc

SEQ ID NO: 1194460 - RNA, 19 nt, Artificial Sequence
  Description of Artificial Sequence: Synthetic oligonucleotide
  Sense strand starting at position 2307 of SEQ ID NO: 916921
ccagguauggaaugaaugu

SEQ ID NO: 1194461 - RNA, 19 nt, Artificial Sequence
  Description of Artificial Sequence: Synthetic oligonucleotide
  Antisense strand to SEQ ID NO: 1194460
acauucauuccauaccugg

SEQ ID NO: 1194462 - RNA, 19 nt, Artificial Sequence
  Description of Artificial Sequence: Synthetic oligonucleotide
  Sense strand starting at position 2318 of SEQ ID NO: 916921
augaauguugcagaaaccu

SEQ ID NO: 1194463 - RNA, 19 nt, Artificial Sequence
  Description of Artificial Sequence: Synthetic oligonucleotide
  Antisense strand to SEQ ID NO: 1194462
agguuucugcaacauucau

SEQ ID NO: 1194464 - RNA, 19 nt, Artificial Sequence
  Description of Artificial Sequence: Synthetic oligonucleotide
  Sense strand starting at position 2359 of SEQ ID NO: 916921
cuggauaaccucuacugca

SEQ ID NO: 1194465 - RNA, 19 nt, Artificial Sequence
  Description of Artificial Sequence: Synthetic oligonucleotide
  Antisense strand to SEQ ID NO: 1194464
ugcaguagagguuauccag

SEQ ID NO: 1194466 - RNA, 19 nt, Artificial Sequence
  Description of Artificial Sequence: Synthetic oligonucleotide
  Sense strand starting at position 2629 of SEQ ID NO: 916921
cuaugaaugccuugaggac

SEQ ID NO: 1194467 - RNA, 19 nt, Artificial Sequence
  Description of Artificial Sequence: Synthetic oligonucleotide
  Antisense strand to SEQ ID NO: 1194466
guccucaaggcauucauag

SEQ ID NO: 1194468 - RNA, 19 nt, Artificial Sequence
  Description of Artificial Sequence: Synthetic oligonucleotide
  Sense strand starting at position 2678 of SEQ ID NO: 916921
ccuugauuccuagagcaga

SEQ ID NO: 1194469 - RNA, 19 nt, Artificial Sequence
  Description of Artificial Sequence: Synthetic oligonucleotide
  Antisense strand to SEQ ID NO: 1194468
ucugcucuaggaaucaagg

SEQ ID NO: 1194470 - RNA, 19 nt, Artificial Sequence
  Description of Artificial Sequence: Synthetic oligonucleotide
  Sense strand starting at position 2828 of SEQ ID NO: 916921
acaggaugauucuucucau

SEQ ID NO: 1194471 - RNA, 19 nt, Artificial Sequence
  Description of Artificial Sequence: Synthetic oligonucleotide
  Antisense strand to SEQ ID NO: 1194470
augagaagaaucauccugu

SEQ ID NO: 1194472 - RNA, 19 nt, Artificial Sequence
  Description of Artificial Sequence: Synthetic oligonucleotide
  Sense strand starting at position 2928 of SEQ ID NO: 916921
caaacuauguggcuccaga

SEQ ID NO: 1194473 - RNA, 19 nt, Artificial Sequence
  Description of Artificial Sequence: Synthetic oligonucleotide
  Antisense strand to SEQ ID NO: 1194472
ucuggagccacauaguuug

SEQ ID NO: 1194474 - RNA, 19 nt, Artificial Sequence
  Description of Artificial Sequence: Synthetic oligonucleotide
  Sense strand starting at position 3162 of SEQ ID NO: 916921
uugguuaaaugauccuuua

SEQ ID NO: 1194475 - RNA, 19 nt, Artificial Sequence
  Description of Artificial Sequence: Synthetic oligonucleotide
  Antisense strand to SEQ ID NO: 1194474
uaaaggaucauuuaaccaa

SEQ ID NO: 1194476 - RNA, 19 nt, Artificial Sequence
  Description of Artificial Sequence: Synthetic oligonucleotide
  Sense strand starting at position 3466 of SEQ ID NO: 916921
auggauuaugauuguguga

SEQ ID NO: 1194477 - RNA, 19 nt, Artificial Sequence
  Description of Artificial Sequence: Synthetic oligonucleotide
  Antisense strand to SEQ ID NO: 1194476
ucacacaaucauaauccau

SEQ ID NO: 1194478 - RNA, 19 nt, Artificial Sequence
  Description of Artificial Sequence: Synthetic oligonucleotide
  Sense strand starting at position 3480 of SEQ ID NO: 916921
ugugaagccagugagacuu

SEQ ID NO: 1194479 - RNA, 19 nt, Artificial Sequence
  Description of Artificial Sequence: Synthetic oligonucleotide
  Antisense strand to SEQ ID NO: 1194478
aagucucacuggcuucaca

SEQ ID NO: 1194480 - RNA, 19 nt, Artificial Sequence
  Description of Artificial Sequence: Synthetic oligonucleotide
  Sense strand starting at position 3581 of SEQ ID NO: 916921
cuuucuaaaggauguagau

SEQ ID NO: 1194481 - RNA, 19 nt, Artificial Sequence
  Description of Artificial Sequence: Synthetic oligonucleotide
  Antisense strand to SEQ ID NO: 1194480
aucuacauccuuuagaaag

SEQ ID NO: 1194482 - RNA, 19 nt, Artificial Sequence
  Description of Artificial Sequence: Synthetic oligonucleotide
  Sense strand starting at position 3621 of SEQ ID NO: 916921
ggcucaauuccaggugaaa

SEQ ID NO: 1194483 - RNA, 19 nt, Artificial Sequence
  Description of Artificial Sequence: Synthetic oligonucleotide
  Antisense strand to SEQ ID NO: 1194482
uuucaccuggaauugagcc

SEQ ID NO: 1194484 - RNA, 19 nt, Artificial Sequence
  Description of Artificial Sequence: Synthetic oligonucleotide
  Sense strand starting at position 3731 of SEQ ID NO: 916921
auucucucgccagauaauu

SEQ ID NO: 1194485 - RNA, 19 nt, Artificial Sequence
  Description of Artificial Sequence: Synthetic oligonucleotide
  Antisense strand to SEQ ID NO: 1194484
aauuaucuggcgagagaau

SEQ ID NO: 1194486 - RNA, 19 nt, Artificial Sequence
  Description of Artificial Sequence: Synthetic oligonucleotide
  Sense strand starting at position 3973 of SEQ ID NO: 916921
agggaaaugccauguuaga

SEQ ID NO: 1194487 - RNA, 19 nt, Artificial Sequence
  Description of Artificial Sequence: Synthetic oligonucleotide
  Antisense strand to SEQ ID NO: 1194486
ucuaacauggcauuucccu

SEQ ID NO: 1194488 - RNA, 19 nt, Artificial Sequence
  Description of Artificial Sequence: Synthetic oligonucleotide
  Sense strand starting at position 64 of SEQ ID NO: 916922
ucuccuuugucccuguaga

SEQ ID NO: 1194489 - RNA, 19 nt, Artificial Sequence
  Description of Artificial Sequence: Synthetic oligonucleotide
  Antisense strand to SEQ ID NO: 1194488
ucuacagggacaaaggaga

SEQ ID NO: 1194490 - RNA, 19 nt, Artificial Sequence
  Description of Artificial Sequence: Synthetic oligonucleotide
  Sense strand starting at position 65 of SEQ ID NO: 916922
cuccuuugucccuguagaa

SEQ ID NO: 1194491 - RNA, 19 nt, Artificial Sequence
  Description of Artificial Sequence: Synthetic oligonucleotide
  Antisense strand to SEQ ID NO: 1194490
uucuacagggacaaaggag

SEQ ID NO: 1194492 - RNA, 19 nt, Artificial Sequence
  Description of Artificial Sequence: Synthetic oligonucleotide
  Sense strand starting at position 78 of SEQ ID NO: 916922
guagaacccuuccugagua

SEQ ID NO: 1194493 - RNA, 19 nt, Artificial Sequence
  Description of Artificial Sequence: Synthetic oligonucleotide
  Antisense strand to SEQ ID NO: 1194492
uacucaggaaggguucuac

SEQ ID NO: 1194494 - RNA, 19 nt, Artificial Sequence
  Description of Artificial Sequence: Synthetic oligonucleotide
  Sense strand starting at position 534 of SEQ ID NO: 916922
gaggcuuucggagaaaugu

SEQ ID NO: 1194495 - RNA, 19 nt, Artificial Sequence
  Description of Artificial Sequence: Synthetic oligonucleotide
  Antisense strand to SEQ ID NO: 1194494
acauuucuccgaaagccuc

SEQ ID NO: 1194496 - RNA, 19 nt, Artificial Sequence
  Description of Artificial Sequence: Synthetic oligonucleotide
  Sense strand starting at position 543 of SEQ ID NO: 916922
ggagaaaugugaugagaga

SEQ ID NO: 1194497 - RNA, 19 nt, Artificial Sequence
  Description of Artificial Sequence: Synthetic oligonucleotide
  Antisense strand to SEQ ID NO: 1194496
ucucucaucacauuucucc

SEQ ID NO: 1194498 - RNA, 19 nt, Artificial Sequence
  Description of Artificial Sequence: Synthetic oligonucleotide
  Sense strand starting at position 1357 of SEQ ID NO: 916922
guacuuuguuucuccugga

SEQ ID NO: 1194499 - RNA, 19 nt, Artificial Sequence
  Description of Artificial Sequence: Synthetic oligonucleotide
  Antisense strand to SEQ ID NO: 1194498
uccaggagaaacaaaguac

SEQ ID NO: 1194500 - RNA, 19 nt, Artificial Sequence
  Description of Artificial Sequence: Synthetic oligonucleotide
  Sense strand starting at position 1361 of SEQ ID NO: 916922
uuuguuucuccuggaaauc

SEQ ID NO: 1194501 - RNA, 19 nt, Artificial Sequence
  Description of Artificial Sequence: Synthetic oligonucleotide
  Antisense strand to SEQ ID NO: 1194500
gauuuccaggagaaacaaa

SEQ ID NO: 1194502 - RNA, 19 nt, Artificial Sequence
  Description of Artificial Sequence: Synthetic oligonucleotide
  Sense strand starting at position 1362 of SEQ ID NO: 916922
uuguuucuccuggaaaucu

SEQ ID NO: 1194503 - RNA, 19 nt, Artificial Sequence
  Description of Artificial Sequence: Synthetic oligonucleotide
  Antisense strand to SEQ ID NO: 1194502
agauuuccaggagaaacaa

SEQ ID NO: 1194504 - RNA, 19 nt, Artificial Sequence
  Description of Artificial Sequence: Synthetic oligonucleotide
  Sense strand starting at position 1370 of SEQ ID NO: 916922
ccuggaaaucugugggcaa

SEQ ID NO: 1194505 - RNA, 19 nt, Artificial Sequence
  Description of Artificial Sequence: Synthetic oligonucleotide
  Antisense strand to SEQ ID NO: 1194504
uugcccacagauuuccagg

SEQ ID NO: 1194506 - RNA, 19 nt, Artificial Sequence
  Description of Artificial Sequence: Synthetic oligonucleotide
  Sense strand starting at position 1372 of SEQ ID NO: 916922
uggaaaucugugggcaaca

SEQ ID NO: 1194507 - RNA, 19 nt, Artificial Sequence
  Description of Artificial Sequence: Synthetic oligonucleotide
  Antisense strand to SEQ ID NO: 1194506
uguugcccacagauuucca

SEQ ID NO: 1194508 - RNA, 19 nt, Artificial Sequence
  Description of Artificial Sequence: Synthetic oligonucleotide
  Sense strand starting at position 1383 of SEQ ID NO: 916922
gggcaacagagaugugaug

SEQ ID NO: 1194509 - RNA, 19 nt, Artificial Sequence
  Description of Artificial Sequence: Synthetic oligonucleotide
  Antisense strand to SEQ ID NO: 1194508
caucacaucucuguugccc

SEQ ID NO: 1194510 - RNA, 19 nt, Artificial Sequence
  Description of Artificial Sequence: Synthetic oligonucleotide
  Sense strand starting at position 1433 of SEQ ID NO: 916922
guuuaauguguguccucgu

SEQ ID NO: 1194511 - RNA, 19 nt, Artificial Sequence
  Description of Artificial Sequence: Synthetic oligonucleotide
  Antisense strand to SEQ ID NO: 1194510
acgaggacacacauuaaac

SEQ ID NO: 1194512 - RNA, 19 nt, Artificial Sequence
  Description of Artificial Sequence: Synthetic oligonucleotide
  Sense strand starting at position 1440 of SEQ ID NO: 916922
guguguccucgugugcaca

SEQ ID NO: 1194513 - RNA, 19 nt, Artificial Sequence
  Description of Artificial Sequence: Synthetic oligonucleotide
  Antisense strand to SEQ ID NO: 1194512
ugugcacacgaggacacac

SEQ ID NO: 1194514 - RNA, 19 nt, Artificial Sequence
  Description of Artificial Sequence: Synthetic oligonucleotide
  Sense strand starting at position 1759 of SEQ ID NO: 916922
ugagcagucguggaaauca

SEQ ID NO: 1194515 - RNA, 19 nt, Artificial Sequence
  Description of Artificial Sequence: Synthetic oligonucleotide
  Antisense strand to SEQ ID NO: 1194514
ugauuuccacgacugcuca

SEQ ID NO: 1194516 - RNA, 19 nt, Artificial Sequence
  Description of Artificial Sequence: Synthetic oligonucleotide
  Sense strand starting at position 1791 of SEQ ID NO: 916922
guaacuuacguucgggauu

SEQ ID NO: 1194517 - RNA, 19 nt, Artificial Sequence
  Description of Artificial Sequence: Synthetic oligonucleotide
  Antisense strand to SEQ ID NO: 1194516
aaucccgaacguaaguuac

SEQ ID NO: 1194518 - RNA, 19 nt, Artificial Sequence
  Description of Artificial Sequence: Synthetic oligonucleotide
  Sense strand starting at position 1939 of SEQ ID NO: 916922
cccagucgcuauuuguaga

SEQ ID NO: 1194519 - RNA, 19 nt, Artificial Sequence
  Description of Artificial Sequence: Synthetic oligonucleotide
  Antisense strand to SEQ ID NO: 1194518
ucuacaaauagcgacuggg

SEQ ID NO: 1194520 - RNA, 19 nt, Artificial Sequence
  Description of Artificial Sequence: Synthetic oligonucleotide
  Sense strand starting at position 1976 of SEQ ID NO: 916922
uggugucagggcugaaaug

SEQ ID NO: 1194521 - RNA, 19 nt, Artificial Sequence
  Description of Artificial Sequence: Synthetic oligonucleotide
  Antisense strand to SEQ ID NO: 1194520
cauuucagcccugacacca

SEQ ID NO: 1194522 - RNA, 19 nt, Artificial Sequence
  Description of Artificial Sequence: Synthetic oligonucleotide
  Sense strand starting at position 1977 of SEQ ID NO: 916922
ggugucagggcugaaauga

SEQ ID NO: 1194523 - RNA, 19 nt, Artificial Sequence
  Description of Artificial Sequence: Synthetic oligonucleotide
  Antisense strand to SEQ ID NO: 1194522
ucauuucagcccugacacc

SEQ ID NO: 1194524 - RNA, 19 nt, Artificial Sequence
  Description of Artificial Sequence: Synthetic oligonucleotide
  Sense strand starting at position 2138 of SEQ ID NO: 916922
ggugaauaauggcugaauu

SEQ ID NO: 1194525 - RNA, 19 nt, Artificial Sequence
  Description of Artificial Sequence: Synthetic oligonucleotide
  Antisense strand to SEQ ID NO: 1194524
aauucagccauuauucacc

SEQ ID NO: 1194526 - RNA, 19 nt, Artificial Sequence
  Description of Artificial Sequence: Synthetic oligonucleotide
  Sense strand starting at position 2139 of SEQ ID NO: 916922
gugaauaauggcugaauuc

SEQ ID NO: 1194527 - RNA, 19 nt, Artificial Sequence
  Description of Artificial Sequence: Synthetic oligonucleotide
  Antisense strand to SEQ ID NO: 1194526
gaauucagccauuauucac

SEQ ID NO: 1194528 - RNA, 19 nt, Artificial Sequence
  Description of Artificial Sequence: Synthetic oligonucleotide
  Sense strand starting at position 2163 of SEQ ID NO: 916922
gggacaguuucuguucaug

SEQ ID NO: 1194529 - RNA, 19 nt, Artificial Sequence
  Description of Artificial Sequence: Synthetic oligonucleotide
  Antisense strand to SEQ ID NO: 1194528
caugaacagaaacuguccc

SEQ ID NO: 1194530 - RNA, 19 nt, Artificial Sequence
  Description of Artificial Sequence: Synthetic oligonucleotide
  Sense strand starting at position 2606 of SEQ ID NO: 916922
guaggugguuggaggagua

SEQ ID NO: 1194531 - RNA, 19 nt, Artificial Sequence
  Description of Artificial Sequence: Synthetic oligonucleotide
  Antisense strand to SEQ ID NO: 1194530
uacuccuccaaccaccuac

SEQ ID NO: 1194532 - RNA, 19 nt, Artificial Sequence
  Description of Artificial Sequence: Synthetic oligonucleotide
  Sense strand starting at position 2616 of SEQ ID NO: 916922
ggaggaguacuuugcuauc

SEQ ID NO: 1194533 - RNA, 19 nt, Artificial Sequence
  Description of Artificial Sequence: Synthetic oligonucleotide
  Antisense strand to SEQ ID NO: 1194532
gauagcaaaguacuccucc

SEQ ID NO: 1194534 - RNA, 19 nt, Artificial Sequence
  Description of Artificial Sequence: Synthetic oligonucleotide
  Sense strand starting at position 2618 of SEQ ID NO: 916922
aggaguacuuugcuauccu

SEQ ID NO: 1194535 - RNA, 19 nt, Artificial Sequence
  Description of Artificial Sequence: Synthetic oligonucleotide
  Antisense strand to SEQ ID NO: 1194534
aggauagcaaaguacuccu

SEQ ID NO: 1194536 - RNA, 19 nt, Artificial Sequence
  Description of Artificial Sequence: Synthetic oligonucleotide
  Sense strand starting at position 2622 of SEQ ID NO: 916922
guacuuugcuauccuguaa

SEQ ID NO: 1194537 - RNA, 19 nt, Artificial Sequence
  Description of Artificial Sequence: Synthetic oligonucleotide
  Antisense strand to SEQ ID NO: 1194536
uuacaggauagcaaaguac

SEQ ID NO: 1194538 - RNA, 19 nt, Artificial Sequence
  Description of Artificial Sequence: Synthetic oligonucleotide
  Sense strand starting at position 2626 of SEQ ID NO: 916922
uuugcuauccuguaagaaa

SEQ ID NO: 1194539 - RNA, 19 nt, Artificial Sequence
  Description of Artificial Sequence: Synthetic oligonucleotide
  Antisense strand to SEQ ID NO: 1194538
uuucuuacaggauagcaaa

SEQ ID NO: 1194540 - RNA, 19 nt, Artificial Sequence
  Description of Artificial Sequence: Synthetic oligonucleotide
  Sense strand starting at position 2644 of SEQ ID NO: 916922
agugaagaauauguaguau

SEQ ID NO: 1194541 - RNA, 19 nt, Artificial Sequence
  Description of Artificial Sequence: Synthetic oligonucleotide
  Antisense strand to SEQ ID NO: 1194540
auacuacauauucuucacu

SEQ ID NO: 1194542 - RNA, 19 nt, Artificial Sequence
  Description of Artificial Sequence: Synthetic oligonucleotide
  Sense strand starting at position 2737 of SEQ ID NO: 916922
agggaauuaccagggcuau

SEQ ID NO: 1194543 - RNA, 19 nt, Artificial Sequence
  Description of Artificial Sequence: Synthetic oligonucleotide
  Antisense strand to SEQ ID NO: 1194542
auagcccugguaauucccu

SEQ ID NO: 1194544 - RNA, 19 nt, Artificial Sequence
  Description of Artificial Sequence: Synthetic oligonucleotide
  Sense strand starting at position 2738 of SEQ ID NO: 916922
gggaauuaccagggcuauu

SEQ ID NO: 1194545 - RNA, 19 nt, Artificial Sequence
  Description of Artificial Sequence: Synthetic oligonucleotide
  Antisense strand to SEQ ID NO: 1194544
aauagcccugguaauuccc

SEQ ID NO: 1194546 - RNA, 19 nt, Artificial Sequence
  Description of Artificial Sequence: Synthetic oligonucleotide
  Sense strand starting at position 2928 of SEQ ID NO: 916922
uuugaugccucaguauaua

SEQ ID NO: 1194547 - RNA, 19 nt, Artificial Sequence
  Description of Artificial Sequence: Synthetic oligonucleotide
  Antisense strand to SEQ ID NO: 1194546
uauauacugaggcaucaaa

SEQ ID NO: 1194548 - RNA, 19 nt, Artificial Sequence
  Description of Artificial Sequence: Synthetic oligonucleotide
  Sense strand starting at position 3001 of SEQ ID NO: 916922
uacucuuugggcugugaca

SEQ ID NO: 1194549 - RNA, 19 nt, Artificial Sequence
  Description of Artificial Sequence: Synthetic oligonucleotide
  Antisense strand to SEQ ID NO: 1194548
ugucacagcccaaagagua

SEQ ID NO: 1194550 - RNA, 19 nt, Artificial Sequence
  Description of Artificial Sequence: Synthetic oligonucleotide
  Sense strand starting at position 3030 of SEQ ID NO: 916922
aggagauacucccaucuca

SEQ ID NO: 1194551 - RNA, 19 nt, Artificial Sequence
  Description of Artificial Sequence: Synthetic oligonucleotide
  Antisense strand to SEQ ID NO: 1194550
ugagaugggaguaucuccu

SEQ ID NO: 1194552 - RNA, 19 nt, Artificial Sequence
  Description of Artificial Sequence: Synthetic oligonucleotide
  Sense strand starting at position 3089 of SEQ ID NO: 916922
uuccuuguaucuguaagaa

SEQ ID NO: 1194553 - RNA, 19 nt, Artificial Sequence
  Description of Artificial Sequence: Synthetic oligonucleotide
  Antisense strand to SEQ ID NO: 1194552
uucuuacagauacaaggaa

SEQ ID NO: 1194554 - RNA, 19 nt, Artificial Sequence
  Description of Artificial Sequence: Synthetic oligonucleotide
  Sense strand starting at position 3105 of SEQ ID NO: 916922
gaaauaaaggacuguguug

SEQ ID NO: 1194555 - RNA, 19 nt, Artificial Sequence
  Description of Artificial Sequence: Synthetic oligonucleotide
  Antisense strand to SEQ ID NO: 1194554
caacacaguccuuuauuuc

SEQ ID NO: 1194556 - RNA, 19 nt, Artificial Sequence
  Description of Artificial Sequence: Synthetic oligonucleotide
  Sense strand starting at position 3147 of SEQ ID NO: 916922
guaggaucgucguuaggga

SEQ ID NO: 1194557 - RNA, 19 nt, Artificial Sequence
  Description of Artificial Sequence: Synthetic oligonucleotide
  Antisense strand to SEQ ID NO: 1194556
ucccuaacgacgauccuac

SEQ ID NO: 1194558 - RNA, 19 nt, Artificial Sequence
  Description of Artificial Sequence: Synthetic oligonucleotide
  Sense strand starting at position 3148 of SEQ ID NO: 916922
uaggaucgucguuagggau

SEQ ID NO: 1194559 - RNA, 19 nt, Artificial Sequence
  Description of Artificial Sequence: Synthetic oligonucleotide
  Antisense strand to SEQ ID NO: 1194558
aucccuaacgacgauccua

SEQ ID NO: 1194560 - RNA, 19 nt, Artificial Sequence
  Description of Artificial Sequence: Synthetic oligonucleotide
  Sense strand starting at position 3181 of SEQ ID NO: 916922
ccaagagauuuccagggca

SEQ ID NO: 1194561 - RNA, 19 nt, Artificial Sequence
  Description of Artificial Sequence: Synthetic oligonucleotide
  Antisense strand to SEQ ID NO: 1194560
ugcccuggaaaucucuugg

SEQ ID NO: 1194562 - RNA, 19 nt, Artificial Sequence
  Description of Artificial Sequence: Synthetic oligonucleotide
  Sense strand starting at position 3195 of SEQ ID NO: 916922
gggcaacgugcuuugucau

SEQ ID NO: 1194563 - RNA, 19 nt, Artificial Sequence
  Description of Artificial Sequence: Synthetic oligonucleotide
  Antisense strand to SEQ ID NO: 1194562
augacaaagcacguugccc

SEQ ID NO: 1194564 - RNA, 19 nt, Artificial Sequence
  Description of Artificial Sequence: Synthetic oligonucleotide
  Sense strand starting at position 3324 of SEQ ID NO: 916922
cagggcuugcuuugagaug

SEQ ID NO: 1194565 - RNA, 19 nt, Artificial Sequence
  Description of Artificial Sequence: Synthetic oligonucleotide
  Antisense strand to SEQ ID NO: 1194564
caucucaaagcaagcccug

SEQ ID NO: 1194566 - RNA, 19 nt, Artificial Sequence
  Description of Artificial Sequence: Synthetic oligonucleotide
  Sense strand starting at position 3420 of SEQ ID NO: 916922
ugcugagcauguuuggaua

SEQ ID NO: 1194567 - RNA, 19 nt, Artificial Sequence
  Description of Artificial Sequence: Synthetic oligonucleotide
  Antisense strand to SEQ ID NO: 1194566
uauccaaacaugcucagca

SEQ ID NO: 1194568 - RNA, 19 nt, Artificial Sequence
  Description of Artificial Sequence: Synthetic oligonucleotide
  Sense strand starting at position 435 of SEQ ID NO: 916923
acacguuuaugaccuguga

SEQ ID NO: 1194569 - RNA, 19 nt, Artificial Sequence
  Description of Artificial Sequence: Synthetic oligonucleotide
  Antisense strand to SEQ ID NO: 1194568
ucacaggucauaaacgugu

SEQ ID NO: 1194570 - RNA, 19 nt, Artificial Sequence
  Description of Artificial Sequence: Synthetic oligonucleotide
  Sense strand starting at position 437 of SEQ ID NO: 916923
acguuuaugaccugugaau

SEQ ID NO: 1194571 - RNA, 19 nt, Artificial Sequence
  Description of Artificial Sequence: Synthetic oligonucleotide
  Antisense strand to SEQ ID NO: 1194570
auucacaggucauaaacgu

SEQ ID NO: 1194572 - RNA, 19 nt, Artificial Sequence
  Description of Artificial Sequence: Synthetic oligonucleotide
  Sense strand starting at position 439 of SEQ ID NO: 916923
guuuaugaccugugaaucu

SEQ ID NO: 1194573 - RNA, 19 nt, Artificial Sequence
  Description of Artificial Sequence: Synthetic oligonucleotide
  Antisense strand to SEQ ID NO: 1194572
agauucacaggucauaaac

SEQ ID NO: 1194574 - RNA, 19 nt, Artificial Sequence
  Description of Artificial Sequence: Synthetic oligonucleotide
  Sense strand starting at position 472 of SEQ ID NO: 916923
gguuaucaacuuugugaga

SEQ ID NO: 1194575 - RNA, 19 nt, Artificial Sequence
  Description of Artificial Sequence: Synthetic oligonucleotide
  Antisense strand to SEQ ID NO: 1194574
ucucacaaaguugauaacc

SEQ ID NO: 1194576 - RNA, 19 nt, Artificial Sequence
  Description of Artificial Sequence: Synthetic oligonucleotide
  Sense strand starting at position 473 of SEQ ID NO: 916923
guuaucaacuuugugagau

SEQ ID NO: 1194577 - RNA, 19 nt, Artificial Sequence
  Description of Artificial Sequence: Synthetic oligonucleotide
  Antisense strand to SEQ ID NO: 1194576
aucucacaaaguugauaac

SEQ ID NO: 1194578 - RNA, 19 nt, Artificial Sequence
  Description of Artificial Sequence: Synthetic oligonucleotide
  Sense strand starting at position 723 of SEQ ID NO: 916923
gccagcuggugucuauuua

SEQ ID NO: 1194579 - RNA, 19 nt, Artificial Sequence
  Description of Artificial Sequence: Synthetic oligonucleotide
  Antisense strand to SEQ ID NO: 1194578
uaaauagacaccagcuggc

SEQ ID NO: 1194580 - RNA, 19 nt, Artificial Sequence
  Description of Artificial Sequence: Synthetic oligonucleotide
  Sense strand starting at position 856 of SEQ ID NO: 916923
gugggagagucuucuacua

SEQ ID NO: 1194581 - RNA, 19 nt, Artificial Sequence
  Description of Artificial Sequence: Synthetic oligonucleotide
  Antisense strand to SEQ ID NO: 1194580
uaguagaagacucucccac

SEQ ID NO: 1194582 - RNA, 19 nt, Artificial Sequence
  Description of Artificial Sequence: Synthetic oligonucleotide
  Sense strand starting at position 1182 of SEQ ID NO: 916923
gucccaauucuugaggauu

SEQ ID NO: 1194583 - RNA, 19 nt, Artificial Sequence
  Description of Artificial Sequence: Synthetic oligonucleotide
  Antisense strand to SEQ ID NO: 1194582
aauccucaagaauugggac

SEQ ID NO: 1194584 - RNA, 19 nt, Artificial Sequence
  Description of Artificial Sequence: Synthetic oligonucleotide
  Sense strand starting at position 1184 of SEQ ID NO: 916923
cccaauucuugaggauuua

SEQ ID NO: 1194585 - RNA, 19 nt, Artificial Sequence
  Description of Artificial Sequence: Synthetic oligonucleotide
  Antisense strand to SEQ ID NO: 1194584
uaaauccucaagaauuggg

SEQ ID NO: 1194586 - RNA, 19 nt, Artificial Sequence
  Description of Artificial Sequence: Synthetic oligonucleotide
  Sense strand starting at position 1219 of SEQ ID NO: 916923
ggagcaagucagcaaagau

SEQ ID NO: 1194587 - RNA, 19 nt, Artificial Sequence
  Description of Artificial Sequence: Synthetic oligonucleotide
  Antisense strand to SEQ ID NO: 1194586
aucuuugcugacuugcucc

SEQ ID NO: 1194588 - RNA, 19 nt, Artificial Sequence
  Description of Artificial Sequence: Synthetic oligonucleotide
  Sense strand starting at position 1293 of SEQ ID NO: 916923
gagguuaagggcugaaaca

SEQ ID NO: 1194589 - RNA, 19 nt, Artificial Sequence
  Description of Artificial Sequence: Synthetic oligonucleotide
  Antisense strand to SEQ ID NO: 1194588
uguuucagcccuuaaccuc

SEQ ID NO: 1194590 - RNA, 19 nt, Artificial Sequence
  Description of Artificial Sequence: Synthetic oligonucleotide
  Sense strand starting at position 2101 of SEQ ID NO: 916923
cagcgauugguggagaagu

SEQ ID NO: 1194591 - RNA, 19 nt, Artificial Sequence
  Description of Artificial Sequence: Synthetic oligonucleotide
  Antisense strand to SEQ ID NO: 1194590
acuucuccaccaaucgcug

SEQ ID NO: 1194592 - RNA, 19 nt, Artificial Sequence
  Description of Artificial Sequence: Synthetic oligonucleotide
  Sense strand starting at position 2478 of SEQ ID NO: 916923
gcauaacuccgccaggaua

SEQ ID NO: 1194593 - RNA, 19 nt, Artificial Sequence
  Description of Artificial Sequence: Synthetic oligonucleotide
  Antisense strand to SEQ ID NO: 1194592
uauccuggcggaguuaugc

SEQ ID NO: 1194594 - RNA, 19 nt, Artificial Sequence
  Description of Artificial Sequence: Synthetic oligonucleotide
  Sense strand starting at position 2480 of SEQ ID NO: 916923
auaacuccgccaggauaau

SEQ ID NO: 1194595 - RNA, 19 nt, Artificial Sequence
  Description of Artificial Sequence: Synthetic oligonucleotide
  Antisense strand to SEQ ID NO: 1194594
auuauccuggcggaguuau

SEQ ID NO: 1194596 - RNA, 19 nt, Artificial Sequence
  Description of Artificial Sequence: Synthetic oligonucleotide
  Sense strand starting at position 2644 of SEQ ID NO: 916923
uugaaaguacugugauaag

SEQ ID NO: 1194597 - RNA, 19 nt, Artificial Sequence
  Description of Artificial Sequence: Synthetic oligonucleotide
  Antisense strand to SEQ ID NO: 1194596
cuuaucacaguacuuucaa

SEQ ID NO: 1194598 - RNA, 19 nt, Artificial Sequence
  Description of Artificial Sequence: Synthetic oligonucleotide
  Sense strand starting at position 2696 of SEQ ID NO: 916923
agggcaacucauugagguu

SEQ ID NO: 1194599 - RNA, 19 nt, Artificial Sequence
  Description of Artificial Sequence: Synthetic oligonucleotide
  Antisense strand to SEQ ID NO: 1194598
aaccucaaugaguugcccu

SEQ ID NO: 1194600 - RNA, 19 nt, Artificial Sequence
  Description of Artificial Sequence: Synthetic oligonucleotide
  Sense strand starting at position 2697 of SEQ ID NO: 916923
gggcaacucauugagguua

SEQ ID NO: 1194601 - RNA, 19 nt, Artificial Sequence
  Description of Artificial Sequence: Synthetic oligonucleotide
  Antisense strand to SEQ ID NO: 1194600
uaaccucaaugaguugccc

SEQ ID NO: 1194602 - RNA, 19 nt, Artificial Sequence
  Description of Artificial Sequence: Synthetic oligonucleotide
  Sense strand starting at position 2848 of SEQ ID NO: 916923
acauuuacguucuuacguu

SEQ ID NO: 1194603 - RNA, 19 nt, Artificial Sequence
  Description of Artificial Sequence: Synthetic oligonucleotide
  Antisense strand to SEQ ID NO: 1194602
aacguaagaacguaaaugu

SEQ ID NO: 1194604 - RNA, 19 nt, Artificial Sequence
  Description of Artificial Sequence: Synthetic oligonucleotide
  Sense strand starting at position 2876 of SEQ ID NO: 916923
agccuuccuccuggauaaa

SEQ ID NO: 1194605 - RNA, 19 nt, Artificial Sequence
  Description of Artificial Sequence: Synthetic oligonucleotide
  Antisense strand to SEQ ID NO: 1194604
uuuauccaggaggaaggcu

SEQ ID NO: 1194606 - RNA, 19 nt, Artificial Sequence
  Description of Artificial Sequence: Synthetic oligonucleotide
  Sense strand starting at position 2877 of SEQ ID NO: 916923
gccuuccuccuggauaaau

SEQ ID NO: 1194607 - RNA, 19 nt, Artificial Sequence
  Description of Artificial Sequence: Synthetic oligonucleotide
  Antisense strand to SEQ ID NO: 1194606
auuuauccaggaggaaggc

SEQ ID NO: 1194608 - RNA, 19 nt, Artificial Sequence
  Description of Artificial Sequence: Synthetic oligonucleotide
  Sense strand starting at position 2886 of SEQ ID NO: 916923
cuggauaaaucagauuaaa

SEQ ID NO: 1194609 - RNA, 19 nt, Artificial Sequence
  Description of Artificial Sequence: Synthetic oligonucleotide
  Antisense strand to SEQ ID NO: 1194608
uuuaaucugauuuauccag

SEQ ID NO: 1194610 - RNA, 19 nt, Artificial Sequence
  Description of Artificial Sequence: Synthetic oligonucleotide
  Sense strand starting at position 2909 of SEQ ID NO: 916923
ugaagacauguauauagcu

SEQ ID NO: 1194611 - RNA, 19 nt, Artificial Sequence
  Description of Artificial Sequence: Synthetic oligonucleotide
  Antisense strand to SEQ ID NO: 1194610
agcuauauacaugucuuca

SEQ ID NO: 1194612 - RNA, 19 nt, Artificial Sequence
  Description of Artificial Sequence: Synthetic oligonucleotide
  Sense strand starting at position 2935 of SEQ ID NO: 916923
guaguacaguuauuaauuc

SEQ ID NO: 1194613 - RNA, 19 nt, Artificial Sequence
  Description of Artificial Sequence: Synthetic oligonucleotide
  Antisense strand to SEQ ID NO: 1194612
gaauuaauaacuguacuac

SEQ ID NO: 1194614 - RNA, 19 nt, Artificial Sequence
  Description of Artificial Sequence: Synthetic oligonucleotide
  Sense strand starting at position 2944 of SEQ ID NO: 916923
uuauuaauucugugguuac

SEQ ID NO: 1194615 - RNA, 19 nt, Artificial Sequence
  Description of Artificial Sequence: Synthetic oligonucleotide
  Antisense strand to SEQ ID NO: 1194614
guaaccacagaauuaauaa

SEQ ID NO: 1194616 - RNA, 19 nt, Artificial Sequence
  Description of Artificial Sequence: Synthetic oligonucleotide
  Sense strand starting at position 3005 of SEQ ID NO: 916923
gucauagcucuugauuaug

SEQ ID NO: 1194617 - RNA, 19 nt, Artificial Sequence
  Description of Artificial Sequence: Synthetic oligonucleotide
  Antisense strand to SEQ ID NO: 1194616
cauaaucaagagcuaugac

SEQ ID NO: 1194618 - RNA, 19 nt, Artificial Sequence
  Description of Artificial Sequence: Synthetic oligonucleotide
  Sense strand starting at position 3133 of SEQ ID NO: 916923
uggucuccggcugagagau

SEQ ID NO: 1194619 - RNA, 19 nt, Artificial Sequence
  Description of Artificial Sequence: Synthetic oligonucleotide
  Antisense strand to SEQ ID NO: 1194618
aucucucagccggagacca

SEQ ID NO: 1194620 - RNA, 19 nt, Artificial Sequence
  Description of Artificial Sequence: Synthetic oligonucleotide
  Sense strand starting at position 3160 of SEQ ID NO: 916923
cuuucugaucuugguaaua

SEQ ID NO: 1194621 - RNA, 19 nt, Artificial Sequence
  Description of Artificial Sequence: Synthetic oligonucleotide
  Antisense strand to SEQ ID NO: 1194620
uauuaccaagaucagaaag

SEQ ID NO: 1194622 - RNA, 19 nt, Artificial Sequence
  Description of Artificial Sequence: Synthetic oligonucleotide
  Sense strand starting at position 3226 of SEQ ID NO: 916923
cacugaucgcuagacccau

SEQ ID NO: 1194623 - RNA, 19 nt, Artificial Sequence
  Description of Artificial Sequence: Synthetic oligonucleotide
  Antisense strand to SEQ ID NO: 1194622
augggucuagcgaucagug

SEQ ID NO: 1194624 - RNA, 19 nt, Artificial Sequence
  Description of Artificial Sequence: Synthetic oligonucleotide
  Sense strand starting at position 3262 of SEQ ID NO: 916923
cagccauggucaucagaag

SEQ ID NO: 1194625 - RNA, 19 nt, Artificial Sequence
  Description of Artificial Sequence: Synthetic oligonucleotide
  Antisense strand to SEQ ID NO: 1194624
cuucugaugaccauggcug

SEQ ID NO: 1194626 - RNA, 19 nt, Artificial Sequence
  Description of Artificial Sequence: Synthetic oligonucleotide
  Sense strand starting at position 3268 of SEQ ID NO: 916923
uggucaucagaaggucaua

SEQ ID NO: 1194627 - RNA, 19 nt, Artificial Sequence
  Description of Artificial Sequence: Synthetic oligonucleotide
  Antisense strand to SEQ ID NO: 1194626
uaugaccuucugaugacca

SEQ ID NO: 1194628 - RNA, 19 nt, Artificial Sequence
  Description of Artificial Sequence: Synthetic oligonucleotide
  Sense strand starting at position 3280 of SEQ ID NO: 916923
ggucauaucccagaucuau

SEQ ID NO: 1194629 - RNA, 19 nt, Artificial Sequence
  Description of Artificial Sequence: Synthetic oligonucleotide
  Antisense strand to SEQ ID NO: 1194628
auagaucugggauaugacc

SEQ ID NO: 1194630 - RNA, 19 nt, Artificial Sequence
  Description of Artificial Sequence: Synthetic oligonucleotide
  Sense strand starting at position 3583 of SEQ ID NO: 916923
ugaggaccuguguagcauu

SEQ ID NO: 1194631 - RNA, 19 nt, Artificial Sequence
  Description of Artificial Sequence: Synthetic oligonucleotide
  Antisense strand to SEQ ID NO: 1194630
aaugcuacacagguccuca

SEQ ID NO: 1194632 - RNA, 19 nt, Artificial Sequence
  Description of Artificial Sequence: Synthetic oligonucleotide
  Sense strand starting at position 3627 of SEQ ID NO: 916923
agcuguagagcccaaacau

SEQ ID NO: 1194633 - RNA, 19 nt, Artificial Sequence
  Description of Artificial Sequence: Synthetic oligonucleotide
  Antisense strand to SEQ ID NO: 1194632
auguuugggcucuacagcu

SEQ ID NO: 1194634 - RNA, 19 nt, Artificial Sequence
  Description of Artificial Sequence: Synthetic oligonucleotide
  Sense strand starting at position 3734 of SEQ ID NO: 916923
cagugacuuugggugcaga

SEQ ID NO: 1194635 - RNA, 19 nt, Artificial Sequence
  Description of Artificial Sequence: Synthetic oligonucleotide
  Antisense strand to SEQ ID NO: 1194634
ucugcacccaaagucacug

SEQ ID NO: 1194636 - RNA, 19 nt, Artificial Sequence
  Description of Artificial Sequence: Synthetic oligonucleotide
  Sense strand starting at position 3735 of SEQ ID NO: 916923
agugacuuugggugcagaa

SEQ ID NO: 1194637 - RNA, 19 nt, Artificial Sequence
  Description of Artificial Sequence: Synthetic oligonucleotide
  Antisense strand to SEQ ID NO: 1194636
uucugcacccaaagucacu

SEQ ID NO: 1194638 - RNA, 19 nt, Artificial Sequence
  Description of Artificial Sequence: Synthetic oligonucleotide
  Sense strand starting at position 3737 of SEQ ID NO: 916923
ugacuuugggugcagaaau

SEQ ID NO: 1194639 - RNA, 19 nt, Artificial Sequence
  Description of Artificial Sequence: Synthetic oligonucleotide
  Antisense strand to SEQ ID NO: 1194638
auuucugcacccaaaguca

SEQ ID NO: 1194640 - RNA, 19 nt, Artificial Sequence
  Description of Artificial Sequence: Synthetic oligonucleotide
  Sense strand starting at position 3819 of SEQ ID NO: 916923
acauuugucugcuuuccau

SEQ ID NO: 1194641 - RNA, 19 nt, Artificial Sequence
  Description of Artificial Sequence: Synthetic oligonucleotide
  Antisense strand to SEQ ID NO: 1194640
auggaaagcagacaaaugu

SEQ ID NO: 1194642 - RNA, 19 nt, Artificial Sequence
  Description of Artificial Sequence: Synthetic oligonucleotide
  Sense strand starting at position 3825 of SEQ ID NO: 916923
gucugcuuuccauaugaag

SEQ ID NO: 1194643 - RNA, 19 nt, Artificial Sequence
  Description of Artificial Sequence: Synthetic oligonucleotide
  Antisense strand to SEQ ID NO: 1194642
cuucauauggaaagcagac

SEQ ID NO: 1194644 - RNA, 19 nt, Artificial Sequence
  Description of Artificial Sequence: Synthetic oligonucleotide
  Sense strand starting at position 3913 of SEQ ID NO: 916923
cacgcaugucuggagcaga

SEQ ID NO: 1194645 - RNA, 19 nt, Artificial Sequence
  Description of Artificial Sequence: Synthetic oligonucleotide
  Antisense strand to SEQ ID NO: 1194644
ucugcuccagacaugcgug

SEQ ID NO: 1194646 - RNA, 19 nt, Artificial Sequence
  Description of Artificial Sequence: Synthetic oligonucleotide
  Sense strand starting at position 3916 of SEQ ID NO: 916923
gcaugucuggagcagagua

SEQ ID NO: 1194647 - RNA, 19 nt, Artificial Sequence
  Description of Artificial Sequence: Synthetic oligonucleotide
  Antisense strand to SEQ ID NO: 1194646
uacucugcuccagacaugc

SEQ ID NO: 1194648 - RNA, 19 nt, Artificial Sequence
  Description of Artificial Sequence: Synthetic oligonucleotide
  Sense strand starting at position 22 of SEQ ID NO: 916924
ccacucaguaagugaguuu

SEQ ID NO: 1194649 - RNA, 19 nt, Artificial Sequence
  Description of Artificial Sequence: Synthetic oligonucleotide
  Antisense strand to SEQ ID NO: 1194648
aaacucacuuacugagugg

SEQ ID NO: 1194650 - RNA, 19 nt, Artificial Sequence
  Description of Artificial Sequence: Synthetic oligonucleotide
  Sense strand starting at position 25 of SEQ ID NO: 916924
cucaguaagugaguuugga

SEQ ID NO: 1194651 - RNA, 19 nt, Artificial Sequence
  Description of Artificial Sequence: Synthetic oligonucleotide
  Antisense strand to SEQ ID NO: 1194650
uccaaacucacuuacugag

SEQ ID NO: 1194652 - RNA, 19 nt, Artificial Sequence
  Description of Artificial Sequence: Synthetic oligonucleotide
  Sense strand starting at position 42 of SEQ ID NO: 916924
gaaagcaggcuuugaaucu

SEQ ID NO: 1194653 - RNA, 19 nt, Artificial Sequence
  Description of Artificial Sequence: Synthetic oligonucleotide
  Antisense strand to SEQ ID NO: 1194652
agauucaaagccugcuuuc

SEQ ID NO: 1194654 - RNA, 19 nt, Artificial Sequence
  Description of Artificial Sequence: Synthetic oligonucleotide
  Sense strand starting at position 66 of SEQ ID NO: 916924
gggauuaaccaucgcacug

SEQ ID NO: 1194655 - RNA, 19 nt, Artificial Sequence
  Description of Artificial Sequence: Synthetic oligonucleotide
  Antisense strand to SEQ ID NO: 1194654
cagugcgaugguuaauccc

SEQ ID NO: 1194656 - RNA, 19 nt, Artificial Sequence
  Description of Artificial Sequence: Synthetic oligonucleotide
  Sense strand starting at position 106 of SEQ ID NO: 916924
gggcaaaucugaucauccu

SEQ ID NO: 1194657 - RNA, 19 nt, Artificial Sequence
  Description of Artificial Sequence: Synthetic oligonucleotide
  Antisense strand to SEQ ID NO: 1194656
aggaugaucagauuugccc

SEQ ID NO: 1194658 - RNA, 19 nt, Artificial Sequence
  Description of Artificial Sequence: Synthetic oligonucleotide
  Sense strand starting at position 107 of SEQ ID NO: 916924
ggcaaaucugaucauccua

SEQ ID NO: 1194659 - RNA, 19 nt, Artificial Sequence
  Description of Artificial Sequence: Synthetic oligonucleotide
  Antisense strand to SEQ ID NO: 1194658
uaggaugaucagauuugcc

SEQ ID NO: 1194660 - RNA, 19 nt, Artificial Sequence
  Description of Artificial Sequence: Synthetic oligonucleotide
  Sense strand starting at position 112 of SEQ ID NO: 916924
aucugaucauccuaagaag

SEQ ID NO: 1194661 - RNA, 19 nt, Artificial Sequence
  Description of Artificial Sequence: Synthetic oligonucleotide
  Antisense strand to SEQ ID NO: 1194660
cuucuuaggaugaucagau

SEQ ID NO: 1194662 - RNA, 19 nt, Artificial Sequence
  Description of Artificial Sequence: Synthetic oligonucleotide
  Sense strand starting at position 223 of SEQ ID NO: 916924
cggguuuaguaagcuagga

SEQ ID NO: 1194663 - RNA, 19 nt, Artificial Sequence
  Description of Artificial Sequence: Synthetic oligonucleotide
  Antisense strand to SEQ ID NO: 1194662
uccuagcuuacuaaacccg

SEQ ID NO: 1194664 - RNA, 19 nt, Artificial Sequence
  Description of Artificial Sequence: Synthetic oligonucleotide
  Sense strand starting at position 227 of SEQ ID NO: 916924
uuuaguaagcuaggaggaa

SEQ ID NO: 1194665 - RNA, 19 nt, Artificial Sequence
  Description of Artificial Sequence: Synthetic oligonucleotide
  Antisense strand to SEQ ID NO: 1194664
uuccuccuagcuuacuaaa

SEQ ID NO: 1194666 - RNA, 19 nt, Artificial Sequence
  Description of Artificial Sequence: Synthetic oligonucleotide
  Sense strand starting at position 228 of SEQ ID NO: 916924
uuaguaagcuaggaggaaa

SEQ ID NO: 1194667 - RNA, 19 nt, Artificial Sequence
  Description of Artificial Sequence: Synthetic oligonucleotide
  Antisense strand to SEQ ID NO: 1194666
uuuccuccuagcuuacuaa

SEQ ID NO: 1194668 - RNA, 19 nt, Artificial Sequence
  Description of Artificial Sequence: Synthetic oligonucleotide
  Sense strand starting at position 576 of SEQ ID NO: 916924
ggacguuucugcuccaaga

SEQ ID NO: 1194669 - RNA, 19 nt, Artificial Sequence
  Description of Artificial Sequence: Synthetic oligonucleotide
  Antisense strand to SEQ ID NO: 1194668
ucuuggagcagaaacgucc

SEQ ID NO: 1194670 - RNA, 19 nt, Artificial Sequence
  Description of Artificial Sequence: Synthetic oligonucleotide
  Sense strand starting at position 670 of SEQ ID NO: 916924
ugcucagguuccuccaaua

SEQ ID NO: 1194671 - RNA, 19 nt, Artificial Sequence
  Description of Artificial Sequence: Synthetic oligonucleotide
  Antisense strand to SEQ ID NO: 1194670
uauuggaggaaccugagca

SEQ ID NO: 1194672 - RNA, 19 nt, Artificial Sequence
  Description of Artificial Sequence: Synthetic oligonucleotide
  Sense strand starting at position 690 of SEQ ID NO: 916924
gccuuucucuagcccaaga

SEQ ID NO: 1194673 - RNA, 19 nt, Artificial Sequence
  Description of Artificial Sequence: Synthetic oligonucleotide
  Antisense strand to SEQ ID NO: 1194672
ucuugggcuagagaaaggc

SEQ ID NO: 1194674 - RNA, 19 nt, Artificial Sequence
  Description of Artificial Sequence: Synthetic oligonucleotide
  Sense strand starting at position 692 of SEQ ID NO: 916924
cuuucucuagcccaagaga

SEQ ID NO: 1194675 - RNA, 19 nt, Artificial Sequence
  Description of Artificial Sequence: Synthetic oligonucleotide
  Antisense strand to SEQ ID NO: 1194674
ucucuugggcuagagaaag

SEQ ID NO: 1194676 - RNA, 19 nt, Artificial Sequence
  Description of Artificial Sequence: Synthetic oligonucleotide
  Sense strand starting at position 780 of SEQ ID NO: 916924
cauggcccuggcuagaaau

SEQ ID NO: 1194677 - RNA, 19 nt, Artificial Sequence
  Description of Artificial Sequence: Synthetic oligonucleotide
  Antisense strand to SEQ ID NO: 1194676
auuucuagccagggccaug

SEQ ID NO: 1194678 - RNA, 19 nt, Artificial Sequence
  Description of Artificial Sequence: Synthetic oligonucleotide
  Sense strand starting at position 782 of SEQ ID NO: 916924
uggcccuggcuagaaauau

SEQ ID NO: 1194679 - RNA, 19 nt, Artificial Sequence
  Description of Artificial Sequence: Synthetic oligonucleotide
  Antisense strand to SEQ ID NO: 1194678
auauuucuagccagggcca

SEQ ID NO: 1194680 - RNA, 19 nt, Artificial Sequence
  Description of Artificial Sequence: Synthetic oligonucleotide
  Sense strand starting at position 1024 of SEQ ID NO: 916924
ggccuaaacucgcuuaucu

SEQ ID NO: 1194681 - RNA, 19 nt, Artificial Sequence
  Description of Artificial Sequence: Synthetic oligonucleotide
  Antisense strand to SEQ ID NO: 1194680
agauaagcgaguuuaggcc

SEQ ID NO: 1194682 - RNA, 19 nt, Artificial Sequence
  Description of Artificial Sequence: Synthetic oligonucleotide
  Sense strand starting at position 1059 of SEQ ID NO: 916924
gaguccucugauuguggga

SEQ ID NO: 1194683 - RNA, 19 nt, Artificial Sequence
  Description of Artificial Sequence: Synthetic oligonucleotide
  Antisense strand to SEQ ID NO: 1194682
ucccacaaucagaggacuc

SEQ ID NO: 1194684 - RNA, 19 nt, Artificial Sequence
  Description of Artificial Sequence: Synthetic oligonucleotide
  Sense strand starting at position 1197 of SEQ ID NO: 916924
ugggaaaucucagcgucua

SEQ ID NO: 1194685 - RNA, 19 nt, Artificial Sequence
  Description of Artificial Sequence: Synthetic oligonucleotide
  Antisense strand to SEQ ID NO: 1194684
uagacgcugagauuuccca

SEQ ID NO: 1194686 - RNA, 19 nt, Artificial Sequence
  Description of Artificial Sequence: Synthetic oligonucleotide
  Sense strand starting at position 1198 of SEQ ID NO: 916924
gggaaaucucagcgucuac

SEQ ID NO: 1194687 - RNA, 19 nt, Artificial Sequence
  Description of Artificial Sequence: Synthetic oligonucleotide
  Antisense strand to SEQ ID NO: 1194686
guagacgcugagauuuccc

SEQ ID NO: 1194688 - RNA, 19 nt, Artificial Sequence
  Description of Artificial Sequence: Synthetic oligonucleotide
  Sense strand starting at position 1534 of SEQ ID NO: 916924
cccagauuccuccaggagu

SEQ ID NO: 1194689 - RNA, 19 nt, Artificial Sequence
  Description of Artificial Sequence: Synthetic oligonucleotide
  Antisense strand to SEQ ID NO: 1194688
acuccuggaggaaucuggg

SEQ ID NO: 1194690 - RNA, 19 nt, Artificial Sequence
  Description of Artificial Sequence: Synthetic oligonucleotide
  Sense strand starting at position 1536 of SEQ ID NO: 916924
cagauuccuccaggaguuc

SEQ ID NO: 1194691 - RNA, 19 nt, Artificial Sequence
  Description of Artificial Sequence: Synthetic oligonucleotide
  Antisense strand to SEQ ID NO: 1194690
gaacuccuggaggaaucug

SEQ ID NO: 1194692 - RNA, 19 nt, Artificial Sequence
  Description of Artificial Sequence: Synthetic oligonucleotide
  Sense strand starting at position 1548 of SEQ ID NO: 916924
ggaguucgaaacugcuaaa

SEQ ID NO: 1194693 - RNA, 19 nt, Artificial Sequence
  Description of Artificial Sequence: Synthetic oligonucleotide
  Antisense strand to SEQ ID NO: 1194692
uuuagcaguuucgaacucc

SEQ ID NO: 1194694 - RNA, 19 nt, Artificial Sequence
  Description of Artificial Sequence: Synthetic oligonucleotide
  Sense strand starting at position 1779 of SEQ ID NO: 916924
uagcucuguccagcgaguu

SEQ ID NO: 1194695 - RNA, 19 nt, Artificial Sequence
  Description of Artificial Sequence: Synthetic oligonucleotide
  Antisense strand to SEQ ID NO: 1194694
aacucgcuggacagagcua

SEQ ID NO: 1194696 - RNA, 19 nt, Artificial Sequence
  Description of Artificial Sequence: Synthetic oligonucleotide
  Sense strand starting at position 3292 of SEQ ID NO: 916924
gcaauuuacucugugauuc

SEQ ID NO: 1194697 - RNA, 19 nt, Artificial Sequence
  Description of Artificial Sequence: Synthetic oligonucleotide
  Antisense strand to SEQ ID NO: 1194696
gaaucacagaguaaauugc

SEQ ID NO: 1194698 - RNA, 19 nt, Artificial Sequence
  Description of Artificial Sequence: Synthetic oligonucleotide
  Sense strand starting at position 3309 of SEQ ID NO: 916924
ucauucucgucaucuguaa

SEQ ID NO: 1194699 - RNA, 19 nt, Artificial Sequence
  Description of Artificial Sequence: Synthetic oligonucleotide
  Antisense strand to SEQ ID NO: 1194698
uuacagaugacgagaauga

SEQ ID NO: 1194700 - RNA, 19 nt, Artificial Sequence
  Description of Artificial Sequence: Synthetic oligonucleotide
  Sense strand starting at position 3341 of SEQ ID NO: 916924
agucuuaacccauaaugug

SEQ ID NO: 1194701 - RNA, 19 nt, Artificial Sequence
  Description of Artificial Sequence: Synthetic oligonucleotide
  Antisense strand to SEQ ID NO: 1194700
cacauuauggguuaagacu

SEQ ID NO: 1194702 - RNA, 19 nt, Artificial Sequence
  Description of Artificial Sequence: Synthetic oligonucleotide
  Sense strand starting at position 3349 of SEQ ID NO: 916924
cccauaaugugagaauaaa

SEQ ID NO: 1194703 - RNA, 19 nt, Artificial Sequence
  Description of Artificial Sequence: Synthetic oligonucleotide
  Antisense strand to SEQ ID NO: 1194702
uuuauucucacauuauggg

SEQ ID NO: 1194704 - RNA, 19 nt, Artificial Sequence
  Description of Artificial Sequence: Synthetic oligonucleotide
  Sense strand starting at position 3523 of SEQ ID NO: 916924
aaggauauugaggguguau

SEQ ID NO: 1194705 - RNA, 19 nt, Artificial Sequence
  Description of Artificial Sequence: Synthetic oligonucleotide
  Antisense strand to SEQ ID NO: 1194704
auacacccucaauauccuu

SEQ ID NO: 1194706 - RNA, 19 nt, Artificial Sequence
  Description of Artificial Sequence: Synthetic oligonucleotide
  Sense strand starting at position 3525 of SEQ ID NO: 916924
ggauauugaggguguaugu

SEQ ID NO: 1194707 - RNA, 19 nt, Artificial Sequence
  Description of Artificial Sequence: Synthetic oligonucleotide
  Antisense strand to SEQ ID NO: 1194706
acauacacccucaauaucc

SEQ ID NO: 1194708 - RNA, 19 nt, Artificial Sequence
  Description of Artificial Sequence: Synthetic oligonucleotide
  Sense strand starting at position 3623 of SEQ ID NO: 916924
uguccauuggcuuguccaa

SEQ ID NO: 1194709 - RNA, 19 nt, Artificial Sequence
  Description of Artificial Sequence: Synthetic oligonucleotide
  Antisense strand to SEQ ID NO: 1194708
uuggacaagccaauggaca

SEQ ID NO: 1194710 - RNA, 19 nt, Artificial Sequence
  Description of Artificial Sequence: Synthetic oligonucleotide
  Sense strand starting at position 3625 of SEQ ID NO: 916924
uccauuggcuuguccaaca

SEQ ID NO: 1194711 - RNA, 19 nt, Artificial Sequence
  Description of Artificial Sequence: Synthetic oligonucleotide
  Antisense strand to SEQ ID NO: 1194710
uguuggacaagccaaugga

SEQ ID NO: 1194712 - RNA, 19 nt, Artificial Sequence
  Description of Artificial Sequence: Synthetic oligonucleotide
  Sense strand starting at position 3655 of SEQ ID NO: 916924
gaucaaggugugugcacau

SEQ ID NO: 1194713 - RNA, 19 nt, Artificial Sequence
  Description of Artificial Sequence: Synthetic oligonucleotide
  Antisense strand to SEQ ID NO: 1194712
augugcacacaccuugauc

SEQ ID NO: 1194714 - RNA, 19 nt, Artificial Sequence
  Description of Artificial Sequence: Synthetic oligonucleotide
  Sense strand starting at position 3695 of SEQ ID NO: 916924
uuuguaugugcucccgagu

SEQ ID NO: 1194715 - RNA, 19 nt, Artificial Sequence
  Description of Artificial Sequence: Synthetic oligonucleotide
  Antisense strand to SEQ ID NO: 1194714
acucgggagcacauacaaa

SEQ ID NO: 1194716 - RNA, 19 nt, Artificial Sequence
  Description of Artificial Sequence: Synthetic oligonucleotide
  Sense strand starting at position 3763 of SEQ ID NO: 916924
accaucuaagggugucaga

SEQ ID NO: 1194717 - RNA, 19 nt, Artificial Sequence
  Description of Artificial Sequence: Synthetic oligonucleotide
  Antisense strand to SEQ ID NO: 1194716
ucugacacccuuagauggu

SEQ ID NO: 1194718 - RNA, 19 nt, Artificial Sequence
  Description of Artificial Sequence: Synthetic oligonucleotide
  Sense strand starting at position 3772 of SEQ ID NO: 916924
gggugucagagcuacaagu

SEQ ID NO: 1194719 - RNA, 19 nt, Artificial Sequence
  Description of Artificial Sequence: Synthetic oligonucleotide
  Antisense strand to SEQ ID NO: 1194718
acuuguagcucugacaccc

SEQ ID NO: 1194720 - RNA, 19 nt, Artificial Sequence
  Description of Artificial Sequence: Synthetic oligonucleotide
  Sense strand starting at position 3821 of SEQ ID NO: 916924
gaguaaaugugaucucuga

SEQ ID NO: 1194721 - RNA, 19 nt, Artificial Sequence
  Description of Artificial Sequence: Synthetic oligonucleotide
  Antisense strand to SEQ ID NO: 1194720
ucagagaucacauuuacuc

SEQ ID NO: 1194722 - RNA, 19 nt, Artificial Sequence
  Description of Artificial Sequence: Synthetic oligonucleotide
  Sense strand starting at position 3871 of SEQ ID NO: 916924
ggagcaaguacugguagaa

SEQ ID NO: 1194723 - RNA, 19 nt, Artificial Sequence
  Description of Artificial Sequence: Synthetic oligonucleotide
  Antisense strand to SEQ ID NO: 1194722
uucuaccaguacuugcucc

SEQ ID NO: 1194724 - RNA, 19 nt, Artificial Sequence
  Description of Artificial Sequence: Synthetic oligonucleotide
  Sense strand starting at position 3929 of SEQ ID NO: 916924
augggaacacugugaugua

SEQ ID NO: 1194725 - RNA, 19 nt, Artificial Sequence
  Description of Artificial Sequence: Synthetic oligonucleotide
  Antisense strand to SEQ ID NO: 1194724
uacaucacaguguucccau

SEQ ID NO: 1194726 - RNA, 19 nt, Artificial Sequence
  Description of Artificial Sequence: Synthetic oligonucleotide
  Sense strand starting at position 3971 of SEQ ID NO: 916924
gcaaaucuggcuuggguau

SEQ ID NO: 1194727 - RNA, 19 nt, Artificial Sequence
  Description of Artificial Sequence: Synthetic oligonucleotide
  Antisense strand to SEQ ID NO: 1194726
auacccaagccagauuugc

SEQ ID NO: 1194728 - RNA, 19 nt, Artificial Sequence
  Description of Artificial Sequence: Synthetic oligonucleotide
  Sense strand starting at position 140 of SEQ ID NO: 916925
cugagucaaugccugagau

SEQ ID NO: 1194729 - RNA, 19 nt, Artificial Sequence
  Description of Artificial Sequence: Synthetic oligonucleotide
  Antisense strand to SEQ ID NO: 1194728
aucucaggcauugacucag

SEQ ID NO: 1194730 - RNA, 19 nt, Artificial Sequence
  Description of Artificial Sequence: Synthetic oligonucleotide
  Sense strand starting at position 141 of SEQ ID NO: 916925
ugagucaaugccugagaug

SEQ ID NO: 1194731 - RNA, 19 nt, Artificial Sequence
  Description of Artificial Sequence: Synthetic oligonucleotide
  Antisense strand to SEQ ID NO: 1194730
caucucaggcauugacuca

SEQ ID NO: 1194732 - RNA, 19 nt, Artificial Sequence
  Description of Artificial Sequence: Synthetic oligonucleotide
  Sense strand starting at position 256 of SEQ ID NO: 916925
gcucucuuagaguggcaga

SEQ ID NO: 1194733 - RNA, 19 nt, Artificial Sequence
  Description of Artificial Sequence: Synthetic oligonucleotide
  Antisense strand to SEQ ID NO: 1194732
ucugccacucuaagagagc

SEQ ID NO: 1194734 - RNA, 19 nt, Artificial Sequence
  Description of Artificial Sequence: Synthetic oligonucleotide
  Sense strand starting at position 261 of SEQ ID NO: 916925
cuuagaguggcagaggauu

SEQ ID NO: 1194735 - RNA, 19 nt, Artificial Sequence
  Description of Artificial Sequence: Synthetic oligonucleotide
  Antisense strand to SEQ ID NO: 1194734
aauccucugccacucuaag

SEQ ID NO: 1194736 - RNA, 19 nt, Artificial Sequence
  Description of Artificial Sequence: Synthetic oligonucleotide
  Sense strand starting at position 303 of SEQ ID NO: 916925
cugguucugugggcaaaga

SEQ ID NO: 1194737 - RNA, 19 nt, Artificial Sequence
  Description of Artificial Sequence: Synthetic oligonucleotide
  Antisense strand to SEQ ID NO: 1194736
ucuuugcccacagaaccag

SEQ ID NO: 1194738 - RNA, 19 nt, Artificial Sequence
  Description of Artificial Sequence: Synthetic oligonucleotide
  Sense strand starting at position 358 of SEQ ID NO: 916925
aaauaugaguguuagauga

SEQ ID NO: 1194739 - RNA, 19 nt, Artificial Sequence
  Description of Artificial Sequence: Synthetic oligonucleotide
  Antisense strand to SEQ ID NO: 1194738
ucaucuaacacucauauuu

SEQ ID NO: 1194740 - RNA, 19 nt, Artificial Sequence
  Description of Artificial Sequence: Synthetic oligonucleotide
  Sense strand starting at position 365 of SEQ ID NO: 916925
aguguuagaugaguggaaa

SEQ ID NO: 1194741 - RNA, 19 nt, Artificial Sequence
  Description of Artificial Sequence: Synthetic oligonucleotide
  Antisense strand to SEQ ID NO: 1194740
uuuccacucaucuaacacu

SEQ ID NO: 1194742 - RNA, 19 nt, Artificial Sequence
  Description of Artificial Sequence: Synthetic oligonucleotide
  Sense strand starting at position 575 of SEQ ID NO: 916925
aggacuccaugagauaauu

SEQ ID NO: 1194743 - RNA, 19 nt, Artificial Sequence
  Description of Artificial Sequence: Synthetic oligonucleotide
  Antisense strand to SEQ ID NO: 1194742
aauuaucucauggaguccu

SEQ ID NO: 1194744 - RNA, 19 nt, Artificial Sequence
  Description of Artificial Sequence: Synthetic oligonucleotide
  Sense strand starting at position 992 of SEQ ID NO: 916925
aagcacuuacuguguauga

SEQ ID NO: 1194745 - RNA, 19 nt, Artificial Sequence
  Description of Artificial Sequence: Synthetic oligonucleotide
  Antisense strand to SEQ ID NO: 1194744
ucauacacaguaagugcuu

SEQ ID NO: 1194746 - RNA, 19 nt, Artificial Sequence
  Description of Artificial Sequence: Synthetic oligonucleotide
  Sense strand starting at position 1001 of SEQ ID NO: 916925
cuguguaugaggcauuaca

SEQ ID NO: 1194747 - RNA, 19 nt, Artificial Sequence
  Description of Artificial Sequence: Synthetic oligonucleotide
  Antisense strand to SEQ ID NO: 1194746
uguaaugccucauacacag

SEQ ID NO: 1194748 - RNA, 19 nt, Artificial Sequence
  Description of Artificial Sequence: Synthetic oligonucleotide
  Sense strand starting at position 1012 of SEQ ID NO: 916925
gcauuacacucaguguauu

SEQ ID NO: 1194749 - RNA, 19 nt, Artificial Sequence
  Description of Artificial Sequence: Synthetic oligonucleotide
  Antisense strand to SEQ ID NO: 1194748
aauacacugaguguaaugc

SEQ ID NO: 1194750 - RNA, 19 nt, Artificial Sequence
  Description of Artificial Sequence: Synthetic oligonucleotide
  Sense strand starting at position 1129 of SEQ ID NO: 916925
ccacucaguaagugaguuu

SEQ ID NO: 1194751 - RNA, 19 nt, Artificial Sequence
  Description of Artificial Sequence: Synthetic oligonucleotide
  Antisense strand to SEQ ID NO: 1194750
aaacucacuuacugagugg

SEQ ID NO: 1194752 - RNA, 19 nt, Artificial Sequence
  Description of Artificial Sequence: Synthetic oligonucleotide
  Sense strand starting at position 1132 of SEQ ID NO: 916925
cucaguaagugaguuugga

SEQ ID NO: 1194753 - RNA, 19 nt, Artificial Sequence
  Description of Artificial Sequence: Synthetic oligonucleotide
  Antisense strand to SEQ ID NO: 1194752
uccaaacucacuuacugag

SEQ ID NO: 1194754 - RNA, 19 nt, Artificial Sequence
  Description of Artificial Sequence: Synthetic oligonucleotide
  Sense strand starting at position 1149 of SEQ ID NO: 916925
gaaagcaggcuuugaaucu

SEQ ID NO: 1194755 - RNA, 19 nt, Artificial Sequence
  Description of Artificial Sequence: Synthetic oligonucleotide
  Antisense strand to SEQ ID NO: 1194754
agauucaaagccugcuuuc

SEQ ID NO: 1194756 - RNA, 19 nt, Artificial Sequence
  Description of Artificial Sequence: Synthetic oligonucleotide
  Sense strand starting at position 1173 of SEQ ID NO: 916925
gggauuaaccaucgcacug

SEQ ID NO: 1194757 - RNA, 19 nt, Artificial Sequence
  Description of Artificial Sequence: Synthetic oligonucleotide
  Antisense strand to SEQ ID NO: 1194756
cagugcgaugguuaauccc

SEQ ID NO: 1194758 - RNA, 19 nt, Artificial Sequence
  Description of Artificial Sequence: Synthetic oligonucleotide
  Sense strand starting at position 1185 of SEQ ID NO: 916925
cgcacuguguuguuaggau

SEQ ID NO: 1194759 - RNA, 19 nt, Artificial Sequence
  Description of Artificial Sequence: Synthetic oligonucleotide
  Antisense strand to SEQ ID NO: 1194758
auccuaacaacacagugcg

SEQ ID NO: 1194760 - RNA, 19 nt, Artificial Sequence
  Description of Artificial Sequence: Synthetic oligonucleotide
  Sense strand starting at position 1213 of SEQ ID NO: 916925
gggcaaaucugaucauccu

SEQ ID NO: 1194761 - RNA, 19 nt, Artificial Sequence
  Description of Artificial Sequence: Synthetic oligonucleotide
  Antisense strand to SEQ ID NO: 1194760
aggaugaucagauuugccc

SEQ ID NO: 1194762 - RNA, 19 nt, Artificial Sequence
  Description of Artificial Sequence: Synthetic oligonucleotide
  Sense strand starting at position 1214 of SEQ ID NO: 916925
ggcaaaucugaucauccua

SEQ ID NO: 1194763 - RNA, 19 nt, Artificial Sequence
  Description of Artificial Sequence: Synthetic oligonucleotide
  Antisense strand to SEQ ID NO: 1194762
uaggaugaucagauuugcc

SEQ ID NO: 1194764 - RNA, 19 nt, Artificial Sequence
  Description of Artificial Sequence: Synthetic oligonucleotide
  Sense strand starting at position 1219 of SEQ ID NO: 916925
aucugaucauccuaagaag

SEQ ID NO: 1194765 - RNA, 19 nt, Artificial Sequence
  Description of Artificial Sequence: Synthetic oligonucleotide
  Antisense strand to SEQ ID NO: 1194764
cuucuuaggaugaucagau

SEQ ID NO: 1194766 - RNA, 19 nt, Artificial Sequence
  Description of Artificial Sequence: Synthetic oligonucleotide
  Sense strand starting at position 1330 of SEQ ID NO: 916925
cggguuuaguaagcuagga

SEQ ID NO: 1194767 - RNA, 19 nt, Artificial Sequence
  Description of Artificial Sequence: Synthetic oligonucleotide
  Antisense strand to SEQ ID NO: 1194766
uccuagcuuacuaaacccg

SEQ ID NO: 1194768 - RNA, 19 nt, Artificial Sequence
  Description of Artificial Sequence: Synthetic oligonucleotide
  Sense strand starting at position 1334 of SEQ ID NO: 916925
uuuaguaagcuaggaggaa

SEQ ID NO: 1194769 - RNA, 19 nt, Artificial Sequence
  Description of Artificial Sequence: Synthetic oligonucleotide
  Antisense strand to SEQ ID NO: 1194768
uuccuccuagcuuacuaaa

SEQ ID NO: 1194770 - RNA, 19 nt, Artificial Sequence
  Description of Artificial Sequence: Synthetic oligonucleotide
  Sense strand starting at position 1335 of SEQ ID NO: 916925
uuaguaagcuaggaggaaa

SEQ ID NO: 1194771 - RNA, 19 nt, Artificial Sequence
  Description of Artificial Sequence: Synthetic oligonucleotide
  Antisense strand to SEQ ID NO: 1194770
uuuccuccuagcuuacuaa

SEQ ID NO: 1194772 - RNA, 19 nt, Artificial Sequence
  Description of Artificial Sequence: Synthetic oligonucleotide
  Sense strand starting at position 1683 of SEQ ID NO: 916925
ggacguuucugcuccaaga

SEQ ID NO: 1194773 - RNA, 19 nt, Artificial Sequence
  Description of Artificial Sequence: Synthetic oligonucleotide
  Antisense strand to SEQ ID NO: 1194772
ucuuggagcagaaacgucc

SEQ ID NO: 1194774 - RNA, 19 nt, Artificial Sequence
  Description of Artificial Sequence: Synthetic oligonucleotide
  Sense strand starting at position 1777 of SEQ ID NO: 916925
ugcucagguuccuccaaua

SEQ ID NO: 1194775 - RNA, 19 nt, Artificial Sequence
  Description of Artificial Sequence: Synthetic oligonucleotide
  Antisense strand to SEQ ID NO: 1194774
uauuggaggaaccugagca

SEQ ID NO: 1194776 - RNA, 19 nt, Artificial Sequence
  Description of Artificial Sequence: Synthetic oligonucleotide
  Sense strand starting at position 1797 of SEQ ID NO: 916925
gccuuucucuagcccaaga

SEQ ID NO: 1194777 - RNA, 19 nt, Artificial Sequence
  Description of Artificial Sequence: Synthetic oligonucleotide
  Antisense strand to SEQ ID NO: 1194776
ucuugggcuagagaaaggc

SEQ ID NO: 1194778 - RNA, 19 nt, Artificial Sequence
  Description of Artificial Sequence: Synthetic oligonucleotide
  Sense strand starting at position 1799 of SEQ ID NO: 916925
cuuucucuagcccaagaga

SEQ ID NO: 1194779 - RNA, 19 nt, Artificial Sequence
  Description of Artificial Sequence: Synthetic oligonucleotide
  Antisense strand to SEQ ID NO: 1194778
ucucuugggcuagagaaag

SEQ ID NO: 1194780 - RNA, 19 nt, Artificial Sequence
  Description of Artificial Sequence: Synthetic oligonucleotide
  Sense strand starting at position 1887 of SEQ ID NO: 916925
cauggcccuggcuagaaau

SEQ ID NO: 1194781 - RNA, 19 nt, Artificial Sequence
  Description of Artificial Sequence: Synthetic oligonucleotide
  Antisense strand to SEQ ID NO: 1194780
auuucuagccagggccaug

SEQ ID NO: 1194782 - RNA, 19 nt, Artificial Sequence
  Description of Artificial Sequence: Synthetic oligonucleotide
  Sense strand starting at position 1889 of SEQ ID NO: 916925
uggcccuggcuagaaauau

SEQ ID NO: 1194783 - RNA, 19 nt, Artificial Sequence
  Description of Artificial Sequence: Synthetic oligonucleotide
  Antisense strand to SEQ ID NO: 1194782
auauuucuagccagggcca

SEQ ID NO: 1194784 - RNA, 19 nt, Artificial Sequence
  Description of Artificial Sequence: Synthetic oligonucleotide
  Sense strand starting at position 2131 of SEQ ID NO: 916925
ggccuaaacucgcuuaucu

SEQ ID NO: 1194785 - RNA, 19 nt, Artificial Sequence
  Description of Artificial Sequence: Synthetic oligonucleotide
  Antisense strand to SEQ ID NO: 1194784
agauaagcgaguuuaggcc

SEQ ID NO: 1194786 - RNA, 19 nt, Artificial Sequence
  Description of Artificial Sequence: Synthetic oligonucleotide
  Sense strand starting at position 2160 of SEQ ID NO: 916925
cugcccgaguccucugauu

SEQ ID NO: 1194787 - RNA, 19 nt, Artificial Sequence
  Description of Artificial Sequence: Synthetic oligonucleotide
  Antisense strand to SEQ ID NO: 1194786
aaucagaggacucgggcag

SEQ ID NO: 1194788 - RNA, 19 nt, Artificial Sequence
  Description of Artificial Sequence: Synthetic oligonucleotide
  Sense strand starting at position 2162 of SEQ ID NO: 916925
gcccgaguccucugauugu

SEQ ID NO: 1194789 - RNA, 19 nt, Artificial Sequence
  Description of Artificial Sequence: Synthetic oligonucleotide
  Antisense strand to SEQ ID NO: 1194788
acaaucagaggacucgggc

SEQ ID NO: 1194790 - RNA, 19 nt, Artificial Sequence
  Description of Artificial Sequence: Synthetic oligonucleotide
  Sense strand starting at position 2166 of SEQ ID NO: 916925
gaguccucugauuguggga

SEQ ID NO: 1194791 - RNA, 19 nt, Artificial Sequence
  Description of Artificial Sequence: Synthetic oligonucleotide
  Antisense strand to SEQ ID NO: 1194790
ucccacaaucagaggacuc

SEQ ID NO: 1194792 - RNA, 19 nt, Artificial Sequence
  Description of Artificial Sequence: Synthetic oligonucleotide
  Sense strand starting at position 2171 of SEQ ID NO: 916925
cucugauugugggaccaca

SEQ ID NO: 1194793 - RNA, 19 nt, Artificial Sequence
  Description of Artificial Sequence: Synthetic oligonucleotide
  Antisense strand to SEQ ID NO: 1194792
uguggucccacaaucagag

SEQ ID NO: 1194794 - RNA, 19 nt, Artificial Sequence
  Description of Artificial Sequence: Synthetic oligonucleotide
  Sense strand starting at position 2304 of SEQ ID NO: 916925
ugggaaaucucagcgucua

SEQ ID NO: 1194795 - RNA, 19 nt, Artificial Sequence
  Description of Artificial Sequence: Synthetic oligonucleotide
  Antisense strand to SEQ ID NO: 1194794
uagacgcugagauuuccca

SEQ ID NO: 1194796 - RNA, 19 nt, Artificial Sequence
  Description of Artificial Sequence: Synthetic oligonucleotide
  Sense strand starting at position 2305 of SEQ ID NO: 916925
gggaaaucucagcgucuac

SEQ ID NO: 1194797 - RNA, 19 nt, Artificial Sequence
  Description of Artificial Sequence: Synthetic oligonucleotide
  Antisense strand to SEQ ID NO: 1194796
guagacgcugagauuuccc

SEQ ID NO: 1194798 - RNA, 19 nt, Artificial Sequence
  Description of Artificial Sequence: Synthetic oligonucleotide
  Sense strand starting at position 2641 of SEQ ID NO: 916925
cccagauuccuccaggagu

SEQ ID NO: 1194799 - RNA, 19 nt, Artificial Sequence
  Description of Artificial Sequence: Synthetic oligonucleotide
  Antisense strand to SEQ ID NO: 1194798
acuccuggaggaaucuggg

SEQ ID NO: 1194800 - RNA, 19 nt, Artificial Sequence
  Description of Artificial Sequence: Synthetic oligonucleotide
  Sense strand starting at position 2643 of SEQ ID NO: 916925
cagauuccuccaggaguuc

SEQ ID NO: 1194801 - RNA, 19 nt, Artificial Sequence
  Description of Artificial Sequence: Synthetic oligonucleotide
  Antisense strand to SEQ ID NO: 1194800
gaacuccuggaggaaucug

SEQ ID NO: 1194802 - RNA, 19 nt, Artificial Sequence
  Description of Artificial Sequence: Synthetic oligonucleotide
  Sense strand starting at position 2655 of SEQ ID NO: 916925
ggaguucgaaacugcuaaa

SEQ ID NO: 1194803 - RNA, 19 nt, Artificial Sequence
  Description of Artificial Sequence: Synthetic oligonucleotide
  Antisense strand to SEQ ID NO: 1194802
uuuagcaguuucgaacucc

SEQ ID NO: 1194804 - RNA, 19 nt, Artificial Sequence
  Description of Artificial Sequence: Synthetic oligonucleotide
  Sense strand starting at position 2886 of SEQ ID NO: 916925
uagcucuguccagcgaguu

SEQ ID NO: 1194805 - RNA, 19 nt, Artificial Sequence
  Description of Artificial Sequence: Synthetic oligonucleotide
  Antisense strand to SEQ ID NO: 1194804
aacucgcuggacagagcua

SEQ ID NO: 1194806 - RNA, 19 nt, Artificial Sequence
  Description of Artificial Sequence: Synthetic oligonucleotide
  Sense strand starting at position 3732 of SEQ ID NO: 916925
cgaaucugcuguguuccua

SEQ ID NO: 1194807 - RNA, 19 nt, Artificial Sequence
  Description of Artificial Sequence: Synthetic oligonucleotide
  Antisense strand to SEQ ID NO: 1194806
uaggaacacagcagauucg

SEQ ID NO: 1194808 - RNA, 19 nt, Artificial Sequence
  Description of Artificial Sequence: Synthetic oligonucleotide
  Sense strand starting at position 5 of SEQ ID NO: 916926
guguccuaccuuuagaaau

SEQ ID NO: 1194809 - RNA, 19 nt, Artificial Sequence
  Description of Artificial Sequence: Synthetic oligonucleotide
  Antisense strand to SEQ ID NO: 1194808
auuucuaaagguaggacac

SEQ ID NO: 1194810 - RNA, 19 nt, Artificial Sequence
  Description of Artificial Sequence: Synthetic oligonucleotide
  Sense strand starting at position 371 of SEQ ID NO: 916926
auggaaguaguuugaugaa

SEQ ID NO: 1194811 - RNA, 19 nt, Artificial Sequence
  Description of Artificial Sequence: Synthetic oligonucleotide
  Antisense strand to SEQ ID NO: 1194810
uucaucaaacuacuuccau

SEQ ID NO: 1194812 - RNA, 19 nt, Artificial Sequence
  Description of Artificial Sequence: Synthetic oligonucleotide
  Sense strand starting at position 383 of SEQ ID NO: 916926
ugaugaacuuaugcaauaa

SEQ ID NO: 1194813 - RNA, 19 nt, Artificial Sequence
  Description of Artificial Sequence: Synthetic oligonucleotide
  Antisense strand to SEQ ID NO: 1194812
uuauugcauaaguucauca

SEQ ID NO: 1194814 - RNA, 19 nt, Artificial Sequence
  Description of Artificial Sequence: Synthetic oligonucleotide
  Sense strand starting at position 576 of SEQ ID NO: 916926
agagguuuacaguaccuua

SEQ ID NO: 1194815 - RNA, 19 nt, Artificial Sequence
  Description of Artificial Sequence: Synthetic oligonucleotide
  Antisense strand to SEQ ID NO: 1194814
uaagguacuguaaaccucu

SEQ ID NO: 1194816 - RNA, 19 nt, Artificial Sequence
  Description of Artificial Sequence: Synthetic oligonucleotide
  Sense strand starting at position 682 of SEQ ID NO: 916926
aguagagagaccggucaaa

SEQ ID NO: 1194817 - RNA, 19 nt, Artificial Sequence
  Description of Artificial Sequence: Synthetic oligonucleotide
  Antisense strand to SEQ ID NO: 1194816
uuugaccggucucucuacu

SEQ ID NO: 1194818 - RNA, 19 nt, Artificial Sequence
  Description of Artificial Sequence: Synthetic oligonucleotide
  Sense strand starting at position 858 of SEQ ID NO: 916926
aucacaaguuaugugaaau

SEQ ID NO: 1194819 - RNA, 19 nt, Artificial Sequence
  Description of Artificial Sequence: Synthetic oligonucleotide
  Antisense strand to SEQ ID NO: 1194818
auuucacauaacuugugau

SEQ ID NO: 1194820 - RNA, 19 nt, Artificial Sequence
  Description of Artificial Sequence: Synthetic oligonucleotide
  Sense strand starting at position 864 of SEQ ID NO: 916926
aguuaugugaaauggguaa

SEQ ID NO: 1194821 - RNA, 19 nt, Artificial Sequence
  Description of Artificial Sequence: Synthetic oligonucleotide
  Antisense strand to SEQ ID NO: 1194820
uuacccauuucacauaacu

SEQ ID NO: 1194822 - RNA, 19 nt, Artificial Sequence
  Description of Artificial Sequence: Synthetic oligonucleotide
  Sense strand starting at position 1121 of SEQ ID NO: 916926
ugaaacgugcccuacucaa

SEQ ID NO: 1194823 - RNA, 19 nt, Artificial Sequence
  Description of Artificial Sequence: Synthetic oligonucleotide
  Antisense strand to SEQ ID NO: 1194822
uugaguagggcacguuuca

SEQ ID NO: 1194824 - RNA, 19 nt, Artificial Sequence
  Description of Artificial Sequence: Synthetic oligonucleotide
  Sense strand starting at position 1181 of SEQ ID NO: 916926
guucgaccucgauacuaaa

SEQ ID NO: 1194825 - RNA, 19 nt, Artificial Sequence
  Description of Artificial Sequence: Synthetic oligonucleotide
  Antisense strand to SEQ ID NO: 1194824
uuuaguaucgaggucgaac

SEQ ID NO: 1194826 - RNA, 19 nt, Artificial Sequence
  Description of Artificial Sequence: Synthetic oligonucleotide
  Sense strand starting at position 1188 of SEQ ID NO: 916926
cucgauacuaaaggugaaa

SEQ ID NO: 1194827 - RNA, 19 nt, Artificial Sequence
  Description of Artificial Sequence: Synthetic oligonucleotide
  Antisense strand to SEQ ID NO: 1194826
uuucaccuuuaguaucgag

SEQ ID NO: 1194828 - RNA, 19 nt, Artificial Sequence
  Description of Artificial Sequence: Synthetic oligonucleotide
  Sense strand starting at position 1320 of SEQ ID NO: 916926
ugagucugucuugagaaau

SEQ ID NO: 1194829 - RNA, 19 nt, Artificial Sequence
  Description of Artificial Sequence: Synthetic oligonucleotide
  Antisense strand to SEQ ID NO: 1194828
auuucucaagacagacuca

SEQ ID NO: 1194830 - RNA, 19 nt, Artificial Sequence
  Description of Artificial Sequence: Synthetic oligonucleotide
  Sense strand starting at position 1330 of SEQ ID NO: 916926
uugagaaauguuuggcaau

SEQ ID NO: 1194831 - RNA, 19 nt, Artificial Sequence
  Description of Artificial Sequence: Synthetic oligonucleotide
  Antisense strand to SEQ ID NO: 1194830
auugccaaacauuucucaa

SEQ ID NO: 1194832 - RNA, 19 nt, Artificial Sequence
  Description of Artificial Sequence: Synthetic oligonucleotide
  Sense strand starting at position 1332 of SEQ ID NO: 916926
gagaaauguuuggcaaucu

SEQ ID NO: 1194833 - RNA, 19 nt, Artificial Sequence
  Description of Artificial Sequence: Synthetic oligonucleotide
  Antisense strand to SEQ ID NO: 1194832
agauugccaaacauuucuc

SEQ ID NO: 1194834 - RNA, 19 nt, Artificial Sequence
  Description of Artificial Sequence: Synthetic oligonucleotide
  Sense strand starting at position 1478 of SEQ ID NO: 916926
auccgcgacauuuguuauu

SEQ ID NO: 1194835 - RNA, 19 nt, Artificial Sequence
  Description of Artificial Sequence: Synthetic oligonucleotide
  Antisense strand to SEQ ID NO: 1194834
aauaacaaaugucgcggau

SEQ ID NO: 1194836 - RNA, 19 nt, Artificial Sequence
  Description of Artificial Sequence: Synthetic oligonucleotide
  Sense strand starting at position 2216 of SEQ ID NO: 916926
gccuaauguguugcgacau

SEQ ID NO: 1194837 - RNA, 19 nt, Artificial Sequence
  Description of Artificial Sequence: Synthetic oligonucleotide
  Antisense strand to SEQ ID NO: 1194836
augucgcaacacauuaggc

SEQ ID NO: 1194838 - RNA, 19 nt, Artificial Sequence
  Description of Artificial Sequence: Synthetic oligonucleotide
  Sense strand starting at position 2326 of SEQ ID NO: 916926
uugggaaacaguugucaac

SEQ ID NO: 1194839 - RNA, 19 nt, Artificial Sequence
  Description of Artificial Sequence: Synthetic oligonucleotide
  Antisense strand to SEQ ID NO: 1194838
guugacaacuguuucccaa

SEQ ID NO: 1194840 - RNA, 19 nt, Artificial Sequence
  Description of Artificial Sequence: Synthetic oligonucleotide
  Sense strand starting at position 2328 of SEQ ID NO: 916926
gggaaacaguugucaacaa

SEQ ID NO: 1194841 - RNA, 19 nt, Artificial Sequence
  Description of Artificial Sequence: Synthetic oligonucleotide
  Antisense strand to SEQ ID NO: 1194840
uuguugacaacuguuuccc

SEQ ID NO: 1194842 - RNA, 19 nt, Artificial Sequence
  Description of Artificial Sequence: Synthetic oligonucleotide
  Sense strand starting at position 2345 of SEQ ID NO: 916926
aaagauggaucagcuaagu

SEQ ID NO: 1194843 - RNA, 19 nt, Artificial Sequence
  Description of Artificial Sequence: Synthetic oligonucleotide
  Antisense strand to SEQ ID NO: 1194842
acuuagcugauccaucuuu

SEQ ID NO: 1194844 - RNA, 19 nt, Artificial Sequence
  Description of Artificial Sequence: Synthetic oligonucleotide
  Sense strand starting at position 2538 of SEQ ID NO: 916926
cugcuuuaucaguaggauc

SEQ ID NO: 1194845 - RNA, 19 nt, Artificial Sequence
  Description of Artificial Sequence: Synthetic oligonucleotide
  Antisense strand to SEQ ID NO: 1194844
gauccuacugauaaagcag

SEQ ID NO: 1194846 - RNA, 19 nt, Artificial Sequence
  Description of Artificial Sequence: Synthetic oligonucleotide
  Sense strand starting at position 2605 of SEQ ID NO: 916926
caacuuugggaagguugau

SEQ ID NO: 1194847 - RNA, 19 nt, Artificial Sequence
  Description of Artificial Sequence: Synthetic oligonucleotide
  Antisense strand to SEQ ID NO: 1194846
aucaaccuucccaaaguug

SEQ ID NO: 1194848 - RNA, 19 nt, Artificial Sequence
  Description of Artificial Sequence: Synthetic oligonucleotide
  Sense strand starting at position 2699 of SEQ ID NO: 916926
guuuauccucaauaugagu

SEQ ID NO: 1194849 - RNA, 19 nt, Artificial Sequence
  Description of Artificial Sequence: Synthetic oligonucleotide
  Antisense strand to SEQ ID NO: 1194848
acucauauugaggauaaac

SEQ ID NO: 1194850 - RNA, 19 nt, Artificial Sequence
  Description of Artificial Sequence: Synthetic oligonucleotide
  Sense strand starting at position 2712 of SEQ ID NO: 916926
augaguauuggaggucuua

SEQ ID NO: 1194851 - RNA, 19 nt, Artificial Sequence
  Description of Artificial Sequence: Synthetic oligonucleotide
  Antisense strand to SEQ ID NO: 1194850
uaagaccuccaauacucau

SEQ ID NO: 1194852 - RNA, 19 nt, Artificial Sequence
  Description of Artificial Sequence: Synthetic oligonucleotide
  Sense strand starting at position 2750 of SEQ ID NO: 916926
agcuuacugagacaacgua

SEQ ID NO: 1194853 - RNA, 19 nt, Artificial Sequence
  Description of Artificial Sequence: Synthetic oligonucleotide
  Antisense strand to SEQ ID NO: 1194852
uacguugucucaguaagcu

SEQ ID NO: 1194854 - RNA, 19 nt, Artificial Sequence
  Description of Artificial Sequence: Synthetic oligonucleotide
  Sense strand starting at position 2773 of SEQ ID NO: 916926
gcugguacugugcuugcaa

SEQ ID NO: 1194855 - RNA, 19 nt, Artificial Sequence
  Description of Artificial Sequence: Synthetic oligonucleotide
  Antisense strand to SEQ ID NO: 1194854
uugcaagcacaguaccagc

SEQ ID NO: 1194856 - RNA, 19 nt, Artificial Sequence
  Description of Artificial Sequence: Synthetic oligonucleotide
  Sense strand starting at position 2820 of SEQ ID NO: 916926
aucuuuagguuucccaaga

SEQ ID NO: 1194857 - RNA, 19 nt, Artificial Sequence
  Description of Artificial Sequence: Synthetic oligonucleotide
  Antisense strand to SEQ ID NO: 1194856
ucuugggaaaccuaaagau

SEQ ID NO: 1194858 - RNA, 19 nt, Artificial Sequence
  Description of Artificial Sequence: Synthetic oligonucleotide
  Sense strand starting at position 2964 of SEQ ID NO: 916926
ggagaucagcuccacuuau

SEQ ID NO: 1194859 - RNA, 19 nt, Artificial Sequence
  Description of Artificial Sequence: Synthetic oligonucleotide
  Antisense strand to SEQ ID NO: 1194858
auaaguggagcugaucucc

SEQ ID NO: 1194860 - RNA, 19 nt, Artificial Sequence
  Description of Artificial Sequence: Synthetic oligonucleotide
  Sense strand starting at position 3032 of SEQ ID NO: 916926
guuuaauugugaucagaca

SEQ ID NO: 1194861 - RNA, 19 nt, Artificial Sequence
  Description of Artificial Sequence: Synthetic oligonucleotide
  Antisense strand to SEQ ID NO: 1194860
ugucugaucacaauuaaac

SEQ ID NO: 1194862 - RNA, 19 nt, Artificial Sequence
  Description of Artificial Sequence: Synthetic oligonucleotide
  Sense strand starting at position 3123 of SEQ ID NO: 916926
uugagaacaguguaugguu

SEQ ID NO: 1194863 - RNA, 19 nt, Artificial Sequence
  Description of Artificial Sequence: Synthetic oligonucleotide
  Antisense strand to SEQ ID NO: 1194862
aaccauacacuguucucaa

SEQ ID NO: 1194864 - RNA, 19 nt, Artificial Sequence
  Description of Artificial Sequence: Synthetic oligonucleotide
  Sense strand starting at position 3165 of SEQ ID NO: 916926
ucaaaugugccauacuaga

SEQ ID NO: 1194865 - RNA, 19 nt, Artificial Sequence
  Description of Artificial Sequence: Synthetic oligonucleotide
  Antisense strand to SEQ ID NO: 1194864
ucuaguauggcacauuuga

SEQ ID NO: 1194866 - RNA, 19 nt, Artificial Sequence
  Description of Artificial Sequence: Synthetic oligonucleotide
  Sense strand starting at position 3170 of SEQ ID NO: 916926
ugugccauacuagaguaau

SEQ ID NO: 1194867 - RNA, 19 nt, Artificial Sequence
  Description of Artificial Sequence: Synthetic oligonucleotide
  Antisense strand to SEQ ID NO: 1194866
auuacucuaguauggcaca

SEQ ID NO: 1194868 - RNA, 19 nt, Artificial Sequence
  Description of Artificial Sequence: Synthetic oligonucleotide
  Sense strand starting at position 3173 of SEQ ID NO: 916926
gccauacuagaguaauaug

SEQ ID NO: 1194869 - RNA, 19 nt, Artificial Sequence
  Description of Artificial Sequence: Synthetic oligonucleotide
  Antisense strand to SEQ ID NO: 1194868
cauauuacucuaguauggc

SEQ ID NO: 1194870 - RNA, 19 nt, Artificial Sequence
  Description of Artificial Sequence: Synthetic oligonucleotide
  Sense strand starting at position 3201 of SEQ ID NO: 916926
agaguagcagucuagguua

SEQ ID NO: 1194871 - RNA, 19 nt, Artificial Sequence
  Description of Artificial Sequence: Synthetic oligonucleotide
  Antisense strand to SEQ ID NO: 1194870
uaaccuagacugcuacucu

SEQ ID NO: 1194872 - RNA, 19 nt, Artificial Sequence
  Description of Artificial Sequence: Synthetic oligonucleotide
  Sense strand starting at position 3206 of SEQ ID NO: 916926
agcagucuagguuaauaug

SEQ ID NO: 1194873 - RNA, 19 nt, Artificial Sequence
  Description of Artificial Sequence: Synthetic oligonucleotide
  Antisense strand to SEQ ID NO: 1194872
cauauuaaccuagacugcu

SEQ ID NO: 1194874 - RNA, 19 nt, Artificial Sequence
  Description of Artificial Sequence: Synthetic oligonucleotide
  Sense strand starting at position 3216 of SEQ ID NO: 916926
guuaauaugggauagccua

SEQ ID NO: 1194875 - RNA, 19 nt, Artificial Sequence
  Description of Artificial Sequence: Synthetic oligonucleotide
  Antisense strand to SEQ ID NO: 1194874
uaggcuaucccauauuaac

SEQ ID NO: 1194876 - RNA, 19 nt, Artificial Sequence
  Description of Artificial Sequence: Synthetic oligonucleotide
  Sense strand starting at position 3295 of SEQ ID NO: 916926
ugggaaguuguugaaagua

SEQ ID NO: 1194877 - RNA, 19 nt, Artificial Sequence
  Description of Artificial Sequence: Synthetic oligonucleotide
  Antisense strand to SEQ ID NO: 1194876
uacuuucaacaacuuccca

SEQ ID NO: 1194878 - RNA, 19 nt, Artificial Sequence
  Description of Artificial Sequence: Synthetic oligonucleotide
  Sense strand starting at position 3490 of SEQ ID NO: 916926
aguaguagcaucuaagaug

SEQ ID NO: 1194879 - RNA, 19 nt, Artificial Sequence
  Description of Artificial Sequence: Synthetic oligonucleotide
  Antisense strand to SEQ ID NO: 1194878
caucuuagaugcuacuacu

SEQ ID NO: 1194880 - RNA, 19 nt, Artificial Sequence
  Description of Artificial Sequence: Synthetic oligonucleotide
  Sense strand starting at position 3610 of SEQ ID NO: 916926
ucauuuccgugauuagguu

SEQ ID NO: 1194881 - RNA, 19 nt, Artificial Sequence
  Description of Artificial Sequence: Synthetic oligonucleotide
  Antisense strand to SEQ ID NO: 1194880
aaccuaaucacggaaauga

SEQ ID NO: 1194882 - RNA, 19 nt, Artificial Sequence
  Description of Artificial Sequence: Synthetic oligonucleotide
  Sense strand starting at position 3790 of SEQ ID NO: 916926
uccaacaaccugugaugaa

SEQ ID NO: 1194883 - RNA, 19 nt, Artificial Sequence
  Description of Artificial Sequence: Synthetic oligonucleotide
  Antisense strand to SEQ ID NO: 1194882
uucaucacagguuguugga

SEQ ID NO: 1194884 - RNA, 19 nt, Artificial Sequence
  Description of Artificial Sequence: Synthetic oligonucleotide
  Sense strand starting at position 3842 of SEQ ID NO: 916926
ggaaguagauucuuuccca

SEQ ID NO: 1194885 - RNA, 19 nt, Artificial Sequence
  Description of Artificial Sequence: Synthetic oligonucleotide
  Antisense strand to SEQ ID NO: 1194884
ugggaaagaaucuacuucc

SEQ ID NO: 1194886 - RNA, 19 nt, Artificial Sequence
  Description of Artificial Sequence: Synthetic oligonucleotide
  Sense strand starting at position 3843 of SEQ ID NO: 916926
gaaguagauucuuucccag

SEQ ID NO: 1194887 - RNA, 19 nt, Artificial Sequence
  Description of Artificial Sequence: Synthetic oligonucleotide
  Antisense strand to SEQ ID NO: 1194886
cugggaaagaaucuacuuc

SEQ ID NO: 1194888 - RNA, 19 nt, Artificial Sequence
  Description of Artificial Sequence: Synthetic oligonucleotide
  Sense strand starting at position 406 of SEQ ID NO: 916927
uuaucuggugcguuuguua

SEQ ID NO: 1194889 - RNA, 19 nt, Artificial Sequence
  Description of Artificial Sequence: Synthetic oligonucleotide
  Antisense strand to SEQ ID NO: 1194888
uaacaaacgcaccagauaa

SEQ ID NO: 1194890 - RNA, 19 nt, Artificial Sequence
  Description of Artificial Sequence: Synthetic oligonucleotide
  Sense strand starting at position 415 of SEQ ID NO: 916927
gcguuuguuaaugcagauu

SEQ ID NO: 1194891 - RNA, 19 nt, Artificial Sequence
  Description of Artificial Sequence: Synthetic oligonucleotide
  Antisense strand to SEQ ID NO: 1194890
aaucugcauuaacaaacgc

SEQ ID NO: 1194892 - RNA, 19 nt, Artificial Sequence
  Description of Artificial Sequence: Synthetic oligonucleotide
  Sense strand starting at position 1018 of SEQ ID NO: 916927
aucuguaauuggcugggaa

SEQ ID NO: 1194893 - RNA, 19 nt, Artificial Sequence
  Description of Artificial Sequence: Synthetic oligonucleotide
  Antisense strand to SEQ ID NO: 1194892
uucccagccaauuacagau

SEQ ID NO: 1194894 - RNA, 19 nt, Artificial Sequence
  Description of Artificial Sequence: Synthetic oligonucleotide
  Sense strand starting at position 1020 of SEQ ID NO: 916927
cuguaauuggcugggaaua

SEQ ID NO: 1194895 - RNA, 19 nt, Artificial Sequence
  Description of Artificial Sequence: Synthetic oligonucleotide
  Antisense strand to SEQ ID NO: 1194894
uauucccagccaauuacag

SEQ ID NO: 1194896 - RNA, 19 nt, Artificial Sequence
  Description of Artificial Sequence: Synthetic oligonucleotide
  Sense strand starting at position 1021 of SEQ ID NO: 916927
uguaauuggcugggaauac

SEQ ID NO: 1194897 - RNA, 19 nt, Artificial Sequence
  Description of Artificial Sequence: Synthetic oligonucleotide
  Antisense strand to SEQ ID NO: 1194896
guauucccagccaauuaca

SEQ ID NO: 1194898 - RNA, 19 nt, Artificial Sequence
  Description of Artificial Sequence: Synthetic oligonucleotide
  Sense strand starting at position 1081 of SEQ ID NO: 916927
acagacaucuuagccugaa

SEQ ID NO: 1194899 - RNA, 19 nt, Artificial Sequence
  Description of Artificial Sequence: Synthetic oligonucleotide
  Antisense strand to SEQ ID NO: 1194898
uucaggcuaagaugucugu

SEQ ID NO: 1194900 - RNA, 19 nt, Artificial Sequence
  Description of Artificial Sequence: Synthetic oligonucleotide
  Sense strand starting at position 1218 of SEQ ID NO: 916927
cuugaaagcuauuuaccgu

SEQ ID NO: 1194901 - RNA, 19 nt, Artificial Sequence
  Description of Artificial Sequence: Synthetic oligonucleotide
  Antisense strand to SEQ ID NO: 1194900
acgguaaauagcuuucaag

SEQ ID NO: 1194902 - RNA, 19 nt, Artificial Sequence
  Description of Artificial Sequence: Synthetic oligonucleotide
  Sense strand starting at position 1221 of SEQ ID NO: 916927
gaaagcuauuuaccguguu

SEQ ID NO: 1194903 - RNA, 19 nt, Artificial Sequence
  Description of Artificial Sequence: Synthetic oligonucleotide
  Antisense strand to SEQ ID NO: 1194902
aacacgguaaauagcuuuc

SEQ ID NO: 1194904 - RNA, 19 nt, Artificial Sequence
  Description of Artificial Sequence: Synthetic oligonucleotide
  Sense strand starting at position 1243 of SEQ ID NO: 916927
ccgagagucuaggcaaaug

SEQ ID NO: 1194905 - RNA, 19 nt, Artificial Sequence
  Description of Artificial Sequence: Synthetic oligonucleotide
  Antisense strand to SEQ ID NO: 1194904
cauuugccuagacucucgg

SEQ ID NO: 1194906 - RNA, 19 nt, Artificial Sequence
  Description of Artificial Sequence: Synthetic oligonucleotide
  Sense strand starting at position 1307 of SEQ ID NO: 916927
gaggucuuaguuggaggua

SEQ ID NO: 1194907 - RNA, 19 nt, Artificial Sequence
  Description of Artificial Sequence: Synthetic oligonucleotide
  Antisense strand to SEQ ID NO: 1194906
uaccuccaacuaagaccuc

SEQ ID NO: 1194908 - RNA, 19 nt, Artificial Sequence
  Description of Artificial Sequence: Synthetic oligonucleotide
  Sense strand starting at position 1312 of SEQ ID NO: 916927
cuuaguuggagguaauagu

SEQ ID NO: 1194909 - RNA, 19 nt, Artificial Sequence
  Description of Artificial Sequence: Synthetic oligonucleotide
  Antisense strand to SEQ ID NO: 1194908
acuauuaccuccaacuaag

SEQ ID NO: 1194910 - RNA, 19 nt, Artificial Sequence
  Description of Artificial Sequence: Synthetic oligonucleotide
  Sense strand starting at position 1321 of SEQ ID NO: 916927
agguaauaguuucuacaaa

SEQ ID NO: 1194911 - RNA, 19 nt, Artificial Sequence
  Description of Artificial Sequence: Synthetic oligonucleotide
  Antisense strand to SEQ ID NO: 1194910
uuuguagaaacuauuaccu

SEQ ID NO: 1194912 - RNA, 19 nt, Artificial Sequence
  Description of Artificial Sequence: Synthetic oligonucleotide
  Sense strand starting at position 2073 of SEQ ID NO: 916927
gcuaguucagugcucguga

SEQ ID NO: 1194913 - RNA, 19 nt, Artificial Sequence
  Description of Artificial Sequence: Synthetic oligonucleotide
  Antisense strand to SEQ ID NO: 1194912
ucacgagcacugaacuagc

SEQ ID NO: 1194914 - RNA, 19 nt, Artificial Sequence
  Description of Artificial Sequence: Synthetic oligonucleotide
  Sense strand starting at position 2076 of SEQ ID NO: 916927
aguucagugcucgugaggu

SEQ ID NO: 1194915 - RNA, 19 nt, Artificial Sequence
  Description of Artificial Sequence: Synthetic oligonucleotide
  Antisense strand to SEQ ID NO: 1194914
accucacgagcacugaacu

SEQ ID NO: 1194916 - RNA, 19 nt, Artificial Sequence
  Description of Artificial Sequence: Synthetic oligonucleotide
  Sense strand starting at position 2195 of SEQ ID NO: 916927
ggccgaguugaaaguuguu

SEQ ID NO: 1194917 - RNA, 19 nt, Artificial Sequence
  Description of Artificial Sequence: Synthetic oligonucleotide
  Antisense strand to SEQ ID NO: 1194916
aacaacuuucaacucggcc

SEQ ID NO: 1194918 - RNA, 19 nt, Artificial Sequence
  Description of Artificial Sequence: Synthetic oligonucleotide
  Sense strand starting at position 2277 of SEQ ID NO: 916927
cugugcucggccucugaau

SEQ ID NO: 1194919 - RNA, 19 nt, Artificial Sequence
  Description of Artificial Sequence: Synthetic oligonucleotide
  Antisense strand to SEQ ID NO: 1194918
auucagaggccgagcacag

SEQ ID NO: 1194920 - RNA, 19 nt, Artificial Sequence
  Description of Artificial Sequence: Synthetic oligonucleotide
  Sense strand starting at position 2656 of SEQ ID NO: 916927
cuugguggacuucggagaa

SEQ ID NO: 1194921 - RNA, 19 nt, Artificial Sequence
  Description of Artificial Sequence: Synthetic oligonucleotide
  Antisense strand to SEQ ID NO: 1194920
uucuccgaaguccaccaag

SEQ ID NO: 1194922 - RNA, 19 nt, Artificial Sequence
  Description of Artificial Sequence: Synthetic oligonucleotide
  Sense strand starting at position 2668 of SEQ ID NO: 916927
cggagaacucuagagucgu

SEQ ID NO: 1194923 - RNA, 19 nt, Artificial Sequence
  Description of Artificial Sequence: Synthetic oligonucleotide
  Antisense strand to SEQ ID NO: 1194922
acgacucuagaguucuccg

SEQ ID NO: 1194924 - RNA, 19 nt, Artificial Sequence
  Description of Artificial Sequence: Synthetic oligonucleotide
  Sense strand starting at position 2711 of SEQ ID NO: 916927
uacucucauccguaaagug

SEQ ID NO: 1194925 - RNA, 19 nt, Artificial Sequence
  Description of Artificial Sequence: Synthetic oligonucleotide
  Antisense strand to SEQ ID NO: 1194924
cacuuuacggaugagagua

SEQ ID NO: 1194926 - RNA, 19 nt, Artificial Sequence
  Description of Artificial Sequence: Synthetic oligonucleotide
  Sense strand starting at position 2798 of SEQ ID NO: 916927
auguauauaugagugauga

SEQ ID NO: 1194927 - RNA, 19 nt, Artificial Sequence
  Description of Artificial Sequence: Synthetic oligonucleotide
  Antisense strand to SEQ ID NO: 1194926
ucaucacucauauauacau

SEQ ID NO: 1194928 - RNA, 19 nt, Artificial Sequence
  Description of Artificial Sequence: Synthetic oligonucleotide
  Sense strand starting at position 2799 of SEQ ID NO: 916927
uguauauaugagugaugau

SEQ ID NO: 1194929 - RNA, 19 nt, Artificial Sequence
  Description of Artificial Sequence: Synthetic oligonucleotide
  Antisense strand to SEQ ID NO: 1194928
aucaucacucauauauaca

SEQ ID NO: 1194930 - RNA, 19 nt, Artificial Sequence
  Description of Artificial Sequence: Synthetic oligonucleotide
  Sense strand starting at position 2825 of SEQ ID NO: 916927
uuacauagaugugcauuau

SEQ ID NO: 1194931 - RNA, 19 nt, Artificial Sequence
  Description of Artificial Sequence: Synthetic oligonucleotide
  Antisense strand to SEQ ID NO: 1194930
auaaugcacaucuauguaa

SEQ ID NO: 1194932 - RNA, 19 nt, Artificial Sequence
  Description of Artificial Sequence: Synthetic oligonucleotide
  Sense strand starting at position 3117 of SEQ ID NO: 916927
acauaaaugucugugaaug

SEQ ID NO: 1194933 - RNA, 19 nt, Artificial Sequence
  Description of Artificial Sequence: Synthetic oligonucleotide
  Antisense strand to SEQ ID NO: 1194932
cauucacagacauuuaugu

SEQ ID NO: 1194934 - RNA, 19 nt, Artificial Sequence
  Description of Artificial Sequence: Synthetic oligonucleotide
  Sense strand starting at position 3371 of SEQ ID NO: 916927
gguuauggcuuugucauuu

SEQ ID NO: 1194935 - RNA, 19 nt, Artificial Sequence
  Description of Artificial Sequence: Synthetic oligonucleotide
  Antisense strand to SEQ ID NO: 1194934
aaaugacaaagccauaacc

SEQ ID NO: 1194936 - RNA, 19 nt, Artificial Sequence
  Description of Artificial Sequence: Synthetic oligonucleotide
  Sense strand starting at position 3375 of SEQ ID NO: 916927
auggcuuugucauuuguac

SEQ ID NO: 1194937 - RNA, 19 nt, Artificial Sequence
  Description of Artificial Sequence: Synthetic oligonucleotide
  Antisense strand to SEQ ID NO: 1194936
guacaaaugacaaagccau

SEQ ID NO: 1194938 - RNA, 19 nt, Artificial Sequence
  Description of Artificial Sequence: Synthetic oligonucleotide
  Sense strand starting at position 3419 of SEQ ID NO: 916927
uuuagugaauacucagcau

SEQ ID NO: 1194939 - RNA, 19 nt, Artificial Sequence
  Description of Artificial Sequence: Synthetic oligonucleotide
  Antisense strand to SEQ ID NO: 1194938
augcugaguauucacuaaa

SEQ ID NO: 1194940 - RNA, 19 nt, Artificial Sequence
  Description of Artificial Sequence: Synthetic oligonucleotide
  Sense strand starting at position 3422 of SEQ ID NO: 916927
agugaauacucagcaugac

SEQ ID NO: 1194941 - RNA, 19 nt, Artificial Sequence
  Description of Artificial Sequence: Synthetic oligonucleotide
  Antisense strand to SEQ ID NO: 1194940
gucaugcugaguauucacu

SEQ ID NO: 1194942 - RNA, 19 nt, Artificial Sequence
  Description of Artificial Sequence: Synthetic oligonucleotide
  Sense strand starting at position 3423 of SEQ ID NO: 916927
gugaauacucagcaugacu

SEQ ID NO: 1194943 - RNA, 19 nt, Artificial Sequence
  Description of Artificial Sequence: Synthetic oligonucleotide
  Antisense strand to SEQ ID NO: 1194942
agucaugcugaguauucac

SEQ ID NO: 1194944 - RNA, 19 nt, Artificial Sequence
  Description of Artificial Sequence: Synthetic oligonucleotide
  Sense strand starting at position 3425 of SEQ ID NO: 916927
gaauacucagcaugacugu

SEQ ID NO: 1194945 - RNA, 19 nt, Artificial Sequence
  Description of Artificial Sequence: Synthetic oligonucleotide
  Antisense strand to SEQ ID NO: 1194944
acagucaugcugaguauuc

SEQ ID NO: 1194946 - RNA, 19 nt, Artificial Sequence
  Description of Artificial Sequence: Synthetic oligonucleotide
  Sense strand starting at position 3449 of SEQ ID NO: 916927
gauuaaauagauuguugca

SEQ ID NO: 1194947 - RNA, 19 nt, Artificial Sequence
  Description of Artificial Sequence: Synthetic oligonucleotide
  Antisense strand to SEQ ID NO: 1194946
ugcaacaaucuauuuaauc

SEQ ID NO: 1194948 - RNA, 19 nt, Artificial Sequence
  Description of Artificial Sequence: Synthetic oligonucleotide
  Sense strand starting at position 3464 of SEQ ID NO: 916927
ugcauuacugauggaggua

SEQ ID NO: 1194949 - RNA, 19 nt, Artificial Sequence
  Description of Artificial Sequence: Synthetic oligonucleotide
  Antisense strand to SEQ ID NO: 1194948
uaccuccaucaguaaugca

SEQ ID NO: 1194950 - RNA, 19 nt, Artificial Sequence
  Description of Artificial Sequence: Synthetic oligonucleotide
  Sense strand starting at position 3503 of SEQ ID NO: 916927
ugacacaacuggucagaua

SEQ ID NO: 1194951 - RNA, 19 nt, Artificial Sequence
  Description of Artificial Sequence: Synthetic oligonucleotide
  Antisense strand to SEQ ID NO: 1194950
uaucugaccaguuguguca

SEQ ID NO: 1194952 - RNA, 19 nt, Artificial Sequence
  Description of Artificial Sequence: Synthetic oligonucleotide
  Sense strand starting at position 3582 of SEQ ID NO: 916927
guacauacuuggcucuaaa

SEQ ID NO: 1194953 - RNA, 19 nt, Artificial Sequence
  Description of Artificial Sequence: Synthetic oligonucleotide
  Antisense strand to SEQ ID NO: 1194952
uuuagagccaaguauguac

SEQ ID NO: 1194954 - RNA, 19 nt, Artificial Sequence
  Description of Artificial Sequence: Synthetic oligonucleotide
  Sense strand starting at position 3603 of SEQ ID NO: 916927
auguauuauuuccugcuca

SEQ ID NO: 1194955 - RNA, 19 nt, Artificial Sequence
  Description of Artificial Sequence: Synthetic oligonucleotide
  Antisense strand to SEQ ID NO: 1194954
ugagcaggaaauaauacau

SEQ ID NO: 1194956 - RNA, 19 nt, Artificial Sequence
  Description of Artificial Sequence: Synthetic oligonucleotide
  Sense strand starting at position 3622 of SEQ ID NO: 916927
uuuggauucugaguucuaa

SEQ ID NO: 1194957 - RNA, 19 nt, Artificial Sequence
  Description of Artificial Sequence: Synthetic oligonucleotide
  Antisense strand to SEQ ID NO: 1194956
uuagaacucagaauccaaa

SEQ ID NO: 1194958 - RNA, 19 nt, Artificial Sequence
  Description of Artificial Sequence: Synthetic oligonucleotide
  Sense strand starting at position 3639 of SEQ ID NO: 916927
aagaguauuguguauuaug

SEQ ID NO: 1194959 - RNA, 19 nt, Artificial Sequence
  Description of Artificial Sequence: Synthetic oligonucleotide
  Antisense strand to SEQ ID NO: 1194958
cauaauacacaauacucuu

SEQ ID NO: 1194960 - RNA, 19 nt, Artificial Sequence
  Description of Artificial Sequence: Synthetic oligonucleotide
  Sense strand starting at position 3647 of SEQ ID NO: 916927
uguguauuaugaccaauug

SEQ ID NO: 1194961 - RNA, 19 nt, Artificial Sequence
  Description of Artificial Sequence: Synthetic oligonucleotide
  Antisense strand to SEQ ID NO: 1194960
caauuggucauaauacaca

SEQ ID NO: 1194962 - RNA, 19 nt, Artificial Sequence
  Description of Artificial Sequence: Synthetic oligonucleotide
  Sense strand starting at position 3887 of SEQ ID NO: 916927
gaaagcauucuguauuaga

SEQ ID NO: 1194963 - RNA, 19 nt, Artificial Sequence
  Description of Artificial Sequence: Synthetic oligonucleotide
  Antisense strand to SEQ ID NO: 1194962
ucuaauacagaaugcuuuc

SEQ ID NO: 1194964 - RNA, 19 nt, Artificial Sequence
  Description of Artificial Sequence: Synthetic oligonucleotide
  Sense strand starting at position 3901 of SEQ ID NO: 916927
uuagauuagguacgagaca

SEQ ID NO: 1194965 - RNA, 19 nt, Artificial Sequence
  Description of Artificial Sequence: Synthetic oligonucleotide
  Antisense strand to SEQ ID NO: 1194964
ugucucguaccuaaucuaa

SEQ ID NO: 1194966 - RNA, 19 nt, Artificial Sequence
  Description of Artificial Sequence: Synthetic oligonucleotide
  Sense strand starting at position 3914 of SEQ ID NO: 916927
gagacagaugauugcuacu

SEQ ID NO: 1194967 - RNA, 19 nt, Artificial Sequence
  Description of Artificial Sequence: Synthetic oligonucleotide
  Antisense strand to SEQ ID NO: 1194966
aguagcaaucaucugucuc

SEQ ID NO: 1194968 - RNA, 19 nt, Artificial Sequence
  Description of Artificial Sequence: Synthetic oligonucleotide
  Sense strand starting at position 491 of SEQ ID NO: 916928
aagauaauccaucgggcaa

SEQ ID NO: 1194969 - RNA, 19 nt, Artificial Sequence
  Description of Artificial Sequence: Synthetic oligonucleotide
  Antisense strand to SEQ ID NO: 1194968
uugcccgauggauuaucuu

SEQ ID NO: 1194970 - RNA, 19 nt, Artificial Sequence
  Description of Artificial Sequence: Synthetic oligonucleotide
  Sense strand starting at position 492 of SEQ ID NO: 916928
agauaauccaucgggcaag

SEQ ID NO: 1194971 - RNA, 19 nt, Artificial Sequence
  Description of Artificial Sequence: Synthetic oligonucleotide
  Antisense strand to SEQ ID NO: 1194970
cuugcccgauggauuaucu

SEQ ID NO: 1194972 - RNA, 19 nt, Artificial Sequence
  Description of Artificial Sequence: Synthetic oligonucleotide
  Sense strand starting at position 495 of SEQ ID NO: 916928
uaauccaucgggcaagaca

SEQ ID NO: 1194973 - RNA, 19 nt, Artificial Sequence
  Description of Artificial Sequence: Synthetic oligonucleotide
  Antisense strand to SEQ ID NO: 1194972
ugucuugcccgauggauua

SEQ ID NO: 1194974 - RNA, 19 nt, Artificial Sequence
  Description of Artificial Sequence: Synthetic oligonucleotide
  Sense strand starting at position 522 of SEQ ID NO: 916928
auaauuugcuguguuuaag

SEQ ID NO: 1194975 - RNA, 19 nt, Artificial Sequence
  Description of Artificial Sequence: Synthetic oligonucleotide
  Antisense strand to SEQ ID NO: 1194974
cuuaaacacagcaaauuau

SEQ ID NO: 1194976 - RNA, 19 nt, Artificial Sequence
  Description of Artificial Sequence: Synthetic oligonucleotide
  Sense strand starting at position 541 of SEQ ID NO: 916928
augauauugaucugcggaa

SEQ ID NO: 1194977 - RNA, 19 nt, Artificial Sequence
  Description of Artificial Sequence: Synthetic oligonucleotide
  Antisense strand to SEQ ID NO: 1194976
uuccgcagaucaauaucau

SEQ ID NO: 1194978 - RNA, 19 nt, Artificial Sequence
  Description of Artificial Sequence: Synthetic oligonucleotide
  Sense strand starting at position 542 of SEQ ID NO: 916928
ugauauugaucugcggaac

SEQ ID NO: 1194979 - RNA, 19 nt, Artificial Sequence
  Description of Artificial Sequence: Synthetic oligonucleotide
  Antisense strand to SEQ ID NO: 1194978
guuccgcagaucaauauca

SEQ ID NO: 1194980 - RNA, 19 nt, Artificial Sequence
  Description of Artificial Sequence: Synthetic oligonucleotide
  Sense strand starting at position 543 of SEQ ID NO: 916928
gauauugaucugcggaaca

SEQ ID NO: 1194981 - RNA, 19 nt, Artificial Sequence
  Description of Artificial Sequence: Synthetic oligonucleotide
  Antisense strand to SEQ ID NO: 1194980
uguuccgcagaucaauauc

SEQ ID NO: 1194982 - RNA, 19 nt, Artificial Sequence
  Description of Artificial Sequence: Synthetic oligonucleotide
  Sense strand starting at position 545 of SEQ ID NO: 916928
uauugaucugcggaacaca

SEQ ID NO: 1194983 - RNA, 19 nt, Artificial Sequence
  Description of Artificial Sequence: Synthetic oligonucleotide
  Antisense strand to SEQ ID NO: 1194982
uguguuccgcagaucaaua

SEQ ID NO: 1194984 - RNA, 19 nt, Artificial Sequence
  Description of Artificial Sequence: Synthetic oligonucleotide
  Sense strand starting at position 653 of SEQ ID NO: 916928
ggaugaaaucauugccuuu

SEQ ID NO: 1194985 - RNA, 19 nt, Artificial Sequence
  Description of Artificial Sequence: Synthetic oligonucleotide
  Antisense strand to SEQ ID NO: 1194984
aaaggcaaugauuucaucc

SEQ ID NO: 1194986 - RNA, 19 nt, Artificial Sequence
  Description of Artificial Sequence: Synthetic oligonucleotide
  Sense strand starting at position 676 of SEQ ID NO: 916928
accagagcuccucaucuga

SEQ ID NO: 1194987 - RNA, 19 nt, Artificial Sequence
  Description of Artificial Sequence: Synthetic oligonucleotide
  Antisense strand to SEQ ID NO: 1194986
ucagaugaggagcucuggu

SEQ ID NO: 1194988 - RNA, 19 nt, Artificial Sequence
  Description of Artificial Sequence: Synthetic oligonucleotide
  Sense strand starting at position 888 of SEQ ID NO: 916928
acacacguagcaugaauua

SEQ ID NO: 1194989 - RNA, 19 nt, Artificial Sequence
  Description of Artificial Sequence: Synthetic oligonucleotide
  Antisense strand to SEQ ID NO: 1194988
uaauucaugcuacgugugu

SEQ ID NO: 1194990 - RNA, 19 nt, Artificial Sequence
  Description of Artificial Sequence: Synthetic oligonucleotide
  Sense strand starting at position 899 of SEQ ID NO: 916928
augaauuaguaccuguauu

SEQ ID NO: 1194991 - RNA, 19 nt, Artificial Sequence
  Description of Artificial Sequence: Synthetic oligonucleotide
  Antisense strand to SEQ ID NO: 1194990
aauacagguacuaauucau

SEQ ID NO: 1194992 - RNA, 19 nt, Artificial Sequence
  Description of Artificial Sequence: Synthetic oligonucleotide
  Sense strand starting at position 986 of SEQ ID NO: 916928
gcacgaccaucacuaucau

SEQ ID NO: 1194993 - RNA, 19 nt, Artificial Sequence
  Description of Artificial Sequence: Synthetic oligonucleotide
  Antisense strand to SEQ ID NO: 1194992
augauagugauggucgugc

SEQ ID NO: 1194994 - RNA, 19 nt, Artificial Sequence
  Description of Artificial Sequence: Synthetic oligonucleotide
  Sense strand starting at position 1038 of SEQ ID NO: 916928
ccuuuacacguguagaaug

SEQ ID NO: 1194995 - RNA, 19 nt, Artificial Sequence
  Description of Artificial Sequence: Synthetic oligonucleotide
  Antisense strand to SEQ ID NO: 1194994
cauucuacacguguaaagg

SEQ ID NO: 1194996 - RNA, 19 nt, Artificial Sequence
  Description of Artificial Sequence: Synthetic oligonucleotide
  Sense strand starting at position 1045 of SEQ ID NO: 916928
acguguagaaugcaucgaa

SEQ ID NO: 1194997 - RNA, 19 nt, Artificial Sequence
  Description of Artificial Sequence: Synthetic oligonucleotide
  Antisense strand to SEQ ID NO: 1194996
uucgaugcauucuacacgu

SEQ ID NO: 1194998 - RNA, 19 nt, Artificial Sequence
  Description of Artificial Sequence: Synthetic oligonucleotide
  Sense strand starting at position 1048 of SEQ ID NO: 916928
uguagaaugcaucgaaauc

SEQ ID NO: 1194999 - RNA, 19 nt, Artificial Sequence
  Description of Artificial Sequence: Synthetic oligonucleotide
  Antisense strand to SEQ ID NO: 1194998
gauuucgaugcauucuaca

SEQ ID NO: 1195000 - RNA, 19 nt, Artificial Sequence
  Description of Artificial Sequence: Synthetic oligonucleotide
  Sense strand starting at position 1423 of SEQ ID NO: 916928
ggguaagcgccagauacaa

SEQ ID NO: 1195001 - RNA, 19 nt, Artificial Sequence
  Description of Artificial Sequence: Synthetic oligonucleotide
  Antisense strand to SEQ ID NO: 1195000
uuguaucuggcgcuuaccc

SEQ ID NO: 1195002 - RNA, 19 nt, Artificial Sequence
  Description of Artificial Sequence: Synthetic oligonucleotide
  Sense strand starting at position 2255 of SEQ ID NO: 916928
ugcagcuuuggguaauaca

SEQ ID NO: 1195003 - RNA, 19 nt, Artificial Sequence
  Description of Artificial Sequence: Synthetic oligonucleotide
  Antisense strand to SEQ ID NO: 1195002
uguauuacccaaagcugca

SEQ ID NO: 1195004 - RNA, 19 nt, Artificial Sequence
  Description of Artificial Sequence: Synthetic oligonucleotide
  Sense strand starting at position 2264 of SEQ ID NO: 916928
ggguaauacauaugccgaa

SEQ ID NO: 1195005 - RNA, 19 nt, Artificial Sequence
  Description of Artificial Sequence: Synthetic oligonucleotide
  Antisense strand to SEQ ID NO: 1195004
uucggcauauguauuaccc

SEQ ID NO: 1195006 - RNA, 19 nt, Artificial Sequence
  Description of Artificial Sequence: Synthetic oligonucleotide
  Sense strand starting at position 2277 of SEQ ID NO: 916928
gccgaaccuucucuuuaag

SEQ ID NO: 1195007 - RNA, 19 nt, Artificial Sequence
  Description of Artificial Sequence: Synthetic oligonucleotide
  Antisense strand to SEQ ID NO: 1195006
cuuaaagagaagguucggc

SEQ ID NO: 1195008 - RNA, 19 nt, Artificial Sequence
  Description of Artificial Sequence: Synthetic oligonucleotide
  Sense strand starting at position 2313 of SEQ ID NO: 916928
gggugugaaugaaggagaa

SEQ ID NO: 1195009 - RNA, 19 nt, Artificial Sequence
  Description of Artificial Sequence: Synthetic oligonucleotide
  Antisense strand to SEQ ID NO: 1195008
uucuccuucauucacaccc

SEQ ID NO: 1195010 - RNA, 19 nt, Artificial Sequence
  Description of Artificial Sequence: Synthetic oligonucleotide
  Sense strand starting at position 2334 of SEQ ID NO: 916928
gaucguguaccacacauga

SEQ ID NO: 1195011 - RNA, 19 nt, Artificial Sequence
  Description of Artificial Sequence: Synthetic oligonucleotide
  Antisense strand to SEQ ID NO: 1195010
ucaugugugguacacgauc

SEQ ID NO: 1195012 - RNA, 19 nt, Artificial Sequence
  Description of Artificial Sequence: Synthetic oligonucleotide
  Sense strand starting at position 2420 of SEQ ID NO: 916928
accauucuggcaggagaaa

SEQ ID NO: 1195013 - RNA, 19 nt, Artificial Sequence
  Description of Artificial Sequence: Synthetic oligonucleotide
  Antisense strand to SEQ ID NO: 1195012
uuucuccugccagaauggu

SEQ ID NO: 1195014 - RNA, 19 nt, Artificial Sequence
  Description of Artificial Sequence: Synthetic oligonucleotide
  Sense strand starting at position 2509 of SEQ ID NO: 916928
cagagaggucgucaugaag

SEQ ID NO: 1195015 - RNA, 19 nt, Artificial Sequence
  Description of Artificial Sequence: Synthetic oligonucleotide
  Antisense strand to SEQ ID NO: 1195014
cuucaugacgaccucucug

SEQ ID NO: 1195016 - RNA, 19 nt, Artificial Sequence
  Description of Artificial Sequence: Synthetic oligonucleotide
  Sense strand starting at position 2599 of SEQ ID NO: 916928
cggcaaauucuggcgguuu

SEQ ID NO: 1195017 - RNA, 19 nt, Artificial Sequence
  Description of Artificial Sequence: Synthetic oligonucleotide
  Antisense strand to SEQ ID NO: 1195016
aaaccgccagaauuugccg

SEQ ID NO: 1195018 - RNA, 19 nt, Artificial Sequence
  Description of Artificial Sequence: Synthetic oligonucleotide
  Sense strand starting at position 2692 of SEQ ID NO: 916928
uaugguuucuuagcaggaa

SEQ ID NO: 1195019 - RNA, 19 nt, Artificial Sequence
  Description of Artificial Sequence: Synthetic oligonucleotide
  Antisense strand to SEQ ID NO: 1195018
uuccugcuaagaaaccaua

SEQ ID NO: 1195020 - RNA, 19 nt, Artificial Sequence
  Description of Artificial Sequence: Synthetic oligonucleotide
  Sense strand starting at position 2809 of SEQ ID NO: 916928
guagucaggccucauuacu

SEQ ID NO: 1195021 - RNA, 19 nt, Artificial Sequence
  Description of Artificial Sequence: Synthetic oligonucleotide
  Antisense strand to SEQ ID NO: 1195020
aguaaugaggccugacuac

SEQ ID NO: 1195022 - RNA, 19 nt, Artificial Sequence
  Description of Artificial Sequence: Synthetic oligonucleotide
  Sense strand starting at position 2836 of SEQ ID NO: 916928
acugauguguggccuuaca

SEQ ID NO: 1195023 - RNA, 19 nt, Artificial Sequence
  Description of Artificial Sequence: Synthetic oligonucleotide
  Antisense strand to SEQ ID NO: 1195022
uguaaggccacacaucagu

SEQ ID NO: 1195024 - RNA, 19 nt, Artificial Sequence
  Description of Artificial Sequence: Synthetic oligonucleotide
  Sense strand starting at position 2920 of SEQ ID NO: 916928
auugcaugugcaugauuga

SEQ ID NO: 1195025 - RNA, 19 nt, Artificial Sequence
  Description of Artificial Sequence: Synthetic oligonucleotide
  Antisense strand to SEQ ID NO: 1195024
ucaaucaugcacaugcaau

SEQ ID NO: 1195026 - RNA, 19 nt, Artificial Sequence
  Description of Artificial Sequence: Synthetic oligonucleotide
  Sense strand starting at position 2921 of SEQ ID NO: 916928
uugcaugugcaugauugau

SEQ ID NO: 1195027 - RNA, 19 nt, Artificial Sequence
  Description of Artificial Sequence: Synthetic oligonucleotide
  Antisense strand to SEQ ID NO: 1195026
aucaaucaugcacaugcaa

SEQ ID NO: 1195028 - RNA, 19 nt, Artificial Sequence
  Description of Artificial Sequence: Synthetic oligonucleotide
  Sense strand starting at position 2925 of SEQ ID NO: 916928
augugcaugauugauugau

SEQ ID NO: 1195029 - RNA, 19 nt, Artificial Sequence
  Description of Artificial Sequence: Synthetic oligonucleotide
  Antisense strand to SEQ ID NO: 1195028
aucaaucaaucaugcacau

SEQ ID NO: 1195030 - RNA, 19 nt, Artificial Sequence
  Description of Artificial Sequence: Synthetic oligonucleotide
  Sense strand starting at position 2929 of SEQ ID NO: 916928
gcaugauugauugauuguu

SEQ ID NO: 1195031 - RNA, 19 nt, Artificial Sequence
  Description of Artificial Sequence: Synthetic oligonucleotide
  Antisense strand to SEQ ID NO: 1195030
aacaaucaaucaaucaugc

SEQ ID NO: 1195032 - RNA, 19 nt, Artificial Sequence
  Description of Artificial Sequence: Synthetic oligonucleotide
  Sense strand starting at position 2970 of SEQ ID NO: 916928
cagccucuugguuaaguga

SEQ ID NO: 1195033 - RNA, 19 nt, Artificial Sequence
  Description of Artificial Sequence: Synthetic oligonucleotide
  Antisense strand to SEQ ID NO: 1195032
ucacuuaaccaagaggcug

SEQ ID NO: 1195034 - RNA, 19 nt, Artificial Sequence
  Description of Artificial Sequence: Synthetic oligonucleotide
  Sense strand starting at position 2973 of SEQ ID NO: 916928
ccucuugguuaagugauau

SEQ ID NO: 1195035 - RNA, 19 nt, Artificial Sequence
  Description of Artificial Sequence: Synthetic oligonucleotide
  Antisense strand to SEQ ID NO: 1195034
auaucacuuaaccaagagg

SEQ ID NO: 1195036 - RNA, 19 nt, Artificial Sequence
  Description of Artificial Sequence: Synthetic oligonucleotide
  Sense strand starting at position 3173 of SEQ ID NO: 916928
uaagaaaucugcuugagag

SEQ ID NO: 1195037 - RNA, 19 nt, Artificial Sequence
  Description of Artificial Sequence: Synthetic oligonucleotide
  Antisense strand to SEQ ID NO: 1195036
cucucaagcagauuucuua

SEQ ID NO: 1195038 - RNA, 19 nt, Artificial Sequence
  Description of Artificial Sequence: Synthetic oligonucleotide
  Sense strand starting at position 3174 of SEQ ID NO: 916928
aagaaaucugcuugagagc

SEQ ID NO: 1195039 - RNA, 19 nt, Artificial Sequence
  Description of Artificial Sequence: Synthetic oligonucleotide
  Antisense strand to SEQ ID NO: 1195038
gcucucaagcagauuucuu

SEQ ID NO: 1195040 - RNA, 19 nt, Artificial Sequence
  Description of Artificial Sequence: Synthetic oligonucleotide
  Sense strand starting at position 3175 of SEQ ID NO: 916928
agaaaucugcuugagagca

SEQ ID NO: 1195041 - RNA, 19 nt, Artificial Sequence
  Description of Artificial Sequence: Synthetic oligonucleotide
  Antisense strand to SEQ ID NO: 1195040
ugcucucaagcagauuucu

SEQ ID NO: 1195042 - RNA, 19 nt, Artificial Sequence
  Description of Artificial Sequence: Synthetic oligonucleotide
  Sense strand starting at position 3248 of SEQ ID NO: 916928
gguucuguuacccgaugga

SEQ ID NO: 1195043 - RNA, 19 nt, Artificial Sequence
  Description of Artificial Sequence: Synthetic oligonucleotide
  Antisense strand to SEQ ID NO: 1195042
uccaucggguaacagaacc

SEQ ID NO: 1195044 - RNA, 19 nt, Artificial Sequence
  Description of Artificial Sequence: Synthetic oligonucleotide
  Sense strand starting at position 3889 of SEQ ID NO: 916928
ugaaguugugaauaaucgu

SEQ ID NO: 1195045 - RNA, 19 nt, Artificial Sequence
  Description of Artificial Sequence: Synthetic oligonucleotide
  Antisense strand to SEQ ID NO: 1195044
acgauuauucacaacuuca

SEQ ID NO: 1195046 - RNA, 19 nt, Artificial Sequence
  Description of Artificial Sequence: Synthetic oligonucleotide
  Sense strand starting at position 3896 of SEQ ID NO: 916928
gugaauaaucguuguggga

SEQ ID NO: 1195047 - RNA, 19 nt, Artificial Sequence
  Description of Artificial Sequence: Synthetic oligonucleotide
  Antisense strand to SEQ ID NO: 1195046
ucccacaacgauuauucac

SEQ ID NO: 1195048 - RNA, 19 nt, Artificial Sequence
  Description of Artificial Sequence: Synthetic oligonucleotide
  Sense strand starting at position 73 of SEQ ID NO: 916929
ucagauaagccacgacauu

SEQ ID NO: 1195049 - RNA, 19 nt, Artificial Sequence
  Description of Artificial Sequence: Synthetic oligonucleotide
  Antisense strand to SEQ ID NO: 1195048
aaugucguggcuuaucuga

SEQ ID NO: 1195050 - RNA, 19 nt, Artificial Sequence
  Description of Artificial Sequence: Synthetic oligonucleotide
  Sense strand starting at position 243 of SEQ ID NO: 916929
cuagcauuagauugucaua

SEQ ID NO: 1195051 - RNA, 19 nt, Artificial Sequence
  Description of Artificial Sequence: Synthetic oligonucleotide
  Antisense strand to SEQ ID NO: 1195050
uaugacaaucuaaugcuag

SEQ ID NO: 1195052 - RNA, 19 nt, Artificial Sequence
  Description of Artificial Sequence: Synthetic oligonucleotide
  Sense strand starting at position 306 of SEQ ID NO: 916929
uugcgaacuccuuaugaga

SEQ ID NO: 1195053 - RNA, 19 nt, Artificial Sequence
  Description of Artificial Sequence: Synthetic oligonucleotide
  Antisense strand to SEQ ID NO: 1195052
ucucauaaggaguucgcaa

SEQ ID NO: 1195054 - RNA, 19 nt, Artificial Sequence
  Description of Artificial Sequence: Synthetic oligonucleotide
  Sense strand starting at position 551 of SEQ ID NO: 916929
caugaugucucauugaaag

SEQ ID NO: 1195055 - RNA, 19 nt, Artificial Sequence
  Description of Artificial Sequence: Synthetic oligonucleotide
  Antisense strand to SEQ ID NO: 1195054
cuuucaaugagacaucaug

SEQ ID NO: 1195056 - RNA, 19 nt, Artificial Sequence
  Description of Artificial Sequence: Synthetic oligonucleotide
  Sense strand starting at position 648 of SEQ ID NO: 916929
ucuguuuccagguguauuu

SEQ ID NO: 1195057 - RNA, 19 nt, Artificial Sequence
  Description of Artificial Sequence: Synthetic oligonucleotide
  Antisense strand to SEQ ID NO: 1195056
aaauacaccuggaaacaga

SEQ ID NO: 1195058 - RNA, 19 nt, Artificial Sequence
  Description of Artificial Sequence: Synthetic oligonucleotide
  Sense strand starting at position 734 of SEQ ID NO: 916929
aaggaaguguggucucaua

SEQ ID NO: 1195059 - RNA, 19 nt, Artificial Sequence
  Description of Artificial Sequence: Synthetic oligonucleotide
  Antisense strand to SEQ ID NO: 1195058
uaugagaccacacuuccuu

SEQ ID NO: 1195060 - RNA, 19 nt, Artificial Sequence
  Description of Artificial Sequence: Synthetic oligonucleotide
  Sense strand starting at position 742 of SEQ ID NO: 916929
guggucucauagguauaag

SEQ ID NO: 1195061 - RNA, 19 nt, Artificial Sequence
  Description of Artificial Sequence: Synthetic oligonucleotide
  Antisense strand to SEQ ID NO: 1195060
cuuauaccuaugagaccac

SEQ ID NO: 1195062 - RNA, 19 nt, Artificial Sequence
  Description of Artificial Sequence: Synthetic oligonucleotide
  Sense strand starting at position 797 of SEQ ID NO: 916929
gcaacaaucgcauaaauga

SEQ ID NO: 1195063 - RNA, 19 nt, Artificial Sequence
  Description of Artificial Sequence: Synthetic oligonucleotide
  Antisense strand to SEQ ID NO: 1195062
ucauuuaugcgauuguugc

SEQ ID NO: 1195064 - RNA, 19 nt, Artificial Sequence
  Description of Artificial Sequence: Synthetic oligonucleotide
  Sense strand starting at position 1164 of SEQ ID NO: 916929
uuuaaagcaugguuauuga

SEQ ID NO: 1195065 - RNA, 19 nt, Artificial Sequence
  Description of Artificial Sequence: Synthetic oligonucleotide
  Antisense strand to SEQ ID NO: 1195064
ucaauaaccaugcuuuaaa

SEQ ID NO: 1195066 - RNA, 19 nt, Artificial Sequence
  Description of Artificial Sequence: Synthetic oligonucleotide
  Sense strand starting at position 1167 of SEQ ID NO: 916929
aaagcaugguuauugauau

SEQ ID NO: 1195067 - RNA, 19 nt, Artificial Sequence
  Description of Artificial Sequence: Synthetic oligonucleotide
  Antisense strand to SEQ ID NO: 1195066
auaucaauaaccaugcuuu

SEQ ID NO: 1195068 - RNA, 19 nt, Artificial Sequence
  Description of Artificial Sequence: Synthetic oligonucleotide
  Sense strand starting at position 1209 of SEQ ID NO: 916929
cuggaaaguaauuaccgua

SEQ ID NO: 1195069 - RNA, 19 nt, Artificial Sequence
  Description of Artificial Sequence: Synthetic oligonucleotide
  Antisense strand to SEQ ID NO: 1195068
uacgguaauuacuuuccag

SEQ ID NO: 1195070 - RNA, 19 nt, Artificial Sequence
  Description of Artificial Sequence: Synthetic oligonucleotide
  Sense strand starting at position 1225 of SEQ ID NO: 916929
guauuuaugcuuugcagau

SEQ ID NO: 1195071 - RNA, 19 nt, Artificial Sequence
  Description of Artificial Sequence: Synthetic oligonucleotide
  Antisense strand to SEQ ID NO: 1195070
aucugcaaagcauaaauac

SEQ ID NO: 1195072 - RNA, 19 nt, Artificial Sequence
  Description of Artificial Sequence: Synthetic oligonucleotide
  Sense strand starting at position 1226 of SEQ ID NO: 916929
uauuuaugcuuugcagaug

SEQ ID NO: 1195073 - RNA, 19 nt, Artificial Sequence
  Description of Artificial Sequence: Synthetic oligonucleotide
  Antisense strand to SEQ ID NO: 1195072
caucugcaaagcauaaaua

SEQ ID NO: 1195074 - RNA, 19 nt, Artificial Sequence
  Description of Artificial Sequence: Synthetic oligonucleotide
  Sense strand starting at position 1231 of SEQ ID NO: 916929
augcuuugcagaugaggaa

SEQ ID NO: 1195075 - RNA, 19 nt, Artificial Sequence
  Description of Artificial Sequence: Synthetic oligonucleotide
  Antisense strand to SEQ ID NO: 1195074
uuccucaucugcaaagcau

SEQ ID NO: 1195076 - RNA, 19 nt, Artificial Sequence
  Description of Artificial Sequence: Synthetic oligonucleotide
  Sense strand starting at position 1264 of SEQ ID NO: 916929
caacgauuccauggucuga

SEQ ID NO: 1195077 - RNA, 19 nt, Artificial Sequence
  Description of Artificial Sequence: Synthetic oligonucleotide
  Antisense strand to SEQ ID NO: 1195076
ucagaccauggaaucguug

SEQ ID NO: 1195078 - RNA, 19 nt, Artificial Sequence
  Description of Artificial Sequence: Synthetic oligonucleotide
  Sense strand starting at position 1266 of SEQ ID NO: 916929
acgauuccauggucugaaa

SEQ ID NO: 1195079 - RNA, 19 nt, Artificial Sequence
  Description of Artificial Sequence: Synthetic oligonucleotide
  Antisense strand to SEQ ID NO: 1195078
uuucagaccauggaaucgu

SEQ ID NO: 1195080 - RNA, 19 nt, Artificial Sequence
  Description of Artificial Sequence: Synthetic oligonucleotide
  Sense strand starting at position 1430 of SEQ ID NO: 916929
gguuuacucccuuaucaua

SEQ ID NO: 1195081 - RNA, 19 nt, Artificial Sequence
  Description of Artificial Sequence: Synthetic oligonucleotide
  Antisense strand to SEQ ID NO: 1195080
uaugauaagggaguaaacc

SEQ ID NO: 1195082 - RNA, 19 nt, Artificial Sequence
  Description of Artificial Sequence: Synthetic oligonucleotide
  Sense strand starting at position 1487 of SEQ ID NO: 916929
cgaagaaacacagguuaau

SEQ ID NO: 1195083 - RNA, 19 nt, Artificial Sequence
  Description of Artificial Sequence: Synthetic oligonucleotide
  Antisense strand to SEQ ID NO: 1195082
auuaaccuguguuucuucg

SEQ ID NO: 1195084 - RNA, 19 nt, Artificial Sequence
  Description of Artificial Sequence: Synthetic oligonucleotide
  Sense strand starting at position 1900 of SEQ ID NO: 916929
acaggaaaccucugcugca

SEQ ID NO: 1195085 - RNA, 19 nt, Artificial Sequence
  Description of Artificial Sequence: Synthetic oligonucleotide
  Antisense strand to SEQ ID NO: 1195084
ugcagcagagguuuccugu

SEQ ID NO: 1195086 - RNA, 19 nt, Artificial Sequence
  Description of Artificial Sequence: Synthetic oligonucleotide
  Sense strand starting at position 1931 of SEQ ID NO: 916929
ggacuuguugcugaucuau

SEQ ID NO: 1195087 - RNA, 19 nt, Artificial Sequence
  Description of Artificial Sequence: Synthetic oligonucleotide
  Antisense strand to SEQ ID NO: 1195086
auagaucagcaacaagucc

SEQ ID NO: 1195088 - RNA, 19 nt, Artificial Sequence
  Description of Artificial Sequence: Synthetic oligonucleotide
  Sense strand starting at position 1937 of SEQ ID NO: 916929
guugcugaucuauacucau

SEQ ID NO: 1195089 - RNA, 19 nt, Artificial Sequence
  Description of Artificial Sequence: Synthetic oligonucleotide
  Antisense strand to SEQ ID NO: 1195088
augaguauagaucagcaac

SEQ ID NO: 1195090 - RNA, 19 nt, Artificial Sequence
  Description of Artificial Sequence: Synthetic oligonucleotide
  Sense strand starting at position 1965 of SEQ ID NO: 916929
uagugauugcuagauguca

SEQ ID NO: 1195091 - RNA, 19 nt, Artificial Sequence
  Description of Artificial Sequence: Synthetic oligonucleotide
  Antisense strand to SEQ ID NO: 1195090
ugacaucuagcaaucacua

SEQ ID NO: 1195092 - RNA, 19 nt, Artificial Sequence
  Description of Artificial Sequence: Synthetic oligonucleotide
  Sense strand starting at position 1995 of SEQ ID NO: 916929
gacuccaguccaggugaaa

SEQ ID NO: 1195093 - RNA, 19 nt, Artificial Sequence
  Description of Artificial Sequence: Synthetic oligonucleotide
  Antisense strand to SEQ ID NO: 1195092
uuucaccuggacuggaguc

SEQ ID NO: 1195094 - RNA, 19 nt, Artificial Sequence
  Description of Artificial Sequence: Synthetic oligonucleotide
  Sense strand starting at position 2397 of SEQ ID NO: 916929
cgcauagagccgagauugu

SEQ ID NO: 1195095 - RNA, 19 nt, Artificial Sequence
  Description of Artificial Sequence: Synthetic oligonucleotide
  Antisense strand to SEQ ID NO: 1195094
acaaucucggcucuaugcg

SEQ ID NO: 1195096 - RNA, 19 nt, Artificial Sequence
  Description of Artificial Sequence: Synthetic oligonucleotide
  Sense strand starting at position 2670 of SEQ ID NO: 916929
ugaacaagguaguuauguu

SEQ ID NO: 1195097 - RNA, 19 nt, Artificial Sequence
  Description of Artificial Sequence: Synthetic oligonucleotide
  Antisense strand to SEQ ID NO: 1195096
aacauaacuaccuuguuca

SEQ ID NO: 1195098 - RNA, 19 nt, Artificial Sequence
  Description of Artificial Sequence: Synthetic oligonucleotide
  Sense strand starting at position 2797 of SEQ ID NO: 916929
agucauagguaacuugaau

SEQ ID NO: 1195099 - RNA, 19 nt, Artificial Sequence
  Description of Artificial Sequence: Synthetic oligonucleotide
  Antisense strand to SEQ ID NO: 1195098
auucaaguuaccuaugacu

SEQ ID NO: 1195100 - RNA, 19 nt, Artificial Sequence
  Description of Artificial Sequence: Synthetic oligonucleotide
  Sense strand starting at position 2912 of SEQ ID NO: 916929
gagauugagguaugucagu

SEQ ID NO: 1195101 - RNA, 19 nt, Artificial Sequence
  Description of Artificial Sequence: Synthetic oligonucleotide
  Antisense strand to SEQ ID NO: 1195100
acugacauaccucaaucuc

SEQ ID NO: 1195102 - RNA, 19 nt, Artificial Sequence
  Description of Artificial Sequence: Synthetic oligonucleotide
  Sense strand starting at position 2987 of SEQ ID NO: 916929
gaugaauuguacuuaaugc

SEQ ID NO: 1195103 - RNA, 19 nt, Artificial Sequence
  Description of Artificial Sequence: Synthetic oligonucleotide
  Antisense strand to SEQ ID NO: 1195102
gcauuaaguacaauucauc

SEQ ID NO: 1195104 - RNA, 19 nt, Artificial Sequence
  Description of Artificial Sequence: Synthetic oligonucleotide
  Sense strand starting at position 3095 of SEQ ID NO: 916929
uuaguuguucuuuagauuc

SEQ ID NO: 1195105 - RNA, 19 nt, Artificial Sequence
  Description of Artificial Sequence: Synthetic oligonucleotide
  Antisense strand to SEQ ID NO: 1195104
gaaucuaaagaacaacuaa

SEQ ID NO: 1195106 - RNA, 19 nt, Artificial Sequence
  Description of Artificial Sequence: Synthetic oligonucleotide
  Sense strand starting at position 3197 of SEQ ID NO: 916929
augcuccuccaugacagau

SEQ ID NO: 1195107 - RNA, 19 nt, Artificial Sequence
  Description of Artificial Sequence: Synthetic oligonucleotide
  Antisense strand to SEQ ID NO: 1195106
aucugucauggaggagcau

SEQ ID NO: 1195108 - RNA, 19 nt, Artificial Sequence
  Description of Artificial Sequence: Synthetic oligonucleotide
  Sense strand starting at position 3211 of SEQ ID NO: 916929
cagauaaagugguuuacuc

SEQ ID NO: 1195109 - RNA, 19 nt, Artificial Sequence
  Description of Artificial Sequence: Synthetic oligonucleotide
  Antisense strand to SEQ ID NO: 1195108
gaguaaaccacuuuaucug

SEQ ID NO: 1195110 - RNA, 19 nt, Artificial Sequence
  Description of Artificial Sequence: Synthetic oligonucleotide
  Sense strand starting at position 3213 of SEQ ID NO: 916929
gauaaagugguuuacucau

SEQ ID NO: 1195111 - RNA, 19 nt, Artificial Sequence
  Description of Artificial Sequence: Synthetic oligonucleotide
  Antisense strand to SEQ ID NO: 1195110
augaguaaaccacuuuauc

SEQ ID NO: 1195112 - RNA, 19 nt, Artificial Sequence
  Description of Artificial Sequence: Synthetic oligonucleotide
  Sense strand starting at position 3255 of SEQ ID NO: 916929
gcuagauacucauucugau

SEQ ID NO: 1195113 - RNA, 19 nt, Artificial Sequence
  Description of Artificial Sequence: Synthetic oligonucleotide
  Antisense strand to SEQ ID NO: 1195112
aucagaaugaguaucuagc

SEQ ID NO: 1195114 - RNA, 19 nt, Artificial Sequence
  Description of Artificial Sequence: Synthetic oligonucleotide
  Sense strand starting at position 3480 of SEQ ID NO: 916929
gucugaguuacacagcaga

SEQ ID NO: 1195115 - RNA, 19 nt, Artificial Sequence
  Description of Artificial Sequence: Synthetic oligonucleotide
  Antisense strand to SEQ ID NO: 1195114
ucugcuguguaacucagac

SEQ ID NO: 1195116 - RNA, 19 nt, Artificial Sequence
  Description of Artificial Sequence: Synthetic oligonucleotide
  Sense strand starting at position 3483 of SEQ ID NO: 916929
ugaguuacacagcagacau

SEQ ID NO: 1195117 - RNA, 19 nt, Artificial Sequence
  Description of Artificial Sequence: Synthetic oligonucleotide
  Antisense strand to SEQ ID NO: 1195116
augucugcuguguaacuca

SEQ ID NO: 1195118 - RNA, 19 nt, Artificial Sequence
  Description of Artificial Sequence: Synthetic oligonucleotide
  Sense strand starting at position 3557 of SEQ ID NO: 916929
ugguuagaauauccauuau

SEQ ID NO: 1195119 - RNA, 19 nt, Artificial Sequence
  Description of Artificial Sequence: Synthetic oligonucleotide
  Antisense strand to SEQ ID NO: 1195118
auaauggauauucuaacca

SEQ ID NO: 1195120 - RNA, 19 nt, Artificial Sequence
  Description of Artificial Sequence: Synthetic oligonucleotide
  Sense strand starting at position 3691 of SEQ ID NO: 916929
aucguuauuucugccucau

SEQ ID NO: 1195121 - RNA, 19 nt, Artificial Sequence
  Description of Artificial Sequence: Synthetic oligonucleotide
  Antisense strand to SEQ ID NO: 1195120
augaggcagaaauaacgau

SEQ ID NO: 1195122 - RNA, 19 nt, Artificial Sequence
  Description of Artificial Sequence: Synthetic oligonucleotide
  Sense strand starting at position 3693 of SEQ ID NO: 916929
cguuauuucugccucauua

SEQ ID NO: 1195123 - RNA, 19 nt, Artificial Sequence
  Description of Artificial Sequence: Synthetic oligonucleotide
  Antisense strand to SEQ ID NO: 1195122
uaaugaggcagaaauaacg

SEQ ID NO: 1195124 - RNA, 19 nt, Artificial Sequence
  Description of Artificial Sequence: Synthetic oligonucleotide
  Sense strand starting at position 3745 of SEQ ID NO: 916929
ucucucuguccagauuaag

SEQ ID NO: 1195125 - RNA, 19 nt, Artificial Sequence
  Description of Artificial Sequence: Synthetic oligonucleotide
  Antisense strand to SEQ ID NO: 1195124
cuuaaucuggacagagaga

SEQ ID NO: 1195126 - RNA, 19 nt, Artificial Sequence
  Description of Artificial Sequence: Synthetic oligonucleotide
  Sense strand starting at position 3819 of SEQ ID NO: 916929
uccaguuuagccuacauga

SEQ ID NO: 1195127 - RNA, 19 nt, Artificial Sequence
  Description of Artificial Sequence: Synthetic oligonucleotide
  Antisense strand to SEQ ID NO: 1195126
ucauguaggcuaaacugga

SEQ ID NO: 1195128 - RNA, 19 nt, Artificial Sequence
  Description of Artificial Sequence: Synthetic oligonucleotide
  Sense strand starting at position 112 of SEQ ID NO: 916930
guaguuguuacgcuacacu

SEQ ID NO: 1195129 - RNA, 19 nt, Artificial Sequence
  Description of Artificial Sequence: Synthetic oligonucleotide
  Antisense strand to SEQ ID NO: 1195128
aguguagcguaacaacuac

SEQ ID NO: 1195130 - RNA, 19 nt, Artificial Sequence
  Description of Artificial Sequence: Synthetic oligonucleotide
  Sense strand starting at position 122 of SEQ ID NO: 916930
cgcuacacuguuuaggaau

SEQ ID NO: 1195131 - RNA, 19 nt, Artificial Sequence
  Description of Artificial Sequence: Synthetic oligonucleotide
  Antisense strand to SEQ ID NO: 1195130
auuccuaaacaguguagcg

SEQ ID NO: 1195132 - RNA, 19 nt, Artificial Sequence
  Description of Artificial Sequence: Synthetic oligonucleotide
  Sense strand starting at position 526 of SEQ ID NO: 916930
gugucuucugauggaauua

SEQ ID NO: 1195133 - RNA, 19 nt, Artificial Sequence
  Description of Artificial Sequence: Synthetic oligonucleotide
  Antisense strand to SEQ ID NO: 1195132
uaauuccaucagaagacac

SEQ ID NO: 1195134 - RNA, 19 nt, Artificial Sequence
  Description of Artificial Sequence: Synthetic oligonucleotide
  Sense strand starting at position 688 of SEQ ID NO: 916930
uuacuuggcacucgggaaa

SEQ ID NO: 1195135 - RNA, 19 nt, Artificial Sequence
  Description of Artificial Sequence: Synthetic oligonucleotide
  Antisense strand to SEQ ID NO: 1195134
uuucccgagugccaaguaa

SEQ ID NO: 1195136 - RNA, 19 nt, Artificial Sequence
  Description of Artificial Sequence: Synthetic oligonucleotide
  Sense strand starting at position 920 of SEQ ID NO: 916930
aaagcaaggcucugagacu

SEQ ID NO: 1195137 - RNA, 19 nt, Artificial Sequence
  Description of Artificial Sequence: Synthetic oligonucleotide
  Antisense strand to SEQ ID NO: 1195136
agucucagagccuugcuuu

SEQ ID NO: 1195138 - RNA, 19 nt, Artificial Sequence
  Description of Artificial Sequence: Synthetic oligonucleotide
  Sense strand starting at position 1086 of SEQ ID NO: 916930
augcgcaugucauuuaauc

SEQ ID NO: 1195139 - RNA, 19 nt, Artificial Sequence
  Description of Artificial Sequence: Synthetic oligonucleotide
  Antisense strand to SEQ ID NO: 1195138
gauuaaaugacaugcgcau

SEQ ID NO: 1195140 - RNA, 19 nt, Artificial Sequence
  Description of Artificial Sequence: Synthetic oligonucleotide
  Sense strand starting at position 1158 of SEQ ID NO: 916930
uccauuacaguuggguaaa

SEQ ID NO: 1195141 - RNA, 19 nt, Artificial Sequence
  Description of Artificial Sequence: Synthetic oligonucleotide
  Antisense strand to SEQ ID NO: 1195140
uuuacccaacuguaaugga

SEQ ID NO: 1195142 - RNA, 19 nt, Artificial Sequence
  Description of Artificial Sequence: Synthetic oligonucleotide
  Sense strand starting at position 1196 of SEQ ID NO: 916930
guuuacaaagcugaguuaa

SEQ ID NO: 1195143 - RNA, 19 nt, Artificial Sequence
  Description of Artificial Sequence: Synthetic oligonucleotide
  Antisense strand to SEQ ID NO: 1195142
uuaacucagcuuuguaaac

SEQ ID NO: 1195144 - RNA, 19 nt, Artificial Sequence
  Description of Artificial Sequence: Synthetic oligonucleotide
  Sense strand starting at position 1198 of SEQ ID NO: 916930
uuacaaagcugaguuaagu

SEQ ID NO: 1195145 - RNA, 19 nt, Artificial Sequence
  Description of Artificial Sequence: Synthetic oligonucleotide
  Antisense strand to SEQ ID NO: 1195144
acuuaacucagcuuuguaa

SEQ ID NO: 1195146 - RNA, 19 nt, Artificial Sequence
  Description of Artificial Sequence: Synthetic oligonucleotide
  Sense strand starting at position 1204 of SEQ ID NO: 916930
agcugaguuaagugacaaa

SEQ ID NO: 1195147 - RNA, 19 nt, Artificial Sequence
  Description of Artificial Sequence: Synthetic oligonucleotide
  Antisense strand to SEQ ID NO: 1195146
uuugucacuuaacucagcu

SEQ ID NO: 1195148 - RNA, 19 nt, Artificial Sequence
  Description of Artificial Sequence: Synthetic oligonucleotide
  Sense strand starting at position 1276 of SEQ ID NO: 916930
cugaguucucaauagugua

SEQ ID NO: 1195149 - RNA, 19 nt, Artificial Sequence
  Description of Artificial Sequence: Synthetic oligonucleotide
  Antisense strand to SEQ ID NO: 1195148
uacacuauugagaacucag

SEQ ID NO: 1195150 - RNA, 19 nt, Artificial Sequence
  Description of Artificial Sequence: Synthetic oligonucleotide
  Sense strand starting at position 1348 of SEQ ID NO: 916930
ggacucugaugcucucaca

SEQ ID NO: 1195151 - RNA, 19 nt, Artificial Sequence
  Description of Artificial Sequence: Synthetic oligonucleotide
  Antisense strand to SEQ ID NO: 1195150
ugugagagcaucagagucc

SEQ ID NO: 1195152 - RNA, 19 nt, Artificial Sequence
  Description of Artificial Sequence: Synthetic oligonucleotide
  Sense strand starting at position 1380 of SEQ ID NO: 916930
cgaacuacacucgauguau

SEQ ID NO: 1195153 - RNA, 19 nt, Artificial Sequence
  Description of Artificial Sequence: Synthetic oligonucleotide
  Antisense strand to SEQ ID NO: 1195152
auacaucgaguguaguucg

SEQ ID NO: 1195154 - RNA, 19 nt, Artificial Sequence
  Description of Artificial Sequence: Synthetic oligonucleotide
  Sense strand starting at position 1402 of SEQ ID NO: 916930
guaaaugaguuucuaauuc

SEQ ID NO: 1195155 - RNA, 19 nt, Artificial Sequence
  Description of Artificial Sequence: Synthetic oligonucleotide
  Antisense strand to SEQ ID NO: 1195154
gaauuagaaacucauuuac

SEQ ID NO: 1195156 - RNA, 19 nt, Artificial Sequence
  Description of Artificial Sequence: Synthetic oligonucleotide
  Sense strand starting at position 2210 of SEQ ID NO: 916930
gcuagagucaggcaaaucu

SEQ ID NO: 1195157 - RNA, 19 nt, Artificial Sequence
  Description of Artificial Sequence: Synthetic oligonucleotide
  Antisense strand to SEQ ID NO: 1195156
agauuugccugacucuagc

SEQ ID NO: 1195158 - RNA, 19 nt, Artificial Sequence
  Description of Artificial Sequence: Synthetic oligonucleotide
  Sense strand starting at position 2482 of SEQ ID NO: 916930
uaguuagagcuuuauuaag

SEQ ID NO: 1195159 - RNA, 19 nt, Artificial Sequence
  Description of Artificial Sequence: Synthetic oligonucleotide
  Antisense strand to SEQ ID NO: 1195158
cuuaauaaagcucuaacua

SEQ ID NO: 1195160 - RNA, 19 nt, Artificial Sequence
  Description of Artificial Sequence: Synthetic oligonucleotide
  Sense strand starting at position 2484 of SEQ ID NO: 916930
guuagagcuuuauuaagag

SEQ ID NO: 1195161 - RNA, 19 nt, Artificial Sequence
  Description of Artificial Sequence: Synthetic oligonucleotide
  Antisense strand to SEQ ID NO: 1195160
cucuuaauaaagcucuaac

SEQ ID NO: 1195162 - RNA, 19 nt, Artificial Sequence
  Description of Artificial Sequence: Synthetic oligonucleotide
  Sense strand starting at position 2582 of SEQ ID NO: 916930
uguguaagguuuauucggu

SEQ ID NO: 1195163 - RNA, 19 nt, Artificial Sequence
  Description of Artificial Sequence: Synthetic oligonucleotide
  Antisense strand to SEQ ID NO: 1195162
accgaauaaaccuuacaca

SEQ ID NO: 1195164 - RNA, 19 nt, Artificial Sequence
  Description of Artificial Sequence: Synthetic oligonucleotide
  Sense strand starting at position 2587 of SEQ ID NO: 916930
aagguuuauucgguaagau

SEQ ID NO: 1195165 - RNA, 19 nt, Artificial Sequence
  Description of Artificial Sequence: Synthetic oligonucleotide
  Antisense strand to SEQ ID NO: 1195164
aucuuaccgaauaaaccuu

SEQ ID NO: 1195166 - RNA, 19 nt, Artificial Sequence
  Description of Artificial Sequence: Synthetic oligonucleotide
  Sense strand starting at position 2588 of SEQ ID NO: 916930
agguuuauucgguaagaug

SEQ ID NO: 1195167 - RNA, 19 nt, Artificial Sequence
  Description of Artificial Sequence: Synthetic oligonucleotide
  Antisense strand to SEQ ID NO: 1195166
caucuuaccgaauaaaccu

SEQ ID NO: 1195168 - RNA, 19 nt, Artificial Sequence
  Description of Artificial Sequence: Synthetic oligonucleotide
  Sense strand starting at position 2631 of SEQ ID NO: 916930
acgagcugucguuugccua

SEQ ID NO: 1195169 - RNA, 19 nt, Artificial Sequence
  Description of Artificial Sequence: Synthetic oligonucleotide
  Antisense strand to SEQ ID NO: 1195168
uaggcaaacgacagcucgu

SEQ ID NO: 1195170 - RNA, 19 nt, Artificial Sequence
  Description of Artificial Sequence: Synthetic oligonucleotide
  Sense strand starting at position 2712 of SEQ ID NO: 916930
agcugccuugaauauuaau

SEQ ID NO: 1195171 - RNA, 19 nt, Artificial Sequence
  Description of Artificial Sequence: Synthetic oligonucleotide
  Antisense strand to SEQ ID NO: 1195170
auuaauauucaaggcagcu

SEQ ID NO: 1195172 - RNA, 19 nt, Artificial Sequence
  Description of Artificial Sequence: Synthetic oligonucleotide
  Sense strand starting at position 2869 of SEQ ID NO: 916930
gaauuaauuugugcgauuc

SEQ ID NO: 1195173 - RNA, 19 nt, Artificial Sequence
  Description of Artificial Sequence: Synthetic oligonucleotide
  Antisense strand to SEQ ID NO: 1195172
gaaucgcacaaauuaauuc

SEQ ID NO: 1195174 - RNA, 19 nt, Artificial Sequence
  Description of Artificial Sequence: Synthetic oligonucleotide
  Sense strand starting at position 2883 of SEQ ID NO: 916930
gauucccucugaguagaaa

SEQ ID NO: 1195175 - RNA, 19 nt, Artificial Sequence
  Description of Artificial Sequence: Synthetic oligonucleotide
  Antisense strand to SEQ ID NO: 1195174
uuucuacucagagggaauc

SEQ ID NO: 1195176 - RNA, 19 nt, Artificial Sequence
  Description of Artificial Sequence: Synthetic oligonucleotide
  Sense strand starting at position 2900 of SEQ ID NO: 916930
aaaggaacacgguguuaua

SEQ ID NO: 1195177 - RNA, 19 nt, Artificial Sequence
  Description of Artificial Sequence: Synthetic oligonucleotide
  Antisense strand to SEQ ID NO: 1195176
uauaacaccguguuccuuu

SEQ ID NO: 1195178 - RNA, 19 nt, Artificial Sequence
  Description of Artificial Sequence: Synthetic oligonucleotide
  Sense strand starting at position 2967 of SEQ ID NO: 916930
uguggucuaguugugugua

SEQ ID NO: 1195179 - RNA, 19 nt, Artificial Sequence
  Description of Artificial Sequence: Synthetic oligonucleotide
  Antisense strand to SEQ ID NO: 1195178
uacacacaacuagaccaca

SEQ ID NO: 1195180 - RNA, 19 nt, Artificial Sequence
  Description of Artificial Sequence: Synthetic oligonucleotide
  Sense strand starting at position 3007 of SEQ ID NO: 916930
uuuaaugguuuguccaaag

SEQ ID NO: 1195181 - RNA, 19 nt, Artificial Sequence
  Description of Artificial Sequence: Synthetic oligonucleotide
  Antisense strand to SEQ ID NO: 1195180
cuuuggacaaaccauuaaa

SEQ ID NO: 1195182 - RNA, 19 nt, Artificial Sequence
  Description of Artificial Sequence: Synthetic oligonucleotide
  Sense strand starting at position 3154 of SEQ ID NO: 916930
cugaauuguucccuaugga

SEQ ID NO: 1195183 - RNA, 19 nt, Artificial Sequence
  Description of Artificial Sequence: Synthetic oligonucleotide
  Antisense strand to SEQ ID NO: 1195182
uccauagggaacaauucag

SEQ ID NO: 1195184 - RNA, 19 nt, Artificial Sequence
  Description of Artificial Sequence: Synthetic oligonucleotide
  Sense strand starting at position 3155 of SEQ ID NO: 916930
ugaauuguucccuauggac

SEQ ID NO: 1195185 - RNA, 19 nt, Artificial Sequence
  Description of Artificial Sequence: Synthetic oligonucleotide
  Antisense strand to SEQ ID NO: 1195184
guccauagggaacaauuca

SEQ ID NO: 1195186 - RNA, 19 nt, Artificial Sequence
  Description of Artificial Sequence: Synthetic oligonucleotide
  Sense strand starting at position 3184 of SEQ ID NO: 916930
augaaacguuauucucauc

SEQ ID NO: 1195187 - RNA, 19 nt, Artificial Sequence
  Description of Artificial Sequence: Synthetic oligonucleotide
  Antisense strand to SEQ ID NO: 1195186
gaugagaauaacguuucau

SEQ ID NO: 1195188 - RNA, 19 nt, Artificial Sequence
  Description of Artificial Sequence: Synthetic oligonucleotide
  Sense strand starting at position 3311 of SEQ ID NO: 916930
uaagaugucuuuccaggag

SEQ ID NO: 1195189 - RNA, 19 nt, Artificial Sequence
  Description of Artificial Sequence: Synthetic oligonucleotide
  Antisense strand to SEQ ID NO: 1195188
cuccuggaaagacaucuua

SEQ ID NO: 1195190 - RNA, 19 nt, Artificial Sequence
  Description of Artificial Sequence: Synthetic oligonucleotide
  Sense strand starting at position 3315 of SEQ ID NO: 916930
augucuuuccaggaguucu

SEQ ID NO: 1195191 - RNA, 19 nt, Artificial Sequence
  Description of Artificial Sequence: Synthetic oligonucleotide
  Antisense strand to SEQ ID NO: 1195190
agaacuccuggaaagacau

SEQ ID NO: 1195192 - RNA, 19 nt, Artificial Sequence
  Description of Artificial Sequence: Synthetic oligonucleotide
  Sense strand starting at position 3462 of SEQ ID NO: 916930
gcuguuggagaacaucuaa

SEQ ID NO: 1195193 - RNA, 19 nt, Artificial Sequence
  Description of Artificial Sequence: Synthetic oligonucleotide
  Antisense strand to SEQ ID NO: 1195192
uuagauguucuccaacagc

SEQ ID NO: 1195194 - RNA, 19 nt, Artificial Sequence
  Description of Artificial Sequence: Synthetic oligonucleotide
  Sense strand starting at position 3503 of SEQ ID NO: 916930
gaguaacuugcguuccugu

SEQ ID NO: 1195195 - RNA, 19 nt, Artificial Sequence
  Description of Artificial Sequence: Synthetic oligonucleotide
  Antisense strand to SEQ ID NO: 1195194
acaggaacgcaaguuacuc

SEQ ID NO: 1195196 - RNA, 19 nt, Artificial Sequence
  Description of Artificial Sequence: Synthetic oligonucleotide
  Sense strand starting at position 3508 of SEQ ID NO: 916930
acuugcguuccugucagua

SEQ ID NO: 1195197 - RNA, 19 nt, Artificial Sequence
  Description of Artificial Sequence: Synthetic oligonucleotide
  Antisense strand to SEQ ID NO: 1195196
uacugacaggaacgcaagu

SEQ ID NO: 1195198 - RNA, 19 nt, Artificial Sequence
  Description of Artificial Sequence: Synthetic oligonucleotide
  Sense strand starting at position 3594 of SEQ ID NO: 916930
uaaguuuauuucguugcua

SEQ ID NO: 1195199 - RNA, 19 nt, Artificial Sequence
  Description of Artificial Sequence: Synthetic oligonucleotide
  Antisense strand to SEQ ID NO: 1195198
uagcaacgaaauaaacuua

SEQ ID NO: 1195200 - RNA, 19 nt, Artificial Sequence
  Description of Artificial Sequence: Synthetic oligonucleotide
  Sense strand starting at position 3595 of SEQ ID NO: 916930
aaguuuauuucguugcuaa

SEQ ID NO: 1195201 - RNA, 19 nt, Artificial Sequence
  Description of Artificial Sequence: Synthetic oligonucleotide
  Antisense strand to SEQ ID NO: 1195200
uuagcaacgaaauaaacuu

SEQ ID NO: 1195202 - RNA, 19 nt, Artificial Sequence
  Description of Artificial Sequence: Synthetic oligonucleotide
  Sense strand starting at position 3596 of SEQ ID NO: 916930
aguuuauuucguugcuaaa

SEQ ID NO: 1195203 - RNA, 19 nt, Artificial Sequence
  Description of Artificial Sequence: Synthetic oligonucleotide
  Antisense strand to SEQ ID NO: 1195202
uuuagcaacgaaauaaacu

SEQ ID NO: 1195204 - RNA, 19 nt, Artificial Sequence
  Description of Artificial Sequence: Synthetic oligonucleotide
  Sense strand starting at position 3598 of SEQ ID NO: 916930
uuuauuucguugcuaaaug

SEQ ID NO: 1195205 - RNA, 19 nt, Artificial Sequence
  Description of Artificial Sequence: Synthetic oligonucleotide
  Antisense strand to SEQ ID NO: 1195204
cauuuagcaacgaaauaaa

SEQ ID NO: 1195206 - RNA, 19 nt, Artificial Sequence
  Description of Artificial Sequence: Synthetic oligonucleotide
  Sense strand starting at position 3735 of SEQ ID NO: 916930
aacugagcacuuggguuau

SEQ ID NO: 1195207 - RNA, 19 nt, Artificial Sequence
  Description of Artificial Sequence: Synthetic oligonucleotide
  Antisense strand to SEQ ID NO: 1195206
auaacccaagugcucaguu

SEQ ID NO: 1195208 - RNA, 19 nt, Artificial Sequence
  Description of Artificial Sequence: Synthetic oligonucleotide
  Sense strand starting at position 248 of SEQ ID NO: 916931
gugagacugugucucuaga

SEQ ID NO: 1195209 - RNA, 19 nt, Artificial Sequence
  Description of Artificial Sequence: Synthetic oligonucleotide
  Antisense strand to SEQ ID NO: 1195208
ucuagagacacagucucac

SEQ ID NO: 1195210 - RNA, 19 nt, Artificial Sequence
  Description of Artificial Sequence: Synthetic oligonucleotide
  Sense strand starting at position 375 of SEQ ID NO: 916931
ucgagacugcaaugaauua

SEQ ID NO: 1195211 - RNA, 19 nt, Artificial Sequence
  Description of Artificial Sequence: Synthetic oligonucleotide
  Antisense strand to SEQ ID NO: 1195210
uaauucauugcagucucga

SEQ ID NO: 1195212 - RNA, 19 nt, Artificial Sequence
  Description of Artificial Sequence: Synthetic oligonucleotide
  Sense strand starting at position 597 of SEQ ID NO: 916931
augggagucuauguuguca

SEQ ID NO: 1195213 - RNA, 19 nt, Artificial Sequence
  Description of Artificial Sequence: Synthetic oligonucleotide
  Antisense strand to SEQ ID NO: 1195212
ugacaacauagacucccau

SEQ ID NO: 1195214 - RNA, 19 nt, Artificial Sequence
  Description of Artificial Sequence: Synthetic oligonucleotide
  Sense strand starting at position 1038 of SEQ ID NO: 916931
agcgguugaccauagcuaa

SEQ ID NO: 1195215 - RNA, 19 nt, Artificial Sequence
  Description of Artificial Sequence: Synthetic oligonucleotide
  Antisense strand to SEQ ID NO: 1195214
uuagcuauggucaaccgcu

SEQ ID NO: 1195216 - RNA, 19 nt, Artificial Sequence
  Description of Artificial Sequence: Synthetic oligonucleotide
  Sense strand starting at position 1070 of SEQ ID NO: 916931
aaaggaaacuuuggauaag

SEQ ID NO: 1195217 - RNA, 19 nt, Artificial Sequence
  Description of Artificial Sequence: Synthetic oligonucleotide
  Antisense strand to SEQ ID NO: 1195216
cuuauccaaaguuuccuuu

SEQ ID NO: 1195218 - RNA, 19 nt, Artificial Sequence
  Description of Artificial Sequence: Synthetic oligonucleotide
  Sense strand starting at position 1098 of SEQ ID NO: 916931
cuguaauaacauugucuuu

SEQ ID NO: 1195219 - RNA, 19 nt, Artificial Sequence
  Description of Artificial Sequence: Synthetic oligonucleotide
  Antisense strand to SEQ ID NO: 1195218
aaagacaauguuauuacag

SEQ ID NO: 1195220 - RNA, 19 nt, Artificial Sequence
  Description of Artificial Sequence: Synthetic oligonucleotide
  Sense strand starting at position 1103 of SEQ ID NO: 916931
auaacauugucuuugaagg

SEQ ID NO: 1195221 - RNA, 19 nt, Artificial Sequence
  Description of Artificial Sequence: Synthetic oligonucleotide
  Antisense strand to SEQ ID NO: 1195220
ccuucaaagacaauguuau

SEQ ID NO: 1195222 - RNA, 19 nt, Artificial Sequence
  Description of Artificial Sequence: Synthetic oligonucleotide
  Sense strand starting at position 1232 of SEQ ID NO: 916931
uagugagcucagcaaauug

SEQ ID NO: 1195223 - RNA, 19 nt, Artificial Sequence
  Description of Artificial Sequence: Synthetic oligonucleotide
  Antisense strand to SEQ ID NO: 1195222
caauuugcugagcucacua

SEQ ID NO: 1195224 - RNA, 19 nt, Artificial Sequence
  Description of Artificial Sequence: Synthetic oligonucleotide
  Sense strand starting at position 1240 of SEQ ID NO: 916931
ucagcaaauugaggaguua

SEQ ID NO: 1195225 - RNA, 19 nt, Artificial Sequence
  Description of Artificial Sequence: Synthetic oligonucleotide
  Antisense strand to SEQ ID NO: 1195224
uaacuccucaauuugcuga

SEQ ID NO: 1195226 - RNA, 19 nt, Artificial Sequence
  Description of Artificial Sequence: Synthetic oligonucleotide
  Sense strand starting at position 1249 of SEQ ID NO: 916931
ugaggaguuaauggccaga

SEQ ID NO: 1195227 - RNA, 19 nt, Artificial Sequence
  Description of Artificial Sequence: Synthetic oligonucleotide
  Antisense strand to SEQ ID NO: 1195226
ucuggccauuaacuccuca

SEQ ID NO: 1195228 - RNA, 19 nt, Artificial Sequence
  Description of Artificial Sequence: Synthetic oligonucleotide
  Sense strand starting at position 1251 of SEQ ID NO: 916931
aggaguuaauggccagagu

SEQ ID NO: 1195229 - RNA, 19 nt, Artificial Sequence
  Description of Artificial Sequence: Synthetic oligonucleotide
  Antisense strand to SEQ ID NO: 1195228
acucuggccauuaacuccu

SEQ ID NO: 1195230 - RNA, 19 nt, Artificial Sequence
  Description of Artificial Sequence: Synthetic oligonucleotide
  Sense strand starting at position 1381 of SEQ ID NO: 916931
ggugacaaaugucuaaacu

SEQ ID NO: 1195231 - RNA, 19 nt, Artificial Sequence
  Description of Artificial Sequence: Synthetic oligonucleotide
  Antisense strand to SEQ ID NO: 1195230
aguuuagacauuugucacc

SEQ ID NO: 1195232 - RNA, 19 nt, Artificial Sequence
  Description of Artificial Sequence: Synthetic oligonucleotide
  Sense strand starting at position 1391 of SEQ ID NO: 916931
gucuaaacugcugaugaga

SEQ ID NO: 1195233 - RNA, 19 nt, Artificial Sequence
  Description of Artificial Sequence: Synthetic oligonucleotide
  Antisense strand to SEQ ID NO: 1195232
ucucaucagcaguuuagac

SEQ ID NO: 1195234 - RNA, 19 nt, Artificial Sequence
  Description of Artificial Sequence: Synthetic oligonucleotide
  Sense strand starting at position 1702 of SEQ ID NO: 916931
gcacguuagguaggaacau

SEQ ID NO: 1195235 - RNA, 19 nt, Artificial Sequence
  Description of Artificial Sequence: Synthetic oligonucleotide
  Antisense strand to SEQ ID NO: 1195234
auguuccuaccuaacgugc

SEQ ID NO: 1195236 - RNA, 19 nt, Artificial Sequence
  Description of Artificial Sequence: Synthetic oligonucleotide
  Sense strand starting at position 1703 of SEQ ID NO: 916931
cacguuagguaggaacaua

SEQ ID NO: 1195237 - RNA, 19 nt, Artificial Sequence
  Description of Artificial Sequence: Synthetic oligonucleotide
  Antisense strand to SEQ ID NO: 1195236
uauguuccuaccuaacgug

SEQ ID NO: 1195238 - RNA, 19 nt, Artificial Sequence
  Description of Artificial Sequence: Synthetic oligonucleotide
  Sense strand starting at position 1796 of SEQ ID NO: 916931
gaggcagguacugauaguu

SEQ ID NO: 1195239 - RNA, 19 nt, Artificial Sequence
  Description of Artificial Sequence: Synthetic oligonucleotide
  Antisense strand to SEQ ID NO: 1195238
aacuaucaguaccugccuc

SEQ ID NO: 1195240 - RNA, 19 nt, Artificial Sequence
  Description of Artificial Sequence: Synthetic oligonucleotide
  Sense strand starting at position 1994 of SEQ ID NO: 916931
gccguuauguccggcugca

SEQ ID NO: 1195241 - RNA, 19 nt, Artificial Sequence
  Description of Artificial Sequence: Synthetic oligonucleotide
  Antisense strand to SEQ ID NO: 1195240
ugcagccggacauaacggc

SEQ ID NO: 1195242 - RNA, 19 nt, Artificial Sequence
  Description of Artificial Sequence: Synthetic oligonucleotide
  Sense strand starting at position 2282 of SEQ ID NO: 916931
ggcugacaggugggagauu

SEQ ID NO: 1195243 - RNA, 19 nt, Artificial Sequence
  Description of Artificial Sequence: Synthetic oligonucleotide
  Antisense strand to SEQ ID NO: 1195242
aaucucccaccugucagcc

SEQ ID NO: 1195244 - RNA, 19 nt, Artificial Sequence
  Description of Artificial Sequence: Synthetic oligonucleotide
  Sense strand starting at position 2361 of SEQ ID NO: 916931
ggcugugaucuccacuuua

SEQ ID NO: 1195245 - RNA, 19 nt, Artificial Sequence
  Description of Artificial Sequence: Synthetic oligonucleotide
  Antisense strand to SEQ ID NO: 1195244
uaaaguggagaucacagcc

SEQ ID NO: 1195246 - RNA, 19 nt, Artificial Sequence
  Description of Artificial Sequence: Synthetic oligonucleotide
  Sense strand starting at position 2374 of SEQ ID NO: 916931
acuuuaaacccaggguaga

SEQ ID NO: 1195247 - RNA, 19 nt, Artificial Sequence
  Description of Artificial Sequence: Synthetic oligonucleotide
  Antisense strand to SEQ ID NO: 1195246
ucuacccuggguuuaaagu

SEQ ID NO: 1195248 - RNA, 19 nt, Artificial Sequence
  Description of Artificial Sequence: Synthetic oligonucleotide
  Sense strand starting at position 2450 of SEQ ID NO: 916931
caaagucaaucgcuuaguu

SEQ ID NO: 1195249 - RNA, 19 nt, Artificial Sequence
  Description of Artificial Sequence: Synthetic oligonucleotide
  Antisense strand to SEQ ID NO: 1195248
aacuaagcgauugacuuug

SEQ ID NO: 1195250 - RNA, 19 nt, Artificial Sequence
  Description of Artificial Sequence: Synthetic oligonucleotide
  Sense strand starting at position 2452 of SEQ ID NO: 916931
aagucaaucgcuuaguucu

SEQ ID NO: 1195251 - RNA, 19 nt, Artificial Sequence
  Description of Artificial Sequence: Synthetic oligonucleotide
  Antisense strand to SEQ ID NO: 1195250
agaacuaagcgauugacuu

SEQ ID NO: 1195252 - RNA, 19 nt, Artificial Sequence
  Description of Artificial Sequence: Synthetic oligonucleotide
  Sense strand starting at position 2458 of SEQ ID NO: 916931
aucgcuuaguucucguauu

SEQ ID NO: 1195253 - RNA, 19 nt, Artificial Sequence
  Description of Artificial Sequence: Synthetic oligonucleotide
  Antisense strand to SEQ ID NO: 1195252
aauacgagaacuaagcgau

SEQ ID NO: 1195254 - RNA, 19 nt, Artificial Sequence
  Description of Artificial Sequence: Synthetic oligonucleotide
  Sense strand starting at position 2459 of SEQ ID NO: 916931
ucgcuuaguucucguauuc

SEQ ID NO: 1195255 - RNA, 19 nt, Artificial Sequence
  Description of Artificial Sequence: Synthetic oligonucleotide
  Antisense strand to SEQ ID NO: 1195254
gaauacgagaacuaagcga

SEQ ID NO: 1195256 - RNA, 19 nt, Artificial Sequence
  Description of Artificial Sequence: Synthetic oligonucleotide
  Sense strand starting at position 2466 of SEQ ID NO: 916931
guucucguauuccaggaau

SEQ ID NO: 1195257 - RNA, 19 nt, Artificial Sequence
  Description of Artificial Sequence: Synthetic oligonucleotide
  Antisense strand to SEQ ID NO: 1195256
auuccuggaauacgagaac

SEQ ID NO: 1195258 - RNA, 19 nt, Artificial Sequence
  Description of Artificial Sequence: Synthetic oligonucleotide
  Sense strand starting at position 2468 of SEQ ID NO: 916931
ucucguauuccaggaauga

SEQ ID NO: 1195259 - RNA, 19 nt, Artificial Sequence
  Description of Artificial Sequence: Synthetic oligonucleotide
  Antisense strand to SEQ ID NO: 1195258
ucauuccuggaauacgaga

SEQ ID NO: 1195260 - RNA, 19 nt, Artificial Sequence
  Description of Artificial Sequence: Synthetic oligonucleotide
  Sense strand starting at position 2469 of SEQ ID NO: 916931
cucguauuccaggaaugau

SEQ ID NO: 1195261 - RNA, 19 nt, Artificial Sequence
  Description of Artificial Sequence: Synthetic oligonucleotide
  Antisense strand to SEQ ID NO: 1195260
aucauuccuggaauacgag

SEQ ID NO: 1195262 - RNA, 19 nt, Artificial Sequence
  Description of Artificial Sequence: Synthetic oligonucleotide
  Sense strand starting at position 2472 of SEQ ID NO: 916931
guauuccaggaaugauaac

SEQ ID NO: 1195263 - RNA, 19 nt, Artificial Sequence
  Description of Artificial Sequence: Synthetic oligonucleotide
  Antisense strand to SEQ ID NO: 1195262
guuaucauuccuggaauac

SEQ ID NO: 1195264 - RNA, 19 nt, Artificial Sequence
  Description of Artificial Sequence: Synthetic oligonucleotide
  Sense strand starting at position 2513 of SEQ ID NO: 916931
ccaagaauuugagauuccu

SEQ ID NO: 1195265 - RNA, 19 nt, Artificial Sequence
  Description of Artificial Sequence: Synthetic oligonucleotide
  Antisense strand to SEQ ID NO: 1195264
aggaaucucaaauucuugg

SEQ ID NO: 1195266 - RNA, 19 nt, Artificial Sequence
  Description of Artificial Sequence: Synthetic oligonucleotide
  Sense strand starting at position 2521 of SEQ ID NO: 916931
uugagauuccuugggcuag

SEQ ID NO: 1195267 - RNA, 19 nt, Artificial Sequence
  Description of Artificial Sequence: Synthetic oligonucleotide
  Antisense strand to SEQ ID NO: 1195266
cuagcccaaggaaucucaa

SEQ ID NO: 1195268 - RNA, 19 nt, Artificial Sequence
  Description of Artificial Sequence: Synthetic oligonucleotide
  Sense strand starting at position 82 of SEQ ID NO: 916932
augucaggucuauauauua

SEQ ID NO: 1195269 - RNA, 19 nt, Artificial Sequence
  Description of Artificial Sequence: Synthetic oligonucleotide
  Antisense strand to SEQ ID NO: 1195268
uaauauauagaccugacau

SEQ ID NO: 1195270 - RNA, 19 nt, Artificial Sequence
  Description of Artificial Sequence: Synthetic oligonucleotide
  Sense strand starting at position 209 of SEQ ID NO: 916932
uccaauauguagucuaauu

SEQ ID NO: 1195271 - RNA, 19 nt, Artificial Sequence
  Description of Artificial Sequence: Synthetic oligonucleotide
  Antisense strand to SEQ ID NO: 1195270
aauuagacuacauauugga

SEQ ID NO: 1195272 - RNA, 19 nt, Artificial Sequence
  Description of Artificial Sequence: Synthetic oligonucleotide
  Sense strand starting at position 220 of SEQ ID NO: 916932
gucuaauucugaguaccaa

SEQ ID NO: 1195273 - RNA, 19 nt, Artificial Sequence
  Description of Artificial Sequence: Synthetic oligonucleotide
  Antisense strand to SEQ ID NO: 1195272
uugguacucagaauuagac

SEQ ID NO: 1195274 - RNA, 19 nt, Artificial Sequence
  Description of Artificial Sequence: Synthetic oligonucleotide
  Sense strand starting at position 334 of SEQ ID NO: 916932
uugggaaauuuguaaucag

SEQ ID NO: 1195275 - RNA, 19 nt, Artificial Sequence
  Description of Artificial Sequence: Synthetic oligonucleotide
  Antisense strand to SEQ ID NO: 1195274
cugauuacaaauuucccaa

SEQ ID NO: 1195276 - RNA, 19 nt, Artificial Sequence
  Description of Artificial Sequence: Synthetic oligonucleotide
  Sense strand starting at position 376 of SEQ ID NO: 916932
uauaucuacgucuggauau

SEQ ID NO: 1195277 - RNA, 19 nt, Artificial Sequence
  Description of Artificial Sequence: Synthetic oligonucleotide
  Antisense strand to SEQ ID NO: 1195276
auauccagacguagauaua

SEQ ID NO: 1195278 - RNA, 19 nt, Artificial Sequence
  Description of Artificial Sequence: Synthetic oligonucleotide
  Sense strand starting at position 378 of SEQ ID NO: 916932
uaucuacgucuggauauua

SEQ ID NO: 1195279 - RNA, 19 nt, Artificial Sequence
  Description of Artificial Sequence: Synthetic oligonucleotide
  Antisense strand to SEQ ID NO: 1195278
uaauauccagacguagaua

SEQ ID NO: 1195280 - RNA, 19 nt, Artificial Sequence
  Description of Artificial Sequence: Synthetic oligonucleotide
  Sense strand starting at position 574 of SEQ ID NO: 916932
cucagagaacuguaucagu

SEQ ID NO: 1195281 - RNA, 19 nt, Artificial Sequence
  Description of Artificial Sequence: Synthetic oligonucleotide
  Antisense strand to SEQ ID NO: 1195280
acugauacaguucucugag

SEQ ID NO: 1195282 - RNA, 19 nt, Artificial Sequence
  Description of Artificial Sequence: Synthetic oligonucleotide
  Sense strand starting at position 608 of SEQ ID NO: 916932
uugggagaauuccucagua

SEQ ID NO: 1195283 - RNA, 19 nt, Artificial Sequence
  Description of Artificial Sequence: Synthetic oligonucleotide
  Antisense strand to SEQ ID NO: 1195282
uacugaggaauucucccaa

SEQ ID NO: 1195284 - RNA, 19 nt, Artificial Sequence
  Description of Artificial Sequence: Synthetic oligonucleotide
  Sense strand starting at position 612 of SEQ ID NO: 916932
gagaauuccucaguagauu

SEQ ID NO: 1195285 - RNA, 19 nt, Artificial Sequence
  Description of Artificial Sequence: Synthetic oligonucleotide
  Antisense strand to SEQ ID NO: 1195284
aaucuacugaggaauucuc

SEQ ID NO: 1195286 - RNA, 19 nt, Artificial Sequence
  Description of Artificial Sequence: Synthetic oligonucleotide
  Sense strand starting at position 1278 of SEQ ID NO: 916932
agcuaaugcuuucuuaaag

SEQ ID NO: 1195287 - RNA, 19 nt, Artificial Sequence
  Description of Artificial Sequence: Synthetic oligonucleotide
  Antisense strand to SEQ ID NO: 1195286
cuuuaagaaagcauuagcu

SEQ ID NO: 1195288 - RNA, 19 nt, Artificial Sequence
  Description of Artificial Sequence: Synthetic oligonucleotide
  Sense strand starting at position 1609 of SEQ ID NO: 916932
uggaauaaguccuccucca

SEQ ID NO: 1195289 - RNA, 19 nt, Artificial Sequence
  Description of Artificial Sequence: Synthetic oligonucleotide
  Antisense strand to SEQ ID NO: 1195288
uggaggaggacuuauucca

SEQ ID NO: 1195290 - RNA, 19 nt, Artificial Sequence
  Description of Artificial Sequence: Synthetic oligonucleotide
  Sense strand starting at position 1925 of SEQ ID NO: 916932
gaugguguaucacugggau

SEQ ID NO: 1195291 - RNA, 19 nt, Artificial Sequence
  Description of Artificial Sequence: Synthetic oligonucleotide
  Antisense strand to SEQ ID NO: 1195290
aucccagugauacaccauc

SEQ ID NO: 1195292 - RNA, 19 nt, Artificial Sequence
  Description of Artificial Sequence: Synthetic oligonucleotide
  Sense strand starting at position 1952 of SEQ ID NO: 916932
ggcacaccagucugugaaa

SEQ ID NO: 1195293 - RNA, 19 nt, Artificial Sequence
  Description of Artificial Sequence: Synthetic oligonucleotide
  Antisense strand to SEQ ID NO: 1195292
uuucacagacuggugugcc

SEQ ID NO: 1195294 - RNA, 19 nt, Artificial Sequence
  Description of Artificial Sequence: Synthetic oligonucleotide
  Sense strand starting at position 1954 of SEQ ID NO: 916932
cacaccagucugugaaaug

SEQ ID NO: 1195295 - RNA, 19 nt, Artificial Sequence
  Description of Artificial Sequence: Synthetic oligonucleotide
  Antisense strand to SEQ ID NO: 1195294
cauuucacagacuggugug

SEQ ID NO: 1195296 - RNA, 19 nt, Artificial Sequence
  Description of Artificial Sequence: Synthetic oligonucleotide
  Sense strand starting at position 2011 of SEQ ID NO: 916932
gcgugucuaaauguuuauu

SEQ ID NO: 1195297 - RNA, 19 nt, Artificial Sequence
  Description of Artificial Sequence: Synthetic oligonucleotide
  Antisense strand to SEQ ID NO: 1195296
aauaaacauuuagacacgc

SEQ ID NO: 1195298 - RNA, 19 nt, Artificial Sequence
  Description of Artificial Sequence: Synthetic oligonucleotide
  Sense strand starting at position 2021 of SEQ ID NO: 916932
auguuuauuugcguggauu

SEQ ID NO: 1195299 - RNA, 19 nt, Artificial Sequence
  Description of Artificial Sequence: Synthetic oligonucleotide
  Antisense strand to SEQ ID NO: 1195298
aauccacgcaaauaaacau

SEQ ID NO: 1195300 - RNA, 19 nt, Artificial Sequence
  Description of Artificial Sequence: Synthetic oligonucleotide
  Sense strand starting at position 2022 of SEQ ID NO: 916932
uguuuauuugcguggauuc

SEQ ID NO: 1195301 - RNA, 19 nt, Artificial Sequence
  Description of Artificial Sequence: Synthetic oligonucleotide
  Antisense strand to SEQ ID NO: 1195300
gaauccacgcaaauaaaca

SEQ ID NO: 1195302 - RNA, 19 nt, Artificial Sequence
  Description of Artificial Sequence: Synthetic oligonucleotide
  Sense strand starting at position 2023 of SEQ ID NO: 916932
guuuauuugcguggauuca

SEQ ID NO: 1195303 - RNA, 19 nt, Artificial Sequence
  Description of Artificial Sequence: Synthetic oligonucleotide
  Antisense strand to SEQ ID NO: 1195302
ugaauccacgcaaauaaac

SEQ ID NO: 1195304 - RNA, 19 nt, Artificial Sequence
  Description of Artificial Sequence: Synthetic oligonucleotide
  Sense strand starting at position 2045 of SEQ ID NO: 916932
auguuauccguauaacacu

SEQ ID NO: 1195305 - RNA, 19 nt, Artificial Sequence
  Description of Artificial Sequence: Synthetic oligonucleotide
  Antisense strand to SEQ ID NO: 1195304
aguguuauacggauaacau

SEQ ID NO: 1195306 - RNA, 19 nt, Artificial Sequence
  Description of Artificial Sequence: Synthetic oligonucleotide
  Sense strand starting at position 2098 of SEQ ID NO: 916932
ugcauuuaaguacgguuua

SEQ ID NO: 1195307 - RNA, 19 nt, Artificial Sequence
  Description of Artificial Sequence: Synthetic oligonucleotide
  Antisense strand to SEQ ID NO: 1195306
uaaaccguacuuaaaugca

SEQ ID NO: 1195308 - RNA, 19 nt, Artificial Sequence
  Description of Artificial Sequence: Synthetic oligonucleotide
  Sense strand starting at position 2195 of SEQ ID NO: 916932
gagcuaagggucuagugaa

SEQ ID NO: 1195309 - RNA, 19 nt, Artificial Sequence
  Description of Artificial Sequence: Synthetic oligonucleotide
  Antisense strand to SEQ ID NO: 1195308
uucacuagacccuuagcuc

SEQ ID NO: 1195310 - RNA, 19 nt, Artificial Sequence
  Description of Artificial Sequence: Synthetic oligonucleotide
  Sense strand starting at position 2203 of SEQ ID NO: 916932
ggucuagugaaaugaauca

SEQ ID NO: 1195311 - RNA, 19 nt, Artificial Sequence
  Description of Artificial Sequence: Synthetic oligonucleotide
  Antisense strand to SEQ ID NO: 1195310
ugauucauuucacuagacc

SEQ ID NO: 1195312 - RNA, 19 nt, Artificial Sequence
  Description of Artificial Sequence: Synthetic oligonucleotide
  Sense strand starting at position 2241 of SEQ ID NO: 916932
uagguaugagaaggccaaa

SEQ ID NO: 1195313 - RNA, 19 nt, Artificial Sequence
  Description of Artificial Sequence: Synthetic oligonucleotide
  Antisense strand to SEQ ID NO: 1195312
uuuggccuucucauaccua

SEQ ID NO: 1195314 - RNA, 19 nt, Artificial Sequence
  Description of Artificial Sequence: Synthetic oligonucleotide
  Sense strand starting at position 2253 of SEQ ID NO: 916932
ggccaaagaucacucauuc

SEQ ID NO: 1195315 - RNA, 19 nt, Artificial Sequence
  Description of Artificial Sequence: Synthetic oligonucleotide
  Antisense strand to SEQ ID NO: 1195314
gaaugagugaucuuuggcc

SEQ ID NO: 1195316 - RNA, 19 nt, Artificial Sequence
  Description of Artificial Sequence: Synthetic oligonucleotide
  Sense strand starting at position 2289 of SEQ ID NO: 916932
gggugaauucuacagcccu

SEQ ID NO: 1195317 - RNA, 19 nt, Artificial Sequence
  Description of Artificial Sequence: Synthetic oligonucleotide
  Antisense strand to SEQ ID NO: 1195316
agggcuguagaauucaccc

SEQ ID NO: 1195318 - RNA, 19 nt, Artificial Sequence
  Description of Artificial Sequence: Synthetic oligonucleotide
  Sense strand starting at position 2355 of SEQ ID NO: 916932
gauccuagauaguuuaaug

SEQ ID NO: 1195319 - RNA, 19 nt, Artificial Sequence
  Description of Artificial Sequence: Synthetic oligonucleotide
  Antisense strand to SEQ ID NO: 1195318
cauuaaacuaucuaggauc

SEQ ID NO: 1195320 - RNA, 19 nt, Artificial Sequence
  Description of Artificial Sequence: Synthetic oligonucleotide
  Sense strand starting at position 2418 of SEQ ID NO: 916932
acuuaagcuccaugagguu

SEQ ID NO: 1195321 - RNA, 19 nt, Artificial Sequence
  Description of Artificial Sequence: Synthetic oligonucleotide
  Antisense strand to SEQ ID NO: 1195320
aaccucauggagcuuaagu

SEQ ID NO: 1195322 - RNA, 19 nt, Artificial Sequence
  Description of Artificial Sequence: Synthetic oligonucleotide
  Sense strand starting at position 2443 of SEQ ID NO: 916932
augugucccaaguacuaga

SEQ ID NO: 1195323 - RNA, 19 nt, Artificial Sequence
  Description of Artificial Sequence: Synthetic oligonucleotide
  Antisense strand to SEQ ID NO: 1195322
ucuaguacuugggacacau

SEQ ID NO: 1195324 - RNA, 19 nt, Artificial Sequence
  Description of Artificial Sequence: Synthetic oligonucleotide
  Sense strand starting at position 2962 of SEQ ID NO: 916932
ccugaucaagugugaacaa

SEQ ID NO: 1195325 - RNA, 19 nt, Artificial Sequence
  Description of Artificial Sequence: Synthetic oligonucleotide
  Antisense strand to SEQ ID NO: 1195324
uuguucacacuugaucagg

SEQ ID NO: 1195326 - RNA, 19 nt, Artificial Sequence
  Description of Artificial Sequence: Synthetic oligonucleotide
  Sense strand starting at position 3289 of SEQ ID NO: 916932
gcaacaauccuaugagcag

SEQ ID NO: 1195327 - RNA, 19 nt, Artificial Sequence
  Description of Artificial Sequence: Synthetic oligonucleotide
  Antisense strand to SEQ ID NO: 1195326
cugcucauaggauuguugc

SEQ ID NO: 1195328 - RNA, 19 nt, Artificial Sequence
  Description of Artificial Sequence: Synthetic oligonucleotide
  Sense strand starting at position 3359 of SEQ ID NO: 916932
gguagauuugcuugcacaa

SEQ ID NO: 1195329 - RNA, 19 nt, Artificial Sequence
  Description of Artificial Sequence: Synthetic oligonucleotide
  Antisense strand to SEQ ID NO: 1195328
uugugcaagcaaaucuacc

SEQ ID NO: 1195330 - RNA, 19 nt, Artificial Sequence
  Description of Artificial Sequence: Synthetic oligonucleotide
  Sense strand starting at position 3493 of SEQ ID NO: 916932
gcggguauaguaggagaaa

SEQ ID NO: 1195331 - RNA, 19 nt, Artificial Sequence
  Description of Artificial Sequence: Synthetic oligonucleotide
  Antisense strand to SEQ ID NO: 1195330
uuucuccuacuauacccgc

SEQ ID NO: 1195332 - RNA, 19 nt, Artificial Sequence
  Description of Artificial Sequence: Synthetic oligonucleotide
  Sense strand starting at position 3564 of SEQ ID NO: 916932
ccaauuauacagugguacu

SEQ ID NO: 1195333 - RNA, 19 nt, Artificial Sequence
  Description of Artificial Sequence: Synthetic oligonucleotide
  Antisense strand to SEQ ID NO: 1195332
aguaccacuguauaauugg

SEQ ID NO: 1195334 - RNA, 19 nt, Artificial Sequence
  Description of Artificial Sequence: Synthetic oligonucleotide
  Sense strand starting at position 3578 of SEQ ID NO: 916932
guacucaagcuccaaugua

SEQ ID NO: 1195335 - RNA, 19 nt, Artificial Sequence
  Description of Artificial Sequence: Synthetic oligonucleotide
  Antisense strand to SEQ ID NO: 1195334
uacauuggagcuugaguac

SEQ ID NO: 1195336 - RNA, 19 nt, Artificial Sequence
  Description of Artificial Sequence: Synthetic oligonucleotide
  Sense strand starting at position 3635 of SEQ ID NO: 916932
gucugucacaaugauaguu

SEQ ID NO: 1195337 - RNA, 19 nt, Artificial Sequence
  Description of Artificial Sequence: Synthetic oligonucleotide
  Antisense strand to SEQ ID NO: 1195336
aacuaucauugugacagac

SEQ ID NO: 1195338 - RNA, 19 nt, Artificial Sequence
  Description of Artificial Sequence: Synthetic oligonucleotide
  Sense strand starting at position 3640 of SEQ ID NO: 916932
ucacaaugauaguuugaac

SEQ ID NO: 1195339 - RNA, 19 nt, Artificial Sequence
  Description of Artificial Sequence: Synthetic oligonucleotide
  Antisense strand to SEQ ID NO: 1195338
guucaaacuaucauuguga

SEQ ID NO: 1195340 - RNA, 19 nt, Artificial Sequence
  Description of Artificial Sequence: Synthetic oligonucleotide
  Sense strand starting at position 3805 of SEQ ID NO: 916932
gguggacacuuaucuaaag

SEQ ID NO: 1195341 - RNA, 19 nt, Artificial Sequence
  Description of Artificial Sequence: Synthetic oligonucleotide
  Antisense strand to SEQ ID NO: 1195340
cuuuagauaaguguccacc

SEQ ID NO: 1195342 - RNA, 19 nt, Artificial Sequence
  Description of Artificial Sequence: Synthetic oligonucleotide
  Sense strand starting at position 3806 of SEQ ID NO: 916932
guggacacuuaucuaaaga

SEQ ID NO: 1195343 - RNA, 19 nt, Artificial Sequence
  Description of Artificial Sequence: Synthetic oligonucleotide
  Antisense strand to SEQ ID NO: 1195342
ucuuuagauaaguguccac

SEQ ID NO: 1195344 - RNA, 19 nt, Artificial Sequence
  Description of Artificial Sequence: Synthetic oligonucleotide
  Sense strand starting at position 3832 of SEQ ID NO: 916932
uccaaacacuugucaguau

SEQ ID NO: 1195345 - RNA, 19 nt, Artificial Sequence
  Description of Artificial Sequence: Synthetic oligonucleotide
  Antisense strand to SEQ ID NO: 1195344
auacugacaaguguuugga

SEQ ID NO: 1195346 - RNA, 19 nt, Artificial Sequence
  Description of Artificial Sequence: Synthetic oligonucleotide
  Sense strand starting at position 3978 of SEQ ID NO: 916932
ucucuagggcucuaugaau

SEQ ID NO: 1195347 - RNA, 19 nt, Artificial Sequence
  Description of Artificial Sequence: Synthetic oligonucleotide
  Antisense strand to SEQ ID NO: 1195346
auucauagagcccuagaga

SEQ ID NO: 1195348 - RNA, 19 nt, Artificial Sequence
  Description of Artificial Sequence: Synthetic oligonucleotide
  Sense strand starting at position 30 of SEQ ID NO: 916933
ucaagucucccuggguuaa

SEQ ID NO: 1195349 - RNA, 19 nt, Artificial Sequence
  Description of Artificial Sequence: Synthetic oligonucleotide
  Antisense strand to SEQ ID NO: 1195348
uuaacccagggagacuuga

SEQ ID NO: 1195350 - RNA, 19 nt, Artificial Sequence
  Description of Artificial Sequence: Synthetic oligonucleotide
  Sense strand starting at position 31 of SEQ ID NO: 916933
caagucucccuggguuaau

SEQ ID NO: 1195351 - RNA, 19 nt, Artificial Sequence
  Description of Artificial Sequence: Synthetic oligonucleotide
  Antisense strand to SEQ ID NO: 1195350
auuaacccagggagacuug

SEQ ID NO: 1195352 - RNA, 19 nt, Artificial Sequence
  Description of Artificial Sequence: Synthetic oligonucleotide
  Sense strand starting at position 100 of SEQ ID NO: 916933
aagcaagaguugccgaaua

SEQ ID NO: 1195353 - RNA, 19 nt, Artificial Sequence
  Description of Artificial Sequence: Synthetic oligonucleotide
  Antisense strand to SEQ ID NO: 1195352
uauucggcaacucuugcuu

SEQ ID NO: 1195354 - RNA, 19 nt, Artificial Sequence
  Description of Artificial Sequence: Synthetic oligonucleotide
  Sense strand starting at position 102 of SEQ ID NO: 916933
gcaagaguugccgaauaag

SEQ ID NO: 1195355 - RNA, 19 nt, Artificial Sequence
  Description of Artificial Sequence: Synthetic oligonucleotide
  Antisense strand to SEQ ID NO: 1195354
cuuauucggcaacucuugc

SEQ ID NO: 1195356 - RNA, 19 nt, Artificial Sequence
  Description of Artificial Sequence: Synthetic oligonucleotide
  Sense strand starting at position 105 of SEQ ID NO: 916933
agaguugccgaauaagcuu

SEQ ID NO: 1195357 - RNA, 19 nt, Artificial Sequence
  Description of Artificial Sequence: Synthetic oligonucleotide
  Antisense strand to SEQ ID NO: 1195356
aagcuuauucggcaacucu

SEQ ID NO: 1195358 - RNA, 19 nt, Artificial Sequence
  Description of Artificial Sequence: Synthetic oligonucleotide
  Sense strand starting at position 250 of SEQ ID NO: 916933
aacuaaguuguacgauagu

SEQ ID NO: 1195359 - RNA, 19 nt, Artificial Sequence
  Description of Artificial Sequence: Synthetic oligonucleotide
  Antisense strand to SEQ ID NO: 1195358
acuaucguacaacuuaguu

SEQ ID NO: 1195360 - RNA, 19 nt, Artificial Sequence
  Description of Artificial Sequence: Synthetic oligonucleotide
  Sense strand starting at position 298 of SEQ ID NO: 916933
ggacaucacugcccaacau

SEQ ID NO: 1195361 - RNA, 19 nt, Artificial Sequence
  Description of Artificial Sequence: Synthetic oligonucleotide
  Antisense strand to SEQ ID NO: 1195360
auguugggcagugaugucc

SEQ ID NO: 1195362 - RNA, 19 nt, Artificial Sequence
  Description of Artificial Sequence: Synthetic oligonucleotide
  Sense strand starting at position 396 of SEQ ID NO: 916933
cucguaaacugaucuucca

SEQ ID NO: 1195363 - RNA, 19 nt, Artificial Sequence
  Description of Artificial Sequence: Synthetic oligonucleotide
  Antisense strand to SEQ ID NO: 1195362
uggaagaucaguuuacgag

SEQ ID NO: 1195364 - RNA, 19 nt, Artificial Sequence
  Description of Artificial Sequence: Synthetic oligonucleotide
  Sense strand starting at position 465 of SEQ ID NO: 916933
uuuagaugcuuccugacuu

SEQ ID NO: 1195365 - RNA, 19 nt, Artificial Sequence
  Description of Artificial Sequence: Synthetic oligonucleotide
  Antisense strand to SEQ ID NO: 1195364
aagucaggaagcaucuaaa

SEQ ID NO: 1195366 - RNA, 19 nt, Artificial Sequence
  Description of Artificial Sequence: Synthetic oligonucleotide
  Sense strand starting at position 566 of SEQ ID NO: 916933
ucgaacaaggauuguugaa

SEQ ID NO: 1195367 - RNA, 19 nt, Artificial Sequence
  Description of Artificial Sequence: Synthetic oligonucleotide
  Antisense strand to SEQ ID NO: 1195366
uucaacaauccuuguucga

SEQ ID NO: 1195368 - RNA, 19 nt, Artificial Sequence
  Description of Artificial Sequence: Synthetic oligonucleotide
  Sense strand starting at position 630 of SEQ ID NO: 916933
agaagauaaugacauuugu

SEQ ID NO: 1195369 - RNA, 19 nt, Artificial Sequence
  Description of Artificial Sequence: Synthetic oligonucleotide
  Antisense strand to SEQ ID NO: 1195368
acaaaugucauuaucuucu

SEQ ID NO: 1195370 - RNA, 19 nt, Artificial Sequence
  Description of Artificial Sequence: Synthetic oligonucleotide
  Sense strand starting at position 1374 of SEQ ID NO: 916933
gccagauucuggcuaaauc

SEQ ID NO: 1195371 - RNA, 19 nt, Artificial Sequence
  Description of Artificial Sequence: Synthetic oligonucleotide
  Antisense strand to SEQ ID NO: 1195370
gauuuagccagaaucuggc

SEQ ID NO: 1195372 - RNA, 19 nt, Artificial Sequence
  Description of Artificial Sequence: Synthetic oligonucleotide
  Sense strand starting at position 1375 of SEQ ID NO: 916933
ccagauucuggcuaaaucu

SEQ ID NO: 1195373 - RNA, 19 nt, Artificial Sequence
  Description of Artificial Sequence: Synthetic oligonucleotide
  Antisense strand to SEQ ID NO: 1195372
agauuuagccagaaucugg

SEQ ID NO: 1195374 - RNA, 19 nt, Artificial Sequence
  Description of Artificial Sequence: Synthetic oligonucleotide
  Sense strand starting at position 1383 of SEQ ID NO: 916933
uggcuaaaucugggcaacu

SEQ ID NO: 1195375 - RNA, 19 nt, Artificial Sequence
  Description of Artificial Sequence: Synthetic oligonucleotide
  Antisense strand to SEQ ID NO: 1195374
aguugcccagauuuagcca

SEQ ID NO: 1195376 - RNA, 19 nt, Artificial Sequence
  Description of Artificial Sequence: Synthetic oligonucleotide
  Sense strand starting at position 1384 of SEQ ID NO: 916933
ggcuaaaucugggcaacuc

SEQ ID NO: 1195377 - RNA, 19 nt, Artificial Sequence
  Description of Artificial Sequence: Synthetic oligonucleotide
  Antisense strand to SEQ ID NO: 1195376
gaguugcccagauuuagcc

SEQ ID NO: 1195378 - RNA, 19 nt, Artificial Sequence
  Description of Artificial Sequence: Synthetic oligonucleotide
  Sense strand starting at position 1385 of SEQ ID NO: 916933
gcuaaaucugggcaacucu

SEQ ID NO: 1195379 - RNA, 19 nt, Artificial Sequence
  Description of Artificial Sequence: Synthetic oligonucleotide
  Antisense strand to SEQ ID NO: 1195378
agaguugcccagauuuagc

SEQ ID NO: 1195380 - RNA, 19 nt, Artificial Sequence
  Description of Artificial Sequence: Synthetic oligonucleotide
  Sense strand starting at position 1538 of SEQ ID NO: 916933
ggcagaagauuucgacaac

SEQ ID NO: 1195381 - RNA, 19 nt, Artificial Sequence
  Description of Artificial Sequence: Synthetic oligonucleotide
  Antisense strand to SEQ ID NO: 1195380
guugucgaaaucuucugcc

SEQ ID NO: 1195382 - RNA, 19 nt, Artificial Sequence
  Description of Artificial Sequence: Synthetic oligonucleotide
  Sense strand starting at position 1539 of SEQ ID NO: 916933
gcagaagauuucgacaaca

SEQ ID NO: 1195383 - RNA, 19 nt, Artificial Sequence
  Description of Artificial Sequence: Synthetic oligonucleotide
  Antisense strand to SEQ ID NO: 1195382
uguugucgaaaucuucugc

SEQ ID NO: 1195384 - RNA, 19 nt, Artificial Sequence
  Description of Artificial Sequence: Synthetic oligonucleotide
  Sense strand starting at position 1660 of SEQ ID NO: 916933
guaaguggucccagggugu

SEQ ID NO: 1195385 - RNA, 19 nt, Artificial Sequence
  Description of Artificial Sequence: Synthetic oligonucleotide
  Antisense strand to SEQ ID NO: 1195384
acacccugggaccacuuac

SEQ ID NO: 1195386 - RNA, 19 nt, Artificial Sequence
  Description of Artificial Sequence: Synthetic oligonucleotide
  Sense strand starting at position 1999 of SEQ ID NO: 916933
cugggauucgcacaggaga

SEQ ID NO: 1195387 - RNA, 19 nt, Artificial Sequence
  Description of Artificial Sequence: Synthetic oligonucleotide
  Antisense strand to SEQ ID NO: 1195386
ucuccugugcgaaucccag

SEQ ID NO: 1195388 - RNA, 19 nt, Artificial Sequence
  Description of Artificial Sequence: Synthetic oligonucleotide
  Sense strand starting at position 2001 of SEQ ID NO: 916933
gggauucgcacaggagaaa

SEQ ID NO: 1195389 - RNA, 19 nt, Artificial Sequence
  Description of Artificial Sequence: Synthetic oligonucleotide
  Antisense strand to SEQ ID NO: 1195388
uuucuccugugcgaauccc

SEQ ID NO: 1195390 - RNA, 19 nt, Artificial Sequence
  Description of Artificial Sequence: Synthetic oligonucleotide
  Sense strand starting at position 2107 of SEQ ID NO: 916933
gggcgauugcgcgcccaaa

SEQ ID NO: 1195391 - RNA, 19 nt, Artificial Sequence
  Description of Artificial Sequence: Synthetic oligonucleotide
  Antisense strand to SEQ ID NO: 1195390
uuugggcgcgcaaucgccc

SEQ ID NO: 1195392 - RNA, 19 nt, Artificial Sequence
  Description of Artificial Sequence: Synthetic oligonucleotide
  Sense strand starting at position 2108 of SEQ ID NO: 916933
ggcgauugcgcgcccaaau

SEQ ID NO: 1195393 - RNA, 19 nt, Artificial Sequence
  Description of Artificial Sequence: Synthetic oligonucleotide
  Antisense strand to SEQ ID NO: 1195392
auuugggcgcgcaaucgcc

SEQ ID NO: 1195394 - RNA, 19 nt, Artificial Sequence
  Description of Artificial Sequence: Synthetic oligonucleotide
  Sense strand starting at position 2109 of SEQ ID NO: 916933
gcgauugcgcgcccaaaua

SEQ ID NO: 1195395 - RNA, 19 nt, Artificial Sequence
  Description of Artificial Sequence: Synthetic oligonucleotide
  Antisense strand to SEQ ID NO: 1195394
uauuugggcgcgcaaucgc

SEQ ID NO: 1195396 - RNA, 19 nt, Artificial Sequence
  Description of Artificial Sequence: Synthetic oligonucleotide
  Sense strand starting at position 2529 of SEQ ID NO: 916933
ugcggaauaauauguaaau

SEQ ID NO: 1195397 - RNA, 19 nt, Artificial Sequence
  Description of Artificial Sequence: Synthetic oligonucleotide
  Antisense strand to SEQ ID NO: 1195396
auuuacauauuauuccgca

SEQ ID NO: 1195398 - RNA, 19 nt, Artificial Sequence
  Description of Artificial Sequence: Synthetic oligonucleotide
  Sense strand starting at position 2530 of SEQ ID NO: 916933
gcggaauaauauguaaauu

SEQ ID NO: 1195399 - RNA, 19 nt, Artificial Sequence
  Description of Artificial Sequence: Synthetic oligonucleotide
  Antisense strand to SEQ ID NO: 1195398
aauuuacauauuauuccgc

SEQ ID NO: 1195400 - RNA, 19 nt, Artificial Sequence
  Description of Artificial Sequence: Synthetic oligonucleotide
  Sense strand starting at position 2778 of SEQ ID NO: 916933
ucgcguuuggcauuacaaa

SEQ ID NO: 1195401 - RNA, 19 nt, Artificial Sequence
  Description of Artificial Sequence: Synthetic oligonucleotide
  Antisense strand to SEQ ID NO: 1195400
uuuguaaugccaaacgcga

SEQ ID NO: 1195402 - RNA, 19 nt, Artificial Sequence
  Description of Artificial Sequence: Synthetic oligonucleotide
  Sense strand starting at position 2860 of SEQ ID NO: 916933
gacuacacggagugaugau

SEQ ID NO: 1195403 - RNA, 19 nt, Artificial Sequence
  Description of Artificial Sequence: Synthetic oligonucleotide
  Antisense strand to SEQ ID NO: 1195402
aucaucacuccguguaguc

SEQ ID NO: 1195404 - RNA, 19 nt, Artificial Sequence
  Description of Artificial Sequence: Synthetic oligonucleotide
  Sense strand starting at position 2912 of SEQ ID NO: 916933
gugggaguauaauuguaaa

SEQ ID NO: 1195405 - RNA, 19 nt, Artificial Sequence
  Description of Artificial Sequence: Synthetic oligonucleotide
  Antisense strand to SEQ ID NO: 1195404
uuuacaauuauacucccac

SEQ ID NO: 1195406 - RNA, 19 nt, Artificial Sequence
  Description of Artificial Sequence: Synthetic oligonucleotide
  Sense strand starting at position 2938 of SEQ ID NO: 916933
uuugguguaacuggaaauc

SEQ ID NO: 1195407 - RNA, 19 nt, Artificial Sequence
  Description of Artificial Sequence: Synthetic oligonucleotide
  Antisense strand to SEQ ID NO: 1195406
gauuuccaguuacaccaaa

SEQ ID NO: 1195408 - RNA, 19 nt, Artificial Sequence
  Description of Artificial Sequence: Synthetic oligonucleotide
  Sense strand starting at position 2984 of SEQ ID NO: 916933
agauacaauuuaugaagga

SEQ ID NO: 1195409 - RNA, 19 nt, Artificial Sequence
  Description of Artificial Sequence: Synthetic oligonucleotide
  Antisense strand to SEQ ID NO: 1195408
uccuucauaaauuguaucu

SEQ ID NO: 1195410 - RNA, 19 nt, Artificial Sequence
  Description of Artificial Sequence: Synthetic oligonucleotide
  Sense strand starting at position 3531 of SEQ ID NO: 916933
ucuuuaauauuuggcaaag

SEQ ID NO: 1195411 - RNA, 19 nt, Artificial Sequence
  Description of Artificial Sequence: Synthetic oligonucleotide
  Antisense strand to SEQ ID NO: 1195410
cuuugccaaauauuaaaga

SEQ ID NO: 1195412 - RNA, 19 nt, Artificial Sequence
  Description of Artificial Sequence: Synthetic oligonucleotide
  Sense strand starting at position 3649 of SEQ ID NO: 916933
uccuuaugaugcucagcau

SEQ ID NO: 1195413 - RNA, 19 nt, Artificial Sequence
  Description of Artificial Sequence: Synthetic oligonucleotide
  Antisense strand to SEQ ID NO: 1195412
augcugagcaucauaagga

SEQ ID NO: 1195414 - RNA, 19 nt, Artificial Sequence
  Description of Artificial Sequence: Synthetic oligonucleotide
  Sense strand starting at position 3650 of SEQ ID NO: 916933
ccuuaugaugcucagcauu

SEQ ID NO: 1195415 - RNA, 19 nt, Artificial Sequence
  Description of Artificial Sequence: Synthetic oligonucleotide
  Antisense strand to SEQ ID NO: 1195414
aaugcugagcaucauaagg

SEQ ID NO: 1195416 - RNA, 19 nt, Artificial Sequence
  Description of Artificial Sequence: Synthetic oligonucleotide
  Sense strand starting at position 3679 of SEQ ID NO: 916933
guuuaaauacaccagugua

SEQ ID NO: 1195417 - RNA, 19 nt, Artificial Sequence
  Description of Artificial Sequence: Synthetic oligonucleotide
  Antisense strand to SEQ ID NO: 1195416
uacacugguguauuuaaac

SEQ ID NO: 1195418 - RNA, 19 nt, Artificial Sequence
  Description of Artificial Sequence: Synthetic oligonucleotide
  Sense strand starting at position 3691 of SEQ ID NO: 916933
caguguauuggguaaggaa

SEQ ID NO: 1195419 - RNA, 19 nt, Artificial Sequence
  Description of Artificial Sequence: Synthetic oligonucleotide
  Antisense strand to SEQ ID NO: 1195418
uuccuuacccaauacacug

SEQ ID NO: 1195420 - RNA, 19 nt, Artificial Sequence
  Description of Artificial Sequence: Synthetic oligonucleotide
  Sense strand starting at position 3726 of SEQ ID NO: 916933
ccagacuuguuccuguaau

SEQ ID NO: 1195421 - RNA, 19 nt, Artificial Sequence
  Description of Artificial Sequence: Synthetic oligonucleotide
  Antisense strand to SEQ ID NO: 1195420
auuacaggaacaagucugg

SEQ ID NO: 1195422 - RNA, 19 nt, Artificial Sequence
  Description of Artificial Sequence: Synthetic oligonucleotide
  Sense strand starting at position 3824 of SEQ ID NO: 916933
guuuguaaagcguuaguac

SEQ ID NO: 1195423 - RNA, 19 nt, Artificial Sequence
  Description of Artificial Sequence: Synthetic oligonucleotide
  Antisense strand to SEQ ID NO: 1195422
guacuaacgcuuuacaaac

SEQ ID NO: 1195424 - RNA, 19 nt, Artificial Sequence
  Description of Artificial Sequence: Synthetic oligonucleotide
  Sense strand starting at position 3825 of SEQ ID NO: 916933
uuuguaaagcguuaguaca

SEQ ID NO: 1195425 - RNA, 19 nt, Artificial Sequence
  Description of Artificial Sequence: Synthetic oligonucleotide
  Antisense strand to SEQ ID NO: 1195424
uguacuaacgcuuuacaaa

SEQ ID NO: 1195426 - RNA, 19 nt, Artificial Sequence
  Description of Artificial Sequence: Synthetic oligonucleotide
  Sense strand starting at position 3888 of SEQ ID NO: 916933
auugacaauuggucccaau

SEQ ID NO: 1195427 - RNA, 19 nt, Artificial Sequence
  Description of Artificial Sequence: Synthetic oligonucleotide
  Antisense strand to SEQ ID NO: 1195426
auugggaccaauugucaau

SEQ ID NO: 1195428 - RNA, 19 nt, Artificial Sequence
  Description of Artificial Sequence: Synthetic oligonucleotide
  Sense strand starting at position 73 of SEQ ID NO: 916934
uuuguuacucaagaaagcu

SEQ ID NO: 1195429 - RNA, 19 nt, Artificial Sequence
  Description of Artificial Sequence: Synthetic oligonucleotide
  Antisense strand to SEQ ID NO: 1195428
agcuuucuugaguaacaaa

SEQ ID NO: 1195430 - RNA, 19 nt, Artificial Sequence
  Description of Artificial Sequence: Synthetic oligonucleotide
  Sense strand starting at position 102 of SEQ ID NO: 916934
agauauuaacacugaugug

SEQ ID NO: 1195431 - RNA, 19 nt, Artificial Sequence
  Description of Artificial Sequence: Synthetic oligonucleotide
  Antisense strand to SEQ ID NO: 1195430
cacaucaguguuaauaucu

SEQ ID NO: 1195432 - RNA, 19 nt, Artificial Sequence
  Description of Artificial Sequence: Synthetic oligonucleotide
  Sense strand starting at position 112 of SEQ ID NO: 916934
acugaugugcaauaccaaa

SEQ ID NO: 1195433 - RNA, 19 nt, Artificial Sequence
  Description of Artificial Sequence: Synthetic oligonucleotide
  Antisense strand to SEQ ID NO: 1195432
uuugguauugcacaucagu

SEQ ID NO: 1195434 - RNA, 19 nt, Artificial Sequence
  Description of Artificial Sequence: Synthetic oligonucleotide
  Sense strand starting at position 204 of SEQ ID NO: 916934
aguugaaaguggguuggau

SEQ ID NO: 1195435 - RNA, 19 nt, Artificial Sequence
  Description of Artificial Sequence: Synthetic oligonucleotide
  Antisense strand to SEQ ID NO: 1195434
auccaacccacuuucaacu

SEQ ID NO: 1195436 - RNA, 19 nt, Artificial Sequence
  Description of Artificial Sequence: Synthetic oligonucleotide
  Sense strand starting at position 1367 of SEQ ID NO: 916934
gcacuaauaauagguggau

SEQ ID NO: 1195437 - RNA, 19 nt, Artificial Sequence
  Description of Artificial Sequence: Synthetic oligonucleotide
  Antisense strand to SEQ ID NO: 1195436
auccaccuauuauuagugc

SEQ ID NO: 1195438 - RNA, 19 nt, Artificial Sequence
  Description of Artificial Sequence: Synthetic oligonucleotide
  Sense strand starting at position 1379 of SEQ ID NO: 916934
gguggauccguucagccaa

SEQ ID NO: 1195439 - RNA, 19 nt, Artificial Sequence
  Description of Artificial Sequence: Synthetic oligonucleotide
  Antisense strand to SEQ ID NO: 1195438
uuggcugaacggauccacc

SEQ ID NO: 1195440 - RNA, 19 nt, Artificial Sequence
  Description of Artificial Sequence: Synthetic oligonucleotide
  Sense strand starting at position 1585 of SEQ ID NO: 916934
gcaguaugcacaggagaaa

SEQ ID NO: 1195441 - RNA, 19 nt, Artificial Sequence
  Description of Artificial Sequence: Synthetic oligonucleotide
  Antisense strand to SEQ ID NO: 1195440
uuucuccugugcauacugc

SEQ ID NO: 1195442 - RNA, 19 nt, Artificial Sequence
  Description of Artificial Sequence: Synthetic oligonucleotide
  Sense strand starting at position 2129 of SEQ ID NO: 916934
ggucaagugcaacauuguu

SEQ ID NO: 1195443 - RNA, 19 nt, Artificial Sequence
  Description of Artificial Sequence: Synthetic oligonucleotide
  Antisense strand to SEQ ID NO: 1195442
aacaauguugcacuugacc

SEQ ID NO: 1195444 - RNA, 19 nt, Artificial Sequence
  Description of Artificial Sequence: Synthetic oligonucleotide
  Sense strand starting at position 2321 of SEQ ID NO: 916934
gugaccugauugucucuaa

SEQ ID NO: 1195445 - RNA, 19 nt, Artificial Sequence
  Description of Artificial Sequence: Synthetic oligonucleotide
  Antisense strand to SEQ ID NO: 1195444
uuagagacaaucaggucac

SEQ ID NO: 1195446 - RNA, 19 nt, Artificial Sequence
  Description of Artificial Sequence: Synthetic oligonucleotide
  Sense strand starting at position 2347 of SEQ ID NO: 916934
ggcaauuuauagcuuggua

SEQ ID NO: 1195447 - RNA, 19 nt, Artificial Sequence
  Description of Artificial Sequence: Synthetic oligonucleotide
  Antisense strand to SEQ ID NO: 1195446
uaccaagcuauaaauugcc

SEQ ID NO: 1195448 - RNA, 19 nt, Artificial Sequence
  Description of Artificial Sequence: Synthetic oligonucleotide
  Sense strand starting at position 2525 of SEQ ID NO: 916934
cccucaaccucguuuaaag

SEQ ID NO: 1195449 - RNA, 19 nt, Artificial Sequence
  Description of Artificial Sequence: Synthetic oligonucleotide
  Antisense strand to SEQ ID NO: 1195448
cuuuaaacgagguugaggg

SEQ ID NO: 1195450 - RNA, 19 nt, Artificial Sequence
  Description of Artificial Sequence: Synthetic oligonucleotide
  Sense strand starting at position 2587 of SEQ ID NO: 916934
uuguguaaacuugaucaau

SEQ ID NO: 1195451 - RNA, 19 nt, Artificial Sequence
  Description of Artificial Sequence: Synthetic oligonucleotide
  Antisense strand to SEQ ID NO: 1195450
auugaucaaguuuacacaa

SEQ ID NO: 1195452 - RNA, 19 nt, Artificial Sequence
  Description of Artificial Sequence: Synthetic oligonucleotide
  Sense strand starting at position 2589 of SEQ ID NO: 916934
guguaaacuugaucaauag

SEQ ID NO: 1195453 - RNA, 19 nt, Artificial Sequence
  Description of Artificial Sequence: Synthetic oligonucleotide
  Antisense strand to SEQ ID NO: 1195452
cuauugaucaaguuuacac

SEQ ID NO: 1195454 - RNA, 19 nt, Artificial Sequence
  Description of Artificial Sequence: Synthetic oligonucleotide
  Sense strand starting at position 2648 of SEQ ID NO: 916934
ugagaagauuaucuuggca

SEQ ID NO: 1195455 - RNA, 19 nt, Artificial Sequence
  Description of Artificial Sequence: Synthetic oligonucleotide
  Antisense strand to SEQ ID NO: 1195454
ugccaagauaaucuucuca

SEQ ID NO: 1195456 - RNA, 19 nt, Artificial Sequence
  Description of Artificial Sequence: Synthetic oligonucleotide
  Sense strand starting at position 2662 of SEQ ID NO: 916934
uggcaucucagguagggaa

SEQ ID NO: 1195457 - RNA, 19 nt, Artificial Sequence
  Description of Artificial Sequence: Synthetic oligonucleotide
  Antisense strand to SEQ ID NO: 1195456
uucccuaccugagaugcca

SEQ ID NO: 1195458 - RNA, 19 nt, Artificial Sequence
  Description of Artificial Sequence: Synthetic oligonucleotide
  Sense strand starting at position 2664 of SEQ ID NO: 916934
gcaucucagguagggaaau

SEQ ID NO: 1195459 - RNA, 19 nt, Artificial Sequence
  Description of Artificial Sequence: Synthetic oligonucleotide
  Antisense strand to SEQ ID NO: 1195458
auuucccuaccugagaugc

SEQ ID NO: 1195460 - RNA, 19 nt, Artificial Sequence
  Description of Artificial Sequence: Synthetic oligonucleotide
  Sense strand starting at position 2733 of SEQ ID NO: 916934
uuaacauuggugugcaaag

SEQ ID NO: 1195461 - RNA, 19 nt, Artificial Sequence
  Description of Artificial Sequence: Synthetic oligonucleotide
  Antisense strand to SEQ ID NO: 1195460
cuuugcacaccaauguuaa

SEQ ID NO: 1195462 - RNA, 19 nt, Artificial Sequence
  Description of Artificial Sequence: Synthetic oligonucleotide
  Sense strand starting at position 2847 of SEQ ID NO: 916934
auucuaaguauacgggaaa

SEQ ID NO: 1195463 - RNA, 19 nt, Artificial Sequence
  Description of Artificial Sequence: Synthetic oligonucleotide
  Antisense strand to SEQ ID NO: 1195462
uuucccguauacuuagaau

SEQ ID NO: 1195464 - RNA, 19 nt, Artificial Sequence
  Description of Artificial Sequence: Synthetic oligonucleotide
  Sense strand starting at position 2870 of SEQ ID NO: 916934
ggcaacgugauauaaauau

SEQ ID NO: 1195465 - RNA, 19 nt, Artificial Sequence
  Description of Artificial Sequence: Synthetic oligonucleotide
  Antisense strand to SEQ ID NO: 1195464
auauuuauaucacguugcc

SEQ ID NO: 1195466 - RNA, 19 nt, Artificial Sequence
  Description of Artificial Sequence: Synthetic oligonucleotide
  Sense strand starting at position 2910 of SEQ ID NO: 916934
uuguauuugggcuaugcuu

SEQ ID NO: 1195467 - RNA, 19 nt, Artificial Sequence
  Description of Artificial Sequence: Synthetic oligonucleotide
  Antisense strand to SEQ ID NO: 1195466
aagcauagcccaaauacaa

SEQ ID NO: 1195468 - RNA, 19 nt, Artificial Sequence
  Description of Artificial Sequence: Synthetic oligonucleotide
  Sense strand starting at position 2912 of SEQ ID NO: 916934
guauuugggcuaugcuuga

SEQ ID NO: 1195469 - RNA, 19 nt, Artificial Sequence
  Description of Artificial Sequence: Synthetic oligonucleotide
  Antisense strand to SEQ ID NO: 1195468
ucaagcauagcccaaauac

SEQ ID NO: 1195470 - RNA, 19 nt, Artificial Sequence
  Description of Artificial Sequence: Synthetic oligonucleotide
  Sense strand starting at position 2916 of SEQ ID NO: 916934
uugggcuaugcuugaauaa

SEQ ID NO: 1195471 - RNA, 19 nt, Artificial Sequence
  Description of Artificial Sequence: Synthetic oligonucleotide
  Antisense strand to SEQ ID NO: 1195470
uuauucaagcauagcccaa

SEQ ID NO: 1195472 - RNA, 19 nt, Artificial Sequence
  Description of Artificial Sequence: Synthetic oligonucleotide
  Sense strand starting at position 2917 of SEQ ID NO: 916934
ugggcuaugcuugaauaau

SEQ ID NO: 1195473 - RNA, 19 nt, Artificial Sequence
  Description of Artificial Sequence: Synthetic oligonucleotide
  Antisense strand to SEQ ID NO: 1195472
auuauucaagcauagccca

SEQ ID NO: 1195474 - RNA, 19 nt, Artificial Sequence
  Description of Artificial Sequence: Synthetic oligonucleotide
  Sense strand starting at position 2925 of SEQ ID NO: 916934
gcuugaauaauaggaaguu

SEQ ID NO: 1195475 - RNA, 19 nt, Artificial Sequence
  Description of Artificial Sequence: Synthetic oligonucleotide
  Antisense strand to SEQ ID NO: 1195474
aacuuccuauuauucaagc

SEQ ID NO: 1195476 - RNA, 19 nt, Artificial Sequence
  Description of Artificial Sequence: Synthetic oligonucleotide
  Sense strand starting at position 3255 of SEQ ID NO: 916934
agaauuaaguaacccugua

SEQ ID NO: 1195477 - RNA, 19 nt, Artificial Sequence
  Description of Artificial Sequence: Synthetic oligonucleotide
  Antisense strand to SEQ ID NO: 1195476
uacaggguuacuuaauucu

SEQ ID NO: 1195478 - RNA, 19 nt, Artificial Sequence
  Description of Artificial Sequence: Synthetic oligonucleotide
  Sense strand starting at position 3367 of SEQ ID NO: 916934
ucuagauuccagugauuaa

SEQ ID NO: 1195479 - RNA, 19 nt, Artificial Sequence
  Description of Artificial Sequence: Synthetic oligonucleotide
  Antisense strand to SEQ ID NO: 1195478
uuaaucacuggaaucuaga

SEQ ID NO: 1195480 - RNA, 19 nt, Artificial Sequence
  Description of Artificial Sequence: Synthetic oligonucleotide
  Sense strand starting at position 3409 of SEQ ID NO: 916934
ccaauagcugcauguagaa

SEQ ID NO: 1195481 - RNA, 19 nt, Artificial Sequence
  Description of Artificial Sequence: Synthetic oligonucleotide
  Antisense strand to SEQ ID NO: 1195480
uucuacaugcagcuauugg

SEQ ID NO: 1195482 - RNA, 19 nt, Artificial Sequence
  Description of Artificial Sequence: Synthetic oligonucleotide
  Sense strand starting at position 3580 of SEQ ID NO: 916934
uggccagaauccuuggcaa

SEQ ID NO: 1195483 - RNA, 19 nt, Artificial Sequence
  Description of Artificial Sequence: Synthetic oligonucleotide
  Antisense strand to SEQ ID NO: 1195482
uugccaaggauucuggcca

SEQ ID NO: 1195484 - RNA, 19 nt, Artificial Sequence
  Description of Artificial Sequence: Synthetic oligonucleotide
  Sense strand starting at position 3582 of SEQ ID NO: 916934
gccagaauccuuggcaaca

SEQ ID NO: 1195485 - RNA, 19 nt, Artificial Sequence
  Description of Artificial Sequence: Synthetic oligonucleotide
  Antisense strand to SEQ ID NO: 1195484
uguugccaaggauucuggc

SEQ ID NO: 1195486 - RNA, 19 nt, Artificial Sequence
  Description of Artificial Sequence: Synthetic oligonucleotide
  Sense strand starting at position 3583 of SEQ ID NO: 916934
ccagaauccuuggcaacau

SEQ ID NO: 1195487 - RNA, 19 nt, Artificial Sequence
  Description of Artificial Sequence: Synthetic oligonucleotide
  Antisense strand to SEQ ID NO: 1195486
auguugccaaggauucugg

SEQ ID NO: 1195488 - RNA, 19 nt, Artificial Sequence
  Description of Artificial Sequence: Synthetic oligonucleotide
  Sense strand starting at position 3612 of SEQ ID NO: 916934
agaaguuuguaacccaaug

SEQ ID NO: 1195489 - RNA, 19 nt, Artificial Sequence
  Description of Artificial Sequence: Synthetic oligonucleotide
  Antisense strand to SEQ ID NO: 1195488
cauuggguuacaaacuucu

SEQ ID NO: 1195490 - RNA, 19 nt, Artificial Sequence
  Description of Artificial Sequence: Synthetic oligonucleotide
  Sense strand starting at position 3624 of SEQ ID NO: 916934
cccaauguuccuugaggga

SEQ ID NO: 1195491 - RNA, 19 nt, Artificial Sequence
  Description of Artificial Sequence: Synthetic oligonucleotide
  Antisense strand to SEQ ID NO: 1195490
ucccucaaggaacauuggg

SEQ ID NO: 1195492 - RNA, 19 nt, Artificial Sequence
  Description of Artificial Sequence: Synthetic oligonucleotide
  Sense strand starting at position 3660 of SEQ ID NO: 916934
agaaaugggcuuuacaugu

SEQ ID NO: 1195493 - RNA, 19 nt, Artificial Sequence
  Description of Artificial Sequence: Synthetic oligonucleotide
  Antisense strand to SEQ ID NO: 1195492
acauguaaagcccauuucu

SEQ ID NO: 1195494 - RNA, 19 nt, Artificial Sequence
  Description of Artificial Sequence: Synthetic oligonucleotide
  Sense strand starting at position 3666 of SEQ ID NO: 916934
gggcuuuacauguauauug

SEQ ID NO: 1195495 - RNA, 19 nt, Artificial Sequence
  Description of Artificial Sequence: Synthetic oligonucleotide
  Antisense strand to SEQ ID NO: 1195494
caauauacauguaaagccc

SEQ ID NO: 1195496 - RNA, 19 nt, Artificial Sequence
  Description of Artificial Sequence: Synthetic oligonucleotide
  Sense strand starting at position 3747 of SEQ ID NO: 916934
ggugacuguagcuauacua

SEQ ID NO: 1195497 - RNA, 19 nt, Artificial Sequence
  Description of Artificial Sequence: Synthetic oligonucleotide
  Antisense strand to SEQ ID NO: 1195496
uaguauagcuacagucacc

SEQ ID NO: 1195498 - RNA, 19 nt, Artificial Sequence
  Description of Artificial Sequence: Synthetic oligonucleotide
  Sense strand starting at position 3824 of SEQ ID NO: 916934
agacguccuccuggaucua

SEQ ID NO: 1195499 - RNA, 19 nt, Artificial Sequence
  Description of Artificial Sequence: Synthetic oligonucleotide
  Antisense strand to SEQ ID NO: 1195498
uagauccaggaggacgucu

SEQ ID NO: 1195500 - RNA, 19 nt, Artificial Sequence
  Description of Artificial Sequence: Synthetic oligonucleotide
  Sense strand starting at position 3923 of SEQ ID NO: 916934
ggaagaucgggucaauugu

SEQ ID NO: 1195501 - RNA, 19 nt, Artificial Sequence
  Description of Artificial Sequence: Synthetic oligonucleotide
  Antisense strand to SEQ ID NO: 1195500
acaauugacccgaucuucc

SEQ ID NO: 1195502 - RNA, 19 nt, Artificial Sequence
  Description of Artificial Sequence: Synthetic oligonucleotide
  Sense strand starting at position 3933 of SEQ ID NO: 916934
gucaauuguucuguagaga

SEQ ID NO: 1195503 - RNA, 19 nt, Artificial Sequence
  Description of Artificial Sequence: Synthetic oligonucleotide
  Antisense strand to SEQ ID NO: 1195502
ucucuacagaacaauugac

SEQ ID NO: 1195504 - RNA, 19 nt, Artificial Sequence
  Description of Artificial Sequence: Synthetic oligonucleotide
  Sense strand starting at position 3934 of SEQ ID NO: 916934
ucaauuguucuguagagac

SEQ ID NO: 1195505 - RNA, 19 nt, Artificial Sequence
  Description of Artificial Sequence: Synthetic oligonucleotide
  Antisense strand to SEQ ID NO: 1195504
gucucuacagaacaauuga

SEQ ID NO: 1195506 - RNA, 19 nt, Artificial Sequence
  Description of Artificial Sequence: Synthetic oligonucleotide
  Sense strand starting at position 3956 of SEQ ID NO: 916934
gagagagcucuuugucacu

SEQ ID NO: 1195507 - RNA, 19 nt, Artificial Sequence
  Description of Artificial Sequence: Synthetic oligonucleotide
  Antisense strand to SEQ ID NO: 1195506
agugacaaagagcucucuc

SEQ ID NO: 1195508 - RNA, 19 nt, Artificial Sequence
  Description of Artificial Sequence: Synthetic oligonucleotide
  Sense strand starting at position 15 of SEQ ID NO: 916935
uuaagaugauacuaugcua

SEQ ID NO: 1195509 - RNA, 19 nt, Artificial Sequence
  Description of Artificial Sequence: Synthetic oligonucleotide
  Antisense strand to SEQ ID NO: 1195508
uagcauaguaucaucuuaa

SEQ ID NO: 1195510 - RNA, 19 nt, Artificial Sequence
  Description of Artificial Sequence: Synthetic oligonucleotide
  Sense strand starting at position 79 of SEQ ID NO: 916935
aauguaucacaacgaguac

SEQ ID NO: 1195511 - RNA, 19 nt, Artificial Sequence
  Description of Artificial Sequence: Synthetic oligonucleotide
  Antisense strand to SEQ ID NO: 1195510
guacucguugugauacauu

SEQ ID NO: 1195512 - RNA, 19 nt, Artificial Sequence
  Description of Artificial Sequence: Synthetic oligonucleotide
  Sense strand starting at position 91 of SEQ ID NO: 916935
cgaguacuuugcccucuua

SEQ ID NO: 1195513 - RNA, 19 nt, Artificial Sequence
  Description of Artificial Sequence: Synthetic oligonucleotide
  Antisense strand to SEQ ID NO: 1195512
uaagagggcaaaguacucg

SEQ ID NO: 1195514 - RNA, 19 nt, Artificial Sequence
  Description of Artificial Sequence: Synthetic oligonucleotide
  Sense strand starting at position 103 of SEQ ID NO: 916935
ccucuuauguaagaggauu

SEQ ID NO: 1195515 - RNA, 19 nt, Artificial Sequence
  Description of Artificial Sequence: Synthetic oligonucleotide
  Antisense strand to SEQ ID NO: 1195514
aauccucuuacauaagagg

SEQ ID NO: 1195516 - RNA, 19 nt, Artificial Sequence
  Description of Artificial Sequence: Synthetic oligonucleotide
  Sense strand starting at position 111 of SEQ ID NO: 916935
guaagaggauuauaggaca

SEQ ID NO: 1195517 - RNA, 19 nt, Artificial Sequence
  Description of Artificial Sequence: Synthetic oligonucleotide
  Antisense strand to SEQ ID NO: 1195516
uguccuauaauccucuuac

SEQ ID NO: 1195518 - RNA, 19 nt, Artificial Sequence
  Description of Artificial Sequence: Synthetic oligonucleotide
  Sense strand starting at position 114 of SEQ ID NO: 916935
agaggauuauaggacaaau

SEQ ID NO: 1195519 - RNA, 19 nt, Artificial Sequence
  Description of Artificial Sequence: Synthetic oligonucleotide
  Antisense strand to SEQ ID NO: 1195518
auuuguccuauaauccucu

SEQ ID NO: 1195520 - RNA, 19 nt, Artificial Sequence
  Description of Artificial Sequence: Synthetic oligonucleotide
  Sense strand starting at position 140 of SEQ ID NO: 916935
aguuuacuccaguaaauug

SEQ ID NO: 1195521 - RNA, 19 nt, Artificial Sequence
  Description of Artificial Sequence: Synthetic oligonucleotide
  Antisense strand to SEQ ID NO: 1195520
caauuuacuggaguaaacu

SEQ ID NO: 1195522 - RNA, 19 nt, Artificial Sequence
  Description of Artificial Sequence: Synthetic oligonucleotide
  Sense strand starting at position 283 of SEQ ID NO: 916935
aguacuuacuguucuauua

SEQ ID NO: 1195523 - RNA, 19 nt, Artificial Sequence
  Description of Artificial Sequence: Synthetic oligonucleotide
  Antisense strand to SEQ ID NO: 1195522
uaauagaacaguaaguacu

SEQ ID NO: 1195524 - RNA, 19 nt, Artificial Sequence
  Description of Artificial Sequence: Synthetic oligonucleotide
  Sense strand starting at position 377 of SEQ ID NO: 916935
uacagagguuacuugacua

SEQ ID NO: 1195525 - RNA, 19 nt, Artificial Sequence
  Description of Artificial Sequence: Synthetic oligonucleotide
  Antisense strand to SEQ ID NO: 1195524
uagucaaguaaccucugua

SEQ ID NO: 1195526 - RNA, 19 nt, Artificial Sequence
  Description of Artificial Sequence: Synthetic oligonucleotide
  Sense strand starting at position 381 of SEQ ID NO: 916935
gagguuacuugacuacaca

SEQ ID NO: 1195527 - RNA, 19 nt, Artificial Sequence
  Description of Artificial Sequence: Synthetic oligonucleotide
  Antisense strand to SEQ ID NO: 1195526
uguguagucaaguaaccuc

SEQ ID NO: 1195528 - RNA, 19 nt, Artificial Sequence
  Description of Artificial Sequence: Synthetic oligonucleotide
  Sense strand starting at position 536 of SEQ ID NO: 916935
uuuaaaguuguuugaugag

SEQ ID NO: 1195529 - RNA, 19 nt, Artificial Sequence
  Description of Artificial Sequence: Synthetic oligonucleotide
  Antisense strand to SEQ ID NO: 1195528
cucaucaaacaacuuuaaa

SEQ ID NO: 1195530 - RNA, 19 nt, Artificial Sequence
  Description of Artificial Sequence: Synthetic oligonucleotide
  Sense strand starting at position 542 of SEQ ID NO: 916935
guuguuugaugagcuagag

SEQ ID NO: 1195531 - RNA, 19 nt, Artificial Sequence
  Description of Artificial Sequence: Synthetic oligonucleotide
  Antisense strand to SEQ ID NO: 1195530
cucuagcucaucaaacaac

SEQ ID NO: 1195532 - RNA, 19 nt, Artificial Sequence
  Description of Artificial Sequence: Synthetic oligonucleotide
  Sense strand starting at position 551 of SEQ ID NO: 916935
ugagcuagagauugagagu

SEQ ID NO: 1195533 - RNA, 19 nt, Artificial Sequence
  Description of Artificial Sequence: Synthetic oligonucleotide
  Antisense strand to SEQ ID NO: 1195532
acucucaaucucuagcuca

SEQ ID NO: 1195534 - RNA, 19 nt, Artificial Sequence
  Description of Artificial Sequence: Synthetic oligonucleotide
  Sense strand starting at position 560 of SEQ ID NO: 916935
gauugagagucuguggaua

SEQ ID NO: 1195535 - RNA, 19 nt, Artificial Sequence
  Description of Artificial Sequence: Synthetic oligonucleotide
  Antisense strand to SEQ ID NO: 1195534
uauccacagacucucaauc

SEQ ID NO: 1195536 - RNA, 19 nt, Artificial Sequence
  Description of Artificial Sequence: Synthetic oligonucleotide
  Sense strand starting at position 565 of SEQ ID NO: 916935
agagucuguggauaguuua

SEQ ID NO: 1195537 - RNA, 19 nt, Artificial Sequence
  Description of Artificial Sequence: Synthetic oligonucleotide
  Antisense strand to SEQ ID NO: 1195536
uaaacuauccacagacucu

SEQ ID NO: 1195538 - RNA, 19 nt, Artificial Sequence
  Description of Artificial Sequence: Synthetic oligonucleotide
  Sense strand starting at position 568 of SEQ ID NO: 916935
gucuguggauaguuuauau

SEQ ID NO: 1195539 - RNA, 19 nt, Artificial Sequence
  Description of Artificial Sequence: Synthetic oligonucleotide
  Antisense strand to SEQ ID NO: 1195538
auauaaacuauccacagac

SEQ ID NO: 1195540 - RNA, 19 nt, Artificial Sequence
  Description of Artificial Sequence: Synthetic oligonucleotide
  Sense strand starting at position 608 of SEQ ID NO: 916935
uuaugcuuucuauaguguu

SEQ ID NO: 1195541 - RNA, 19 nt, Artificial Sequence
  Description of Artificial Sequence: Synthetic oligonucleotide
  Antisense strand to SEQ ID NO: 1195540
aacacuauagaaagcauaa

SEQ ID NO: 1195542 - RNA, 19 nt, Artificial Sequence
  Description of Artificial Sequence: Synthetic oligonucleotide
  Sense strand starting at position 646 of SEQ ID NO: 916935
acacuaaucuaggcagaca

SEQ ID NO: 1195543 - RNA, 19 nt, Artificial Sequence
  Description of Artificial Sequence: Synthetic oligonucleotide
  Antisense strand to SEQ ID NO: 1195542
ugucugccuagauuagugu

SEQ ID NO: 1195544 - RNA, 19 nt, Artificial Sequence
  Description of Artificial Sequence: Synthetic oligonucleotide
  Sense strand starting at position 695 of SEQ ID NO: 916935
aucacaugauucuuaguca

SEQ ID NO: 1195545 - RNA, 19 nt, Artificial Sequence
  Description of Artificial Sequence: Synthetic oligonucleotide
  Antisense strand to SEQ ID NO: 1195544
ugacuaagaaucaugugau

SEQ ID NO: 1195546 - RNA, 19 nt, Artificial Sequence
  Description of Artificial Sequence: Synthetic oligonucleotide
  Sense strand starting at position 947 of SEQ ID NO: 916935
aauagauauguagguacau

SEQ ID NO: 1195547 - RNA, 19 nt, Artificial Sequence
  Description of Artificial Sequence: Synthetic oligonucleotide
  Antisense strand to SEQ ID NO: 1195546
auguaccuacauaucuauu

SEQ ID NO: 1195548 - RNA, 19 nt, Artificial Sequence
  Description of Artificial Sequence: Synthetic oligonucleotide
  Sense strand starting at position 948 of SEQ ID NO: 916935
auagauauguagguacaua

SEQ ID NO: 1195549 - RNA, 19 nt, Artificial Sequence
  Description of Artificial Sequence: Synthetic oligonucleotide
  Antisense strand to SEQ ID NO: 1195548
uauguaccuacauaucuau

SEQ ID NO: 1195550 - RNA, 19 nt, Artificial Sequence
  Description of Artificial Sequence: Synthetic oligonucleotide
  Sense strand starting at position 1022 of SEQ ID NO: 916935
gauugcacgucauugcaua

SEQ ID NO: 1195551 - RNA, 19 nt, Artificial Sequence
  Description of Artificial Sequence: Synthetic oligonucleotide
  Antisense strand to SEQ ID NO: 1195550
uaugcaaugacgugcaauc

SEQ ID NO: 1195552 - RNA, 19 nt, Artificial Sequence
  Description of Artificial Sequence: Synthetic oligonucleotide
  Sense strand starting at position 1023 of SEQ ID NO: 916935
auugcacgucauugcauaa

SEQ ID NO: 1195553 - RNA, 19 nt, Artificial Sequence
  Description of Artificial Sequence: Synthetic oligonucleotide
  Antisense strand to SEQ ID NO: 1195552
uuaugcaaugacgugcaau

SEQ ID NO: 1195554 - RNA, 19 nt, Artificial Sequence
  Description of Artificial Sequence: Synthetic oligonucleotide
  Sense strand starting at position 1139 of SEQ ID NO: 916935
cugauuugguuugacaugu

SEQ ID NO: 1195555 - RNA, 19 nt, Artificial Sequence
  Description of Artificial Sequence: Synthetic oligonucleotide
  Antisense strand to SEQ ID NO: 1195554
acaugucaaaccaaaucag

SEQ ID NO: 1195556 - RNA, 19 nt, Artificial Sequence
  Description of Artificial Sequence: Synthetic oligonucleotide
  Sense strand starting at position 1318 of SEQ ID NO: 916935
aagaguucucauggcaucu

SEQ ID NO: 1195557 - RNA, 19 nt, Artificial Sequence
  Description of Artificial Sequence: Synthetic oligonucleotide
  Antisense strand to SEQ ID NO: 1195556
agaugccaugagaacucuu

SEQ ID NO: 1195558 - RNA, 19 nt, Artificial Sequence
  Description of Artificial Sequence: Synthetic oligonucleotide
  Sense strand starting at position 1379 of SEQ ID NO: 916935
uagcuauugggucacauag

SEQ ID NO: 1195559 - RNA, 19 nt, Artificial Sequence
  Description of Artificial Sequence: Synthetic oligonucleotide
  Antisense strand to SEQ ID NO: 1195558
cuaugugacccaauagcua

SEQ ID NO: 1195560 - RNA, 19 nt, Artificial Sequence
  Description of Artificial Sequence: Synthetic oligonucleotide
  Sense strand starting at position 1394 of SEQ ID NO: 916935
auagguaacucagcauaaa

SEQ ID NO: 1195561 - RNA, 19 nt, Artificial Sequence
  Description of Artificial Sequence: Synthetic oligonucleotide
  Antisense strand to SEQ ID NO: 1195560
uuuaugcugaguuaccuau

SEQ ID NO: 1195562 - RNA, 19 nt, Artificial Sequence
  Description of Artificial Sequence: Synthetic oligonucleotide
  Sense strand starting at position 1418 of SEQ ID NO: 916935
uaaagugacagcgguauuu

SEQ ID NO: 1195563 - RNA, 19 nt, Artificial Sequence
  Description of Artificial Sequence: Synthetic oligonucleotide
  Antisense strand to SEQ ID NO: 1195562
aaauaccgcugucacuuua

SEQ ID NO: 1195564 - RNA, 19 nt, Artificial Sequence
  Description of Artificial Sequence: Synthetic oligonucleotide
  Sense strand starting at position 1451 of SEQ ID NO: 916935
acugcaucugcucaacagu

SEQ ID NO: 1195565 - RNA, 19 nt, Artificial Sequence
  Description of Artificial Sequence: Synthetic oligonucleotide
  Antisense strand to SEQ ID NO: 1195564
acuguugagcagaugcagu

SEQ ID NO: 1195566 - RNA, 19 nt, Artificial Sequence
  Description of Artificial Sequence: Synthetic oligonucleotide
  Sense strand starting at position 1454 of SEQ ID NO: 916935
gcaucugcucaacaguuaa

SEQ ID NO: 1195567 - RNA, 19 nt, Artificial Sequence
  Description of Artificial Sequence: Synthetic oligonucleotide
  Antisense strand to SEQ ID NO: 1195566
uuaacuguugagcagaugc

SEQ ID NO: 1195568 - RNA, 19 nt, Artificial Sequence
  Description of Artificial Sequence: Synthetic oligonucleotide
  Sense strand starting at position 1510 of SEQ ID NO: 916935
acucaacuguuucuuagua

SEQ ID NO: 1195569 - RNA, 19 nt, Artificial Sequence
  Description of Artificial Sequence: Synthetic oligonucleotide
  Antisense strand to SEQ ID NO: 1195568
uacuaagaaacaguugagu

SEQ ID NO: 1195570 - RNA, 19 nt, Artificial Sequence
  Description of Artificial Sequence: Synthetic oligonucleotide
  Sense strand starting at position 1511 of SEQ ID NO: 916935
cucaacuguuucuuaguaa

SEQ ID NO: 1195571 - RNA, 19 nt, Artificial Sequence
  Description of Artificial Sequence: Synthetic oligonucleotide
  Antisense strand to SEQ ID NO: 1195570
uuacuaagaaacaguugag

SEQ ID NO: 1195572 - RNA, 19 nt, Artificial Sequence
  Description of Artificial Sequence: Synthetic oligonucleotide
  Sense strand starting at position 1537 of SEQ ID NO: 916935
uuggaagagcaauguuaaa

SEQ ID NO: 1195573 - RNA, 19 nt, Artificial Sequence
  Description of Artificial Sequence: Synthetic oligonucleotide
  Antisense strand to SEQ ID NO: 1195572
uuuaacauugcucuuccaa

SEQ ID NO: 1195574 - RNA, 19 nt, Artificial Sequence
  Description of Artificial Sequence: Synthetic oligonucleotide
  Sense strand starting at position 1568 of SEQ ID NO: 916935
uugccugacugccucuaaa

SEQ ID NO: 1195575 - RNA, 19 nt, Artificial Sequence
  Description of Artificial Sequence: Synthetic oligonucleotide
  Antisense strand to SEQ ID NO: 1195574
uuuagaggcagucaggcaa

SEQ ID NO: 1195576 - RNA, 19 nt, Artificial Sequence
  Description of Artificial Sequence: Synthetic oligonucleotide
  Sense strand starting at position 1613 of SEQ ID NO: 916935
uuagauaugcuuuguauag

SEQ ID NO: 1195577 - RNA, 19 nt, Artificial Sequence
  Description of Artificial Sequence: Synthetic oligonucleotide
  Antisense strand to SEQ ID NO: 1195576
cuauacaaagcauaucuaa

SEQ ID NO: 1195578 - RNA, 19 nt, Artificial Sequence
  Description of Artificial Sequence: Synthetic oligonucleotide
  Sense strand starting at position 1614 of SEQ ID NO: 916935
uagauaugcuuuguauagu

SEQ ID NO: 1195579 - RNA, 19 nt, Artificial Sequence
  Description of Artificial Sequence: Synthetic oligonucleotide
  Antisense strand to SEQ ID NO: 1195578
acuauacaaagcauaucua

SEQ ID NO: 1195580 - RNA, 19 nt, Artificial Sequence
  Description of Artificial Sequence: Synthetic oligonucleotide
  Sense strand starting at position 1674 of SEQ ID NO: 916935
gagcaagauucuguggaca

SEQ ID NO: 1195581 - RNA, 19 nt, Artificial Sequence
  Description of Artificial Sequence: Synthetic oligonucleotide
  Antisense strand to SEQ ID NO: 1195580
uguccacagaaucuugcuc

SEQ ID NO: 1195582 - RNA, 19 nt, Artificial Sequence
  Description of Artificial Sequence: Synthetic oligonucleotide
  Sense strand starting at position 1700 of SEQ ID NO: 916935
uaagguaaacagugacaca

SEQ ID NO: 1195583 - RNA, 19 nt, Artificial Sequence
  Description of Artificial Sequence: Synthetic oligonucleotide
  Antisense strand to SEQ ID NO: 1195582
ugugucacuguuuaccuua

SEQ ID NO: 1195584 - RNA, 19 nt, Artificial Sequence
  Description of Artificial Sequence: Synthetic oligonucleotide
  Sense strand starting at position 1787 of SEQ ID NO: 916935
gagaauaguugacacuaua

SEQ ID NO: 1195585 - RNA, 19 nt, Artificial Sequence
  Description of Artificial Sequence: Synthetic oligonucleotide
  Antisense strand to SEQ ID NO: 1195584
uauagugucaacuauucuc

SEQ ID NO: 1195586 - RNA, 19 nt, Artificial Sequence
  Description of Artificial Sequence: Synthetic oligonucleotide
  Sense strand starting at position 1987 of SEQ ID NO: 916935
uuuauucuuggugguagaa

SEQ ID NO: 1195587 - RNA, 19 nt, Artificial Sequence
  Description of Artificial Sequence: Synthetic oligonucleotide
  Antisense strand to SEQ ID NO: 1195586
uucuaccaccaagaauaaa

SEQ ID NO: 1195588 - RNA, 19 nt, Artificial Sequence
  Description of Artificial Sequence: Synthetic oligonucleotide
  Sense strand starting at position 53 of SEQ ID NO: 916936
cuuagcugucccugaagaa

SEQ ID NO: 1195589 - RNA, 19 nt, Artificial Sequence
  Description of Artificial Sequence: Synthetic oligonucleotide
  Antisense strand to SEQ ID NO: 1195588
uucuucagggacagcuaag

SEQ ID NO: 1195590 - RNA, 19 nt, Artificial Sequence
  Description of Artificial Sequence: Synthetic oligonucleotide
  Sense strand starting at position 54 of SEQ ID NO: 916936
uuagcugucccugaagaau

SEQ ID NO: 1195591 - RNA, 19 nt, Artificial Sequence
  Description of Artificial Sequence: Synthetic oligonucleotide
  Antisense strand to SEQ ID NO: 1195590
auucuucagggacagcuaa

SEQ ID NO: 1195592 - RNA, 19 nt, Artificial Sequence
  Description of Artificial Sequence: Synthetic oligonucleotide
  Sense strand starting at position 57 of SEQ ID NO: 916936
gcugucccugaagaauaau

SEQ ID NO: 1195593 - RNA, 19 nt, Artificial Sequence
  Description of Artificial Sequence: Synthetic oligonucleotide
  Antisense strand to SEQ ID NO: 1195592
auuauucuucagggacagc

SEQ ID NO: 1195594 - RNA, 19 nt, Artificial Sequence
  Description of Artificial Sequence: Synthetic oligonucleotide
  Sense strand starting at position 128 of SEQ ID NO: 916936
cuguaaaggcucuguccaa

SEQ ID NO: 1195595 - RNA, 19 nt, Artificial Sequence
  Description of Artificial Sequence: Synthetic oligonucleotide
  Antisense strand to SEQ ID NO: 1195594
uuggacagagccuuuacag

SEQ ID NO: 1195596 - RNA, 19 nt, Artificial Sequence
  Description of Artificial Sequence: Synthetic oligonucleotide
  Sense strand starting at position 268 of SEQ ID NO: 916936
uaggguaucuuucuagcau

SEQ ID NO: 1195597 - RNA, 19 nt, Artificial Sequence
  Description of Artificial Sequence: Synthetic oligonucleotide
  Antisense strand to SEQ ID NO: 1195596
augcuagaaagauacccua

SEQ ID NO: 1195598 - RNA, 19 nt, Artificial Sequence
  Description of Artificial Sequence: Synthetic oligonucleotide
  Sense strand starting at position 313 of SEQ ID NO: 916936
ggaggauucuuguccaacu

SEQ ID NO: 1195599 - RNA, 19 nt, Artificial Sequence
  Description of Artificial Sequence: Synthetic oligonucleotide
  Antisense strand to SEQ ID NO: 1195598
aguuggacaagaauccucc

SEQ ID NO: 1195600 - RNA, 19 nt, Artificial Sequence
  Description of Artificial Sequence: Synthetic oligonucleotide
  Sense strand starting at position 314 of SEQ ID NO: 916936
gaggauucuuguccaacug

SEQ ID NO: 1195601 - RNA, 19 nt, Artificial Sequence
  Description of Artificial Sequence: Synthetic oligonucleotide
  Antisense strand to SEQ ID NO: 1195600
caguuggacaagaauccuc

SEQ ID NO: 1195602 - RNA, 19 nt, Artificial Sequence
  Description of Artificial Sequence: Synthetic oligonucleotide
  Sense strand starting at position 360 of SEQ ID NO: 916936
gcugaaauuguauaaacau

SEQ ID NO: 1195603 - RNA, 19 nt, Artificial Sequence
  Description of Artificial Sequence: Synthetic oligonucleotide
  Antisense strand to SEQ ID NO: 1195602
auguuuauacaauuucagc

SEQ ID NO: 1195604 - RNA, 19 nt, Artificial Sequence
  Description of Artificial Sequence: Synthetic oligonucleotide
  Sense strand starting at position 427 of SEQ ID NO: 916936
ggcauaaguuugguaucca

SEQ ID NO: 1195605 - RNA, 19 nt, Artificial Sequence
  Description of Artificial Sequence: Synthetic oligonucleotide
  Antisense strand to SEQ ID NO: 1195604
uggauaccaaacuuaugcc

SEQ ID NO: 1195606 - RNA, 19 nt, Artificial Sequence
  Description of Artificial Sequence: Synthetic oligonucleotide
  Sense strand starting at position 431 of SEQ ID NO: 916936
uaaguuugguauccagaca

SEQ ID NO: 1195607 - RNA, 19 nt, Artificial Sequence
  Description of Artificial Sequence: Synthetic oligonucleotide
  Antisense strand to SEQ ID NO: 1195606
ugucuggauaccaaacuua

SEQ ID NO: 1195608 - RNA, 19 nt, Artificial Sequence
  Description of Artificial Sequence: Synthetic oligonucleotide
  Sense strand starting at position 596 of SEQ ID NO: 916936
agauuagcuuucucaaagu

SEQ ID NO: 1195609 - RNA, 19 nt, Artificial Sequence
  Description of Artificial Sequence: Synthetic oligonucleotide
  Antisense strand to SEQ ID NO: 1195608
acuuugagaaagcuaaucu

SEQ ID NO: 1195610 - RNA, 19 nt, Artificial Sequence
  Description of Artificial Sequence: Synthetic oligonucleotide
  Sense strand starting at position 749 of SEQ ID NO: 916936
uuuguuacucaagaaagcu

SEQ ID NO: 1195611 - RNA, 19 nt, Artificial Sequence
  Description of Artificial Sequence: Synthetic oligonucleotide
  Antisense strand to SEQ ID NO: 1195610
agcuuucuugaguaacaaa

SEQ ID NO: 1195612 - RNA, 19 nt, Artificial Sequence
  Description of Artificial Sequence: Synthetic oligonucleotide
  Sense strand starting at position 778 of SEQ ID NO: 916936
agauauuaacacugaugug

SEQ ID NO: 1195613 - RNA, 19 nt, Artificial Sequence
  Description of Artificial Sequence: Synthetic oligonucleotide
  Antisense strand to SEQ ID NO: 1195612
cacaucaguguuaauaucu

SEQ ID NO: 1195614 - RNA, 19 nt, Artificial Sequence
  Description of Artificial Sequence: Synthetic oligonucleotide
  Sense strand starting at position 788 of SEQ ID NO: 916936
acugaugugcaauaccaaa

SEQ ID NO: 1195615 - RNA, 19 nt, Artificial Sequence
  Description of Artificial Sequence: Synthetic oligonucleotide
  Antisense strand to SEQ ID NO: 1195614
uuugguauugcacaucagu

SEQ ID NO: 1195616 - RNA, 19 nt, Artificial Sequence
  Description of Artificial Sequence: Synthetic oligonucleotide
  Sense strand starting at position 880 of SEQ ID NO: 916936
aguugaaaguggguuggau

SEQ ID NO: 1195617 - RNA, 19 nt, Artificial Sequence
  Description of Artificial Sequence: Synthetic oligonucleotide
  Antisense strand to SEQ ID NO: 1195616
auccaacccacuuucaacu

SEQ ID NO: 1195618 - RNA, 19 nt, Artificial Sequence
  Description of Artificial Sequence: Synthetic oligonucleotide
  Sense strand starting at position 1394 of SEQ ID NO: 916936
augcacauguagucucaua

SEQ ID NO: 1195619 - RNA, 19 nt, Artificial Sequence
  Description of Artificial Sequence: Synthetic oligonucleotide
  Antisense strand to SEQ ID NO: 1195618
uaugagacuacaugugcau

SEQ ID NO: 1195620 - RNA, 19 nt, Artificial Sequence
  Description of Artificial Sequence: Synthetic oligonucleotide
  Sense strand starting at position 2043 of SEQ ID NO: 916936
gcacuaauaauagguggau

SEQ ID NO: 1195621 - RNA, 19 nt, Artificial Sequence
  Description of Artificial Sequence: Synthetic oligonucleotide
  Antisense strand to SEQ ID NO: 1195620
auccaccuauuauuagugc

SEQ ID NO: 1195622 - RNA, 19 nt, Artificial Sequence
  Description of Artificial Sequence: Synthetic oligonucleotide
  Sense strand starting at position 2055 of SEQ ID NO: 916936
gguggauccguucagccaa

SEQ ID NO: 1195623 - RNA, 19 nt, Artificial Sequence
  Description of Artificial Sequence: Synthetic oligonucleotide
  Antisense strand to SEQ ID NO: 1195622
uuggcugaacggauccacc

SEQ ID NO: 1195624 - RNA, 19 nt, Artificial Sequence
  Description of Artificial Sequence: Synthetic oligonucleotide
  Sense strand starting at position 2261 of SEQ ID NO: 916936
gcaguaugcacaggagaaa

SEQ ID NO: 1195625 - RNA, 19 nt, Artificial Sequence
  Description of Artificial Sequence: Synthetic oligonucleotide
  Antisense strand to SEQ ID NO: 1195624
uuucuccugugcauacugc

SEQ ID NO: 1195626 - RNA, 19 nt, Artificial Sequence
  Description of Artificial Sequence: Synthetic oligonucleotide
  Sense strand starting at position 2792 of SEQ ID NO: 916936
guuuguacacuugggucaa

SEQ ID NO: 1195627 - RNA, 19 nt, Artificial Sequence
  Description of Artificial Sequence: Synthetic oligonucleotide
  Antisense strand to SEQ ID NO: 1195626
uugacccaaguguacaaac

SEQ ID NO: 1195628 - RNA, 19 nt, Artificial Sequence
  Description of Artificial Sequence: Synthetic oligonucleotide
  Sense strand starting at position 2805 of SEQ ID NO: 916936
ggucaagugcaacauuguu

SEQ ID NO: 1195629 - RNA, 19 nt, Artificial Sequence
  Description of Artificial Sequence: Synthetic oligonucleotide
  Antisense strand to SEQ ID NO: 1195628
aacaauguugcacuugacc

SEQ ID NO: 1195630 - RNA, 19 nt, Artificial Sequence
  Description of Artificial Sequence: Synthetic oligonucleotide
  Sense strand starting at position 2997 of SEQ ID NO: 916936
gugaccugauugucucuaa

SEQ ID NO: 1195631 - RNA, 19 nt, Artificial Sequence
  Description of Artificial Sequence: Synthetic oligonucleotide
  Antisense strand to SEQ ID NO: 1195630
uuagagacaaucaggucac

SEQ ID NO: 1195632 - RNA, 19 nt, Artificial Sequence
  Description of Artificial Sequence: Synthetic oligonucleotide
  Sense strand starting at position 3000 of SEQ ID NO: 916936
accugauugucucuaagcu

SEQ ID NO: 1195633 - RNA, 19 nt, Artificial Sequence
  Description of Artificial Sequence: Synthetic oligonucleotide
  Antisense strand to SEQ ID NO: 1195632
agcuuagagacaaucaggu

SEQ ID NO: 1195634 - RNA, 19 nt, Artificial Sequence
  Description of Artificial Sequence: Synthetic oligonucleotide
  Sense strand starting at position 3023 of SEQ ID NO: 916936
ggcaauuuauagcuuggua

SEQ ID NO: 1195635 - RNA, 19 nt, Artificial Sequence
  Description of Artificial Sequence: Synthetic oligonucleotide
  Antisense strand to SEQ ID NO: 1195634
uaccaagcuauaaauugcc

SEQ ID NO: 1195636 - RNA, 19 nt, Artificial Sequence
  Description of Artificial Sequence: Synthetic oligonucleotide
  Sense strand starting at position 3201 of SEQ ID NO: 916936
cccucaaccucguuuaaag

SEQ ID NO: 1195637 - RNA, 19 nt, Artificial Sequence
  Description of Artificial Sequence: Synthetic oligonucleotide
  Antisense strand to SEQ ID NO: 1195636
cuuuaaacgagguugaggg

SEQ ID NO: 1195638 - RNA, 19 nt, Artificial Sequence
  Description of Artificial Sequence: Synthetic oligonucleotide
  Sense strand starting at position 3263 of SEQ ID NO: 916936
uuguguaaacuugaucaau

SEQ ID NO: 1195639 - RNA, 19 nt, Artificial Sequence
  Description of Artificial Sequence: Synthetic oligonucleotide
  Antisense strand to SEQ ID NO: 1195638
auugaucaaguuuacacaa

SEQ ID NO: 1195640 - RNA, 19 nt, Artificial Sequence
  Description of Artificial Sequence: Synthetic oligonucleotide
  Sense strand starting at position 3265 of SEQ ID NO: 916936
guguaaacuugaucaauag

SEQ ID NO: 1195641 - RNA, 19 nt, Artificial Sequence
  Description of Artificial Sequence: Synthetic oligonucleotide
  Antisense strand to SEQ ID NO: 1195640
cuauugaucaaguuuacac

SEQ ID NO: 1195642 - RNA, 19 nt, Artificial Sequence
  Description of Artificial Sequence: Synthetic oligonucleotide
  Sense strand starting at position 3324 of SEQ ID NO: 916936
ugagaagauuaucuuggca

SEQ ID NO: 1195643 - RNA, 19 nt, Artificial Sequence
  Description of Artificial Sequence: Synthetic oligonucleotide
  Antisense strand to SEQ ID NO: 1195642
ugccaagauaaucuucuca

SEQ ID NO: 1195644 - RNA, 19 nt, Artificial Sequence
  Description of Artificial Sequence: Synthetic oligonucleotide
  Sense strand starting at position 3338 of SEQ ID NO: 916936
uggcaucucagguagggaa

SEQ ID NO: 1195645 - RNA, 19 nt, Artificial Sequence
  Description of Artificial Sequence: Synthetic oligonucleotide
  Antisense strand to SEQ ID NO: 1195644
uucccuaccugagaugcca

SEQ ID NO: 1195646 - RNA, 19 nt, Artificial Sequence
  Description of Artificial Sequence: Synthetic oligonucleotide
  Sense strand starting at position 3340 of SEQ ID NO: 916936
gcaucucagguagggaaau

SEQ ID NO: 1195647 - RNA, 19 nt, Artificial Sequence
  Description of Artificial Sequence: Synthetic oligonucleotide
  Antisense strand to SEQ ID NO: 1195646
auuucccuaccugagaugc

SEQ ID NO: 1195648 - RNA, 19 nt, Artificial Sequence
  Description of Artificial Sequence: Synthetic oligonucleotide
  Sense strand starting at position 3409 of SEQ ID NO: 916936
uuaacauuggugugcaaag

SEQ ID NO: 1195649 - RNA, 19 nt, Artificial Sequence
  Description of Artificial Sequence: Synthetic oligonucleotide
  Antisense strand to SEQ ID NO: 1195648
cuuugcacaccaauguuaa

SEQ ID NO: 1195650 - RNA, 19 nt, Artificial Sequence
  Description of Artificial Sequence: Synthetic oligonucleotide
  Sense strand starting at position 3487 of SEQ ID NO: 916936
ucuucuacuuauguaaugu

SEQ ID NO: 1195651 - RNA, 19 nt, Artificial Sequence
  Description of Artificial Sequence: Synthetic oligonucleotide
  Antisense strand to SEQ ID NO: 1195650
acauuacauaaguagaaga

SEQ ID NO: 1195652 - RNA, 19 nt, Artificial Sequence
  Description of Artificial Sequence: Synthetic oligonucleotide
  Sense strand starting at position 3523 of SEQ ID NO: 916936
auucuaaguauacgggaaa

SEQ ID NO: 1195653 - RNA, 19 nt, Artificial Sequence
  Description of Artificial Sequence: Synthetic oligonucleotide
  Antisense strand to SEQ ID NO: 1195652
uuucccguauacuuagaau

SEQ ID NO: 1195654 - RNA, 19 nt, Artificial Sequence
  Description of Artificial Sequence: Synthetic oligonucleotide
  Sense strand starting at position 3546 of SEQ ID NO: 916936
ggcaacgugauauaaauau

SEQ ID NO: 1195655 - RNA, 19 nt, Artificial Sequence
  Description of Artificial Sequence: Synthetic oligonucleotide
  Antisense strand to SEQ ID NO: 1195654
auauuuauaucacguugcc

SEQ ID NO: 1195656 - RNA, 19 nt, Artificial Sequence
  Description of Artificial Sequence: Synthetic oligonucleotide
  Sense strand starting at position 3586 of SEQ ID NO: 916936
uuguauuugggcuaugcuu

SEQ ID NO: 1195657 - RNA, 19 nt, Artificial Sequence
  Description of Artificial Sequence: Synthetic oligonucleotide
  Antisense strand to SEQ ID NO: 1195656
aagcauagcccaaauacaa

SEQ ID NO: 1195658 - RNA, 19 nt, Artificial Sequence
  Description of Artificial Sequence: Synthetic oligonucleotide
  Sense strand starting at position 3588 of SEQ ID NO: 916936
guauuugggcuaugcuuga

SEQ ID NO: 1195659 - RNA, 19 nt, Artificial Sequence
  Description of Artificial Sequence: Synthetic oligonucleotide
  Antisense strand to SEQ ID NO: 1195658
ucaagcauagcccaaauac

SEQ ID NO: 1195660 - RNA, 19 nt, Artificial Sequence
  Description of Artificial Sequence: Synthetic oligonucleotide
  Sense strand starting at position 3592 of SEQ ID NO: 916936
uugggcuaugcuugaauaa

SEQ ID NO: 1195661 - RNA, 19 nt, Artificial Sequence
  Description of Artificial Sequence: Synthetic oligonucleotide
  Antisense strand to SEQ ID NO: 1195660
uuauucaagcauagcccaa

SEQ ID NO: 1195662 - RNA, 19 nt, Artificial Sequence
  Description of Artificial Sequence: Synthetic oligonucleotide
  Sense strand starting at position 3593 of SEQ ID NO: 916936
ugggcuaugcuugaauaau

SEQ ID NO: 1195663 - RNA, 19 nt, Artificial Sequence
  Description of Artificial Sequence: Synthetic oligonucleotide
  Antisense strand to SEQ ID NO: 1195662
auuauucaagcauagccca

SEQ ID NO: 1195664 - RNA, 19 nt, Artificial Sequence
  Description of Artificial Sequence: Synthetic oligonucleotide
  Sense strand starting at position 3601 of SEQ ID NO: 916936
gcuugaauaauaggaaguu

SEQ ID NO: 1195665 - RNA, 19 nt, Artificial Sequence
  Description of Artificial Sequence: Synthetic oligonucleotide
  Antisense strand to SEQ ID NO: 1195664
aacuuccuauuauucaagc

SEQ ID NO: 1195666 - RNA, 19 nt, Artificial Sequence
  Description of Artificial Sequence: Synthetic oligonucleotide
  Sense strand starting at position 3931 of SEQ ID NO: 916936
agaauuaaguaacccugua

SEQ ID NO: 1195667 - RNA, 19 nt, Artificial Sequence
  Description of Artificial Sequence: Synthetic oligonucleotide
  Antisense strand to SEQ ID NO: 1195666
uacaggguuacuuaauucu

SEQ ID NO: 1195668 - RNA, 19 nt, Artificial Sequence
  Description of Artificial Sequence: Synthetic oligonucleotide
  Sense strand starting at position 87 of SEQ ID NO: 916937
uggaaaugauucucaguug

SEQ ID NO: 1195669 - RNA, 19 nt, Artificial Sequence
  Description of Artificial Sequence: Synthetic oligonucleotide
  Antisense strand to SEQ ID NO: 1195668
caacugagaaucauuucca

SEQ ID NO: 1195670 - RNA, 19 nt, Artificial Sequence
  Description of Artificial Sequence: Synthetic oligonucleotide
  Sense strand starting at position 90 of SEQ ID NO: 916937
aaaugauucucaguugugu

SEQ ID NO: 1195671 - RNA, 19 nt, Artificial Sequence
  Description of Artificial Sequence: Synthetic oligonucleotide
  Antisense strand to SEQ ID NO: 1195670
acacaacugagaaucauuu

SEQ ID NO: 1195672 - RNA, 19 nt, Artificial Sequence
  Description of Artificial Sequence: Synthetic oligonucleotide
  Sense strand starting at position 98 of SEQ ID NO: 916937
cucaguuguguuuauacac

SEQ ID NO: 1195673 - RNA, 19 nt, Artificial Sequence
  Description of Artificial Sequence: Synthetic oligonucleotide
  Antisense strand to SEQ ID NO: 1195672
guguauaaacacaacugag

SEQ ID NO: 1195674 - RNA, 19 nt, Artificial Sequence
  Description of Artificial Sequence: Synthetic oligonucleotide
  Sense strand starting at position 105 of SEQ ID NO: 916937
guguuuauacacugagaaa

SEQ ID NO: 1195675 - RNA, 19 nt, Artificial Sequence
  Description of Artificial Sequence: Synthetic oligonucleotide
  Antisense strand to SEQ ID NO: 1195674
uuucucaguguauaaacac

SEQ ID NO: 1195676 - RNA, 19 nt, Artificial Sequence
  Description of Artificial Sequence: Synthetic oligonucleotide
  Sense strand starting at position 245 of SEQ ID NO: 916937
ccaugugaacgauggaaug

SEQ ID NO: 1195677 - RNA, 19 nt, Artificial Sequence
  Description of Artificial Sequence: Synthetic oligonucleotide
  Antisense strand to SEQ ID NO: 1195676
cauuccaucguucacaugg

SEQ ID NO: 1195678 - RNA, 19 nt, Artificial Sequence
  Description of Artificial Sequence: Synthetic oligonucleotide
  Sense strand starting at position 247 of SEQ ID NO: 916937
augugaacgauggaaugua

SEQ ID NO: 1195679 - RNA, 19 nt, Artificial Sequence
  Description of Artificial Sequence: Synthetic oligonucleotide
  Antisense strand to SEQ ID NO: 1195678
uacauuccaucguucacau

SEQ ID NO: 1195680 - RNA, 19 nt, Artificial Sequence
  Description of Artificial Sequence: Synthetic oligonucleotide
  Sense strand starting at position 742 of SEQ ID NO: 916937
ccagauuuccgacggucga

SEQ ID NO: 1195681 - RNA, 19 nt, Artificial Sequence
  Description of Artificial Sequence: Synthetic oligonucleotide
  Antisense strand to SEQ ID NO: 1195680
ucgaccgucggaaaucugg

SEQ ID NO: 1195682 - RNA, 19 nt, Artificial Sequence
  Description of Artificial Sequence: Synthetic oligonucleotide
  Sense strand starting at position 743 of SEQ ID NO: 916937
cagauuuccgacggucgau

SEQ ID NO: 1195683 - RNA, 19 nt, Artificial Sequence
  Description of Artificial Sequence: Synthetic oligonucleotide
  Antisense strand to SEQ ID NO: 1195682
aucgaccgucggaaaucug

SEQ ID NO: 1195684 - RNA, 19 nt, Artificial Sequence
  Description of Artificial Sequence: Synthetic oligonucleotide
  Sense strand starting at position 820 of SEQ ID NO: 916937
guuggaugucugagagcgu

SEQ ID NO: 1195685 - RNA, 19 nt, Artificial Sequence
  Description of Artificial Sequence: Synthetic oligonucleotide
  Antisense strand to SEQ ID NO: 1195684
acgcucucagacauccaac

SEQ ID NO: 1195686 - RNA, 19 nt, Artificial Sequence
  Description of Artificial Sequence: Synthetic oligonucleotide
  Sense strand starting at position 1806 of SEQ ID NO: 916937
ggugacuuuggcuggagau

SEQ ID NO: 1195687 - RNA, 19 nt, Artificial Sequence
  Description of Artificial Sequence: Synthetic oligonucleotide
  Antisense strand to SEQ ID NO: 1195686
aucuccagccaaagucacc

SEQ ID NO: 1195688 - RNA, 19 nt, Artificial Sequence
  Description of Artificial Sequence: Synthetic oligonucleotide
  Sense strand starting at position 1807 of SEQ ID NO: 916937
gugacuuuggcuggagauu

SEQ ID NO: 1195689 - RNA, 19 nt, Artificial Sequence
  Description of Artificial Sequence: Synthetic oligonucleotide
  Antisense strand to SEQ ID NO: 1195688
aaucuccagccaaagucac

SEQ ID NO: 1195690 - RNA, 19 nt, Artificial Sequence
  Description of Artificial Sequence: Synthetic oligonucleotide
  Sense strand starting at position 2475 of SEQ ID NO: 916937
cccucuuagguagaucaca

SEQ ID NO: 1195691 - RNA, 19 nt, Artificial Sequence
  Description of Artificial Sequence: Synthetic oligonucleotide
  Antisense strand to SEQ ID NO: 1195690
ugugaucuaccuaagaggg

SEQ ID NO: 1195692 - RNA, 19 nt, Artificial Sequence
  Description of Artificial Sequence: Synthetic oligonucleotide
  Sense strand starting at position 2522 of SEQ ID NO: 916937
agauaagauucugucgauu

SEQ ID NO: 1195693 - RNA, 19 nt, Artificial Sequence
  Description of Artificial Sequence: Synthetic oligonucleotide
  Antisense strand to SEQ ID NO: 1195692
aaucgacagaaucuuaucu

SEQ ID NO: 1195694 - RNA, 19 nt, Artificial Sequence
  Description of Artificial Sequence: Synthetic oligonucleotide
  Sense strand starting at position 2525 of SEQ ID NO: 916937
uaagauucugucgauuaau

SEQ ID NO: 1195695 - RNA, 19 nt, Artificial Sequence
  Description of Artificial Sequence: Synthetic oligonucleotide
  Antisense strand to SEQ ID NO: 1195694
auuaaucgacagaaucuua

SEQ ID NO: 1195696 - RNA, 19 nt, Artificial Sequence
  Description of Artificial Sequence: Synthetic oligonucleotide
  Sense strand starting at position 2535 of SEQ ID NO: 916937
ucgauuaauccguaauugg

SEQ ID NO: 1195697 - RNA, 19 nt, Artificial Sequence
  Description of Artificial Sequence: Synthetic oligonucleotide
  Antisense strand to SEQ ID NO: 1195696
ccaauuacggauuaaucga

SEQ ID NO: 1195698 - RNA, 19 nt, Artificial Sequence
  Description of Artificial Sequence: Synthetic oligonucleotide
  Sense strand starting at position 2546 of SEQ ID NO: 916937
guaauuggcgauugagaau

SEQ ID NO: 1195699 - RNA, 19 nt, Artificial Sequence
  Description of Artificial Sequence: Synthetic oligonucleotide
  Antisense strand to SEQ ID NO: 1195698
auucucaaucgccaauuac

SEQ ID NO: 1195700 - RNA, 19 nt, Artificial Sequence
  Description of Artificial Sequence: Synthetic oligonucleotide
  Sense strand starting at position 2552 of SEQ ID NO: 916937
ggcgauugagaaugcacaa

SEQ ID NO: 1195701 - RNA, 19 nt, Artificial Sequence
  Description of Artificial Sequence: Synthetic oligonucleotide
  Antisense strand to SEQ ID NO: 1195700
uugugcauucucaaucgcc

SEQ ID NO: 1195702 - RNA, 19 nt, Artificial Sequence
  Description of Artificial Sequence: Synthetic oligonucleotide
  Sense strand starting at position 2607 of SEQ ID NO: 916937
acaagacauggguguuaaa

SEQ ID NO: 1195703 - RNA, 19 nt, Artificial Sequence
  Description of Artificial Sequence: Synthetic oligonucleotide
  Antisense strand to SEQ ID NO: 1195702
uuuaacacccaugucuugu

SEQ ID NO: 1195704 - RNA, 19 nt, Artificial Sequence
  Description of Artificial Sequence: Synthetic oligonucleotide
  Sense strand starting at position 2920 of SEQ ID NO: 916937
uuuggacucggaugucuua

SEQ ID NO: 1195705 - RNA, 19 nt, Artificial Sequence
  Description of Artificial Sequence: Synthetic oligonucleotide
  Antisense strand to SEQ ID NO: 1195704
uaagacauccgaguccaaa

SEQ ID NO: 1195706 - RNA, 19 nt, Artificial Sequence
  Description of Artificial Sequence: Synthetic oligonucleotide
  Sense strand starting at position 2974 of SEQ ID NO: 916937
ggugcaaaucaguagaacu

SEQ ID NO: 1195707 - RNA, 19 nt, Artificial Sequence
  Description of Artificial Sequence: Synthetic oligonucleotide
  Antisense strand to SEQ ID NO: 1195706
aguucuacugauuugcacc

SEQ ID NO: 1195708 - RNA, 19 nt, Artificial Sequence
  Description of Artificial Sequence: Synthetic oligonucleotide
  Sense strand starting at position 2985 of SEQ ID NO: 916937
guagaacuaaagcgacaaa

SEQ ID NO: 1195709 - RNA, 19 nt, Artificial Sequence
  Description of Artificial Sequence: Synthetic oligonucleotide
  Antisense strand to SEQ ID NO: 1195708
uuugucgcuuuaguucuac

SEQ ID NO: 1195710 - RNA, 19 nt, Artificial Sequence
  Description of Artificial Sequence: Synthetic oligonucleotide
  Sense strand starting at position 3061 of SEQ ID NO: 916937
ggcagaguuugaucccaua

SEQ ID NO: 1195711 - RNA, 19 nt, Artificial Sequence
  Description of Artificial Sequence: Synthetic oligonucleotide
  Antisense strand to SEQ ID NO: 1195710
uaugggaucaaacucugcc

SEQ ID NO: 1195712 - RNA, 19 nt, Artificial Sequence
  Description of Artificial Sequence: Synthetic oligonucleotide
  Sense strand starting at position 3103 of SEQ ID NO: 916937
cccucuugugaugagggau

SEQ ID NO: 1195713 - RNA, 19 nt, Artificial Sequence
  Description of Artificial Sequence: Synthetic oligonucleotide
  Antisense strand to SEQ ID NO: 1195712
aucccucaucacaagaggg

SEQ ID NO: 1195714 - RNA, 19 nt, Artificial Sequence
  Description of Artificial Sequence: Synthetic oligonucleotide
  Sense strand starting at position 3106 of SEQ ID NO: 916937
ucuugugaugagggauucu

SEQ ID NO: 1195715 - RNA, 19 nt, Artificial Sequence
  Description of Artificial Sequence: Synthetic oligonucleotide
  Antisense strand to SEQ ID NO: 1195714
agaaucccucaucacaaga

SEQ ID NO: 1195716 - RNA, 19 nt, Artificial Sequence
  Description of Artificial Sequence: Synthetic oligonucleotide
  Sense strand starting at position 3150 of SEQ ID NO: 916937
acuuguuagcgugucuaug

SEQ ID NO: 1195717 - RNA, 19 nt, Artificial Sequence
  Description of Artificial Sequence: Synthetic oligonucleotide
  Antisense strand to SEQ ID NO: 1195716
cauagacacgcuaacaagu

SEQ ID NO: 1195718 - RNA, 19 nt, Artificial Sequence
  Description of Artificial Sequence: Synthetic oligonucleotide
  Sense strand starting at position 3230 of SEQ ID NO: 916937
ugcacaggacuaugguaaa

SEQ ID NO: 1195719 - RNA, 19 nt, Artificial Sequence
  Description of Artificial Sequence: Synthetic oligonucleotide
  Antisense strand to SEQ ID NO: 1195718
uuuaccauaguccugugca

SEQ ID NO: 1195720 - RNA, 19 nt, Artificial Sequence
  Description of Artificial Sequence: Synthetic oligonucleotide
  Sense strand starting at position 3311 of SEQ ID NO: 916937
accugauccauaggacgau

SEQ ID NO: 1195721 - RNA, 19 nt, Artificial Sequence
  Description of Artificial Sequence: Synthetic oligonucleotide
  Antisense strand to SEQ ID NO: 1195720
aucguccuauggaucaggu

SEQ ID NO: 1195722 - RNA, 19 nt, Artificial Sequence
  Description of Artificial Sequence: Synthetic oligonucleotide
  Sense strand starting at position 3321 of SEQ ID NO: 916937
uaggacgauugguuuaacu

SEQ ID NO: 1195723 - RNA, 19 nt, Artificial Sequence
  Description of Artificial Sequence: Synthetic oligonucleotide
  Antisense strand to SEQ ID NO: 1195722
aguuaaaccaaucguccua

SEQ ID NO: 1195724 - RNA, 19 nt, Artificial Sequence
  Description of Artificial Sequence: Synthetic oligonucleotide
  Sense strand starting at position 3323 of SEQ ID NO: 916937
ggacgauugguuuaacuag

SEQ ID NO: 1195725 - RNA, 19 nt, Artificial Sequence
  Description of Artificial Sequence: Synthetic oligonucleotide
  Antisense strand to SEQ ID NO: 1195724
cuaguuaaaccaaucgucc

SEQ ID NO: 1195726 - RNA, 19 nt, Artificial Sequence
  Description of Artificial Sequence: Synthetic oligonucleotide
  Sense strand starting at position 3329 of SEQ ID NO: 916937
uugguuuaacuaggacuau

SEQ ID NO: 1195727 - RNA, 19 nt, Artificial Sequence
  Description of Artificial Sequence: Synthetic oligonucleotide
  Antisense strand to SEQ ID NO: 1195726
auaguccuaguuaaaccaa

SEQ ID NO: 1195728 - RNA, 19 nt, Artificial Sequence
  Description of Artificial Sequence: Synthetic oligonucleotide
  Sense strand starting at position 3628 of SEQ ID NO: 916937
aacuaauugcuguguagga

SEQ ID NO: 1195729 - RNA, 19 nt, Artificial Sequence
  Description of Artificial Sequence: Synthetic oligonucleotide
  Antisense strand to SEQ ID NO: 1195728
uccuacacagcaauuaguu

SEQ ID NO: 1195730 - RNA, 19 nt, Artificial Sequence
  Description of Artificial Sequence: Synthetic oligonucleotide
  Sense strand starting at position 3681 of SEQ ID NO: 916937
agauucuaauugcuuaagu

SEQ ID NO: 1195731 - RNA, 19 nt, Artificial Sequence
  Description of Artificial Sequence: Synthetic oligonucleotide
  Antisense strand to SEQ ID NO: 1195730
acuuaagcaauuagaaucu

SEQ ID NO: 1195732 - RNA, 19 nt, Artificial Sequence
  Description of Artificial Sequence: Synthetic oligonucleotide
  Sense strand starting at position 3682 of SEQ ID NO: 916937
gauucuaauugcuuaagug

SEQ ID NO: 1195733 - RNA, 19 nt, Artificial Sequence
  Description of Artificial Sequence: Synthetic oligonucleotide
  Antisense strand to SEQ ID NO: 1195732
cacuuaagcaauuagaauc

SEQ ID NO: 1195734 - RNA, 19 nt, Artificial Sequence
  Description of Artificial Sequence: Synthetic oligonucleotide
  Sense strand starting at position 3689 of SEQ ID NO: 916937
auugcuuaaguggaguaau

SEQ ID NO: 1195735 - RNA, 19 nt, Artificial Sequence
  Description of Artificial Sequence: Synthetic oligonucleotide
  Antisense strand to SEQ ID NO: 1195734
auuacuccacuuaagcaau

SEQ ID NO: 1195736 - RNA, 19 nt, Artificial Sequence
  Description of Artificial Sequence: Synthetic oligonucleotide
  Sense strand starting at position 3692 of SEQ ID NO: 916937
gcuuaaguggaguaaugca

SEQ ID NO: 1195737 - RNA, 19 nt, Artificial Sequence
  Description of Artificial Sequence: Synthetic oligonucleotide
  Antisense strand to SEQ ID NO: 1195736
ugcauuacuccacuuaagc

SEQ ID NO: 1195738 - RNA, 19 nt, Artificial Sequence
  Description of Artificial Sequence: Synthetic oligonucleotide
  Sense strand starting at position 3707 of SEQ ID NO: 916937
ugcagaaggucucccuaau

SEQ ID NO: 1195739 - RNA, 19 nt, Artificial Sequence
  Description of Artificial Sequence: Synthetic oligonucleotide
  Antisense strand to SEQ ID NO: 1195738
auuagggagaccuucugca

SEQ ID NO: 1195740 - RNA, 19 nt, Artificial Sequence
  Description of Artificial Sequence: Synthetic oligonucleotide
  Sense strand starting at position 3727 of SEQ ID NO: 916937
acccucuuguguuugauuu

SEQ ID NO: 1195741 - RNA, 19 nt, Artificial Sequence
  Description of Artificial Sequence: Synthetic oligonucleotide
  Antisense strand to SEQ ID NO: 1195740
aaaucaaacacaagagggu

SEQ ID NO: 1195742 - RNA, 19 nt, Artificial Sequence
  Description of Artificial Sequence: Synthetic oligonucleotide
  Sense strand starting at position 3747 of SEQ ID NO: 916937
aguguuaaacauuagguaa

SEQ ID NO: 1195743 - RNA, 19 nt, Artificial Sequence
  Description of Artificial Sequence: Synthetic oligonucleotide
  Antisense strand to SEQ ID NO: 1195742
uuaccuaauguuuaacacu

SEQ ID NO: 1195744 - RNA, 19 nt, Artificial Sequence
  Description of Artificial Sequence: Synthetic oligonucleotide
  Sense strand starting at position 3750 of SEQ ID NO: 916937
guuaaacauuagguaaaca

SEQ ID NO: 1195745 - RNA, 19 nt, Artificial Sequence
  Description of Artificial Sequence: Synthetic oligonucleotide
  Antisense strand to SEQ ID NO: 1195744
uguuuaccuaauguuuaac

SEQ ID NO: 1195746 - RNA, 19 nt, Artificial Sequence
  Description of Artificial Sequence: Synthetic oligonucleotide
  Sense strand starting at position 3975 of SEQ ID NO: 916937
ucauuagcaggugaaucaa

SEQ ID NO: 1195747 - RNA, 19 nt, Artificial Sequence
  Description of Artificial Sequence: Synthetic oligonucleotide
  Antisense strand to SEQ ID NO: 1195746
uugauucaccugcuaauga

SEQ ID NO: 1195748 - RNA, 19 nt, Artificial Sequence
  Description of Artificial Sequence: Synthetic oligonucleotide
  Sense strand starting at position 30 of SEQ ID NO: 916938
uggccaaggucuugaaaca

SEQ ID NO: 1195749 - RNA, 19 nt, Artificial Sequence
  Description of Artificial Sequence: Synthetic oligonucleotide
  Antisense strand to SEQ ID NO: 1195748
uguuucaagaccuuggcca

SEQ ID NO: 1195750 - RNA, 19 nt, Artificial Sequence
  Description of Artificial Sequence: Synthetic oligonucleotide
  Sense strand starting at position 43 of SEQ ID NO: 916938
gaaacaaguuugucucaga

SEQ ID NO: 1195751 - RNA, 19 nt, Artificial Sequence
  Description of Artificial Sequence: Synthetic oligonucleotide
  Antisense strand to SEQ ID NO: 1195750
ucugagacaaacuuguuuc

SEQ ID NO: 1195752 - RNA, 19 nt, Artificial Sequence
  Description of Artificial Sequence: Synthetic oligonucleotide
  Sense strand starting at position 48 of SEQ ID NO: 916938
aaguuugucucagaagaac

SEQ ID NO: 1195753 - RNA, 19 nt, Artificial Sequence
  Description of Artificial Sequence: Synthetic oligonucleotide
  Antisense strand to SEQ ID NO: 1195752
guucuucugagacaaacuu

SEQ ID NO: 1195754 - RNA, 19 nt, Artificial Sequence
  Description of Artificial Sequence: Synthetic oligonucleotide
  Sense strand starting at position 77 of SEQ ID NO: 916938
uaacuauccugggcuggaa

SEQ ID NO: 1195755 - RNA, 19 nt, Artificial Sequence
  Description of Artificial Sequence: Synthetic oligonucleotide
  Antisense strand to SEQ ID NO: 1195754
uuccagcccaggauaguua

SEQ ID NO: 1195756 - RNA, 19 nt, Artificial Sequence
  Description of Artificial Sequence: Synthetic oligonucleotide
  Sense strand starting at position 92 of SEQ ID NO: 916938
ggaacuuuguggcuccaaa

SEQ ID NO: 1195757 - RNA, 19 nt, Artificial Sequence
  Description of Artificial Sequence: Synthetic oligonucleotide
  Antisense strand to SEQ ID NO: 1195756
uuuggagccacaaaguucc

SEQ ID NO: 1195758 - RNA, 19 nt, Artificial Sequence
  Description of Artificial Sequence: Synthetic oligonucleotide
  Sense strand starting at position 200 of SEQ ID NO: 916938
caaggcugcccuggugaua

SEQ ID NO: 1195759 - RNA, 19 nt, Artificial Sequence
  Description of Artificial Sequence: Synthetic oligonucleotide
  Antisense strand to SEQ ID NO: 1195758
uaucaccagggcagccuug

SEQ ID NO: 1195760 - RNA, 19 nt, Artificial Sequence
  Description of Artificial Sequence: Synthetic oligonucleotide
  Sense strand starting at position 380 of SEQ ID NO: 916938
aagcauuuguaccgaugua

SEQ ID NO: 1195761 - RNA, 19 nt, Artificial Sequence
  Description of Artificial Sequence: Synthetic oligonucleotide
  Antisense strand to SEQ ID NO: 1195760
uacaucgguacaaaugcuu

SEQ ID NO: 1195762 - RNA, 19 nt, Artificial Sequence
  Description of Artificial Sequence: Synthetic oligonucleotide
  Sense strand starting at position 492 of SEQ ID NO: 916938
uguggaaaucgaggcucaa

SEQ ID NO: 1195763 - RNA, 19 nt, Artificial Sequence
  Description of Artificial Sequence: Synthetic oligonucleotide
  Antisense strand to SEQ ID NO: 1195762
uugagccucgauuuccaca

SEQ ID NO: 1195764 - RNA, 19 nt, Artificial Sequence
  Description of Artificial Sequence: Synthetic oligonucleotide
  Sense strand starting at position 604 of SEQ ID NO: 916938
cuuagaagcaccugagguu

SEQ ID NO: 1195765 - RNA, 19 nt, Artificial Sequence
  Description of Artificial Sequence: Synthetic oligonucleotide
  Antisense strand to SEQ ID NO: 1195764
aaccucaggugcuucuaag

SEQ ID NO: 1195766 - RNA, 19 nt, Artificial Sequence
  Description of Artificial Sequence: Synthetic oligonucleotide
  Sense strand starting at position 682 of SEQ ID NO: 916938
acacauaacugauagguaa

SEQ ID NO: 1195767 - RNA, 19 nt, Artificial Sequence
  Description of Artificial Sequence: Synthetic oligonucleotide
  Antisense strand to SEQ ID NO: 1195766
uuaccuaucaguuaugugu

SEQ ID NO: 1195768 - RNA, 19 nt, Artificial Sequence
  Description of Artificial Sequence: Synthetic oligonucleotide
  Sense strand starting at position 765 of SEQ ID NO: 916938
agagaucugucccuugcaa

SEQ ID NO: 1195769 - RNA, 19 nt, Artificial Sequence
  Description of Artificial Sequence: Synthetic oligonucleotide
  Antisense strand to SEQ ID NO: 1195768
uugcaagggacagaucucu

SEQ ID NO: 1195770 - RNA, 19 nt, Artificial Sequence
  Description of Artificial Sequence: Synthetic oligonucleotide
  Sense strand starting at position 767 of SEQ ID NO: 916938
agaucugucccuugcaaag

SEQ ID NO: 1195771 - RNA, 19 nt, Artificial Sequence
  Description of Artificial Sequence: Synthetic oligonucleotide
  Antisense strand to SEQ ID NO: 1195770
cuuugcaagggacagaucu

SEQ ID NO: 1195772 - RNA, 19 nt, Artificial Sequence
  Description of Artificial Sequence: Synthetic oligonucleotide
  Sense strand starting at position 1155 of SEQ ID NO: 916938
uccuguggcuccuuacaga

SEQ ID NO: 1195773 - RNA, 19 nt, Artificial Sequence
  Description of Artificial Sequence: Synthetic oligonucleotide
  Antisense strand to SEQ ID NO: 1195772
ucuguaaggagccacagga

SEQ ID NO: 1195774 - RNA, 19 nt, Artificial Sequence
  Description of Artificial Sequence: Synthetic oligonucleotide
  Sense strand starting at position 1204 of SEQ ID NO: 916938
ccaggauggcugugaauag

SEQ ID NO: 1195775 - RNA, 19 nt, Artificial Sequence
  Description of Artificial Sequence: Synthetic oligonucleotide
  Antisense strand to SEQ ID NO: 1195774
cuauucacagccauccugg

SEQ ID NO: 1195776 - RNA, 19 nt, Artificial Sequence
  Description of Artificial Sequence: Synthetic oligonucleotide
  Sense strand starting at position 1222 of SEQ ID NO: 916938
gcagcaugauccucauggu

SEQ ID NO: 1195777 - RNA, 19 nt, Artificial Sequence
  Description of Artificial Sequence: Synthetic oligonucleotide
  Antisense strand to SEQ ID NO: 1195776
accaugaggaucaugcugc

SEQ ID NO: 1195778 - RNA, 19 nt, Artificial Sequence
  Description of Artificial Sequence: Synthetic oligonucleotide
  Sense strand starting at position 1399 of SEQ ID NO: 916938
gaaaguauuucugagaagg

SEQ ID NO: 1195779 - RNA, 19 nt, Artificial Sequence
  Description of Artificial Sequence: Synthetic oligonucleotide
  Antisense strand to SEQ ID NO: 1195778
ccuucucagaaauacuuuc

SEQ ID NO: 1195780 - RNA, 19 nt, Artificial Sequence
  Description of Artificial Sequence: Synthetic oligonucleotide
  Sense strand starting at position 1431 of SEQ ID NO: 916938
gggcuuaguuucccugcua

SEQ ID NO: 1195781 - RNA, 19 nt, Artificial Sequence
  Description of Artificial Sequence: Synthetic oligonucleotide
  Antisense strand to SEQ ID NO: 1195780
uagcagggaaacuaagccc

SEQ ID NO: 1195782 - RNA, 19 nt, Artificial Sequence
  Description of Artificial Sequence: Synthetic oligonucleotide
  Sense strand starting at position 1470 of SEQ ID NO: 916938
ggagaugugcaaugcuaua

SEQ ID NO: 1195783 - RNA, 19 nt, Artificial Sequence
  Description of Artificial Sequence: Synthetic oligonucleotide
  Antisense strand to SEQ ID NO: 1195782
uauagcauugcacaucucc

SEQ ID NO: 1195784 - RNA, 19 nt, Artificial Sequence
  Description of Artificial Sequence: Synthetic oligonucleotide
  Sense strand starting at position 1498 of SEQ ID NO: 916938
ggaggacucuagcucccaa

SEQ ID NO: 1195785 - RNA, 19 nt, Artificial Sequence
  Description of Artificial Sequence: Synthetic oligonucleotide
  Antisense strand to SEQ ID NO: 1195784
uugggagcuagaguccucc

SEQ ID NO: 1195786 - RNA, 19 nt, Artificial Sequence
  Description of Artificial Sequence: Synthetic oligonucleotide
  Sense strand starting at position 1522 of SEQ ID NO: 916938
augauagauuuguaggaca

SEQ ID NO: 1195787 - RNA, 19 nt, Artificial Sequence
  Description of Artificial Sequence: Synthetic oligonucleotide
  Antisense strand to SEQ ID NO: 1195786
uguccuacaaaucuaucau

SEQ ID NO: 1195788 - RNA, 19 nt, Artificial Sequence
  Description of Artificial Sequence: Synthetic oligonucleotide
  Sense strand starting at position 1546 of SEQ ID NO: 916938
uggucuguuuccucaguca

SEQ ID NO: 1195789 - RNA, 19 nt, Artificial Sequence
  Description of Artificial Sequence: Synthetic oligonucleotide
  Antisense strand to SEQ ID NO: 1195788
ugacugaggaaacagacca

SEQ ID NO: 1195790 - RNA, 19 nt, Artificial Sequence
  Description of Artificial Sequence: Synthetic oligonucleotide
  Sense strand starting at position 1573 of SEQ ID NO: 916938
agggauccuggaugcuauu

SEQ ID NO: 1195791 - RNA, 19 nt, Artificial Sequence
  Description of Artificial Sequence: Synthetic oligonucleotide
  Antisense strand to SEQ ID NO: 1195790
aauagcauccaggaucccu

SEQ ID NO: 1195792 - RNA, 19 nt, Artificial Sequence
  Description of Artificial Sequence: Synthetic oligonucleotide
  Sense strand starting at position 1626 of SEQ ID NO: 916938
aacuuucugguaugaaaga

SEQ ID NO: 1195793 - RNA, 19 nt, Artificial Sequence
  Description of Artificial Sequence: Synthetic oligonucleotide
  Antisense strand to SEQ ID NO: 1195792
ucuuucauaccagaaaguu

SEQ ID NO: 1195794 - RNA, 19 nt, Artificial Sequence
  Description of Artificial Sequence: Synthetic oligonucleotide
  Sense strand starting at position 1627 of SEQ ID NO: 916938
acuuucugguaugaaagaa

SEQ ID NO: 1195795 - RNA, 19 nt, Artificial Sequence
  Description of Artificial Sequence: Synthetic oligonucleotide
  Antisense strand to SEQ ID NO: 1195794
uucuuucauaccagaaagu

SEQ ID NO: 1195796 - RNA, 19 nt, Artificial Sequence
  Description of Artificial Sequence: Synthetic oligonucleotide
  Sense strand starting at position 1637 of SEQ ID NO: 916938
augaaagaaugagucugua

SEQ ID NO: 1195797 - RNA, 19 nt, Artificial Sequence
  Description of Artificial Sequence: Synthetic oligonucleotide
  Antisense strand to SEQ ID NO: 1195796
uacagacucauucuuucau

SEQ ID NO: 1195798 - RNA, 19 nt, Artificial Sequence
  Description of Artificial Sequence: Synthetic oligonucleotide
  Sense strand starting at position 1641 of SEQ ID NO: 916938
aagaaugagucuguagcca

SEQ ID NO: 1195799 - RNA, 19 nt, Artificial Sequence
  Description of Artificial Sequence: Synthetic oligonucleotide
  Antisense strand to SEQ ID NO: 1195798
uggcuacagacucauucuu

SEQ ID NO: 1195800 - RNA, 19 nt, Artificial Sequence
  Description of Artificial Sequence: Synthetic oligonucleotide
  Sense strand starting at position 1855 of SEQ ID NO: 916938
gguggucuggcaggaucaa

SEQ ID NO: 1195801 - RNA, 19 nt, Artificial Sequence
  Description of Artificial Sequence: Synthetic oligonucleotide
  Antisense strand to SEQ ID NO: 1195800
uugauccugccagaccacc

SEQ ID NO: 1195802 - RNA, 19 nt, Artificial Sequence
  Description of Artificial Sequence: Synthetic oligonucleotide
  Sense strand starting at position 1919 of SEQ ID NO: 916938
gccggugcuccugcaaaga

SEQ ID NO: 1195803 - RNA, 19 nt, Artificial Sequence
  Description of Artificial Sequence: Synthetic oligonucleotide
  Antisense strand to SEQ ID NO: 1195802
ucuuugcaggagcaccggc

SEQ ID NO: 1195804 - RNA, 19 nt, Artificial Sequence
  Description of Artificial Sequence: Synthetic oligonucleotide
  Sense strand starting at position 2186 of SEQ ID NO: 916938
uguguaugguuuguguaca

SEQ ID NO: 1195805 - RNA, 19 nt, Artificial Sequence
  Description of Artificial Sequence: Synthetic oligonucleotide
  Antisense strand to SEQ ID NO: 1195804
uguacacaaaccauacaca

SEQ ID NO: 1195806 - RNA, 19 nt, Artificial Sequence
  Description of Artificial Sequence: Synthetic oligonucleotide
  Sense strand starting at position 2723 of SEQ ID NO: 916938
uguggaguuucacgaguca

SEQ ID NO: 1195807 - RNA, 19 nt, Artificial Sequence
  Description of Artificial Sequence: Synthetic oligonucleotide
  Antisense strand to SEQ ID NO: 1195806
ugacucgugaaacuccaca

SEQ ID NO: 1195808 - RNA, 19 nt, Artificial Sequence
  Description of Artificial Sequence: Synthetic oligonucleotide
  Sense strand starting at position 2732 of SEQ ID NO: 916938
ucacgagucaugggcagau

SEQ ID NO: 1195809 - RNA, 19 nt, Artificial Sequence
  Description of Artificial Sequence: Synthetic oligonucleotide
  Antisense strand to SEQ ID NO: 1195808
aucugcccaugacucguga

SEQ ID NO: 1195810 - RNA, 19 nt, Artificial Sequence
  Description of Artificial Sequence: Synthetic oligonucleotide
  Sense strand starting at position 2856 of SEQ ID NO: 916938
acauauagcuagucauaua

SEQ ID NO: 1195811 - RNA, 19 nt, Artificial Sequence
  Description of Artificial Sequence: Synthetic oligonucleotide
  Antisense strand to SEQ ID NO: 1195810
uauaugacuagcuauaugu

SEQ ID NO: 1195812 - RNA, 19 nt, Artificial Sequence
  Description of Artificial Sequence: Synthetic oligonucleotide
  Sense strand starting at position 2902 of SEQ ID NO: 916938
agagaugacuuaugacagu

SEQ ID NO: 1195813 - RNA, 19 nt, Artificial Sequence
  Description of Artificial Sequence: Synthetic oligonucleotide
  Antisense strand to SEQ ID NO: 1195812
acugucauaagucaucucu

SEQ ID NO: 1195814 - RNA, 19 nt, Artificial Sequence
  Description of Artificial Sequence: Synthetic oligonucleotide
  Sense strand starting at position 2905 of SEQ ID NO: 916938
gaugacuuaugacaguuau

SEQ ID NO: 1195815 - RNA, 19 nt, Artificial Sequence
  Description of Artificial Sequence: Synthetic oligonucleotide
  Antisense strand to SEQ ID NO: 1195814
auaacugucauaagucauc

SEQ ID NO: 1195816 - RNA, 19 nt, Artificial Sequence
  Description of Artificial Sequence: Synthetic oligonucleotide
  Sense strand starting at position 2953 of SEQ ID NO: 916938
cuacuuauuucuucgugca

SEQ ID NO: 1195817 - RNA, 19 nt, Artificial Sequence
  Description of Artificial Sequence: Synthetic oligonucleotide
  Antisense strand to SEQ ID NO: 1195816
ugcacgaagaaauaaguag

SEQ ID NO: 1195818 - RNA, 19 nt, Artificial Sequence
  Description of Artificial Sequence: Synthetic oligonucleotide
  Sense strand starting at position 2955 of SEQ ID NO: 916938
acuuauuucuucgugcauu

SEQ ID NO: 1195819 - RNA, 19 nt, Artificial Sequence
  Description of Artificial Sequence: Synthetic oligonucleotide
  Antisense strand to SEQ ID NO: 1195818
aaugcacgaagaaauaagu

SEQ ID NO: 1195820 - RNA, 19 nt, Artificial Sequence
  Description of Artificial Sequence: Synthetic oligonucleotide
  Sense strand starting at position 2956 of SEQ ID NO: 916938
cuuauuucuucgugcauuu

SEQ ID NO: 1195821 - RNA, 19 nt, Artificial Sequence
  Description of Artificial Sequence: Synthetic oligonucleotide
  Antisense strand to SEQ ID NO: 1195820
aaaugcacgaagaaauaag

SEQ ID NO: 1195822 - RNA, 19 nt, Artificial Sequence
  Description of Artificial Sequence: Synthetic oligonucleotide
  Sense strand starting at position 3017 of SEQ ID NO: 916938
agcacucaccauugaggau

SEQ ID NO: 1195823 - RNA, 19 nt, Artificial Sequence
  Description of Artificial Sequence: Synthetic oligonucleotide
  Antisense strand to SEQ ID NO: 1195822
auccucaauggugagugcu

SEQ ID NO: 1195824 - RNA, 19 nt, Artificial Sequence
  Description of Artificial Sequence: Synthetic oligonucleotide
  Sense strand starting at position 3032 of SEQ ID NO: 916938
ggaugaaacucccauuaaa

SEQ ID NO: 1195825 - RNA, 19 nt, Artificial Sequence
  Description of Artificial Sequence: Synthetic oligonucleotide
  Antisense strand to SEQ ID NO: 1195824
uuuaaugggaguuucaucc

SEQ ID NO: 1195826 - RNA, 19 nt, Artificial Sequence
  Description of Artificial Sequence: Synthetic oligonucleotide
  Sense strand starting at position 3549 of SEQ ID NO: 916938
uccagcuaugccugcuuua

SEQ ID NO: 1195827 - RNA, 19 nt, Artificial Sequence
  Description of Artificial Sequence: Synthetic oligonucleotide
  Antisense strand to SEQ ID NO: 1195826
uaaagcaggcauagcugga

SEQ ID NO: 1195828 - RNA, 19 nt, Artificial Sequence
  Description of Artificial Sequence: Synthetic oligonucleotide
  Sense strand starting at position 117 of SEQ ID NO: 916939
cuaguauaguuccuuuaaa

SEQ ID NO: 1195829 - RNA, 19 nt, Artificial Sequence
  Description of Artificial Sequence: Synthetic oligonucleotide
  Antisense strand to SEQ ID NO: 1195828
uuuaaaggaacuauacuag

SEQ ID NO: 1195830 - RNA, 19 nt, Artificial Sequence
  Description of Artificial Sequence: Synthetic oligonucleotide
  Sense strand starting at position 184 of SEQ ID NO: 916939
uucuuagcuccuugagcua

SEQ ID NO: 1195831 - RNA, 19 nt, Artificial Sequence
  Description of Artificial Sequence: Synthetic oligonucleotide
  Antisense strand to SEQ ID NO: 1195830
uagcucaaggagcuaagaa

SEQ ID NO: 1195832 - RNA, 19 nt, Artificial Sequence
  Description of Artificial Sequence: Synthetic oligonucleotide
  Sense strand starting at position 228 of SEQ ID NO: 916939
aacgcaagggucuaucaaa

SEQ ID NO: 1195833 - RNA, 19 nt, Artificial Sequence
  Description of Artificial Sequence: Synthetic oligonucleotide
  Antisense strand to SEQ ID NO: 1195832
uuugauagacccuugcguu

SEQ ID NO: 1195834 - RNA, 19 nt, Artificial Sequence
  Description of Artificial Sequence: Synthetic oligonucleotide
  Sense strand starting at position 464 of SEQ ID NO: 916939
cgcgcaggucucuugauca

SEQ ID NO: 1195835 - RNA, 19 nt, Artificial Sequence
  Description of Artificial Sequence: Synthetic oligonucleotide
  Antisense strand to SEQ ID NO: 1195834
ugaucaagagaccugcgcg

SEQ ID NO: 1195836 - RNA, 19 nt, Artificial Sequence
  Description of Artificial Sequence: Synthetic oligonucleotide
  Sense strand starting at position 471 of SEQ ID NO: 916939
gucucuugaucauuccaag

SEQ ID NO: 1195837 - RNA, 19 nt, Artificial Sequence
  Description of Artificial Sequence: Synthetic oligonucleotide
  Antisense strand to SEQ ID NO: 1195836
cuuggaaugaucaagagac

SEQ ID NO: 1195838 - RNA, 19 nt, Artificial Sequence
  Description of Artificial Sequence: Synthetic oligonucleotide
  Sense strand starting at position 485 of SEQ ID NO: 916939
ccaagaucuuuguccugca

SEQ ID NO: 1195839 - RNA, 19 nt, Artificial Sequence
  Description of Artificial Sequence: Synthetic oligonucleotide
  Antisense strand to SEQ ID NO: 1195838
ugcaggacaaagaucuugg

SEQ ID NO: 1195840 - RNA, 19 nt, Artificial Sequence
  Description of Artificial Sequence: Synthetic oligonucleotide
  Sense strand starting at position 1170 of SEQ ID NO: 916939
ucuuuacucuguccuggau

SEQ ID NO: 1195841 - RNA, 19 nt, Artificial Sequence
  Description of Artificial Sequence: Synthetic oligonucleotide
  Antisense strand to SEQ ID NO: 1195840
auccaggacagaguaaaga

SEQ ID NO: 1195842 - RNA, 19 nt, Artificial Sequence
  Description of Artificial Sequence: Synthetic oligonucleotide
  Sense strand starting at position 2062 of SEQ ID NO: 916939
ccaauaggcucucuacuga

SEQ ID NO: 1195843 - RNA, 19 nt, Artificial Sequence
  Description of Artificial Sequence: Synthetic oligonucleotide
  Antisense strand to SEQ ID NO: 1195842
ucaguagagagccuauugg

SEQ ID NO: 1195844 - RNA, 19 nt, Artificial Sequence
  Description of Artificial Sequence: Synthetic oligonucleotide
  Sense strand starting at position 2167 of SEQ ID NO: 916939
cgaggauuggcggaguugu

SEQ ID NO: 1195845 - RNA, 19 nt, Artificial Sequence
  Description of Artificial Sequence: Synthetic oligonucleotide
  Antisense strand to SEQ ID NO: 1195844
acaacuccgccaauccucg

SEQ ID NO: 1195846 - RNA, 19 nt, Artificial Sequence
  Description of Artificial Sequence: Synthetic oligonucleotide
  Sense strand starting at position 2287 of SEQ ID NO: 916939
gcugcucuccggucaaagu

SEQ ID NO: 1195847 - RNA, 19 nt, Artificial Sequence
  Description of Artificial Sequence: Synthetic oligonucleotide
  Antisense strand to SEQ ID NO: 1195846
acuuugaccggagagcagc

SEQ ID NO: 1195848 - RNA, 19 nt, Artificial Sequence
  Description of Artificial Sequence: Synthetic oligonucleotide
  Sense strand starting at position 2288 of SEQ ID NO: 916939
cugcucuccggucaaaguu

SEQ ID NO: 1195849 - RNA, 19 nt, Artificial Sequence
  Description of Artificial Sequence: Synthetic oligonucleotide
  Antisense strand to SEQ ID NO: 1195848
aacuuugaccggagagcag

SEQ ID NO: 1195850 - RNA, 19 nt, Artificial Sequence
  Description of Artificial Sequence: Synthetic oligonucleotide
  Sense strand starting at position 2350 of SEQ ID NO: 916939
cagggaccaccauguuaga

SEQ ID NO: 1195851 - RNA, 19 nt, Artificial Sequence
  Description of Artificial Sequence: Synthetic oligonucleotide
  Antisense strand to SEQ ID NO: 1195850
ucuaacaugguggucccug

SEQ ID NO: 1195852 - RNA, 19 nt, Artificial Sequence
  Description of Artificial Sequence: Synthetic oligonucleotide
  Sense strand starting at position 2403 of SEQ ID NO: 916939
uugcacagcuuucuuagua

SEQ ID NO: 1195853 - RNA, 19 nt, Artificial Sequence
  Description of Artificial Sequence: Synthetic oligonucleotide
  Antisense strand to SEQ ID NO: 1195852
uacuaagaaagcugugcaa

SEQ ID NO: 1195854 - RNA, 19 nt, Artificial Sequence
  Description of Artificial Sequence: Synthetic oligonucleotide
  Sense strand starting at position 2404 of SEQ ID NO: 916939
ugcacagcuuucuuaguaa

SEQ ID NO: 1195855 - RNA, 19 nt, Artificial Sequence
  Description of Artificial Sequence: Synthetic oligonucleotide
  Antisense strand to SEQ ID NO: 1195854
uuacuaagaaagcugugca

SEQ ID NO: 1195856 - RNA, 19 nt, Artificial Sequence
  Description of Artificial Sequence: Synthetic oligonucleotide
  Sense strand starting at position 2415 of SEQ ID NO: 916939
cuuaguaauucugccauga

SEQ ID NO: 1195857 - RNA, 19 nt, Artificial Sequence
  Description of Artificial Sequence: Synthetic oligonucleotide
  Antisense strand to SEQ ID NO: 1195856
ucauggcagaauuacuaag

SEQ ID NO: 1195858 - RNA, 19 nt, Artificial Sequence
  Description of Artificial Sequence: Synthetic oligonucleotide
  Sense strand starting at position 2419 of SEQ ID NO: 916939
guaauucugccaugaacua

SEQ ID NO: 1195859 - RNA, 19 nt, Artificial Sequence
  Description of Artificial Sequence: Synthetic oligonucleotide
  Antisense strand to SEQ ID NO: 1195858
uaguucauggcagaauuac

SEQ ID NO: 1195860 - RNA, 19 nt, Artificial Sequence
  Description of Artificial Sequence: Synthetic oligonucleotide
  Sense strand starting at position 2513 of SEQ ID NO: 916939
ggaguugccucuccuugaa

SEQ ID NO: 1195861 - RNA, 19 nt, Artificial Sequence
  Description of Artificial Sequence: Synthetic oligonucleotide
  Antisense strand to SEQ ID NO: 1195860
uucaaggagaggcaacucc

SEQ ID NO: 1195862 - RNA, 19 nt, Artificial Sequence
  Description of Artificial Sequence: Synthetic oligonucleotide
  Sense strand starting at position 2515 of SEQ ID NO: 916939
aguugccucuccuugaauu

SEQ ID NO: 1195863 - RNA, 19 nt, Artificial Sequence
  Description of Artificial Sequence: Synthetic oligonucleotide
  Antisense strand to SEQ ID NO: 1195862
aauucaaggagaggcaacu

SEQ ID NO: 1195864 - RNA, 19 nt, Artificial Sequence
  Description of Artificial Sequence: Synthetic oligonucleotide
  Sense strand starting at position 2517 of SEQ ID NO: 916939
uugccucuccuugaauuga

SEQ ID NO: 1195865 - RNA, 19 nt, Artificial Sequence
  Description of Artificial Sequence: Synthetic oligonucleotide
  Antisense strand to SEQ ID NO: 1195864
ucaauucaaggagaggcaa

SEQ ID NO: 1195866 - RNA, 19 nt, Artificial Sequence
  Description of Artificial Sequence: Synthetic oligonucleotide
  Sense strand starting at position 2784 of SEQ ID NO: 916939
uaaugauucuaugugaacg

SEQ ID NO: 1195867 - RNA, 19 nt, Artificial Sequence
  Description of Artificial Sequence: Synthetic oligonucleotide
  Antisense strand to SEQ ID NO: 1195866
cguucacauagaaucauua

SEQ ID NO: 1195868 - RNA, 19 nt, Artificial Sequence
  Description of Artificial Sequence: Synthetic oligonucleotide
  Sense strand starting at position 2819 of SEQ ID NO: 916939
cgagcuuugacccagguuu

SEQ ID NO: 1195869 - RNA, 19 nt, Artificial Sequence
  Description of Artificial Sequence: Synthetic oligonucleotide
  Antisense strand to SEQ ID NO: 1195868
aaaccugggucaaagcucg

SEQ ID NO: 1195870 - RNA, 19 nt, Artificial Sequence
  Description of Artificial Sequence: Synthetic oligonucleotide
  Sense strand starting at position 2821 of SEQ ID NO: 916939
agcuuugacccagguuuaa

SEQ ID NO: 1195871 - RNA, 19 nt, Artificial Sequence
  Description of Artificial Sequence: Synthetic oligonucleotide
  Antisense strand to SEQ ID NO: 1195870
uuaaaccugggucaaagcu

SEQ ID NO: 1195872 - RNA, 19 nt, Artificial Sequence
  Description of Artificial Sequence: Synthetic oligonucleotide
  Sense strand starting at position 2841 of SEQ ID NO: 916939
augugauaaucagagacuc

SEQ ID NO: 1195873 - RNA, 19 nt, Artificial Sequence
  Description of Artificial Sequence: Synthetic oligonucleotide
  Antisense strand to SEQ ID NO: 1195872
gagucucugauuaucacau

SEQ ID NO: 1195874 - RNA, 19 nt, Artificial Sequence
  Description of Artificial Sequence: Synthetic oligonucleotide
  Sense strand starting at position 2849 of SEQ ID NO: 916939
aucagagacuccucuugau

SEQ ID NO: 1195875 - RNA, 19 nt, Artificial Sequence
  Description of Artificial Sequence: Synthetic oligonucleotide
  Antisense strand to SEQ ID NO: 1195874
aucaagaggagucucugau

SEQ ID NO: 1195876 - RNA, 19 nt, Artificial Sequence
  Description of Artificial Sequence: Synthetic oligonucleotide
  Sense strand starting at position 2859 of SEQ ID NO: 916939
ccucuugauccacgcuaaa

SEQ ID NO: 1195877 - RNA, 19 nt, Artificial Sequence
  Description of Artificial Sequence: Synthetic oligonucleotide
  Antisense strand to SEQ ID NO: 1195876
uuuagcguggaucaagagg

SEQ ID NO: 1195878 - RNA, 19 nt, Artificial Sequence
  Description of Artificial Sequence: Synthetic oligonucleotide
  Sense strand starting at position 2896 of SEQ ID NO: 916939
gugaaagugcaucaugcua

SEQ ID NO: 1195879 - RNA, 19 nt, Artificial Sequence
  Description of Artificial Sequence: Synthetic oligonucleotide
  Antisense strand to SEQ ID NO: 1195878
uagcaugaugcacuuucac

SEQ ID NO: 1195880 - RNA, 19 nt, Artificial Sequence
  Description of Artificial Sequence: Synthetic oligonucleotide
  Sense strand starting at position 2946 of SEQ ID NO: 916939
uggauaugcugaucaaauc

SEQ ID NO: 1195881 - RNA, 19 nt, Artificial Sequence
  Description of Artificial Sequence: Synthetic oligonucleotide
  Antisense strand to SEQ ID NO: 1195880
gauuugaucagcauaucca

SEQ ID NO: 1195882 - RNA, 19 nt, Artificial Sequence
  Description of Artificial Sequence: Synthetic oligonucleotide
  Sense strand starting at position 3097 of SEQ ID NO: 916939
aggccuuaguucucagaga

SEQ ID NO: 1195883 - RNA, 19 nt, Artificial Sequence
  Description of Artificial Sequence: Synthetic oligonucleotide
  Antisense strand to SEQ ID NO: 1195882
ucucugagaacuaaggccu

SEQ ID NO: 1195884 - RNA, 19 nt, Artificial Sequence
  Description of Artificial Sequence: Synthetic oligonucleotide
  Sense strand starting at position 3110 of SEQ ID NO: 916939
cagagaacccucgauuguu

SEQ ID NO: 1195885 - RNA, 19 nt, Artificial Sequence
  Description of Artificial Sequence: Synthetic oligonucleotide
  Antisense strand to SEQ ID NO: 1195884
aacaaucgaggguucucug

SEQ ID NO: 1195886 - RNA, 19 nt, Artificial Sequence
  Description of Artificial Sequence: Synthetic oligonucleotide
  Sense strand starting at position 3151 of SEQ ID NO: 916939
aaauguguuuguguucuaa

SEQ ID NO: 1195887 - RNA, 19 nt, Artificial Sequence
  Description of Artificial Sequence: Synthetic oligonucleotide
  Antisense strand to SEQ ID NO: 1195886
uuagaacacaaacacauuu

SEQ ID NO: 1195888 - RNA, 19 nt, Artificial Sequence
  Description of Artificial Sequence: Synthetic oligonucleotide
  Sense strand starting at position 3153 of SEQ ID NO: 916939
auguguuuguguucuaaac

SEQ ID NO: 1195889 - RNA, 19 nt, Artificial Sequence
  Description of Artificial Sequence: Synthetic oligonucleotide
  Antisense strand to SEQ ID NO: 1195888
guuuagaacacaaacacau

SEQ ID NO: 1195890 - RNA, 19 nt, Artificial Sequence
  Description of Artificial Sequence: Synthetic oligonucleotide
  Sense strand starting at position 3162 of SEQ ID NO: 916939
uguucuaaacaguauacau

SEQ ID NO: 1195891 - RNA, 19 nt, Artificial Sequence
  Description of Artificial Sequence: Synthetic oligonucleotide
  Antisense strand to SEQ ID NO: 1195890
auguauacuguuuagaaca

SEQ ID NO: 1195892 - RNA, 19 nt, Artificial Sequence
  Description of Artificial Sequence: Synthetic oligonucleotide
  Sense strand starting at position 3259 of SEQ ID NO: 916939
ugaaaucccgucuguacga

SEQ ID NO: 1195893 - RNA, 19 nt, Artificial Sequence
  Description of Artificial Sequence: Synthetic oligonucleotide
  Antisense strand to SEQ ID NO: 1195892
ucguacagacgggauuuca

SEQ ID NO: 1195894 - RNA, 19 nt, Artificial Sequence
  Description of Artificial Sequence: Synthetic oligonucleotide
  Sense strand starting at position 3260 of SEQ ID NO: 916939
gaaaucccgucuguacgaa

SEQ ID NO: 1195895 - RNA, 19 nt, Artificial Sequence
  Description of Artificial Sequence: Synthetic oligonucleotide
  Antisense strand to SEQ ID NO: 1195894
uucguacagacgggauuuc

SEQ ID NO: 1195896 - RNA, 19 nt, Artificial Sequence
  Description of Artificial Sequence: Synthetic oligonucleotide
  Sense strand starting at position 3699 of SEQ ID NO: 916939
gaguauagcgacuguccaa

SEQ ID NO: 1195897 - RNA, 19 nt, Artificial Sequence
  Description of Artificial Sequence: Synthetic oligonucleotide
  Antisense strand to SEQ ID NO: 1195896
uuggacagucgcuauacuc

SEQ ID NO: 1195898 - RNA, 19 nt, Artificial Sequence
  Description of Artificial Sequence: Synthetic oligonucleotide
  Sense strand starting at position 3738 of SEQ ID NO: 916939
aagguuagguaagacuaaa

SEQ ID NO: 1195899 - RNA, 19 nt, Artificial Sequence
  Description of Artificial Sequence: Synthetic oligonucleotide
  Antisense strand to SEQ ID NO: 1195898
uuuagucuuaccuaaccuu

SEQ ID NO: 1195900 - RNA, 19 nt, Artificial Sequence
  Description of Artificial Sequence: Synthetic oligonucleotide
  Sense strand starting at position 3818 of SEQ ID NO: 916939
gcuggcaaucuggacagaa

SEQ ID NO: 1195901 - RNA, 19 nt, Artificial Sequence
  Description of Artificial Sequence: Synthetic oligonucleotide
  Antisense strand to SEQ ID NO: 1195900
uucuguccagauugccagc

SEQ ID NO: 1195902 - RNA, 19 nt, Artificial Sequence
  Description of Artificial Sequence: Synthetic oligonucleotide
  Sense strand starting at position 3916 of SEQ ID NO: 916939
aacagaugcuguuugcagu

SEQ ID NO: 1195903 - RNA, 19 nt, Artificial Sequence
  Description of Artificial Sequence: Synthetic oligonucleotide
  Antisense strand to SEQ ID NO: 1195902
acugcaaacagcaucuguu

SEQ ID NO: 1195904 - RNA, 19 nt, Artificial Sequence
  Description of Artificial Sequence: Synthetic oligonucleotide
  Sense strand starting at position 3923 of SEQ ID NO: 916939
gcuguuugcagucaagaag

SEQ ID NO: 1195905 - RNA, 19 nt, Artificial Sequence
  Description of Artificial Sequence: Synthetic oligonucleotide
  Antisense strand to SEQ ID NO: 1195904
cuucuugacugcaaacagc

SEQ ID NO: 1195906 - RNA, 19 nt, Artificial Sequence
  Description of Artificial Sequence: Synthetic oligonucleotide
  Sense strand starting at position 3926 of SEQ ID NO: 916939
guuugcagucaagaagaca

SEQ ID NO: 1195907 - RNA, 19 nt, Artificial Sequence
  Description of Artificial Sequence: Synthetic oligonucleotide
  Antisense strand to SEQ ID NO: 1195906
ugucuucuugacugcaaac

SEQ ID NO: 1195908 - RNA, 19 nt, Artificial Sequence
  Description of Artificial Sequence: Synthetic oligonucleotide
  Sense strand starting at position 593 of SEQ ID NO: 916940
ggcaaauuagcgugagaac

SEQ ID NO: 1195909 - RNA, 19 nt, Artificial Sequence
  Description of Artificial Sequence: Synthetic oligonucleotide
  Antisense strand to SEQ ID NO: 1195908
guucucacgcuaauuugcc

SEQ ID NO: 1195910 - RNA, 19 nt, Artificial Sequence
  Description of Artificial Sequence: Synthetic oligonucleotide
  Sense strand starting at position 594 of SEQ ID NO: 916940
gcaaauuagcgugagaaca

SEQ ID NO: 1195911 - RNA, 19 nt, Artificial Sequence
  Description of Artificial Sequence: Synthetic oligonucleotide
  Antisense strand to SEQ ID NO: 1195910
uguucucacgcuaauuugc

SEQ ID NO: 1195912 - RNA, 19 nt, Artificial Sequence
  Description of Artificial Sequence: Synthetic oligonucleotide
  Sense strand starting at position 629 of SEQ ID NO: 916940
gcaguauguguggcuguaa

SEQ ID NO: 1195913 - RNA, 19 nt, Artificial Sequence
  Description of Artificial Sequence: Synthetic oligonucleotide
  Antisense strand to SEQ ID NO: 1195912
uuacagccacacauacugc

SEQ ID NO: 1195914 - RNA, 19 nt, Artificial Sequence
  Description of Artificial Sequence: Synthetic oligonucleotide
  Sense strand starting at position 630 of SEQ ID NO: 916940
caguauguguggcuguaau

SEQ ID NO: 1195915 - RNA, 19 nt, Artificial Sequence
  Description of Artificial Sequence: Synthetic oligonucleotide
  Antisense strand to SEQ ID NO: 1195914
auuacagccacacauacug

SEQ ID NO: 1195916 - RNA, 19 nt, Artificial Sequence
  Description of Artificial Sequence: Synthetic oligonucleotide
  Sense strand starting at position 1069 of SEQ ID NO: 916940
guuucugugucccucuauu

SEQ ID NO: 1195917 - RNA, 19 nt, Artificial Sequence
  Description of Artificial Sequence: Synthetic oligonucleotide
  Antisense strand to SEQ ID NO: 1195916
aauagagggacacagaaac

SEQ ID NO: 1195918 - RNA, 19 nt, Artificial Sequence
  Description of Artificial Sequence: Synthetic oligonucleotide
  Sense strand starting at position 1123 of SEQ ID NO: 916940
ccugcuaguccaggcaaau

SEQ ID NO: 1195919 - RNA, 19 nt, Artificial Sequence
  Description of Artificial Sequence: Synthetic oligonucleotide
  Antisense strand to SEQ ID NO: 1195918
auuugccuggacuagcagg

SEQ ID NO: 1195920 - RNA, 19 nt, Artificial Sequence
  Description of Artificial Sequence: Synthetic oligonucleotide
  Sense strand starting at position 1135 of SEQ ID NO: 916940
ggcaaauacuucuugguga

SEQ ID NO: 1195921 - RNA, 19 nt, Artificial Sequence
  Description of Artificial Sequence: Synthetic oligonucleotide
  Antisense strand to SEQ ID NO: 1195920
ucaccaagaaguauuugcc

SEQ ID NO: 1195922 - RNA, 19 nt, Artificial Sequence
  Description of Artificial Sequence: Synthetic oligonucleotide
  Sense strand starting at position 1136 of SEQ ID NO: 916940
gcaaauacuucuuggugag

SEQ ID NO: 1195923 - RNA, 19 nt, Artificial Sequence
  Description of Artificial Sequence: Synthetic oligonucleotide
  Antisense strand to SEQ ID NO: 1195922
cucaccaagaaguauuugc

SEQ ID NO: 1195924 - RNA, 19 nt, Artificial Sequence
  Description of Artificial Sequence: Synthetic oligonucleotide
  Sense strand starting at position 1137 of SEQ ID NO: 916940
caaauacuucuuggugaga

SEQ ID NO: 1195925 - RNA, 19 nt, Artificial Sequence
  Description of Artificial Sequence: Synthetic oligonucleotide
  Antisense strand to SEQ ID NO: 1195924
ucucaccaagaaguauuug

SEQ ID NO: 1195926 - RNA, 19 nt, Artificial Sequence
  Description of Artificial Sequence: Synthetic oligonucleotide
  Sense strand starting at position 1139 of SEQ ID NO: 916940
aauacuucuuggugagagu

SEQ ID NO: 1195927 - RNA, 19 nt, Artificial Sequence
  Description of Artificial Sequence: Synthetic oligonucleotide
  Antisense strand to SEQ ID NO: 1195926
acucucaccaagaaguauu

SEQ ID NO: 1195928 - RNA, 19 nt, Artificial Sequence
  Description of Artificial Sequence: Synthetic oligonucleotide
  Sense strand starting at position 1140 of SEQ ID NO: 916940
auacuucuuggugagaguu

SEQ ID NO: 1195929 - RNA, 19 nt, Artificial Sequence
  Description of Artificial Sequence: Synthetic oligonucleotide
  Antisense strand to SEQ ID NO: 1195928
aacucucaccaagaaguau

SEQ ID NO: 1195930 - RNA, 19 nt, Artificial Sequence
  Description of Artificial Sequence: Synthetic oligonucleotide
  Sense strand starting at position 1142 of SEQ ID NO: 916940
acuucuuggugagaguuaa

SEQ ID NO: 1195931 - RNA, 19 nt, Artificial Sequence
  Description of Artificial Sequence: Synthetic oligonucleotide
  Antisense strand to SEQ ID NO: 1195930
uuaacucucaccaagaagu

SEQ ID NO: 1195932 - RNA, 19 nt, Artificial Sequence
  Description of Artificial Sequence: Synthetic oligonucleotide
  Sense strand starting at position 1146 of SEQ ID NO: 916940
cuuggugagaguuaaaguc

SEQ ID NO: 1195933 - RNA, 19 nt, Artificial Sequence
  Description of Artificial Sequence: Synthetic oligonucleotide
  Antisense strand to SEQ ID NO: 1195932
gacuuuaacucucaccaag

SEQ ID NO: 1195934 - RNA, 19 nt, Artificial Sequence
  Description of Artificial Sequence: Synthetic oligonucleotide
  Sense strand starting at position 1154 of SEQ ID NO: 916940
gaguuaaaguccuggauuu

SEQ ID NO: 1195935 - RNA, 19 nt, Artificial Sequence
  Description of Artificial Sequence: Synthetic oligonucleotide
  Antisense strand to SEQ ID NO: 1195934
aaauccaggacuuuaacuc

SEQ ID NO: 1195936 - RNA, 19 nt, Artificial Sequence
  Description of Artificial Sequence: Synthetic oligonucleotide
  Sense strand starting at position 1174 of SEQ ID NO: 916940
ccuugcucagaggaguuua

SEQ ID NO: 1195937 - RNA, 19 nt, Artificial Sequence
  Description of Artificial Sequence: Synthetic oligonucleotide
  Antisense strand to SEQ ID NO: 1195936
uaaacuccucugagcaagg

SEQ ID NO: 1195938 - RNA, 19 nt, Artificial Sequence
  Description of Artificial Sequence: Synthetic oligonucleotide
  Sense strand starting at position 1179 of SEQ ID NO: 916940
cucagaggaguuuaugcuu

SEQ ID NO: 1195939 - RNA, 19 nt, Artificial Sequence
  Description of Artificial Sequence: Synthetic oligonucleotide
  Antisense strand to SEQ ID NO: 1195938
aagcauaaacuccucugag

SEQ ID NO: 1195940 - RNA, 19 nt, Artificial Sequence
  Description of Artificial Sequence: Synthetic oligonucleotide
  Sense strand starting at position 1182 of SEQ ID NO: 916940
agaggaguuuaugcuugca

SEQ ID NO: 1195941 - RNA, 19 nt, Artificial Sequence
  Description of Artificial Sequence: Synthetic oligonucleotide
  Antisense strand to SEQ ID NO: 1195940
ugcaagcauaaacuccucu

SEQ ID NO: 1195942 - RNA, 19 nt, Artificial Sequence
  Description of Artificial Sequence: Synthetic oligonucleotide
  Sense strand starting at position 1184 of SEQ ID NO: 916940
aggaguuuaugcuugcauu

SEQ ID NO: 1195943 - RNA, 19 nt, Artificial Sequence
  Description of Artificial Sequence: Synthetic oligonucleotide
  Antisense strand to SEQ ID NO: 1195942
aaugcaagcauaaacuccu

SEQ ID NO: 1195944 - RNA, 19 nt, Artificial Sequence
  Description of Artificial Sequence: Synthetic oligonucleotide
  Sense strand starting at position 1185 of SEQ ID NO: 916940
ggaguuuaugcuugcauuu

SEQ ID NO: 1195945 - RNA, 19 nt, Artificial Sequence
  Description of Artificial Sequence: Synthetic oligonucleotide
  Antisense strand to SEQ ID NO: 1195944
aaaugcaagcauaaacucc

SEQ ID NO: 1195946 - RNA, 19 nt, Artificial Sequence
  Description of Artificial Sequence: Synthetic oligonucleotide
  Sense strand starting at position 2095 of SEQ ID NO: 916940
gagcuauaacugugggaaa

SEQ ID NO: 1195947 - RNA, 19 nt, Artificial Sequence
  Description of Artificial Sequence: Synthetic oligonucleotide
  Antisense strand to SEQ ID NO: 1195946
uuucccacaguuauagcuc

SEQ ID NO: 1195948 - RNA, 19 nt, Artificial Sequence
  Description of Artificial Sequence: Synthetic oligonucleotide
  Sense strand starting at position 2188 of SEQ ID NO: 916940
aacauaaccggcugagaaa

SEQ ID NO: 1195949 - RNA, 19 nt, Artificial Sequence
  Description of Artificial Sequence: Synthetic oligonucleotide
  Antisense strand to SEQ ID NO: 1195948
uuucucagccgguuauguu

SEQ ID NO: 1195950 - RNA, 19 nt, Artificial Sequence
  Description of Artificial Sequence: Synthetic oligonucleotide
  Sense strand starting at position 2200 of SEQ ID NO: 916940
ugagaaaccuccucugcca

SEQ ID NO: 1195951 - RNA, 19 nt, Artificial Sequence
  Description of Artificial Sequence: Synthetic oligonucleotide
  Antisense strand to SEQ ID NO: 1195950
uggcagaggagguuucuca

SEQ ID NO: 1195952 - RNA, 19 nt, Artificial Sequence
  Description of Artificial Sequence: Synthetic oligonucleotide
  Sense strand starting at position 2735 of SEQ ID NO: 916940
ucuccuuugucugcagaag

SEQ ID NO: 1195953 - RNA, 19 nt, Artificial Sequence
  Description of Artificial Sequence: Synthetic oligonucleotide
  Antisense strand to SEQ ID NO: 1195952
cuucugcagacaaaggaga

SEQ ID NO: 1195954 - RNA, 19 nt, Artificial Sequence
  Description of Artificial Sequence: Synthetic oligonucleotide
  Sense strand starting at position 2752 of SEQ ID NO: 916940
aggagauccgaugagucuu

SEQ ID NO: 1195955 - RNA, 19 nt, Artificial Sequence
  Description of Artificial Sequence: Synthetic oligonucleotide
  Antisense strand to SEQ ID NO: 1195954
aagacucaucggaucuccu

SEQ ID NO: 1195956 - RNA, 19 nt, Artificial Sequence
  Description of Artificial Sequence: Synthetic oligonucleotide
  Sense strand starting at position 2760 of SEQ ID NO: 916940
cgaugagucuuggccagca

SEQ ID NO: 1195957 - RNA, 19 nt, Artificial Sequence
  Description of Artificial Sequence: Synthetic oligonucleotide
  Antisense strand to SEQ ID NO: 1195956
ugcuggccaagacucaucg

SEQ ID NO: 1195958 - RNA, 19 nt, Artificial Sequence
  Description of Artificial Sequence: Synthetic oligonucleotide
  Sense strand starting at position 2762 of SEQ ID NO: 916940
augagucuuggccagcagu

SEQ ID NO: 1195959 - RNA, 19 nt, Artificial Sequence
  Description of Artificial Sequence: Synthetic oligonucleotide
  Antisense strand to SEQ ID NO: 1195958
acugcuggccaagacucau

SEQ ID NO: 1195960 - RNA, 19 nt, Artificial Sequence
  Description of Artificial Sequence: Synthetic oligonucleotide
  Sense strand starting at position 2905 of SEQ ID NO: 916940
ggguuucagugagauucca

SEQ ID NO: 1195961 - RNA, 19 nt, Artificial Sequence
  Description of Artificial Sequence: Synthetic oligonucleotide
  Antisense strand to SEQ ID NO: 1195960
uggaaucucacugaaaccc

SEQ ID NO: 1195962 - RNA, 19 nt, Artificial Sequence
  Description of Artificial Sequence: Synthetic oligonucleotide
  Sense strand starting at position 2978 of SEQ ID NO: 916940
gccuguguucugucucuua

SEQ ID NO: 1195963 - RNA, 19 nt, Artificial Sequence
  Description of Artificial Sequence: Synthetic oligonucleotide
  Antisense strand to SEQ ID NO: 1195962
uaagagacagaacacaggc

SEQ ID NO: 1195964 - RNA, 19 nt, Artificial Sequence
  Description of Artificial Sequence: Synthetic oligonucleotide
  Sense strand starting at position 2981 of SEQ ID NO: 916940
uguguucugucucuuacuu

SEQ ID NO: 1195965 - RNA, 19 nt, Artificial Sequence
  Description of Artificial Sequence: Synthetic oligonucleotide
  Antisense strand to SEQ ID NO: 1195964
aaguaagagacagaacaca

SEQ ID NO: 1195966 - RNA, 19 nt, Artificial Sequence
  Description of Artificial Sequence: Synthetic oligonucleotide
  Sense strand starting at position 2988 of SEQ ID NO: 916940
ugucucuuacuugaucuau

SEQ ID NO: 1195967 - RNA, 19 nt, Artificial Sequence
  Description of Artificial Sequence: Synthetic oligonucleotide
  Antisense strand to SEQ ID NO: 1195966
auagaucaaguaagagaca

SEQ ID NO: 1195968 - RNA, 19 nt, Artificial Sequence
  Description of Artificial Sequence: Synthetic oligonucleotide
  Sense strand starting at position 3105 of SEQ ID NO: 916940
agggaucuuugggcuguaa

SEQ ID NO: 1195969 - RNA, 19 nt, Artificial Sequence
  Description of Artificial Sequence: Synthetic oligonucleotide
  Antisense strand to SEQ ID NO: 1195968
uuacagcccaaagaucccu

SEQ ID NO: 1195970 - RNA, 19 nt, Artificial Sequence
  Description of Artificial Sequence: Synthetic oligonucleotide
  Sense strand starting at position 3107 of SEQ ID NO: 916940
ggaucuuugggcuguaaua

SEQ ID NO: 1195971 - RNA, 19 nt, Artificial Sequence
  Description of Artificial Sequence: Synthetic oligonucleotide
  Antisense strand to SEQ ID NO: 1195970
uauuacagcccaaagaucc

SEQ ID NO: 1195972 - RNA, 19 nt, Artificial Sequence
  Description of Artificial Sequence: Synthetic oligonucleotide
  Sense strand starting at position 3291 of SEQ ID NO: 916940
ucccuaauccuaggagcuu

SEQ ID NO: 1195973 - RNA, 19 nt, Artificial Sequence
  Description of Artificial Sequence: Synthetic oligonucleotide
  Antisense strand to SEQ ID NO: 1195972
aagcuccuaggauuaggga

SEQ ID NO: 1195974 - RNA, 19 nt, Artificial Sequence
  Description of Artificial Sequence: Synthetic oligonucleotide
  Sense strand starting at position 3292 of SEQ ID NO: 916940
cccuaauccuaggagcuuu

SEQ ID NO: 1195975 - RNA, 19 nt, Artificial Sequence
  Description of Artificial Sequence: Synthetic oligonucleotide
  Antisense strand to SEQ ID NO: 1195974
aaagcuccuaggauuaggg

SEQ ID NO: 1195976 - RNA, 19 nt, Artificial Sequence
  Description of Artificial Sequence: Synthetic oligonucleotide
  Sense strand starting at position 3303 of SEQ ID NO: 916940
ggagcuuucugucuggcuu

SEQ ID NO: 1195977 - RNA, 19 nt, Artificial Sequence
  Description of Artificial Sequence: Synthetic oligonucleotide
  Antisense strand to SEQ ID NO: 1195976
aagccagacagaaagcucc

SEQ ID NO: 1195978 - RNA, 19 nt, Artificial Sequence
  Description of Artificial Sequence: Synthetic oligonucleotide
  Sense strand starting at position 3460 of SEQ ID NO: 916940
ccuccagcaucucuggaaa

SEQ ID NO: 1195979 - RNA, 19 nt, Artificial Sequence
  Description of Artificial Sequence: Synthetic oligonucleotide
  Antisense strand to SEQ ID NO: 1195978
uuuccagagaugcuggagg

SEQ ID NO: 1195980 - RNA, 19 nt, Artificial Sequence
  Description of Artificial Sequence: Synthetic oligonucleotide
  Sense strand starting at position 3628 of SEQ ID NO: 916940
cgugauggcacagagaguu

SEQ ID NO: 1195981 - RNA, 19 nt, Artificial Sequence
  Description of Artificial Sequence: Synthetic oligonucleotide
  Antisense strand to SEQ ID NO: 1195980
aacucucugugccaucacg

SEQ ID NO: 1195982 - RNA, 19 nt, Artificial Sequence
  Description of Artificial Sequence: Synthetic oligonucleotide
  Sense strand starting at position 3636 of SEQ ID NO: 916940
cacagagaguugccuggaa

SEQ ID NO: 1195983 - RNA, 19 nt, Artificial Sequence
  Description of Artificial Sequence: Synthetic oligonucleotide
  Antisense strand to SEQ ID NO: 1195982
uuccaggcaacucucugug

SEQ ID NO: 1195984 - RNA, 19 nt, Artificial Sequence
  Description of Artificial Sequence: Synthetic oligonucleotide
  Sense strand starting at position 3638 of SEQ ID NO: 916940
cagagaguugccuggaacu

SEQ ID NO: 1195985 - RNA, 19 nt, Artificial Sequence
  Description of Artificial Sequence: Synthetic oligonucleotide
  Antisense strand to SEQ ID NO: 1195984
aguuccaggcaacucucug

SEQ ID NO: 1195986 - RNA, 19 nt, Artificial Sequence
  Description of Artificial Sequence: Synthetic oligonucleotide
  Sense strand starting at position 3640 of SEQ ID NO: 916940
gagaguugccuggaacuua

SEQ ID NO: 1195987 - RNA, 19 nt, Artificial Sequence
  Description of Artificial Sequence: Synthetic oligonucleotide
  Antisense strand to SEQ ID NO: 1195986
uaaguuccaggcaacucuc

SEQ ID NO: 1195988 - RNA, 19 nt, Artificial Sequence
  Description of Artificial Sequence: Synthetic oligonucleotide
  Sense strand starting at position 40 of SEQ ID NO: 916941
ucacuaauugcuggaagga

SEQ ID NO: 1195989 - RNA, 19 nt, Artificial Sequence
  Description of Artificial Sequence: Synthetic oligonucleotide
  Antisense strand to SEQ ID NO: 1195988
uccuuccagcaauuaguga

SEQ ID NO: 1195990 - RNA, 19 nt, Artificial Sequence
  Description of Artificial Sequence: Synthetic oligonucleotide
  Sense strand starting at position 86 of SEQ ID NO: 916941
agaauuaagccaugccaag

SEQ ID NO: 1195991 - RNA, 19 nt, Artificial Sequence
  Description of Artificial Sequence: Synthetic oligonucleotide
  Antisense strand to SEQ ID NO: 1195990
cuuggcauggcuuaauucu

SEQ ID NO: 1195992 - RNA, 19 nt, Artificial Sequence
  Description of Artificial Sequence: Synthetic oligonucleotide
  Sense strand starting at position 131 of SEQ ID NO: 916941
gguggacuucugagcgcaa

SEQ ID NO: 1195993 - RNA, 19 nt, Artificial Sequence
  Description of Artificial Sequence: Synthetic oligonucleotide
  Antisense strand to SEQ ID NO: 1195992
uugcgcucagaaguccacc

SEQ ID NO: 1195994 - RNA, 19 nt, Artificial Sequence
  Description of Artificial Sequence: Synthetic oligonucleotide
  Sense strand starting at position 132 of SEQ ID NO: 916941
guggacuucugagcgcaaa

SEQ ID NO: 1195995 - RNA, 19 nt, Artificial Sequence
  Description of Artificial Sequence: Synthetic oligonucleotide
  Antisense strand to SEQ ID NO: 1195994
uuugcgcucagaaguccac

SEQ ID NO: 1195996 - RNA, 19 nt, Artificial Sequence
  Description of Artificial Sequence: Synthetic oligonucleotide
  Sense strand starting at position 133 of SEQ ID NO: 916941
uggacuucugagcgcaaau

SEQ ID NO: 1195997 - RNA, 19 nt, Artificial Sequence
  Description of Artificial Sequence: Synthetic oligonucleotide
  Antisense strand to SEQ ID NO: 1195996
auuugcgcucagaagucca

SEQ ID NO: 1195998 - RNA, 19 nt, Artificial Sequence
  Description of Artificial Sequence: Synthetic oligonucleotide
  Sense strand starting at position 142 of SEQ ID NO: 916941
gagcgcaaaugcuuuaauu

SEQ ID NO: 1195999 - RNA, 19 nt, Artificial Sequence
  Description of Artificial Sequence: Synthetic oligonucleotide
  Antisense strand to SEQ ID NO: 1195998
aauuaaagcauuugcgcuc

SEQ ID NO: 1196000 - RNA, 19 nt, Artificial Sequence
  Description of Artificial Sequence: Synthetic oligonucleotide
  Sense strand starting at position 144 of SEQ ID NO: 916941
gcgcaaaugcuuuaauuuc

SEQ ID NO: 1196001 - RNA, 19 nt, Artificial Sequence
  Description of Artificial Sequence: Synthetic oligonucleotide
  Antisense strand to SEQ ID NO: 1196000
gaaauuaaagcauuugcgc

SEQ ID NO: 1196002 - RNA, 19 nt, Artificial Sequence
  Description of Artificial Sequence: Synthetic oligonucleotide
  Sense strand starting at position 215 of SEQ ID NO: 916941
gaggguaggcucuggagua

SEQ ID NO: 1196003 - RNA, 19 nt, Artificial Sequence
  Description of Artificial Sequence: Synthetic oligonucleotide
  Antisense strand to SEQ ID NO: 1196002
uacuccagagccuacccuc

SEQ ID NO: 1196004 - RNA, 19 nt, Artificial Sequence
  Description of Artificial Sequence: Synthetic oligonucleotide
  Sense strand starting at position 369 of SEQ ID NO: 916941
auugguuagacugagguuu

SEQ ID NO: 1196005 - RNA, 19 nt, Artificial Sequence
  Description of Artificial Sequence: Synthetic oligonucleotide
  Antisense strand to SEQ ID NO: 1196004
aaaccucagucuaaccaau

SEQ ID NO: 1196006 - RNA, 19 nt, Artificial Sequence
  Description of Artificial Sequence: Synthetic oligonucleotide
  Sense strand starting at position 515 of SEQ ID NO: 916941
gccagaucacugugggagu

SEQ ID NO: 1196007 - RNA, 19 nt, Artificial Sequence
  Description of Artificial Sequence: Synthetic oligonucleotide
  Antisense strand to SEQ ID NO: 1196006
acucccacagugaucuggc

SEQ ID NO: 1196008 - RNA, 19 nt, Artificial Sequence
  Description of Artificial Sequence: Synthetic oligonucleotide
  Sense strand starting at position 632 of SEQ ID NO: 916941
cucacuggccuuggagaaa

SEQ ID NO: 1196009 - RNA, 19 nt, Artificial Sequence
  Description of Artificial Sequence: Synthetic oligonucleotide
  Antisense strand to SEQ ID NO: 1196008
uuucuccaaggccagugag

SEQ ID NO: 1196010 - RNA, 19 nt, Artificial Sequence
  Description of Artificial Sequence: Synthetic oligonucleotide
  Sense strand starting at position 1103 of SEQ ID NO: 916941
ggaagaaugcauugcuccu

SEQ ID NO: 1196011 - RNA, 19 nt, Artificial Sequence
  Description of Artificial Sequence: Synthetic oligonucleotide
  Antisense strand to SEQ ID NO: 1196010
aggagcaaugcauucuucc

SEQ ID NO: 1196012 - RNA, 19 nt, Artificial Sequence
  Description of Artificial Sequence: Synthetic oligonucleotide
  Sense strand starting at position 2033 of SEQ ID NO: 916941
gucauugguuacucccauu

SEQ ID NO: 1196013 - RNA, 19 nt, Artificial Sequence
  Description of Artificial Sequence: Synthetic oligonucleotide
  Antisense strand to SEQ ID NO: 1196012
aaugggaguaaccaaugac

SEQ ID NO: 1196014 - RNA, 19 nt, Artificial Sequence
  Description of Artificial Sequence: Synthetic oligonucleotide
  Sense strand starting at position 2039 of SEQ ID NO: 916941
gguuacucccauugcgauu

SEQ ID NO: 1196015 - RNA, 19 nt, Artificial Sequence
  Description of Artificial Sequence: Synthetic oligonucleotide
  Antisense strand to SEQ ID NO: 1196014
aaucgcaaugggaguaacc

SEQ ID NO: 1196016 - RNA, 19 nt, Artificial Sequence
  Description of Artificial Sequence: Synthetic oligonucleotide
  Sense strand starting at position 2072 of SEQ ID NO: 916941
cacugagauugguuacuuc

SEQ ID NO: 1196017 - RNA, 19 nt, Artificial Sequence
  Description of Artificial Sequence: Synthetic oligonucleotide
  Antisense strand to SEQ ID NO: 1196016
gaaguaaccaaucucagug

SEQ ID NO: 1196018 - RNA, 19 nt, Artificial Sequence
  Description of Artificial Sequence: Synthetic oligonucleotide
  Sense strand starting at position 2076 of SEQ ID NO: 916941
gagauugguuacuucgacu

SEQ ID NO: 1196019 - RNA, 19 nt, Artificial Sequence
  Description of Artificial Sequence: Synthetic oligonucleotide
  Antisense strand to SEQ ID NO: 1196018
agucgaaguaaccaaucuc

SEQ ID NO: 1196020 - RNA, 19 nt, Artificial Sequence
  Description of Artificial Sequence: Synthetic oligonucleotide
  Sense strand starting at position 2156 of SEQ ID NO: 916941
uugugauugguccggagag

SEQ ID NO: 1196021 - RNA, 19 nt, Artificial Sequence
  Description of Artificial Sequence: Synthetic oligonucleotide
  Antisense strand to SEQ ID NO: 1196020
cucuccggaccaaucacaa

SEQ ID NO: 1196022 - RNA, 19 nt, Artificial Sequence
  Description of Artificial Sequence: Synthetic oligonucleotide
  Sense strand starting at position 2417 of SEQ ID NO: 916941
uuagaaccgcucuagugaa

SEQ ID NO: 1196023 - RNA, 19 nt, Artificial Sequence
  Description of Artificial Sequence: Synthetic oligonucleotide
  Antisense strand to SEQ ID NO: 1196022
uucacuagagcgguucuaa

SEQ ID NO: 1196024 - RNA, 19 nt, Artificial Sequence
  Description of Artificial Sequence: Synthetic oligonucleotide
  Sense strand starting at position 2440 of SEQ ID NO: 916941
ucuuuaacuggcgaggaaa

SEQ ID NO: 1196025 - RNA, 19 nt, Artificial Sequence
  Description of Artificial Sequence: Synthetic oligonucleotide
  Antisense strand to SEQ ID NO: 1196024
uuuccucgccaguuaaaga

SEQ ID NO: 1196026 - RNA, 19 nt, Artificial Sequence
  Description of Artificial Sequence: Synthetic oligonucleotide
  Sense strand starting at position 2470 of SEQ ID NO: 916941
ugauaaucaggcuguaaug

SEQ ID NO: 1196027 - RNA, 19 nt, Artificial Sequence
  Description of Artificial Sequence: Synthetic oligonucleotide
  Antisense strand to SEQ ID NO: 1196026
cauuacagccugauuauca

SEQ ID NO: 1196028 - RNA, 19 nt, Artificial Sequence
  Description of Artificial Sequence: Synthetic oligonucleotide
  Sense strand starting at position 2552 of SEQ ID NO: 916941
gggucucucagcugaagag

SEQ ID NO: 1196029 - RNA, 19 nt, Artificial Sequence
  Description of Artificial Sequence: Synthetic oligonucleotide
  Antisense strand to SEQ ID NO: 1196028
cucuucagcugagagaccc

SEQ ID NO: 1196030 - RNA, 19 nt, Artificial Sequence
  Description of Artificial Sequence: Synthetic oligonucleotide
  Sense strand starting at position 2553 of SEQ ID NO: 916941
ggucucucagcugaagaga

SEQ ID NO: 1196031 - RNA, 19 nt, Artificial Sequence
  Description of Artificial Sequence: Synthetic oligonucleotide
  Antisense strand to SEQ ID NO: 1196030
ucucuucagcugagagacc

SEQ ID NO: 1196032 - RNA, 19 nt, Artificial Sequence
  Description of Artificial Sequence: Synthetic oligonucleotide
  Sense strand starting at position 2588 of SEQ ID NO: 916941
gccgccuaagauuaaucaa

SEQ ID NO: 1196033 - RNA, 19 nt, Artificial Sequence
  Description of Artificial Sequence: Synthetic oligonucleotide
  Antisense strand to SEQ ID NO: 1196032
uugauuaaucuuaggcggc

SEQ ID NO: 1196034 - RNA, 19 nt, Artificial Sequence
  Description of Artificial Sequence: Synthetic oligonucleotide
  Sense strand starting at position 2591 of SEQ ID NO: 916941
gccuaagauuaaucaacug

SEQ ID NO: 1196035 - RNA, 19 nt, Artificial Sequence
  Description of Artificial Sequence: Synthetic oligonucleotide
  Antisense strand to SEQ ID NO: 1196034
caguugauuaaucuuaggc

SEQ ID NO: 1196036 - RNA, 19 nt, Artificial Sequence
  Description of Artificial Sequence: Synthetic oligonucleotide
  Sense strand starting at position 2605 of SEQ ID NO: 916941
aacugaucuggguguugag

SEQ ID NO: 1196037 - RNA, 19 nt, Artificial Sequence
  Description of Artificial Sequence: Synthetic oligonucleotide
  Antisense strand to SEQ ID NO: 1196036
cucaacacccagaucaguu

SEQ ID NO: 1196038 - RNA, 19 nt, Artificial Sequence
  Description of Artificial Sequence: Synthetic oligonucleotide
  Sense strand starting at position 2622 of SEQ ID NO: 916941
agcagacgcgcauuguuua

SEQ ID NO: 1196039 - RNA, 19 nt, Artificial Sequence
  Description of Artificial Sequence: Synthetic oligonucleotide
  Antisense strand to SEQ ID NO: 1196038
uaaacaaugcgcgucugcu

SEQ ID NO: 1196040 - RNA, 19 nt, Artificial Sequence
  Description of Artificial Sequence: Synthetic oligonucleotide
  Sense strand starting at position 2695 of SEQ ID NO: 916941
gaaaucuugugaccuugga

SEQ ID NO: 1196041 - RNA, 19 nt, Artificial Sequence
  Description of Artificial Sequence: Synthetic oligonucleotide
  Antisense strand to SEQ ID NO: 1196040
uccaaggucacaagauuuc

SEQ ID NO: 1196042 - RNA, 19 nt, Artificial Sequence
  Description of Artificial Sequence: Synthetic oligonucleotide
  Sense strand starting at position 2699 of SEQ ID NO: 916941
ucuugugaccuuggagaga

SEQ ID NO: 1196043 - RNA, 19 nt, Artificial Sequence
  Description of Artificial Sequence: Synthetic oligonucleotide
  Antisense strand to SEQ ID NO: 1196042
ucucuccaaggucacaaga

SEQ ID NO: 1196044 - RNA, 19 nt, Artificial Sequence
  Description of Artificial Sequence: Synthetic oligonucleotide
  Sense strand starting at position 2749 of SEQ ID NO: 916941
gguucuaaugaguguucug

SEQ ID NO: 1196045 - RNA, 19 nt, Artificial Sequence
  Description of Artificial Sequence: Synthetic oligonucleotide
  Antisense strand to SEQ ID NO: 1196044
cagaacacucauuagaacc

SEQ ID NO: 1196046 - RNA, 19 nt, Artificial Sequence
  Description of Artificial Sequence: Synthetic oligonucleotide
  Sense strand starting at position 2752 of SEQ ID NO: 916941
ucuaaugaguguucugaga

SEQ ID NO: 1196047 - RNA, 19 nt, Artificial Sequence
  Description of Artificial Sequence: Synthetic oligonucleotide
  Antisense strand to SEQ ID NO: 1196046
ucucagaacacucauuaga

SEQ ID NO: 1196048 - RNA, 19 nt, Artificial Sequence
  Description of Artificial Sequence: Synthetic oligonucleotide
  Sense strand starting at position 2774 of SEQ ID NO: 916941
ggucaagaaagaugucuua

SEQ ID NO: 1196049 - RNA, 19 nt, Artificial Sequence
  Description of Artificial Sequence: Synthetic oligonucleotide
  Antisense strand to SEQ ID NO: 1196048
uaagacaucuuucuugacc

SEQ ID NO: 1196050 - RNA, 19 nt, Artificial Sequence
  Description of Artificial Sequence: Synthetic oligonucleotide
  Sense strand starting at position 2873 of SEQ ID NO: 916941
ccuagagccgagugaauuc

SEQ ID NO: 1196051 - RNA, 19 nt, Artificial Sequence
  Description of Artificial Sequence: Synthetic oligonucleotide
  Antisense strand to SEQ ID NO: 1196050
gaauucacucggcucuagg

SEQ ID NO: 1196052 - RNA, 19 nt, Artificial Sequence
  Description of Artificial Sequence: Synthetic oligonucleotide
  Sense strand starting at position 2884 of SEQ ID NO: 916941
gugaauuccaaguggguga

SEQ ID NO: 1196053 - RNA, 19 nt, Artificial Sequence
  Description of Artificial Sequence: Synthetic oligonucleotide
  Antisense strand to SEQ ID NO: 1196052
ucacccacuuggaauucac

SEQ ID NO: 1196054 - RNA, 19 nt, Artificial Sequence
  Description of Artificial Sequence: Synthetic oligonucleotide
  Sense strand starting at position 2897 of SEQ ID NO: 916941
gggugaaauuggagugagu

SEQ ID NO: 1196055 - RNA, 19 nt, Artificial Sequence
  Description of Artificial Sequence: Synthetic oligonucleotide
  Antisense strand to SEQ ID NO: 1196054
acucacuccaauuucaccc

SEQ ID NO: 1196056 - RNA, 19 nt, Artificial Sequence
  Description of Artificial Sequence: Synthetic oligonucleotide
  Sense strand starting at position 2939 of SEQ ID NO: 916941
cuggcaagaucgguaugau

SEQ ID NO: 1196057 - RNA, 19 nt, Artificial Sequence
  Description of Artificial Sequence: Synthetic oligonucleotide
  Antisense strand to SEQ ID NO: 1196056
aucauaccgaucuugccag

SEQ ID NO: 1196058 - RNA, 19 nt, Artificial Sequence
  Description of Artificial Sequence: Synthetic oligonucleotide
  Sense strand starting at position 2940 of SEQ ID NO: 916941
uggcaagaucgguaugaua

SEQ ID NO: 1196059 - RNA, 19 nt, Artificial Sequence
  Description of Artificial Sequence: Synthetic oligonucleotide
  Antisense strand to SEQ ID NO: 1196058
uaucauaccgaucuugcca

SEQ ID NO: 1196060 - RNA, 19 nt, Artificial Sequence
  Description of Artificial Sequence: Synthetic oligonucleotide
  Sense strand starting at position 2942 of SEQ ID NO: 916941
gcaagaucgguaugauagg

SEQ ID NO: 1196061 - RNA, 19 nt, Artificial Sequence
  Description of Artificial Sequence: Synthetic oligonucleotide
  Antisense strand to SEQ ID NO: 1196060
ccuaucauaccgaucuugc

SEQ ID NO: 1196062 - RNA, 19 nt, Artificial Sequence
  Description of Artificial Sequence: Synthetic oligonucleotide
  Sense strand starting at position 3001 of SEQ ID NO: 916941
ugcucucuccgauguagaa

SEQ ID NO: 1196063 - RNA, 19 nt, Artificial Sequence
  Description of Artificial Sequence: Synthetic oligonucleotide
  Antisense strand to SEQ ID NO: 1196062
uucuacaucggagagagca

SEQ ID NO: 1196064 - RNA, 19 nt, Artificial Sequence
  Description of Artificial Sequence: Synthetic oligonucleotide
  Sense strand starting at position 3023 of SEQ ID NO: 916941
agucuauaagacgggucau

SEQ ID NO: 1196065 - RNA, 19 nt, Artificial Sequence
  Description of Artificial Sequence: Synthetic oligonucleotide
  Antisense strand to SEQ ID NO: 1196064
augacccgucuuauagacu

SEQ ID NO: 1196066 - RNA, 19 nt, Artificial Sequence
  Description of Artificial Sequence: Synthetic oligonucleotide
  Sense strand starting at position 3024 of SEQ ID NO: 916941
gucuauaagacgggucaua

SEQ ID NO: 1196067 - RNA, 19 nt, Artificial Sequence
  Description of Artificial Sequence: Synthetic oligonucleotide
  Antisense strand to SEQ ID NO: 1196066
uaugacccgucuuauagac

SEQ ID NO: 1196068 - RNA, 19 nt, Artificial Sequence
  Description of Artificial Sequence: Synthetic oligonucleotide
  Sense strand starting at position 73 of SEQ ID NO: 916942
aagagagucucagagaaga

SEQ ID NO: 1196069 - RNA, 19 nt, Artificial Sequence
  Description of Artificial Sequence: Synthetic oligonucleotide
  Antisense strand to SEQ ID NO: 1196068
ucuucucugagacucucuu

SEQ ID NO: 1196070 - RNA, 19 nt, Artificial Sequence
  Description of Artificial Sequence: Synthetic oligonucleotide
  Sense strand starting at position 86 of SEQ ID NO: 916942
agaagaggguaucuuugua

SEQ ID NO: 1196071 - RNA, 19 nt, Artificial Sequence
  Description of Artificial Sequence: Synthetic oligonucleotide
  Antisense strand to SEQ ID NO: 1196070
uacaaagauacccucuucu

SEQ ID NO: 1196072 - RNA, 19 nt, Artificial Sequence
  Description of Artificial Sequence: Synthetic oligonucleotide
  Sense strand starting at position 90 of SEQ ID NO: 916942
gaggguaucuuuguaccca

SEQ ID NO: 1196073 - RNA, 19 nt, Artificial Sequence
  Description of Artificial Sequence: Synthetic oligonucleotide
  Antisense strand to SEQ ID NO: 1196072
uggguacaaagauacccuc

SEQ ID NO: 1196074 - RNA, 19 nt, Artificial Sequence
  Description of Artificial Sequence: Synthetic oligonucleotide
  Sense strand starting at position 94 of SEQ ID NO: 916942
guaucuuuguacccaagaa

SEQ ID NO: 1196075 - RNA, 19 nt, Artificial Sequence
  Description of Artificial Sequence: Synthetic oligonucleotide
  Antisense strand to SEQ ID NO: 1196074
uucuuggguacaaagauac

SEQ ID NO: 1196076 - RNA, 19 nt, Artificial Sequence
  Description of Artificial Sequence: Synthetic oligonucleotide
  Sense strand starting at position 712 of SEQ ID NO: 916942
ucacuaauugcuggaagga

SEQ ID NO: 1196077 - RNA, 19 nt, Artificial Sequence
  Description of Artificial Sequence: Synthetic oligonucleotide
  Antisense strand to SEQ ID NO: 1196076
uccuuccagcaauuaguga

SEQ ID NO: 1196078 - RNA, 19 nt, Artificial Sequence
  Description of Artificial Sequence: Synthetic oligonucleotide
  Sense strand starting at position 758 of SEQ ID NO: 916942
agaauuaagccaugccaag

SEQ ID NO: 1196079 - RNA, 19 nt, Artificial Sequence
  Description of Artificial Sequence: Synthetic oligonucleotide
  Antisense strand to SEQ ID NO: 1196078
cuuggcauggcuuaauucu

SEQ ID NO: 1196080 - RNA, 19 nt, Artificial Sequence
  Description of Artificial Sequence: Synthetic oligonucleotide
  Sense strand starting at position 803 of SEQ ID NO: 916942
gguggacuucugagcgcaa

SEQ ID NO: 1196081 - RNA, 19 nt, Artificial Sequence
  Description of Artificial Sequence: Synthetic oligonucleotide
  Antisense strand to SEQ ID NO: 1196080
uugcgcucagaaguccacc

SEQ ID NO: 1196082 - RNA, 19 nt, Artificial Sequence
  Description of Artificial Sequence: Synthetic oligonucleotide
  Sense strand starting at position 805 of SEQ ID NO: 916942
uggacuucugagcgcaaau

SEQ ID NO: 1196083 - RNA, 19 nt, Artificial Sequence
  Description of Artificial Sequence: Synthetic oligonucleotide
  Antisense strand to SEQ ID NO: 1196082
auuugcgcucagaagucca

SEQ ID NO: 1196084 - RNA, 19 nt, Artificial Sequence
  Description of Artificial Sequence: Synthetic oligonucleotide
  Sense strand starting at position 816 of SEQ ID NO: 916942
gcgcaaaugcuuuaauuuc

SEQ ID NO: 1196085 - RNA, 19 nt, Artificial Sequence
  Description of Artificial Sequence: Synthetic oligonucleotide
  Antisense strand to SEQ ID NO: 1196084
gaaauuaaagcauuugcgc

SEQ ID NO: 1196086 - RNA, 19 nt, Artificial Sequence
  Description of Artificial Sequence: Synthetic oligonucleotide
  Sense strand starting at position 887 of SEQ ID NO: 916942
gaggguaggcucuggagua

SEQ ID NO: 1196087 - RNA, 19 nt, Artificial Sequence
  Description of Artificial Sequence: Synthetic oligonucleotide
  Antisense strand to SEQ ID NO: 1196086
uacuccagagccuacccuc

SEQ ID NO: 1196088 - RNA, 19 nt, Artificial Sequence
  Description of Artificial Sequence: Synthetic oligonucleotide
  Sense strand starting at position 1041 of SEQ ID NO: 916942
auugguuagacugagguuu

SEQ ID NO: 1196089 - RNA, 19 nt, Artificial Sequence
  Description of Artificial Sequence: Synthetic oligonucleotide
  Antisense strand to SEQ ID NO: 1196088
aaaccucagucuaaccaau

SEQ ID NO: 1196090 - RNA, 19 nt, Artificial Sequence
  Description of Artificial Sequence: Synthetic oligonucleotide
  Sense strand starting at position 1187 of SEQ ID NO: 916942
gccagaucacugugggagu

SEQ ID NO: 1196091 - RNA, 19 nt, Artificial Sequence
  Description of Artificial Sequence: Synthetic oligonucleotide
  Antisense strand to SEQ ID NO: 1196090
acucccacagugaucuggc

SEQ ID NO: 1196092 - RNA, 19 nt, Artificial Sequence
  Description of Artificial Sequence: Synthetic oligonucleotide
  Sense strand starting at position 1304 of SEQ ID NO: 916942
cucacuggccuuggagaaa

SEQ ID NO: 1196093 - RNA, 19 nt, Artificial Sequence
  Description of Artificial Sequence: Synthetic oligonucleotide
  Antisense strand to SEQ ID NO: 1196092
uuucuccaaggccagugag

SEQ ID NO: 1196094 - RNA, 19 nt, Artificial Sequence
  Description of Artificial Sequence: Synthetic oligonucleotide
  Sense strand starting at position 1775 of SEQ ID NO: 916942
ggaagaaugcauugcuccu

SEQ ID NO: 1196095 - RNA, 19 nt, Artificial Sequence
  Description of Artificial Sequence: Synthetic oligonucleotide
  Antisense strand to SEQ ID NO: 1196094
aggagcaaugcauucuucc

SEQ ID NO: 1196096 - RNA, 19 nt, Artificial Sequence
  Description of Artificial Sequence: Synthetic oligonucleotide
  Sense strand starting at position 2705 of SEQ ID NO: 916942
gucauugguuacucccauu

SEQ ID NO: 1196097 - RNA, 19 nt, Artificial Sequence
  Description of Artificial Sequence: Synthetic oligonucleotide
  Antisense strand to SEQ ID NO: 1196096
aaugggaguaaccaaugac

SEQ ID NO: 1196098 - RNA, 19 nt, Artificial Sequence
  Description of Artificial Sequence: Synthetic oligonucleotide
  Sense strand starting at position 2744 of SEQ ID NO: 916942
cacugagauugguuacuuc

SEQ ID NO: 1196099 - RNA, 19 nt, Artificial Sequence
  Description of Artificial Sequence: Synthetic oligonucleotide
  Antisense strand to SEQ ID NO: 1196098
gaaguaaccaaucucagug

SEQ ID NO: 1196100 - RNA, 19 nt, Artificial Sequence
  Description of Artificial Sequence: Synthetic oligonucleotide
  Sense strand starting at position 2748 of SEQ ID NO: 916942
gagauugguuacuucgacu

SEQ ID NO: 1196101 - RNA, 19 nt, Artificial Sequence
  Description of Artificial Sequence: Synthetic oligonucleotide
  Antisense strand to SEQ ID NO: 1196100
agucgaaguaaccaaucuc

SEQ ID NO: 1196102 - RNA, 19 nt, Artificial Sequence
  Description of Artificial Sequence: Synthetic oligonucleotide
  Sense strand starting at position 2828 of SEQ ID NO: 916942
uugugauugguccggagag

SEQ ID NO: 1196103 - RNA, 19 nt, Artificial Sequence
  Description of Artificial Sequence: Synthetic oligonucleotide
  Antisense strand to SEQ ID NO: 1196102
cucuccggaccaaucacaa

SEQ ID NO: 1196104 - RNA, 19 nt, Artificial Sequence
  Description of Artificial Sequence: Synthetic oligonucleotide
  Sense strand starting at position 3089 of SEQ ID NO: 916942
uuagaaccgcucuagugaa

SEQ ID NO: 1196105 - RNA, 19 nt, Artificial Sequence
  Description of Artificial Sequence: Synthetic oligonucleotide
  Antisense strand to SEQ ID NO: 1196104
uucacuagagcgguucuaa

SEQ ID NO: 1196106 - RNA, 19 nt, Artificial Sequence
  Description of Artificial Sequence: Synthetic oligonucleotide
  Sense strand starting at position 3112 of SEQ ID NO: 916942
ucuuuaacuggcgaggaaa

SEQ ID NO: 1196107 - RNA, 19 nt, Artificial Sequence
  Description of Artificial Sequence: Synthetic oligonucleotide
  Antisense strand to SEQ ID NO: 1196106
uuuccucgccaguuaaaga

SEQ ID NO: 1196108 - RNA, 19 nt, Artificial Sequence
  Description of Artificial Sequence: Synthetic oligonucleotide
  Sense strand starting at position 3142 of SEQ ID NO: 916942
ugauaaucaggcuguaaug

SEQ ID NO: 1196109 - RNA, 19 nt, Artificial Sequence
  Description of Artificial Sequence: Synthetic oligonucleotide
  Antisense strand to SEQ ID NO: 1196108
cauuacagccugauuauca

SEQ ID NO: 1196110 - RNA, 19 nt, Artificial Sequence
  Description of Artificial Sequence: Synthetic oligonucleotide
  Sense strand starting at position 3224 of SEQ ID NO: 916942
gggucucucagcugaagag

SEQ ID NO: 1196111 - RNA, 19 nt, Artificial Sequence
  Description of Artificial Sequence: Synthetic oligonucleotide
  Antisense strand to SEQ ID NO: 1196110
cucuucagcugagagaccc

SEQ ID NO: 1196112 - RNA, 19 nt, Artificial Sequence
  Description of Artificial Sequence: Synthetic oligonucleotide
  Sense strand starting at position 3225 of SEQ ID NO: 916942
ggucucucagcugaagaga

SEQ ID NO: 1196113 - RNA, 19 nt, Artificial Sequence
  Description of Artificial Sequence: Synthetic oligonucleotide
  Antisense strand to SEQ ID NO: 1196112
ucucuucagcugagagacc

SEQ ID NO: 1196114 - RNA, 19 nt, Artificial Sequence
  Description of Artificial Sequence: Synthetic oligonucleotide
  Sense strand starting at position 3260 of SEQ ID NO: 916942
gccgccuaagauuaaucaa

SEQ ID NO: 1196115 - RNA, 19 nt, Artificial Sequence
  Description of Artificial Sequence: Synthetic oligonucleotide
  Antisense strand to SEQ ID NO: 1196114
uugauuaaucuuaggcggc

SEQ ID NO: 1196116 - RNA, 19 nt, Artificial Sequence
  Description of Artificial Sequence: Synthetic oligonucleotide
  Sense strand starting at position 3263 of SEQ ID NO: 916942
gccuaagauuaaucaacug

SEQ ID NO: 1196117 - RNA, 19 nt, Artificial Sequence
  Description of Artificial Sequence: Synthetic oligonucleotide
  Antisense strand to SEQ ID NO: 1196116
caguugauuaaucuuaggc

SEQ ID NO: 1196118 - RNA, 19 nt, Artificial Sequence
  Description of Artificial Sequence: Synthetic oligonucleotide
  Sense strand starting at position 3277 of SEQ ID NO: 916942
aacugaucuggguguugag

SEQ ID NO: 1196119 - RNA, 19 nt, Artificial Sequence
  Description of Artificial Sequence: Synthetic oligonucleotide
  Antisense strand to SEQ ID NO: 1196118
cucaacacccagaucaguu

SEQ ID NO: 1196120 - RNA, 19 nt, Artificial Sequence
  Description of Artificial Sequence: Synthetic oligonucleotide
  Sense strand starting at position 3294 of SEQ ID NO: 916942
agcagacgcgcauuguuua

SEQ ID NO: 1196121 - RNA, 19 nt, Artificial Sequence
  Description of Artificial Sequence: Synthetic oligonucleotide
  Antisense strand to SEQ ID NO: 1196120
uaaacaaugcgcgucugcu

SEQ ID NO: 1196122 - RNA, 19 nt, Artificial Sequence
  Description of Artificial Sequence: Synthetic oligonucleotide
  Sense strand starting at position 3367 of SEQ ID NO: 916942
gaaaucuugugaccuugga

SEQ ID NO: 1196123 - RNA, 19 nt, Artificial Sequence
  Description of Artificial Sequence: Synthetic oligonucleotide
  Antisense strand to SEQ ID NO: 1196122
uccaaggucacaagauuuc

SEQ ID NO: 1196124 - RNA, 19 nt, Artificial Sequence
  Description of Artificial Sequence: Synthetic oligonucleotide
  Sense strand starting at position 3371 of SEQ ID NO: 916942
ucuugugaccuuggagaga

SEQ ID NO: 1196125 - RNA, 19 nt, Artificial Sequence
  Description of Artificial Sequence: Synthetic oligonucleotide
  Antisense strand to SEQ ID NO: 1196124
ucucuccaaggucacaaga

SEQ ID NO: 1196126 - RNA, 19 nt, Artificial Sequence
  Description of Artificial Sequence: Synthetic oligonucleotide
  Sense strand starting at position 3421 of SEQ ID NO: 916942
gguucuaaugaguguucug

SEQ ID NO: 1196127 - RNA, 19 nt, Artificial Sequence
  Description of Artificial Sequence: Synthetic oligonucleotide
  Antisense strand to SEQ ID NO: 1196126
cagaacacucauuagaacc

SEQ ID NO: 1196128 - RNA, 19 nt, Artificial Sequence
  Description of Artificial Sequence: Synthetic oligonucleotide
  Sense strand starting at position 3424 of SEQ ID NO: 916942
ucuaaugaguguucugaga

SEQ ID NO: 1196129 - RNA, 19 nt, Artificial Sequence
  Description of Artificial Sequence: Synthetic oligonucleotide
  Antisense strand to SEQ ID NO: 1196128
ucucagaacacucauuaga

SEQ ID NO: 1196130 - RNA, 19 nt, Artificial Sequence
  Description of Artificial Sequence: Synthetic oligonucleotide
  Sense strand starting at position 3446 of SEQ ID NO: 916942
ggucaagaaagaugucuua

SEQ ID NO: 1196131 - RNA, 19 nt, Artificial Sequence
  Description of Artificial Sequence: Synthetic oligonucleotide
  Antisense strand to SEQ ID NO: 1196130
uaagacaucuuucuugacc

SEQ ID NO: 1196132 - RNA, 19 nt, Artificial Sequence
  Description of Artificial Sequence: Synthetic oligonucleotide
  Sense strand starting at position 3545 of SEQ ID NO: 916942
ccuagagccgagugaauuc

SEQ ID NO: 1196133 - RNA, 19 nt, Artificial Sequence
  Description of Artificial Sequence: Synthetic oligonucleotide
  Antisense strand to SEQ ID NO: 1196132
gaauucacucggcucuagg

SEQ ID NO: 1196134 - RNA, 19 nt, Artificial Sequence
  Description of Artificial Sequence: Synthetic oligonucleotide
  Sense strand starting at position 3556 of SEQ ID NO: 916942
gugaauuccaaguggguga

SEQ ID NO: 1196135 - RNA, 19 nt, Artificial Sequence
  Description of Artificial Sequence: Synthetic oligonucleotide
  Antisense strand to SEQ ID NO: 1196134
ucacccacuuggaauucac

SEQ ID NO: 1196136 - RNA, 19 nt, Artificial Sequence
  Description of Artificial Sequence: Synthetic oligonucleotide
  Sense strand starting at position 3569 of SEQ ID NO: 916942
gggugaaauuggagugagu

SEQ ID NO: 1196137 - RNA, 19 nt, Artificial Sequence
  Description of Artificial Sequence: Synthetic oligonucleotide
  Antisense strand to SEQ ID NO: 1196136
acucacuccaauuucaccc

SEQ ID NO: 1196138 - RNA, 19 nt, Artificial Sequence
  Description of Artificial Sequence: Synthetic oligonucleotide
  Sense strand starting at position 3611 of SEQ ID NO: 916942
cuggcaagaucgguaugau

SEQ ID NO: 1196139 - RNA, 19 nt, Artificial Sequence
  Description of Artificial Sequence: Synthetic oligonucleotide
  Antisense strand to SEQ ID NO: 1196138
aucauaccgaucuugccag

SEQ ID NO: 1196140 - RNA, 19 nt, Artificial Sequence
  Description of Artificial Sequence: Synthetic oligonucleotide
  Sense strand starting at position 3612 of SEQ ID NO: 916942
uggcaagaucgguaugaua

SEQ ID NO: 1196141 - RNA, 19 nt, Artificial Sequence
  Description of Artificial Sequence: Synthetic oligonucleotide
  Antisense strand to SEQ ID NO: 1196140
uaucauaccgaucuugcca

SEQ ID NO: 1196142 - RNA, 19 nt, Artificial Sequence
  Description of Artificial Sequence: Synthetic oligonucleotide
  Sense strand starting at position 3614 of SEQ ID NO: 916942
gcaagaucgguaugauagg

SEQ ID NO: 1196143 - RNA, 19 nt, Artificial Sequence
  Description of Artificial Sequence: Synthetic oligonucleotide
  Antisense strand to SEQ ID NO: 1196142
ccuaucauaccgaucuugc

SEQ ID NO: 1196144 - RNA, 19 nt, Artificial Sequence
  Description of Artificial Sequence: Synthetic oligonucleotide
  Sense strand starting at position 3695 of SEQ ID NO: 916942
agucuauaagacgggucau

SEQ ID NO: 1196145 - RNA, 19 nt, Artificial Sequence
  Description of Artificial Sequence: Synthetic oligonucleotide
  Antisense strand to SEQ ID NO: 1196144
augacccgucuuauagacu

SEQ ID NO: 1196146 - RNA, 19 nt, Artificial Sequence
  Description of Artificial Sequence: Synthetic oligonucleotide
  Sense strand starting at position 3696 of SEQ ID NO: 916942
gucuauaagacgggucaua

SEQ ID NO: 1196147 - RNA, 19 nt, Artificial Sequence
  Description of Artificial Sequence: Synthetic oligonucleotide
  Antisense strand to SEQ ID NO: 1196146
uaugacccgucuuauagac

SEQ ID NO: 1196148 - RNA, 19 nt, Artificial Sequence
  Description of Artificial Sequence: Synthetic oligonucleotide
  Sense strand starting at position 70 of SEQ ID NO: 916943
cucauuaggccauaaguau

SEQ ID NO: 1196149 - RNA, 19 nt, Artificial Sequence
  Description of Artificial Sequence: Synthetic oligonucleotide
  Antisense strand to SEQ ID NO: 1196148
auacuuauggccuaaugag

SEQ ID NO: 1196150 - RNA, 19 nt, Artificial Sequence
  Description of Artificial Sequence: Synthetic oligonucleotide
  Sense strand starting at position 76 of SEQ ID NO: 916943
aggccauaaguaugagauc

SEQ ID NO: 1196151 - RNA, 19 nt, Artificial Sequence
  Description of Artificial Sequence: Synthetic oligonucleotide
  Antisense strand to SEQ ID NO: 1196150
gaucucauacuuauggccu

SEQ ID NO: 1196152 - RNA, 19 nt, Artificial Sequence
  Description of Artificial Sequence: Synthetic oligonucleotide
  Sense strand starting at position 85 of SEQ ID NO: 916943
guaugagaucaaggcacuu

SEQ ID NO: 1196153 - RNA, 19 nt, Artificial Sequence
  Description of Artificial Sequence: Synthetic oligonucleotide
  Antisense strand to SEQ ID NO: 1196152
aagugccuugaucucauac

SEQ ID NO: 1196154 - RNA, 19 nt, Artificial Sequence
  Description of Artificial Sequence: Synthetic oligonucleotide
  Sense strand starting at position 119 of SEQ ID NO: 916943
auaagucacugaguuuaua

SEQ ID NO: 1196155 - RNA, 19 nt, Artificial Sequence
  Description of Artificial Sequence: Synthetic oligonucleotide
  Antisense strand to SEQ ID NO: 1196154
uauaaacucagugacuuau

SEQ ID NO: 1196156 - RNA, 19 nt, Artificial Sequence
  Description of Artificial Sequence: Synthetic oligonucleotide
  Sense strand starting at position 131 of SEQ ID NO: 916943
guuuauaaccuggguugga

SEQ ID NO: 1196157 - RNA, 19 nt, Artificial Sequence
  Description of Artificial Sequence: Synthetic oligonucleotide
  Antisense strand to SEQ ID NO: 1196156
uccaacccagguuauaaac

SEQ ID NO: 1196158 - RNA, 19 nt, Artificial Sequence
  Description of Artificial Sequence: Synthetic oligonucleotide
  Sense strand starting at position 191 of SEQ ID NO: 916943
gugagugcaaguuugugua

SEQ ID NO: 1196159 - RNA, 19 nt, Artificial Sequence
  Description of Artificial Sequence: Synthetic oligonucleotide
  Antisense strand to SEQ ID NO: 1196158
uacacaaacuugcacucac

SEQ ID NO: 1196160 - RNA, 19 nt, Artificial Sequence
  Description of Artificial Sequence: Synthetic oligonucleotide
  Sense strand starting at position 198 of SEQ ID NO: 916943
caaguuuguguauaugaau

SEQ ID NO: 1196161 - RNA, 19 nt, Artificial Sequence
  Description of Artificial Sequence: Synthetic oligonucleotide
  Antisense strand to SEQ ID NO: 1196160
auucauauacacaaacuug

SEQ ID NO: 1196162 - RNA, 19 nt, Artificial Sequence
  Description of Artificial Sequence: Synthetic oligonucleotide
  Sense strand starting at position 245 of SEQ ID NO: 916943
guguaugaagccugaagac

SEQ ID NO: 1196163 - RNA, 19 nt, Artificial Sequence
  Description of Artificial Sequence: Synthetic oligonucleotide
  Antisense strand to SEQ ID NO: 1196162
gucuucaggcuucauacac

SEQ ID NO: 1196164 - RNA, 19 nt, Artificial Sequence
  Description of Artificial Sequence: Synthetic oligonucleotide
  Sense strand starting at position 347 of SEQ ID NO: 916943
uuggaucgaugcuucuaga

SEQ ID NO: 1196165 - RNA, 19 nt, Artificial Sequence
  Description of Artificial Sequence: Synthetic oligonucleotide
  Antisense strand to SEQ ID NO: 1196164
ucuagaagcaucgauccaa

SEQ ID NO: 1196166 - RNA, 19 nt, Artificial Sequence
  Description of Artificial Sequence: Synthetic oligonucleotide
  Sense strand starting at position 655 of SEQ ID NO: 916943
ugucaagauugaucuaauu

SEQ ID NO: 1196167 - RNA, 19 nt, Artificial Sequence
  Description of Artificial Sequence: Synthetic oligonucleotide
  Antisense strand to SEQ ID NO: 1196166
aauuagaucaaucuugaca

SEQ ID NO: 1196168 - RNA, 19 nt, Artificial Sequence
  Description of Artificial Sequence: Synthetic oligonucleotide
  Sense strand starting at position 904 of SEQ ID NO: 916943
cuccucaaagacugagauu

SEQ ID NO: 1196169 - RNA, 19 nt, Artificial Sequence
  Description of Artificial Sequence: Synthetic oligonucleotide
  Antisense strand to SEQ ID NO: 1196168
aaucucagucuuugaggag

SEQ ID NO: 1196170 - RNA, 19 nt, Artificial Sequence
  Description of Artificial Sequence: Synthetic oligonucleotide
  Sense strand starting at position 1040 of SEQ ID NO: 916943
auuccuuucguggaacauc

SEQ ID NO: 1196171 - RNA, 19 nt, Artificial Sequence
  Description of Artificial Sequence: Synthetic oligonucleotide
  Antisense strand to SEQ ID NO: 1196170
gauguuccacgaaaggaau

SEQ ID NO: 1196172 - RNA, 19 nt, Artificial Sequence
  Description of Artificial Sequence: Synthetic oligonucleotide
  Sense strand starting at position 1066 of SEQ ID NO: 916943
ucccaaggugucuauguga

SEQ ID NO: 1196173 - RNA, 19 nt, Artificial Sequence
  Description of Artificial Sequence: Synthetic oligonucleotide
  Antisense strand to SEQ ID NO: 1196172
ucacauagacaccuuggga

SEQ ID NO: 1196174 - RNA, 19 nt, Artificial Sequence
  Description of Artificial Sequence: Synthetic oligonucleotide
  Sense strand starting at position 1383 of SEQ ID NO: 916943
cugccuguugugucuccaa

SEQ ID NO: 1196175 - RNA, 19 nt, Artificial Sequence
  Description of Artificial Sequence: Synthetic oligonucleotide
  Antisense strand to SEQ ID NO: 1196174
uuggagacacaacaggcag

SEQ ID NO: 1196176 - RNA, 19 nt, Artificial Sequence
  Description of Artificial Sequence: Synthetic oligonucleotide
  Sense strand starting at position 1391 of SEQ ID NO: 916943
ugugucuccaaagggaaau

SEQ ID NO: 1196177 - RNA, 19 nt, Artificial Sequence
  Description of Artificial Sequence: Synthetic oligonucleotide
  Antisense strand to SEQ ID NO: 1196176
auuucccuuuggagacaca

SEQ ID NO: 1196178 - RNA, 19 nt, Artificial Sequence
  Description of Artificial Sequence: Synthetic oligonucleotide
  Sense strand starting at position 1425 of SEQ ID NO: 916943
uguaauuagggauagugua

SEQ ID NO: 1196179 - RNA, 19 nt, Artificial Sequence
  Description of Artificial Sequence: Synthetic oligonucleotide
  Antisense strand to SEQ ID NO: 1196178
uacacuaucccuaauuaca

SEQ ID NO: 1196180 - RNA, 19 nt, Artificial Sequence
  Description of Artificial Sequence: Synthetic oligonucleotide
  Sense strand starting at position 1763 of SEQ ID NO: 916943
gguuaccggaggcauauau

SEQ ID NO: 1196181 - RNA, 19 nt, Artificial Sequence
  Description of Artificial Sequence: Synthetic oligonucleotide
  Antisense strand to SEQ ID NO: 1196180
auauaugccuccgguaacc

SEQ ID NO: 1196182 - RNA, 19 nt, Artificial Sequence
  Description of Artificial Sequence: Synthetic oligonucleotide
  Sense strand starting at position 1848 of SEQ ID NO: 916943
agcuaagccggugagaaua

SEQ ID NO: 1196183 - RNA, 19 nt, Artificial Sequence
  Description of Artificial Sequence: Synthetic oligonucleotide
  Antisense strand to SEQ ID NO: 1196182
uauucucaccggcuuagcu

SEQ ID NO: 1196184 - RNA, 19 nt, Artificial Sequence
  Description of Artificial Sequence: Synthetic oligonucleotide
  Sense strand starting at position 1885 of SEQ ID NO: 916943
uuauucuuggcacagucaa

SEQ ID NO: 1196185 - RNA, 19 nt, Artificial Sequence
  Description of Artificial Sequence: Synthetic oligonucleotide
  Antisense strand to SEQ ID NO: 1196184
uugacugugccaagaauaa

SEQ ID NO: 1196186 - RNA, 19 nt, Artificial Sequence
  Description of Artificial Sequence: Synthetic oligonucleotide
  Sense strand starting at position 2026 of SEQ ID NO: 916943
uguuacaucuaucuuagau

SEQ ID NO: 1196187 - RNA, 19 nt, Artificial Sequence
  Description of Artificial Sequence: Synthetic oligonucleotide
  Antisense strand to SEQ ID NO: 1196186
aucuaagauagauguaaca

SEQ ID NO: 1196188 - RNA, 19 nt, Artificial Sequence
  Description of Artificial Sequence: Synthetic oligonucleotide
  Sense strand starting at position 2052 of SEQ ID NO: 916943
ugcagaaugaggcauauau

SEQ ID NO: 1196189 - RNA, 19 nt, Artificial Sequence
  Description of Artificial Sequence: Synthetic oligonucleotide
  Antisense strand to SEQ ID NO: 1196188
auauaugccucauucugca

SEQ ID NO: 1196190 - RNA, 19 nt, Artificial Sequence
  Description of Artificial Sequence: Synthetic oligonucleotide
  Sense strand starting at position 2131 of SEQ ID NO: 916943
ccaguaauggcuugagaug

SEQ ID NO: 1196191 - RNA, 19 nt, Artificial Sequence
  Description of Artificial Sequence: Synthetic oligonucleotide
  Antisense strand to SEQ ID NO: 1196190
caucucaagccauuacugg

SEQ ID NO: 1196192 - RNA, 19 nt, Artificial Sequence
  Description of Artificial Sequence: Synthetic oligonucleotide
  Sense strand starting at position 2208 of SEQ ID NO: 916943
uggagaauguauguucaga

SEQ ID NO: 1196193 - RNA, 19 nt, Artificial Sequence
  Description of Artificial Sequence: Synthetic oligonucleotide
  Antisense strand to SEQ ID NO: 1196192
ucugaacauacauucucca

SEQ ID NO: 1196194 - RNA, 19 nt, Artificial Sequence
  Description of Artificial Sequence: Synthetic oligonucleotide
  Sense strand starting at position 2286 of SEQ ID NO: 916943
acauguccuccugagacua

SEQ ID NO: 1196195 - RNA, 19 nt, Artificial Sequence
  Description of Artificial Sequence: Synthetic oligonucleotide
  Antisense strand to SEQ ID NO: 1196194
uagucucaggaggacaugu

SEQ ID NO: 1196196 - RNA, 19 nt, Artificial Sequence
  Description of Artificial Sequence: Synthetic oligonucleotide
  Sense strand starting at position 2320 of SEQ ID NO: 916943
auugaauuguggaggagga

SEQ ID NO: 1196197 - RNA, 19 nt, Artificial Sequence
  Description of Artificial Sequence: Synthetic oligonucleotide
  Antisense strand to SEQ ID NO: 1196196
uccuccuccacaauucaau

SEQ ID NO: 1196198 - RNA, 19 nt, Artificial Sequence
  Description of Artificial Sequence: Synthetic oligonucleotide
  Sense strand starting at position 2540 of SEQ ID NO: 916943
agcucaacucuagguauga

SEQ ID NO: 1196199 - RNA, 19 nt, Artificial Sequence
  Description of Artificial Sequence: Synthetic oligonucleotide
  Antisense strand to SEQ ID NO: 1196198
ucauaccuagaguugagcu

SEQ ID NO: 1196200 - RNA, 19 nt, Artificial Sequence
  Description of Artificial Sequence: Synthetic oligonucleotide
  Sense strand starting at position 2627 of SEQ ID NO: 916943
gcagaagauuauguugacu

SEQ ID NO: 1196201 - RNA, 19 nt, Artificial Sequence
  Description of Artificial Sequence: Synthetic oligonucleotide
  Antisense strand to SEQ ID NO: 1196200
agucaacauaaucuucugc

SEQ ID NO: 1196202 - RNA, 19 nt, Artificial Sequence
  Description of Artificial Sequence: Synthetic oligonucleotide
  Sense strand starting at position 2639 of SEQ ID NO: 916943
guugacuacccuugacaug

SEQ ID NO: 1196203 - RNA, 19 nt, Artificial Sequence
  Description of Artificial Sequence: Synthetic oligonucleotide
  Antisense strand to SEQ ID NO: 1196202
caugucaaggguagucaac

SEQ ID NO: 1196204 - RNA, 19 nt, Artificial Sequence
  Description of Artificial Sequence: Synthetic oligonucleotide
  Sense strand starting at position 2732 of SEQ ID NO: 916943
uuuacugaaugucuagaua

SEQ ID NO: 1196205 - RNA, 19 nt, Artificial Sequence
  Description of Artificial Sequence: Synthetic oligonucleotide
  Antisense strand to SEQ ID NO: 1196204
uaucuagacauucaguaaa

SEQ ID NO: 1196206 - RNA, 19 nt, Artificial Sequence
  Description of Artificial Sequence: Synthetic oligonucleotide
  Sense strand starting at position 2819 of SEQ ID NO: 916943
uggaguguauauucuaaug

SEQ ID NO: 1196207 - RNA, 19 nt, Artificial Sequence
  Description of Artificial Sequence: Synthetic oligonucleotide
  Antisense strand to SEQ ID NO: 1196206
cauuagaauauacacucca

SEQ ID NO: 1196208 - RNA, 19 nt, Artificial Sequence
  Description of Artificial Sequence: Synthetic oligonucleotide
  Sense strand starting at position 2937 of SEQ ID NO: 916943
ccuagcgcuauguuaagua

SEQ ID NO: 1196209 - RNA, 19 nt, Artificial Sequence
  Description of Artificial Sequence: Synthetic oligonucleotide
  Antisense strand to SEQ ID NO: 1196208
uacuuaacauagcgcuagg

SEQ ID NO: 1196210 - RNA, 19 nt, Artificial Sequence
  Description of Artificial Sequence: Synthetic oligonucleotide
  Sense strand starting at position 3065 of SEQ ID NO: 916943
cucacuuauccuggcauga

SEQ ID NO: 1196211 - RNA, 19 nt, Artificial Sequence
  Description of Artificial Sequence: Synthetic oligonucleotide
  Antisense strand to SEQ ID NO: 1196210
ucaugccaggauaagugag

SEQ ID NO: 1196212 - RNA, 19 nt, Artificial Sequence
  Description of Artificial Sequence: Synthetic oligonucleotide
  Sense strand starting at position 3261 of SEQ ID NO: 916943
uguauacacuguuuacaaa

SEQ ID NO: 1196213 - RNA, 19 nt, Artificial Sequence
  Description of Artificial Sequence: Synthetic oligonucleotide
  Antisense strand to SEQ ID NO: 1196212
uuuguaaacaguguauaca

SEQ ID NO: 1196214 - RNA, 19 nt, Artificial Sequence
  Description of Artificial Sequence: Synthetic oligonucleotide
  Sense strand starting at position 3305 of SEQ ID NO: 916943
gcagcaagagacuguuaga

SEQ ID NO: 1196215 - RNA, 19 nt, Artificial Sequence
  Description of Artificial Sequence: Synthetic oligonucleotide
  Antisense strand to SEQ ID NO: 1196214
ucuaacagucucuugcugc

SEQ ID NO: 1196216 - RNA, 19 nt, Artificial Sequence
  Description of Artificial Sequence: Synthetic oligonucleotide
  Sense strand starting at position 3446 of SEQ ID NO: 916943
acuguauacugcuuacaag

SEQ ID NO: 1196217 - RNA, 19 nt, Artificial Sequence
  Description of Artificial Sequence: Synthetic oligonucleotide
  Antisense strand to SEQ ID NO: 1196216
cuuguaagcaguauacagu

SEQ ID NO: 1196218 - RNA, 19 nt, Artificial Sequence
  Description of Artificial Sequence: Synthetic oligonucleotide
  Sense strand starting at position 3447 of SEQ ID NO: 916943
cuguauacugcuuacaaga

SEQ ID NO: 1196219 - RNA, 19 nt, Artificial Sequence
  Description of Artificial Sequence: Synthetic oligonucleotide
  Antisense strand to SEQ ID NO: 1196218
ucuuguaagcaguauacag

SEQ ID NO: 1196220 - RNA, 19 nt, Artificial Sequence
  Description of Artificial Sequence: Synthetic oligonucleotide
  Sense strand starting at position 3616 of SEQ ID NO: 916943
gggaguguacuuuauagug

SEQ ID NO: 1196221 - RNA, 19 nt, Artificial Sequence
  Description of Artificial Sequence: Synthetic oligonucleotide
  Antisense strand to SEQ ID NO: 1196220
cacuauaaaguacacuccc

SEQ ID NO: 1196222 - RNA, 19 nt, Artificial Sequence
  Description of Artificial Sequence: Synthetic oligonucleotide
  Sense strand starting at position 3932 of SEQ ID NO: 916943
uguugaauguucucugaau

SEQ ID NO: 1196223 - RNA, 19 nt, Artificial Sequence
  Description of Artificial Sequence: Synthetic oligonucleotide
  Antisense strand to SEQ ID NO: 1196222
auucagagaacauucaaca

SEQ ID NO: 1196224 - RNA, 19 nt, Artificial Sequence
  Description of Artificial Sequence: Synthetic oligonucleotide
  Sense strand starting at position 3933 of SEQ ID NO: 916943
guugaauguucucugaauu

SEQ ID NO: 1196225 - RNA, 19 nt, Artificial Sequence
  Description of Artificial Sequence: Synthetic oligonucleotide
  Antisense strand to SEQ ID NO: 1196224
aauucagagaacauucaac

SEQ ID NO: 1196226 - RNA, 19 nt, Artificial Sequence
  Description of Artificial Sequence: Synthetic oligonucleotide
  Sense strand starting at position 3934 of SEQ ID NO: 916943
uugaauguucucugaauuc

SEQ ID NO: 1196227 - RNA, 19 nt, Artificial Sequence
  Description of Artificial Sequence: Synthetic oligonucleotide
  Antisense strand to SEQ ID NO: 1196226
gaauucagagaacauucaa

SEQ ID NO: 1196228 - RNA, 19 nt, Artificial Sequence
  Description of Artificial Sequence: Synthetic oligonucleotide
  Sense strand starting at position 60 of SEQ ID NO: 916944
auaaguaguugcuugggaa

SEQ ID NO: 1196229 - RNA, 19 nt, Artificial Sequence
  Description of Artificial Sequence: Synthetic oligonucleotide
  Antisense strand to SEQ ID NO: 1196228
uucccaagcaacuacuuau

SEQ ID NO: 1196230 - RNA, 19 nt, Artificial Sequence
  Description of Artificial Sequence: Synthetic oligonucleotide
  Sense strand starting at position 61 of SEQ ID NO: 916944
uaaguaguugcuugggaaa

SEQ ID NO: 1196231 - RNA, 19 nt, Artificial Sequence
  Description of Artificial Sequence: Synthetic oligonucleotide
  Antisense strand to SEQ ID NO: 1196230
uuucccaagcaacuacuua

SEQ ID NO: 1196232 - RNA, 19 nt, Artificial Sequence
  Description of Artificial Sequence: Synthetic oligonucleotide
  Sense strand starting at position 116 of SEQ ID NO: 916944
cugacauuguggucacaca

SEQ ID NO: 1196233 - RNA, 19 nt, Artificial Sequence
  Description of Artificial Sequence: Synthetic oligonucleotide
  Antisense strand to SEQ ID NO: 1196232
ugugugaccacaaugucag

SEQ ID NO: 1196234 - RNA, 19 nt, Artificial Sequence
  Description of Artificial Sequence: Synthetic oligonucleotide
  Sense strand starting at position 117 of SEQ ID NO: 916944
ugacauuguggucacacaa

SEQ ID NO: 1196235 - RNA, 19 nt, Artificial Sequence
  Description of Artificial Sequence: Synthetic oligonucleotide
  Antisense strand to SEQ ID NO: 1196234
uugugugaccacaauguca

SEQ ID NO: 1196236 - RNA, 19 nt, Artificial Sequence
  Description of Artificial Sequence: Synthetic oligonucleotide
  Sense strand starting at position 423 of SEQ ID NO: 916944
ccauuuaaauaggaguacu

SEQ ID NO: 1196237 - RNA, 19 nt, Artificial Sequence
  Description of Artificial Sequence: Synthetic oligonucleotide
  Antisense strand to SEQ ID NO: 1196236
aguacuccuauuuaaaugg

SEQ ID NO: 1196238 - RNA, 19 nt, Artificial Sequence
  Description of Artificial Sequence: Synthetic oligonucleotide
  Sense strand starting at position 541 of SEQ ID NO: 916944
cuaaguaugcuguaguaua

SEQ ID NO: 1196239 - RNA, 19 nt, Artificial Sequence
  Description of Artificial Sequence: Synthetic oligonucleotide
  Antisense strand to SEQ ID NO: 1196238
uauacuacagcauacuuag

SEQ ID NO: 1196240 - RNA, 19 nt, Artificial Sequence
  Description of Artificial Sequence: Synthetic oligonucleotide
  Sense strand starting at position 784 of SEQ ID NO: 916944
aauaaucuguggucugaau

SEQ ID NO: 1196241 - RNA, 19 nt, Artificial Sequence
  Description of Artificial Sequence: Synthetic oligonucleotide
  Antisense strand to SEQ ID NO: 1196240
auucagaccacagauuauu

SEQ ID NO: 1196242 - RNA, 19 nt, Artificial Sequence
  Description of Artificial Sequence: Synthetic oligonucleotide
  Sense strand starting at position 795 of SEQ ID NO: 916944
gucugaauggcuuaugaaa

SEQ ID NO: 1196243 - RNA, 19 nt, Artificial Sequence
  Description of Artificial Sequence: Synthetic oligonucleotide
  Antisense strand to SEQ ID NO: 1196242
uuucauaagccauucagac

SEQ ID NO: 1196244 - RNA, 19 nt, Artificial Sequence
  Description of Artificial Sequence: Synthetic oligonucleotide
  Sense strand starting at position 808 of SEQ ID NO: 916944
augaaauugugaguuucuc

SEQ ID NO: 1196245 - RNA, 19 nt, Artificial Sequence
  Description of Artificial Sequence: Synthetic oligonucleotide
  Antisense strand to SEQ ID NO: 1196244
gagaaacucacaauuucau

SEQ ID NO: 1196246 - RNA, 19 nt, Artificial Sequence
  Description of Artificial Sequence: Synthetic oligonucleotide
  Sense strand starting at position 878 of SEQ ID NO: 916944
uagcguuuccuagaaucag

SEQ ID NO: 1196247 - RNA, 19 nt, Artificial Sequence
  Description of Artificial Sequence: Synthetic oligonucleotide
  Antisense strand to SEQ ID NO: 1196246
cugauucuaggaaacgcua

SEQ ID NO: 1196248 - RNA, 19 nt, Artificial Sequence
  Description of Artificial Sequence: Synthetic oligonucleotide
  Sense strand starting at position 950 of SEQ ID NO: 916944
agaucacuguguucugaua

SEQ ID NO: 1196249 - RNA, 19 nt, Artificial Sequence
  Description of Artificial Sequence: Synthetic oligonucleotide
  Antisense strand to SEQ ID NO: 1196248
uaucagaacacagugaucu

SEQ ID NO: 1196250 - RNA, 19 nt, Artificial Sequence
  Description of Artificial Sequence: Synthetic oligonucleotide
  Sense strand starting at position 975 of SEQ ID NO: 916944
agaaauccaugauaugaga

SEQ ID NO: 1196251 - RNA, 19 nt, Artificial Sequence
  Description of Artificial Sequence: Synthetic oligonucleotide
  Antisense strand to SEQ ID NO: 1196250
ucucauaucauggauuucu

SEQ ID NO: 1196252 - RNA, 19 nt, Artificial Sequence
  Description of Artificial Sequence: Synthetic oligonucleotide
  Sense strand starting at position 1109 of SEQ ID NO: 916944
ggagauguuucugcaggga

SEQ ID NO: 1196253 - RNA, 19 nt, Artificial Sequence
  Description of Artificial Sequence: Synthetic oligonucleotide
  Antisense strand to SEQ ID NO: 1196252
ucccugcagaaacaucucc

SEQ ID NO: 1196254 - RNA, 19 nt, Artificial Sequence
  Description of Artificial Sequence: Synthetic oligonucleotide
  Sense strand starting at position 1112 of SEQ ID NO: 916944
gauguuucugcagggagaa

SEQ ID NO: 1196255 - RNA, 19 nt, Artificial Sequence
  Description of Artificial Sequence: Synthetic oligonucleotide
  Antisense strand to SEQ ID NO: 1196254
uucucccugcagaaacauc

SEQ ID NO: 1196256 - RNA, 19 nt, Artificial Sequence
  Description of Artificial Sequence: Synthetic oligonucleotide
  Sense strand starting at position 1113 of SEQ ID NO: 916944
auguuucugcagggagaaa

SEQ ID NO: 1196257 - RNA, 19 nt, Artificial Sequence
  Description of Artificial Sequence: Synthetic oligonucleotide
  Antisense strand to SEQ ID NO: 1196256
uuucucccugcagaaacau

SEQ ID NO: 1196258 - RNA, 19 nt, Artificial Sequence
  Description of Artificial Sequence: Synthetic oligonucleotide
  Sense strand starting at position 1175 of SEQ ID NO: 916944
gacugaacauagucauagu

SEQ ID NO: 1196259 - RNA, 19 nt, Artificial Sequence
  Description of Artificial Sequence: Synthetic oligonucleotide
  Antisense strand to SEQ ID NO: 1196258
acuaugacuauguucaguc

SEQ ID NO: 1196260 - RNA, 19 nt, Artificial Sequence
  Description of Artificial Sequence: Synthetic oligonucleotide
  Sense strand starting at position 1286 of SEQ ID NO: 916944
gcauguuuauuuguaucag

SEQ ID NO: 1196261 - RNA, 19 nt, Artificial Sequence
  Description of Artificial Sequence: Synthetic oligonucleotide
  Antisense strand to SEQ ID NO: 1196260
cugauacaaauaaacaugc

SEQ ID NO: 1196262 - RNA, 19 nt, Artificial Sequence
  Description of Artificial Sequence: Synthetic oligonucleotide
  Sense strand starting at position 1517 of SEQ ID NO: 916944
cuagauaaugcagagcuaa

SEQ ID NO: 1196263 - RNA, 19 nt, Artificial Sequence
  Description of Artificial Sequence: Synthetic oligonucleotide
  Antisense strand to SEQ ID NO: 1196262
uuagcucugcauuaucuag

SEQ ID NO: 1196264 - RNA, 19 nt, Artificial Sequence
  Description of Artificial Sequence: Synthetic oligonucleotide
  Sense strand starting at position 1596 of SEQ ID NO: 916944
gaguuuaucgacugaggac

SEQ ID NO: 1196265 - RNA, 19 nt, Artificial Sequence
  Description of Artificial Sequence: Synthetic oligonucleotide
  Antisense strand to SEQ ID NO: 1196264
guccucagucgauaaacuc

SEQ ID NO: 1196266 - RNA, 19 nt, Artificial Sequence
  Description of Artificial Sequence: Synthetic oligonucleotide
  Sense strand starting at position 1641 of SEQ ID NO: 916944
gcaguugaucaguacuaua

SEQ ID NO: 1196267 - RNA, 19 nt, Artificial Sequence
  Description of Artificial Sequence: Synthetic oligonucleotide
  Antisense strand to SEQ ID NO: 1196266
uauaguacugaucaacugc

SEQ ID NO: 1196268 - RNA, 19 nt, Artificial Sequence
  Description of Artificial Sequence: Synthetic oligonucleotide
  Sense strand starting at position 1724 of SEQ ID NO: 916944
gggcacuuuccaugucaga

SEQ ID NO: 1196269 - RNA, 19 nt, Artificial Sequence
  Description of Artificial Sequence: Synthetic oligonucleotide
  Antisense strand to SEQ ID NO: 1196268
ucugacauggaaagugccc

SEQ ID NO: 1196270 - RNA, 19 nt, Artificial Sequence
  Description of Artificial Sequence: Synthetic oligonucleotide
  Sense strand starting at position 1880 of SEQ ID NO: 916944
agcagaaaucucuaaaguu

SEQ ID NO: 1196271 - RNA, 19 nt, Artificial Sequence
  Description of Artificial Sequence: Synthetic oligonucleotide
  Antisense strand to SEQ ID NO: 1196270
aacuuuagagauuucugcu

SEQ ID NO: 1196272 - RNA, 19 nt, Artificial Sequence
  Description of Artificial Sequence: Synthetic oligonucleotide
  Sense strand starting at position 1918 of SEQ ID NO: 916944
aacuguucuggugauaucu

SEQ ID NO: 1196273 - RNA, 19 nt, Artificial Sequence
  Description of Artificial Sequence: Synthetic oligonucleotide
  Antisense strand to SEQ ID NO: 1196272
agauaucaccagaacaguu

SEQ ID NO: 1196274 - RNA, 19 nt, Artificial Sequence
  Description of Artificial Sequence: Synthetic oligonucleotide
  Sense strand starting at position 2013 of SEQ ID NO: 916944
augauuaugcagcaaaguu

SEQ ID NO: 1196275 - RNA, 19 nt, Artificial Sequence
  Description of Artificial Sequence: Synthetic oligonucleotide
  Antisense strand to SEQ ID NO: 1196274
aacuuugcugcauaaucau

SEQ ID NO: 1196276 - RNA, 19 nt, Artificial Sequence
  Description of Artificial Sequence: Synthetic oligonucleotide
  Sense strand starting at position 2169 of SEQ ID NO: 916944
uagaauauguagcuaaaug

SEQ ID NO: 1196277 - RNA, 19 nt, Artificial Sequence
  Description of Artificial Sequence: Synthetic oligonucleotide
  Antisense strand to SEQ ID NO: 1196276
cauuuagcuacauauucua

SEQ ID NO: 1196278 - RNA, 19 nt, Artificial Sequence
  Description of Artificial Sequence: Synthetic oligonucleotide
  Sense strand starting at position 2264 of SEQ ID NO: 916944
gugcucaauuucuugugga

SEQ ID NO: 1196279 - RNA, 19 nt, Artificial Sequence
  Description of Artificial Sequence: Synthetic oligonucleotide
  Antisense strand to SEQ ID NO: 1196278
uccacaagaaauugagcac

SEQ ID NO: 1196280 - RNA, 19 nt, Artificial Sequence
  Description of Artificial Sequence: Synthetic oligonucleotide
  Sense strand starting at position 2289 of SEQ ID NO: 916944
gcuggaucuggucaauacu

SEQ ID NO: 1196281 - RNA, 19 nt, Artificial Sequence
  Description of Artificial Sequence: Synthetic oligonucleotide
  Antisense strand to SEQ ID NO: 1196280
aguauugaccagauccagc

SEQ ID NO: 1196282 - RNA, 19 nt, Artificial Sequence
  Description of Artificial Sequence: Synthetic oligonucleotide
  Sense strand starting at position 2297 of SEQ ID NO: 916944
uggucaauacugugacuaa

SEQ ID NO: 1196283 - RNA, 19 nt, Artificial Sequence
  Description of Artificial Sequence: Synthetic oligonucleotide
  Antisense strand to SEQ ID NO: 1196282
uuagucacaguauugacca

SEQ ID NO: 1196284 - RNA, 19 nt, Artificial Sequence
  Description of Artificial Sequence: Synthetic oligonucleotide
  Sense strand starting at position 3276 of SEQ ID NO: 916944
gugaauuaugaauguuugu

SEQ ID NO: 1196285 - RNA, 19 nt, Artificial Sequence
  Description of Artificial Sequence: Synthetic oligonucleotide
  Antisense strand to SEQ ID NO: 1196284
acaaacauucauaauucac

SEQ ID NO: 1196286 - RNA, 19 nt, Artificial Sequence
  Description of Artificial Sequence: Synthetic oligonucleotide
  Sense strand starting at position 3309 of SEQ ID NO: 916944
gcaaucuuuauugggugau

SEQ ID NO: 1196287 - RNA, 19 nt, Artificial Sequence
  Description of Artificial Sequence: Synthetic oligonucleotide
  Antisense strand to SEQ ID NO: 1196286
aucacccaauaaagauugc

SEQ ID NO: 1196288 - RNA, 19 nt, Artificial Sequence
  Description of Artificial Sequence: Synthetic oligonucleotide
  Sense strand starting at position 3311 of SEQ ID NO: 916944
aaucuuuauugggugaucu

SEQ ID NO: 1196289 - RNA, 19 nt, Artificial Sequence
  Description of Artificial Sequence: Synthetic oligonucleotide
  Antisense strand to SEQ ID NO: 1196288
agaucacccaauaaagauu

SEQ ID NO: 1196290 - RNA, 19 nt, Artificial Sequence
  Description of Artificial Sequence: Synthetic oligonucleotide
  Sense strand starting at position 3312 of SEQ ID NO: 916944
aucuuuauugggugaucua

SEQ ID NO: 1196291 - RNA, 19 nt, Artificial Sequence
  Description of Artificial Sequence: Synthetic oligonucleotide
  Antisense strand to SEQ ID NO: 1196290
uagaucacccaauaaagau

SEQ ID NO: 1196292 - RNA, 19 nt, Artificial Sequence
  Description of Artificial Sequence: Synthetic oligonucleotide
  Sense strand starting at position 3313 of SEQ ID NO: 916944
ucuuuauugggugaucuac

SEQ ID NO: 1196293 - RNA, 19 nt, Artificial Sequence
  Description of Artificial Sequence: Synthetic oligonucleotide
  Antisense strand to SEQ ID NO: 1196292
guagaucacccaauaaaga

SEQ ID NO: 1196294 - RNA, 19 nt, Artificial Sequence
  Description of Artificial Sequence: Synthetic oligonucleotide
  Sense strand starting at position 3319 of SEQ ID NO: 916944
uugggugaucuacagagua

SEQ ID NO: 1196295 - RNA, 19 nt, Artificial Sequence
  Description of Artificial Sequence: Synthetic oligonucleotide
  Antisense strand to SEQ ID NO: 1196294
uacucuguagaucacccaa

SEQ ID NO: 1196296 - RNA, 19 nt, Artificial Sequence
  Description of Artificial Sequence: Synthetic oligonucleotide
  Sense strand starting at position 3321 of SEQ ID NO: 916944
gggugaucuacagaguacu

SEQ ID NO: 1196297 - RNA, 19 nt, Artificial Sequence
  Description of Artificial Sequence: Synthetic oligonucleotide
  Antisense strand to SEQ ID NO: 1196296
aguacucuguagaucaccc

SEQ ID NO: 1196298 - RNA, 19 nt, Artificial Sequence
  Description of Artificial Sequence: Synthetic oligonucleotide
  Sense strand starting at position 3434 of SEQ ID NO: 916944
ugguauauuugucaagaua

SEQ ID NO: 1196299 - RNA, 19 nt, Artificial Sequence
  Description of Artificial Sequence: Synthetic oligonucleotide
  Antisense strand to SEQ ID NO: 1196298
uaucuugacaaauauacca

SEQ ID NO: 1196300 - RNA, 19 nt, Artificial Sequence
  Description of Artificial Sequence: Synthetic oligonucleotide
  Sense strand starting at position 3633 of SEQ ID NO: 916944
cggucacaacuugauaaua

SEQ ID NO: 1196301 - RNA, 19 nt, Artificial Sequence
  Description of Artificial Sequence: Synthetic oligonucleotide
  Antisense strand to SEQ ID NO: 1196300
uauuaucaaguugugaccg

SEQ ID NO: 1196302 - RNA, 19 nt, Artificial Sequence
  Description of Artificial Sequence: Synthetic oligonucleotide
  Sense strand starting at position 3967 of SEQ ID NO: 916944
caaugaaagguuugaguau

SEQ ID NO: 1196303 - RNA, 19 nt, Artificial Sequence
  Description of Artificial Sequence: Synthetic oligonucleotide
  Antisense strand to SEQ ID NO: 1196302
auacucaaaccuuucauug

SEQ ID NO: 1196304 - RNA, 19 nt, Artificial Sequence
  Description of Artificial Sequence: Synthetic oligonucleotide
  Sense strand starting at position 3973 of SEQ ID NO: 916944
aagguuugaguauguaaag

SEQ ID NO: 1196305 - RNA, 19 nt, Artificial Sequence
  Description of Artificial Sequence: Synthetic oligonucleotide
  Antisense strand to SEQ ID NO: 1196304
cuuuacauacucaaaccuu

SEQ ID NO: 1196306 - RNA, 19 nt, Artificial Sequence
  Description of Artificial Sequence: Synthetic oligonucleotide
  Sense strand starting at position 3974 of SEQ ID NO: 916944
agguuugaguauguaaagu

SEQ ID NO: 1196307 - RNA, 19 nt, Artificial Sequence
  Description of Artificial Sequence: Synthetic oligonucleotide
  Antisense strand to SEQ ID NO: 1196306
acuuuacauacucaaaccu

SEQ ID NO: 1196308 - RNA, 19 nt, Artificial Sequence
  Description of Artificial Sequence: Synthetic oligonucleotide
  Sense strand starting at position 43 of SEQ ID NO: 916945
gcguguguaugaauaugua

SEQ ID NO: 1196309 - RNA, 19 nt, Artificial Sequence
  Description of Artificial Sequence: Synthetic oligonucleotide
  Antisense strand to SEQ ID NO: 1196308
uacauauucauacacacgc

SEQ ID NO: 1196310 - RNA, 19 nt, Artificial Sequence
  Description of Artificial Sequence: Synthetic oligonucleotide
  Sense strand starting at position 297 of SEQ ID NO: 916945
aagcuagagucaguauuac

SEQ ID NO: 1196311 - RNA, 19 nt, Artificial Sequence
  Description of Artificial Sequence: Synthetic oligonucleotide
  Antisense strand to SEQ ID NO: 1196310
guaauacugacucuagcuu

SEQ ID NO: 1196312 - RNA, 19 nt, Artificial Sequence
  Description of Artificial Sequence: Synthetic oligonucleotide
  Sense strand starting at position 358 of SEQ ID NO: 916945
agcaguuacgaucaggauu

SEQ ID NO: 1196313 - RNA, 19 nt, Artificial Sequence
  Description of Artificial Sequence: Synthetic oligonucleotide
  Antisense strand to SEQ ID NO: 1196312
aauccugaucguaacugcu

SEQ ID NO: 1196314 - RNA, 19 nt, Artificial Sequence
  Description of Artificial Sequence: Synthetic oligonucleotide
  Sense strand starting at position 361 of SEQ ID NO: 916945
aguuacgaucaggauuacu

SEQ ID NO: 1196315 - RNA, 19 nt, Artificial Sequence
  Description of Artificial Sequence: Synthetic oligonucleotide
  Antisense strand to SEQ ID NO: 1196314
aguaauccugaucguaacu

SEQ ID NO: 1196316 - RNA, 19 nt, Artificial Sequence
  Description of Artificial Sequence: Synthetic oligonucleotide
  Sense strand starting at position 366 of SEQ ID NO: 916945
cgaucaggauuacuuaaca

SEQ ID NO: 1196317 - RNA, 19 nt, Artificial Sequence
  Description of Artificial Sequence: Synthetic oligonucleotide
  Antisense strand to SEQ ID NO: 1196316
uguuaaguaauccugaucg

SEQ ID NO: 1196318 - RNA, 19 nt, Artificial Sequence
  Description of Artificial Sequence: Synthetic oligonucleotide
  Sense strand starting at position 687 of SEQ ID NO: 916945
accagauugagauguaagu

SEQ ID NO: 1196319 - RNA, 19 nt, Artificial Sequence
  Description of Artificial Sequence: Synthetic oligonucleotide
  Antisense strand to SEQ ID NO: 1196318
acuuacaucucaaucuggu

SEQ ID NO: 1196320 - RNA, 19 nt, Artificial Sequence
  Description of Artificial Sequence: Synthetic oligonucleotide
  Sense strand starting at position 971 of SEQ ID NO: 916945
augaaagaaucuuaaggaa

SEQ ID NO: 1196321 - RNA, 19 nt, Artificial Sequence
  Description of Artificial Sequence: Synthetic oligonucleotide
  Antisense strand to SEQ ID NO: 1196320
uuccuuaagauucuuucau

SEQ ID NO: 1196322 - RNA, 19 nt, Artificial Sequence
  Description of Artificial Sequence: Synthetic oligonucleotide
  Sense strand starting at position 1012 of SEQ ID NO: 916945
agaauuucuuaggagcuau

SEQ ID NO: 1196323 - RNA, 19 nt, Artificial Sequence
  Description of Artificial Sequence: Synthetic oligonucleotide
  Antisense strand to SEQ ID NO: 1196322
auagcuccuaagaaauucu

SEQ ID NO: 1196324 - RNA, 19 nt, Artificial Sequence
  Description of Artificial Sequence: Synthetic oligonucleotide
  Sense strand starting at position 1123 of SEQ ID NO: 916945
gacagagaggccugucuca

SEQ ID NO: 1196325 - RNA, 19 nt, Artificial Sequence
  Description of Artificial Sequence: Synthetic oligonucleotide
  Antisense strand to SEQ ID NO: 1196324
ugagacaggccucucuguc

SEQ ID NO: 1196326 - RNA, 19 nt, Artificial Sequence
  Description of Artificial Sequence: Synthetic oligonucleotide
  Sense strand starting at position 1145 of SEQ ID NO: 916945
ucuuguuuccaagaaucag

SEQ ID NO: 1196327 - RNA, 19 nt, Artificial Sequence
  Description of Artificial Sequence: Synthetic oligonucleotide
  Antisense strand to SEQ ID NO: 1196326
cugauucuuggaaacaaga

SEQ ID NO: 1196328 - RNA, 19 nt, Artificial Sequence
  Description of Artificial Sequence: Synthetic oligonucleotide
  Sense strand starting at position 1446 of SEQ ID NO: 916945
cacagugcugguuaauaca

SEQ ID NO: 1196329 - RNA, 19 nt, Artificial Sequence
  Description of Artificial Sequence: Synthetic oligonucleotide
  Antisense strand to SEQ ID NO: 1196328
uguauuaaccagcacugug

SEQ ID NO: 1196330 - RNA, 19 nt, Artificial Sequence
  Description of Artificial Sequence: Synthetic oligonucleotide
  Sense strand starting at position 1481 of SEQ ID NO: 916945
guguaaaguuacuugaauc

SEQ ID NO: 1196331 - RNA, 19 nt, Artificial Sequence
  Description of Artificial Sequence: Synthetic oligonucleotide
  Antisense strand to SEQ ID NO: 1196330
gauucaaguaacuuuacac

SEQ ID NO: 1196332 - RNA, 19 nt, Artificial Sequence
  Description of Artificial Sequence: Synthetic oligonucleotide
  Sense strand starting at position 1520 of SEQ ID NO: 916945
uucuguauccauugauacu

SEQ ID NO: 1196333 - RNA, 19 nt, Artificial Sequence
  Description of Artificial Sequence: Synthetic oligonucleotide
  Antisense strand to SEQ ID NO: 1196332
aguaucaauggauacagaa

SEQ ID NO: 1196334 - RNA, 19 nt, Artificial Sequence
  Description of Artificial Sequence: Synthetic oligonucleotide
  Sense strand starting at position 1553 of SEQ ID NO: 916945
uguuuaucagugcaauauu

SEQ ID NO: 1196335 - RNA, 19 nt, Artificial Sequence
  Description of Artificial Sequence: Synthetic oligonucleotide
  Antisense strand to SEQ ID NO: 1196334
aauauugcacugauaaaca

SEQ ID NO: 1196336 - RNA, 19 nt, Artificial Sequence
  Description of Artificial Sequence: Synthetic oligonucleotide
  Sense strand starting at position 1722 of SEQ ID NO: 916945
auugaucacuguccagaua

SEQ ID NO: 1196337 - RNA, 19 nt, Artificial Sequence
  Description of Artificial Sequence: Synthetic oligonucleotide
  Antisense strand to SEQ ID NO: 1196336
uaucuggacagugaucaau

SEQ ID NO: 1196338 - RNA, 19 nt, Artificial Sequence
  Description of Artificial Sequence: Synthetic oligonucleotide
  Sense strand starting at position 1723 of SEQ ID NO: 916945
uugaucacuguccagauau

SEQ ID NO: 1196339 - RNA, 19 nt, Artificial Sequence
  Description of Artificial Sequence: Synthetic oligonucleotide
  Antisense strand to SEQ ID NO: 1196338
auaucuggacagugaucaa

SEQ ID NO: 1196340 - RNA, 19 nt, Artificial Sequence
  Description of Artificial Sequence: Synthetic oligonucleotide
  Sense strand starting at position 1736 of SEQ ID NO: 916945
agauauuaguaagcauucu

SEQ ID NO: 1196341 - RNA, 19 nt, Artificial Sequence
  Description of Artificial Sequence: Synthetic oligonucleotide
  Antisense strand to SEQ ID NO: 1196340
agaaugcuuacuaauaucu

SEQ ID NO: 1196342 - RNA, 19 nt, Artificial Sequence
  Description of Artificial Sequence: Synthetic oligonucleotide
  Sense strand starting at position 1770 of SEQ ID NO: 916945
ggcaaauaaagcugggaaa

SEQ ID NO: 1196343 - RNA, 19 nt, Artificial Sequence
  Description of Artificial Sequence: Synthetic oligonucleotide
  Antisense strand to SEQ ID NO: 1196342
uuucccagcuuuauuugcc

SEQ ID NO: 1196344 - RNA, 19 nt, Artificial Sequence
  Description of Artificial Sequence: Synthetic oligonucleotide
  Sense strand starting at position 1803 of SEQ ID NO: 916945
ccagcuuccgaauauuaac

SEQ ID NO: 1196345 - RNA, 19 nt, Artificial Sequence
  Description of Artificial Sequence: Synthetic oligonucleotide
  Antisense strand to SEQ ID NO: 1196344
guuaauauucggaagcugg

SEQ ID NO: 1196346 - RNA, 19 nt, Artificial Sequence
  Description of Artificial Sequence: Synthetic oligonucleotide
  Sense strand starting at position 1910 of SEQ ID NO: 916945
ucaccagugcuaugaaacu

SEQ ID NO: 1196347 - RNA, 19 nt, Artificial Sequence
  Description of Artificial Sequence: Synthetic oligonucleotide
  Antisense strand to SEQ ID NO: 1196346
aguuucauagcacugguga

SEQ ID NO: 1196348 - RNA, 19 nt, Artificial Sequence
  Description of Artificial Sequence: Synthetic oligonucleotide
  Sense strand starting at position 2024 of SEQ ID NO: 916945
gucuaauaucacugcugaa

SEQ ID NO: 1196349 - RNA, 19 nt, Artificial Sequence
  Description of Artificial Sequence: Synthetic oligonucleotide
  Antisense strand to SEQ ID NO: 1196348
uucagcagugauauuagac

SEQ ID NO: 1196350 - RNA, 19 nt, Artificial Sequence
  Description of Artificial Sequence: Synthetic oligonucleotide
  Sense strand starting at position 2072 of SEQ ID NO: 916945
auguauaucugauucuuga

SEQ ID NO: 1196351 - RNA, 19 nt, Artificial Sequence
  Description of Artificial Sequence: Synthetic oligonucleotide
  Antisense strand to SEQ ID NO: 1196350
ucaagaaucagauauacau

SEQ ID NO: 1196352 - RNA, 19 nt, Artificial Sequence
  Description of Artificial Sequence: Synthetic oligonucleotide
  Sense strand starting at position 2427 of SEQ ID NO: 916945
auaugaaacuuuguaagca

SEQ ID NO: 1196353 - RNA, 19 nt, Artificial Sequence
  Description of Artificial Sequence: Synthetic oligonucleotide
  Antisense strand to SEQ ID NO: 1196352
ugcuuacaaaguuucauau

SEQ ID NO: 1196354 - RNA, 19 nt, Artificial Sequence
  Description of Artificial Sequence: Synthetic oligonucleotide
  Sense strand starting at position 2431 of SEQ ID NO: 916945
gaaacuuuguaagcacuga

SEQ ID NO: 1196355 - RNA, 19 nt, Artificial Sequence
  Description of Artificial Sequence: Synthetic oligonucleotide
  Antisense strand to SEQ ID NO: 1196354
ucagugcuuacaaaguuuc

SEQ ID NO: 1196356 - RNA, 19 nt, Artificial Sequence
  Description of Artificial Sequence: Synthetic oligonucleotide
  Sense strand starting at position 2435 of SEQ ID NO: 916945
cuuuguaagcacugagaau

SEQ ID NO: 1196357 - RNA, 19 nt, Artificial Sequence
  Description of Artificial Sequence: Synthetic oligonucleotide
  Antisense strand to SEQ ID NO: 1196356
auucucagugcuuacaaag

SEQ ID NO: 1196358 - RNA, 19 nt, Artificial Sequence
  Description of Artificial Sequence: Synthetic oligonucleotide
  Sense strand starting at position 2564 of SEQ ID NO: 916945
auugaacagcauugugaau

SEQ ID NO: 1196359 - RNA, 19 nt, Artificial Sequence
  Description of Artificial Sequence: Synthetic oligonucleotide
  Antisense strand to SEQ ID NO: 1196358
auucacaaugcuguucaau

SEQ ID NO: 1196360 - RNA, 19 nt, Artificial Sequence
  Description of Artificial Sequence: Synthetic oligonucleotide
  Sense strand starting at position 2594 of SEQ ID NO: 916945
uaguguauuguacauuaca

SEQ ID NO: 1196361 - RNA, 19 nt, Artificial Sequence
  Description of Artificial Sequence: Synthetic oligonucleotide
  Antisense strand to SEQ ID NO: 1196360
uguaauguacaauacacua

SEQ ID NO: 1196362 - RNA, 19 nt, Artificial Sequence
  Description of Artificial Sequence: Synthetic oligonucleotide
  Sense strand starting at position 2725 of SEQ ID NO: 916945
uccacauaguagucauaaa

SEQ ID NO: 1196363 - RNA, 19 nt, Artificial Sequence
  Description of Artificial Sequence: Synthetic oligonucleotide
  Antisense strand to SEQ ID NO: 1196362
uuuaugacuacuaugugga

SEQ ID NO: 1196364 - RNA, 19 nt, Artificial Sequence
  Description of Artificial Sequence: Synthetic oligonucleotide
  Sense strand starting at position 2764 of SEQ ID NO: 916945
ucauaaauguaugcaagua

SEQ ID NO: 1196365 - RNA, 19 nt, Artificial Sequence
  Description of Artificial Sequence: Synthetic oligonucleotide
  Antisense strand to SEQ ID NO: 1196364
uacuugcauacauuuauga

SEQ ID NO: 1196366 - RNA, 19 nt, Artificial Sequence
  Description of Artificial Sequence: Synthetic oligonucleotide
  Sense strand starting at position 2839 of SEQ ID NO: 916945
uaaaguuaagucuguaaag

SEQ ID NO: 1196367 - RNA, 19 nt, Artificial Sequence
  Description of Artificial Sequence: Synthetic oligonucleotide
  Antisense strand to SEQ ID NO: 1196366
cuuuacagacuuaacuuua

SEQ ID NO: 1196368 - RNA, 19 nt, Artificial Sequence
  Description of Artificial Sequence: Synthetic oligonucleotide
  Sense strand starting at position 2934 of SEQ ID NO: 916945
ccuagaaugcuggguacca

SEQ ID NO: 1196369 - RNA, 19 nt, Artificial Sequence
  Description of Artificial Sequence: Synthetic oligonucleotide
  Antisense strand to SEQ ID NO: 1196368
ugguacccagcauucuagg

SEQ ID NO: 1196370 - RNA, 19 nt, Artificial Sequence
  Description of Artificial Sequence: Synthetic oligonucleotide
  Sense strand starting at position 2935 of SEQ ID NO: 916945
cuagaaugcuggguaccaa

SEQ ID NO: 1196371 - RNA, 19 nt, Artificial Sequence
  Description of Artificial Sequence: Synthetic oligonucleotide
  Antisense strand to SEQ ID NO: 1196370
uugguacccagcauucuag

SEQ ID NO: 1196372 - RNA, 19 nt, Artificial Sequence
  Description of Artificial Sequence: Synthetic oligonucleotide
  Sense strand starting at position 2988 of SEQ ID NO: 916945
guacaugcccagcaaacau

SEQ ID NO: 1196373 - RNA, 19 nt, Artificial Sequence
  Description of Artificial Sequence: Synthetic oligonucleotide
  Antisense strand to SEQ ID NO: 1196372
auguuugcugggcauguac

SEQ ID NO: 1196374 - RNA, 19 nt, Artificial Sequence
  Description of Artificial Sequence: Synthetic oligonucleotide
  Sense strand starting at position 3193 of SEQ ID NO: 916945
guaaauauuccggagacuu

SEQ ID NO: 1196375 - RNA, 19 nt, Artificial Sequence
  Description of Artificial Sequence: Synthetic oligonucleotide
  Antisense strand to SEQ ID NO: 1196374
aagucuccggaauauuuac

SEQ ID NO: 1196376 - RNA, 19 nt, Artificial Sequence
  Description of Artificial Sequence: Synthetic oligonucleotide
  Sense strand starting at position 3244 of SEQ ID NO: 916945
guagaaaucuaucuauugu

SEQ ID NO: 1196377 - RNA, 19 nt, Artificial Sequence
  Description of Artificial Sequence: Synthetic oligonucleotide
  Antisense strand to SEQ ID NO: 1196376
acaauagauagauuucuac

SEQ ID NO: 1196378 - RNA, 19 nt, Artificial Sequence
  Description of Artificial Sequence: Synthetic oligonucleotide
  Sense strand starting at position 3303 of SEQ ID NO: 916945
uggcaagaauucuuauucu

SEQ ID NO: 1196379 - RNA, 19 nt, Artificial Sequence
  Description of Artificial Sequence: Synthetic oligonucleotide
  Antisense strand to SEQ ID NO: 1196378
agaauaagaauucuugcca

SEQ ID NO: 1196380 - RNA, 19 nt, Artificial Sequence
  Description of Artificial Sequence: Synthetic oligonucleotide
  Sense strand starting at position 3456 of SEQ ID NO: 916945
ugacauacugucuagccaa

SEQ ID NO: 1196381 - RNA, 19 nt, Artificial Sequence
  Description of Artificial Sequence: Synthetic oligonucleotide
  Antisense strand to SEQ ID NO: 1196380
uuggcuagacaguauguca

SEQ ID NO: 1196382 - RNA, 19 nt, Artificial Sequence
  Description of Artificial Sequence: Synthetic oligonucleotide
  Sense strand starting at position 3633 of SEQ ID NO: 916945
gguguuccacuaugaagaa

SEQ ID NO: 1196383 - RNA, 19 nt, Artificial Sequence
  Description of Artificial Sequence: Synthetic oligonucleotide
  Antisense strand to SEQ ID NO: 1196382
uucuucauaguggaacacc

SEQ ID NO: 1196384 - RNA, 19 nt, Artificial Sequence
  Description of Artificial Sequence: Synthetic oligonucleotide
  Sense strand starting at position 3870 of SEQ ID NO: 916945
aggcaauaaagaugagguu

SEQ ID NO: 1196385 - RNA, 19 nt, Artificial Sequence
  Description of Artificial Sequence: Synthetic oligonucleotide
  Antisense strand to SEQ ID NO: 1196384
aaccucaucuuuauugccu

SEQ ID NO: 1196386 - RNA, 19 nt, Artificial Sequence
  Description of Artificial Sequence: Synthetic oligonucleotide
  Sense strand starting at position 3943 of SEQ ID NO: 916945
guggguucuguugagacuu

SEQ ID NO: 1196387 - RNA, 19 nt, Artificial Sequence
  Description of Artificial Sequence: Synthetic oligonucleotide
  Antisense strand to SEQ ID NO: 1196386
aagucucaacagaacccac

SEQ ID NO: 1196388 - RNA, 19 nt, Artificial Sequence
  Description of Artificial Sequence: Synthetic oligonucleotide
  Sense strand starting at position 2 of SEQ ID NO: 916946
aucaacacacuguguaauu

SEQ ID NO: 1196389 - RNA, 19 nt, Artificial Sequence
  Description of Artificial Sequence: Synthetic oligonucleotide
  Antisense strand to SEQ ID NO: 1196388
aauuacacaguguguugau

SEQ ID NO: 1196390 - RNA, 19 nt, Artificial Sequence
  Description of Artificial Sequence: Synthetic oligonucleotide
  Sense strand starting at position 115 of SEQ ID NO: 916946
uuuaacauuugaggaaagu

SEQ ID NO: 1196391 - RNA, 19 nt, Artificial Sequence
  Description of Artificial Sequence: Synthetic oligonucleotide
  Antisense strand to SEQ ID NO: 1196390
acuuuccucaaauguuaaa

SEQ ID NO: 1196392 - RNA, 19 nt, Artificial Sequence
  Description of Artificial Sequence: Synthetic oligonucleotide
  Sense strand starting at position 264 of SEQ ID NO: 916946
gcucaagguggcuaagaaa

SEQ ID NO: 1196393 - RNA, 19 nt, Artificial Sequence
  Description of Artificial Sequence: Synthetic oligonucleotide
  Antisense strand to SEQ ID NO: 1196392
uuucuuagccaccuugagc

SEQ ID NO: 1196394 - RNA, 19 nt, Artificial Sequence
  Description of Artificial Sequence: Synthetic oligonucleotide
  Sense strand starting at position 393 of SEQ ID NO: 916946
cugaaaugaucaucagcau

SEQ ID NO: 1196395 - RNA, 19 nt, Artificial Sequence
  Description of Artificial Sequence: Synthetic oligonucleotide
  Antisense strand to SEQ ID NO: 1196394
augcugaugaucauuucag

SEQ ID NO: 1196396 - RNA, 19 nt, Artificial Sequence
  Description of Artificial Sequence: Synthetic oligonucleotide
  Sense strand starting at position 1104 of SEQ ID NO: 916946
gcgugucaucugccacaaa

SEQ ID NO: 1196397 - RNA, 19 nt, Artificial Sequence
  Description of Artificial Sequence: Synthetic oligonucleotide
  Antisense strand to SEQ ID NO: 1196396
uuuguggcagaugacacgc

SEQ ID NO: 1196398 - RNA, 19 nt, Artificial Sequence
  Description of Artificial Sequence: Synthetic oligonucleotide
  Sense strand starting at position 1185 of SEQ ID NO: 916946
aggauacaugauugcaaca

SEQ ID NO: 1196399 - RNA, 19 nt, Artificial Sequence
  Description of Artificial Sequence: Synthetic oligonucleotide
  Antisense strand to SEQ ID NO: 1196398
uguugcaaucauguauccu

SEQ ID NO: 1196400 - RNA, 19 nt, Artificial Sequence
  Description of Artificial Sequence: Synthetic oligonucleotide
  Sense strand starting at position 1254 of SEQ ID NO: 916946
aguugaugugauuauacac

SEQ ID NO: 1196401 - RNA, 19 nt, Artificial Sequence
  Description of Artificial Sequence: Synthetic oligonucleotide
  Antisense strand to SEQ ID NO: 1196400
guguauaaucacaucaacu

SEQ ID NO: 1196402 - RNA, 19 nt, Artificial Sequence
  Description of Artificial Sequence: Synthetic oligonucleotide
  Sense strand starting at position 1351 of SEQ ID NO: 916946
ugagauccuuugcuaugga

SEQ ID NO: 1196403 - RNA, 19 nt, Artificial Sequence
  Description of Artificial Sequence: Synthetic oligonucleotide
  Antisense strand to SEQ ID NO: 1196402
uccauagcaaaggaucuca

SEQ ID NO: 1196404 - RNA, 19 nt, Artificial Sequence
  Description of Artificial Sequence: Synthetic oligonucleotide
  Sense strand starting at position 1419 of SEQ ID NO: 916946
acauauuaggcucagagua

SEQ ID NO: 1196405 - RNA, 19 nt, Artificial Sequence
  Description of Artificial Sequence: Synthetic oligonucleotide
  Antisense strand to SEQ ID NO: 1196404
uacucugagccuaauaugu

SEQ ID NO: 1196406 - RNA, 19 nt, Artificial Sequence
  Description of Artificial Sequence: Synthetic oligonucleotide
  Sense strand starting at position 1433 of SEQ ID NO: 916946
gaguaaaggguaugagguu

SEQ ID NO: 1196407 - RNA, 19 nt, Artificial Sequence
  Description of Artificial Sequence: Synthetic oligonucleotide
  Antisense strand to SEQ ID NO: 1196406
aaccucauacccuuuacuc

SEQ ID NO: 1196408 - RNA, 19 nt, Artificial Sequence
  Description of Artificial Sequence: Synthetic oligonucleotide
  Sense strand starting at position 1445 of SEQ ID NO: 916946
ugagguuugcuagaguagu

SEQ ID NO: 1196409 - RNA, 19 nt, Artificial Sequence
  Description of Artificial Sequence: Synthetic oligonucleotide
  Antisense strand to SEQ ID NO: 1196408
acuacucuagcaaaccuca

SEQ ID NO: 1196410 - RNA, 19 nt, Artificial Sequence
  Description of Artificial Sequence: Synthetic oligonucleotide
  Sense strand starting at position 1458 of SEQ ID NO: 916946
aguaguuacagucaagcuu

SEQ ID NO: 1196411 - RNA, 19 nt, Artificial Sequence
  Description of Artificial Sequence: Synthetic oligonucleotide
  Antisense strand to SEQ ID NO: 1196410
aagcuugacuguaacuacu

SEQ ID NO: 1196412 - RNA, 19 nt, Artificial Sequence
  Description of Artificial Sequence: Synthetic oligonucleotide
  Sense strand starting at position 1631 of SEQ ID NO: 916946
ucuucuuuagguggagaga

SEQ ID NO: 1196413 - RNA, 19 nt, Artificial Sequence
  Description of Artificial Sequence: Synthetic oligonucleotide
  Antisense strand to SEQ ID NO: 1196412
ucucuccaccuaaagaaga

SEQ ID NO: 1196414 - RNA, 19 nt, Artificial Sequence
  Description of Artificial Sequence: Synthetic oligonucleotide
  Sense strand starting at position 1667 of SEQ ID NO: 916946
uggcaaucuugagcaaaca

SEQ ID NO: 1196415 - RNA, 19 nt, Artificial Sequence
  Description of Artificial Sequence: Synthetic oligonucleotide
  Antisense strand to SEQ ID NO: 1196414
uguuugcucaagauugcca

SEQ ID NO: 1196416 - RNA, 19 nt, Artificial Sequence
  Description of Artificial Sequence: Synthetic oligonucleotide
  Sense strand starting at position 1668 of SEQ ID NO: 916946
ggcaaucuugagcaaacaa

SEQ ID NO: 1196417 - RNA, 19 nt, Artificial Sequence
  Description of Artificial Sequence: Synthetic oligonucleotide
  Antisense strand to SEQ ID NO: 1196416
uuguuugcucaagauugcc

SEQ ID NO: 1196418 - RNA, 19 nt, Artificial Sequence
  Description of Artificial Sequence: Synthetic oligonucleotide
  Sense strand starting at position 1717 of SEQ ID NO: 916946
cugaaaugguucguuacag

SEQ ID NO: 1196419 - RNA, 19 nt, Artificial Sequence
  Description of Artificial Sequence: Synthetic oligonucleotide
  Antisense strand to SEQ ID NO: 1196418
cuguaacgaaccauuucag

SEQ ID NO: 1196420 - RNA, 19 nt, Artificial Sequence
  Description of Artificial Sequence: Synthetic oligonucleotide
  Sense strand starting at position 1844 of SEQ ID NO: 916946
ccaccagagcagugagaau

SEQ ID NO: 1196421 - RNA, 19 nt, Artificial Sequence
  Description of Artificial Sequence: Synthetic oligonucleotide
  Antisense strand to SEQ ID NO: 1196420
auucucacugcucuggugg

SEQ ID NO: 1196422 - RNA, 19 nt, Artificial Sequence
  Description of Artificial Sequence: Synthetic oligonucleotide
  Sense strand starting at position 1855 of SEQ ID NO: 916946
gugagaauuugcucagcug

SEQ ID NO: 1196423 - RNA, 19 nt, Artificial Sequence
  Description of Artificial Sequence: Synthetic oligonucleotide
  Antisense strand to SEQ ID NO: 1196422
cagcugagcaaauucucac

SEQ ID NO: 1196424 - RNA, 19 nt, Artificial Sequence
  Description of Artificial Sequence: Synthetic oligonucleotide
  Sense strand starting at position 2057 of SEQ ID NO: 916946
uccagauguuaacuucgau

SEQ ID NO: 1196425 - RNA, 19 nt, Artificial Sequence
  Description of Artificial Sequence: Synthetic oligonucleotide
  Antisense strand to SEQ ID NO: 1196424
aucgaaguuaacaucugga

SEQ ID NO: 1196426 - RNA, 19 nt, Artificial Sequence
  Description of Artificial Sequence: Synthetic oligonucleotide
  Sense strand starting at position 2060 of SEQ ID NO: 916946
agauguuaacuucgaugaa

SEQ ID NO: 1196427 - RNA, 19 nt, Artificial Sequence
  Description of Artificial Sequence: Synthetic oligonucleotide
  Antisense strand to SEQ ID NO: 1196426
uucaucgaaguuaacaucu

SEQ ID NO: 1196428 - RNA, 19 nt, Artificial Sequence
  Description of Artificial Sequence: Synthetic oligonucleotide
  Sense strand starting at position 2063 of SEQ ID NO: 916946
uguuaacuucgaugaacac

SEQ ID NO: 1196429 - RNA, 19 nt, Artificial Sequence
  Description of Artificial Sequence: Synthetic oligonucleotide
  Antisense strand to SEQ ID NO: 1196428
guguucaucgaaguuaaca

SEQ ID NO: 1196430 - RNA, 19 nt, Artificial Sequence
  Description of Artificial Sequence: Synthetic oligonucleotide
  Sense strand starting at position 2064 of SEQ ID NO: 916946
guuaacuucgaugaacacu

SEQ ID NO: 1196431 - RNA, 19 nt, Artificial Sequence
  Description of Artificial Sequence: Synthetic oligonucleotide
  Antisense strand to SEQ ID NO: 1196430
aguguucaucgaaguuaac

SEQ ID NO: 1196432 - RNA, 19 nt, Artificial Sequence
  Description of Artificial Sequence: Synthetic oligonucleotide
  Sense strand starting at position 2308 of SEQ ID NO: 916946
uguguuaguaugcaaagaa

SEQ ID NO: 1196433 - RNA, 19 nt, Artificial Sequence
  Description of Artificial Sequence: Synthetic oligonucleotide
  Antisense strand to SEQ ID NO: 1196432
uucuuugcauacuaacaca

SEQ ID NO: 1196434 - RNA, 19 nt, Artificial Sequence
  Description of Artificial Sequence: Synthetic oligonucleotide
  Sense strand starting at position 2399 of SEQ ID NO: 916946
ucaguuguuccauagggaa

SEQ ID NO: 1196435 - RNA, 19 nt, Artificial Sequence
  Description of Artificial Sequence: Synthetic oligonucleotide
  Antisense strand to SEQ ID NO: 1196434
uucccuauggaacaacuga

SEQ ID NO: 1196436 - RNA, 19 nt, Artificial Sequence
  Description of Artificial Sequence: Synthetic oligonucleotide
  Sense strand starting at position 2401 of SEQ ID NO: 916946
aguuguuccauagggaaau

SEQ ID NO: 1196437 - RNA, 19 nt, Artificial Sequence
  Description of Artificial Sequence: Synthetic oligonucleotide
  Antisense strand to SEQ ID NO: 1196436
auuucccuauggaacaacu

SEQ ID NO: 1196438 - RNA, 19 nt, Artificial Sequence
  Description of Artificial Sequence: Synthetic oligonucleotide
  Sense strand starting at position 2474 of SEQ ID NO: 916946
uggucauaacuaggaucau

SEQ ID NO: 1196439 - RNA, 19 nt, Artificial Sequence
  Description of Artificial Sequence: Synthetic oligonucleotide
  Antisense strand to SEQ ID NO: 1196438
augauccuaguuaugacca

SEQ ID NO: 1196440 - RNA, 19 nt, Artificial Sequence
  Description of Artificial Sequence: Synthetic oligonucleotide
  Sense strand starting at position 2743 of SEQ ID NO: 916946
ggaacucauccagguggua

SEQ ID NO: 1196441 - RNA, 19 nt, Artificial Sequence
  Description of Artificial Sequence: Synthetic oligonucleotide
  Antisense strand to SEQ ID NO: 1196440
uaccaccuggaugaguucc

SEQ ID NO: 1196442 - RNA, 19 nt, Artificial Sequence
  Description of Artificial Sequence: Synthetic oligonucleotide
  Sense strand starting at position 2746 of SEQ ID NO: 916946
acucauccaggugguauua

SEQ ID NO: 1196443 - RNA, 19 nt, Artificial Sequence
  Description of Artificial Sequence: Synthetic oligonucleotide
  Antisense strand to SEQ ID NO: 1196442
uaauaccaccuggaugagu

SEQ ID NO: 1196444 - RNA, 19 nt, Artificial Sequence
  Description of Artificial Sequence: Synthetic oligonucleotide
  Sense strand starting at position 2785 of SEQ ID NO: 916946
gcugucagacaaugaauaa

SEQ ID NO: 1196445 - RNA, 19 nt, Artificial Sequence
  Description of Artificial Sequence: Synthetic oligonucleotide
  Antisense strand to SEQ ID NO: 1196444
uuauucauugucugacagc

SEQ ID NO: 1196446 - RNA, 19 nt, Artificial Sequence
  Description of Artificial Sequence: Synthetic oligonucleotide
  Sense strand starting at position 3105 of SEQ ID NO: 916946
acaucaucuggcuagcaca

SEQ ID NO: 1196447 - RNA, 19 nt, Artificial Sequence
  Description of Artificial Sequence: Synthetic oligonucleotide
  Antisense strand to SEQ ID NO: 1196446
ugugcuagccagaugaugu

SEQ ID NO: 1196448 - RNA, 19 nt, Artificial Sequence
  Description of Artificial Sequence: Synthetic oligonucleotide
  Sense strand starting at position 3245 of SEQ ID NO: 916946
ccaccaaaccuagguuaga

SEQ ID NO: 1196449 - RNA, 19 nt, Artificial Sequence
  Description of Artificial Sequence: Synthetic oligonucleotide
  Antisense strand to SEQ ID NO: 1196448
ucuaaccuagguuuggugg

SEQ ID NO: 1196450 - RNA, 19 nt, Artificial Sequence
  Description of Artificial Sequence: Synthetic oligonucleotide
  Sense strand starting at position 3326 of SEQ ID NO: 916946
acauaagugauguagguau

SEQ ID NO: 1196451 - RNA, 19 nt, Artificial Sequence
  Description of Artificial Sequence: Synthetic oligonucleotide
  Antisense strand to SEQ ID NO: 1196450
auaccuacaucacuuaugu

SEQ ID NO: 1196452 - RNA, 19 nt, Artificial Sequence
  Description of Artificial Sequence: Synthetic oligonucleotide
  Sense strand starting at position 3363 of SEQ ID NO: 916946
ugggaaauaugcccaccau

SEQ ID NO: 1196453 - RNA, 19 nt, Artificial Sequence
  Description of Artificial Sequence: Synthetic oligonucleotide
  Antisense strand to SEQ ID NO: 1196452
auggugggcauauuuccca

SEQ ID NO: 1196454 - RNA, 19 nt, Artificial Sequence
  Description of Artificial Sequence: Synthetic oligonucleotide
  Sense strand starting at position 3414 of SEQ ID NO: 916946
aauagagaauguccaaguu

SEQ ID NO: 1196455 - RNA, 19 nt, Artificial Sequence
  Description of Artificial Sequence: Synthetic oligonucleotide
  Antisense strand to SEQ ID NO: 1196454
aacuuggacauucucuauu

SEQ ID NO: 1196456 - RNA, 19 nt, Artificial Sequence
  Description of Artificial Sequence: Synthetic oligonucleotide
  Sense strand starting at position 3434 of SEQ ID NO: 916946
ugucauaugaaguggguaa

SEQ ID NO: 1196457 - RNA, 19 nt, Artificial Sequence
  Description of Artificial Sequence: Synthetic oligonucleotide
  Antisense strand to SEQ ID NO: 1196456
uuacccacuucauaugaca

SEQ ID NO: 1196458 - RNA, 19 nt, Artificial Sequence
  Description of Artificial Sequence: Synthetic oligonucleotide
  Sense strand starting at position 3435 of SEQ ID NO: 916946
gucauaugaaguggguaau

SEQ ID NO: 1196459 - RNA, 19 nt, Artificial Sequence
  Description of Artificial Sequence: Synthetic oligonucleotide
  Antisense strand to SEQ ID NO: 1196458
auuacccacuucauaugac

SEQ ID NO: 1196460 - RNA, 19 nt, Artificial Sequence
  Description of Artificial Sequence: Synthetic oligonucleotide
  Sense strand starting at position 3436 of SEQ ID NO: 916946
ucauaugaaguggguaauu

SEQ ID NO: 1196461 - RNA, 19 nt, Artificial Sequence
  Description of Artificial Sequence: Synthetic oligonucleotide
  Antisense strand to SEQ ID NO: 1196460
aauuacccacuucauauga

SEQ ID NO: 1196462 - RNA, 19 nt, Artificial Sequence
  Description of Artificial Sequence: Synthetic oligonucleotide
  Sense strand starting at position 3605 of SEQ ID NO: 916946
aguauauaaugagcagagu

SEQ ID NO: 1196463 - RNA, 19 nt, Artificial Sequence
  Description of Artificial Sequence: Synthetic oligonucleotide
  Antisense strand to SEQ ID NO: 1196462
acucugcucauuauauacu

SEQ ID NO: 1196464 - RNA, 19 nt, Artificial Sequence
  Description of Artificial Sequence: Synthetic oligonucleotide
  Sense strand starting at position 3776 of SEQ ID NO: 916946
uugcuaagagccuaaguuu

SEQ ID NO: 1196465 - RNA, 19 nt, Artificial Sequence
  Description of Artificial Sequence: Synthetic oligonucleotide
  Antisense strand to SEQ ID NO: 1196464
aaacuuaggcucuuagcaa

SEQ ID NO: 1196466 - RNA, 19 nt, Artificial Sequence
  Description of Artificial Sequence: Synthetic oligonucleotide
  Sense strand starting at position 3906 of SEQ ID NO: 916946
gguauucgacccuaaacuc

SEQ ID NO: 1196467 - RNA, 19 nt, Artificial Sequence
  Description of Artificial Sequence: Synthetic oligonucleotide
  Antisense strand to SEQ ID NO: 1196466
gaguuuagggucgaauacc

SEQ ID NO: 1196468 - RNA, 19 nt, Artificial Sequence
  Description of Artificial Sequence: Synthetic oligonucleotide
  Sense strand starting at position 519 of SEQ ID NO: 916947
cucaucgauuuagaauuaa

SEQ ID NO: 1196469 - RNA, 19 nt, Artificial Sequence
  Description of Artificial Sequence: Synthetic oligonucleotide
  Antisense strand to SEQ ID NO: 1196468
uuaauucuaaaucgaugag

SEQ ID NO: 1196470 - RNA, 19 nt, Artificial Sequence
  Description of Artificial Sequence: Synthetic oligonucleotide
  Sense strand starting at position 600 of SEQ ID NO: 916947
augguacauauacgugaua

SEQ ID NO: 1196471 - RNA, 19 nt, Artificial Sequence
  Description of Artificial Sequence: Synthetic oligonucleotide
  Antisense strand to SEQ ID NO: 1196470
uaucacguauauguaccau

SEQ ID NO: 1196472 - RNA, 19 nt, Artificial Sequence
  Description of Artificial Sequence: Synthetic oligonucleotide
  Sense strand starting at position 603 of SEQ ID NO: 916947
guacauauacgugauacaa

SEQ ID NO: 1196473 - RNA, 19 nt, Artificial Sequence
  Description of Artificial Sequence: Synthetic oligonucleotide
  Antisense strand to SEQ ID NO: 1196472
uuguaucacguauauguac

SEQ ID NO: 1196474 - RNA, 19 nt, Artificial Sequence
  Description of Artificial Sequence: Synthetic oligonucleotide
  Sense strand starting at position 747 of SEQ ID NO: 916947
gugugaaauacacaugggu

SEQ ID NO: 1196475 - RNA, 19 nt, Artificial Sequence
  Description of Artificial Sequence: Synthetic oligonucleotide
  Antisense strand to SEQ ID NO: 1196474
acccauguguauuucacac

SEQ ID NO: 1196476 - RNA, 19 nt, Artificial Sequence
  Description of Artificial Sequence: Synthetic oligonucleotide
  Sense strand starting at position 749 of SEQ ID NO: 916947
gugaaauacacauggguuc

SEQ ID NO: 1196477 - RNA, 19 nt, Artificial Sequence
  Description of Artificial Sequence: Synthetic oligonucleotide
  Antisense strand to SEQ ID NO: 1196476
gaacccauguguauuucac

SEQ ID NO: 1196478 - RNA, 19 nt, Artificial Sequence
  Description of Artificial Sequence: Synthetic oligonucleotide
  Sense strand starting at position 790 of SEQ ID NO: 916947
ccuacuuugguauaacuga

SEQ ID NO: 1196479 - RNA, 19 nt, Artificial Sequence
  Description of Artificial Sequence: Synthetic oligonucleotide
  Antisense strand to SEQ ID NO: 1196478
ucaguuauaccaaaguagg

SEQ ID NO: 1196480 - RNA, 19 nt, Artificial Sequence
  Description of Artificial Sequence: Synthetic oligonucleotide
  Sense strand starting at position 825 of SEQ ID NO: 916947
guugauuaaagguauguua

SEQ ID NO: 1196481 - RNA, 19 nt, Artificial Sequence
  Description of Artificial Sequence: Synthetic oligonucleotide
  Antisense strand to SEQ ID NO: 1196480
uaacauaccuuuaaucaac

SEQ ID NO: 1196482 - RNA, 19 nt, Artificial Sequence
  Description of Artificial Sequence: Synthetic oligonucleotide
  Sense strand starting at position 827 of SEQ ID NO: 916947
ugauuaaagguauguuaug

SEQ ID NO: 1196483 - RNA, 19 nt, Artificial Sequence
  Description of Artificial Sequence: Synthetic oligonucleotide
  Antisense strand to SEQ ID NO: 1196482
cauaacauaccuuuaauca

SEQ ID NO: 1196484 - RNA, 19 nt, Artificial Sequence
  Description of Artificial Sequence: Synthetic oligonucleotide
  Sense strand starting at position 1126 of SEQ ID NO: 916947
gaaagaaaggucugcuuua

SEQ ID NO: 1196485 - RNA, 19 nt, Artificial Sequence
  Description of Artificial Sequence: Synthetic oligonucleotide
  Antisense strand to SEQ ID NO: 1196484
uaaagcagaccuuucuuuc

SEQ ID NO: 1196486 - RNA, 19 nt, Artificial Sequence
  Description of Artificial Sequence: Synthetic oligonucleotide
  Sense strand starting at position 1127 of SEQ ID NO: 916947
aaagaaaggucugcuuuag

SEQ ID NO: 1196487 - RNA, 19 nt, Artificial Sequence
  Description of Artificial Sequence: Synthetic oligonucleotide
  Antisense strand to SEQ ID NO: 1196486
cuaaagcagaccuuucuuu

SEQ ID NO: 1196488 - RNA, 19 nt, Artificial Sequence
  Description of Artificial Sequence: Synthetic oligonucleotide
  Sense strand starting at position 1206 of SEQ ID NO: 916947
uuggcaaagcauuaagaca

SEQ ID NO: 1196489 - RNA, 19 nt, Artificial Sequence
  Description of Artificial Sequence: Synthetic oligonucleotide
  Antisense strand to SEQ ID NO: 1196488
ugucuuaaugcuuugccaa

SEQ ID NO: 1196490 - RNA, 19 nt, Artificial Sequence
  Description of Artificial Sequence: Synthetic oligonucleotide
  Sense strand starting at position 1278 of SEQ ID NO: 916947
guaaauggcaaguaauaug

SEQ ID NO: 1196491 - RNA, 19 nt, Artificial Sequence
  Description of Artificial Sequence: Synthetic oligonucleotide
  Antisense strand to SEQ ID NO: 1196490
cauauuacuugccauuuac

SEQ ID NO: 1196492 - RNA, 19 nt, Artificial Sequence
  Description of Artificial Sequence: Synthetic oligonucleotide
  Sense strand starting at position 1283 of SEQ ID NO: 916947
uggcaaguaauaugaggaa

SEQ ID NO: 1196493 - RNA, 19 nt, Artificial Sequence
  Description of Artificial Sequence: Synthetic oligonucleotide
  Antisense strand to SEQ ID NO: 1196492
uuccucauauuacuugcca

SEQ ID NO: 1196494 - RNA, 19 nt, Artificial Sequence
  Description of Artificial Sequence: Synthetic oligonucleotide
  Sense strand starting at position 1429 of SEQ ID NO: 916947
gucagagugaaugguauca

SEQ ID NO: 1196495 - RNA, 19 nt, Artificial Sequence
  Description of Artificial Sequence: Synthetic oligonucleotide
  Antisense strand to SEQ ID NO: 1196494
ugauaccauucacucugac

SEQ ID NO: 1196496 - RNA, 19 nt, Artificial Sequence
  Description of Artificial Sequence: Synthetic oligonucleotide
  Sense strand starting at position 1543 of SEQ ID NO: 916947
acauuuauauacguguguu

SEQ ID NO: 1196497 - RNA, 19 nt, Artificial Sequence
  Description of Artificial Sequence: Synthetic oligonucleotide
  Antisense strand to SEQ ID NO: 1196496
aacacacguauauaaaugu

SEQ ID NO: 1196498 - RNA, 19 nt, Artificial Sequence
  Description of Artificial Sequence: Synthetic oligonucleotide
  Sense strand starting at position 1665 of SEQ ID NO: 916947
auugacgaucuugagcaaa

SEQ ID NO: 1196499 - RNA, 19 nt, Artificial Sequence
  Description of Artificial Sequence: Synthetic oligonucleotide
  Antisense strand to SEQ ID NO: 1196498
uuugcucaagaucgucaau

SEQ ID NO: 1196500 - RNA, 19 nt, Artificial Sequence
  Description of Artificial Sequence: Synthetic oligonucleotide
  Sense strand starting at position 1667 of SEQ ID NO: 916947
ugacgaucuugagcaaaua

SEQ ID NO: 1196501 - RNA, 19 nt, Artificial Sequence
  Description of Artificial Sequence: Synthetic oligonucleotide
  Antisense strand to SEQ ID NO: 1196500
uauuugcucaagaucguca

SEQ ID NO: 1196502 - RNA, 19 nt, Artificial Sequence
  Description of Artificial Sequence: Synthetic oligonucleotide
  Sense strand starting at position 1733 of SEQ ID NO: 916947
cugcccaggcauuagaaau

SEQ ID NO: 1196503 - RNA, 19 nt, Artificial Sequence
  Description of Artificial Sequence: Synthetic oligonucleotide
  Antisense strand to SEQ ID NO: 1196502
auuucuaaugccugggcag

SEQ ID NO: 1196504 - RNA, 19 nt, Artificial Sequence
  Description of Artificial Sequence: Synthetic oligonucleotide
  Sense strand starting at position 1795 of SEQ ID NO: 916947
guugaauaccaauguaaua

SEQ ID NO: 1196505 - RNA, 19 nt, Artificial Sequence
  Description of Artificial Sequence: Synthetic oligonucleotide
  Antisense strand to SEQ ID NO: 1196504
uauuacauugguauucaac

SEQ ID NO: 1196506 - RNA, 19 nt, Artificial Sequence
  Description of Artificial Sequence: Synthetic oligonucleotide
  Sense strand starting at position 1844 of SEQ ID NO: 916947
cugccagagcagcaauaau

SEQ ID NO: 1196507 - RNA, 19 nt, Artificial Sequence
  Description of Artificial Sequence: Synthetic oligonucleotide
  Antisense strand to SEQ ID NO: 1196506
auuauugcugcucuggcag

SEQ ID NO: 1196508 - RNA, 19 nt, Artificial Sequence
  Description of Artificial Sequence: Synthetic oligonucleotide
  Sense strand starting at position 1892 of SEQ ID NO: 916947
ugacccaggcaaugaaauu

SEQ ID NO: 1196509 - RNA, 19 nt, Artificial Sequence
  Description of Artificial Sequence: Synthetic oligonucleotide
  Antisense strand to SEQ ID NO: 1196508
aauuucauugccuggguca

SEQ ID NO: 1196510 - RNA, 19 nt, Artificial Sequence
  Description of Artificial Sequence: Synthetic oligonucleotide
  Sense strand starting at position 2045 of SEQ ID NO: 916947
gauggugacuccucugaua

SEQ ID NO: 1196511 - RNA, 19 nt, Artificial Sequence
  Description of Artificial Sequence: Synthetic oligonucleotide
  Antisense strand to SEQ ID NO: 1196510
uaucagaggagucaccauc

SEQ ID NO: 1196512 - RNA, 19 nt, Artificial Sequence
  Description of Artificial Sequence: Synthetic oligonucleotide
  Sense strand starting at position 2090 of SEQ ID NO: 916947
uugauuccugaauguccaa

SEQ ID NO: 1196513 - RNA, 19 nt, Artificial Sequence
  Description of Artificial Sequence: Synthetic oligonucleotide
  Antisense strand to SEQ ID NO: 1196512
uuggacauucaggaaucaa

SEQ ID NO: 1196514 - RNA, 19 nt, Artificial Sequence
  Description of Artificial Sequence: Synthetic oligonucleotide
  Sense strand starting at position 2183 of SEQ ID NO: 916947
caaugcugccuuuauggga

SEQ ID NO: 1196515 - RNA, 19 nt, Artificial Sequence
  Description of Artificial Sequence: Synthetic oligonucleotide
  Antisense strand to SEQ ID NO: 1196514
ucccauaaaggcagcauug

SEQ ID NO: 1196516 - RNA, 19 nt, Artificial Sequence
  Description of Artificial Sequence: Synthetic oligonucleotide
  Sense strand starting at position 2594 of SEQ ID NO: 916947
uuauaauuugguugcuguu

SEQ ID NO: 1196517 - RNA, 19 nt, Artificial Sequence
  Description of Artificial Sequence: Synthetic oligonucleotide
  Antisense strand to SEQ ID NO: 1196516
aacagcaaccaaauuauaa

SEQ ID NO: 1196518 - RNA, 19 nt, Artificial Sequence
  Description of Artificial Sequence: Synthetic oligonucleotide
  Sense strand starting at position 2596 of SEQ ID NO: 916947
auaauuugguugcuguuaa

SEQ ID NO: 1196519 - RNA, 19 nt, Artificial Sequence
  Description of Artificial Sequence: Synthetic oligonucleotide
  Antisense strand to SEQ ID NO: 1196518
uuaacagcaaccaaauuau

SEQ ID NO: 1196520 - RNA, 19 nt, Artificial Sequence
  Description of Artificial Sequence: Synthetic oligonucleotide
  Sense strand starting at position 2860 of SEQ ID NO: 916947
uuguaaacauuccugagua

SEQ ID NO: 1196521 - RNA, 19 nt, Artificial Sequence
  Description of Artificial Sequence: Synthetic oligonucleotide
  Antisense strand to SEQ ID NO: 1196520
uacucaggaauguuuacaa

SEQ ID NO: 1196522 - RNA, 19 nt, Artificial Sequence
  Description of Artificial Sequence: Synthetic oligonucleotide
  Sense strand starting at position 2878 of SEQ ID NO: 916947
accagaccuuugucacaua

SEQ ID NO: 1196523 - RNA, 19 nt, Artificial Sequence
  Description of Artificial Sequence: Synthetic oligonucleotide
  Antisense strand to SEQ ID NO: 1196522
uaugugacaaaggucuggu

SEQ ID NO: 1196524 - RNA, 19 nt, Artificial Sequence
  Description of Artificial Sequence: Synthetic oligonucleotide
  Sense strand starting at position 3057 of SEQ ID NO: 916947
augagaacauguccacacu

SEQ ID NO: 1196525 - RNA, 19 nt, Artificial Sequence
  Description of Artificial Sequence: Synthetic oligonucleotide
  Antisense strand to SEQ ID NO: 1196524
aguguggacauguucucau

SEQ ID NO: 1196526 - RNA, 19 nt, Artificial Sequence
  Description of Artificial Sequence: Synthetic oligonucleotide
  Sense strand starting at position 3100 of SEQ ID NO: 916947
ugaguaacucauggaauca

SEQ ID NO: 1196527 - RNA, 19 nt, Artificial Sequence
  Description of Artificial Sequence: Synthetic oligonucleotide
  Antisense strand to SEQ ID NO: 1196526
ugauuccaugaguuacuca

SEQ ID NO: 1196528 - RNA, 19 nt, Artificial Sequence
  Description of Artificial Sequence: Synthetic oligonucleotide
  Sense strand starting at position 3321 of SEQ ID NO: 916947
cugcuaauccaagaguuug

SEQ ID NO: 1196529 - RNA, 19 nt, Artificial Sequence
  Description of Artificial Sequence: Synthetic oligonucleotide
  Antisense strand to SEQ ID NO: 1196528
caaacucuuggauuagcag

SEQ ID NO: 1196530 - RNA, 19 nt, Artificial Sequence
  Description of Artificial Sequence: Synthetic oligonucleotide
  Sense strand starting at position 3341 of SEQ ID NO: 916947
gaaauaugugcgcccuugu

SEQ ID NO: 1196531 - RNA, 19 nt, Artificial Sequence
  Description of Artificial Sequence: Synthetic oligonucleotide
  Antisense strand to SEQ ID NO: 1196530
acaagggcgcacauauuuc

SEQ ID NO: 1196532 - RNA, 19 nt, Artificial Sequence
  Description of Artificial Sequence: Synthetic oligonucleotide
  Sense strand starting at position 3414 of SEQ ID NO: 916947
uguaauaugaggugaauau

SEQ ID NO: 1196533 - RNA, 19 nt, Artificial Sequence
  Description of Artificial Sequence: Synthetic oligonucleotide
  Antisense strand to SEQ ID NO: 1196532
auauucaccucauauuaca

SEQ ID NO: 1196534 - RNA, 19 nt, Artificial Sequence
  Description of Artificial Sequence: Synthetic oligonucleotide
  Sense strand starting at position 3456 of SEQ ID NO: 916947
gaaagaucuggaggcugua

SEQ ID NO: 1196535 - RNA, 19 nt, Artificial Sequence
  Description of Artificial Sequence: Synthetic oligonucleotide
  Antisense strand to SEQ ID NO: 1196534
uacagccuccagaucuuuc

SEQ ID NO: 1196536 - RNA, 19 nt, Artificial Sequence
  Description of Artificial Sequence: Synthetic oligonucleotide
  Sense strand starting at position 3533 of SEQ ID NO: 916947
ucuugaguuguauaagaau

SEQ ID NO: 1196537 - RNA, 19 nt, Artificial Sequence
  Description of Artificial Sequence: Synthetic oligonucleotide
  Antisense strand to SEQ ID NO: 1196536
auucuuauacaacucaaga

SEQ ID NO: 1196538 - RNA, 19 nt, Artificial Sequence
  Description of Artificial Sequence: Synthetic oligonucleotide
  Sense strand starting at position 3541 of SEQ ID NO: 916947
uguauaagaauguacguaa

SEQ ID NO: 1196539 - RNA, 19 nt, Artificial Sequence
  Description of Artificial Sequence: Synthetic oligonucleotide
  Antisense strand to SEQ ID NO: 1196538
uuacguacauucuuauaca

SEQ ID NO: 1196540 - RNA, 19 nt, Artificial Sequence
  Description of Artificial Sequence: Synthetic oligonucleotide
  Sense strand starting at position 3544 of SEQ ID NO: 916947
auaagaauguacguaaaug

SEQ ID NO: 1196541 - RNA, 19 nt, Artificial Sequence
  Description of Artificial Sequence: Synthetic oligonucleotide
  Antisense strand to SEQ ID NO: 1196540
cauuuacguacauucuuau

SEQ ID NO: 1196542 - RNA, 19 nt, Artificial Sequence
  Description of Artificial Sequence: Synthetic oligonucleotide
  Sense strand starting at position 3580 of SEQ ID NO: 916947
guauauaaugagcagagca

SEQ ID NO: 1196543 - RNA, 19 nt, Artificial Sequence
  Description of Artificial Sequence: Synthetic oligonucleotide
  Antisense strand to SEQ ID NO: 1196542
ugcucugcucauuauauac

SEQ ID NO: 1196544 - RNA, 19 nt, Artificial Sequence
  Description of Artificial Sequence: Synthetic oligonucleotide
  Sense strand starting at position 3688 of SEQ ID NO: 916947
agguaagagcaauguauca

SEQ ID NO: 1196545 - RNA, 19 nt, Artificial Sequence
  Description of Artificial Sequence: Synthetic oligonucleotide
  Antisense strand to SEQ ID NO: 1196544
ugauacauugcucuuaccu

SEQ ID NO: 1196546 - RNA, 19 nt, Artificial Sequence
  Description of Artificial Sequence: Synthetic oligonucleotide
  Sense strand starting at position 3964 of SEQ ID NO: 916947
ggcuucuugcacuagauau

SEQ ID NO: 1196547 - RNA, 19 nt, Artificial Sequence
  Description of Artificial Sequence: Synthetic oligonucleotide
  Antisense strand to SEQ ID NO: 1196546
auaucuagugcaagaagcc

SEQ ID NO: 1196548 - RNA, 19 nt, Artificial Sequence
  Description of Artificial Sequence: Synthetic oligonucleotide
  Sense strand starting at position 119 of SEQ ID NO: 916948
ggaguucucuuaucugaag

SEQ ID NO: 1196549 - RNA, 19 nt, Artificial Sequence
  Description of Artificial Sequence: Synthetic oligonucleotide
  Antisense strand to SEQ ID NO: 1196548
cuucagauaagagaacucc

SEQ ID NO: 1196550 - RNA, 19 nt, Artificial Sequence
  Description of Artificial Sequence: Synthetic oligonucleotide
  Sense strand starting at position 277 of SEQ ID NO: 916948
agaaaugacuguucuaacu

SEQ ID NO: 1196551 - RNA, 19 nt, Artificial Sequence
  Description of Artificial Sequence: Synthetic oligonucleotide
  Antisense strand to SEQ ID NO: 1196550
aguuagaacagucauuucu

SEQ ID NO: 1196552 - RNA, 19 nt, Artificial Sequence
  Description of Artificial Sequence: Synthetic oligonucleotide
  Sense strand starting at position 287 of SEQ ID NO: 916948
guucuaacugcauauggaa

SEQ ID NO: 1196553 - RNA, 19 nt, Artificial Sequence
  Description of Artificial Sequence: Synthetic oligonucleotide
  Antisense strand to SEQ ID NO: 1196552
uuccauaugcaguuagaac

SEQ ID NO: 1196554 - RNA, 19 nt, Artificial Sequence
  Description of Artificial Sequence: Synthetic oligonucleotide
  Sense strand starting at position 559 of SEQ ID NO: 916948
acauccucauuagugauua

SEQ ID NO: 1196555 - RNA, 19 nt, Artificial Sequence
  Description of Artificial Sequence: Synthetic oligonucleotide
  Antisense strand to SEQ ID NO: 1196554
uaaucacuaaugaggaugu

SEQ ID NO: 1196556 - RNA, 19 nt, Artificial Sequence
  Description of Artificial Sequence: Synthetic oligonucleotide
  Sense strand starting at position 563 of SEQ ID NO: 916948
ccucauuagugauuaagaa

SEQ ID NO: 1196557 - RNA, 19 nt, Artificial Sequence
  Description of Artificial Sequence: Synthetic oligonucleotide
  Antisense strand to SEQ ID NO: 1196556
uucuuaaucacuaaugagg

SEQ ID NO: 1196558 - RNA, 19 nt, Artificial Sequence
  Description of Artificial Sequence: Synthetic oligonucleotide
  Sense strand starting at position 571 of SEQ ID NO: 916948
gugauuaagaauugaacga

SEQ ID NO: 1196559 - RNA, 19 nt, Artificial Sequence
  Description of Artificial Sequence: Synthetic oligonucleotide
  Antisense strand to SEQ ID NO: 1196558
ucguucaauucuuaaucac

SEQ ID NO: 1196560 - RNA, 19 nt, Artificial Sequence
  Description of Artificial Sequence: Synthetic oligonucleotide
  Sense strand starting at position 575 of SEQ ID NO: 916948
uuaagaauugaacgaccuu

SEQ ID NO: 1196561 - RNA, 19 nt, Artificial Sequence
  Description of Artificial Sequence: Synthetic oligonucleotide
  Antisense strand to SEQ ID NO: 1196560
aaggucguucaauucuuaa

SEQ ID NO: 1196562 - RNA, 19 nt, Artificial Sequence
  Description of Artificial Sequence: Synthetic oligonucleotide
  Sense strand starting at position 694 of SEQ ID NO: 916948
auaagcuguuaguucuuaa

SEQ ID NO: 1196563 - RNA, 19 nt, Artificial Sequence
  Description of Artificial Sequence: Synthetic oligonucleotide
  Antisense strand to SEQ ID NO: 1196562
uuaagaacuaacagcuuau

SEQ ID NO: 1196564 - RNA, 19 nt, Artificial Sequence
  Description of Artificial Sequence: Synthetic oligonucleotide
  Sense strand starting at position 697 of SEQ ID NO: 916948
agcuguuaguucuuaauaa

SEQ ID NO: 1196565 - RNA, 19 nt, Artificial Sequence
  Description of Artificial Sequence: Synthetic oligonucleotide
  Antisense strand to SEQ ID NO: 1196564
uuauuaagaacuaacagcu

SEQ ID NO: 1196566 - RNA, 19 nt, Artificial Sequence
  Description of Artificial Sequence: Synthetic oligonucleotide
  Sense strand starting at position 1180 of SEQ ID NO: 916948
guugaaggauagcugaaua

SEQ ID NO: 1196567 - RNA, 19 nt, Artificial Sequence
  Description of Artificial Sequence: Synthetic oligonucleotide
  Antisense strand to SEQ ID NO: 1196566
uauucagcuauccuucaac

SEQ ID NO: 1196568 - RNA, 19 nt, Artificial Sequence
  Description of Artificial Sequence: Synthetic oligonucleotide
  Sense strand starting at position 1196 of SEQ ID NO: 916948
auauaauagcuuggcagaa

SEQ ID NO: 1196569 - RNA, 19 nt, Artificial Sequence
  Description of Artificial Sequence: Synthetic oligonucleotide
  Antisense strand to SEQ ID NO: 1196568
uucugccaagcuauuauau

SEQ ID NO: 1196570 - RNA, 19 nt, Artificial Sequence
  Description of Artificial Sequence: Synthetic oligonucleotide
  Sense strand starting at position 1460 of SEQ ID NO: 916948
ugguuagagucauauuuga

SEQ ID NO: 1196571 - RNA, 19 nt, Artificial Sequence
  Description of Artificial Sequence: Synthetic oligonucleotide
  Antisense strand to SEQ ID NO: 1196570
ucaaauaugacucuaacca

SEQ ID NO: 1196572 - RNA, 19 nt, Artificial Sequence
  Description of Artificial Sequence: Synthetic oligonucleotide
  Sense strand starting at position 1465 of SEQ ID NO: 916948
agagucauauuugaauggu

SEQ ID NO: 1196573 - RNA, 19 nt, Artificial Sequence
  Description of Artificial Sequence: Synthetic oligonucleotide
  Antisense strand to SEQ ID NO: 1196572
accauucaaauaugacucu

SEQ ID NO: 1196574 - RNA, 19 nt, Artificial Sequence
  Description of Artificial Sequence: Synthetic oligonucleotide
  Sense strand starting at position 1667 of SEQ ID NO: 916948
uggcaauccugagcaaaua

SEQ ID NO: 1196575 - RNA, 19 nt, Artificial Sequence
  Description of Artificial Sequence: Synthetic oligonucleotide
  Antisense strand to SEQ ID NO: 1196574
uauuugcucaggauugcca

SEQ ID NO: 1196576 - RNA, 19 nt, Artificial Sequence
  Description of Artificial Sequence: Synthetic oligonucleotide
  Sense strand starting at position 1668 of SEQ ID NO: 916948
ggcaauccugagcaaauaa

SEQ ID NO: 1196577 - RNA, 19 nt, Artificial Sequence
  Description of Artificial Sequence: Synthetic oligonucleotide
  Antisense strand to SEQ ID NO: 1196576
uuauuugcucaggauugcc

SEQ ID NO: 1196578 - RNA, 19 nt, Artificial Sequence
  Description of Artificial Sequence: Synthetic oligonucleotide
  Sense strand starting at position 1726 of SEQ ID NO: 916948
uugguuacugcccagacau

SEQ ID NO: 1196579 - RNA, 19 nt, Artificial Sequence
  Description of Artificial Sequence: Synthetic oligonucleotide
  Antisense strand to SEQ ID NO: 1196578
augucugggcaguaaccaa

SEQ ID NO: 1196580 - RNA, 19 nt, Artificial Sequence
  Description of Artificial Sequence: Synthetic oligonucleotide
  Sense strand starting at position 2152 of SEQ ID NO: 916948
gucagaaaucaccauggca

SEQ ID NO: 1196581 - RNA, 19 nt, Artificial Sequence
  Description of Artificial Sequence: Synthetic oligonucleotide
  Antisense strand to SEQ ID NO: 1196580
ugccauggugauuucugac

SEQ ID NO: 1196582 - RNA, 19 nt, Artificial Sequence
  Description of Artificial Sequence: Synthetic oligonucleotide
  Sense strand starting at position 2344 of SEQ ID NO: 916948
cuuccaguguuugcaauuu

SEQ ID NO: 1196583 - RNA, 19 nt, Artificial Sequence
  Description of Artificial Sequence: Synthetic oligonucleotide
  Antisense strand to SEQ ID NO: 1196582
aaauugcaaacacuggaag

SEQ ID NO: 1196584 - RNA, 19 nt, Artificial Sequence
  Description of Artificial Sequence: Synthetic oligonucleotide
  Sense strand starting at position 2381 of SEQ ID NO: 916948
caucauuugucuuuagcga

SEQ ID NO: 1196585 - RNA, 19 nt, Artificial Sequence
  Description of Artificial Sequence: Synthetic oligonucleotide
  Antisense strand to SEQ ID NO: 1196584
ucgcuaaagacaaaugaug

SEQ ID NO: 1196586 - RNA, 19 nt, Artificial Sequence
  Description of Artificial Sequence: Synthetic oligonucleotide
  Sense strand starting at position 2419 of SEQ ID NO: 916948
uuuauaacccgauauguag

SEQ ID NO: 1196587 - RNA, 19 nt, Artificial Sequence
  Description of Artificial Sequence: Synthetic oligonucleotide
  Antisense strand to SEQ ID NO: 1196586
cuacauaucggguuauaaa

SEQ ID NO: 1196588 - RNA, 19 nt, Artificial Sequence
  Description of Artificial Sequence: Synthetic oligonucleotide
  Sense strand starting at position 2425 of SEQ ID NO: 916948
acccgauauguagaucgua

SEQ ID NO: 1196589 - RNA, 19 nt, Artificial Sequence
  Description of Artificial Sequence: Synthetic oligonucleotide
  Antisense strand to SEQ ID NO: 1196588
uacgaucuacauaucgggu

SEQ ID NO: 1196590 - RNA, 19 nt, Artificial Sequence
  Description of Artificial Sequence: Synthetic oligonucleotide
  Sense strand starting at position 2428 of SEQ ID NO: 916948
cgauauguagaucguauag

SEQ ID NO: 1196591 - RNA, 19 nt, Artificial Sequence
  Description of Artificial Sequence: Synthetic oligonucleotide
  Antisense strand to SEQ ID NO: 1196590
cuauacgaucuacauaucg

SEQ ID NO: 1196592 - RNA, 19 nt, Artificial Sequence
  Description of Artificial Sequence: Synthetic oligonucleotide
  Sense strand starting at position 2465 of SEQ ID NO: 916948
aagggagcuugaucauaac

SEQ ID NO: 1196593 - RNA, 19 nt, Artificial Sequence
  Description of Artificial Sequence: Synthetic oligonucleotide
  Antisense strand to SEQ ID NO: 1196592
guuaugaucaagcucccuu

SEQ ID NO: 1196594 - RNA, 19 nt, Artificial Sequence
  Description of Artificial Sequence: Synthetic oligonucleotide
  Sense strand starting at position 2471 of SEQ ID NO: 916948
gcuugaucauaacuaagau

SEQ ID NO: 1196595 - RNA, 19 nt, Artificial Sequence
  Description of Artificial Sequence: Synthetic oligonucleotide
  Antisense strand to SEQ ID NO: 1196594
aucuuaguuaugaucaagc

SEQ ID NO: 1196596 - RNA, 19 nt, Artificial Sequence
  Description of Artificial Sequence: Synthetic oligonucleotide
  Sense strand starting at position 2565 of SEQ ID NO: 916948
agauuuacuugagaaccac

SEQ ID NO: 1196597 - RNA, 19 nt, Artificial Sequence
  Description of Artificial Sequence: Synthetic oligonucleotide
  Antisense strand to SEQ ID NO: 1196596
gugguucucaaguaaaucu

SEQ ID NO: 1196598 - RNA, 19 nt, Artificial Sequence
  Description of Artificial Sequence: Synthetic oligonucleotide
  Sense strand starting at position 2747 of SEQ ID NO: 916948
ggagguuguccaggugaaa

SEQ ID NO: 1196599 - RNA, 19 nt, Artificial Sequence
  Description of Artificial Sequence: Synthetic oligonucleotide
  Antisense strand to SEQ ID NO: 1196598
uuucaccuggacaaccucc

SEQ ID NO: 1196600 - RNA, 19 nt, Artificial Sequence
  Description of Artificial Sequence: Synthetic oligonucleotide
  Sense strand starting at position 2750 of SEQ ID NO: 916948
gguuguccaggugaaauua

SEQ ID NO: 1196601 - RNA, 19 nt, Artificial Sequence
  Description of Artificial Sequence: Synthetic oligonucleotide
  Antisense strand to SEQ ID NO: 1196600
uaauuucaccuggacaacc

SEQ ID NO: 1196602 - RNA, 19 nt, Artificial Sequence
  Description of Artificial Sequence: Synthetic oligonucleotide
  Sense strand starting at position 2758 of SEQ ID NO: 916948
aggugaaauuaguccuauu

SEQ ID NO: 1196603 - RNA, 19 nt, Artificial Sequence
  Description of Artificial Sequence: Synthetic oligonucleotide
  Antisense strand to SEQ ID NO: 1196602
aauaggacuaauuucaccu

SEQ ID NO: 1196604 - RNA, 19 nt, Artificial Sequence
  Description of Artificial Sequence: Synthetic oligonucleotide
  Sense strand starting at position 2910 of SEQ ID NO: 916948
uuauaaguauuccugagua

SEQ ID NO: 1196605 - RNA, 19 nt, Artificial Sequence
  Description of Artificial Sequence: Synthetic oligonucleotide
  Antisense strand to SEQ ID NO: 1196604
uacucaggaauacuuauaa

SEQ ID NO: 1196606 - RNA, 19 nt, Artificial Sequence
  Description of Artificial Sequence: Synthetic oligonucleotide
  Sense strand starting at position 2912 of SEQ ID NO: 916948
auaaguauuccugaguacc

SEQ ID NO: 1196607 - RNA, 19 nt, Artificial Sequence
  Description of Artificial Sequence: Synthetic oligonucleotide
  Antisense strand to SEQ ID NO: 1196606
gguacucaggaauacuuau

SEQ ID NO: 1196608 - RNA, 19 nt, Artificial Sequence
  Description of Artificial Sequence: Synthetic oligonucleotide
  Sense strand starting at position 2914 of SEQ ID NO: 916948
aaguauuccugaguaccag

SEQ ID NO: 1196609 - RNA, 19 nt, Artificial Sequence
  Description of Artificial Sequence: Synthetic oligonucleotide
  Antisense strand to SEQ ID NO: 1196608
cugguacucaggaauacuu

SEQ ID NO: 1196610 - RNA, 19 nt, Artificial Sequence
  Description of Artificial Sequence: Synthetic oligonucleotide
  Sense strand starting at position 2915 of SEQ ID NO: 916948
aguauuccugaguaccaga

SEQ ID NO: 1196611 - RNA, 19 nt, Artificial Sequence
  Description of Artificial Sequence: Synthetic oligonucleotide
  Antisense strand to SEQ ID NO: 1196610
ucugguacucaggaauacu

SEQ ID NO: 1196612 - RNA, 19 nt, Artificial Sequence
  Description of Artificial Sequence: Synthetic oligonucleotide
  Sense strand starting at position 3053 of SEQ ID NO: 916948
auagaaauuugagauagcu

SEQ ID NO: 1196613 - RNA, 19 nt, Artificial Sequence
  Description of Artificial Sequence: Synthetic oligonucleotide
  Antisense strand to SEQ ID NO: 1196612
agcuaucucaaauuucuau

SEQ ID NO: 1196614 - RNA, 19 nt, Artificial Sequence
  Description of Artificial Sequence: Synthetic oligonucleotide
  Sense strand starting at position 3140 of SEQ ID NO: 916948
gaaggagaaucagaaacua

SEQ ID NO: 1196615 - RNA, 19 nt, Artificial Sequence
  Description of Artificial Sequence: Synthetic oligonucleotide
  Antisense strand to SEQ ID NO: 1196614
uaguuucugauucuccuuc

SEQ ID NO: 1196616 - RNA, 19 nt, Artificial Sequence
  Description of Artificial Sequence: Synthetic oligonucleotide
  Sense strand starting at position 3463 of SEQ ID NO: 916948
ucaugugagguggauaauu

SEQ ID NO: 1196617 - RNA, 19 nt, Artificial Sequence
  Description of Artificial Sequence: Synthetic oligonucleotide
  Antisense strand to SEQ ID NO: 1196616
aauuauccaccucacauga

SEQ ID NO: 1196618 - RNA, 19 nt, Artificial Sequence
  Description of Artificial Sequence: Synthetic oligonucleotide
  Sense strand starting at position 3586 of SEQ ID NO: 916948
guuguauaagaauguauac

SEQ ID NO: 1196619 - RNA, 19 nt, Artificial Sequence
  Description of Artificial Sequence: Synthetic oligonucleotide
  Antisense strand to SEQ ID NO: 1196618
guauacauucuuauacaac

SEQ ID NO: 1196620 - RNA, 19 nt, Artificial Sequence
  Description of Artificial Sequence: Synthetic oligonucleotide
  Sense strand starting at position 3648 of SEQ ID NO: 916948
aauaauuucuaugagacgu

SEQ ID NO: 1196621 - RNA, 19 nt, Artificial Sequence
  Description of Artificial Sequence: Synthetic oligonucleotide
  Antisense strand to SEQ ID NO: 1196620
acgucucauagaaauuauu

SEQ ID NO: 1196622 - RNA, 19 nt, Artificial Sequence
  Description of Artificial Sequence: Synthetic oligonucleotide
  Sense strand starting at position 3658 of SEQ ID NO: 916948
augagacguuucuccuaau

SEQ ID NO: 1196623 - RNA, 19 nt, Artificial Sequence
  Description of Artificial Sequence: Synthetic oligonucleotide
  Antisense strand to SEQ ID NO: 1196622
auuaggagaaacgucucau

SEQ ID NO: 1196624 - RNA, 19 nt, Artificial Sequence
  Description of Artificial Sequence: Synthetic oligonucleotide
  Sense strand starting at position 3659 of SEQ ID NO: 916948
ugagacguuucuccuaauu

SEQ ID NO: 1196625 - RNA, 19 nt, Artificial Sequence
  Description of Artificial Sequence: Synthetic oligonucleotide
  Antisense strand to SEQ ID NO: 1196624
aauuaggagaaacgucuca

SEQ ID NO: 1196626 - RNA, 19 nt, Artificial Sequence
  Description of Artificial Sequence: Synthetic oligonucleotide
  Sense strand starting at position 3982 of SEQ ID NO: 916948
ggugcauuccuacauguuc

SEQ ID NO: 1196627 - RNA, 19 nt, Artificial Sequence
  Description of Artificial Sequence: Synthetic oligonucleotide
  Antisense strand to SEQ ID NO: 1196626
gaacauguaggaaugcacc

SEQ ID NO: 1196628 - RNA, 19 nt, Artificial Sequence
  Description of Artificial Sequence: Synthetic oligonucleotide
  Sense strand starting at position 87 of SEQ ID NO: 916949
aauggaagguaaggauaua

SEQ ID NO: 1196629 - RNA, 19 nt, Artificial Sequence
  Description of Artificial Sequence: Synthetic oligonucleotide
  Antisense strand to SEQ ID NO: 1196628
uauauccuuaccuuccauu

SEQ ID NO: 1196630 - RNA, 19 nt, Artificial Sequence
  Description of Artificial Sequence: Synthetic oligonucleotide
  Sense strand starting at position 254 of SEQ ID NO: 916949
agaucaugaucaugauauu

SEQ ID NO: 1196631 - RNA, 19 nt, Artificial Sequence
  Description of Artificial Sequence: Synthetic oligonucleotide
  Antisense strand to SEQ ID NO: 1196630
aauaucaugaucaugaucu

SEQ ID NO: 1196632 - RNA, 19 nt, Artificial Sequence
  Description of Artificial Sequence: Synthetic oligonucleotide
  Sense strand starting at position 569 of SEQ ID NO: 916949
gguguauuccugugguuca

SEQ ID NO: 1196633 - RNA, 19 nt, Artificial Sequence
  Description of Artificial Sequence: Synthetic oligonucleotide
  Antisense strand to SEQ ID NO: 1196632
ugaaccacaggaauacacc

SEQ ID NO: 1196634 - RNA, 19 nt, Artificial Sequence
  Description of Artificial Sequence: Synthetic oligonucleotide
  Sense strand starting at position 619 of SEQ ID NO: 916949
gggauaagcuguuacuucu

SEQ ID NO: 1196635 - RNA, 19 nt, Artificial Sequence
  Description of Artificial Sequence: Synthetic oligonucleotide
  Antisense strand to SEQ ID NO: 1196634
agaaguaacagcuuauccc

SEQ ID NO: 1196636 - RNA, 19 nt, Artificial Sequence
  Description of Artificial Sequence: Synthetic oligonucleotide
  Sense strand starting at position 774 of SEQ ID NO: 916949
aagagcauguuauugucaa

SEQ ID NO: 1196637 - RNA, 19 nt, Artificial Sequence
  Description of Artificial Sequence: Synthetic oligonucleotide
  Antisense strand to SEQ ID NO: 1196636
uugacaauaacaugcucuu

SEQ ID NO: 1196638 - RNA, 19 nt, Artificial Sequence
  Description of Artificial Sequence: Synthetic oligonucleotide
  Sense strand starting at position 786 of SEQ ID NO: 916949
uugucaauguucuuaaguu

SEQ ID NO: 1196639 - RNA, 19 nt, Artificial Sequence
  Description of Artificial Sequence: Synthetic oligonucleotide
  Antisense strand to SEQ ID NO: 1196638
aacuuaagaacauugacaa

SEQ ID NO: 1196640 - RNA, 19 nt, Artificial Sequence
  Description of Artificial Sequence: Synthetic oligonucleotide
  Sense strand starting at position 848 of SEQ ID NO: 916949
agacuaauauuaggucaaa

SEQ ID NO: 1196641 - RNA, 19 nt, Artificial Sequence
  Description of Artificial Sequence: Synthetic oligonucleotide
  Antisense strand to SEQ ID NO: 1196640
uuugaccuaauauuagucu

SEQ ID NO: 1196642 - RNA, 19 nt, Artificial Sequence
  Description of Artificial Sequence: Synthetic oligonucleotide
  Sense strand starting at position 874 of SEQ ID NO: 916949
cuagguauacguugggaaa

SEQ ID NO: 1196643 - RNA, 19 nt, Artificial Sequence
  Description of Artificial Sequence: Synthetic oligonucleotide
  Antisense strand to SEQ ID NO: 1196642
uuucccaacguauaccuag

SEQ ID NO: 1196644 - RNA, 19 nt, Artificial Sequence
  Description of Artificial Sequence: Synthetic oligonucleotide
  Sense strand starting at position 875 of SEQ ID NO: 916949
uagguauacguugggaaau

SEQ ID NO: 1196645 - RNA, 19 nt, Artificial Sequence
  Description of Artificial Sequence: Synthetic oligonucleotide
  Antisense strand to SEQ ID NO: 1196644
auuucccaacguauaccua

SEQ ID NO: 1196646 - RNA, 19 nt, Artificial Sequence
  Description of Artificial Sequence: Synthetic oligonucleotide
  Sense strand starting at position 876 of SEQ ID NO: 916949
agguauacguugggaaauu

SEQ ID NO: 1196647 - RNA, 19 nt, Artificial Sequence
  Description of Artificial Sequence: Synthetic oligonucleotide
  Antisense strand to SEQ ID NO: 1196646
aauuucccaacguauaccu

SEQ ID NO: 1196648 - RNA, 19 nt, Artificial Sequence
  Description of Artificial Sequence: Synthetic oligonucleotide
  Sense strand starting at position 877 of SEQ ID NO: 916949
gguauacguugggaaauua

SEQ ID NO: 1196649 - RNA, 19 nt, Artificial Sequence
  Description of Artificial Sequence: Synthetic oligonucleotide
  Antisense strand to SEQ ID NO: 1196648
uaauuucccaacguauacc

SEQ ID NO: 1196650 - RNA, 19 nt, Artificial Sequence
  Description of Artificial Sequence: Synthetic oligonucleotide
  Sense strand starting at position 991 of SEQ ID NO: 916949
ucaugaaucuauggagaug

SEQ ID NO: 1196651 - RNA, 19 nt, Artificial Sequence
  Description of Artificial Sequence: Synthetic oligonucleotide
  Antisense strand to SEQ ID NO: 1196650
caucuccauagauucauga

SEQ ID NO: 1196652 - RNA, 19 nt, Artificial Sequence
  Description of Artificial Sequence: Synthetic oligonucleotide
  Sense strand starting at position 1326 of SEQ ID NO: 916949
agaacagauuaacagcaaa

SEQ ID NO: 1196653 - RNA, 19 nt, Artificial Sequence
  Description of Artificial Sequence: Synthetic oligonucleotide
  Antisense strand to SEQ ID NO: 1196652
uuugcuguuaaucuguucu

SEQ ID NO: 1196654 - RNA, 19 nt, Artificial Sequence
  Description of Artificial Sequence: Synthetic oligonucleotide
  Sense strand starting at position 1362 of SEQ ID NO: 916949
agugaagggcacuaaguuu

SEQ ID NO: 1196655 - RNA, 19 nt, Artificial Sequence
  Description of Artificial Sequence: Synthetic oligonucleotide
  Antisense strand to SEQ ID NO: 1196654
aaacuuagugcccuucacu

SEQ ID NO: 1196656 - RNA, 19 nt, Artificial Sequence
  Description of Artificial Sequence: Synthetic oligonucleotide
  Sense strand starting at position 1370 of SEQ ID NO: 916949
gcacuaaguuuccuagcgu

SEQ ID NO: 1196657 - RNA, 19 nt, Artificial Sequence
  Description of Artificial Sequence: Synthetic oligonucleotide
  Antisense strand to SEQ ID NO: 1196656
acgcuaggaaacuuagugc

SEQ ID NO: 1196658 - RNA, 19 nt, Artificial Sequence
  Description of Artificial Sequence: Synthetic oligonucleotide
  Sense strand starting at position 1377 of SEQ ID NO: 916949
guuuccuagcgugguuaca

SEQ ID NO: 1196659 - RNA, 19 nt, Artificial Sequence
  Description of Artificial Sequence: Synthetic oligonucleotide
  Antisense strand to SEQ ID NO: 1196658
uguaaccacgcuaggaaac

SEQ ID NO: 1196660 - RNA, 19 nt, Artificial Sequence
  Description of Artificial Sequence: Synthetic oligonucleotide
  Sense strand starting at position 1644 of SEQ ID NO: 916949
gcugaaauggccgguuacu

SEQ ID NO: 1196661 - RNA, 19 nt, Artificial Sequence
  Description of Artificial Sequence: Synthetic oligonucleotide
  Antisense strand to SEQ ID NO: 1196660
aguaaccggccauuucagc

SEQ ID NO: 1196662 - RNA, 19 nt, Artificial Sequence
  Description of Artificial Sequence: Synthetic oligonucleotide
  Sense strand starting at position 1653 of SEQ ID NO: 916949
gccgguuacugcccagaca

SEQ ID NO: 1196663 - RNA, 19 nt, Artificial Sequence
  Description of Artificial Sequence: Synthetic oligonucleotide
  Antisense strand to SEQ ID NO: 1196662
ugucugggcaguaaccggc

SEQ ID NO: 1196664 - RNA, 19 nt, Artificial Sequence
  Description of Artificial Sequence: Synthetic oligonucleotide
  Sense strand starting at position 1654 of SEQ ID NO: 916949
ccgguuacugcccagacau

SEQ ID NO: 1196665 - RNA, 19 nt, Artificial Sequence
  Description of Artificial Sequence: Synthetic oligonucleotide
  Antisense strand to SEQ ID NO: 1196664
augucugggcaguaaccgg

SEQ ID NO: 1196666 - RNA, 19 nt, Artificial Sequence
  Description of Artificial Sequence: Synthetic oligonucleotide
  Sense strand starting at position 1783 of SEQ ID NO: 916949
gugagaaucuggucagcaa

SEQ ID NO: 1196667 - RNA, 19 nt, Artificial Sequence
  Description of Artificial Sequence: Synthetic oligonucleotide
  Antisense strand to SEQ ID NO: 1196666
uugcugaccagauucucac

SEQ ID NO: 1196668 - RNA, 19 nt, Artificial Sequence
  Description of Artificial Sequence: Synthetic oligonucleotide
  Sense strand starting at position 1920 of SEQ ID NO: 916949
aguugucaugucugaacag

SEQ ID NO: 1196669 - RNA, 19 nt, Artificial Sequence
  Description of Artificial Sequence: Synthetic oligonucleotide
  Antisense strand to SEQ ID NO: 1196668
cuguucagacaugacaacu

SEQ ID NO: 1196670 - RNA, 19 nt, Artificial Sequence
  Description of Artificial Sequence: Synthetic oligonucleotide
  Sense strand starting at position 1921 of SEQ ID NO: 916949
guugucaugucugaacaga

SEQ ID NO: 1196671 - RNA, 19 nt, Artificial Sequence
  Description of Artificial Sequence: Synthetic oligonucleotide
  Antisense strand to SEQ ID NO: 1196670
ucuguucagacaugacaac

SEQ ID NO: 1196672 - RNA, 19 nt, Artificial Sequence
  Description of Artificial Sequence: Synthetic oligonucleotide
  Sense strand starting at position 1962 of SEQ ID NO: 916949
ugguguuguguccggaguu

SEQ ID NO: 1196673 - RNA, 19 nt, Artificial Sequence
  Description of Artificial Sequence: Synthetic oligonucleotide
  Antisense strand to SEQ ID NO: 1196672
aacuccggacacaacacca

SEQ ID NO: 1196674 - RNA, 19 nt, Artificial Sequence
  Description of Artificial Sequence: Synthetic oligonucleotide
  Sense strand starting at position 2275 of SEQ ID NO: 916949
gauccuguugcuuggugua

SEQ ID NO: 1196675 - RNA, 19 nt, Artificial Sequence
  Description of Artificial Sequence: Synthetic oligonucleotide
  Antisense strand to SEQ ID NO: 1196674
uacaccaagcaacaggauc

SEQ ID NO: 1196676 - RNA, 19 nt, Artificial Sequence
  Description of Artificial Sequence: Synthetic oligonucleotide
  Sense strand starting at position 2277 of SEQ ID NO: 916949
uccuguugcuugguguauu

SEQ ID NO: 1196677 - RNA, 19 nt, Artificial Sequence
  Description of Artificial Sequence: Synthetic oligonucleotide
  Antisense strand to SEQ ID NO: 1196676
aauacaccaagcaacagga

SEQ ID NO: 1196678 - RNA, 19 nt, Artificial Sequence
  Description of Artificial Sequence: Synthetic oligonucleotide
  Sense strand starting at position 2461 of SEQ ID NO: 916949
auguaauauaacugggugu

SEQ ID NO: 1196679 - RNA, 19 nt, Artificial Sequence
  Description of Artificial Sequence: Synthetic oligonucleotide
  Antisense strand to SEQ ID NO: 1196678
acacccaguuauauuacau

SEQ ID NO: 1196680 - RNA, 19 nt, Artificial Sequence
  Description of Artificial Sequence: Synthetic oligonucleotide
  Sense strand starting at position 2463 of SEQ ID NO: 916949
guaauauaacuggguguga

SEQ ID NO: 1196681 - RNA, 19 nt, Artificial Sequence
  Description of Artificial Sequence: Synthetic oligonucleotide
  Antisense strand to SEQ ID NO: 1196680
ucacacccaguuauauuac

SEQ ID NO: 1196682 - RNA, 19 nt, Artificial Sequence
  Description of Artificial Sequence: Synthetic oligonucleotide
  Sense strand starting at position 2464 of SEQ ID NO: 916949
uaauauaacugggugugau

SEQ ID NO: 1196683 - RNA, 19 nt, Artificial Sequence
  Description of Artificial Sequence: Synthetic oligonucleotide
  Antisense strand to SEQ ID NO: 1196682
aucacacccaguuauauua

SEQ ID NO: 1196684 - RNA, 19 nt, Artificial Sequence
  Description of Artificial Sequence: Synthetic oligonucleotide
  Sense strand starting at position 2465 of SEQ ID NO: 916949
aauauaacugggugugauu

SEQ ID NO: 1196685 - RNA, 19 nt, Artificial Sequence
  Description of Artificial Sequence: Synthetic oligonucleotide
  Antisense strand to SEQ ID NO: 1196684
aaucacacccaguuauauu

SEQ ID NO: 1196686 - RNA, 19 nt, Artificial Sequence
  Description of Artificial Sequence: Synthetic oligonucleotide
  Sense strand starting at position 2707 of SEQ ID NO: 916949
cacugaaauugacgugaaa

SEQ ID NO: 1196687 - RNA, 19 nt, Artificial Sequence
  Description of Artificial Sequence: Synthetic oligonucleotide
  Antisense strand to SEQ ID NO: 1196686
uuucacgucaauuucagug

SEQ ID NO: 1196688 - RNA, 19 nt, Artificial Sequence
  Description of Artificial Sequence: Synthetic oligonucleotide
  Sense strand starting at position 2709 of SEQ ID NO: 916949
cugaaauugacgugaaacc

SEQ ID NO: 1196689 - RNA, 19 nt, Artificial Sequence
  Description of Artificial Sequence: Synthetic oligonucleotide
  Antisense strand to SEQ ID NO: 1196688
gguuucacgucaauuucag

SEQ ID NO: 1196690 - RNA, 19 nt, Artificial Sequence
  Description of Artificial Sequence: Synthetic oligonucleotide
  Sense strand starting at position 2734 of SEQ ID NO: 916949
cucauuugcuaguacgcaa

SEQ ID NO: 1196691 - RNA, 19 nt, Artificial Sequence
  Description of Artificial Sequence: Synthetic oligonucleotide
  Antisense strand to SEQ ID NO: 1196690
uugcguacuagcaaaugag

SEQ ID NO: 1196692 - RNA, 19 nt, Artificial Sequence
  Description of Artificial Sequence: Synthetic oligonucleotide
  Sense strand starting at position 2737 of SEQ ID NO: 916949
auuugcuaguacgcaaaua

SEQ ID NO: 1196693 - RNA, 19 nt, Artificial Sequence
  Description of Artificial Sequence: Synthetic oligonucleotide
  Antisense strand to SEQ ID NO: 1196692
uauuugcguacuagcaaau

SEQ ID NO: 1196694 - RNA, 19 nt, Artificial Sequence
  Description of Artificial Sequence: Synthetic oligonucleotide
  Sense strand starting at position 3371 of SEQ ID NO: 916949
ccugcaguauccuaucaca

SEQ ID NO: 1196695 - RNA, 19 nt, Artificial Sequence
  Description of Artificial Sequence: Synthetic oligonucleotide
  Antisense strand to SEQ ID NO: 1196694
ugugauaggauacugcagg

SEQ ID NO: 1196696 - RNA, 19 nt, Artificial Sequence
  Description of Artificial Sequence: Synthetic oligonucleotide
  Sense strand starting at position 3374 of SEQ ID NO: 916949
gcaguauccuaucacagga

SEQ ID NO: 1196697 - RNA, 19 nt, Artificial Sequence
  Description of Artificial Sequence: Synthetic oligonucleotide
  Antisense strand to SEQ ID NO: 1196696
uccugugauaggauacugc

SEQ ID NO: 1196698 - RNA, 19 nt, Artificial Sequence
  Description of Artificial Sequence: Synthetic oligonucleotide
  Sense strand starting at position 3522 of SEQ ID NO: 916949
ccauaagaguauggccuau

SEQ ID NO: 1196699 - RNA, 19 nt, Artificial Sequence
  Description of Artificial Sequence: Synthetic oligonucleotide
  Antisense strand to SEQ ID NO: 1196698
auaggccauacucuuaugg

SEQ ID NO: 1196700 - RNA, 19 nt, Artificial Sequence
  Description of Artificial Sequence: Synthetic oligonucleotide
  Sense strand starting at position 3526 of SEQ ID NO: 916949
aagaguauggccuaucuag

SEQ ID NO: 1196701 - RNA, 19 nt, Artificial Sequence
  Description of Artificial Sequence: Synthetic oligonucleotide
  Antisense strand to SEQ ID NO: 1196700
cuagauaggccauacucuu

SEQ ID NO: 1196702 - RNA, 19 nt, Artificial Sequence
  Description of Artificial Sequence: Synthetic oligonucleotide
  Sense strand starting at position 3569 of SEQ ID NO: 916949
agaaacuaaugacgugaga

SEQ ID NO: 1196703 - RNA, 19 nt, Artificial Sequence
  Description of Artificial Sequence: Synthetic oligonucleotide
  Antisense strand to SEQ ID NO: 1196702
ucucacgucauuaguuucu

SEQ ID NO: 1196704 - RNA, 19 nt, Artificial Sequence
  Description of Artificial Sequence: Synthetic oligonucleotide
  Sense strand starting at position 3583 of SEQ ID NO: 916949
ugagauugcugccaccuga

SEQ ID NO: 1196705 - RNA, 19 nt, Artificial Sequence
  Description of Artificial Sequence: Synthetic oligonucleotide
  Antisense strand to SEQ ID NO: 1196704
ucagguggcagcaaucuca

SEQ ID NO: 1196706 - RNA, 19 nt, Artificial Sequence
  Description of Artificial Sequence: Synthetic oligonucleotide
  Sense strand starting at position 3628 of SEQ ID NO: 916949
cguccuccaagauguagaa

SEQ ID NO: 1196707 - RNA, 19 nt, Artificial Sequence
  Description of Artificial Sequence: Synthetic oligonucleotide
  Antisense strand to SEQ ID NO: 1196706
uucuacaucuuggaggacg

SEQ ID NO: 1196708 - RNA, 19 nt, Artificial Sequence
  Description of Artificial Sequence: Synthetic oligonucleotide
  Sense strand starting at position 36 of SEQ ID NO: 916950
gguagaaacauugguuucu

SEQ ID NO: 1196709 - RNA, 19 nt, Artificial Sequence
  Description of Artificial Sequence: Synthetic oligonucleotide
  Antisense strand to SEQ ID NO: 1196708
agaaaccaauguuucuacc

SEQ ID NO: 1196710 - RNA, 19 nt, Artificial Sequence
  Description of Artificial Sequence: Synthetic oligonucleotide
  Sense strand starting at position 99 of SEQ ID NO: 916950
uuagcaugugccuagaaac

SEQ ID NO: 1196711 - RNA, 19 nt, Artificial Sequence
  Description of Artificial Sequence: Synthetic oligonucleotide
  Antisense strand to SEQ ID NO: 1196710
guuucuaggcacaugcuaa

SEQ ID NO: 1196712 - RNA, 19 nt, Artificial Sequence
  Description of Artificial Sequence: Synthetic oligonucleotide
  Sense strand starting at position 159 of SEQ ID NO: 916950
auuaaaucauguguuucca

SEQ ID NO: 1196713 - RNA, 19 nt, Artificial Sequence
  Description of Artificial Sequence: Synthetic oligonucleotide
  Antisense strand to SEQ ID NO: 1196712
uggaaacacaugauuuaau

SEQ ID NO: 1196714 - RNA, 19 nt, Artificial Sequence
  Description of Artificial Sequence: Synthetic oligonucleotide
  Sense strand starting at position 232 of SEQ ID NO: 916950
ucacauaaucgucguauuu

SEQ ID NO: 1196715 - RNA, 19 nt, Artificial Sequence
  Description of Artificial Sequence: Synthetic oligonucleotide
  Antisense strand to SEQ ID NO: 1196714
aaauacgacgauuauguga

SEQ ID NO: 1196716 - RNA, 19 nt, Artificial Sequence
  Description of Artificial Sequence: Synthetic oligonucleotide
  Sense strand starting at position 244 of SEQ ID NO: 916950
cguauuuccuuguuaucaa

SEQ ID NO: 1196717 - RNA, 19 nt, Artificial Sequence
  Description of Artificial Sequence: Synthetic oligonucleotide
  Antisense strand to SEQ ID NO: 1196716
uugauaacaaggaaauacg

SEQ ID NO: 1196718 - RNA, 19 nt, Artificial Sequence
  Description of Artificial Sequence: Synthetic oligonucleotide
  Sense strand starting at position 505 of SEQ ID NO: 916950
auaggagaguuguuugaac

SEQ ID NO: 1196719 - RNA, 19 nt, Artificial Sequence
  Description of Artificial Sequence: Synthetic oligonucleotide
  Antisense strand to SEQ ID NO: 1196718
guucaaacaacucuccuau

SEQ ID NO: 1196720 - RNA, 19 nt, Artificial Sequence
  Description of Artificial Sequence: Synthetic oligonucleotide
  Sense strand starting at position 818 of SEQ ID NO: 916950
ugaaauaauaugugagguu

SEQ ID NO: 1196721 - RNA, 19 nt, Artificial Sequence
  Description of Artificial Sequence: Synthetic oligonucleotide
  Antisense strand to SEQ ID NO: 1196720
aaccucacauauuauuuca

SEQ ID NO: 1196722 - RNA, 19 nt, Artificial Sequence
  Description of Artificial Sequence: Synthetic oligonucleotide
  Sense strand starting at position 899 of SEQ ID NO: 916950
augugugaauuaccaucaa

SEQ ID NO: 1196723 - RNA, 19 nt, Artificial Sequence
  Description of Artificial Sequence: Synthetic oligonucleotide
  Antisense strand to SEQ ID NO: 1196722
uugaugguaauucacacau

SEQ ID NO: 1196724 - RNA, 19 nt, Artificial Sequence
  Description of Artificial Sequence: Synthetic oligonucleotide
  Sense strand starting at position 1018 of SEQ ID NO: 916950
uugaguuauucucuuagaa

SEQ ID NO: 1196725 - RNA, 19 nt, Artificial Sequence
  Description of Artificial Sequence: Synthetic oligonucleotide
  Antisense strand to SEQ ID NO: 1196724
uucuaagagaauaacucaa

SEQ ID NO: 1196726 - RNA, 19 nt, Artificial Sequence
  Description of Artificial Sequence: Synthetic oligonucleotide
  Sense strand starting at position 1133 of SEQ ID NO: 916950
ugcuguuucccagaaugag

SEQ ID NO: 1196727 - RNA, 19 nt, Artificial Sequence
  Description of Artificial Sequence: Synthetic oligonucleotide
  Antisense strand to SEQ ID NO: 1196726
cucauucugggaaacagca

SEQ ID NO: 1196728 - RNA, 19 nt, Artificial Sequence
  Description of Artificial Sequence: Synthetic oligonucleotide
  Sense strand starting at position 1136 of SEQ ID NO: 916950
uguuucccagaaugagaau

SEQ ID NO: 1196729 - RNA, 19 nt, Artificial Sequence
  Description of Artificial Sequence: Synthetic oligonucleotide
  Antisense strand to SEQ ID NO: 1196728
auucucauucugggaaaca

SEQ ID NO: 1196730 - RNA, 19 nt, Artificial Sequence
  Description of Artificial Sequence: Synthetic oligonucleotide
  Sense strand starting at position 1209 of SEQ ID NO: 916950
cuuguuguuccacaacaua

SEQ ID NO: 1196731 - RNA, 19 nt, Artificial Sequence
  Description of Artificial Sequence: Synthetic oligonucleotide
  Antisense strand to SEQ ID NO: 1196730
uauguuguggaacaacaag

SEQ ID NO: 1196732 - RNA, 19 nt, Artificial Sequence
  Description of Artificial Sequence: Synthetic oligonucleotide
  Sense strand starting at position 1367 of SEQ ID NO: 916950
uaguaugucucaccaagga

SEQ ID NO: 1196733 - RNA, 19 nt, Artificial Sequence
  Description of Artificial Sequence: Synthetic oligonucleotide
  Antisense strand to SEQ ID NO: 1196732
uccuuggugagacauacua

SEQ ID NO: 1196734 - RNA, 19 nt, Artificial Sequence
  Description of Artificial Sequence: Synthetic oligonucleotide
  Sense strand starting at position 1523 of SEQ ID NO: 916950
cuauuauauugagugagau

SEQ ID NO: 1196735 - RNA, 19 nt, Artificial Sequence
  Description of Artificial Sequence: Synthetic oligonucleotide
  Antisense strand to SEQ ID NO: 1196734
aucucacucaauauaauag

SEQ ID NO: 1196736 - RNA, 19 nt, Artificial Sequence
  Description of Artificial Sequence: Synthetic oligonucleotide
  Sense strand starting at position 1712 of SEQ ID NO: 916950
uugucaagugauuagucau

SEQ ID NO: 1196737 - RNA, 19 nt, Artificial Sequence
  Description of Artificial Sequence: Synthetic oligonucleotide
  Antisense strand to SEQ ID NO: 1196736
augacuaaucacuugacaa

SEQ ID NO: 1196738 - RNA, 19 nt, Artificial Sequence
  Description of Artificial Sequence: Synthetic oligonucleotide
  Sense strand starting at position 1768 of SEQ ID NO: 916950
gugguauauaaaugugaag

SEQ ID NO: 1196739 - RNA, 19 nt, Artificial Sequence
  Description of Artificial Sequence: Synthetic oligonucleotide
  Antisense strand to SEQ ID NO: 1196738
cuucacauuuauauaccac

SEQ ID NO: 1196740 - RNA, 19 nt, Artificial Sequence
  Description of Artificial Sequence: Synthetic oligonucleotide
  Sense strand starting at position 1770 of SEQ ID NO: 916950
gguauauaaaugugaagca

SEQ ID NO: 1196741 - RNA, 19 nt, Artificial Sequence
  Description of Artificial Sequence: Synthetic oligonucleotide
  Antisense strand to SEQ ID NO: 1196740
ugcuucacauuuauauacc

SEQ ID NO: 1196742 - RNA, 19 nt, Artificial Sequence
  Description of Artificial Sequence: Synthetic oligonucleotide
  Sense strand starting at position 1828 of SEQ ID NO: 916950
uguccaauuguggagauag

SEQ ID NO: 1196743 - RNA, 19 nt, Artificial Sequence
  Description of Artificial Sequence: Synthetic oligonucleotide
  Antisense strand to SEQ ID NO: 1196742
cuaucuccacaauuggaca

SEQ ID NO: 1196744 - RNA, 19 nt, Artificial Sequence
  Description of Artificial Sequence: Synthetic oligonucleotide
  Sense strand starting at position 1860 of SEQ ID NO: 916950
gaugaagucagcugagaag

SEQ ID NO: 1196745 - RNA, 19 nt, Artificial Sequence
  Description of Artificial Sequence: Synthetic oligonucleotide
  Antisense strand to SEQ ID NO: 1196744
cuucucagcugacuucauc

SEQ ID NO: 1196746 - RNA, 19 nt, Artificial Sequence
  Description of Artificial Sequence: Synthetic oligonucleotide
  Sense strand starting at position 1907 of SEQ ID NO: 916950
aguuuaccaguccaaugaa

SEQ ID NO: 1196747 - RNA, 19 nt, Artificial Sequence
  Description of Artificial Sequence: Synthetic oligonucleotide
  Antisense strand to SEQ ID NO: 1196746
uucauuggacugguaaacu

SEQ ID NO: 1196748 - RNA, 19 nt, Artificial Sequence
  Description of Artificial Sequence: Synthetic oligonucleotide
  Sense strand starting at position 1935 of SEQ ID NO: 916950
cagcaugcugaugaugaau

SEQ ID NO: 1196749 - RNA, 19 nt, Artificial Sequence
  Description of Artificial Sequence: Synthetic oligonucleotide
  Antisense strand to SEQ ID NO: 1196748
auucaucaucagcaugcug

SEQ ID NO: 1196750 - RNA, 19 nt, Artificial Sequence
  Description of Artificial Sequence: Synthetic oligonucleotide
  Sense strand starting at position 1955 of SEQ ID NO: 916950
cugcuauugccagaaucag

SEQ ID NO: 1196751 - RNA, 19 nt, Artificial Sequence
  Description of Artificial Sequence: Synthetic oligonucleotide
  Antisense strand to SEQ ID NO: 1196750
cugauucuggcaauagcag

SEQ ID NO: 1196752 - RNA, 19 nt, Artificial Sequence
  Description of Artificial Sequence: Synthetic oligonucleotide
  Sense strand starting at position 2115 of SEQ ID NO: 916950
acuuccagucuugaucaga

SEQ ID NO: 1196753 - RNA, 19 nt, Artificial Sequence
  Description of Artificial Sequence: Synthetic oligonucleotide
  Antisense strand to SEQ ID NO: 1196752
ucugaucaagacuggaagu

SEQ ID NO: 1196754 - RNA, 19 nt, Artificial Sequence
  Description of Artificial Sequence: Synthetic oligonucleotide
  Sense strand starting at position 2153 of SEQ ID NO: 916950
agucucauauacuuaagga

SEQ ID NO: 1196755 - RNA, 19 nt, Artificial Sequence
  Description of Artificial Sequence: Synthetic oligonucleotide
  Antisense strand to SEQ ID NO: 1196754
uccuuaaguauaugagacu

SEQ ID NO: 1196756 - RNA, 19 nt, Artificial Sequence
  Description of Artificial Sequence: Synthetic oligonucleotide
  Sense strand starting at position 2271 of SEQ ID NO: 916950
gaaagagcugcugaauucu

SEQ ID NO: 1196757 - RNA, 19 nt, Artificial Sequence
  Description of Artificial Sequence: Synthetic oligonucleotide
  Antisense strand to SEQ ID NO: 1196756
agaauucagcagcucuuuc

SEQ ID NO: 1196758 - RNA, 19 nt, Artificial Sequence
  Description of Artificial Sequence: Synthetic oligonucleotide
  Sense strand starting at position 2298 of SEQ ID NO: 916950
caguuucuguguccauuua

SEQ ID NO: 1196759 - RNA, 19 nt, Artificial Sequence
  Description of Artificial Sequence: Synthetic oligonucleotide
  Antisense strand to SEQ ID NO: 1196758
uaaauggacacagaaacug

SEQ ID NO: 1196760 - RNA, 19 nt, Artificial Sequence
  Description of Artificial Sequence: Synthetic oligonucleotide
  Sense strand starting at position 2320 of SEQ ID NO: 916950
uugucaugggcugaaacuu

SEQ ID NO: 1196761 - RNA, 19 nt, Artificial Sequence
  Description of Artificial Sequence: Synthetic oligonucleotide
  Antisense strand to SEQ ID NO: 1196760
aaguuucagcccaugacaa

SEQ ID NO: 1196762 - RNA, 19 nt, Artificial Sequence
  Description of Artificial Sequence: Synthetic oligonucleotide
  Sense strand starting at position 2328 of SEQ ID NO: 916950
ggcugaaacuuuccacuug

SEQ ID NO: 1196763 - RNA, 19 nt, Artificial Sequence
  Description of Artificial Sequence: Synthetic oligonucleotide
  Antisense strand to SEQ ID NO: 1196762
caaguggaaaguuucagcc

SEQ ID NO: 1196764 - RNA, 19 nt, Artificial Sequence
  Description of Artificial Sequence: Synthetic oligonucleotide
  Sense strand starting at position 2412 of SEQ ID NO: 916950
uucucugauuuguacauuu

SEQ ID NO: 1196765 - RNA, 19 nt, Artificial Sequence
  Description of Artificial Sequence: Synthetic oligonucleotide
  Antisense strand to SEQ ID NO: 1196764
aaauguacaaaucagagaa

SEQ ID NO: 1196766 - RNA, 19 nt, Artificial Sequence
  Description of Artificial Sequence: Synthetic oligonucleotide
  Sense strand starting at position 2557 of SEQ ID NO: 916950
uucugaucuuaugcaaaug

SEQ ID NO: 1196767 - RNA, 19 nt, Artificial Sequence
  Description of Artificial Sequence: Synthetic oligonucleotide
  Antisense strand to SEQ ID NO: 1196766
cauuugcauaagaucagaa

SEQ ID NO: 1196768 - RNA, 19 nt, Artificial Sequence
  Description of Artificial Sequence: Synthetic oligonucleotide
  Sense strand starting at position 2862 of SEQ ID NO: 916950
cuaaauguuccucagguau

SEQ ID NO: 1196769 - RNA, 19 nt, Artificial Sequence
  Description of Artificial Sequence: Synthetic oligonucleotide
  Antisense strand to SEQ ID NO: 1196768
auaccugaggaacauuuag

SEQ ID NO: 1196770 - RNA, 19 nt, Artificial Sequence
  Description of Artificial Sequence: Synthetic oligonucleotide
  Sense strand starting at position 2960 of SEQ ID NO: 916950
agagauauauugcuaccaa

SEQ ID NO: 1196771 - RNA, 19 nt, Artificial Sequence
  Description of Artificial Sequence: Synthetic oligonucleotide
  Antisense strand to SEQ ID NO: 1196770
uugguagcaauauaucucu

SEQ ID NO: 1196772 - RNA, 19 nt, Artificial Sequence
  Description of Artificial Sequence: Synthetic oligonucleotide
  Sense strand starting at position 3106 of SEQ ID NO: 916950
agaguuacagauuaugugu

SEQ ID NO: 1196773 - RNA, 19 nt, Artificial Sequence
  Description of Artificial Sequence: Synthetic oligonucleotide
  Antisense strand to SEQ ID NO: 1196772
acacauaaucuguaacucu

SEQ ID NO: 1196774 - RNA, 19 nt, Artificial Sequence
  Description of Artificial Sequence: Synthetic oligonucleotide
  Sense strand starting at position 3126 of SEQ ID NO: 916950
uugguuuauggucagcaaa

SEQ ID NO: 1196775 - RNA, 19 nt, Artificial Sequence
  Description of Artificial Sequence: Synthetic oligonucleotide
  Antisense strand to SEQ ID NO: 1196774
uuugcugaccauaaaccaa

SEQ ID NO: 1196776 - RNA, 19 nt, Artificial Sequence
  Description of Artificial Sequence: Synthetic oligonucleotide
  Sense strand starting at position 3579 of SEQ ID NO: 916950
ccaaauuagugucuagaga

SEQ ID NO: 1196777 - RNA, 19 nt, Artificial Sequence
  Description of Artificial Sequence: Synthetic oligonucleotide
  Antisense strand to SEQ ID NO: 1196776
ucucuagacacuaauuugg

SEQ ID NO: 1196778 - RNA, 19 nt, Artificial Sequence
  Description of Artificial Sequence: Synthetic oligonucleotide
  Sense strand starting at position 3587 of SEQ ID NO: 916950
gugucuagagauggaaaga

SEQ ID NO: 1196779 - RNA, 19 nt, Artificial Sequence
  Description of Artificial Sequence: Synthetic oligonucleotide
  Antisense strand to SEQ ID NO: 1196778
ucuuuccaucucuagacac

SEQ ID NO: 1196780 - RNA, 19 nt, Artificial Sequence
  Description of Artificial Sequence: Synthetic oligonucleotide
  Sense strand starting at position 3683 of SEQ ID NO: 916950
aggagucugcaaugaaaug

SEQ ID NO: 1196781 - RNA, 19 nt, Artificial Sequence
  Description of Artificial Sequence: Synthetic oligonucleotide
  Antisense strand to SEQ ID NO: 1196780
cauuucauugcagacuccu

SEQ ID NO: 1196782 - RNA, 19 nt, Artificial Sequence
  Description of Artificial Sequence: Synthetic oligonucleotide
  Sense strand starting at position 3736 of SEQ ID NO: 916950
gguacugugaucugaggga

SEQ ID NO: 1196783 - RNA, 19 nt, Artificial Sequence
  Description of Artificial Sequence: Synthetic oligonucleotide
  Antisense strand to SEQ ID NO: 1196782
ucccucagaucacaguacc

SEQ ID NO: 1196784 - RNA, 19 nt, Artificial Sequence
  Description of Artificial Sequence: Synthetic oligonucleotide
  Sense strand starting at position 3740 of SEQ ID NO: 916950
cugugaucugagggaauca

SEQ ID NO: 1196785 - RNA, 19 nt, Artificial Sequence
  Description of Artificial Sequence: Synthetic oligonucleotide
  Antisense strand to SEQ ID NO: 1196784
ugauucccucagaucacag

SEQ ID NO: 1196786 - RNA, 19 nt, Artificial Sequence
  Description of Artificial Sequence: Synthetic oligonucleotide
  Sense strand starting at position 3886 of SEQ ID NO: 916950
gauauuugugacugcagcu

SEQ ID NO: 1196787 - RNA, 19 nt, Artificial Sequence
  Description of Artificial Sequence: Synthetic oligonucleotide
  Antisense strand to SEQ ID NO: 1196786
agcugcagucacaaauauc

SEQ ID NO: 1196788 - RNA, 19 nt, Artificial Sequence
  Description of Artificial Sequence: Synthetic oligonucleotide
  Sense strand starting at position 58 of SEQ ID NO: 916951
aacggaagguaaggauaua

SEQ ID NO: 1196789 - RNA, 19 nt, Artificial Sequence
  Description of Artificial Sequence: Synthetic oligonucleotide
  Antisense strand to SEQ ID NO: 1196788
uauauccuuaccuuccguu

SEQ ID NO: 1196790 - RNA, 19 nt, Artificial Sequence
  Description of Artificial Sequence: Synthetic oligonucleotide
  Sense strand starting at position 70 of SEQ ID NO: 916951
ggauauaauuagcaaauca

SEQ ID NO: 1196791 - RNA, 19 nt, Artificial Sequence
  Description of Artificial Sequence: Synthetic oligonucleotide
  Antisense strand to SEQ ID NO: 1196790
ugauuugcuaauuauaucc

SEQ ID NO: 1196792 - RNA, 19 nt, Artificial Sequence
  Description of Artificial Sequence: Synthetic oligonucleotide
  Sense strand starting at position 225 of SEQ ID NO: 916951
agaucaugaucaugauguu

SEQ ID NO: 1196793 - RNA, 19 nt, Artificial Sequence
  Description of Artificial Sequence: Synthetic oligonucleotide
  Antisense strand to SEQ ID NO: 1196792
aacaucaugaucaugaucu

SEQ ID NO: 1196794 - RNA, 19 nt, Artificial Sequence
  Description of Artificial Sequence: Synthetic oligonucleotide
  Sense strand starting at position 590 of SEQ ID NO: 916951
gggauaagcucuuacuucu

SEQ ID NO: 1196795 - RNA, 19 nt, Artificial Sequence
  Description of Artificial Sequence: Synthetic oligonucleotide
  Antisense strand to SEQ ID NO: 1196794
agaaguaagagcuuauccc

SEQ ID NO: 1196796 - RNA, 19 nt, Artificial Sequence
  Description of Artificial Sequence: Synthetic oligonucleotide
  Sense strand starting at position 744 of SEQ ID NO: 916951
aagagcauguuguugucaa

SEQ ID NO: 1196797 - RNA, 19 nt, Artificial Sequence
  Description of Artificial Sequence: Synthetic oligonucleotide
  Antisense strand to SEQ ID NO: 1196796
uugacaacaacaugcucuu

SEQ ID NO: 1196798 - RNA, 19 nt, Artificial Sequence
  Description of Artificial Sequence: Synthetic oligonucleotide
  Sense strand starting at position 751 of SEQ ID NO: 916951
uguuguugucaauguuaag

SEQ ID NO: 1196799 - RNA, 19 nt, Artificial Sequence
  Description of Artificial Sequence: Synthetic oligonucleotide
  Antisense strand to SEQ ID NO: 1196798
cuuaacauugacaacaaca

SEQ ID NO: 1196800 - RNA, 19 nt, Artificial Sequence
  Description of Artificial Sequence: Synthetic oligonucleotide
  Sense strand starting at position 863 of SEQ ID NO: 916951
uagguauacguuuggaaau

SEQ ID NO: 1196801 - RNA, 19 nt, Artificial Sequence
  Description of Artificial Sequence: Synthetic oligonucleotide
  Antisense strand to SEQ ID NO: 1196800
auuuccaaacguauaccua

SEQ ID NO: 1196802 - RNA, 19 nt, Artificial Sequence
  Description of Artificial Sequence: Synthetic oligonucleotide
  Sense strand starting at position 865 of SEQ ID NO: 916951
gguauacguuuggaaauua

SEQ ID NO: 1196803 - RNA, 19 nt, Artificial Sequence
  Description of Artificial Sequence: Synthetic oligonucleotide
  Antisense strand to SEQ ID NO: 1196802
uaauuuccaaacguauacc

SEQ ID NO: 1196804 - RNA, 19 nt, Artificial Sequence
  Description of Artificial Sequence: Synthetic oligonucleotide
  Sense strand starting at position 940 of SEQ ID NO: 916951
accaguuuguuuccugcua

SEQ ID NO: 1196805 - RNA, 19 nt, Artificial Sequence
  Description of Artificial Sequence: Synthetic oligonucleotide
  Antisense strand to SEQ ID NO: 1196804
uagcaggaaacaaacuggu

SEQ ID NO: 1196806 - RNA, 19 nt, Artificial Sequence
  Description of Artificial Sequence: Synthetic oligonucleotide
  Sense strand starting at position 947 of SEQ ID NO: 916951
uguuuccugcuagaagaua

SEQ ID NO: 1196807 - RNA, 19 nt, Artificial Sequence
  Description of Artificial Sequence: Synthetic oligonucleotide
  Antisense strand to SEQ ID NO: 1196806
uaucuucuagcaggaaaca

SEQ ID NO: 1196808 - RNA, 19 nt, Artificial Sequence
  Description of Artificial Sequence: Synthetic oligonucleotide
  Sense strand starting at position 979 of SEQ ID NO: 916951
ucgugaaucuauggagaug

SEQ ID NO: 1196809 - RNA, 19 nt, Artificial Sequence
  Description of Artificial Sequence: Synthetic oligonucleotide
  Antisense strand to SEQ ID NO: 1196808
caucuccauagauucacga

SEQ ID NO: 1196810 - RNA, 19 nt, Artificial Sequence
  Description of Artificial Sequence: Synthetic oligonucleotide
  Sense strand starting at position 1314 of SEQ ID NO: 916951
agaacagauuaacagcaua

SEQ ID NO: 1196811 - RNA, 19 nt, Artificial Sequence
  Description of Artificial Sequence: Synthetic oligonucleotide
  Antisense strand to SEQ ID NO: 1196810
uaugcuguuaaucuguucu

SEQ ID NO: 1196812 - RNA, 19 nt, Artificial Sequence
  Description of Artificial Sequence: Synthetic oligonucleotide
  Sense strand starting at position 1337 of SEQ ID NO: 916951
auaguagggucagagugaa

SEQ ID NO: 1196813 - RNA, 19 nt, Artificial Sequence
  Description of Artificial Sequence: Synthetic oligonucleotide
  Antisense strand to SEQ ID NO: 1196812
uucacucugacccuacuau

SEQ ID NO: 1196814 - RNA, 19 nt, Artificial Sequence
  Description of Artificial Sequence: Synthetic oligonucleotide
  Sense strand starting at position 1345 of SEQ ID NO: 916951
gucagagugaaggguacua

SEQ ID NO: 1196815 - RNA, 19 nt, Artificial Sequence
  Description of Artificial Sequence: Synthetic oligonucleotide
  Antisense strand to SEQ ID NO: 1196814
uaguacccuucacucugac

SEQ ID NO: 1196816 - RNA, 19 nt, Artificial Sequence
  Description of Artificial Sequence: Synthetic oligonucleotide
  Sense strand starting at position 1350 of SEQ ID NO: 916951
agugaaggguacuaaguuu

SEQ ID NO: 1196817 - RNA, 19 nt, Artificial Sequence
  Description of Artificial Sequence: Synthetic oligonucleotide
  Antisense strand to SEQ ID NO: 1196816
aaacuuaguacccuucacu

SEQ ID NO: 1196818 - RNA, 19 nt, Artificial Sequence
  Description of Artificial Sequence: Synthetic oligonucleotide
  Sense strand starting at position 1358 of SEQ ID NO: 916951
guacuaaguuugcuaccau

SEQ ID NO: 1196819 - RNA, 19 nt, Artificial Sequence
  Description of Artificial Sequence: Synthetic oligonucleotide
  Antisense strand to SEQ ID NO: 1196818
augguagcaaacuuaguac

SEQ ID NO: 1196820 - RNA, 19 nt, Artificial Sequence
  Description of Artificial Sequence: Synthetic oligonucleotide
  Sense strand starting at position 1365 of SEQ ID NO: 916951
guuugcuaccaugguuaca

SEQ ID NO: 1196821 - RNA, 19 nt, Artificial Sequence
  Description of Artificial Sequence: Synthetic oligonucleotide
  Antisense strand to SEQ ID NO: 1196820
uguaaccaugguagcaaac

SEQ ID NO: 1196822 - RNA, 19 nt, Artificial Sequence
  Description of Artificial Sequence: Synthetic oligonucleotide
  Sense strand starting at position 1376 of SEQ ID NO: 916951
ugguuacagucauauuuga

SEQ ID NO: 1196823 - RNA, 19 nt, Artificial Sequence
  Description of Artificial Sequence: Synthetic oligonucleotide
  Antisense strand to SEQ ID NO: 1196822
ucaaauaugacuguaacca

SEQ ID NO: 1196824 - RNA, 19 nt, Artificial Sequence
  Description of Artificial Sequence: Synthetic oligonucleotide
  Sense strand starting at position 1602 of SEQ ID NO: 916951
aaauaugcugaggguagua

SEQ ID NO: 1196825 - RNA, 19 nt, Artificial Sequence
  Description of Artificial Sequence: Synthetic oligonucleotide
  Antisense strand to SEQ ID NO: 1196824
uacuacccucagcauauuu

SEQ ID NO: 1196826 - RNA, 19 nt, Artificial Sequence
  Description of Artificial Sequence: Synthetic oligonucleotide
  Sense strand starting at position 1631 of SEQ ID NO: 916951
ugcugaaaugguugaucac

SEQ ID NO: 1196827 - RNA, 19 nt, Artificial Sequence
  Description of Artificial Sequence: Synthetic oligonucleotide
  Antisense strand to SEQ ID NO: 1196826
gugaucaaccauuucagca

SEQ ID NO: 1196828 - RNA, 19 nt, Artificial Sequence
  Description of Artificial Sequence: Synthetic oligonucleotide
  Sense strand starting at position 1632 of SEQ ID NO: 916951
gcugaaaugguugaucacu

SEQ ID NO: 1196829 - RNA, 19 nt, Artificial Sequence
  Description of Artificial Sequence: Synthetic oligonucleotide
  Antisense strand to SEQ ID NO: 1196828
agugaucaaccauuucagc

SEQ ID NO: 1196830 - RNA, 19 nt, Artificial Sequence
  Description of Artificial Sequence: Synthetic oligonucleotide
  Sense strand starting at position 1641 of SEQ ID NO: 916951
guugaucacugcccagaua

SEQ ID NO: 1196831 - RNA, 19 nt, Artificial Sequence
  Description of Artificial Sequence: Synthetic oligonucleotide
  Antisense strand to SEQ ID NO: 1196830
uaucugggcagugaucaac

SEQ ID NO: 1196832 - RNA, 19 nt, Artificial Sequence
  Description of Artificial Sequence: Synthetic oligonucleotide
  Sense strand starting at position 1642 of SEQ ID NO: 916951
uugaucacugcccagauau

SEQ ID NO: 1196833 - RNA, 19 nt, Artificial Sequence
  Description of Artificial Sequence: Synthetic oligonucleotide
  Antisense strand to SEQ ID NO: 1196832
auaucugggcagugaucaa

SEQ ID NO: 1196834 - RNA, 19 nt, Artificial Sequence
  Description of Artificial Sequence: Synthetic oligonucleotide
  Sense strand starting at position 1708 of SEQ ID NO: 916951
acaguugaauaccaguuua

SEQ ID NO: 1196835 - RNA, 19 nt, Artificial Sequence
  Description of Artificial Sequence: Synthetic oligonucleotide
  Antisense strand to SEQ ID NO: 1196834
uaaacugguauucaacugu

SEQ ID NO: 1196836 - RNA, 19 nt, Artificial Sequence
  Description of Artificial Sequence: Synthetic oligonucleotide
  Sense strand starting at position 1948 of SEQ ID NO: 916951
gcugguguuguguccggaa

SEQ ID NO: 1196837 - RNA, 19 nt, Artificial Sequence
  Description of Artificial Sequence: Synthetic oligonucleotide
  Antisense strand to SEQ ID NO: 1196836
uuccggacacaacaccagc

SEQ ID NO: 1196838 - RNA, 19 nt, Artificial Sequence
  Description of Artificial Sequence: Synthetic oligonucleotide
  Sense strand starting at position 2421 of SEQ ID NO: 916951
ggaaguauagcuggcuuca

SEQ ID NO: 1196839 - RNA, 19 nt, Artificial Sequence
  Description of Artificial Sequence: Synthetic oligonucleotide
  Antisense strand to SEQ ID NO: 1196838
ugaagccagcuauacuucc

SEQ ID NO: 1196840 - RNA, 19 nt, Artificial Sequence
  Description of Artificial Sequence: Synthetic oligonucleotide
  Sense strand starting at position 2693 of SEQ ID NO: 916951
cacugaaauugacgugaga

SEQ ID NO: 1196841 - RNA, 19 nt, Artificial Sequence
  Description of Artificial Sequence: Synthetic oligonucleotide
  Antisense strand to SEQ ID NO: 1196840
ucucacgucaauuucagug

SEQ ID NO: 1196842 - RNA, 19 nt, Artificial Sequence
  Description of Artificial Sequence: Synthetic oligonucleotide
  Sense strand starting at position 2695 of SEQ ID NO: 916951
cugaaauugacgugagacc

SEQ ID NO: 1196843 - RNA, 19 nt, Artificial Sequence
  Description of Artificial Sequence: Synthetic oligonucleotide
  Antisense strand to SEQ ID NO: 1196842
ggucucacgucaauuucag

SEQ ID NO: 1196844 - RNA, 19 nt, Artificial Sequence
  Description of Artificial Sequence: Synthetic oligonucleotide
  Sense strand starting at position 2778 of SEQ ID NO: 916951
uguguaaacucuccaucau

SEQ ID NO: 1196845 - RNA, 19 nt, Artificial Sequence
  Description of Artificial Sequence: Synthetic oligonucleotide
  Antisense strand to SEQ ID NO: 1196844
augauggagaguuuacaca

SEQ ID NO: 1196846 - RNA, 19 nt, Artificial Sequence
  Description of Artificial Sequence: Synthetic oligonucleotide
  Sense strand starting at position 2779 of SEQ ID NO: 916951
guguaaacucuccaucauu

SEQ ID NO: 1196847 - RNA, 19 nt, Artificial Sequence
  Description of Artificial Sequence: Synthetic oligonucleotide
  Antisense strand to SEQ ID NO: 1196846
aaugauggagaguuuacac

SEQ ID NO: 1196848 - RNA, 19 nt, Artificial Sequence
  Description of Artificial Sequence: Synthetic oligonucleotide
  Sense strand starting at position 2852 of SEQ ID NO: 916951
uccaguaaaugucuaaauu

SEQ ID NO: 1196849 - RNA, 19 nt, Artificial Sequence
  Description of Artificial Sequence: Synthetic oligonucleotide
  Antisense strand to SEQ ID NO: 1196848
aauuuagacauuuacugga

SEQ ID NO: 1196850 - RNA, 19 nt, Artificial Sequence
  Description of Artificial Sequence: Synthetic oligonucleotide
  Sense strand starting at position 2853 of SEQ ID NO: 916951
ccaguaaaugucuaaauuc

SEQ ID NO: 1196851 - RNA, 19 nt, Artificial Sequence
  Description of Artificial Sequence: Synthetic oligonucleotide
  Antisense strand to SEQ ID NO: 1196850
gaauuuagacauuuacugg

SEQ ID NO: 1196852 - RNA, 19 nt, Artificial Sequence
  Description of Artificial Sequence: Synthetic oligonucleotide
  Sense strand starting at position 3027 of SEQ ID NO: 916951
gcuaauacuuucguauaac

SEQ ID NO: 1196853 - RNA, 19 nt, Artificial Sequence
  Description of Artificial Sequence: Synthetic oligonucleotide
  Antisense strand to SEQ ID NO: 1196852
guuauacgaaaguauuagc

SEQ ID NO: 1196854 - RNA, 19 nt, Artificial Sequence
  Description of Artificial Sequence: Synthetic oligonucleotide
  Sense strand starting at position 3246 of SEQ ID NO: 916951
cuugguaaaguucgucuca

SEQ ID NO: 1196855 - RNA, 19 nt, Artificial Sequence
  Description of Artificial Sequence: Synthetic oligonucleotide
  Antisense strand to SEQ ID NO: 1196854
ugagacgaacuuuaccaag

SEQ ID NO: 1196856 - RNA, 19 nt, Artificial Sequence
  Description of Artificial Sequence: Synthetic oligonucleotide
  Sense strand starting at position 3247 of SEQ ID NO: 916951
uugguaaaguucgucucaa

SEQ ID NO: 1196857 - RNA, 19 nt, Artificial Sequence
  Description of Artificial Sequence: Synthetic oligonucleotide
  Antisense strand to SEQ ID NO: 1196856
uugagacgaacuuuaccaa

SEQ ID NO: 1196858 - RNA, 19 nt, Artificial Sequence
  Description of Artificial Sequence: Synthetic oligonucleotide
  Sense strand starting at position 3248 of SEQ ID NO: 916951
ugguaaaguucgucucaag

SEQ ID NO: 1196859 - RNA, 19 nt, Artificial Sequence
  Description of Artificial Sequence: Synthetic oligonucleotide
  Antisense strand to SEQ ID NO: 1196858
cuugagacgaacuuuacca

SEQ ID NO: 1196860 - RNA, 19 nt, Artificial Sequence
  Description of Artificial Sequence: Synthetic oligonucleotide
  Sense strand starting at position 3553 of SEQ ID NO: 916951
augagaauaucgccuggcu

SEQ ID NO: 1196861 - RNA, 19 nt, Artificial Sequence
  Description of Artificial Sequence: Synthetic oligonucleotide
  Antisense strand to SEQ ID NO: 1196860
agccaggcgauauucucau

SEQ ID NO: 1196862 - RNA, 19 nt, Artificial Sequence
  Description of Artificial Sequence: Synthetic oligonucleotide
  Sense strand starting at position 3555 of SEQ ID NO: 916951
gagaauaucgccuggcuag

SEQ ID NO: 1196863 - RNA, 19 nt, Artificial Sequence
  Description of Artificial Sequence: Synthetic oligonucleotide
  Antisense strand to SEQ ID NO: 1196862
cuagccaggcgauauucuc

SEQ ID NO: 1196864 - RNA, 19 nt, Artificial Sequence
  Description of Artificial Sequence: Synthetic oligonucleotide
  Sense strand starting at position 3556 of SEQ ID NO: 916951
agaauaucgccuggcuagu

SEQ ID NO: 1196865 - RNA, 19 nt, Artificial Sequence
  Description of Artificial Sequence: Synthetic oligonucleotide
  Antisense strand to SEQ ID NO: 1196864
acuagccaggcgauauucu

SEQ ID NO: 1196866 - RNA, 19 nt, Artificial Sequence
  Description of Artificial Sequence: Synthetic oligonucleotide
  Sense strand starting at position 3595 of SEQ ID NO: 916951
augagaaacuauugaaguc

SEQ ID NO: 1196867 - RNA, 19 nt, Artificial Sequence
  Description of Artificial Sequence: Synthetic oligonucleotide
  Antisense strand to SEQ ID NO: 1196866
gacuucaauaguuucucau

SEQ ID NO: 1196868 - RNA, 19 nt, Artificial Sequence
  Description of Artificial Sequence: Synthetic oligonucleotide
  Sense strand starting at position 400 of SEQ ID NO: 916952
cucagaacuguuuauggua

SEQ ID NO: 1196869 - RNA, 19 nt, Artificial Sequence
  Description of Artificial Sequence: Synthetic oligonucleotide
  Antisense strand to SEQ ID NO: 1196868
uaccauaaacaguucugag

SEQ ID NO: 1196870 - RNA, 19 nt, Artificial Sequence
  Description of Artificial Sequence: Synthetic oligonucleotide
  Sense strand starting at position 407 of SEQ ID NO: 916952
cuguuuaugguagacauag

SEQ ID NO: 1196871 - RNA, 19 nt, Artificial Sequence
  Description of Artificial Sequence: Synthetic oligonucleotide
  Antisense strand to SEQ ID NO: 1196870
cuaugucuaccauaaacag

SEQ ID NO: 1196872 - RNA, 19 nt, Artificial Sequence
  Description of Artificial Sequence: Synthetic oligonucleotide
  Sense strand starting at position 409 of SEQ ID NO: 916952
guuuaugguagacauaguu

SEQ ID NO: 1196873 - RNA, 19 nt, Artificial Sequence
  Description of Artificial Sequence: Synthetic oligonucleotide
  Antisense strand to SEQ ID NO: 1196872
aacuaugucuaccauaaac

SEQ ID NO: 1196874 - RNA, 19 nt, Artificial Sequence
  Description of Artificial Sequence: Synthetic oligonucleotide
  Sense strand starting at position 415 of SEQ ID NO: 916952
gguagacauaguugaaacu

SEQ ID NO: 1196875 - RNA, 19 nt, Artificial Sequence
  Description of Artificial Sequence: Synthetic oligonucleotide
  Antisense strand to SEQ ID NO: 1196874
aguuucaacuaugucuacc

SEQ ID NO: 1196876 - RNA, 19 nt, Artificial Sequence
  Description of Artificial Sequence: Synthetic oligonucleotide
  Sense strand starting at position 635 of SEQ ID NO: 916952
gguauauuugugugguuca

SEQ ID NO: 1196877 - RNA, 19 nt, Artificial Sequence
  Description of Artificial Sequence: Synthetic oligonucleotide
  Antisense strand to SEQ ID NO: 1196876
ugaaccacacaaauauacc

SEQ ID NO: 1196878 - RNA, 19 nt, Artificial Sequence
  Description of Artificial Sequence: Synthetic oligonucleotide
  Sense strand starting at position 670 of SEQ ID NO: 916952
agcaaugucuuuccugaga

SEQ ID NO: 1196879 - RNA, 19 nt, Artificial Sequence
  Description of Artificial Sequence: Synthetic oligonucleotide
  Antisense strand to SEQ ID NO: 1196878
ucucaggaaagacauugcu

SEQ ID NO: 1196880 - RNA, 19 nt, Artificial Sequence
  Description of Artificial Sequence: Synthetic oligonucleotide
  Sense strand starting at position 683 of SEQ ID NO: 916952
cugagauaagcugauaguu

SEQ ID NO: 1196881 - RNA, 19 nt, Artificial Sequence
  Description of Artificial Sequence: Synthetic oligonucleotide
  Antisense strand to SEQ ID NO: 1196880
aacuaucagcuuaucucag

SEQ ID NO: 1196882 - RNA, 19 nt, Artificial Sequence
  Description of Artificial Sequence: Synthetic oligonucleotide
  Sense strand starting at position 688 of SEQ ID NO: 916952
auaagcugauaguucuuaa

SEQ ID NO: 1196883 - RNA, 19 nt, Artificial Sequence
  Description of Artificial Sequence: Synthetic oligonucleotide
  Antisense strand to SEQ ID NO: 1196882
uuaagaacuaucagcuuau

SEQ ID NO: 1196884 - RNA, 19 nt, Artificial Sequence
  Description of Artificial Sequence: Synthetic oligonucleotide
  Sense strand starting at position 691 of SEQ ID NO: 916952
agcugauaguucuuaauaa

SEQ ID NO: 1196885 - RNA, 19 nt, Artificial Sequence
  Description of Artificial Sequence: Synthetic oligonucleotide
  Antisense strand to SEQ ID NO: 1196884
uuauuaagaacuaucagcu

SEQ ID NO: 1196886 - RNA, 19 nt, Artificial Sequence
  Description of Artificial Sequence: Synthetic oligonucleotide
  Sense strand starting at position 839 of SEQ ID NO: 916952
aagaguaugucacugucaa

SEQ ID NO: 1196887 - RNA, 19 nt, Artificial Sequence
  Description of Artificial Sequence: Synthetic oligonucleotide
  Antisense strand to SEQ ID NO: 1196886
uugacagugacauacucuu

SEQ ID NO: 1196888 - RNA, 19 nt, Artificial Sequence
  Description of Artificial Sequence: Synthetic oligonucleotide
  Sense strand starting at position 840 of SEQ ID NO: 916952
agaguaugucacugucaau

SEQ ID NO: 1196889 - RNA, 19 nt, Artificial Sequence
  Description of Artificial Sequence: Synthetic oligonucleotide
  Antisense strand to SEQ ID NO: 1196888
auugacagugacauacucu

SEQ ID NO: 1196890 - RNA, 19 nt, Artificial Sequence
  Description of Artificial Sequence: Synthetic oligonucleotide
  Sense strand starting at position 920 of SEQ ID NO: 916952
uuagacuaacguuagguaa

SEQ ID NO: 1196891 - RNA, 19 nt, Artificial Sequence
  Description of Artificial Sequence: Synthetic oligonucleotide
  Antisense strand to SEQ ID NO: 1196890
uuaccuaacguuagucuaa

SEQ ID NO: 1196892 - RNA, 19 nt, Artificial Sequence
  Description of Artificial Sequence: Synthetic oligonucleotide
  Sense strand starting at position 948 of SEQ ID NO: 916952
cuagguacaugcuugaaag

SEQ ID NO: 1196893 - RNA, 19 nt, Artificial Sequence
  Description of Artificial Sequence: Synthetic oligonucleotide
  Antisense strand to SEQ ID NO: 1196892
cuuucaagcauguaccuag

SEQ ID NO: 1196894 - RNA, 19 nt, Artificial Sequence
  Description of Artificial Sequence: Synthetic oligonucleotide
  Sense strand starting at position 950 of SEQ ID NO: 916952
agguacaugcuugaaaguu

SEQ ID NO: 1196895 - RNA, 19 nt, Artificial Sequence
  Description of Artificial Sequence: Synthetic oligonucleotide
  Antisense strand to SEQ ID NO: 1196894
aacuuucaagcauguaccu

SEQ ID NO: 1196896 - RNA, 19 nt, Artificial Sequence
  Description of Artificial Sequence: Synthetic oligonucleotide
  Sense strand starting at position 1185 of SEQ ID NO: 916952
aggauagcugaaugcaaua

SEQ ID NO: 1196897 - RNA, 19 nt, Artificial Sequence
  Description of Artificial Sequence: Synthetic oligonucleotide
  Antisense strand to SEQ ID NO: 1196896
uauugcauucagcuauccu

SEQ ID NO: 1196898 - RNA, 19 nt, Artificial Sequence
  Description of Artificial Sequence: Synthetic oligonucleotide
  Sense strand starting at position 1441 of SEQ ID NO: 916952
ggaacuaaguuugcuagga

SEQ ID NO: 1196899 - RNA, 19 nt, Artificial Sequence
  Description of Artificial Sequence: Synthetic oligonucleotide
  Antisense strand to SEQ ID NO: 1196898
uccuagcaaacuuaguucc

SEQ ID NO: 1196900 - RNA, 19 nt, Artificial Sequence
  Description of Artificial Sequence: Synthetic oligonucleotide
  Sense strand starting at position 1442 of SEQ ID NO: 916952
gaacuaaguuugcuaggau

SEQ ID NO: 1196901 - RNA, 19 nt, Artificial Sequence
  Description of Artificial Sequence: Synthetic oligonucleotide
  Antisense strand to SEQ ID NO: 1196900
auccuagcaaacuuaguuc

SEQ ID NO: 1196902 - RNA, 19 nt, Artificial Sequence
  Description of Artificial Sequence: Synthetic oligonucleotide
  Sense strand starting at position 1458 of SEQ ID NO: 916952
gaugguuaccguuguauuu

SEQ ID NO: 1196903 - RNA, 19 nt, Artificial Sequence
  Description of Artificial Sequence: Synthetic oligonucleotide
  Antisense strand to SEQ ID NO: 1196902
aaauacaacgguaaccauc

SEQ ID NO: 1196904 - RNA, 19 nt, Artificial Sequence
  Description of Artificial Sequence: Synthetic oligonucleotide
  Sense strand starting at position 1715 of SEQ ID NO: 916952
ugcugaaaugguugauuac

SEQ ID NO: 1196905 - RNA, 19 nt, Artificial Sequence
  Description of Artificial Sequence: Synthetic oligonucleotide
  Antisense strand to SEQ ID NO: 1196904
guaaucaaccauuucagca

SEQ ID NO: 1196906 - RNA, 19 nt, Artificial Sequence
  Description of Artificial Sequence: Synthetic oligonucleotide
  Sense strand starting at position 1716 of SEQ ID NO: 916952
gcugaaaugguugauuacu

SEQ ID NO: 1196907 - RNA, 19 nt, Artificial Sequence
  Description of Artificial Sequence: Synthetic oligonucleotide
  Antisense strand to SEQ ID NO: 1196906
aguaaucaaccauuucagc

SEQ ID NO: 1196908 - RNA, 19 nt, Artificial Sequence
  Description of Artificial Sequence: Synthetic oligonucleotide
  Sense strand starting at position 1725 of SEQ ID NO: 916952
guugauuacugcccagaca

SEQ ID NO: 1196909 - RNA, 19 nt, Artificial Sequence
  Description of Artificial Sequence: Synthetic oligonucleotide
  Antisense strand to SEQ ID NO: 1196908
ugucugggcaguaaucaac

SEQ ID NO: 1196910 - RNA, 19 nt, Artificial Sequence
  Description of Artificial Sequence: Synthetic oligonucleotide
  Sense strand starting at position 1726 of SEQ ID NO: 916952
uugauuacugcccagacau

SEQ ID NO: 1196911 - RNA, 19 nt, Artificial Sequence
  Description of Artificial Sequence: Synthetic oligonucleotide
  Antisense strand to SEQ ID NO: 1196910
augucugggcaguaaucaa

SEQ ID NO: 1196912 - RNA, 19 nt, Artificial Sequence
  Description of Artificial Sequence: Synthetic oligonucleotide
  Sense strand starting at position 1738 of SEQ ID NO: 916952
cagacauuguaagcaguaa

SEQ ID NO: 1196913 - RNA, 19 nt, Artificial Sequence
  Description of Artificial Sequence: Synthetic oligonucleotide
  Antisense strand to SEQ ID NO: 1196912
uuacugcuuacaaugucug

SEQ ID NO: 1196914 - RNA, 19 nt, Artificial Sequence
  Description of Artificial Sequence: Synthetic oligonucleotide
  Sense strand starting at position 2152 of SEQ ID NO: 916952
gccagaaaucaccauggca

SEQ ID NO: 1196915 - RNA, 19 nt, Artificial Sequence
  Description of Artificial Sequence: Synthetic oligonucleotide
  Antisense strand to SEQ ID NO: 1196914
ugccauggugauuucuggc

SEQ ID NO: 1196916 - RNA, 19 nt, Artificial Sequence
  Description of Artificial Sequence: Synthetic oligonucleotide
  Sense strand starting at position 2379 of SEQ ID NO: 916952
uccaucauuugucuuuagu

SEQ ID NO: 1196917 - RNA, 19 nt, Artificial Sequence
  Description of Artificial Sequence: Synthetic oligonucleotide
  Antisense strand to SEQ ID NO: 1196916
acuaaagacaaaugaugga

SEQ ID NO: 1196918 - RNA, 19 nt, Artificial Sequence
  Description of Artificial Sequence: Synthetic oligonucleotide
  Sense strand starting at position 2465 of SEQ ID NO: 916952
aaaggagcuuggucauaau

SEQ ID NO: 1196919 - RNA, 19 nt, Artificial Sequence
  Description of Artificial Sequence: Synthetic oligonucleotide
  Antisense strand to SEQ ID NO: 1196918
auuaugaccaagcuccuuu

SEQ ID NO: 1196920 - RNA, 19 nt, Artificial Sequence
  Description of Artificial Sequence: Synthetic oligonucleotide
  Sense strand starting at position 2595 of SEQ ID NO: 916952
gcugcuaauacguuuguau

SEQ ID NO: 1196921 - RNA, 19 nt, Artificial Sequence
  Description of Artificial Sequence: Synthetic oligonucleotide
  Antisense strand to SEQ ID NO: 1196920
auacaaacguauuagcagc

SEQ ID NO: 1196922 - RNA, 19 nt, Artificial Sequence
  Description of Artificial Sequence: Synthetic oligonucleotide
  Sense strand starting at position 2729 of SEQ ID NO: 916952
ggagguugucuaggugaag

SEQ ID NO: 1196923 - RNA, 19 nt, Artificial Sequence
  Description of Artificial Sequence: Synthetic oligonucleotide
  Antisense strand to SEQ ID NO: 1196922
cuucaccuagacaaccucc

SEQ ID NO: 1196924 - RNA, 19 nt, Artificial Sequence
  Description of Artificial Sequence: Synthetic oligonucleotide
  Sense strand starting at position 2732 of SEQ ID NO: 916952
gguugucuaggugaaguua

SEQ ID NO: 1196925 - RNA, 19 nt, Artificial Sequence
  Description of Artificial Sequence: Synthetic oligonucleotide
  Antisense strand to SEQ ID NO: 1196924
uaacuucaccuagacaacc

SEQ ID NO: 1196926 - RNA, 19 nt, Artificial Sequence
  Description of Artificial Sequence: Synthetic oligonucleotide
  Sense strand starting at position 2740 of SEQ ID NO: 916952
aggugaaguuaguccuauu

SEQ ID NO: 1196927 - RNA, 19 nt, Artificial Sequence
  Description of Artificial Sequence: Synthetic oligonucleotide
  Antisense strand to SEQ ID NO: 1196926
aauaggacuaacuucaccu

SEQ ID NO: 1196928 - RNA, 19 nt, Artificial Sequence
  Description of Artificial Sequence: Synthetic oligonucleotide
  Sense strand starting at position 2829 of SEQ ID NO: 916952
gguaaaguuucucucaaga

SEQ ID NO: 1196929 - RNA, 19 nt, Artificial Sequence
  Description of Artificial Sequence: Synthetic oligonucleotide
  Antisense strand to SEQ ID NO: 1196928
ucuugagagaaacuuuacc

SEQ ID NO: 1196930 - RNA, 19 nt, Artificial Sequence
  Description of Artificial Sequence: Synthetic oligonucleotide
  Sense strand starting at position 2891 of SEQ ID NO: 916952
guauaagaauuccugagua

SEQ ID NO: 1196931 - RNA, 19 nt, Artificial Sequence
  Description of Artificial Sequence: Synthetic oligonucleotide
  Antisense strand to SEQ ID NO: 1196930
uacucaggaauucuuauac

SEQ ID NO: 1196932 - RNA, 19 nt, Artificial Sequence
  Description of Artificial Sequence: Synthetic oligonucleotide
  Sense strand starting at position 3428 of SEQ ID NO: 916952
ggaaauugcaaagguuugu

SEQ ID NO: 1196933 - RNA, 19 nt, Artificial Sequence
  Description of Artificial Sequence: Synthetic oligonucleotide
  Antisense strand to SEQ ID NO: 1196932
acaaaccuuugcaauuucc

SEQ ID NO: 1196934 - RNA, 19 nt, Artificial Sequence
  Description of Artificial Sequence: Synthetic oligonucleotide
  Sense strand starting at position 3447 of SEQ ID NO: 916952
ucuugugaggucgauaauu

SEQ ID NO: 1196935 - RNA, 19 nt, Artificial Sequence
  Description of Artificial Sequence: Synthetic oligonucleotide
  Antisense strand to SEQ ID NO: 1196934
aauuaucgaccucacaaga

SEQ ID NO: 1196936 - RNA, 19 nt, Artificial Sequence
  Description of Artificial Sequence: Synthetic oligonucleotide
  Sense strand starting at position 3449 of SEQ ID NO: 916952
uugugaggucgauaauuaa

SEQ ID NO: 1196937 - RNA, 19 nt, Artificial Sequence
  Description of Artificial Sequence: Synthetic oligonucleotide
  Antisense strand to SEQ ID NO: 1196936
uuaauuaucgaccucacaa

SEQ ID NO: 1196938 - RNA, 19 nt, Artificial Sequence
  Description of Artificial Sequence: Synthetic oligonucleotide
  Sense strand starting at position 3543 of SEQ ID NO: 916952
auaagaaagugcucacuuc

SEQ ID NO: 1196939 - RNA, 19 nt, Artificial Sequence
  Description of Artificial Sequence: Synthetic oligonucleotide
  Antisense strand to SEQ ID NO: 1196938
gaagugagcacuuucuuau

SEQ ID NO: 1196940 - RNA, 19 nt, Artificial Sequence
  Description of Artificial Sequence: Synthetic oligonucleotide
  Sense strand starting at position 3568 of SEQ ID NO: 916952
cuuagaguuguauaacaau

SEQ ID NO: 1196941 - RNA, 19 nt, Artificial Sequence
  Description of Artificial Sequence: Synthetic oligonucleotide
  Antisense strand to SEQ ID NO: 1196940
auuguuauacaacucuaag

SEQ ID NO: 1196942 - RNA, 19 nt, Artificial Sequence
  Description of Artificial Sequence: Synthetic oligonucleotide
  Sense strand starting at position 3574 of SEQ ID NO: 916952
guuguauaacaauguauac

SEQ ID NO: 1196943 - RNA, 19 nt, Artificial Sequence
  Description of Artificial Sequence: Synthetic oligonucleotide
  Antisense strand to SEQ ID NO: 1196942
guauacauuguuauacaac

SEQ ID NO: 1196944 - RNA, 19 nt, Artificial Sequence
  Description of Artificial Sequence: Synthetic oligonucleotide
  Sense strand starting at position 3606 of SEQ ID NO: 916952
uugccaucaguauauaaug

SEQ ID NO: 1196945 - RNA, 19 nt, Artificial Sequence
  Description of Artificial Sequence: Synthetic oligonucleotide
  Antisense strand to SEQ ID NO: 1196944
cauuauauacugauggcaa

SEQ ID NO: 1196946 - RNA, 19 nt, Artificial Sequence
  Description of Artificial Sequence: Synthetic oligonucleotide
  Sense strand starting at position 3757 of SEQ ID NO: 916952
ccaugaugcaggcaagaca

SEQ ID NO: 1196947 - RNA, 19 nt, Artificial Sequence
  Description of Artificial Sequence: Synthetic oligonucleotide
  Antisense strand to SEQ ID NO: 1196946
ugucuugccugcaucaugg

SEQ ID NO: 1196948 - RNA, 19 nt, Artificial Sequence
  Description of Artificial Sequence: Synthetic oligonucleotide
  Sense strand starting at position 123 of SEQ ID NO: 916953
aggagaucauuggcaauuc

SEQ ID NO: 1196949 - RNA, 19 nt, Artificial Sequence
  Description of Artificial Sequence: Synthetic oligonucleotide
  Antisense strand to SEQ ID NO: 1196948
gaauugccaaugaucuccu

SEQ ID NO: 1196950 - RNA, 19 nt, Artificial Sequence
  Description of Artificial Sequence: Synthetic oligonucleotide
  Sense strand starting at position 143 of SEQ ID NO: 916953
gggacucugaggugguuua

SEQ ID NO: 1196951 - RNA, 19 nt, Artificial Sequence
  Description of Artificial Sequence: Synthetic oligonucleotide
  Antisense strand to SEQ ID NO: 1196950
uaaaccaccucagaguccc

SEQ ID NO: 1196952 - RNA, 19 nt, Artificial Sequence
  Description of Artificial Sequence: Synthetic oligonucleotide
  Sense strand starting at position 358 of SEQ ID NO: 916953
auuauuccucaguacuguu

SEQ ID NO: 1196953 - RNA, 19 nt, Artificial Sequence
  Description of Artificial Sequence: Synthetic oligonucleotide
  Antisense strand to SEQ ID NO: 1196952
aacaguacugaggaauaau

SEQ ID NO: 1196954 - RNA, 19 nt, Artificial Sequence
  Description of Artificial Sequence: Synthetic oligonucleotide
  Sense strand starting at position 372 of SEQ ID NO: 916953
cuguuuaugguagacauau

SEQ ID NO: 1196955 - RNA, 19 nt, Artificial Sequence
  Description of Artificial Sequence: Synthetic oligonucleotide
  Antisense strand to SEQ ID NO: 1196954
auaugucuaccauaaacag

SEQ ID NO: 1196956 - RNA, 19 nt, Artificial Sequence
  Description of Artificial Sequence: Synthetic oligonucleotide
  Sense strand starting at position 458 of SEQ ID NO: 916953
uuaugcuggcuauaaacua

SEQ ID NO: 1196957 - RNA, 19 nt, Artificial Sequence
  Description of Artificial Sequence: Synthetic oligonucleotide
  Antisense strand to SEQ ID NO: 1196956
uaguuuauagccagcauaa

SEQ ID NO: 1196958 - RNA, 19 nt, Artificial Sequence
  Description of Artificial Sequence: Synthetic oligonucleotide
  Sense strand starting at position 635 of SEQ ID NO: 916953
uugagauaaugugucacuu

SEQ ID NO: 1196959 - RNA, 19 nt, Artificial Sequence
  Description of Artificial Sequence: Synthetic oligonucleotide
  Antisense strand to SEQ ID NO: 1196958
aagugacacauuaucucaa

SEQ ID NO: 1196960 - RNA, 19 nt, Artificial Sequence
  Description of Artificial Sequence: Synthetic oligonucleotide
  Sense strand starting at position 643 of SEQ ID NO: 916953
augugucacuucuuaacaa

SEQ ID NO: 1196961 - RNA, 19 nt, Artificial Sequence
  Description of Artificial Sequence: Synthetic oligonucleotide
  Antisense strand to SEQ ID NO: 1196960
uuguuaagaagugacacau

SEQ ID NO: 1196962 - RNA, 19 nt, Artificial Sequence
  Description of Artificial Sequence: Synthetic oligonucleotide
  Sense strand starting at position 718 of SEQ ID NO: 916953
gugaaauauacauggguuc

SEQ ID NO: 1196963 - RNA, 19 nt, Artificial Sequence
  Description of Artificial Sequence: Synthetic oligonucleotide
  Antisense strand to SEQ ID NO: 1196962
gaacccauguauauuucac

SEQ ID NO: 1196964 - RNA, 19 nt, Artificial Sequence
  Description of Artificial Sequence: Synthetic oligonucleotide
  Sense strand starting at position 1112 of SEQ ID NO: 916953
uaggaugaaugagucgaau

SEQ ID NO: 1196965 - RNA, 19 nt, Artificial Sequence
  Description of Artificial Sequence: Synthetic oligonucleotide
  Antisense strand to SEQ ID NO: 1196964
auucgacucauucauccua

SEQ ID NO: 1196966 - RNA, 19 nt, Artificial Sequence
  Description of Artificial Sequence: Synthetic oligonucleotide
  Sense strand starting at position 1115 of SEQ ID NO: 916953
gaugaaugagucgaaugca

SEQ ID NO: 1196967 - RNA, 19 nt, Artificial Sequence
  Description of Artificial Sequence: Synthetic oligonucleotide
  Antisense strand to SEQ ID NO: 1196966
ugcauucgacucauucauc

SEQ ID NO: 1196968 - RNA, 19 nt, Artificial Sequence
  Description of Artificial Sequence: Synthetic oligonucleotide
  Sense strand starting at position 1118 of SEQ ID NO: 916953
gaaugagucgaaugcaaga

SEQ ID NO: 1196969 - RNA, 19 nt, Artificial Sequence
  Description of Artificial Sequence: Synthetic oligonucleotide
  Antisense strand to SEQ ID NO: 1196968
ucuugcauucgacucauuc

SEQ ID NO: 1196970 - RNA, 19 nt, Artificial Sequence
  Description of Artificial Sequence: Synthetic oligonucleotide
  Sense strand starting at position 1120 of SEQ ID NO: 916953
augagucgaaugcaagaua

SEQ ID NO: 1196971 - RNA, 19 nt, Artificial Sequence
  Description of Artificial Sequence: Synthetic oligonucleotide
  Antisense strand to SEQ ID NO: 1196970
uaucuugcauucgacucau

SEQ ID NO: 1196972 - RNA, 19 nt, Artificial Sequence
  Description of Artificial Sequence: Synthetic oligonucleotide
  Sense strand starting at position 1123 of SEQ ID NO: 916953
agucgaaugcaagauauau

SEQ ID NO: 1196973 - RNA, 19 nt, Artificial Sequence
  Description of Artificial Sequence: Synthetic oligonucleotide
  Antisense strand to SEQ ID NO: 1196972
auauaucuugcauucgacu

SEQ ID NO: 1196974 - RNA, 19 nt, Artificial Sequence
  Description of Artificial Sequence: Synthetic oligonucleotide
  Sense strand starting at position 1125 of SEQ ID NO: 916953
ucgaaugcaagauauaugu

SEQ ID NO: 1196975 - RNA, 19 nt, Artificial Sequence
  Description of Artificial Sequence: Synthetic oligonucleotide
  Antisense strand to SEQ ID NO: 1196974
acauauaucuugcauucga

SEQ ID NO: 1196976 - RNA, 19 nt, Artificial Sequence
  Description of Artificial Sequence: Synthetic oligonucleotide
  Sense strand starting at position 1134 of SEQ ID NO: 916953
agauauauguuuccaacag

SEQ ID NO: 1196977 - RNA, 19 nt, Artificial Sequence
  Description of Artificial Sequence: Synthetic oligonucleotide
  Antisense strand to SEQ ID NO: 1196976
cuguuggaaacauauaucu

SEQ ID NO: 1196978 - RNA, 19 nt, Artificial Sequence
  Description of Artificial Sequence: Synthetic oligonucleotide
  Sense strand starting at position 1162 of SEQ ID NO: 916953
ccaugacaaccgggucauu

SEQ ID NO: 1196979 - RNA, 19 nt, Artificial Sequence
  Description of Artificial Sequence: Synthetic oligonucleotide
  Antisense strand to SEQ ID NO: 1196978
aaugacccgguugucaugg

SEQ ID NO: 1196980 - RNA, 19 nt, Artificial Sequence
  Description of Artificial Sequence: Synthetic oligonucleotide
  Sense strand starting at position 1251 of SEQ ID NO: 916953
gagaucagaguuugcaaag

SEQ ID NO: 1196981 - RNA, 19 nt, Artificial Sequence
  Description of Artificial Sequence: Synthetic oligonucleotide
  Antisense strand to SEQ ID NO: 1196980
cuuugcaaacucugaucuc

SEQ ID NO: 1196982 - RNA, 19 nt, Artificial Sequence
  Description of Artificial Sequence: Synthetic oligonucleotide
  Sense strand starting at position 1391 of SEQ ID NO: 916953
uaugaagcuccauagggua

SEQ ID NO: 1196983 - RNA, 19 nt, Artificial Sequence
  Description of Artificial Sequence: Synthetic oligonucleotide
  Antisense strand to SEQ ID NO: 1196982
uacccuauggagcuucaua

SEQ ID NO: 1196984 - RNA, 19 nt, Artificial Sequence
  Description of Artificial Sequence: Synthetic oligonucleotide
  Sense strand starting at position 1406 of SEQ ID NO: 916953
gguaguuacagucaaauau

SEQ ID NO: 1196985 - RNA, 19 nt, Artificial Sequence
  Description of Artificial Sequence: Synthetic oligonucleotide
  Antisense strand to SEQ ID NO: 1196984
auauuugacuguaacuacc

SEQ ID NO: 1196986 - RNA, 19 nt, Artificial Sequence
  Description of Artificial Sequence: Synthetic oligonucleotide
  Sense strand starting at position 1665 of SEQ ID NO: 916953
cugaaaugguugguuacaa

SEQ ID NO: 1196987 - RNA, 19 nt, Artificial Sequence
  Description of Artificial Sequence: Synthetic oligonucleotide
  Antisense strand to SEQ ID NO: 1196986
uuguaaccaaccauuucag

SEQ ID NO: 1196988 - RNA, 19 nt, Artificial Sequence
  Description of Artificial Sequence: Synthetic oligonucleotide
  Sense strand starting at position 1666 of SEQ ID NO: 916953
ugaaaugguugguuacaac

SEQ ID NO: 1196989 - RNA, 19 nt, Artificial Sequence
  Description of Artificial Sequence: Synthetic oligonucleotide
  Antisense strand to SEQ ID NO: 1196988
guuguaaccaaccauuuca

SEQ ID NO: 1196990 - RNA, 19 nt, Artificial Sequence
  Description of Artificial Sequence: Synthetic oligonucleotide
  Sense strand starting at position 1676 of SEQ ID NO: 916953
gguuacaacccaggcauua

SEQ ID NO: 1196991 - RNA, 19 nt, Artificial Sequence
  Description of Artificial Sequence: Synthetic oligonucleotide
  Antisense strand to SEQ ID NO: 1196990
uaaugccuggguuguaacc

SEQ ID NO: 1196992 - RNA, 19 nt, Artificial Sequence
  Description of Artificial Sequence: Synthetic oligonucleotide
  Sense strand starting at position 1867 of SEQ ID NO: 916953
cuaugaagccauuggcaaa

SEQ ID NO: 1196993 - RNA, 19 nt, Artificial Sequence
  Description of Artificial Sequence: Synthetic oligonucleotide
  Antisense strand to SEQ ID NO: 1196992
uuugccaauggcuucauag

SEQ ID NO: 1196994 - RNA, 19 nt, Artificial Sequence
  Description of Artificial Sequence: Synthetic oligonucleotide
  Sense strand starting at position 2116 of SEQ ID NO: 916953
gcuaauggaugaguuugau

SEQ ID NO: 1196995 - RNA, 19 nt, Artificial Sequence
  Description of Artificial Sequence: Synthetic oligonucleotide
  Antisense strand to SEQ ID NO: 1196994
aucaaacucauccauuagc

SEQ ID NO: 1196996 - RNA, 19 nt, Artificial Sequence
  Description of Artificial Sequence: Synthetic oligonucleotide
  Sense strand starting at position 2119 of SEQ ID NO: 916953
aauggaugaguuugauguc

SEQ ID NO: 1196997 - RNA, 19 nt, Artificial Sequence
  Description of Artificial Sequence: Synthetic oligonucleotide
  Antisense strand to SEQ ID NO: 1196996
gacaucaaacucauccauu

SEQ ID NO: 1196998 - RNA, 19 nt, Artificial Sequence
  Description of Artificial Sequence: Synthetic oligonucleotide
  Sense strand starting at position 2131 of SEQ ID NO: 916953
ugaugucaucuuuacggaa

SEQ ID NO: 1196999 - RNA, 19 nt, Artificial Sequence
  Description of Artificial Sequence: Synthetic oligonucleotide
  Antisense strand to SEQ ID NO: 1196998
uuccguaaagaugacauca

SEQ ID NO: 1197000 - RNA, 19 nt, Artificial Sequence
  Description of Artificial Sequence: Synthetic oligonucleotide
  Sense strand starting at position 2205 of SEQ ID NO: 916953
ugugaugggcuugaauuau

SEQ ID NO: 1197001 - RNA, 19 nt, Artificial Sequence
  Description of Artificial Sequence: Synthetic oligonucleotide
  Antisense strand to SEQ ID NO: 1197000
auaauucaagcccaucaca

SEQ ID NO: 1197002 - RNA, 19 nt, Artificial Sequence
  Description of Artificial Sequence: Synthetic oligonucleotide
  Sense strand starting at position 2350 of SEQ ID NO: 916953
agcuguuagauagggaaau

SEQ ID NO: 1197003 - RNA, 19 nt, Artificial Sequence
  Description of Artificial Sequence: Synthetic oligonucleotide
  Antisense strand to SEQ ID NO: 1197002
auuucccuaucuaacagcu

SEQ ID NO: 1197004 - RNA, 19 nt, Artificial Sequence
  Description of Artificial Sequence: Synthetic oligonucleotide
  Sense strand starting at position 2393 of SEQ ID NO: 916953
acaguaaaugucuaaguuc

SEQ ID NO: 1197005 - RNA, 19 nt, Artificial Sequence
  Description of Artificial Sequence: Synthetic oligonucleotide
  Antisense strand to SEQ ID NO: 1197004
gaacuuagacauuuacugu

SEQ ID NO: 1197006 - RNA, 19 nt, Artificial Sequence
  Description of Artificial Sequence: Synthetic oligonucleotide
  Sense strand starting at position 2727 of SEQ ID NO: 916953
ggccauccacgugaaauua

SEQ ID NO: 1197007 - RNA, 19 nt, Artificial Sequence
  Description of Artificial Sequence: Synthetic oligonucleotide
  Antisense strand to SEQ ID NO: 1197006
uaauuucacguggauggcc

SEQ ID NO: 1197008 - RNA, 19 nt, Artificial Sequence
  Description of Artificial Sequence: Synthetic oligonucleotide
  Sense strand starting at position 2836 of SEQ ID NO: 916953
ugguaaacuuacucucaag

SEQ ID NO: 1197009 - RNA, 19 nt, Artificial Sequence
  Description of Artificial Sequence: Synthetic oligonucleotide
  Antisense strand to SEQ ID NO: 1197008
cuugagaguaaguuuacca

SEQ ID NO: 1197010 - RNA, 19 nt, Artificial Sequence
  Description of Artificial Sequence: Synthetic oligonucleotide
  Sense strand starting at position 2906 of SEQ ID NO: 916953
guaaauauuccugaguacc

SEQ ID NO: 1197011 - RNA, 19 nt, Artificial Sequence
  Description of Artificial Sequence: Synthetic oligonucleotide
  Antisense strand to SEQ ID NO: 1197010
gguacucaggaauauuuac

SEQ ID NO: 1197012 - RNA, 19 nt, Artificial Sequence
  Description of Artificial Sequence: Synthetic oligonucleotide
  Sense strand starting at position 2961 of SEQ ID NO: 916953
ccauaagcagguugauuau

SEQ ID NO: 1197013 - RNA, 19 nt, Artificial Sequence
  Description of Artificial Sequence: Synthetic oligonucleotide
  Antisense strand to SEQ ID NO: 1197012
auaaucaaccugcuuaugg

SEQ ID NO: 1197014 - RNA, 19 nt, Artificial Sequence
  Description of Artificial Sequence: Synthetic oligonucleotide
  Sense strand starting at position 3101 of SEQ ID NO: 916953
augagauuaucaccuggcu

SEQ ID NO: 1197015 - RNA, 19 nt, Artificial Sequence
  Description of Artificial Sequence: Synthetic oligonucleotide
  Antisense strand to SEQ ID NO: 1197014
agccaggugauaaucucau

SEQ ID NO: 1197016 - RNA, 19 nt, Artificial Sequence
  Description of Artificial Sequence: Synthetic oligonucleotide
  Sense strand starting at position 3454 of SEQ ID NO: 916953
ugucaugugagguagauaa

SEQ ID NO: 1197017 - RNA, 19 nt, Artificial Sequence
  Description of Artificial Sequence: Synthetic oligonucleotide
  Antisense strand to SEQ ID NO: 1197016
uuaucuaccucacaugaca

SEQ ID NO: 1197018 - RNA, 19 nt, Artificial Sequence
  Description of Artificial Sequence: Synthetic oligonucleotide
  Sense strand starting at position 3497 of SEQ ID NO: 916953
aaaggauuugugugcugca

SEQ ID NO: 1197019 - RNA, 19 nt, Artificial Sequence
  Description of Artificial Sequence: Synthetic oligonucleotide
  Antisense strand to SEQ ID NO: 1197018
ugcagcacacaaauccuuu

SEQ ID NO: 1197020 - RNA, 19 nt, Artificial Sequence
  Description of Artificial Sequence: Synthetic oligonucleotide
  Sense strand starting at position 3514 of SEQ ID NO: 916953
cagguagcaucaucugaaa

SEQ ID NO: 1197021 - RNA, 19 nt, Artificial Sequence
  Description of Artificial Sequence: Synthetic oligonucleotide
  Antisense strand to SEQ ID NO: 1197020
uuucagaugaugcuaccug

SEQ ID NO: 1197022 - RNA, 19 nt, Artificial Sequence
  Description of Artificial Sequence: Synthetic oligonucleotide
  Sense strand starting at position 3593 of SEQ ID NO: 916953
auguguauaaauggugaau

SEQ ID NO: 1197023 - RNA, 19 nt, Artificial Sequence
  Description of Artificial Sequence: Synthetic oligonucleotide
  Antisense strand to SEQ ID NO: 1197022
auucaccauuuauacacau

SEQ ID NO: 1197024 - RNA, 19 nt, Artificial Sequence
  Description of Artificial Sequence: Synthetic oligonucleotide
  Sense strand starting at position 3621 of SEQ ID NO: 916953
gguauacaaugagcagaau

SEQ ID NO: 1197025 - RNA, 19 nt, Artificial Sequence
  Description of Artificial Sequence: Synthetic oligonucleotide
  Antisense strand to SEQ ID NO: 1197024
auucugcucauuguauacc

SEQ ID NO: 1197026 - RNA, 19 nt, Artificial Sequence
  Description of Artificial Sequence: Synthetic oligonucleotide
  Sense strand starting at position 3869 of SEQ ID NO: 916953
agccauaauuuagaaugau

SEQ ID NO: 1197027 - RNA, 19 nt, Artificial Sequence
  Description of Artificial Sequence: Synthetic oligonucleotide
  Antisense strand to SEQ ID NO: 1197026
aucauucuaaauuauggcu

SEQ ID NO: 1197028 - RNA, 19 nt, Artificial Sequence
  Description of Artificial Sequence: Synthetic oligonucleotide
  Sense strand starting at position 122 of SEQ ID NO: 916954
gaugaucuacauugaggca

SEQ ID NO: 1197029 - RNA, 19 nt, Artificial Sequence
  Description of Artificial Sequence: Synthetic oligonucleotide
  Antisense strand to SEQ ID NO: 1197028
ugccucaauguagaucauc

SEQ ID NO: 1197030 - RNA, 19 nt, Artificial Sequence
  Description of Artificial Sequence: Synthetic oligonucleotide
  Sense strand starting at position 137 of SEQ ID NO: 916954
ggcaauauauccuuugaga

SEQ ID NO: 1197031 - RNA, 19 nt, Artificial Sequence
  Description of Artificial Sequence: Synthetic oligonucleotide
  Antisense strand to SEQ ID NO: 1197030
ucucaaaggauauauugcc

SEQ ID NO: 1197032 - RNA, 19 nt, Artificial Sequence
  Description of Artificial Sequence: Synthetic oligonucleotide
  Sense strand starting at position 522 of SEQ ID NO: 916954
uuuguuggaugauccaaga

SEQ ID NO: 1197033 - RNA, 19 nt, Artificial Sequence
  Description of Artificial Sequence: Synthetic oligonucleotide
  Antisense strand to SEQ ID NO: 1197032
ucuuggaucauccaacaaa

SEQ ID NO: 1197034 - RNA, 19 nt, Artificial Sequence
  Description of Artificial Sequence: Synthetic oligonucleotide
  Sense strand starting at position 995 of SEQ ID NO: 916954
guuuauguuguuggaauuu

SEQ ID NO: 1197035 - RNA, 19 nt, Artificial Sequence
  Description of Artificial Sequence: Synthetic oligonucleotide
  Antisense strand to SEQ ID NO: 1197034
aaauuccaacaacauaaac

SEQ ID NO: 1197036 - RNA, 19 nt, Artificial Sequence
  Description of Artificial Sequence: Synthetic oligonucleotide
  Sense strand starting at position 1115 of SEQ ID NO: 916954
agauuagagcuauggacuc

SEQ ID NO: 1197037 - RNA, 19 nt, Artificial Sequence
  Description of Artificial Sequence: Synthetic oligonucleotide
  Antisense strand to SEQ ID NO: 1197036
gaguccauagcucuaaucu

SEQ ID NO: 1197038 - RNA, 19 nt, Artificial Sequence
  Description of Artificial Sequence: Synthetic oligonucleotide
  Sense strand starting at position 1194 of SEQ ID NO: 916954
ggacaaauaguaggcaaua

SEQ ID NO: 1197039 - RNA, 19 nt, Artificial Sequence
  Description of Artificial Sequence: Synthetic oligonucleotide
  Antisense strand to SEQ ID NO: 1197038
uauugccuacuauuugucc

SEQ ID NO: 1197040 - RNA, 19 nt, Artificial Sequence
  Description of Artificial Sequence: Synthetic oligonucleotide
  Sense strand starting at position 1641 of SEQ ID NO: 916954
gguugcaaaccagauacuu

SEQ ID NO: 1197041 - RNA, 19 nt, Artificial Sequence
  Description of Artificial Sequence: Synthetic oligonucleotide
  Antisense strand to SEQ ID NO: 1197040
aaguaucugguuugcaacc

SEQ ID NO: 1197042 - RNA, 19 nt, Artificial Sequence
  Description of Artificial Sequence: Synthetic oligonucleotide
  Sense strand starting at position 1666 of SEQ ID NO: 916954
uugguuaguguccagaaga

SEQ ID NO: 1197043 - RNA, 19 nt, Artificial Sequence
  Description of Artificial Sequence: Synthetic oligonucleotide
  Antisense strand to SEQ ID NO: 1197042
ucuucuggacacuaaccaa

SEQ ID NO: 1197044 - RNA, 19 nt, Artificial Sequence
  Description of Artificial Sequence: Synthetic oligonucleotide
  Sense strand starting at position 1682 of SEQ ID NO: 916954
agaagucaaugauucucau

SEQ ID NO: 1197045 - RNA, 19 nt, Artificial Sequence
  Description of Artificial Sequence: Synthetic oligonucleotide
  Antisense strand to SEQ ID NO: 1197044
augagaaucauugacuucu

SEQ ID NO: 1197046 - RNA, 19 nt, Artificial Sequence
  Description of Artificial Sequence: Synthetic oligonucleotide
  Sense strand starting at position 1705 of SEQ ID NO: 916954
uuaccaguggcauagacau

SEQ ID NO: 1197047 - RNA, 19 nt, Artificial Sequence
  Description of Artificial Sequence: Synthetic oligonucleotide
  Antisense strand to SEQ ID NO: 1197046
augucuaugccacugguaa

SEQ ID NO: 1197048 - RNA, 19 nt, Artificial Sequence
  Description of Artificial Sequence: Synthetic oligonucleotide
  Sense strand starting at position 1713 of SEQ ID NO: 916954
ggcauagacaucuggauau

SEQ ID NO: 1197049 - RNA, 19 nt, Artificial Sequence
  Description of Artificial Sequence: Synthetic oligonucleotide
  Antisense strand to SEQ ID NO: 1197048
auauccagaugucuaugcc

SEQ ID NO: 1197050 - RNA, 19 nt, Artificial Sequence
  Description of Artificial Sequence: Synthetic oligonucleotide
  Sense strand starting at position 1755 of SEQ ID NO: 916954
uaguauuacgcacaauaga

SEQ ID NO: 1197051 - RNA, 19 nt, Artificial Sequence
  Description of Artificial Sequence: Synthetic oligonucleotide
  Antisense strand to SEQ ID NO: 1197050
ucuauugugcguaauacua

SEQ ID NO: 1197052 - RNA, 19 nt, Artificial Sequence
  Description of Artificial Sequence: Synthetic oligonucleotide
  Sense strand starting at position 1779 of SEQ ID NO: 916954
ucuggauauggccagacuu

SEQ ID NO: 1197053 - RNA, 19 nt, Artificial Sequence
  Description of Artificial Sequence: Synthetic oligonucleotide
  Antisense strand to SEQ ID NO: 1197052
aagucuggccauauccaga

SEQ ID NO: 1197054 - RNA, 19 nt, Artificial Sequence
  Description of Artificial Sequence: Synthetic oligonucleotide
  Sense strand starting at position 1781 of SEQ ID NO: 916954
uggauauggccagacuugu

SEQ ID NO: 1197055 - RNA, 19 nt, Artificial Sequence
  Description of Artificial Sequence: Synthetic oligonucleotide
  Antisense strand to SEQ ID NO: 1197054
acaagucuggccauaucca

SEQ ID NO: 1197056 - RNA, 19 nt, Artificial Sequence
  Description of Artificial Sequence: Synthetic oligonucleotide
  Sense strand starting at position 1864 of SEQ ID NO: 916954
augaaugcauucccuaaga

SEQ ID NO: 1197057 - RNA, 19 nt, Artificial Sequence
  Description of Artificial Sequence: Synthetic oligonucleotide
  Antisense strand to SEQ ID NO: 1197056
ucuuagggaaugcauucau

SEQ ID NO: 1197058 - RNA, 19 nt, Artificial Sequence
  Description of Artificial Sequence: Synthetic oligonucleotide
  Sense strand starting at position 2197 of SEQ ID NO: 916954
guuaauuuaggcugagcua

SEQ ID NO: 1197059 - RNA, 19 nt, Artificial Sequence
  Description of Artificial Sequence: Synthetic oligonucleotide
  Antisense strand to SEQ ID NO: 1197058
uagcucagccuaaauuaac

SEQ ID NO: 1197060 - RNA, 19 nt, Artificial Sequence
  Description of Artificial Sequence: Synthetic oligonucleotide
  Sense strand starting at position 2306 of SEQ ID NO: 916954
auuugugauguaugcuagu

SEQ ID NO: 1197061 - RNA, 19 nt, Artificial Sequence
  Description of Artificial Sequence: Synthetic oligonucleotide
  Antisense strand to SEQ ID NO: 1197060
acuagcauacaucacaaau

SEQ ID NO: 1197062 - RNA, 19 nt, Artificial Sequence
  Description of Artificial Sequence: Synthetic oligonucleotide
  Sense strand starting at position 2321 of SEQ ID NO: 916954
uaguaaccucaauaggguu

SEQ ID NO: 1197063 - RNA, 19 nt, Artificial Sequence
  Description of Artificial Sequence: Synthetic oligonucleotide
  Antisense strand to SEQ ID NO: 1197062
aacccuauugagguuacua

SEQ ID NO: 1197064 - RNA, 19 nt, Artificial Sequence
  Description of Artificial Sequence: Synthetic oligonucleotide
  Sense strand starting at position 2338 of SEQ ID NO: 916954
uugcuagauuuagcgacua

SEQ ID NO: 1197065 - RNA, 19 nt, Artificial Sequence
  Description of Artificial Sequence: Synthetic oligonucleotide
  Antisense strand to SEQ ID NO: 1197064
uagucgcuaaaucuagcaa

SEQ ID NO: 1197066 - RNA, 19 nt, Artificial Sequence
  Description of Artificial Sequence: Synthetic oligonucleotide
  Sense strand starting at position 2362 of SEQ ID NO: 916954
ucaggacacucaguuaaac

SEQ ID NO: 1197067 - RNA, 19 nt, Artificial Sequence
  Description of Artificial Sequence: Synthetic oligonucleotide
  Antisense strand to SEQ ID NO: 1197066
guuuaacugaguguccuga

SEQ ID NO: 1197068 - RNA, 19 nt, Artificial Sequence
  Description of Artificial Sequence: Synthetic oligonucleotide
  Sense strand starting at position 2420 of SEQ ID NO: 916954
ugucccugauuacuuaaga

SEQ ID NO: 1197069 - RNA, 19 nt, Artificial Sequence
  Description of Artificial Sequence: Synthetic oligonucleotide
  Antisense strand to SEQ ID NO: 1197068
ucuuaaguaaucagggaca

SEQ ID NO: 1197070 - RNA, 19 nt, Artificial Sequence
  Description of Artificial Sequence: Synthetic oligonucleotide
  Sense strand starting at position 2421 of SEQ ID NO: 916954
gucccugauuacuuaagau

SEQ ID NO: 1197071 - RNA, 19 nt, Artificial Sequence
  Description of Artificial Sequence: Synthetic oligonucleotide
  Antisense strand to SEQ ID NO: 1197070
aucuuaaguaaucagggac

SEQ ID NO: 1197072 - RNA, 19 nt, Artificial Sequence
  Description of Artificial Sequence: Synthetic oligonucleotide
  Sense strand starting at position 2756 of SEQ ID NO: 916954
uugucuuacugacuaaaug

SEQ ID NO: 1197073 - RNA, 19 nt, Artificial Sequence
  Description of Artificial Sequence: Synthetic oligonucleotide
  Antisense strand to SEQ ID NO: 1197072
cauuuagucaguaagacaa

SEQ ID NO: 1197074 - RNA, 19 nt, Artificial Sequence
  Description of Artificial Sequence: Synthetic oligonucleotide
  Sense strand starting at position 2903 of SEQ ID NO: 916954
agauauguccauuaccuug

SEQ ID NO: 1197075 - RNA, 19 nt, Artificial Sequence
  Description of Artificial Sequence: Synthetic oligonucleotide
  Antisense strand to SEQ ID NO: 1197074
caagguaauggacauaucu

SEQ ID NO: 1197076 - RNA, 19 nt, Artificial Sequence
  Description of Artificial Sequence: Synthetic oligonucleotide
  Sense strand starting at position 2921 of SEQ ID NO: 916954
guuuguggugaagauauca

SEQ ID NO: 1197077 - RNA, 19 nt, Artificial Sequence
  Description of Artificial Sequence: Synthetic oligonucleotide
  Antisense strand to SEQ ID NO: 1197076
ugauaucuucaccacaaac

SEQ ID NO: 1197078 - RNA, 19 nt, Artificial Sequence
  Description of Artificial Sequence: Synthetic oligonucleotide
  Sense strand starting at position 2929 of SEQ ID NO: 916954
ugaagauaucauggguguu

SEQ ID NO: 1197079 - RNA, 19 nt, Artificial Sequence
  Description of Artificial Sequence: Synthetic oligonucleotide
  Antisense strand to SEQ ID NO: 1197078
aacacccaugauaucuuca

SEQ ID NO: 1197080 - RNA, 19 nt, Artificial Sequence
  Description of Artificial Sequence: Synthetic oligonucleotide
  Sense strand starting at position 2930 of SEQ ID NO: 916954
gaagauaucauggguguuu

SEQ ID NO: 1197081 - RNA, 19 nt, Artificial Sequence
  Description of Artificial Sequence: Synthetic oligonucleotide
  Antisense strand to SEQ ID NO: 1197080
aaacacccaugauaucuuc

SEQ ID NO: 1197082 - RNA, 19 nt, Artificial Sequence
  Description of Artificial Sequence: Synthetic oligonucleotide
  Sense strand starting at position 2932 of SEQ ID NO: 916954
agauaucauggguguuuga

SEQ ID NO: 1197083 - RNA, 19 nt, Artificial Sequence
  Description of Artificial Sequence: Synthetic oligonucleotide
  Antisense strand to SEQ ID NO: 1197082
ucaaacacccaugauaucu

SEQ ID NO: 1197084 - RNA, 19 nt, Artificial Sequence
  Description of Artificial Sequence: Synthetic oligonucleotide
  Sense strand starting at position 3039 of SEQ ID NO: 916954
aguuguaugcaugagagag

SEQ ID NO: 1197085 - RNA, 19 nt, Artificial Sequence
  Description of Artificial Sequence: Synthetic oligonucleotide
  Antisense strand to SEQ ID NO: 1197084
cucucucaugcauacaacu

SEQ ID NO: 1197086 - RNA, 19 nt, Artificial Sequence
  Description of Artificial Sequence: Synthetic oligonucleotide
  Sense strand starting at position 3100 of SEQ ID NO: 916954
auacaaauugcaugaguau

SEQ ID NO: 1197087 - RNA, 19 nt, Artificial Sequence
  Description of Artificial Sequence: Synthetic oligonucleotide
  Antisense strand to SEQ ID NO: 1197086
auacucaugcaauuuguau

SEQ ID NO: 1197088 - RNA, 19 nt, Artificial Sequence
  Description of Artificial Sequence: Synthetic oligonucleotide
  Sense strand starting at position 3247 of SEQ ID NO: 916954
auagaauaguucuugggua

SEQ ID NO: 1197089 - RNA, 19 nt, Artificial Sequence
  Description of Artificial Sequence: Synthetic oligonucleotide
  Antisense strand to SEQ ID NO: 1197088
uacccaagaacuauucuau

SEQ ID NO: 1197090 - RNA, 19 nt, Artificial Sequence
  Description of Artificial Sequence: Synthetic oligonucleotide
  Sense strand starting at position 3318 of SEQ ID NO: 916954
accaucauuccggagaugu

SEQ ID NO: 1197091 - RNA, 19 nt, Artificial Sequence
  Description of Artificial Sequence: Synthetic oligonucleotide
  Antisense strand to SEQ ID NO: 1197090
acaucuccggaaugauggu

SEQ ID NO: 1197092 - RNA, 19 nt, Artificial Sequence
  Description of Artificial Sequence: Synthetic oligonucleotide
  Sense strand starting at position 3320 of SEQ ID NO: 916954
caucauuccggagauguag

SEQ ID NO: 1197093 - RNA, 19 nt, Artificial Sequence
  Description of Artificial Sequence: Synthetic oligonucleotide
  Antisense strand to SEQ ID NO: 1197092
cuacaucuccggaaugaug

SEQ ID NO: 1197094 - RNA, 19 nt, Artificial Sequence
  Description of Artificial Sequence: Synthetic oligonucleotide
  Sense strand starting at position 3347 of SEQ ID NO: 916954
uuuggacaaucuguaugau

SEQ ID NO: 1197095 - RNA, 19 nt, Artificial Sequence
  Description of Artificial Sequence: Synthetic oligonucleotide
  Antisense strand to SEQ ID NO: 1197094
aucauacagauuguccaaa

SEQ ID NO: 1197096 - RNA, 19 nt, Artificial Sequence
  Description of Artificial Sequence: Synthetic oligonucleotide
  Sense strand starting at position 3350 of SEQ ID NO: 916954
ggacaaucuguaugauuau

SEQ ID NO: 1197097 - RNA, 19 nt, Artificial Sequence
  Description of Artificial Sequence: Synthetic oligonucleotide
  Antisense strand to SEQ ID NO: 1197096
auaaucauacagauugucc

SEQ ID NO: 1197098 - RNA, 19 nt, Artificial Sequence
  Description of Artificial Sequence: Synthetic oligonucleotide
  Sense strand starting at position 3418 of SEQ ID NO: 916954
uggauaugaucccugaccu

SEQ ID NO: 1197099 - RNA, 19 nt, Artificial Sequence
  Description of Artificial Sequence: Synthetic oligonucleotide
  Antisense strand to SEQ ID NO: 1197098
aggucagggaucauaucca

SEQ ID NO: 1197100 - RNA, 19 nt, Artificial Sequence
  Description of Artificial Sequence: Synthetic oligonucleotide
  Sense strand starting at position 3419 of SEQ ID NO: 916954
ggauaugaucccugaccua

SEQ ID NO: 1197101 - RNA, 19 nt, Artificial Sequence
  Description of Artificial Sequence: Synthetic oligonucleotide
  Antisense strand to SEQ ID NO: 1197100
uaggucagggaucauaucc

SEQ ID NO: 1197102 - RNA, 19 nt, Artificial Sequence
  Description of Artificial Sequence: Synthetic oligonucleotide
  Sense strand starting at position 3922 of SEQ ID NO: 916954
aguucuaugagagagcauu

SEQ ID NO: 1197103 - RNA, 19 nt, Artificial Sequence
  Description of Artificial Sequence: Synthetic oligonucleotide
  Antisense strand to SEQ ID NO: 1197102
aaugcucucucauagaacu

SEQ ID NO: 1197104 - RNA, 19 nt, Artificial Sequence
  Description of Artificial Sequence: Synthetic oligonucleotide
  Sense strand starting at position 3972 of SEQ ID NO: 916954
cacuguggucacuagagau

SEQ ID NO: 1197105 - RNA, 19 nt, Artificial Sequence
  Description of Artificial Sequence: Synthetic oligonucleotide
  Antisense strand to SEQ ID NO: 1197104
aucucuagugaccacagug

SEQ ID NO: 1197106 - RNA, 19 nt, Artificial Sequence
  Description of Artificial Sequence: Synthetic oligonucleotide
  Sense strand starting at position 3982 of SEQ ID NO: 916954
acuagagaugcuugaaaca

SEQ ID NO: 1197107 - RNA, 19 nt, Artificial Sequence
  Description of Artificial Sequence: Synthetic oligonucleotide
  Antisense strand to SEQ ID NO: 1197106
uguuucaagcaucucuagu

SEQ ID NO: 1197108 - RNA, 19 nt, Artificial Sequence
  Description of Artificial Sequence: Synthetic oligonucleotide
  Sense strand starting at position 494 of SEQ ID NO: 916955
aguuguuugagaggaaauu

SEQ ID NO: 1197109 - RNA, 19 nt, Artificial Sequence
  Description of Artificial Sequence: Synthetic oligonucleotide
  Antisense strand to SEQ ID NO: 1197108
aauuuccucucaaacaacu

SEQ ID NO: 1197110 - RNA, 19 nt, Artificial Sequence
  Description of Artificial Sequence: Synthetic oligonucleotide
  Sense strand starting at position 581 of SEQ ID NO: 916955
uggaaaucaucauucggga

SEQ ID NO: 1197111 - RNA, 19 nt, Artificial Sequence
  Description of Artificial Sequence: Synthetic oligonucleotide
  Antisense strand to SEQ ID NO: 1197110
ucccgaaugaugauuucca

SEQ ID NO: 1197112 - RNA, 19 nt, Artificial Sequence
  Description of Artificial Sequence: Synthetic oligonucleotide
  Sense strand starting at position 617 of SEQ ID NO: 916955
gagaacaucugaguuccua

SEQ ID NO: 1197113 - RNA, 19 nt, Artificial Sequence
  Description of Artificial Sequence: Synthetic oligonucleotide
  Antisense strand to SEQ ID NO: 1197112
uaggaacucagauguucuc

SEQ ID NO: 1197114 - RNA, 19 nt, Artificial Sequence
  Description of Artificial Sequence: Synthetic oligonucleotide
  Sense strand starting at position 783 of SEQ ID NO: 916955
agacuuuaacuaggcaaua

SEQ ID NO: 1197115 - RNA, 19 nt, Artificial Sequence
  Description of Artificial Sequence: Synthetic oligonucleotide
  Antisense strand to SEQ ID NO: 1197114
uauugccuaguuaaagucu

SEQ ID NO: 1197116 - RNA, 19 nt, Artificial Sequence
  Description of Artificial Sequence: Synthetic oligonucleotide
  Sense strand starting at position 809 of SEQ ID NO: 916955
aacacuugcguugaggaga

SEQ ID NO: 1197117 - RNA, 19 nt, Artificial Sequence
  Description of Artificial Sequence: Synthetic oligonucleotide
  Antisense strand to SEQ ID NO: 1197116
ucuccucaacgcaaguguu

SEQ ID NO: 1197118 - RNA, 19 nt, Artificial Sequence
  Description of Artificial Sequence: Synthetic oligonucleotide
  Sense strand starting at position 846 of SEQ ID NO: 916955
cucugaaauucuucgagga

SEQ ID NO: 1197119 - RNA, 19 nt, Artificial Sequence
  Description of Artificial Sequence: Synthetic oligonucleotide
  Antisense strand to SEQ ID NO: 1197118
uccucgaagaauuucagag

SEQ ID NO: 1197120 - RNA, 19 nt, Artificial Sequence
  Description of Artificial Sequence: Synthetic oligonucleotide
  Sense strand starting at position 847 of SEQ ID NO: 916955
ucugaaauucuucgaggaa

SEQ ID NO: 1197121 - RNA, 19 nt, Artificial Sequence
  Description of Artificial Sequence: Synthetic oligonucleotide
  Antisense strand to SEQ ID NO: 1197120
uuccucgaagaauuucaga

SEQ ID NO: 1197122 - RNA, 19 nt, Artificial Sequence
  Description of Artificial Sequence: Synthetic oligonucleotide
  Sense strand starting at position 869 of SEQ ID NO: 916955
gaguguaaagaugagcauu

SEQ ID NO: 1197123 - RNA, 19 nt, Artificial Sequence
  Description of Artificial Sequence: Synthetic oligonucleotide
  Antisense strand to SEQ ID NO: 1197122
aaugcucaucuuuacacuc

SEQ ID NO: 1197124 - RNA, 19 nt, Artificial Sequence
  Description of Artificial Sequence: Synthetic oligonucleotide
  Sense strand starting at position 889 of SEQ ID NO: 916955
cugaguuguaaagggauag

SEQ ID NO: 1197125 - RNA, 19 nt, Artificial Sequence
  Description of Artificial Sequence: Synthetic oligonucleotide
  Antisense strand to SEQ ID NO: 1197124
cuaucccuuuacaacucag

SEQ ID NO: 1197126 - RNA, 19 nt, Artificial Sequence
  Description of Artificial Sequence: Synthetic oligonucleotide
  Sense strand starting at position 890 of SEQ ID NO: 916955
ugaguuguaaagggauaga

SEQ ID NO: 1197127 - RNA, 19 nt, Artificial Sequence
  Description of Artificial Sequence: Synthetic oligonucleotide
  Antisense strand to SEQ ID NO: 1197126
ucuaucccuuuacaacuca

SEQ ID NO: 1197128 - RNA, 19 nt, Artificial Sequence
  Description of Artificial Sequence: Synthetic oligonucleotide
  Sense strand starting at position 1120 of SEQ ID NO: 916955
ugccucaguuuauuauuua

SEQ ID NO: 1197129 - RNA, 19 nt, Artificial Sequence
  Description of Artificial Sequence: Synthetic oligonucleotide
  Antisense strand to SEQ ID NO: 1197128
uaaauaauaaacugaggca

SEQ ID NO: 1197130 - RNA, 19 nt, Artificial Sequence
  Description of Artificial Sequence: Synthetic oligonucleotide
  Sense strand starting at position 1172 of SEQ ID NO: 916955
agagaauugcugcaaucuc

SEQ ID NO: 1197131 - RNA, 19 nt, Artificial Sequence
  Description of Artificial Sequence: Synthetic oligonucleotide
  Antisense strand to SEQ ID NO: 1197130
gagauugcagcaauucucu

SEQ ID NO: 1197132 - RNA, 19 nt, Artificial Sequence
  Description of Artificial Sequence: Synthetic oligonucleotide
  Sense strand starting at position 1363 of SEQ ID NO: 916955
uugguaugucuccauaaag

SEQ ID NO: 1197133 - RNA, 19 nt, Artificial Sequence
  Description of Artificial Sequence: Synthetic oligonucleotide
  Antisense strand to SEQ ID NO: 1197132
cuuuauggagacauaccaa

SEQ ID NO: 1197134 - RNA, 19 nt, Artificial Sequence
  Description of Artificial Sequence: Synthetic oligonucleotide
  Sense strand starting at position 1514 of SEQ ID NO: 916955
uggcaauugcaugaaaccu

SEQ ID NO: 1197135 - RNA, 19 nt, Artificial Sequence
  Description of Artificial Sequence: Synthetic oligonucleotide
  Antisense strand to SEQ ID NO: 1197134
agguuucaugcaauugcca

SEQ ID NO: 1197136 - RNA, 19 nt, Artificial Sequence
  Description of Artificial Sequence: Synthetic oligonucleotide
  Sense strand starting at position 1725 of SEQ ID NO: 916955
ggcaaauguccagaaggua

SEQ ID NO: 1197137 - RNA, 19 nt, Artificial Sequence
  Description of Artificial Sequence: Synthetic oligonucleotide
  Antisense strand to SEQ ID NO: 1197136
uaccuucuggacauuugcc

SEQ ID NO: 1197138 - RNA, 19 nt, Artificial Sequence
  Description of Artificial Sequence: Synthetic oligonucleotide
  Sense strand starting at position 1830 of SEQ ID NO: 916955
acaaauucuggcgauaacu

SEQ ID NO: 1197139 - RNA, 19 nt, Artificial Sequence
  Description of Artificial Sequence: Synthetic oligonucleotide
  Antisense strand to SEQ ID NO: 1197138
aguuaucgccagaauuugu

SEQ ID NO: 1197140 - RNA, 19 nt, Artificial Sequence
  Description of Artificial Sequence: Synthetic oligonucleotide
  Sense strand starting at position 1852 of SEQ ID NO: 916955
uugguaaggauguagucaa

SEQ ID NO: 1197141 - RNA, 19 nt, Artificial Sequence
  Description of Artificial Sequence: Synthetic oligonucleotide
  Antisense strand to SEQ ID NO: 1197140
uugacuacauccuuaccaa

SEQ ID NO: 1197142 - RNA, 19 nt, Artificial Sequence
  Description of Artificial Sequence: Synthetic oligonucleotide
  Sense strand starting at position 1864 of SEQ ID NO: 916955
uagucaacuguggaaaucu

SEQ ID NO: 1197143 - RNA, 19 nt, Artificial Sequence
  Description of Artificial Sequence: Synthetic oligonucleotide
  Antisense strand to SEQ ID NO: 1197142
agauuuccacaguugacua

SEQ ID NO: 1197144 - RNA, 19 nt, Artificial Sequence
  Description of Artificial Sequence: Synthetic oligonucleotide
  Sense strand starting at position 1946 of SEQ ID NO: 916955
guaugaauucuccaguuau

SEQ ID NO: 1197145 - RNA, 19 nt, Artificial Sequence
  Description of Artificial Sequence: Synthetic oligonucleotide
  Antisense strand to SEQ ID NO: 1197144
auaacuggagaauucauac

SEQ ID NO: 1197146 - RNA, 19 nt, Artificial Sequence
  Description of Artificial Sequence: Synthetic oligonucleotide
  Sense strand starting at position 1976 of SEQ ID NO: 916955
agauguuaucugcaggacu

SEQ ID NO: 1197147 - RNA, 19 nt, Artificial Sequence
  Description of Artificial Sequence: Synthetic oligonucleotide
  Antisense strand to SEQ ID NO: 1197146
aguccugcagauaacaucu

SEQ ID NO: 1197148 - RNA, 19 nt, Artificial Sequence
  Description of Artificial Sequence: Synthetic oligonucleotide
  Sense strand starting at position 1979 of SEQ ID NO: 916955
uguuaucugcaggacugaa

SEQ ID NO: 1197149 - RNA, 19 nt, Artificial Sequence
  Description of Artificial Sequence: Synthetic oligonucleotide
  Antisense strand to SEQ ID NO: 1197148
uucaguccugcagauaaca

SEQ ID NO: 1197150 - RNA, 19 nt, Artificial Sequence
  Description of Artificial Sequence: Synthetic oligonucleotide
  Sense strand starting at position 1991 of SEQ ID NO: 916955
gacugaacauguuuguaga

SEQ ID NO: 1197151 - RNA, 19 nt, Artificial Sequence
  Description of Artificial Sequence: Synthetic oligonucleotide
  Antisense strand to SEQ ID NO: 1197150
ucuacaaacauguucaguc

SEQ ID NO: 1197152 - RNA, 19 nt, Artificial Sequence
  Description of Artificial Sequence: Synthetic oligonucleotide
  Sense strand starting at position 1993 of SEQ ID NO: 916955
cugaacauguuuguagaga

SEQ ID NO: 1197153 - RNA, 19 nt, Artificial Sequence
  Description of Artificial Sequence: Synthetic oligonucleotide
  Antisense strand to SEQ ID NO: 1197152
ucucuacaaacauguucag

SEQ ID NO: 1197154 - RNA, 19 nt, Artificial Sequence
  Description of Artificial Sequence: Synthetic oligonucleotide
  Sense strand starting at position 2062 of SEQ ID NO: 916955
cuguuaaagcaugauagau

SEQ ID NO: 1197155 - RNA, 19 nt, Artificial Sequence
  Description of Artificial Sequence: Synthetic oligonucleotide
  Antisense strand to SEQ ID NO: 1197154
aucuaucaugcuuuaacag

SEQ ID NO: 1197156 - RNA, 19 nt, Artificial Sequence
  Description of Artificial Sequence: Synthetic oligonucleotide
  Sense strand starting at position 2075 of SEQ ID NO: 916955
auagaucaauucuucgaau

SEQ ID NO: 1197157 - RNA, 19 nt, Artificial Sequence
  Description of Artificial Sequence: Synthetic oligonucleotide
  Antisense strand to SEQ ID NO: 1197156
auucgaagaauugaucuau

SEQ ID NO: 1197158 - RNA, 19 nt, Artificial Sequence
  Description of Artificial Sequence: Synthetic oligonucleotide
  Sense strand starting at position 2077 of SEQ ID NO: 916955
agaucaauucuucgaauca

SEQ ID NO: 1197159 - RNA, 19 nt, Artificial Sequence
  Description of Artificial Sequence: Synthetic oligonucleotide
  Antisense strand to SEQ ID NO: 1197158
ugauucgaagaauugaucu

SEQ ID NO: 1197160 - RNA, 19 nt, Artificial Sequence
  Description of Artificial Sequence: Synthetic oligonucleotide
  Sense strand starting at position 2115 of SEQ ID NO: 916955
gcuguuauuucgacguugu

SEQ ID NO: 1197161 - RNA, 19 nt, Artificial Sequence
  Description of Artificial Sequence: Synthetic oligonucleotide
  Antisense strand to SEQ ID NO: 1197160
acaacgucgaaauaacagc

SEQ ID NO: 1197162 - RNA, 19 nt, Artificial Sequence
  Description of Artificial Sequence: Synthetic oligonucleotide
  Sense strand starting at position 2162 of SEQ ID NO: 916955
cugaaauaggauugucucu

SEQ ID NO: 1197163 - RNA, 19 nt, Artificial Sequence
  Description of Artificial Sequence: Synthetic oligonucleotide
  Antisense strand to SEQ ID NO: 1197162
agagacaauccuauuucag

SEQ ID NO: 1197164 - RNA, 19 nt, Artificial Sequence
  Description of Artificial Sequence: Synthetic oligonucleotide
  Sense strand starting at position 2164 of SEQ ID NO: 916955
gaaauaggauugucucuac

SEQ ID NO: 1197165 - RNA, 19 nt, Artificial Sequence
  Description of Artificial Sequence: Synthetic oligonucleotide
  Antisense strand to SEQ ID NO: 1197164
guagagacaauccuauuuc

SEQ ID NO: 1197166 - RNA, 19 nt, Artificial Sequence
  Description of Artificial Sequence: Synthetic oligonucleotide
  Sense strand starting at position 2248 of SEQ ID NO: 916955
auuauuauccuuuagugag

SEQ ID NO: 1197167 - RNA, 19 nt, Artificial Sequence
  Description of Artificial Sequence: Synthetic oligonucleotide
  Antisense strand to SEQ ID NO: 1197166
cucacuaaaggauaauaau

SEQ ID NO: 1197168 - RNA, 19 nt, Artificial Sequence
  Description of Artificial Sequence: Synthetic oligonucleotide
  Sense strand starting at position 2262 of SEQ ID NO: 916955
gugagugauaccugaaaug

SEQ ID NO: 1197169 - RNA, 19 nt, Artificial Sequence
  Description of Artificial Sequence: Synthetic oligonucleotide
  Antisense strand to SEQ ID NO: 1197168
cauuucagguaucacucac

SEQ ID NO: 1197170 - RNA, 19 nt, Artificial Sequence
  Description of Artificial Sequence: Synthetic oligonucleotide
  Sense strand starting at position 2276 of SEQ ID NO: 916955
aaauguuuggcugaaauug

SEQ ID NO: 1197171 - RNA, 19 nt, Artificial Sequence
  Description of Artificial Sequence: Synthetic oligonucleotide
  Antisense strand to SEQ ID NO: 1197170
caauuucagccaaacauuu

SEQ ID NO: 1197172 - RNA, 19 nt, Artificial Sequence
  Description of Artificial Sequence: Synthetic oligonucleotide
  Sense strand starting at position 2529 of SEQ ID NO: 916955
guacaauuagauuguagau

SEQ ID NO: 1197173 - RNA, 19 nt, Artificial Sequence
  Description of Artificial Sequence: Synthetic oligonucleotide
  Antisense strand to SEQ ID NO: 1197172
aucuacaaucuaauuguac

SEQ ID NO: 1197174 - RNA, 19 nt, Artificial Sequence
  Description of Artificial Sequence: Synthetic oligonucleotide
  Sense strand starting at position 2552 of SEQ ID NO: 916955
aacauuuagucagaggaua

SEQ ID NO: 1197175 - RNA, 19 nt, Artificial Sequence
  Description of Artificial Sequence: Synthetic oligonucleotide
  Antisense strand to SEQ ID NO: 1197174
uauccucugacuaaauguu

SEQ ID NO: 1197176 - RNA, 19 nt, Artificial Sequence
  Description of Artificial Sequence: Synthetic oligonucleotide
  Sense strand starting at position 2688 of SEQ ID NO: 916955
ucaauuguuccucagaagu

SEQ ID NO: 1197177 - RNA, 19 nt, Artificial Sequence
  Description of Artificial Sequence: Synthetic oligonucleotide
  Antisense strand to SEQ ID NO: 1197176
acuucugaggaacaauuga

SEQ ID NO: 1197178 - RNA, 19 nt, Artificial Sequence
  Description of Artificial Sequence: Synthetic oligonucleotide
  Sense strand starting at position 2706 of SEQ ID NO: 916955
ugaaauaugccagguaaag

SEQ ID NO: 1197179 - RNA, 19 nt, Artificial Sequence
  Description of Artificial Sequence: Synthetic oligonucleotide
  Antisense strand to SEQ ID NO: 1197178
cuuuaccuggcauauuuca

SEQ ID NO: 1197180 - RNA, 19 nt, Artificial Sequence
  Description of Artificial Sequence: Synthetic oligonucleotide
  Sense strand starting at position 2791 of SEQ ID NO: 916955
cugucucuuguauaauaag

SEQ ID NO: 1197181 - RNA, 19 nt, Artificial Sequence
  Description of Artificial Sequence: Synthetic oligonucleotide
  Antisense strand to SEQ ID NO: 1197180
cuuauuauacaagagacag

SEQ ID NO: 1197182 - RNA, 19 nt, Artificial Sequence
  Description of Artificial Sequence: Synthetic oligonucleotide
  Sense strand starting at position 3765 of SEQ ID NO: 916955
aaggguugaugaguucuaa

SEQ ID NO: 1197183 - RNA, 19 nt, Artificial Sequence
  Description of Artificial Sequence: Synthetic oligonucleotide
  Antisense strand to SEQ ID NO: 1197182
uuagaacucaucaacccuu

SEQ ID NO: 1197184 - RNA, 19 nt, Artificial Sequence
  Description of Artificial Sequence: Synthetic oligonucleotide
  Sense strand starting at position 3842 of SEQ ID NO: 916955
uugccaguauuugucagaa

SEQ ID NO: 1197185 - RNA, 19 nt, Artificial Sequence
  Description of Artificial Sequence: Synthetic oligonucleotide
  Antisense strand to SEQ ID NO: 1197184
uucugacaaauacuggcaa

SEQ ID NO: 1197186 - RNA, 19 nt, Artificial Sequence
  Description of Artificial Sequence: Synthetic oligonucleotide
  Sense strand starting at position 3955 of SEQ ID NO: 916955
gaauauacggugcaaugau

SEQ ID NO: 1197187 - RNA, 19 nt, Artificial Sequence
  Description of Artificial Sequence: Synthetic oligonucleotide
  Antisense strand to SEQ ID NO: 1197186
aucauugcaccguauauuc

SEQ ID NO: 1197188 - RNA, 19 nt, Artificial Sequence
  Description of Artificial Sequence: Synthetic oligonucleotide
  Sense strand starting at position 288 of SEQ ID NO: 916956
cagcuagaguacucaugaa

SEQ ID NO: 1197189 - RNA, 19 nt, Artificial Sequence
  Description of Artificial Sequence: Synthetic oligonucleotide
  Antisense strand to SEQ ID NO: 1197188
uucaugaguacucuagcug

SEQ ID NO: 1197190 - RNA, 19 nt, Artificial Sequence
  Description of Artificial Sequence: Synthetic oligonucleotide
  Sense strand starting at position 577 of SEQ ID NO: 916956
aaggguugaugaguucuaa

SEQ ID NO: 1197191 - RNA, 19 nt, Artificial Sequence
  Description of Artificial Sequence: Synthetic oligonucleotide
  Antisense strand to SEQ ID NO: 1197190
uuagaacucaucaacccuu

SEQ ID NO: 1197192 - RNA, 19 nt, Artificial Sequence
  Description of Artificial Sequence: Synthetic oligonucleotide
  Sense strand starting at position 649 of SEQ ID NO: 916956
ggccuuugccaguauuugu

SEQ ID NO: 1197193 - RNA, 19 nt, Artificial Sequence
  Description of Artificial Sequence: Synthetic oligonucleotide
  Antisense strand to SEQ ID NO: 1197192
acaaauacuggcaaaggcc

SEQ ID NO: 1197194 - RNA, 19 nt, Artificial Sequence
  Description of Artificial Sequence: Synthetic oligonucleotide
  Sense strand starting at position 654 of SEQ ID NO: 916956
uugccaguauuugucagaa

SEQ ID NO: 1197195 - RNA, 19 nt, Artificial Sequence
  Description of Artificial Sequence: Synthetic oligonucleotide
  Antisense strand to SEQ ID NO: 1197194
uucugacaaauacuggcaa

SEQ ID NO: 1197196 - RNA, 19 nt, Artificial Sequence
  Description of Artificial Sequence: Synthetic oligonucleotide
  Sense strand starting at position 765 of SEQ ID NO: 916956
aagaauauacggugcaaug

SEQ ID NO: 1197197 - RNA, 19 nt, Artificial Sequence
  Description of Artificial Sequence: Synthetic oligonucleotide
  Antisense strand to SEQ ID NO: 1197196
cauugcaccguauauucuu

SEQ ID NO: 1197198 - RNA, 19 nt, Artificial Sequence
  Description of Artificial Sequence: Synthetic oligonucleotide
  Sense strand starting at position 767 of SEQ ID NO: 916956
gaauauacggugcaaugau

SEQ ID NO: 1197199 - RNA, 19 nt, Artificial Sequence
  Description of Artificial Sequence: Synthetic oligonucleotide
  Antisense strand to SEQ ID NO: 1197198
aucauugcaccguauauuc

SEQ ID NO: 1197200 - RNA, 19 nt, Artificial Sequence
  Description of Artificial Sequence: Synthetic oligonucleotide
  Sense strand starting at position 1360 of SEQ ID NO: 916956
aggguuaacuguuugaaag

SEQ ID NO: 1197201 - RNA, 19 nt, Artificial Sequence
  Description of Artificial Sequence: Synthetic oligonucleotide
  Antisense strand to SEQ ID NO: 1197200
cuuucaaacaguuaacccu

SEQ ID NO: 1197202 - RNA, 19 nt, Artificial Sequence
  Description of Artificial Sequence: Synthetic oligonucleotide
  Sense strand starting at position 1370 of SEQ ID NO: 916956
guuugaaaguaccuggaau

SEQ ID NO: 1197203 - RNA, 19 nt, Artificial Sequence
  Description of Artificial Sequence: Synthetic oligonucleotide
  Antisense strand to SEQ ID NO: 1197202
auuccagguacuuucaaac

SEQ ID NO: 1197204 - RNA, 19 nt, Artificial Sequence
  Description of Artificial Sequence: Synthetic oligonucleotide
  Sense strand starting at position 1563 of SEQ ID NO: 916956
cgauauauuggcuaucuug

SEQ ID NO: 1197205 - RNA, 19 nt, Artificial Sequence
  Description of Artificial Sequence: Synthetic oligonucleotide
  Antisense strand to SEQ ID NO: 1197204
caagauagccaauauaucg

SEQ ID NO: 1197206 - RNA, 19 nt, Artificial Sequence
  Description of Artificial Sequence: Synthetic oligonucleotide
  Sense strand starting at position 1569 of SEQ ID NO: 916956
auuggcuaucuugaguaaa

SEQ ID NO: 1197207 - RNA, 19 nt, Artificial Sequence
  Description of Artificial Sequence: Synthetic oligonucleotide
  Antisense strand to SEQ ID NO: 1197206
uuuacucaagauagccaau

SEQ ID NO: 1197208 - RNA, 19 nt, Artificial Sequence
  Description of Artificial Sequence: Synthetic oligonucleotide
  Sense strand starting at position 1572 of SEQ ID NO: 916956
ggcuaucuugaguaaauag

SEQ ID NO: 1197209 - RNA, 19 nt, Artificial Sequence
  Description of Artificial Sequence: Synthetic oligonucleotide
  Antisense strand to SEQ ID NO: 1197208
cuauuuacucaagauagcc

SEQ ID NO: 1197210 - RNA, 19 nt, Artificial Sequence
  Description of Artificial Sequence: Synthetic oligonucleotide
  Sense strand starting at position 1618 of SEQ ID NO: 916956
agacuugaauuauuggcaa

SEQ ID NO: 1197211 - RNA, 19 nt, Artificial Sequence
  Description of Artificial Sequence: Synthetic oligonucleotide
  Antisense strand to SEQ ID NO: 1197210
uugccaauaauucaagucu

SEQ ID NO: 1197212 - RNA, 19 nt, Artificial Sequence
  Description of Artificial Sequence: Synthetic oligonucleotide
  Sense strand starting at position 1621 of SEQ ID NO: 916956
cuugaauuauuggcaaaug

SEQ ID NO: 1197213 - RNA, 19 nt, Artificial Sequence
  Description of Artificial Sequence: Synthetic oligonucleotide
  Antisense strand to SEQ ID NO: 1197212
cauuugccaauaauucaag

SEQ ID NO: 1197214 - RNA, 19 nt, Artificial Sequence
  Description of Artificial Sequence: Synthetic oligonucleotide
  Sense strand starting at position 1630 of SEQ ID NO: 916956
uuggcaaauguccagacaa

SEQ ID NO: 1197215 - RNA, 19 nt, Artificial Sequence
  Description of Artificial Sequence: Synthetic oligonucleotide
  Antisense strand to SEQ ID NO: 1197214
uugucuggacauuugccaa

SEQ ID NO: 1197216 - RNA, 19 nt, Artificial Sequence
  Description of Artificial Sequence: Synthetic oligonucleotide
  Sense strand starting at position 1677 of SEQ ID NO: 916956
gccauauguaccuggaaag

SEQ ID NO: 1197217 - RNA, 19 nt, Artificial Sequence
  Description of Artificial Sequence: Synthetic oligonucleotide
  Antisense strand to SEQ ID NO: 1197216
cuuuccagguacauauggc

SEQ ID NO: 1197218 - RNA, 19 nt, Artificial Sequence
  Description of Artificial Sequence: Synthetic oligonucleotide
  Sense strand starting at position 1678 of SEQ ID NO: 916956
ccauauguaccuggaaaga

SEQ ID NO: 1197219 - RNA, 19 nt, Artificial Sequence
  Description of Artificial Sequence: Synthetic oligonucleotide
  Antisense strand to SEQ ID NO: 1197218
ucuuuccagguacauaugg

SEQ ID NO: 1197220 - RNA, 19 nt, Artificial Sequence
  Description of Artificial Sequence: Synthetic oligonucleotide
  Sense strand starting at position 1928 of SEQ ID NO: 916956
uuugaauaucacugaugau

SEQ ID NO: 1197221 - RNA, 19 nt, Artificial Sequence
  Description of Artificial Sequence: Synthetic oligonucleotide
  Antisense strand to SEQ ID NO: 1197220
aucaucagugauauucaaa

SEQ ID NO: 1197222 - RNA, 19 nt, Artificial Sequence
  Description of Artificial Sequence: Synthetic oligonucleotide
  Sense strand starting at position 1967 of SEQ ID NO: 916956
agugaagaacaauguaucu

SEQ ID NO: 1197223 - RNA, 19 nt, Artificial Sequence
  Description of Artificial Sequence: Synthetic oligonucleotide
  Antisense strand to SEQ ID NO: 1197222
agauacauuguucuucacu

SEQ ID NO: 1197224 - RNA, 19 nt, Artificial Sequence
  Description of Artificial Sequence: Synthetic oligonucleotide
  Sense strand starting at position 1989 of SEQ ID NO: 916956
ugccucuuagaccaugaua

SEQ ID NO: 1197225 - RNA, 19 nt, Artificial Sequence
  Description of Artificial Sequence: Synthetic oligonucleotide
  Antisense strand to SEQ ID NO: 1197224
uaucauggucuaagaggca

SEQ ID NO: 1197226 - RNA, 19 nt, Artificial Sequence
  Description of Artificial Sequence: Synthetic oligonucleotide
  Sense strand starting at position 2037 of SEQ ID NO: 916956
cugugaugcagaugaagaa

SEQ ID NO: 1197227 - RNA, 19 nt, Artificial Sequence
  Description of Artificial Sequence: Synthetic oligonucleotide
  Antisense strand to SEQ ID NO: 1197226
uucuucaucugcaucacag

SEQ ID NO: 1197228 - RNA, 19 nt, Artificial Sequence
  Description of Artificial Sequence: Synthetic oligonucleotide
  Sense strand starting at position 2108 of SEQ ID NO: 916956
gccaguaauuuccuuuggu

SEQ ID NO: 1197229 - RNA, 19 nt, Artificial Sequence
  Description of Artificial Sequence: Synthetic oligonucleotide
  Antisense strand to SEQ ID NO: 1197228
accaaaggaaauuacuggc

SEQ ID NO: 1197230 - RNA, 19 nt, Artificial Sequence
  Description of Artificial Sequence: Synthetic oligonucleotide
  Sense strand starting at position 2111 of SEQ ID NO: 916956
aguaauuuccuuuggugca

SEQ ID NO: 1197231 - RNA, 19 nt, Artificial Sequence
  Description of Artificial Sequence: Synthetic oligonucleotide
  Antisense strand to SEQ ID NO: 1197230
ugcaccaaaggaaauuacu

SEQ ID NO: 1197232 - RNA, 19 nt, Artificial Sequence
  Description of Artificial Sequence: Synthetic oligonucleotide
  Sense strand starting at position 2160 of SEQ ID NO: 916956
gggaauggaucugauuucu

SEQ ID NO: 1197233 - RNA, 19 nt, Artificial Sequence
  Description of Artificial Sequence: Synthetic oligonucleotide
  Antisense strand to SEQ ID NO: 1197232
agaaaucagauccauuccc

SEQ ID NO: 1197234 - RNA, 19 nt, Artificial Sequence
  Description of Artificial Sequence: Synthetic oligonucleotide
  Sense strand starting at position 2260 of SEQ ID NO: 916956
agguaucaauuacuuggaa

SEQ ID NO: 1197235 - RNA, 19 nt, Artificial Sequence
  Description of Artificial Sequence: Synthetic oligonucleotide
  Antisense strand to SEQ ID NO: 1197234
uuccaaguaauugauaccu

SEQ ID NO: 1197236 - RNA, 19 nt, Artificial Sequence
  Description of Artificial Sequence: Synthetic oligonucleotide
  Sense strand starting at position 2261 of SEQ ID NO: 916956
gguaucaauuacuuggaaa

SEQ ID NO: 1197237 - RNA, 19 nt, Artificial Sequence
  Description of Artificial Sequence: Synthetic oligonucleotide
  Antisense strand to SEQ ID NO: 1197236
uuuccaaguaauugauacc

SEQ ID NO: 1197238 - RNA, 19 nt, Artificial Sequence
  Description of Artificial Sequence: Synthetic oligonucleotide
  Sense strand starting at position 2452 of SEQ ID NO: 916956
gcauaacugguggaaugua

SEQ ID NO: 1197239 - RNA, 19 nt, Artificial Sequence
  Description of Artificial Sequence: Synthetic oligonucleotide
  Antisense strand to SEQ ID NO: 1197238
uacauuccaccaguuaugc

SEQ ID NO: 1197240 - RNA, 19 nt, Artificial Sequence
  Description of Artificial Sequence: Synthetic oligonucleotide
  Sense strand starting at position 2481 of SEQ ID NO: 916956
ucuaaagguguaggaagau

SEQ ID NO: 1197241 - RNA, 19 nt, Artificial Sequence
  Description of Artificial Sequence: Synthetic oligonucleotide
  Antisense strand to SEQ ID NO: 1197240
aucuuccuacaccuuuaga

SEQ ID NO: 1197242 - RNA, 19 nt, Artificial Sequence
  Description of Artificial Sequence: Synthetic oligonucleotide
  Sense strand starting at position 2583 of SEQ ID NO: 916956
ucacuagggcauugagaaa

SEQ ID NO: 1197243 - RNA, 19 nt, Artificial Sequence
  Description of Artificial Sequence: Synthetic oligonucleotide
  Antisense strand to SEQ ID NO: 1197242
uuucucaaugcccuaguga

SEQ ID NO: 1197244 - RNA, 19 nt, Artificial Sequence
  Description of Artificial Sequence: Synthetic oligonucleotide
  Sense strand starting at position 2815 of SEQ ID NO: 916956
gucacuuaucuuuagaaug

SEQ ID NO: 1197245 - RNA, 19 nt, Artificial Sequence
  Description of Artificial Sequence: Synthetic oligonucleotide
  Antisense strand to SEQ ID NO: 1197244
cauucuaaagauaagugac

SEQ ID NO: 1197246 - RNA, 19 nt, Artificial Sequence
  Description of Artificial Sequence: Synthetic oligonucleotide
  Sense strand starting at position 2837 of SEQ ID NO: 916956
acagaucagccugaacagu

SEQ ID NO: 1197247 - RNA, 19 nt, Artificial Sequence
  Description of Artificial Sequence: Synthetic oligonucleotide
  Antisense strand to SEQ ID NO: 1197246
acuguucaggcugaucugu

SEQ ID NO: 1197248 - RNA, 19 nt, Artificial Sequence
  Description of Artificial Sequence: Synthetic oligonucleotide
  Sense strand starting at position 2867 of SEQ ID NO: 916956
agagcaagaaagugauauu

SEQ ID NO: 1197249 - RNA, 19 nt, Artificial Sequence
  Description of Artificial Sequence: Synthetic oligonucleotide
  Antisense strand to SEQ ID NO: 1197248
aauaucacuuucuugcucu

SEQ ID NO: 1197250 - RNA, 19 nt, Artificial Sequence
  Description of Artificial Sequence: Synthetic oligonucleotide
  Sense strand starting at position 2900 of SEQ ID NO: 916956
gcgugauagauauacaaga

SEQ ID NO: 1197251 - RNA, 19 nt, Artificial Sequence
  Description of Artificial Sequence: Synthetic oligonucleotide
  Antisense strand to SEQ ID NO: 1197250
ucuuguauaucuaucacgc

SEQ ID NO: 1197252 - RNA, 19 nt, Artificial Sequence
  Description of Artificial Sequence: Synthetic oligonucleotide
  Sense strand starting at position 2923 of SEQ ID NO: 916956
ucagucugaacugagugau

SEQ ID NO: 1197253 - RNA, 19 nt, Artificial Sequence
  Description of Artificial Sequence: Synthetic oligonucleotide
  Antisense strand to SEQ ID NO: 1197252
aucacucaguucagacuga

SEQ ID NO: 1197254 - RNA, 19 nt, Artificial Sequence
  Description of Artificial Sequence: Synthetic oligonucleotide
  Sense strand starting at position 2926 of SEQ ID NO: 916956
gucugaacugagugauaag

SEQ ID NO: 1197255 - RNA, 19 nt, Artificial Sequence
  Description of Artificial Sequence: Synthetic oligonucleotide
  Antisense strand to SEQ ID NO: 1197254
cuuaucacucaguucagac

SEQ ID NO: 1197256 - RNA, 19 nt, Artificial Sequence
  Description of Artificial Sequence: Synthetic oligonucleotide
  Sense strand starting at position 3055 of SEQ ID NO: 916956
ugaaacaugucauugggca

SEQ ID NO: 1197257 - RNA, 19 nt, Artificial Sequence
  Description of Artificial Sequence: Synthetic oligonucleotide
  Antisense strand to SEQ ID NO: 1197256
ugcccaaugacauguuuca

SEQ ID NO: 1197258 - RNA, 19 nt, Artificial Sequence
  Description of Artificial Sequence: Synthetic oligonucleotide
  Sense strand starting at position 3056 of SEQ ID NO: 916956
gaaacaugucauugggcau

SEQ ID NO: 1197259 - RNA, 19 nt, Artificial Sequence
  Description of Artificial Sequence: Synthetic oligonucleotide
  Antisense strand to SEQ ID NO: 1197258
augcccaaugacauguuuc

SEQ ID NO: 1197260 - RNA, 19 nt, Artificial Sequence
  Description of Artificial Sequence: Synthetic oligonucleotide
  Sense strand starting at position 3062 of SEQ ID NO: 916956
ugucauugggcauaguaga

SEQ ID NO: 1197261 - RNA, 19 nt, Artificial Sequence
  Description of Artificial Sequence: Synthetic oligonucleotide
  Antisense strand to SEQ ID NO: 1197260
ucuacuaugcccaaugaca

SEQ ID NO: 1197262 - RNA, 19 nt, Artificial Sequence
  Description of Artificial Sequence: Synthetic oligonucleotide
  Sense strand starting at position 3214 of SEQ ID NO: 916956
augagauaaugugucauau

SEQ ID NO: 1197263 - RNA, 19 nt, Artificial Sequence
  Description of Artificial Sequence: Synthetic oligonucleotide
  Antisense strand to SEQ ID NO: 1197262
auaugacacauuaucucau

SEQ ID NO: 1197264 - RNA, 19 nt, Artificial Sequence
  Description of Artificial Sequence: Synthetic oligonucleotide
  Sense strand starting at position 3669 of SEQ ID NO: 916956
cauguaggagggugauuaa

SEQ ID NO: 1197265 - RNA, 19 nt, Artificial Sequence
  Description of Artificial Sequence: Synthetic oligonucleotide
  Antisense strand to SEQ ID NO: 1197264
uuaaucacccuccuacaug

SEQ ID NO: 1197266 - RNA, 19 nt, Artificial Sequence
  Description of Artificial Sequence: Synthetic oligonucleotide
  Sense strand starting at position 3679 of SEQ ID NO: 916956
ggugauuaauaacugacau

SEQ ID NO: 1197267 - RNA, 19 nt, Artificial Sequence
  Description of Artificial Sequence: Synthetic oligonucleotide
  Antisense strand to SEQ ID NO: 1197266
augucaguuauuaaucacc

SEQ ID NO: 1197268 - RNA, 19 nt, Artificial Sequence
  Description of Artificial Sequence: Synthetic oligonucleotide
  Sense strand starting at position 90 of SEQ ID NO: 916957
acugguaggacaugguuau

SEQ ID NO: 1197269 - RNA, 19 nt, Artificial Sequence
  Description of Artificial Sequence: Synthetic oligonucleotide
  Antisense strand to SEQ ID NO: 1197268
auaaccauguccuaccagu

SEQ ID NO: 1197270 - RNA, 19 nt, Artificial Sequence
  Description of Artificial Sequence: Synthetic oligonucleotide
  Sense strand starting at position 91 of SEQ ID NO: 916957
cugguaggacaugguuauu

SEQ ID NO: 1197271 - RNA, 19 nt, Artificial Sequence
  Description of Artificial Sequence: Synthetic oligonucleotide
  Antisense strand to SEQ ID NO: 1197270
aauaaccauguccuaccag

SEQ ID NO: 1197272 - RNA, 19 nt, Artificial Sequence
  Description of Artificial Sequence: Synthetic oligonucleotide
  Sense strand starting at position 94 of SEQ ID NO: 916957
guaggacaugguuauugau

SEQ ID NO: 1197273 - RNA, 19 nt, Artificial Sequence
  Description of Artificial Sequence: Synthetic oligonucleotide
  Antisense strand to SEQ ID NO: 1197272
aucaauaaccauguccuac

SEQ ID NO: 1197274 - RNA, 19 nt, Artificial Sequence
  Description of Artificial Sequence: Synthetic oligonucleotide
  Sense strand starting at position 96 of SEQ ID NO: 916957
aggacaugguuauugauua

SEQ ID NO: 1197275 - RNA, 19 nt, Artificial Sequence
  Description of Artificial Sequence: Synthetic oligonucleotide
  Antisense strand to SEQ ID NO: 1197274
uaaucaauaaccauguccu

SEQ ID NO: 1197276 - RNA, 19 nt, Artificial Sequence
  Description of Artificial Sequence: Synthetic oligonucleotide
  Sense strand starting at position 100 of SEQ ID NO: 916957
caugguuauugauuagaga

SEQ ID NO: 1197277 - RNA, 19 nt, Artificial Sequence
  Description of Artificial Sequence: Synthetic oligonucleotide
  Antisense strand to SEQ ID NO: 1197276
ucucuaaucaauaaccaug

SEQ ID NO: 1197278 - RNA, 19 nt, Artificial Sequence
  Description of Artificial Sequence: Synthetic oligonucleotide
  Sense strand starting at position 108 of SEQ ID NO: 916957
uugauuagagaguguuaua

SEQ ID NO: 1197279 - RNA, 19 nt, Artificial Sequence
  Description of Artificial Sequence: Synthetic oligonucleotide
  Antisense strand to SEQ ID NO: 1197278
uauaacacucucuaaucaa

SEQ ID NO: 1197280 - RNA, 19 nt, Artificial Sequence
  Description of Artificial Sequence: Synthetic oligonucleotide
  Sense strand starting at position 115 of SEQ ID NO: 916957
gagaguguuauaggaauga

SEQ ID NO: 1197281 - RNA, 19 nt, Artificial Sequence
  Description of Artificial Sequence: Synthetic oligonucleotide
  Antisense strand to SEQ ID NO: 1197280
ucauuccuauaacacucuc

SEQ ID NO: 1197282 - RNA, 19 nt, Artificial Sequence
  Description of Artificial Sequence: Synthetic oligonucleotide
  Sense strand starting at position 222 of SEQ ID NO: 916957
uuuguuggucaugauagua

SEQ ID NO: 1197283 - RNA, 19 nt, Artificial Sequence
  Description of Artificial Sequence: Synthetic oligonucleotide
  Antisense strand to SEQ ID NO: 1197282
uacuaucaugaccaacaaa

SEQ ID NO: 1197284 - RNA, 19 nt, Artificial Sequence
  Description of Artificial Sequence: Synthetic oligonucleotide
  Sense strand starting at position 232 of SEQ ID NO: 916957
augauaguauuacuuggga

SEQ ID NO: 1197285 - RNA, 19 nt, Artificial Sequence
  Description of Artificial Sequence: Synthetic oligonucleotide
  Antisense strand to SEQ ID NO: 1197284
ucccaaguaauacuaucau

SEQ ID NO: 1197286 - RNA, 19 nt, Artificial Sequence
  Description of Artificial Sequence: Synthetic oligonucleotide
  Sense strand starting at position 276 of SEQ ID NO: 916957
cuaguuucaguggagugau

SEQ ID NO: 1197287 - RNA, 19 nt, Artificial Sequence
  Description of Artificial Sequence: Synthetic oligonucleotide
  Antisense strand to SEQ ID NO: 1197286
aucacuccacugaaacuag

SEQ ID NO: 1197288 - RNA, 19 nt, Artificial Sequence
  Description of Artificial Sequence: Synthetic oligonucleotide
  Sense strand starting at position 288 of SEQ ID NO: 916957
gagugauggcaauagaugu

SEQ ID NO: 1197289 - RNA, 19 nt, Artificial Sequence
  Description of Artificial Sequence: Synthetic oligonucleotide
  Antisense strand to SEQ ID NO: 1197288
acaucuauugccaucacuc

SEQ ID NO: 1197290 - RNA, 19 nt, Artificial Sequence
  Description of Artificial Sequence: Synthetic oligonucleotide
  Sense strand starting at position 1017 of SEQ ID NO: 916957
guaaacaaccauuaguguu

SEQ ID NO: 1197291 - RNA, 19 nt, Artificial Sequence
  Description of Artificial Sequence: Synthetic oligonucleotide
  Antisense strand to SEQ ID NO: 1197290
aacacuaaugguuguuuac

SEQ ID NO: 1197292 - RNA, 19 nt, Artificial Sequence
  Description of Artificial Sequence: Synthetic oligonucleotide
  Sense strand starting at position 1055 of SEQ ID NO: 916957
auuccagcuguuuaugaaa

SEQ ID NO: 1197293 - RNA, 19 nt, Artificial Sequence
  Description of Artificial Sequence: Synthetic oligonucleotide
  Antisense strand to SEQ ID NO: 1197292
uuucauaaacagcuggaau

SEQ ID NO: 1197294 - RNA, 19 nt, Artificial Sequence
  Description of Artificial Sequence: Synthetic oligonucleotide
  Sense strand starting at position 1073 of SEQ ID NO: 916957
auacuccugcacugggaaa

SEQ ID NO: 1197295 - RNA, 19 nt, Artificial Sequence
  Description of Artificial Sequence: Synthetic oligonucleotide
  Antisense strand to SEQ ID NO: 1197294
uuucccagugcaggaguau

SEQ ID NO: 1197296 - RNA, 19 nt, Artificial Sequence
  Description of Artificial Sequence: Synthetic oligonucleotide
  Sense strand starting at position 1075 of SEQ ID NO: 916957
acuccugcacugggaaaua

SEQ ID NO: 1197297 - RNA, 19 nt, Artificial Sequence
  Description of Artificial Sequence: Synthetic oligonucleotide
  Antisense strand to SEQ ID NO: 1197296
uauuucccagugcaggagu

SEQ ID NO: 1197298 - RNA, 19 nt, Artificial Sequence
  Description of Artificial Sequence: Synthetic oligonucleotide
  Sense strand starting at position 1114 of SEQ ID NO: 916957
agcugauagcccuaacuau

SEQ ID NO: 1197299 - RNA, 19 nt, Artificial Sequence
  Description of Artificial Sequence: Synthetic oligonucleotide
  Antisense strand to SEQ ID NO: 1197298
auaguuagggcuaucagcu

SEQ ID NO: 1197300 - RNA, 19 nt, Artificial Sequence
  Description of Artificial Sequence: Synthetic oligonucleotide
  Sense strand starting at position 1163 of SEQ ID NO: 916957
gcacuauucgacgaaaucu

SEQ ID NO: 1197301 - RNA, 19 nt, Artificial Sequence
  Description of Artificial Sequence: Synthetic oligonucleotide
  Antisense strand to SEQ ID NO: 1197300
agauuucgucgaauagugc

SEQ ID NO: 1197302 - RNA, 19 nt, Artificial Sequence
  Description of Artificial Sequence: Synthetic oligonucleotide
  Sense strand starting at position 1260 of SEQ ID NO: 916957
cugaaaugccuaggaaaua

SEQ ID NO: 1197303 - RNA, 19 nt, Artificial Sequence
  Description of Artificial Sequence: Synthetic oligonucleotide
  Antisense strand to SEQ ID NO: 1197302
uauuuccuaggcauuucag

SEQ ID NO: 1197304 - RNA, 19 nt, Artificial Sequence
  Description of Artificial Sequence: Synthetic oligonucleotide
  Sense strand starting at position 1510 of SEQ ID NO: 916957
ggguuaacgcuucaaagag

SEQ ID NO: 1197305 - RNA, 19 nt, Artificial Sequence
  Description of Artificial Sequence: Synthetic oligonucleotide
  Antisense strand to SEQ ID NO: 1197304
cucuuugaagcguuaaccc

SEQ ID NO: 1197306 - RNA, 19 nt, Artificial Sequence
  Description of Artificial Sequence: Synthetic oligonucleotide
  Sense strand starting at position 1613 of SEQ ID NO: 916957
ccaccugucccuuaguaaa

SEQ ID NO: 1197307 - RNA, 19 nt, Artificial Sequence
  Description of Artificial Sequence: Synthetic oligonucleotide
  Antisense strand to SEQ ID NO: 1197306
uuuacuaagggacaggugg

SEQ ID NO: 1197308 - RNA, 19 nt, Artificial Sequence
  Description of Artificial Sequence: Synthetic oligonucleotide
  Sense strand starting at position 1696 of SEQ ID NO: 916957
agcaguagccggcucuaua

SEQ ID NO: 1197309 - RNA, 19 nt, Artificial Sequence
  Description of Artificial Sequence: Synthetic oligonucleotide
  Antisense strand to SEQ ID NO: 1197308
uauagagccggcuacugcu

SEQ ID NO: 1197310 - RNA, 19 nt, Artificial Sequence
  Description of Artificial Sequence: Synthetic oligonucleotide
  Sense strand starting at position 1697 of SEQ ID NO: 916957
gcaguagccggcucuauaa

SEQ ID NO: 1197311 - RNA, 19 nt, Artificial Sequence
  Description of Artificial Sequence: Synthetic oligonucleotide
  Antisense strand to SEQ ID NO: 1197310
uuauagagccggcuacugc

SEQ ID NO: 1197312 - RNA, 19 nt, Artificial Sequence
  Description of Artificial Sequence: Synthetic oligonucleotide
  Sense strand starting at position 1730 of SEQ ID NO: 916957
uggcauucucgggaaacca

SEQ ID NO: 1197313 - RNA, 19 nt, Artificial Sequence
  Description of Artificial Sequence: Synthetic oligonucleotide
  Antisense strand to SEQ ID NO: 1197312
ugguuucccgagaaugcca

SEQ ID NO: 1197314 - RNA, 19 nt, Artificial Sequence
  Description of Artificial Sequence: Synthetic oligonucleotide
  Sense strand starting at position 2212 of SEQ ID NO: 916957
ggaguuugucgagacucug

SEQ ID NO: 1197315 - RNA, 19 nt, Artificial Sequence
  Description of Artificial Sequence: Synthetic oligonucleotide
  Antisense strand to SEQ ID NO: 1197314
cagagucucgacaaacucc

SEQ ID NO: 1197316 - RNA, 19 nt, Artificial Sequence
  Description of Artificial Sequence: Synthetic oligonucleotide
  Sense strand starting at position 2278 of SEQ ID NO: 916957
acuggaagccagcaagauu

SEQ ID NO: 1197317 - RNA, 19 nt, Artificial Sequence
  Description of Artificial Sequence: Synthetic oligonucleotide
  Antisense strand to SEQ ID NO: 1197316
aaucuugcuggcuuccagu

SEQ ID NO: 1197318 - RNA, 19 nt, Artificial Sequence
  Description of Artificial Sequence: Synthetic oligonucleotide
  Sense strand starting at position 2287 of SEQ ID NO: 916957
cagcaagauuuguccuggu

SEQ ID NO: 1197319 - RNA, 19 nt, Artificial Sequence
  Description of Artificial Sequence: Synthetic oligonucleotide
  Antisense strand to SEQ ID NO: 1197318
accaggacaaaucuugcug

SEQ ID NO: 1197320 - RNA, 19 nt, Artificial Sequence
  Description of Artificial Sequence: Synthetic oligonucleotide
  Sense strand starting at position 2726 of SEQ ID NO: 916957
ggagauaucccaggcacua

SEQ ID NO: 1197321 - RNA, 19 nt, Artificial Sequence
  Description of Artificial Sequence: Synthetic oligonucleotide
  Antisense strand to SEQ ID NO: 1197320
uagugccugggauaucucc

SEQ ID NO: 1197322 - RNA, 19 nt, Artificial Sequence
  Description of Artificial Sequence: Synthetic oligonucleotide
  Sense strand starting at position 2738 of SEQ ID NO: 916957
ggcacuauacauggagacu

SEQ ID NO: 1197323 - RNA, 19 nt, Artificial Sequence
  Description of Artificial Sequence: Synthetic oligonucleotide
  Antisense strand to SEQ ID NO: 1197322
agucuccauguauagugcc

SEQ ID NO: 1197324 - RNA, 19 nt, Artificial Sequence
  Description of Artificial Sequence: Synthetic oligonucleotide
  Sense strand starting at position 2829 of SEQ ID NO: 916957
uucgauaggaacugugaua

SEQ ID NO: 1197325 - RNA, 19 nt, Artificial Sequence
  Description of Artificial Sequence: Synthetic oligonucleotide
  Antisense strand to SEQ ID NO: 1197324
uaucacaguuccuaucgaa

SEQ ID NO: 1197326 - RNA, 19 nt, Artificial Sequence
  Description of Artificial Sequence: Synthetic oligonucleotide
  Sense strand starting at position 3009 of SEQ ID NO: 916957
gacaauacaugugugguaa

SEQ ID NO: 1197327 - RNA, 19 nt, Artificial Sequence
  Description of Artificial Sequence: Synthetic oligonucleotide
  Antisense strand to SEQ ID NO: 1197326
uuaccacacauguauuguc

SEQ ID NO: 1197328 - RNA, 19 nt, Artificial Sequence
  Description of Artificial Sequence: Synthetic oligonucleotide
  Sense strand starting at position 3010 of SEQ ID NO: 916957
acaauacaugugugguaaa

SEQ ID NO: 1197329 - RNA, 19 nt, Artificial Sequence
  Description of Artificial Sequence: Synthetic oligonucleotide
  Antisense strand to SEQ ID NO: 1197328
uuuaccacacauguauugu

SEQ ID NO: 1197330 - RNA, 19 nt, Artificial Sequence
  Description of Artificial Sequence: Synthetic oligonucleotide
  Sense strand starting at position 3111 of SEQ ID NO: 916957
ccuugauaacucuggcaca

SEQ ID NO: 1197331 - RNA, 19 nt, Artificial Sequence
  Description of Artificial Sequence: Synthetic oligonucleotide
  Antisense strand to SEQ ID NO: 1197330
ugugccagaguuaucaagg

SEQ ID NO: 1197332 - RNA, 19 nt, Artificial Sequence
  Description of Artificial Sequence: Synthetic oligonucleotide
  Sense strand starting at position 3122 of SEQ ID NO: 916957
cuggcacagaucugggauu

SEQ ID NO: 1197333 - RNA, 19 nt, Artificial Sequence
  Description of Artificial Sequence: Synthetic oligonucleotide
  Antisense strand to SEQ ID NO: 1197332
aaucccagaucugugccag

SEQ ID NO: 1197334 - RNA, 19 nt, Artificial Sequence
  Description of Artificial Sequence: Synthetic oligonucleotide
  Sense strand starting at position 3488 of SEQ ID NO: 916957
augagaauauuagcaguaa

SEQ ID NO: 1197335 - RNA, 19 nt, Artificial Sequence
  Description of Artificial Sequence: Synthetic oligonucleotide
  Antisense strand to SEQ ID NO: 1197334
uuacugcuaauauucucau

SEQ ID NO: 1197336 - RNA, 19 nt, Artificial Sequence
  Description of Artificial Sequence: Synthetic oligonucleotide
  Sense strand starting at position 3503 of SEQ ID NO: 916957
guaaucagcauugagugaa

SEQ ID NO: 1197337 - RNA, 19 nt, Artificial Sequence
  Description of Artificial Sequence: Synthetic oligonucleotide
  Antisense strand to SEQ ID NO: 1197336
uucacucaaugcugauuac

SEQ ID NO: 1197338 - RNA, 19 nt, Artificial Sequence
  Description of Artificial Sequence: Synthetic oligonucleotide
  Sense strand starting at position 3507 of SEQ ID NO: 916957
ucagcauugagugaagacu

SEQ ID NO: 1197339 - RNA, 19 nt, Artificial Sequence
  Description of Artificial Sequence: Synthetic oligonucleotide
  Antisense strand to SEQ ID NO: 1197338
agucuucacucaaugcuga

SEQ ID NO: 1197340 - RNA, 19 nt, Artificial Sequence
  Description of Artificial Sequence: Synthetic oligonucleotide
  Sense strand starting at position 3578 of SEQ ID NO: 916957
auauaaucuugggugugga

SEQ ID NO: 1197341 - RNA, 19 nt, Artificial Sequence
  Description of Artificial Sequence: Synthetic oligonucleotide
  Antisense strand to SEQ ID NO: 1197340
uccacacccaagauuauau

SEQ ID NO: 1197342 - RNA, 19 nt, Artificial Sequence
  Description of Artificial Sequence: Synthetic oligonucleotide
  Sense strand starting at position 3790 of SEQ ID NO: 916957
guuugagaacuacaggcuu

SEQ ID NO: 1197343 - RNA, 19 nt, Artificial Sequence
  Description of Artificial Sequence: Synthetic oligonucleotide
  Antisense strand to SEQ ID NO: 1197342
aagccuguaguucucaaac

SEQ ID NO: 1197344 - RNA, 19 nt, Artificial Sequence
  Description of Artificial Sequence: Synthetic oligonucleotide
  Sense strand starting at position 3798 of SEQ ID NO: 916957
acuacaggcuucucauuga

SEQ ID NO: 1197345 - RNA, 19 nt, Artificial Sequence
  Description of Artificial Sequence: Synthetic oligonucleotide
  Antisense strand to SEQ ID NO: 1197344
ucaaugagaagccuguagu

SEQ ID NO: 1197346 - RNA, 19 nt, Artificial Sequence
  Description of Artificial Sequence: Synthetic oligonucleotide
  Sense strand starting at position 3877 of SEQ ID NO: 916957
acaagugugccuuaaauaa

SEQ ID NO: 1197347 - RNA, 19 nt, Artificial Sequence
  Description of Artificial Sequence: Synthetic oligonucleotide
  Antisense strand to SEQ ID NO: 1197346
uuauuuaaggcacacuugu

SEQ ID NO: 1197348 - RNA, 19 nt, Artificial Sequence
  Description of Artificial Sequence: Synthetic oligonucleotide
  Sense strand starting at position 70 of SEQ ID NO: 916958
aauggaggagcguauaauc

SEQ ID NO: 1197349 - RNA, 19 nt, Artificial Sequence
  Description of Artificial Sequence: Synthetic oligonucleotide
  Antisense strand to SEQ ID NO: 1197348
gauuauacgcuccuccauu

SEQ ID NO: 1197350 - RNA, 19 nt, Artificial Sequence
  Description of Artificial Sequence: Synthetic oligonucleotide
  Sense strand starting at position 73 of SEQ ID NO: 916958
ggaggagcguauaaucaug

SEQ ID NO: 1197351 - RNA, 19 nt, Artificial Sequence
  Description of Artificial Sequence: Synthetic oligonucleotide
  Antisense strand to SEQ ID NO: 1197350
caugauuauacgcuccucc

SEQ ID NO: 1197352 - RNA, 19 nt, Artificial Sequence
  Description of Artificial Sequence: Synthetic oligonucleotide
  Sense strand starting at position 79 of SEQ ID NO: 916958
gcguauaaucaugacguuu

SEQ ID NO: 1197353 - RNA, 19 nt, Artificial Sequence
  Description of Artificial Sequence: Synthetic oligonucleotide
  Antisense strand to SEQ ID NO: 1197352
aaacgucaugauuauacgc

SEQ ID NO: 1197354 - RNA, 19 nt, Artificial Sequence
  Description of Artificial Sequence: Synthetic oligonucleotide
  Sense strand starting at position 87 of SEQ ID NO: 916958
ucaugacguuugcuugaua

SEQ ID NO: 1197355 - RNA, 19 nt, Artificial Sequence
  Description of Artificial Sequence: Synthetic oligonucleotide
  Antisense strand to SEQ ID NO: 1197354
uaucaagcaaacgucauga

SEQ ID NO: 1197356 - RNA, 19 nt, Artificial Sequence
  Description of Artificial Sequence: Synthetic oligonucleotide
  Sense strand starting at position 88 of SEQ ID NO: 916958
caugacguuugcuugauaa

SEQ ID NO: 1197357 - RNA, 19 nt, Artificial Sequence
  Description of Artificial Sequence: Synthetic oligonucleotide
  Antisense strand to SEQ ID NO: 1197356
uuaucaagcaaacgucaug

SEQ ID NO: 1197358 - RNA, 19 nt, Artificial Sequence
  Description of Artificial Sequence: Synthetic oligonucleotide
  Sense strand starting at position 90 of SEQ ID NO: 916958
ugacguuugcuugauaaca

SEQ ID NO: 1197359 - RNA, 19 nt, Artificial Sequence
  Description of Artificial Sequence: Synthetic oligonucleotide
  Antisense strand to SEQ ID NO: 1197358
uguuaucaagcaaacguca

SEQ ID NO: 1197360 - RNA, 19 nt, Artificial Sequence
  Description of Artificial Sequence: Synthetic oligonucleotide
  Sense strand starting at position 152 of SEQ ID NO: 916958
cuacaaggauucccuguau

SEQ ID NO: 1197361 - RNA, 19 nt, Artificial Sequence
  Description of Artificial Sequence: Synthetic oligonucleotide
  Antisense strand to SEQ ID NO: 1197360
auacagggaauccuuguag

SEQ ID NO: 1197362 - RNA, 19 nt, Artificial Sequence
  Description of Artificial Sequence: Synthetic oligonucleotide
  Sense strand starting at position 156 of SEQ ID NO: 916958
aaggauucccuguaugucu

SEQ ID NO: 1197363 - RNA, 19 nt, Artificial Sequence
  Description of Artificial Sequence: Synthetic oligonucleotide
  Antisense strand to SEQ ID NO: 1197362
agacauacagggaauccuu

SEQ ID NO: 1197364 - RNA, 19 nt, Artificial Sequence
  Description of Artificial Sequence: Synthetic oligonucleotide
  Sense strand starting at position 165 of SEQ ID NO: 916958
cuguaugucugaccaauau

SEQ ID NO: 1197365 - RNA, 19 nt, Artificial Sequence
  Description of Artificial Sequence: Synthetic oligonucleotide
  Antisense strand to SEQ ID NO: 1197364
auauuggucagacauacag

SEQ ID NO: 1197366 - RNA, 19 nt, Artificial Sequence
  Description of Artificial Sequence: Synthetic oligonucleotide
  Sense strand starting at position 223 of SEQ ID NO: 916958
ccgauugccuucucauagu

SEQ ID NO: 1197367 - RNA, 19 nt, Artificial Sequence
  Description of Artificial Sequence: Synthetic oligonucleotide
  Antisense strand to SEQ ID NO: 1197366
acuaugagaaggcaaucgg

SEQ ID NO: 1197368 - RNA, 19 nt, Artificial Sequence
  Description of Artificial Sequence: Synthetic oligonucleotide
  Sense strand starting at position 509 of SEQ ID NO: 916958
aaaggaagauggugaauaa

SEQ ID NO: 1197369 - RNA, 19 nt, Artificial Sequence
  Description of Artificial Sequence: Synthetic oligonucleotide
  Antisense strand to SEQ ID NO: 1197368
uuauucaccaucuuccuuu

SEQ ID NO: 1197370 - RNA, 19 nt, Artificial Sequence
  Description of Artificial Sequence: Synthetic oligonucleotide
  Sense strand starting at position 784 of SEQ ID NO: 916958
agccacuccuugccagaaa

SEQ ID NO: 1197371 - RNA, 19 nt, Artificial Sequence
  Description of Artificial Sequence: Synthetic oligonucleotide
  Antisense strand to SEQ ID NO: 1197370
uuucuggcaaggaguggcu

SEQ ID NO: 1197372 - RNA, 19 nt, Artificial Sequence
  Description of Artificial Sequence: Synthetic oligonucleotide
  Sense strand starting at position 1127 of SEQ ID NO: 916958
gugucaaaccugugccacu

SEQ ID NO: 1197373 - RNA, 19 nt, Artificial Sequence
  Description of Artificial Sequence: Synthetic oligonucleotide
  Antisense strand to SEQ ID NO: 1197372
aguggcacagguuugacac

SEQ ID NO: 1197374 - RNA, 19 nt, Artificial Sequence
  Description of Artificial Sequence: Synthetic oligonucleotide
  Sense strand starting at position 2123 of SEQ ID NO: 916958
aacagagauguccgugcuu

SEQ ID NO: 1197375 - RNA, 19 nt, Artificial Sequence
  Description of Artificial Sequence: Synthetic oligonucleotide
  Antisense strand to SEQ ID NO: 1197374
aagcacggacaucucuguu

SEQ ID NO: 1197376 - RNA, 19 nt, Artificial Sequence
  Description of Artificial Sequence: Synthetic oligonucleotide
  Sense strand starting at position 2125 of SEQ ID NO: 916958
cagagauguccgugcuucu

SEQ ID NO: 1197377 - RNA, 19 nt, Artificial Sequence
  Description of Artificial Sequence: Synthetic oligonucleotide
  Antisense strand to SEQ ID NO: 1197376
agaagcacggacaucucug

SEQ ID NO: 1197378 - RNA, 19 nt, Artificial Sequence
  Description of Artificial Sequence: Synthetic oligonucleotide
  Sense strand starting at position 2132 of SEQ ID NO: 916958
guccgugcuucucccaaga

SEQ ID NO: 1197379 - RNA, 19 nt, Artificial Sequence
  Description of Artificial Sequence: Synthetic oligonucleotide
  Antisense strand to SEQ ID NO: 1197378
ucuugggagaagcacggac

SEQ ID NO: 1197380 - RNA, 19 nt, Artificial Sequence
  Description of Artificial Sequence: Synthetic oligonucleotide
  Sense strand starting at position 2290 of SEQ ID NO: 916958
gcccgaauugcguugaauu

SEQ ID NO: 1197381 - RNA, 19 nt, Artificial Sequence
  Description of Artificial Sequence: Synthetic oligonucleotide
  Antisense strand to SEQ ID NO: 1197380
aauucaacgcaauucgggc

SEQ ID NO: 1197382 - RNA, 19 nt, Artificial Sequence
  Description of Artificial Sequence: Synthetic oligonucleotide
  Sense strand starting at position 2291 of SEQ ID NO: 916958
cccgaauugcguugaauua

SEQ ID NO: 1197383 - RNA, 19 nt, Artificial Sequence
  Description of Artificial Sequence: Synthetic oligonucleotide
  Antisense strand to SEQ ID NO: 1197382
uaauucaacgcaauucggg

SEQ ID NO: 1197384 - RNA, 19 nt, Artificial Sequence
  Description of Artificial Sequence: Synthetic oligonucleotide
  Sense strand starting at position 2292 of SEQ ID NO: 916958
ccgaauugcguugaauuau

SEQ ID NO: 1197385 - RNA, 19 nt, Artificial Sequence
  Description of Artificial Sequence: Synthetic oligonucleotide
  Antisense strand to SEQ ID NO: 1197384
auaauucaacgcaauucgg

SEQ ID NO: 1197386 - RNA, 19 nt, Artificial Sequence
  Description of Artificial Sequence: Synthetic oligonucleotide
  Sense strand starting at position 2303 of SEQ ID NO: 916958
ugaauuauuuccuggcaga

SEQ ID NO: 1197387 - RNA, 19 nt, Artificial Sequence
  Description of Artificial Sequence: Synthetic oligonucleotide
  Antisense strand to SEQ ID NO: 1197386
ucugccaggaaauaauuca

SEQ ID NO: 1197388 - RNA, 19 nt, Artificial Sequence
  Description of Artificial Sequence: Synthetic oligonucleotide
  Sense strand starting at position 2306 of SEQ ID NO: 916958
auuauuuccuggcagauua

SEQ ID NO: 1197389 - RNA, 19 nt, Artificial Sequence
  Description of Artificial Sequence: Synthetic oligonucleotide
  Antisense strand to SEQ ID NO: 1197388
uaaucugccaggaaauaau

SEQ ID NO: 1197390 - RNA, 19 nt, Artificial Sequence
  Description of Artificial Sequence: Synthetic oligonucleotide
  Sense strand starting at position 2423 of SEQ ID NO: 916958
aguaauguuccucaucucu

SEQ ID NO: 1197391 - RNA, 19 nt, Artificial Sequence
  Description of Artificial Sequence: Synthetic oligonucleotide
  Antisense strand to SEQ ID NO: 1197390
agagaugaggaacauuacu

SEQ ID NO: 1197392 - RNA, 19 nt, Artificial Sequence
  Description of Artificial Sequence: Synthetic oligonucleotide
  Sense strand starting at position 2504 of SEQ ID NO: 916958
auucucaaacggcaauauu

SEQ ID NO: 1197393 - RNA, 19 nt, Artificial Sequence
  Description of Artificial Sequence: Synthetic oligonucleotide
  Antisense strand to SEQ ID NO: 1197392
aauauugccguuugagaau

SEQ ID NO: 1197394 - RNA, 19 nt, Artificial Sequence
  Description of Artificial Sequence: Synthetic oligonucleotide
  Sense strand starting at position 2583 of SEQ ID NO: 916958
agauacuuguguuugcuaa

SEQ ID NO: 1197395 - RNA, 19 nt, Artificial Sequence
  Description of Artificial Sequence: Synthetic oligonucleotide
  Antisense strand to SEQ ID NO: 1197394
uuagcaaacacaaguaucu

SEQ ID NO: 1197396 - RNA, 19 nt, Artificial Sequence
  Description of Artificial Sequence: Synthetic oligonucleotide
  Sense strand starting at position 2584 of SEQ ID NO: 916958
gauacuuguguuugcuaau

SEQ ID NO: 1197397 - RNA, 19 nt, Artificial Sequence
  Description of Artificial Sequence: Synthetic oligonucleotide
  Antisense strand to SEQ ID NO: 1197396
auuagcaaacacaaguauc

SEQ ID NO: 1197398 - RNA, 19 nt, Artificial Sequence
  Description of Artificial Sequence: Synthetic oligonucleotide
  Sense strand starting at position 2585 of SEQ ID NO: 916958
auacuuguguuugcuaaua

SEQ ID NO: 1197399 - RNA, 19 nt, Artificial Sequence
  Description of Artificial Sequence: Synthetic oligonucleotide
  Antisense strand to SEQ ID NO: 1197398
uauuagcaaacacaaguau

SEQ ID NO: 1197400 - RNA, 19 nt, Artificial Sequence
  Description of Artificial Sequence: Synthetic oligonucleotide
  Sense strand starting at position 2998 of SEQ ID NO: 916958
gcaggaggaugucuugaaa

SEQ ID NO: 1197401 - RNA, 19 nt, Artificial Sequence
  Description of Artificial Sequence: Synthetic oligonucleotide
  Antisense strand to SEQ ID NO: 1197400
uuucaagacauccuccugc

SEQ ID NO: 1197402 - RNA, 19 nt, Artificial Sequence
  Description of Artificial Sequence: Synthetic oligonucleotide
  Sense strand starting at position 3076 of SEQ ID NO: 916958
agaccuagucccugacuau

SEQ ID NO: 1197403 - RNA, 19 nt, Artificial Sequence
  Description of Artificial Sequence: Synthetic oligonucleotide
  Antisense strand to SEQ ID NO: 1197402
auagucagggacuaggucu

SEQ ID NO: 1197404 - RNA, 19 nt, Artificial Sequence
  Description of Artificial Sequence: Synthetic oligonucleotide
  Sense strand starting at position 3215 of SEQ ID NO: 916958
cucuuaaguugacauagaa

SEQ ID NO: 1197405 - RNA, 19 nt, Artificial Sequence
  Description of Artificial Sequence: Synthetic oligonucleotide
  Antisense strand to SEQ ID NO: 1197404
uucuaugucaacuuaagag

SEQ ID NO: 1197406 - RNA, 19 nt, Artificial Sequence
  Description of Artificial Sequence: Synthetic oligonucleotide
  Sense strand starting at position 3259 of SEQ ID NO: 916958
aguuguacauauucccaga

SEQ ID NO: 1197407 - RNA, 19 nt, Artificial Sequence
  Description of Artificial Sequence: Synthetic oligonucleotide
  Antisense strand to SEQ ID NO: 1197406
ucugggaauauguacaacu

SEQ ID NO: 1197408 - RNA, 19 nt, Artificial Sequence
  Description of Artificial Sequence: Synthetic oligonucleotide
  Sense strand starting at position 3262 of SEQ ID NO: 916958
uguacauauucccagagca

SEQ ID NO: 1197409 - RNA, 19 nt, Artificial Sequence
  Description of Artificial Sequence: Synthetic oligonucleotide
  Antisense strand to SEQ ID NO: 1197408
ugcucugggaauauguaca

SEQ ID NO: 1197410 - RNA, 19 nt, Artificial Sequence
  Description of Artificial Sequence: Synthetic oligonucleotide
  Sense strand starting at position 3437 of SEQ ID NO: 916958
auauguguauaaccaaagu

SEQ ID NO: 1197411 - RNA, 19 nt, Artificial Sequence
  Description of Artificial Sequence: Synthetic oligonucleotide
  Antisense strand to SEQ ID NO: 1197410
acuuugguuauacacauau

SEQ ID NO: 1197412 - RNA, 19 nt, Artificial Sequence
  Description of Artificial Sequence: Synthetic oligonucleotide
  Sense strand starting at position 3487 of SEQ ID NO: 916958
auauuuauaugggaaacac

SEQ ID NO: 1197413 - RNA, 19 nt, Artificial Sequence
  Description of Artificial Sequence: Synthetic oligonucleotide
  Antisense strand to SEQ ID NO: 1197412
guguuucccauauaaauau

SEQ ID NO: 1197414 - RNA, 19 nt, Artificial Sequence
  Description of Artificial Sequence: Synthetic oligonucleotide
  Sense strand starting at position 3497 of SEQ ID NO: 916958
gggaaacacuaguaugaac

SEQ ID NO: 1197415 - RNA, 19 nt, Artificial Sequence
  Description of Artificial Sequence: Synthetic oligonucleotide
  Antisense strand to SEQ ID NO: 1197414
guucauacuaguguuuccc

SEQ ID NO: 1197416 - RNA, 19 nt, Artificial Sequence
  Description of Artificial Sequence: Synthetic oligonucleotide
  Sense strand starting at position 3554 of SEQ ID NO: 916958
ugaauagguuuagaaguaa

SEQ ID NO: 1197417 - RNA, 19 nt, Artificial Sequence
  Description of Artificial Sequence: Synthetic oligonucleotide
  Antisense strand to SEQ ID NO: 1197416
uuacuucuaaaccuauuca

SEQ ID NO: 1197418 - RNA, 19 nt, Artificial Sequence
  Description of Artificial Sequence: Synthetic oligonucleotide
  Sense strand starting at position 3572 of SEQ ID NO: 916958
aggacaacucagcagcaau

SEQ ID NO: 1197419 - RNA, 19 nt, Artificial Sequence
  Description of Artificial Sequence: Synthetic oligonucleotide
  Antisense strand to SEQ ID NO: 1197418
auugcugcugaguuguccu

SEQ ID NO: 1197420 - RNA, 19 nt, Artificial Sequence
  Description of Artificial Sequence: Synthetic oligonucleotide
  Sense strand starting at position 3654 of SEQ ID NO: 916958
uccuuugaggagugacuga

SEQ ID NO: 1197421 - RNA, 19 nt, Artificial Sequence
  Description of Artificial Sequence: Synthetic oligonucleotide
  Antisense strand to SEQ ID NO: 1197420
ucagucacuccucaaagga

SEQ ID NO: 1197422 - RNA, 19 nt, Artificial Sequence
  Description of Artificial Sequence: Synthetic oligonucleotide
  Sense strand starting at position 3664 of SEQ ID NO: 916958
agugacugauuccagguuu

SEQ ID NO: 1197423 - RNA, 19 nt, Artificial Sequence
  Description of Artificial Sequence: Synthetic oligonucleotide
  Antisense strand to SEQ ID NO: 1197422
aaaccuggaaucagucacu

SEQ ID NO: 1197424 - RNA, 19 nt, Artificial Sequence
  Description of Artificial Sequence: Synthetic oligonucleotide
  Sense strand starting at position 3799 of SEQ ID NO: 916958
ccuuccuauuggccaaaga

SEQ ID NO: 1197425 - RNA, 19 nt, Artificial Sequence
  Description of Artificial Sequence: Synthetic oligonucleotide
  Antisense strand to SEQ ID NO: 1197424
ucuuuggccaauaggaagg

SEQ ID NO: 1197426 - RNA, 19 nt, Artificial Sequence
  Description of Artificial Sequence: Synthetic oligonucleotide
  Sense strand starting at position 3800 of SEQ ID NO: 916958
cuuccuauuggccaaagau

SEQ ID NO: 1197427 - RNA, 19 nt, Artificial Sequence
  Description of Artificial Sequence: Synthetic oligonucleotide
  Antisense strand to SEQ ID NO: 1197426
aucuuuggccaauaggaag

SEQ ID NO: 1197428 - RNA, 19 nt, Artificial Sequence
  Description of Artificial Sequence: Synthetic oligonucleotide
  Sense strand starting at position 154 of SEQ ID NO: 916959
aggauaguuucuccaaccu

SEQ ID NO: 1197429 - RNA, 19 nt, Artificial Sequence
  Description of Artificial Sequence: Synthetic oligonucleotide
  Antisense strand to SEQ ID NO: 1197428
agguuggagaaacuauccu

SEQ ID NO: 1197430 - RNA, 19 nt, Artificial Sequence
  Description of Artificial Sequence: Synthetic oligonucleotide
  Sense strand starting at position 196 of SEQ ID NO: 916959
ccaaguagccuguauuauc

SEQ ID NO: 1197431 - RNA, 19 nt, Artificial Sequence
  Description of Artificial Sequence: Synthetic oligonucleotide
  Antisense strand to SEQ ID NO: 1197430
gauaauacaggcuacuugg

SEQ ID NO: 1197432 - RNA, 19 nt, Artificial Sequence
  Description of Artificial Sequence: Synthetic oligonucleotide
  Sense strand starting at position 238 of SEQ ID NO: 916959
uggaucuaucaagguauac

SEQ ID NO: 1197433 - RNA, 19 nt, Artificial Sequence
  Description of Artificial Sequence: Synthetic oligonucleotide
  Antisense strand to SEQ ID NO: 1197432
guauaccuugauagaucca

SEQ ID NO: 1197434 - RNA, 19 nt, Artificial Sequence
  Description of Artificial Sequence: Synthetic oligonucleotide
  Sense strand starting at position 409 of SEQ ID NO: 916959
uagacuagguauucuguga

SEQ ID NO: 1197435 - RNA, 19 nt, Artificial Sequence
  Description of Artificial Sequence: Synthetic oligonucleotide
  Antisense strand to SEQ ID NO: 1197434
ucacagaauaccuagucua

SEQ ID NO: 1197436 - RNA, 19 nt, Artificial Sequence
  Description of Artificial Sequence: Synthetic oligonucleotide
  Sense strand starting at position 413 of SEQ ID NO: 916959
cuagguauucugugaugaa

SEQ ID NO: 1197437 - RNA, 19 nt, Artificial Sequence
  Description of Artificial Sequence: Synthetic oligonucleotide
  Antisense strand to SEQ ID NO: 1197436
uucaucacagaauaccuag

SEQ ID NO: 1197438 - RNA, 19 nt, Artificial Sequence
  Description of Artificial Sequence: Synthetic oligonucleotide
  Sense strand starting at position 417 of SEQ ID NO: 916959
guauucugugaugaauuaa

SEQ ID NO: 1197439 - RNA, 19 nt, Artificial Sequence
  Description of Artificial Sequence: Synthetic oligonucleotide
  Antisense strand to SEQ ID NO: 1197438
uuaauucaucacagaauac

SEQ ID NO: 1197440 - RNA, 19 nt, Artificial Sequence
  Description of Artificial Sequence: Synthetic oligonucleotide
  Sense strand starting at position 504 of SEQ ID NO: 916959
acugauauaguaggauauu

SEQ ID NO: 1197441 - RNA, 19 nt, Artificial Sequence
  Description of Artificial Sequence: Synthetic oligonucleotide
  Antisense strand to SEQ ID NO: 1197440
aauauccuacuauaucagu

SEQ ID NO: 1197442 - RNA, 19 nt, Artificial Sequence
  Description of Artificial Sequence: Synthetic oligonucleotide
  Sense strand starting at position 505 of SEQ ID NO: 916959
cugauauaguaggauauuu

SEQ ID NO: 1197443 - RNA, 19 nt, Artificial Sequence
  Description of Artificial Sequence: Synthetic oligonucleotide
  Antisense strand to SEQ ID NO: 1197442
aaauauccuacuauaucag

SEQ ID NO: 1197444 - RNA, 19 nt, Artificial Sequence
  Description of Artificial Sequence: Synthetic oligonucleotide
  Sense strand starting at position 832 of SEQ ID NO: 916959
caguaaucacaauaguggu

SEQ ID NO: 1197445 - RNA, 19 nt, Artificial Sequence
  Description of Artificial Sequence: Synthetic oligonucleotide
  Antisense strand to SEQ ID NO: 1197444
accacuauugugauuacug

SEQ ID NO: 1197446 - RNA, 19 nt, Artificial Sequence
  Description of Artificial Sequence: Synthetic oligonucleotide
  Sense strand starting at position 984 of SEQ ID NO: 916959
acaacuauguugcugauga

SEQ ID NO: 1197447 - RNA, 19 nt, Artificial Sequence
  Description of Artificial Sequence: Synthetic oligonucleotide
  Antisense strand to SEQ ID NO: 1197446
ucaucagcaacauaguugu

SEQ ID NO: 1197448 - RNA, 19 nt, Artificial Sequence
  Description of Artificial Sequence: Synthetic oligonucleotide
  Sense strand starting at position 1157 of SEQ ID NO: 916959
aaagaccagucuuugguua

SEQ ID NO: 1197449 - RNA, 19 nt, Artificial Sequence
  Description of Artificial Sequence: Synthetic oligonucleotide
  Antisense strand to SEQ ID NO: 1197448
uaaccaaagacuggucuuu

SEQ ID NO: 1197450 - RNA, 19 nt, Artificial Sequence
  Description of Artificial Sequence: Synthetic oligonucleotide
  Sense strand starting at position 1158 of SEQ ID NO: 916959
aagaccagucuuugguuau

SEQ ID NO: 1197451 - RNA, 19 nt, Artificial Sequence
  Description of Artificial Sequence: Synthetic oligonucleotide
  Antisense strand to SEQ ID NO: 1197450
auaaccaaagacuggucuu

SEQ ID NO: 1197452 - RNA, 19 nt, Artificial Sequence
  Description of Artificial Sequence: Synthetic oligonucleotide
  Sense strand starting at position 1161 of SEQ ID NO: 916959
accagucuuugguuauaca

SEQ ID NO: 1197453 - RNA, 19 nt, Artificial Sequence
  Description of Artificial Sequence: Synthetic oligonucleotide
  Antisense strand to SEQ ID NO: 1197452
uguauaaccaaagacuggu

SEQ ID NO: 1197454 - RNA, 19 nt, Artificial Sequence
  Description of Artificial Sequence: Synthetic oligonucleotide
  Sense strand starting at position 1162 of SEQ ID NO: 916959
ccagucuuugguuauacau

SEQ ID NO: 1197455 - RNA, 19 nt, Artificial Sequence
  Description of Artificial Sequence: Synthetic oligonucleotide
  Antisense strand to SEQ ID NO: 1197454
auguauaaccaaagacugg

SEQ ID NO: 1197456 - RNA, 19 nt, Artificial Sequence
  Description of Artificial Sequence: Synthetic oligonucleotide
  Sense strand starting at position 1181 of SEQ ID NO: 916959
uuggcaauuacuugggagu

SEQ ID NO: 1197457 - RNA, 19 nt, Artificial Sequence
  Description of Artificial Sequence: Synthetic oligonucleotide
  Antisense strand to SEQ ID NO: 1197456
acucccaaguaauugccaa

SEQ ID NO: 1197458 - RNA, 19 nt, Artificial Sequence
  Description of Artificial Sequence: Synthetic oligonucleotide
  Sense strand starting at position 1182 of SEQ ID NO: 916959
uggcaauuacuugggaguu

SEQ ID NO: 1197459 - RNA, 19 nt, Artificial Sequence
  Description of Artificial Sequence: Synthetic oligonucleotide
  Antisense strand to SEQ ID NO: 1197458
aacucccaaguaauugcca

SEQ ID NO: 1197460 - RNA, 19 nt, Artificial Sequence
  Description of Artificial Sequence: Synthetic oligonucleotide
  Sense strand starting at position 1219 of SEQ ID NO: 916959
aagaauacuugggauagag

SEQ ID NO: 1197461 - RNA, 19 nt, Artificial Sequence
  Description of Artificial Sequence: Synthetic oligonucleotide
  Antisense strand to SEQ ID NO: 1197460
cucuaucccaaguauucuu

SEQ ID NO: 1197462 - RNA, 19 nt, Artificial Sequence
  Description of Artificial Sequence: Synthetic oligonucleotide
  Sense strand starting at position 1332 of SEQ ID NO: 916959
ucuaauuuccggugugagu

SEQ ID NO: 1197463 - RNA, 19 nt, Artificial Sequence
  Description of Artificial Sequence: Synthetic oligonucleotide
  Antisense strand to SEQ ID NO: 1197462
acucacaccggaaauuaga

SEQ ID NO: 1197464 - RNA, 19 nt, Artificial Sequence
  Description of Artificial Sequence: Synthetic oligonucleotide
  Sense strand starting at position 1334 of SEQ ID NO: 916959
uaauuuccggugugaguca

SEQ ID NO: 1197465 - RNA, 19 nt, Artificial Sequence
  Description of Artificial Sequence: Synthetic oligonucleotide
  Antisense strand to SEQ ID NO: 1197464
ugacucacaccggaaauua

SEQ ID NO: 1197466 - RNA, 19 nt, Artificial Sequence
  Description of Artificial Sequence: Synthetic oligonucleotide
  Sense strand starting at position 1439 of SEQ ID NO: 916959
uugugucgacgcucggaaa

SEQ ID NO: 1197467 - RNA, 19 nt, Artificial Sequence
  Description of Artificial Sequence: Synthetic oligonucleotide
  Antisense strand to SEQ ID NO: 1197466
uuuccgagcgucgacacaa

SEQ ID NO: 1197468 - RNA, 19 nt, Artificial Sequence
  Description of Artificial Sequence: Synthetic oligonucleotide
  Sense strand starting at position 2238 of SEQ ID NO: 916959
gacgcugagcaagggauua

SEQ ID NO: 1197469 - RNA, 19 nt, Artificial Sequence
  Description of Artificial Sequence: Synthetic oligonucleotide
  Antisense strand to SEQ ID NO: 1197468
uaaucccuugcucagcguc

SEQ ID NO: 1197470 - RNA, 19 nt, Artificial Sequence
  Description of Artificial Sequence: Synthetic oligonucleotide
  Sense strand starting at position 2376 of SEQ ID NO: 916959
cagauuaucgucucgcagu

SEQ ID NO: 1197471 - RNA, 19 nt, Artificial Sequence
  Description of Artificial Sequence: Synthetic oligonucleotide
  Antisense strand to SEQ ID NO: 1197470
acugcgagacgauaaucug

SEQ ID NO: 1197472 - RNA, 19 nt, Artificial Sequence
  Description of Artificial Sequence: Synthetic oligonucleotide
  Sense strand starting at position 2381 of SEQ ID NO: 916959
uaucgucucgcaguaauuc

SEQ ID NO: 1197473 - RNA, 19 nt, Artificial Sequence
  Description of Artificial Sequence: Synthetic oligonucleotide
  Antisense strand to SEQ ID NO: 1197472
gaauuacugcgagacgaua

SEQ ID NO: 1197474 - RNA, 19 nt, Artificial Sequence
  Description of Artificial Sequence: Synthetic oligonucleotide
  Sense strand starting at position 2501 of SEQ ID NO: 916959
gccguauuggaguaucuaa

SEQ ID NO: 1197475 - RNA, 19 nt, Artificial Sequence
  Description of Artificial Sequence: Synthetic oligonucleotide
  Antisense strand to SEQ ID NO: 1197474
uuagauacuccaauacggc

SEQ ID NO: 1197476 - RNA, 19 nt, Artificial Sequence
  Description of Artificial Sequence: Synthetic oligonucleotide
  Sense strand starting at position 2508 of SEQ ID NO: 916959
uggaguaucuaacucuaaa

SEQ ID NO: 1197477 - RNA, 19 nt, Artificial Sequence
  Description of Artificial Sequence: Synthetic oligonucleotide
  Antisense strand to SEQ ID NO: 1197476
uuuagaguuagauacucca

SEQ ID NO: 1197478 - RNA, 19 nt, Artificial Sequence
  Description of Artificial Sequence: Synthetic oligonucleotide
  Sense strand starting at position 2571 of SEQ ID NO: 916959
ugcaauauucgugcaguca

SEQ ID NO: 1197479 - RNA, 19 nt, Artificial Sequence
  Description of Artificial Sequence: Synthetic oligonucleotide
  Antisense strand to SEQ ID NO: 1197478
ugacugcacgaauauugca

SEQ ID NO: 1197480 - RNA, 19 nt, Artificial Sequence
  Description of Artificial Sequence: Synthetic oligonucleotide
  Sense strand starting at position 2601 of SEQ ID NO: 916959
cgcuauucccaauaaggaa

SEQ ID NO: 1197481 - RNA, 19 nt, Artificial Sequence
  Description of Artificial Sequence: Synthetic oligonucleotide
  Antisense strand to SEQ ID NO: 1197480
uuccuuauugggaauagcg

SEQ ID NO: 1197482 - RNA, 19 nt, Artificial Sequence
  Description of Artificial Sequence: Synthetic oligonucleotide
  Sense strand starting at position 2975 of SEQ ID NO: 916959
uguauaagugauggaauca

SEQ ID NO: 1197483 - RNA, 19 nt, Artificial Sequence
  Description of Artificial Sequence: Synthetic oligonucleotide
  Antisense strand to SEQ ID NO: 1197482
ugauuccaucacuuauaca

SEQ ID NO: 1197484 - RNA, 19 nt, Artificial Sequence
  Description of Artificial Sequence: Synthetic oligonucleotide
  Sense strand starting at position 3040 of SEQ ID NO: 916959
guucuuugauaucuaauga

SEQ ID NO: 1197485 - RNA, 19 nt, Artificial Sequence
  Description of Artificial Sequence: Synthetic oligonucleotide
  Antisense strand to SEQ ID NO: 1197484
ucauuagauaucaaagaac

SEQ ID NO: 1197486 - RNA, 19 nt, Artificial Sequence
  Description of Artificial Sequence: Synthetic oligonucleotide
  Sense strand starting at position 3079 of SEQ ID NO: 916959
aguuccuuccaccaguaaa

SEQ ID NO: 1197487 - RNA, 19 nt, Artificial Sequence
  Description of Artificial Sequence: Synthetic oligonucleotide
  Antisense strand to SEQ ID NO: 1197486
uuuacugguggaaggaacu

SEQ ID NO: 1197488 - RNA, 19 nt, Artificial Sequence
  Description of Artificial Sequence: Synthetic oligonucleotide
  Sense strand starting at position 3106 of SEQ ID NO: 916959
cucaaaguugugggaguga

SEQ ID NO: 1197489 - RNA, 19 nt, Artificial Sequence
  Description of Artificial Sequence: Synthetic oligonucleotide
  Antisense strand to SEQ ID NO: 1197488
ucacucccacaacuuugag

SEQ ID NO: 1197490 - RNA, 19 nt, Artificial Sequence
  Description of Artificial Sequence: Synthetic oligonucleotide
  Sense strand starting at position 3111 of SEQ ID NO: 916959
aguugugggagugauuaac

SEQ ID NO: 1197491 - RNA, 19 nt, Artificial Sequence
  Description of Artificial Sequence: Synthetic oligonucleotide
  Antisense strand to SEQ ID NO: 1197490
guuaaucacucccacaacu

SEQ ID NO: 1197492 - RNA, 19 nt, Artificial Sequence
  Description of Artificial Sequence: Synthetic oligonucleotide
  Sense strand starting at position 3350 of SEQ ID NO: 916959
agacaauuauuugaguacu

SEQ ID NO: 1197493 - RNA, 19 nt, Artificial Sequence
  Description of Artificial Sequence: Synthetic oligonucleotide
  Antisense strand to SEQ ID NO: 1197492
aguacucaaauaauugucu

SEQ ID NO: 1197494 - RNA, 19 nt, Artificial Sequence
  Description of Artificial Sequence: Synthetic oligonucleotide
  Sense strand starting at position 3356 of SEQ ID NO: 916959
uuauuugaguacuugcuuu

SEQ ID NO: 1197495 - RNA, 19 nt, Artificial Sequence
  Description of Artificial Sequence: Synthetic oligonucleotide
  Antisense strand to SEQ ID NO: 1197494
aaagcaaguacucaaauaa

SEQ ID NO: 1197496 - RNA, 19 nt, Artificial Sequence
  Description of Artificial Sequence: Synthetic oligonucleotide
  Sense strand starting at position 3445 of SEQ ID NO: 916959
gauagaaguuaugcaugau

SEQ ID NO: 1197497 - RNA, 19 nt, Artificial Sequence
  Description of Artificial Sequence: Synthetic oligonucleotide
  Antisense strand to SEQ ID NO: 1197496
aucaugcauaacuucuauc

SEQ ID NO: 1197498 - RNA, 19 nt, Artificial Sequence
  Description of Artificial Sequence: Synthetic oligonucleotide
  Sense strand starting at position 3448 of SEQ ID NO: 916959
agaaguuaugcaugauuau

SEQ ID NO: 1197499 - RNA, 19 nt, Artificial Sequence
  Description of Artificial Sequence: Synthetic oligonucleotide
  Antisense strand to SEQ ID NO: 1197498
auaaucaugcauaacuucu

SEQ ID NO: 1197500 - RNA, 19 nt, Artificial Sequence
  Description of Artificial Sequence: Synthetic oligonucleotide
  Sense strand starting at position 3449 of SEQ ID NO: 916959
gaaguuaugcaugauuaua

SEQ ID NO: 1197501 - RNA, 19 nt, Artificial Sequence
  Description of Artificial Sequence: Synthetic oligonucleotide
  Antisense strand to SEQ ID NO: 1197500
uauaaucaugcauaacuuc

SEQ ID NO: 1197502 - RNA, 19 nt, Artificial Sequence
  Description of Artificial Sequence: Synthetic oligonucleotide
  Sense strand starting at position 3541 of SEQ ID NO: 916959
guaaaucuucugcagagcu

SEQ ID NO: 1197503 - RNA, 19 nt, Artificial Sequence
  Description of Artificial Sequence: Synthetic oligonucleotide
  Antisense strand to SEQ ID NO: 1197502
agcucugcagaagauuuac

SEQ ID NO: 1197504 - RNA, 19 nt, Artificial Sequence
  Description of Artificial Sequence: Synthetic oligonucleotide
  Sense strand starting at position 3796 of SEQ ID NO: 916959
gcaggaggauugguagagu

SEQ ID NO: 1197505 - RNA, 19 nt, Artificial Sequence
  Description of Artificial Sequence: Synthetic oligonucleotide
  Antisense strand to SEQ ID NO: 1197504
acucuaccaauccuccugc

SEQ ID NO: 1197506 - RNA, 19 nt, Artificial Sequence
  Description of Artificial Sequence: Synthetic oligonucleotide
  Sense strand starting at position 3865 of SEQ ID NO: 916959
gugauagacugaucucuau

SEQ ID NO: 1197507 - RNA, 19 nt, Artificial Sequence
  Description of Artificial Sequence: Synthetic oligonucleotide
  Antisense strand to SEQ ID NO: 1197506
auagagaucagucuaucac

SEQ ID NO: 1197508 - RNA, 19 nt, Artificial Sequence
  Description of Artificial Sequence: Synthetic oligonucleotide
  Sense strand starting at position 80 of SEQ ID NO: 916960
guuacagacacgugaagua

SEQ ID NO: 1197509 - RNA, 19 nt, Artificial Sequence
  Description of Artificial Sequence: Synthetic oligonucleotide
  Antisense strand to SEQ ID NO: 1197508
uacuucacgugucuguaac

SEQ ID NO: 1197510 - RNA, 19 nt, Artificial Sequence
  Description of Artificial Sequence: Synthetic oligonucleotide
  Sense strand starting at position 93 of SEQ ID NO: 916960
gaaguagugugggcaaaca

SEQ ID NO: 1197511 - RNA, 19 nt, Artificial Sequence
  Description of Artificial Sequence: Synthetic oligonucleotide
  Antisense strand to SEQ ID NO: 1197510
uguuugcccacacuacuuc

SEQ ID NO: 1197512 - RNA, 19 nt, Artificial Sequence
  Description of Artificial Sequence: Synthetic oligonucleotide
  Sense strand starting at position 319 of SEQ ID NO: 916960
ggguuugaagagugaguuu

SEQ ID NO: 1197513 - RNA, 19 nt, Artificial Sequence
  Description of Artificial Sequence: Synthetic oligonucleotide
  Antisense strand to SEQ ID NO: 1197512
aaacucacucuucaaaccc

SEQ ID NO: 1197514 - RNA, 19 nt, Artificial Sequence
  Description of Artificial Sequence: Synthetic oligonucleotide
  Sense strand starting at position 381 of SEQ ID NO: 916960
cagggaugucugugcucca

SEQ ID NO: 1197515 - RNA, 19 nt, Artificial Sequence
  Description of Artificial Sequence: Synthetic oligonucleotide
  Antisense strand to SEQ ID NO: 1197514
uggagcacagacaucccug

SEQ ID NO: 1197516 - RNA, 19 nt, Artificial Sequence
  Description of Artificial Sequence: Synthetic oligonucleotide
  Sense strand starting at position 386 of SEQ ID NO: 916960
augucugugcuccacugaa

SEQ ID NO: 1197517 - RNA, 19 nt, Artificial Sequence
  Description of Artificial Sequence: Synthetic oligonucleotide
  Antisense strand to SEQ ID NO: 1197516
uucaguggagcacagacau

SEQ ID NO: 1197518 - RNA, 19 nt, Artificial Sequence
  Description of Artificial Sequence: Synthetic oligonucleotide
  Sense strand starting at position 410 of SEQ ID NO: 916960
cugucuguucgggagggaa

SEQ ID NO: 1197519 - RNA, 19 nt, Artificial Sequence
  Description of Artificial Sequence: Synthetic oligonucleotide
  Antisense strand to SEQ ID NO: 1197518
uucccucccgaacagacag

SEQ ID NO: 1197520 - RNA, 19 nt, Artificial Sequence
  Description of Artificial Sequence: Synthetic oligonucleotide
  Sense strand starting at position 446 of SEQ ID NO: 916960
augcaagacccaugcagau

SEQ ID NO: 1197521 - RNA, 19 nt, Artificial Sequence
  Description of Artificial Sequence: Synthetic oligonucleotide
  Antisense strand to SEQ ID NO: 1197520
aucugcaugggucuugcau

SEQ ID NO: 1197522 - RNA, 19 nt, Artificial Sequence
  Description of Artificial Sequence: Synthetic oligonucleotide
  Sense strand starting at position 503 of SEQ ID NO: 916960
ccuggaagucugugcauac

SEQ ID NO: 1197523 - RNA, 19 nt, Artificial Sequence
  Description of Artificial Sequence: Synthetic oligonucleotide
  Antisense strand to SEQ ID NO: 1197522
guaugcacagacuuccagg

SEQ ID NO: 1197524 - RNA, 19 nt, Artificial Sequence
  Description of Artificial Sequence: Synthetic oligonucleotide
  Sense strand starting at position 504 of SEQ ID NO: 916960
cuggaagucugugcauaca

SEQ ID NO: 1197525 - RNA, 19 nt, Artificial Sequence
  Description of Artificial Sequence: Synthetic oligonucleotide
  Antisense strand to SEQ ID NO: 1197524
uguaugcacagacuuccag

SEQ ID NO: 1197526 - RNA, 19 nt, Artificial Sequence
  Description of Artificial Sequence: Synthetic oligonucleotide
  Sense strand starting at position 993 of SEQ ID NO: 916960
augcuugucccaggaauga

SEQ ID NO: 1197527 - RNA, 19 nt, Artificial Sequence
  Description of Artificial Sequence: Synthetic oligonucleotide
  Antisense strand to SEQ ID NO: 1197526
ucauuccugggacaagcau

SEQ ID NO: 1197528 - RNA, 19 nt, Artificial Sequence
  Description of Artificial Sequence: Synthetic oligonucleotide
  Sense strand starting at position 1470 of SEQ ID NO: 916960
ugugaaagguucuccuaga

SEQ ID NO: 1197529 - RNA, 19 nt, Artificial Sequence
  Description of Artificial Sequence: Synthetic oligonucleotide
  Antisense strand to SEQ ID NO: 1197528
ucuaggagaaccuuucaca

SEQ ID NO: 1197530 - RNA, 19 nt, Artificial Sequence
  Description of Artificial Sequence: Synthetic oligonucleotide
  Sense strand starting at position 1471 of SEQ ID NO: 916960
gugaaagguucuccuagaa

SEQ ID NO: 1197531 - RNA, 19 nt, Artificial Sequence
  Description of Artificial Sequence: Synthetic oligonucleotide
  Antisense strand to SEQ ID NO: 1197530
uucuaggagaaccuuucac

SEQ ID NO: 1197532 - RNA, 19 nt, Artificial Sequence
  Description of Artificial Sequence: Synthetic oligonucleotide
  Sense strand starting at position 1656 of SEQ ID NO: 916960
uucuaccagcgcuaucaaa

SEQ ID NO: 1197533 - RNA, 19 nt, Artificial Sequence
  Description of Artificial Sequence: Synthetic oligonucleotide
  Antisense strand to SEQ ID NO: 1197532
uuugauagcgcugguagaa

SEQ ID NO: 1197534 - RNA, 19 nt, Artificial Sequence
  Description of Artificial Sequence: Synthetic oligonucleotide
  Sense strand starting at position 1739 of SEQ ID NO: 916960
gagggugucucgguuucaa

SEQ ID NO: 1197535 - RNA, 19 nt, Artificial Sequence
  Description of Artificial Sequence: Synthetic oligonucleotide
  Antisense strand to SEQ ID NO: 1197534
uugaaaccgagacacccuc

SEQ ID NO: 1197536 - RNA, 19 nt, Artificial Sequence
  Description of Artificial Sequence: Synthetic oligonucleotide
  Sense strand starting at position 2076 of SEQ ID NO: 916960
gcucuuugacgcuuucgga

SEQ ID NO: 1197537 - RNA, 19 nt, Artificial Sequence
  Description of Artificial Sequence: Synthetic oligonucleotide
  Antisense strand to SEQ ID NO: 1197536
uccgaaagcgucaaagagc

SEQ ID NO: 1197538 - RNA, 19 nt, Artificial Sequence
  Description of Artificial Sequence: Synthetic oligonucleotide
  Sense strand starting at position 2162 of SEQ ID NO: 916960
aaagaaggugucggaaacu

SEQ ID NO: 1197539 - RNA, 19 nt, Artificial Sequence
  Description of Artificial Sequence: Synthetic oligonucleotide
  Antisense strand to SEQ ID NO: 1197538
aguuuccgacaccuucuuu

SEQ ID NO: 1197540 - RNA, 19 nt, Artificial Sequence
  Description of Artificial Sequence: Synthetic oligonucleotide
  Sense strand starting at position 2213 of SEQ ID NO: 916960
cuguccugugaauauguca

SEQ ID NO: 1197541 - RNA, 19 nt, Artificial Sequence
  Description of Artificial Sequence: Synthetic oligonucleotide
  Antisense strand to SEQ ID NO: 1197540
ugacauauucacaggacag

SEQ ID NO: 1197542 - RNA, 19 nt, Artificial Sequence
  Description of Artificial Sequence: Synthetic oligonucleotide
  Sense strand starting at position 2216 of SEQ ID NO: 916960
uccugugaauaugucaaca

SEQ ID NO: 1197543 - RNA, 19 nt, Artificial Sequence
  Description of Artificial Sequence: Synthetic oligonucleotide
  Antisense strand to SEQ ID NO: 1197542
uguugacauauucacagga

SEQ ID NO: 1197544 - RNA, 19 nt, Artificial Sequence
  Description of Artificial Sequence: Synthetic oligonucleotide
  Sense strand starting at position 2292 of SEQ ID NO: 916960
guggcuuaucgagagaucg

SEQ ID NO: 1197545 - RNA, 19 nt, Artificial Sequence
  Description of Artificial Sequence: Synthetic oligonucleotide
  Antisense strand to SEQ ID NO: 1197544
cgaucucucgauaagccac

SEQ ID NO: 1197546 - RNA, 19 nt, Artificial Sequence
  Description of Artificial Sequence: Synthetic oligonucleotide
  Sense strand starting at position 2294 of SEQ ID NO: 916960
ggcuuaucgagagaucgcu

SEQ ID NO: 1197547 - RNA, 19 nt, Artificial Sequence
  Description of Artificial Sequence: Synthetic oligonucleotide
  Antisense strand to SEQ ID NO: 1197546
agcgaucucucgauaagcc

SEQ ID NO: 1197548 - RNA, 19 nt, Artificial Sequence
  Description of Artificial Sequence: Synthetic oligonucleotide
  Sense strand starting at position 2354 of SEQ ID NO: 916960
ucugaaaugccucagucau

SEQ ID NO: 1197549 - RNA, 19 nt, Artificial Sequence
  Description of Artificial Sequence: Synthetic oligonucleotide
  Antisense strand to SEQ ID NO: 1197548
augacugaggcauuucaga

SEQ ID NO: 1197550 - RNA, 19 nt, Artificial Sequence
  Description of Artificial Sequence: Synthetic oligonucleotide
  Sense strand starting at position 2887 of SEQ ID NO: 916960
guguaucuguacucgaaca

SEQ ID NO: 1197551 - RNA, 19 nt, Artificial Sequence
  Description of Artificial Sequence: Synthetic oligonucleotide
  Antisense strand to SEQ ID NO: 1197550
uguucgaguacagauacac

SEQ ID NO: 1197552 - RNA, 19 nt, Artificial Sequence
  Description of Artificial Sequence: Synthetic oligonucleotide
  Sense strand starting at position 3117 of SEQ ID NO: 916960
aauggaggaucuggacaaa

SEQ ID NO: 1197553 - RNA, 19 nt, Artificial Sequence
  Description of Artificial Sequence: Synthetic oligonucleotide
  Antisense strand to SEQ ID NO: 1197552
uuuguccagauccuccauu

SEQ ID NO: 1197554 - RNA, 19 nt, Artificial Sequence
  Description of Artificial Sequence: Synthetic oligonucleotide
  Sense strand starting at position 3145 of SEQ ID NO: 916960
gcgagagacuggguucuga

SEQ ID NO: 1197555 - RNA, 19 nt, Artificial Sequence
  Description of Artificial Sequence: Synthetic oligonucleotide
  Antisense strand to SEQ ID NO: 1197554
ucagaacccagucucucgc

SEQ ID NO: 1197556 - RNA, 19 nt, Artificial Sequence
  Description of Artificial Sequence: Synthetic oligonucleotide
  Sense strand starting at position 3262 of SEQ ID NO: 916960
cugguaucuucucuaggca

SEQ ID NO: 1197557 - RNA, 19 nt, Artificial Sequence
  Description of Artificial Sequence: Synthetic oligonucleotide
  Antisense strand to SEQ ID NO: 1197556
ugccuagagaagauaccag

SEQ ID NO: 1197558 - RNA, 19 nt, Artificial Sequence
  Description of Artificial Sequence: Synthetic oligonucleotide
  Sense strand starting at position 3263 of SEQ ID NO: 916960
ugguaucuucucuaggcau

SEQ ID NO: 1197559 - RNA, 19 nt, Artificial Sequence
  Description of Artificial Sequence: Synthetic oligonucleotide
  Antisense strand to SEQ ID NO: 1197558
augccuagagaagauacca

SEQ ID NO: 1197560 - RNA, 19 nt, Artificial Sequence
  Description of Artificial Sequence: Synthetic oligonucleotide
  Sense strand starting at position 3324 of SEQ ID NO: 916960
gacuuaaucuggccagaag

SEQ ID NO: 1197561 - RNA, 19 nt, Artificial Sequence
  Description of Artificial Sequence: Synthetic oligonucleotide
  Antisense strand to SEQ ID NO: 1197560
cuucuggccagauuaaguc

SEQ ID NO: 1197562 - RNA, 19 nt, Artificial Sequence
  Description of Artificial Sequence: Synthetic oligonucleotide
  Sense strand starting at position 3325 of SEQ ID NO: 916960
acuuaaucuggccagaagu

SEQ ID NO: 1197563 - RNA, 19 nt, Artificial Sequence
  Description of Artificial Sequence: Synthetic oligonucleotide
  Antisense strand to SEQ ID NO: 1197562
acuucuggccagauuaagu

SEQ ID NO: 1197564 - RNA, 19 nt, Artificial Sequence
  Description of Artificial Sequence: Synthetic oligonucleotide
  Sense strand starting at position 3470 of SEQ ID NO: 916960
cuuaccaaucgccgaauua

SEQ ID NO: 1197565 - RNA, 19 nt, Artificial Sequence
  Description of Artificial Sequence: Synthetic oligonucleotide
  Antisense strand to SEQ ID NO: 1197564
uaauucggcgauugguaag

SEQ ID NO: 1197566 - RNA, 19 nt, Artificial Sequence
  Description of Artificial Sequence: Synthetic oligonucleotide
  Sense strand starting at position 3559 of SEQ ID NO: 916960
ggccaaugucuuggaccau

SEQ ID NO: 1197567 - RNA, 19 nt, Artificial Sequence
  Description of Artificial Sequence: Synthetic oligonucleotide
  Antisense strand to SEQ ID NO: 1197566
augguccaagacauuggcc

SEQ ID NO: 1197568 - RNA, 19 nt, Artificial Sequence
  Description of Artificial Sequence: Synthetic oligonucleotide
  Sense strand starting at position 3571 of SEQ ID NO: 916960
ggaccauccuugcuuagau

SEQ ID NO: 1197569 - RNA, 19 nt, Artificial Sequence
  Description of Artificial Sequence: Synthetic oligonucleotide
  Antisense strand to SEQ ID NO: 1197568
aucuaagcaaggauggucc

SEQ ID NO: 1197570 - RNA, 19 nt, Artificial Sequence
  Description of Artificial Sequence: Synthetic oligonucleotide
  Sense strand starting at position 3572 of SEQ ID NO: 916960
gaccauccuugcuuagaug

SEQ ID NO: 1197571 - RNA, 19 nt, Artificial Sequence
  Description of Artificial Sequence: Synthetic oligonucleotide
  Antisense strand to SEQ ID NO: 1197570
caucuaagcaaggaugguc

SEQ ID NO: 1197572 - RNA, 19 nt, Artificial Sequence
  Description of Artificial Sequence: Synthetic oligonucleotide
  Sense strand starting at position 3581 of SEQ ID NO: 916960
ugcuuagauggagggaaau

SEQ ID NO: 1197573 - RNA, 19 nt, Artificial Sequence
  Description of Artificial Sequence: Synthetic oligonucleotide
  Antisense strand to SEQ ID NO: 1197572
auuucccuccaucuaagca

SEQ ID NO: 1197574 - RNA, 19 nt, Artificial Sequence
  Description of Artificial Sequence: Synthetic oligonucleotide
  Sense strand starting at position 3631 of SEQ ID NO: 916960
gaugaaagcuucuucgaug

SEQ ID NO: 1197575 - RNA, 19 nt, Artificial Sequence
  Description of Artificial Sequence: Synthetic oligonucleotide
  Antisense strand to SEQ ID NO: 1197574
caucgaagaagcuuucauc

SEQ ID NO: 1197576 - RNA, 19 nt, Artificial Sequence
  Description of Artificial Sequence: Synthetic oligonucleotide
  Sense strand starting at position 3636 of SEQ ID NO: 916960
aagcuucuucgauggaaag

SEQ ID NO: 1197577 - RNA, 19 nt, Artificial Sequence
  Description of Artificial Sequence: Synthetic oligonucleotide
  Antisense strand to SEQ ID NO: 1197576
cuuuccaucgaagaagcuu

SEQ ID NO: 1197578 - RNA, 19 nt, Artificial Sequence
  Description of Artificial Sequence: Synthetic oligonucleotide
  Sense strand starting at position 3839 of SEQ ID NO: 916960
ggccaaccacgcugagaua

SEQ ID NO: 1197579 - RNA, 19 nt, Artificial Sequence
  Description of Artificial Sequence: Synthetic oligonucleotide
  Antisense strand to SEQ ID NO: 1197578
uaucucagcgugguuggcc

SEQ ID NO: 1197580 - RNA, 19 nt, Artificial Sequence
  Description of Artificial Sequence: Synthetic oligonucleotide
  Sense strand starting at position 3904 of SEQ ID NO: 916960
gacgcacaugguuaagaga

SEQ ID NO: 1197581 - RNA, 19 nt, Artificial Sequence
  Description of Artificial Sequence: Synthetic oligonucleotide
  Antisense strand to SEQ ID NO: 1197580
ucucuuaaccaugugcguc

SEQ ID NO: 1197582 - RNA, 19 nt, Artificial Sequence
  Description of Artificial Sequence: Synthetic oligonucleotide
  Sense strand starting at position 3935 of SEQ ID NO: 916960
cguugagaauucccugaag

SEQ ID NO: 1197583 - RNA, 19 nt, Artificial Sequence
  Description of Artificial Sequence: Synthetic oligonucleotide
  Antisense strand to SEQ ID NO: 1197582
cuucagggaauucucaacg

SEQ ID NO: 1197584 - RNA, 19 nt, Artificial Sequence
  Description of Artificial Sequence: Synthetic oligonucleotide
  Sense strand starting at position 3937 of SEQ ID NO: 916960
uugagaauucccugaaguc

SEQ ID NO: 1197585 - RNA, 19 nt, Artificial Sequence
  Description of Artificial Sequence: Synthetic oligonucleotide
  Antisense strand to SEQ ID NO: 1197584
gacuucagggaauucucaa

SEQ ID NO: 1197586 - RNA, 19 nt, Artificial Sequence
  Description of Artificial Sequence: Synthetic oligonucleotide
  Sense strand starting at position 3960 of SEQ ID NO: 916960
gagagaauagugugguucu

SEQ ID NO: 1197587 - RNA, 19 nt, Artificial Sequence
  Description of Artificial Sequence: Synthetic oligonucleotide
  Antisense strand to SEQ ID NO: 1197586
agaaccacacuauucucuc

SEQ ID NO: 1197588 - RNA, 19 nt, Artificial Sequence
  Description of Artificial Sequence: Synthetic oligonucleotide
  Sense strand starting at position 422 of SEQ ID NO: 916961
gggugaguugaagagguca

SEQ ID NO: 1197589 - RNA, 19 nt, Artificial Sequence
  Description of Artificial Sequence: Synthetic oligonucleotide
  Antisense strand to SEQ ID NO: 1197588
ugaccucuucaacucaccc

SEQ ID NO: 1197590 - RNA, 19 nt, Artificial Sequence
  Description of Artificial Sequence: Synthetic oligonucleotide
  Sense strand starting at position 424 of SEQ ID NO: 916961
gugaguugaagaggucaau

SEQ ID NO: 1197591 - RNA, 19 nt, Artificial Sequence
  Description of Artificial Sequence: Synthetic oligonucleotide
  Antisense strand to SEQ ID NO: 1197590
auugaccucuucaacucac

SEQ ID NO: 1197592 - RNA, 19 nt, Artificial Sequence
  Description of Artificial Sequence: Synthetic oligonucleotide
  Sense strand starting at position 499 of SEQ ID NO: 916961
gaauauuggugcuuggagu

SEQ ID NO: 1197593 - RNA, 19 nt, Artificial Sequence
  Description of Artificial Sequence: Synthetic oligonucleotide
  Antisense strand to SEQ ID NO: 1197592
acuccaagcaccaauauuc

SEQ ID NO: 1197594 - RNA, 19 nt, Artificial Sequence
  Description of Artificial Sequence: Synthetic oligonucleotide
  Sense strand starting at position 500 of SEQ ID NO: 916961
aauauuggugcuuggagua

SEQ ID NO: 1197595 - RNA, 19 nt, Artificial Sequence
  Description of Artificial Sequence: Synthetic oligonucleotide
  Antisense strand to SEQ ID NO: 1197594
uacuccaagcaccaauauu

SEQ ID NO: 1197596 - RNA, 19 nt, Artificial Sequence
  Description of Artificial Sequence: Synthetic oligonucleotide
  Sense strand starting at position 505 of SEQ ID NO: 916961
uggugcuuggaguaaaugu

SEQ ID NO: 1197597 - RNA, 19 nt, Artificial Sequence
  Description of Artificial Sequence: Synthetic oligonucleotide
  Antisense strand to SEQ ID NO: 1197596
acauuuacuccaagcacca

SEQ ID NO: 1197598 - RNA, 19 nt, Artificial Sequence
  Description of Artificial Sequence: Synthetic oligonucleotide
  Sense strand starting at position 597 of SEQ ID NO: 916961
gagacuugggccugcaagu

SEQ ID NO: 1197599 - RNA, 19 nt, Artificial Sequence
  Description of Artificial Sequence: Synthetic oligonucleotide
  Antisense strand to SEQ ID NO: 1197598
acuugcaggcccaagucuc

SEQ ID NO: 1197600 - RNA, 19 nt, Artificial Sequence
  Description of Artificial Sequence: Synthetic oligonucleotide
  Sense strand starting at position 611 of SEQ ID NO: 916961
caagucaaggucuggagaa

SEQ ID NO: 1197601 - RNA, 19 nt, Artificial Sequence
  Description of Artificial Sequence: Synthetic oligonucleotide
  Antisense strand to SEQ ID NO: 1197600
uucuccagaccuugacuug

SEQ ID NO: 1197602 - RNA, 19 nt, Artificial Sequence
  Description of Artificial Sequence: Synthetic oligonucleotide
  Sense strand starting at position 668 of SEQ ID NO: 916961
uguguaacccucugugacu

SEQ ID NO: 1197603 - RNA, 19 nt, Artificial Sequence
  Description of Artificial Sequence: Synthetic oligonucleotide
  Antisense strand to SEQ ID NO: 1197602
agucacagaggguuacaca

SEQ ID NO: 1197604 - RNA, 19 nt, Artificial Sequence
  Description of Artificial Sequence: Synthetic oligonucleotide
  Sense strand starting at position 948 of SEQ ID NO: 916961
caaacauggcaucggaaga

SEQ ID NO: 1197605 - RNA, 19 nt, Artificial Sequence
  Description of Artificial Sequence: Synthetic oligonucleotide
  Antisense strand to SEQ ID NO: 1197604
ucuuccgaugccauguuug

SEQ ID NO: 1197606 - RNA, 19 nt, Artificial Sequence
  Description of Artificial Sequence: Synthetic oligonucleotide
  Sense strand starting at position 975 of SEQ ID NO: 916961
ccgcuacaucuccaguaga

SEQ ID NO: 1197607 - RNA, 19 nt, Artificial Sequence
  Description of Artificial Sequence: Synthetic oligonucleotide
  Antisense strand to SEQ ID NO: 1197606
ucuacuggagauguagcgg

SEQ ID NO: 1197608 - RNA, 19 nt, Artificial Sequence
  Description of Artificial Sequence: Synthetic oligonucleotide
  Sense strand starting at position 1026 of SEQ ID NO: 916961
cccuuuaaguucucagaga

SEQ ID NO: 1197609 - RNA, 19 nt, Artificial Sequence
  Description of Artificial Sequence: Synthetic oligonucleotide
  Antisense strand to SEQ ID NO: 1197608
ucucugagaacuuaaaggg

SEQ ID NO: 1197610 - RNA, 19 nt, Artificial Sequence
  Description of Artificial Sequence: Synthetic oligonucleotide
  Sense strand starting at position 1104 of SEQ ID NO: 916961
uggacucucccagguaaua

SEQ ID NO: 1197611 - RNA, 19 nt, Artificial Sequence
  Description of Artificial Sequence: Synthetic oligonucleotide
  Antisense strand to SEQ ID NO: 1197610
uauuaccugggagagucca

SEQ ID NO: 1197612 - RNA, 19 nt, Artificial Sequence
  Description of Artificial Sequence: Synthetic oligonucleotide
  Sense strand starting at position 1128 of SEQ ID NO: 916961
gccagauuugcuuagcuca

SEQ ID NO: 1197613 - RNA, 19 nt, Artificial Sequence
  Description of Artificial Sequence: Synthetic oligonucleotide
  Antisense strand to SEQ ID NO: 1197612
ugagcuaagcaaaucuggc

SEQ ID NO: 1197614 - RNA, 19 nt, Artificial Sequence
  Description of Artificial Sequence: Synthetic oligonucleotide
  Sense strand starting at position 1140 of SEQ ID NO: 916961
uagcucauugagcacagau

SEQ ID NO: 1197615 - RNA, 19 nt, Artificial Sequence
  Description of Artificial Sequence: Synthetic oligonucleotide
  Antisense strand to SEQ ID NO: 1197614
aucugugcucaaugagcua

SEQ ID NO: 1197616 - RNA, 19 nt, Artificial Sequence
  Description of Artificial Sequence: Synthetic oligonucleotide
  Sense strand starting at position 1208 of SEQ ID NO: 916961
ccauucuugccaggugaca

SEQ ID NO: 1197617 - RNA, 19 nt, Artificial Sequence
  Description of Artificial Sequence: Synthetic oligonucleotide
  Antisense strand to SEQ ID NO: 1197616
ugucaccuggcaagaaugg

SEQ ID NO: 1197618 - RNA, 19 nt, Artificial Sequence
  Description of Artificial Sequence: Synthetic oligonucleotide
  Sense strand starting at position 1347 of SEQ ID NO: 916961
cucaguccuccagggugaa

SEQ ID NO: 1197619 - RNA, 19 nt, Artificial Sequence
  Description of Artificial Sequence: Synthetic oligonucleotide
  Antisense strand to SEQ ID NO: 1197618
uucacccuggaggacugag

SEQ ID NO: 1197620 - RNA, 19 nt, Artificial Sequence
  Description of Artificial Sequence: Synthetic oligonucleotide
  Sense strand starting at position 1348 of SEQ ID NO: 916961
ucaguccuccagggugaaa

SEQ ID NO: 1197621 - RNA, 19 nt, Artificial Sequence
  Description of Artificial Sequence: Synthetic oligonucleotide
  Antisense strand to SEQ ID NO: 1197620
uuucacccuggaggacuga

SEQ ID NO: 1197622 - RNA, 19 nt, Artificial Sequence
  Description of Artificial Sequence: Synthetic oligonucleotide
  Sense strand starting at position 1359 of SEQ ID NO: 916961
gggugaaacucaccuccaa

SEQ ID NO: 1197623 - RNA, 19 nt, Artificial Sequence
  Description of Artificial Sequence: Synthetic oligonucleotide
  Antisense strand to SEQ ID NO: 1197622
uuggaggugaguuucaccc

SEQ ID NO: 1197624 - RNA, 19 nt, Artificial Sequence
  Description of Artificial Sequence: Synthetic oligonucleotide
  Sense strand starting at position 1493 of SEQ ID NO: 916961
cuuccaacgucugucaaga

SEQ ID NO: 1197625 - RNA, 19 nt, Artificial Sequence
  Description of Artificial Sequence: Synthetic oligonucleotide
  Antisense strand to SEQ ID NO: 1197624
ucuugacagacguuggaag

SEQ ID NO: 1197626 - RNA, 19 nt, Artificial Sequence
  Description of Artificial Sequence: Synthetic oligonucleotide
  Sense strand starting at position 1543 of SEQ ID NO: 916961
uguggucuccgacaaauua

SEQ ID NO: 1197627 - RNA, 19 nt, Artificial Sequence
  Description of Artificial Sequence: Synthetic oligonucleotide
  Antisense strand to SEQ ID NO: 1197626
uaauuugucggagaccaca

SEQ ID NO: 1197628 - RNA, 19 nt, Artificial Sequence
  Description of Artificial Sequence: Synthetic oligonucleotide
  Sense strand starting at position 1570 of SEQ ID NO: 916961
uguuuauuaccaggcauac

SEQ ID NO: 1197629 - RNA, 19 nt, Artificial Sequence
  Description of Artificial Sequence: Synthetic oligonucleotide
  Antisense strand to SEQ ID NO: 1197628
guaugccugguaauaaaca

SEQ ID NO: 1197630 - RNA, 19 nt, Artificial Sequence
  Description of Artificial Sequence: Synthetic oligonucleotide
  Sense strand starting at position 1613 of SEQ ID NO: 916961
ggcgauagcgacuaucuca

SEQ ID NO: 1197631 - RNA, 19 nt, Artificial Sequence
  Description of Artificial Sequence: Synthetic oligonucleotide
  Antisense strand to SEQ ID NO: 1197630
ugagauagucgcuaucgcc

SEQ ID NO: 1197632 - RNA, 19 nt, Artificial Sequence
  Description of Artificial Sequence: Synthetic oligonucleotide
  Sense strand starting at position 1720 of SEQ ID NO: 916961
gagguaaauuucucuccgu

SEQ ID NO: 1197633 - RNA, 19 nt, Artificial Sequence
  Description of Artificial Sequence: Synthetic oligonucleotide
  Antisense strand to SEQ ID NO: 1197632
acggagagaaauuuaccuc

SEQ ID NO: 1197634 - RNA, 19 nt, Artificial Sequence
  Description of Artificial Sequence: Synthetic oligonucleotide
  Sense strand starting at position 1723 of SEQ ID NO: 916961
guaaauuucucuccgucuu

SEQ ID NO: 1197635 - RNA, 19 nt, Artificial Sequence
  Description of Artificial Sequence: Synthetic oligonucleotide
  Antisense strand to SEQ ID NO: 1197634
aagacggagagaaauuuac

SEQ ID NO: 1197636 - RNA, 19 nt, Artificial Sequence
  Description of Artificial Sequence: Synthetic oligonucleotide
  Sense strand starting at position 1939 of SEQ ID NO: 916961
agaccucuauuggaaggaa

SEQ ID NO: 1197637 - RNA, 19 nt, Artificial Sequence
  Description of Artificial Sequence: Synthetic oligonucleotide
  Antisense strand to SEQ ID NO: 1197636
uuccuuccaauagaggucu

SEQ ID NO: 1197638 - RNA, 19 nt, Artificial Sequence
  Description of Artificial Sequence: Synthetic oligonucleotide
  Sense strand starting at position 1980 of SEQ ID NO: 916961
aggucucuugcauaaggca

SEQ ID NO: 1197639 - RNA, 19 nt, Artificial Sequence
  Description of Artificial Sequence: Synthetic oligonucleotide
  Antisense strand to SEQ ID NO: 1197638
ugccuuaugcaagagaccu

SEQ ID NO: 1197640 - RNA, 19 nt, Artificial Sequence
  Description of Artificial Sequence: Synthetic oligonucleotide
  Sense strand starting at position 1998 of SEQ ID NO: 916961
augggauccuuauuauuau

SEQ ID NO: 1197641 - RNA, 19 nt, Artificial Sequence
  Description of Artificial Sequence: Synthetic oligonucleotide
  Antisense strand to SEQ ID NO: 1197640
auaauaauaaggaucccau

SEQ ID NO: 1197642 - RNA, 19 nt, Artificial Sequence
  Description of Artificial Sequence: Synthetic oligonucleotide
  Sense strand starting at position 2041 of SEQ ID NO: 916961
ggaggagcucugggcaaau

SEQ ID NO: 1197643 - RNA, 19 nt, Artificial Sequence
  Description of Artificial Sequence: Synthetic oligonucleotide
  Antisense strand to SEQ ID NO: 1197642
auuugcccagagcuccucc

SEQ ID NO: 1197644 - RNA, 19 nt, Artificial Sequence
  Description of Artificial Sequence: Synthetic oligonucleotide
  Sense strand starting at position 2086 of SEQ ID NO: 916961
uuaggcuugggaugcgaua

SEQ ID NO: 1197645 - RNA, 19 nt, Artificial Sequence
  Description of Artificial Sequence: Synthetic oligonucleotide
  Antisense strand to SEQ ID NO: 1197644
uaucgcaucccaagccuaa

SEQ ID NO: 1197646 - RNA, 19 nt, Artificial Sequence
  Description of Artificial Sequence: Synthetic oligonucleotide
  Sense strand starting at position 2119 of SEQ ID NO: 916961
ugcagacuugcauagaaau

SEQ ID NO: 1197647 - RNA, 19 nt, Artificial Sequence
  Description of Artificial Sequence: Synthetic oligonucleotide
  Antisense strand to SEQ ID NO: 1197646
auuucuaugcaagucugca

SEQ ID NO: 1197648 - RNA, 19 nt, Artificial Sequence
  Description of Artificial Sequence: Synthetic oligonucleotide
  Sense strand starting at position 2172 of SEQ ID NO: 916961
gagggaguucuccguaaug

SEQ ID NO: 1197649 - RNA, 19 nt, Artificial Sequence
  Description of Artificial Sequence: Synthetic oligonucleotide
  Antisense strand to SEQ ID NO: 1197648
cauuacggagaacucccuc

SEQ ID NO: 1197650 - RNA, 19 nt, Artificial Sequence
  Description of Artificial Sequence: Synthetic oligonucleotide
  Sense strand starting at position 2174 of SEQ ID NO: 916961
gggaguucuccguaaugug

SEQ ID NO: 1197651 - RNA, 19 nt, Artificial Sequence
  Description of Artificial Sequence: Synthetic oligonucleotide
  Antisense strand to SEQ ID NO: 1197650
cacauuacggagaacuccc

SEQ ID NO: 1197652 - RNA, 19 nt, Artificial Sequence
  Description of Artificial Sequence: Synthetic oligonucleotide
  Sense strand starting at position 2183 of SEQ ID NO: 916961
ccguaaugugccuugcgga

SEQ ID NO: 1197653 - RNA, 19 nt, Artificial Sequence
  Description of Artificial Sequence: Synthetic oligonucleotide
  Antisense strand to SEQ ID NO: 1197652
uccgcaaggcacauuacgg

SEQ ID NO: 1197654 - RNA, 19 nt, Artificial Sequence
  Description of Artificial Sequence: Synthetic oligonucleotide
  Sense strand starting at position 2215 of SEQ ID NO: 916961
gaaugcaauucgucccaga

SEQ ID NO: 1197655 - RNA, 19 nt, Artificial Sequence
  Description of Artificial Sequence: Synthetic oligonucleotide
  Antisense strand to SEQ ID NO: 1197654
ucugggacgaauugcauuc

SEQ ID NO: 1197656 - RNA, 19 nt, Artificial Sequence
  Description of Artificial Sequence: Synthetic oligonucleotide
  Sense strand starting at position 2285 of SEQ ID NO: 916961
ggagagaggugguuucugu

SEQ ID NO: 1197657 - RNA, 19 nt, Artificial Sequence
  Description of Artificial Sequence: Synthetic oligonucleotide
  Antisense strand to SEQ ID NO: 1197656
acagaaaccaccucucucc

SEQ ID NO: 1197658 - RNA, 19 nt, Artificial Sequence
  Description of Artificial Sequence: Synthetic oligonucleotide
  Sense strand starting at position 2293 of SEQ ID NO: 916961
gugguuucuguagagaaua

SEQ ID NO: 1197659 - RNA, 19 nt, Artificial Sequence
  Description of Artificial Sequence: Synthetic oligonucleotide
  Antisense strand to SEQ ID NO: 1197658
uauucucuacagaaaccac

SEQ ID NO: 1197660 - RNA, 19 nt, Artificial Sequence
  Description of Artificial Sequence: Synthetic oligonucleotide
  Sense strand starting at position 2358 of SEQ ID NO: 916961
uuguaaucacgacgacuau

SEQ ID NO: 1197661 - RNA, 19 nt, Artificial Sequence
  Description of Artificial Sequence: Synthetic oligonucleotide
  Antisense strand to SEQ ID NO: 1197660
auagucgucgugauuacaa

SEQ ID NO: 1197662 - RNA, 19 nt, Artificial Sequence
  Description of Artificial Sequence: Synthetic oligonucleotide
  Sense strand starting at position 2359 of SEQ ID NO: 916961
uguaaucacgacgacuauu

SEQ ID NO: 1197663 - RNA, 19 nt, Artificial Sequence
  Description of Artificial Sequence: Synthetic oligonucleotide
  Antisense strand to SEQ ID NO: 1197662
aauagucgucgugauuaca

SEQ ID NO: 1197664 - RNA, 19 nt, Artificial Sequence
  Description of Artificial Sequence: Synthetic oligonucleotide
  Sense strand starting at position 2563 of SEQ ID NO: 916961
aggguaaguucuccgccaa

SEQ ID NO: 1197665 - RNA, 19 nt, Artificial Sequence
  Description of Artificial Sequence: Synthetic oligonucleotide
  Antisense strand to SEQ ID NO: 1197664
uuggcggagaacuuacccu

SEQ ID NO: 1197666 - RNA, 19 nt, Artificial Sequence
  Description of Artificial Sequence: Synthetic oligonucleotide
  Sense strand starting at position 2933 of SEQ ID NO: 916961
gcuguuaauaacgauaugu

SEQ ID NO: 1197667 - RNA, 19 nt, Artificial Sequence
  Description of Artificial Sequence: Synthetic oligonucleotide
  Antisense strand to SEQ ID NO: 1197666
acauaucguuauuaacagc

SEQ ID NO: 1197668 - RNA, 19 nt, Artificial Sequence
  Description of Artificial Sequence: Synthetic oligonucleotide
  Sense strand starting at position 71 of SEQ ID NO: 916962
gcaagcugcccgucaaauu

SEQ ID NO: 1197669 - RNA, 19 nt, Artificial Sequence
  Description of Artificial Sequence: Synthetic oligonucleotide
  Antisense strand to SEQ ID NO: 1197668
aauuugacgggcagcuugc

SEQ ID NO: 1197670 - RNA, 19 nt, Artificial Sequence
  Description of Artificial Sequence: Synthetic oligonucleotide
  Sense strand starting at position 72 of SEQ ID NO: 916962
caagcugcccgucaaauuu

SEQ ID NO: 1197671 - RNA, 19 nt, Artificial Sequence
  Description of Artificial Sequence: Synthetic oligonucleotide
  Antisense strand to SEQ ID NO: 1197670
aaauuugacgggcagcuug

SEQ ID NO: 1197672 - RNA, 19 nt, Artificial Sequence
  Description of Artificial Sequence: Synthetic oligonucleotide
  Sense strand starting at position 80 of SEQ ID NO: 916962
ccgucaaauuugucuggac

SEQ ID NO: 1197673 - RNA, 19 nt, Artificial Sequence
  Description of Artificial Sequence: Synthetic oligonucleotide
  Antisense strand to SEQ ID NO: 1197672
guccagacaaauuugacgg

SEQ ID NO: 1197674 - RNA, 19 nt, Artificial Sequence
  Description of Artificial Sequence: Synthetic oligonucleotide
  Sense strand starting at position 81 of SEQ ID NO: 916962
cgucaaauuugucuggacu

SEQ ID NO: 1197675 - RNA, 19 nt, Artificial Sequence
  Description of Artificial Sequence: Synthetic oligonucleotide
  Antisense strand to SEQ ID NO: 1197674
aguccagacaaauuugacg

SEQ ID NO: 1197676 - RNA, 19 nt, Artificial Sequence
  Description of Artificial Sequence: Synthetic oligonucleotide
  Sense strand starting at position 115 of SEQ ID NO: 916962
aaagauaaggcguggguau

SEQ ID NO: 1197677 - RNA, 19 nt, Artificial Sequence
  Description of Artificial Sequence: Synthetic oligonucleotide
  Antisense strand to SEQ ID NO: 1197676
auacccacgccuuaucuuu

SEQ ID NO: 1197678 - RNA, 19 nt, Artificial Sequence
  Description of Artificial Sequence: Synthetic oligonucleotide
  Sense strand starting at position 117 of SEQ ID NO: 916962
agauaaggcguggguauuu

SEQ ID NO: 1197679 - RNA, 19 nt, Artificial Sequence
  Description of Artificial Sequence: Synthetic oligonucleotide
  Antisense strand to SEQ ID NO: 1197678
aaauacccacgccuuaucu

SEQ ID NO: 1197680 - RNA, 19 nt, Artificial Sequence
  Description of Artificial Sequence: Synthetic oligonucleotide
  Sense strand starting at position 178 of SEQ ID NO: 916962
aacccaguguccuuuagag

SEQ ID NO: 1197681 - RNA, 19 nt, Artificial Sequence
  Description of Artificial Sequence: Synthetic oligonucleotide
  Antisense strand to SEQ ID NO: 1197680
cucuaaaggacacuggguu

SEQ ID NO: 1197682 - RNA, 19 nt, Artificial Sequence
  Description of Artificial Sequence: Synthetic oligonucleotide
  Sense strand starting at position 180 of SEQ ID NO: 916962
cccaguguccuuuagagaa

SEQ ID NO: 1197683 - RNA, 19 nt, Artificial Sequence
  Description of Artificial Sequence: Synthetic oligonucleotide
  Antisense strand to SEQ ID NO: 1197682
uucucuaaaggacacuggg

SEQ ID NO: 1197684 - RNA, 19 nt, Artificial Sequence
  Description of Artificial Sequence: Synthetic oligonucleotide
  Sense strand starting at position 278 of SEQ ID NO: 916962
ggcagaaaugugugaaaua

SEQ ID NO: 1197685 - RNA, 19 nt, Artificial Sequence
  Description of Artificial Sequence: Synthetic oligonucleotide
  Antisense strand to SEQ ID NO: 1197684
uauuucacacauuucugcc

SEQ ID NO: 1197686 - RNA, 19 nt, Artificial Sequence
  Description of Artificial Sequence: Synthetic oligonucleotide
  Sense strand starting at position 387 of SEQ ID NO: 916962
aguuacaggccuuaacauu

SEQ ID NO: 1197687 - RNA, 19 nt, Artificial Sequence
  Description of Artificial Sequence: Synthetic oligonucleotide
  Antisense strand to SEQ ID NO: 1197686
aauguuaaggccuguaacu

SEQ ID NO: 1197688 - RNA, 19 nt, Artificial Sequence
  Description of Artificial Sequence: Synthetic oligonucleotide
  Sense strand starting at position 667 of SEQ ID NO: 916962
caggauuggcgaggacaaa

SEQ ID NO: 1197689 - RNA, 19 nt, Artificial Sequence
  Description of Artificial Sequence: Synthetic oligonucleotide
  Antisense strand to SEQ ID NO: 1197688
uuuguccucgccaauccug

SEQ ID NO: 1197690 - RNA, 19 nt, Artificial Sequence
  Description of Artificial Sequence: Synthetic oligonucleotide
  Sense strand starting at position 695 of SEQ ID NO: 916962
ggauaaguccuaggcugga

SEQ ID NO: 1197691 - RNA, 19 nt, Artificial Sequence
  Description of Artificial Sequence: Synthetic oligonucleotide
  Antisense strand to SEQ ID NO: 1197690
uccagccuaggacuuaucc

SEQ ID NO: 1197692 - RNA, 19 nt, Artificial Sequence
  Description of Artificial Sequence: Synthetic oligonucleotide
  Sense strand starting at position 700 of SEQ ID NO: 916962
aguccuaggcuggagacau

SEQ ID NO: 1197693 - RNA, 19 nt, Artificial Sequence
  Description of Artificial Sequence: Synthetic oligonucleotide
  Antisense strand to SEQ ID NO: 1197692
augucuccagccuaggacu

SEQ ID NO: 1197694 - RNA, 19 nt, Artificial Sequence
  Description of Artificial Sequence: Synthetic oligonucleotide
  Sense strand starting at position 769 of SEQ ID NO: 916962
ggcguaugagcuuagaaca

SEQ ID NO: 1197695 - RNA, 19 nt, Artificial Sequence
  Description of Artificial Sequence: Synthetic oligonucleotide
  Antisense strand to SEQ ID NO: 1197694
uguucuaagcucauacgcc

SEQ ID NO: 1197696 - RNA, 19 nt, Artificial Sequence
  Description of Artificial Sequence: Synthetic oligonucleotide
  Sense strand starting at position 862 of SEQ ID NO: 916962
ucuauacgcaaguaggaau

SEQ ID NO: 1197697 - RNA, 19 nt, Artificial Sequence
  Description of Artificial Sequence: Synthetic oligonucleotide
  Antisense strand to SEQ ID NO: 1197696
auuccuacuugcguauaga

SEQ ID NO: 1197698 - RNA, 19 nt, Artificial Sequence
  Description of Artificial Sequence: Synthetic oligonucleotide
  Sense strand starting at position 1230 of SEQ ID NO: 916962
caagaugcgguuugacaga

SEQ ID NO: 1197699 - RNA, 19 nt, Artificial Sequence
  Description of Artificial Sequence: Synthetic oligonucleotide
  Antisense strand to SEQ ID NO: 1197698
ucugucaaaccgcaucuug

SEQ ID NO: 1197700 - RNA, 19 nt, Artificial Sequence
  Description of Artificial Sequence: Synthetic oligonucleotide
  Sense strand starting at position 1347 of SEQ ID NO: 916962
gcaagcugugcucugcaga

SEQ ID NO: 1197701 - RNA, 19 nt, Artificial Sequence
  Description of Artificial Sequence: Synthetic oligonucleotide
  Antisense strand to SEQ ID NO: 1197700
ucugcagagcacagcuugc

SEQ ID NO: 1197702 - RNA, 19 nt, Artificial Sequence
  Description of Artificial Sequence: Synthetic oligonucleotide
  Sense strand starting at position 1571 of SEQ ID NO: 916962
guuuacugcuuacccagaa

SEQ ID NO: 1197703 - RNA, 19 nt, Artificial Sequence
  Description of Artificial Sequence: Synthetic oligonucleotide
  Antisense strand to SEQ ID NO: 1197702
uucuggguaagcaguaaac

SEQ ID NO: 1197704 - RNA, 19 nt, Artificial Sequence
  Description of Artificial Sequence: Synthetic oligonucleotide
  Sense strand starting at position 1675 of SEQ ID NO: 916962
gugcgcuugcucucccuaa

SEQ ID NO: 1197705 - RNA, 19 nt, Artificial Sequence
  Description of Artificial Sequence: Synthetic oligonucleotide
  Antisense strand to SEQ ID NO: 1197704
uuagggagagcaagcgcac

SEQ ID NO: 1197706 - RNA, 19 nt, Artificial Sequence
  Description of Artificial Sequence: Synthetic oligonucleotide
  Sense strand starting at position 1677 of SEQ ID NO: 916962
gcgcuugcucucccuaaau

SEQ ID NO: 1197707 - RNA, 19 nt, Artificial Sequence
  Description of Artificial Sequence: Synthetic oligonucleotide
  Antisense strand to SEQ ID NO: 1197706
auuuagggagagcaagcgc

SEQ ID NO: 1197708 - RNA, 19 nt, Artificial Sequence
  Description of Artificial Sequence: Synthetic oligonucleotide
  Sense strand starting at position 1850 of SEQ ID NO: 916962
ggauuaaaguucccggauu

SEQ ID NO: 1197709 - RNA, 19 nt, Artificial Sequence
  Description of Artificial Sequence: Synthetic oligonucleotide
  Antisense strand to SEQ ID NO: 1197708
aauccgggaacuuuaaucc

SEQ ID NO: 1197710 - RNA, 19 nt, Artificial Sequence
  Description of Artificial Sequence: Synthetic oligonucleotide
  Sense strand starting at position 1862 of SEQ ID NO: 916962
ccggauucgagguaagagu

SEQ ID NO: 1197711 - RNA, 19 nt, Artificial Sequence
  Description of Artificial Sequence: Synthetic oligonucleotide
  Antisense strand to SEQ ID NO: 1197710
acucuuaccucgaauccgg

SEQ ID NO: 1197712 - RNA, 19 nt, Artificial Sequence
  Description of Artificial Sequence: Synthetic oligonucleotide
  Sense strand starting at position 1979 of SEQ ID NO: 916962
acugaaaucgccuauccaa

SEQ ID NO: 1197713 - RNA, 19 nt, Artificial Sequence
  Description of Artificial Sequence: Synthetic oligonucleotide
  Antisense strand to SEQ ID NO: 1197712
uuggauaggcgauuucagu

SEQ ID NO: 1197714 - RNA, 19 nt, Artificial Sequence
  Description of Artificial Sequence: Synthetic oligonucleotide
  Sense strand starting at position 2240 of SEQ ID NO: 916962
gcuucuaaucgggaaguaa

SEQ ID NO: 1197715 - RNA, 19 nt, Artificial Sequence
  Description of Artificial Sequence: Synthetic oligonucleotide
  Antisense strand to SEQ ID NO: 1197714
uuacuucccgauuagaagc

SEQ ID NO: 1197716 - RNA, 19 nt, Artificial Sequence
  Description of Artificial Sequence: Synthetic oligonucleotide
  Sense strand starting at position 2701 of SEQ ID NO: 916962
gggugaguugaagagguca

SEQ ID NO: 1197717 - RNA, 19 nt, Artificial Sequence
  Description of Artificial Sequence: Synthetic oligonucleotide
  Antisense strand to SEQ ID NO: 1197716
ugaccucuucaacucaccc

SEQ ID NO: 1197718 - RNA, 19 nt, Artificial Sequence
  Description of Artificial Sequence: Synthetic oligonucleotide
  Sense strand starting at position 2703 of SEQ ID NO: 916962
gugaguugaagaggucaau

SEQ ID NO: 1197719 - RNA, 19 nt, Artificial Sequence
  Description of Artificial Sequence: Synthetic oligonucleotide
  Antisense strand to SEQ ID NO: 1197718
auugaccucuucaacucac

SEQ ID NO: 1197720 - RNA, 19 nt, Artificial Sequence
  Description of Artificial Sequence: Synthetic oligonucleotide
  Sense strand starting at position 2778 of SEQ ID NO: 916962
gaauauuggugcuuggagu

SEQ ID NO: 1197721 - RNA, 19 nt, Artificial Sequence
  Description of Artificial Sequence: Synthetic oligonucleotide
  Antisense strand to SEQ ID NO: 1197720
acuccaagcaccaauauuc

SEQ ID NO: 1197722 - RNA, 19 nt, Artificial Sequence
  Description of Artificial Sequence: Synthetic oligonucleotide
  Sense strand starting at position 2779 of SEQ ID NO: 916962
aauauuggugcuuggagua

SEQ ID NO: 1197723 - RNA, 19 nt, Artificial Sequence
  Description of Artificial Sequence: Synthetic oligonucleotide
  Antisense strand to SEQ ID NO: 1197722
uacuccaagcaccaauauu

SEQ ID NO: 1197724 - RNA, 19 nt, Artificial Sequence
  Description of Artificial Sequence: Synthetic oligonucleotide
  Sense strand starting at position 2784 of SEQ ID NO: 916962
uggugcuuggaguaaaugu

SEQ ID NO: 1197725 - RNA, 19 nt, Artificial Sequence
  Description of Artificial Sequence: Synthetic oligonucleotide
  Antisense strand to SEQ ID NO: 1197724
acauuuacuccaagcacca

SEQ ID NO: 1197726 - RNA, 19 nt, Artificial Sequence
  Description of Artificial Sequence: Synthetic oligonucleotide
  Sense strand starting at position 2890 of SEQ ID NO: 916962
caagucaaggucuggagaa

SEQ ID NO: 1197727 - RNA, 19 nt, Artificial Sequence
  Description of Artificial Sequence: Synthetic oligonucleotide
  Antisense strand to SEQ ID NO: 1197726
uucuccagaccuugacuug

SEQ ID NO: 1197728 - RNA, 19 nt, Artificial Sequence
  Description of Artificial Sequence: Synthetic oligonucleotide
  Sense strand starting at position 3227 of SEQ ID NO: 916962
caaacauggcaucggaaga

SEQ ID NO: 1197729 - RNA, 19 nt, Artificial Sequence
  Description of Artificial Sequence: Synthetic oligonucleotide
  Antisense strand to SEQ ID NO: 1197728
ucuuccgaugccauguuug

SEQ ID NO: 1197730 - RNA, 19 nt, Artificial Sequence
  Description of Artificial Sequence: Synthetic oligonucleotide
  Sense strand starting at position 3254 of SEQ ID NO: 916962
ccgcuacaucuccaguaga

SEQ ID NO: 1197731 - RNA, 19 nt, Artificial Sequence
  Description of Artificial Sequence: Synthetic oligonucleotide
  Antisense strand to SEQ ID NO: 1197730
ucuacuggagauguagcgg

SEQ ID NO: 1197732 - RNA, 19 nt, Artificial Sequence
  Description of Artificial Sequence: Synthetic oligonucleotide
  Sense strand starting at position 3305 of SEQ ID NO: 916962
cccuuuaaguucucagaga

SEQ ID NO: 1197733 - RNA, 19 nt, Artificial Sequence
  Description of Artificial Sequence: Synthetic oligonucleotide
  Antisense strand to SEQ ID NO: 1197732
ucucugagaacuuaaaggg

SEQ ID NO: 1197734 - RNA, 19 nt, Artificial Sequence
  Description of Artificial Sequence: Synthetic oligonucleotide
  Sense strand starting at position 3383 of SEQ ID NO: 916962
uggacucucccagguaaua

SEQ ID NO: 1197735 - RNA, 19 nt, Artificial Sequence
  Description of Artificial Sequence: Synthetic oligonucleotide
  Antisense strand to SEQ ID NO: 1197734
uauuaccugggagagucca

SEQ ID NO: 1197736 - RNA, 19 nt, Artificial Sequence
  Description of Artificial Sequence: Synthetic oligonucleotide
  Sense strand starting at position 3407 of SEQ ID NO: 916962
gccagauuugcuuagcuca

SEQ ID NO: 1197737 - RNA, 19 nt, Artificial Sequence
  Description of Artificial Sequence: Synthetic oligonucleotide
  Antisense strand to SEQ ID NO: 1197736
ugagcuaagcaaaucuggc

SEQ ID NO: 1197738 - RNA, 19 nt, Artificial Sequence
  Description of Artificial Sequence: Synthetic oligonucleotide
  Sense strand starting at position 3419 of SEQ ID NO: 916962
uagcucauugagcacagau

SEQ ID NO: 1197739 - RNA, 19 nt, Artificial Sequence
  Description of Artificial Sequence: Synthetic oligonucleotide
  Antisense strand to SEQ ID NO: 1197738
aucugugcucaaugagcua

SEQ ID NO: 1197740 - RNA, 19 nt, Artificial Sequence
  Description of Artificial Sequence: Synthetic oligonucleotide
  Sense strand starting at position 3626 of SEQ ID NO: 916962
cucaguccuccagggugaa

SEQ ID NO: 1197741 - RNA, 19 nt, Artificial Sequence
  Description of Artificial Sequence: Synthetic oligonucleotide
  Antisense strand to SEQ ID NO: 1197740
uucacccuggaggacugag

SEQ ID NO: 1197742 - RNA, 19 nt, Artificial Sequence
  Description of Artificial Sequence: Synthetic oligonucleotide
  Sense strand starting at position 3627 of SEQ ID NO: 916962
ucaguccuccagggugaaa

SEQ ID NO: 1197743 - RNA, 19 nt, Artificial Sequence
  Description of Artificial Sequence: Synthetic oligonucleotide
  Antisense strand to SEQ ID NO: 1197742
uuucacccuggaggacuga

SEQ ID NO: 1197744 - RNA, 19 nt, Artificial Sequence
  Description of Artificial Sequence: Synthetic oligonucleotide
  Sense strand starting at position 3638 of SEQ ID NO: 916962
gggugaaacucaccuccaa

SEQ ID NO: 1197745 - RNA, 19 nt, Artificial Sequence
  Description of Artificial Sequence: Synthetic oligonucleotide
  Antisense strand to SEQ ID NO: 1197744
uuggaggugaguuucaccc

SEQ ID NO: 1197746 - RNA, 19 nt, Artificial Sequence
  Description of Artificial Sequence: Synthetic oligonucleotide
  Sense strand starting at position 3822 of SEQ ID NO: 916962
uguggucuccgacaaauua

SEQ ID NO: 1197747 - RNA, 19 nt, Artificial Sequence
  Description of Artificial Sequence: Synthetic oligonucleotide
  Antisense strand to SEQ ID NO: 1197746
uaauuugucggagaccaca

SEQ ID NO: 1197748 - RNA, 19 nt, Artificial Sequence
  Description of Artificial Sequence: Synthetic oligonucleotide
  Sense strand starting at position 23 of SEQ ID NO: 916963
gcuguagcgagccaugaua

SEQ ID NO: 1197749 - RNA, 19 nt, Artificial Sequence
  Description of Artificial Sequence: Synthetic oligonucleotide
  Antisense strand to SEQ ID NO: 1197748
uaucauggcucgcuacagc

SEQ ID NO: 1197750 - RNA, 19 nt, Artificial Sequence
  Description of Artificial Sequence: Synthetic oligonucleotide
  Sense strand starting at position 172 of SEQ ID NO: 916963
uuguccuaagauugcuaga

SEQ ID NO: 1197751 - RNA, 19 nt, Artificial Sequence
  Description of Artificial Sequence: Synthetic oligonucleotide
  Antisense strand to SEQ ID NO: 1197750
ucuagcaaucuuaggacaa

SEQ ID NO: 1197752 - RNA, 19 nt, Artificial Sequence
  Description of Artificial Sequence: Synthetic oligonucleotide
  Sense strand starting at position 174 of SEQ ID NO: 916963
guccuaagauugcuagacu

SEQ ID NO: 1197753 - RNA, 19 nt, Artificial Sequence
  Description of Artificial Sequence: Synthetic oligonucleotide
  Antisense strand to SEQ ID NO: 1197752
agucuagcaaucuuaggac

SEQ ID NO: 1197754 - RNA, 19 nt, Artificial Sequence
  Description of Artificial Sequence: Synthetic oligonucleotide
  Sense strand starting at position 206 of SEQ ID NO: 916963
gcauuuaugcugugcuuaa

SEQ ID NO: 1197755 - RNA, 19 nt, Artificial Sequence
  Description of Artificial Sequence: Synthetic oligonucleotide
  Antisense strand to SEQ ID NO: 1197754
uuaagcacagcauaaaugc

SEQ ID NO: 1197756 - RNA, 19 nt, Artificial Sequence
  Description of Artificial Sequence: Synthetic oligonucleotide
  Sense strand starting at position 322 of SEQ ID NO: 916963
ggaaacuuacguugaagag

SEQ ID NO: 1197757 - RNA, 19 nt, Artificial Sequence
  Description of Artificial Sequence: Synthetic oligonucleotide
  Antisense strand to SEQ ID NO: 1197756
cucuucaacguaaguuucc

SEQ ID NO: 1197758 - RNA, 19 nt, Artificial Sequence
  Description of Artificial Sequence: Synthetic oligonucleotide
  Sense strand starting at position 405 of SEQ ID NO: 916963
uuauuuagccagugcccaa

SEQ ID NO: 1197759 - RNA, 19 nt, Artificial Sequence
  Description of Artificial Sequence: Synthetic oligonucleotide
  Antisense strand to SEQ ID NO: 1197758
uugggcacuggcuaaauaa

SEQ ID NO: 1197760 - RNA, 19 nt, Artificial Sequence
  Description of Artificial Sequence: Synthetic oligonucleotide
  Sense strand starting at position 438 of SEQ ID NO: 916963
auucucuuggcccgaggaa

SEQ ID NO: 1197761 - RNA, 19 nt, Artificial Sequence
  Description of Artificial Sequence: Synthetic oligonucleotide
  Antisense strand to SEQ ID NO: 1197760
uuccucgggccaagagaau

SEQ ID NO: 1197762 - RNA, 19 nt, Artificial Sequence
  Description of Artificial Sequence: Synthetic oligonucleotide
  Sense strand starting at position 551 of SEQ ID NO: 916963
gacaaagagucacagagaa

SEQ ID NO: 1197763 - RNA, 19 nt, Artificial Sequence
  Description of Artificial Sequence: Synthetic oligonucleotide
  Antisense strand to SEQ ID NO: 1197762
uucucugugacucuuuguc

SEQ ID NO: 1197764 - RNA, 19 nt, Artificial Sequence
  Description of Artificial Sequence: Synthetic oligonucleotide
  Sense strand starting at position 755 of SEQ ID NO: 916963
acucuuugauauguugaga

SEQ ID NO: 1197765 - RNA, 19 nt, Artificial Sequence
  Description of Artificial Sequence: Synthetic oligonucleotide
  Antisense strand to SEQ ID NO: 1197764
ucucaacauaucaaagagu

SEQ ID NO: 1197766 - RNA, 19 nt, Artificial Sequence
  Description of Artificial Sequence: Synthetic oligonucleotide
  Sense strand starting at position 758 of SEQ ID NO: 916963
cuuugauauguugagauuc

SEQ ID NO: 1197767 - RNA, 19 nt, Artificial Sequence
  Description of Artificial Sequence: Synthetic oligonucleotide
  Antisense strand to SEQ ID NO: 1197766
gaaucucaacauaucaaag

SEQ ID NO: 1197768 - RNA, 19 nt, Artificial Sequence
  Description of Artificial Sequence: Synthetic oligonucleotide
  Sense strand starting at position 766 of SEQ ID NO: 916963
uguugagauucugcuuaca

SEQ ID NO: 1197769 - RNA, 19 nt, Artificial Sequence
  Description of Artificial Sequence: Synthetic oligonucleotide
  Antisense strand to SEQ ID NO: 1197768
uguaagcagaaucucaaca

SEQ ID NO: 1197770 - RNA, 19 nt, Artificial Sequence
  Description of Artificial Sequence: Synthetic oligonucleotide
  Sense strand starting at position 769 of SEQ ID NO: 916963
ugagauucugcuuacacaa

SEQ ID NO: 1197771 - RNA, 19 nt, Artificial Sequence
  Description of Artificial Sequence: Synthetic oligonucleotide
  Antisense strand to SEQ ID NO: 1197770
uuguguaagcagaaucuca

SEQ ID NO: 1197772 - RNA, 19 nt, Artificial Sequence
  Description of Artificial Sequence: Synthetic oligonucleotide
  Sense strand starting at position 827 of SEQ ID NO: 916963
augucuuguaaaugaggga

SEQ ID NO: 1197773 - RNA, 19 nt, Artificial Sequence
  Description of Artificial Sequence: Synthetic oligonucleotide
  Antisense strand to SEQ ID NO: 1197772
ucccucauuuacaagacau

SEQ ID NO: 1197774 - RNA, 19 nt, Artificial Sequence
  Description of Artificial Sequence: Synthetic oligonucleotide
  Sense strand starting at position 1172 of SEQ ID NO: 916963
auaauaacacucggaagua

SEQ ID NO: 1197775 - RNA, 19 nt, Artificial Sequence
  Description of Artificial Sequence: Synthetic oligonucleotide
  Antisense strand to SEQ ID NO: 1197774
uacuuccgaguguuauuau

SEQ ID NO: 1197776 - RNA, 19 nt, Artificial Sequence
  Description of Artificial Sequence: Synthetic oligonucleotide
  Sense strand starting at position 1185 of SEQ ID NO: 916963
gaaguauguugggcuacca

SEQ ID NO: 1197777 - RNA, 19 nt, Artificial Sequence
  Description of Artificial Sequence: Synthetic oligonucleotide
  Antisense strand to SEQ ID NO: 1197776
ugguagcccaacauacuuc

SEQ ID NO: 1197778 - RNA, 19 nt, Artificial Sequence
  Description of Artificial Sequence: Synthetic oligonucleotide
  Sense strand starting at position 1252 of SEQ ID NO: 916963
agaggaauugccugagcaa

SEQ ID NO: 1197779 - RNA, 19 nt, Artificial Sequence
  Description of Artificial Sequence: Synthetic oligonucleotide
  Antisense strand to SEQ ID NO: 1197778
uugcucaggcaauuccucu

SEQ ID NO: 1197780 - RNA, 19 nt, Artificial Sequence
  Description of Artificial Sequence: Synthetic oligonucleotide
  Sense strand starting at position 1253 of SEQ ID NO: 916963
gaggaauugccugagcaau

SEQ ID NO: 1197781 - RNA, 19 nt, Artificial Sequence
  Description of Artificial Sequence: Synthetic oligonucleotide
  Antisense strand to SEQ ID NO: 1197780
auugcucaggcaauuccuc

SEQ ID NO: 1197782 - RNA, 19 nt, Artificial Sequence
  Description of Artificial Sequence: Synthetic oligonucleotide
  Sense strand starting at position 1255 of SEQ ID NO: 916963
ggaauugccugagcaaugu

SEQ ID NO: 1197783 - RNA, 19 nt, Artificial Sequence
  Description of Artificial Sequence: Synthetic oligonucleotide
  Antisense strand to SEQ ID NO: 1197782
acauugcucaggcaauucc

SEQ ID NO: 1197784 - RNA, 19 nt, Artificial Sequence
  Description of Artificial Sequence: Synthetic oligonucleotide
  Sense strand starting at position 1261 of SEQ ID NO: 916963
gccugagcaauguagggau

SEQ ID NO: 1197785 - RNA, 19 nt, Artificial Sequence
  Description of Artificial Sequence: Synthetic oligonucleotide
  Antisense strand to SEQ ID NO: 1197784
aucccuacauugcucaggc

SEQ ID NO: 1197786 - RNA, 19 nt, Artificial Sequence
  Description of Artificial Sequence: Synthetic oligonucleotide
  Sense strand starting at position 1408 of SEQ ID NO: 916963
ccuggugcacgccaagaau

SEQ ID NO: 1197787 - RNA, 19 nt, Artificial Sequence
  Description of Artificial Sequence: Synthetic oligonucleotide
  Antisense strand to SEQ ID NO: 1197786
auucuuggcgugcaccagg

SEQ ID NO: 1197788 - RNA, 19 nt, Artificial Sequence
  Description of Artificial Sequence: Synthetic oligonucleotide
  Sense strand starting at position 1467 of SEQ ID NO: 916963
gcgucuaugguccaaaugu

SEQ ID NO: 1197789 - RNA, 19 nt, Artificial Sequence
  Description of Artificial Sequence: Synthetic oligonucleotide
  Antisense strand to SEQ ID NO: 1197788
acauuuggaccauagacgc

SEQ ID NO: 1197790 - RNA, 19 nt, Artificial Sequence
  Description of Artificial Sequence: Synthetic oligonucleotide
  Sense strand starting at position 2166 of SEQ ID NO: 916963
ggugguuaccaucacguga

SEQ ID NO: 1197791 - RNA, 19 nt, Artificial Sequence
  Description of Artificial Sequence: Synthetic oligonucleotide
  Antisense strand to SEQ ID NO: 1197790
ucacgugaugguaaccacc

SEQ ID NO: 1197792 - RNA, 19 nt, Artificial Sequence
  Description of Artificial Sequence: Synthetic oligonucleotide
  Sense strand starting at position 2170 of SEQ ID NO: 916963
guuaccaucacgugaaggu

SEQ ID NO: 1197793 - RNA, 19 nt, Artificial Sequence
  Description of Artificial Sequence: Synthetic oligonucleotide
  Antisense strand to SEQ ID NO: 1197792
accuucacgugaugguaac

SEQ ID NO: 1197794 - RNA, 19 nt, Artificial Sequence
  Description of Artificial Sequence: Synthetic oligonucleotide
  Sense strand starting at position 2216 of SEQ ID NO: 916963
guaagucagugguccucaa

SEQ ID NO: 1197795 - RNA, 19 nt, Artificial Sequence
  Description of Artificial Sequence: Synthetic oligonucleotide
  Antisense strand to SEQ ID NO: 1197794
uugaggaccacugacuuac

SEQ ID NO: 1197796 - RNA, 19 nt, Artificial Sequence
  Description of Artificial Sequence: Synthetic oligonucleotide
  Sense strand starting at position 2220 of SEQ ID NO: 916963
gucagugguccucaaaccu

SEQ ID NO: 1197797 - RNA, 19 nt, Artificial Sequence
  Description of Artificial Sequence: Synthetic oligonucleotide
  Antisense strand to SEQ ID NO: 1197796
agguuugaggaccacugac

SEQ ID NO: 1197798 - RNA, 19 nt, Artificial Sequence
  Description of Artificial Sequence: Synthetic oligonucleotide
  Sense strand starting at position 2245 of SEQ ID NO: 916963
gcgugagaaucaccagaua

SEQ ID NO: 1197799 - RNA, 19 nt, Artificial Sequence
  Description of Artificial Sequence: Synthetic oligonucleotide
  Antisense strand to SEQ ID NO: 1197798
uaucuggugauucucacgc

SEQ ID NO: 1197800 - RNA, 19 nt, Artificial Sequence
  Description of Artificial Sequence: Synthetic oligonucleotide
  Sense strand starting at position 2282 of SEQ ID NO: 916963
agggacuccugucucuaaa

SEQ ID NO: 1197801 - RNA, 19 nt, Artificial Sequence
  Description of Artificial Sequence: Synthetic oligonucleotide
  Antisense strand to SEQ ID NO: 1197800
uuuagagacaggagucccu

SEQ ID NO: 1197802 - RNA, 19 nt, Artificial Sequence
  Description of Artificial Sequence: Synthetic oligonucleotide
  Sense strand starting at position 2523 of SEQ ID NO: 916963
cccaucugagaguaucagu

SEQ ID NO: 1197803 - RNA, 19 nt, Artificial Sequence
  Description of Artificial Sequence: Synthetic oligonucleotide
  Antisense strand to SEQ ID NO: 1197802
acugauacucucagauggg

SEQ ID NO: 1197804 - RNA, 19 nt, Artificial Sequence
  Description of Artificial Sequence: Synthetic oligonucleotide
  Sense strand starting at position 2559 of SEQ ID NO: 916963
agguguguucaauguacaa

SEQ ID NO: 1197805 - RNA, 19 nt, Artificial Sequence
  Description of Artificial Sequence: Synthetic oligonucleotide
  Antisense strand to SEQ ID NO: 1197804
uuguacauugaacacaccu

SEQ ID NO: 1197806 - RNA, 19 nt, Artificial Sequence
  Description of Artificial Sequence: Synthetic oligonucleotide
  Sense strand starting at position 2596 of SEQ ID NO: 916963
ggcauaaguagauggaagu

SEQ ID NO: 1197807 - RNA, 19 nt, Artificial Sequence
  Description of Artificial Sequence: Synthetic oligonucleotide
  Antisense strand to SEQ ID NO: 1197806
acuuccaucuacuuaugcc

SEQ ID NO: 1197808 - RNA, 19 nt, Artificial Sequence
  Description of Artificial Sequence: Synthetic oligonucleotide
  Sense strand starting at position 2597 of SEQ ID NO: 916963
gcauaaguagauggaaguu

SEQ ID NO: 1197809 - RNA, 19 nt, Artificial Sequence
  Description of Artificial Sequence: Synthetic oligonucleotide
  Antisense strand to SEQ ID NO: 1197808
aacuuccaucuacuuaugc

SEQ ID NO: 1197810 - RNA, 19 nt, Artificial Sequence
  Description of Artificial Sequence: Synthetic oligonucleotide
  Sense strand starting at position 2915 of SEQ ID NO: 916963
gccgauaacuuucuauuau

SEQ ID NO: 1197811 - RNA, 19 nt, Artificial Sequence
  Description of Artificial Sequence: Synthetic oligonucleotide
  Antisense strand to SEQ ID NO: 1197810
auaauagaaaguuaucggc

SEQ ID NO: 1197812 - RNA, 19 nt, Artificial Sequence
  Description of Artificial Sequence: Synthetic oligonucleotide
  Sense strand starting at position 2934 of SEQ ID NO: 916963
agucuuauauuggugguga

SEQ ID NO: 1197813 - RNA, 19 nt, Artificial Sequence
  Description of Artificial Sequence: Synthetic oligonucleotide
  Antisense strand to SEQ ID NO: 1197812
ucaccaccaauauaagacu

SEQ ID NO: 1197814 - RNA, 19 nt, Artificial Sequence
  Description of Artificial Sequence: Synthetic oligonucleotide
  Sense strand starting at position 2936 of SEQ ID NO: 916963
ucuuauauugguggugagu

SEQ ID NO: 1197815 - RNA, 19 nt, Artificial Sequence
  Description of Artificial Sequence: Synthetic oligonucleotide
  Antisense strand to SEQ ID NO: 1197814
acucaccaccaauauaaga

SEQ ID NO: 1197816 - RNA, 19 nt, Artificial Sequence
  Description of Artificial Sequence: Synthetic oligonucleotide
  Sense strand starting at position 2983 of SEQ ID NO: 916963
uuauaacucgugugcuaca

SEQ ID NO: 1197817 - RNA, 19 nt, Artificial Sequence
  Description of Artificial Sequence: Synthetic oligonucleotide
  Antisense strand to SEQ ID NO: 1197816
uguagcacacgaguuauaa

SEQ ID NO: 1197818 - RNA, 19 nt, Artificial Sequence
  Description of Artificial Sequence: Synthetic oligonucleotide
  Sense strand starting at position 2984 of SEQ ID NO: 916963
uauaacucgugugcuacaa

SEQ ID NO: 1197819 - RNA, 19 nt, Artificial Sequence
  Description of Artificial Sequence: Synthetic oligonucleotide
  Antisense strand to SEQ ID NO: 1197818
uuguagcacacgaguuaua

SEQ ID NO: 1197820 - RNA, 19 nt, Artificial Sequence
  Description of Artificial Sequence: Synthetic oligonucleotide
  Sense strand starting at position 2988 of SEQ ID NO: 916963
acucgugugcuacaaguau

SEQ ID NO: 1197821 - RNA, 19 nt, Artificial Sequence
  Description of Artificial Sequence: Synthetic oligonucleotide
  Antisense strand to SEQ ID NO: 1197820
auacuuguagcacacgagu

SEQ ID NO: 1197822 - RNA, 19 nt, Artificial Sequence
  Description of Artificial Sequence: Synthetic oligonucleotide
  Sense strand starting at position 2992 of SEQ ID NO: 916963
gugugcuacaaguauuaca

SEQ ID NO: 1197823 - RNA, 19 nt, Artificial Sequence
  Description of Artificial Sequence: Synthetic oligonucleotide
  Antisense strand to SEQ ID NO: 1197822
uguaauacuuguagcacac

SEQ ID NO: 1197824 - RNA, 19 nt, Artificial Sequence
  Description of Artificial Sequence: Synthetic oligonucleotide
  Sense strand starting at position 3724 of SEQ ID NO: 916963
uuccuaguccauggaauga

SEQ ID NO: 1197825 - RNA, 19 nt, Artificial Sequence
  Description of Artificial Sequence: Synthetic oligonucleotide
  Antisense strand to SEQ ID NO: 1197824
ucauuccauggacuaggaa

SEQ ID NO: 1197826 - RNA, 19 nt, Artificial Sequence
  Description of Artificial Sequence: Synthetic oligonucleotide
  Sense strand starting at position 3955 of SEQ ID NO: 916963
ggagaaucgccucaaccga

SEQ ID NO: 1197827 - RNA, 19 nt, Artificial Sequence
  Description of Artificial Sequence: Synthetic oligonucleotide
  Antisense strand to SEQ ID NO: 1197826
ucgguugaggcgauucucc

SEQ ID NO: 1197828 - RNA, 19 nt, Artificial Sequence
  Description of Artificial Sequence: Synthetic oligonucleotide
  Sense strand starting at position 267 of SEQ ID NO: 916964
gcuguagcgagccaugaua

SEQ ID NO: 1197829 - RNA, 19 nt, Artificial Sequence
  Description of Artificial Sequence: Synthetic oligonucleotide
  Antisense strand to SEQ ID NO: 1197828
uaucauggcucgcuacagc

SEQ ID NO: 1197830 - RNA, 19 nt, Artificial Sequence
  Description of Artificial Sequence: Synthetic oligonucleotide
  Sense strand starting at position 410 of SEQ ID NO: 916964
cagggauuguccuaagauu

SEQ ID NO: 1197831 - RNA, 19 nt, Artificial Sequence
  Description of Artificial Sequence: Synthetic oligonucleotide
  Antisense strand to SEQ ID NO: 1197830
aaucuuaggacaaucccug

SEQ ID NO: 1197832 - RNA, 19 nt, Artificial Sequence
  Description of Artificial Sequence: Synthetic oligonucleotide
  Sense strand starting at position 416 of SEQ ID NO: 916964
uuguccuaagauugcuaga

SEQ ID NO: 1197833 - RNA, 19 nt, Artificial Sequence
  Description of Artificial Sequence: Synthetic oligonucleotide
  Antisense strand to SEQ ID NO: 1197832
ucuagcaaucuuaggacaa

SEQ ID NO: 1197834 - RNA, 19 nt, Artificial Sequence
  Description of Artificial Sequence: Synthetic oligonucleotide
  Sense strand starting at position 418 of SEQ ID NO: 916964
guccuaagauugcuagacu

SEQ ID NO: 1197835 - RNA, 19 nt, Artificial Sequence
  Description of Artificial Sequence: Synthetic oligonucleotide
  Antisense strand to SEQ ID NO: 1197834
agucuagcaaucuuaggac

SEQ ID NO: 1197836 - RNA, 19 nt, Artificial Sequence
  Description of Artificial Sequence: Synthetic oligonucleotide
  Sense strand starting at position 450 of SEQ ID NO: 916964
gcauuuaugcugugcuuaa

SEQ ID NO: 1197837 - RNA, 19 nt, Artificial Sequence
  Description of Artificial Sequence: Synthetic oligonucleotide
  Antisense strand to SEQ ID NO: 1197836
uuaagcacagcauaaaugc

SEQ ID NO: 1197838 - RNA, 19 nt, Artificial Sequence
  Description of Artificial Sequence: Synthetic oligonucleotide
  Sense strand starting at position 566 of SEQ ID NO: 916964
ggaaacuuacguugaagag

SEQ ID NO: 1197839 - RNA, 19 nt, Artificial Sequence
  Description of Artificial Sequence: Synthetic oligonucleotide
  Antisense strand to SEQ ID NO: 1197838
cucuucaacguaaguuucc

SEQ ID NO: 1197840 - RNA, 19 nt, Artificial Sequence
  Description of Artificial Sequence: Synthetic oligonucleotide
  Sense strand starting at position 649 of SEQ ID NO: 916964
uuauuuagccagugcccaa

SEQ ID NO: 1197841 - RNA, 19 nt, Artificial Sequence
  Description of Artificial Sequence: Synthetic oligonucleotide
  Antisense strand to SEQ ID NO: 1197840
uugggcacuggcuaaauaa

SEQ ID NO: 1197842 - RNA, 19 nt, Artificial Sequence
  Description of Artificial Sequence: Synthetic oligonucleotide
  Sense strand starting at position 682 of SEQ ID NO: 916964
auucucuuggcccgaggaa

SEQ ID NO: 1197843 - RNA, 19 nt, Artificial Sequence
  Description of Artificial Sequence: Synthetic oligonucleotide
  Antisense strand to SEQ ID NO: 1197842
uuccucgggccaagagaau

SEQ ID NO: 1197844 - RNA, 19 nt, Artificial Sequence
  Description of Artificial Sequence: Synthetic oligonucleotide
  Sense strand starting at position 795 of SEQ ID NO: 916964
gacaaagagucacagagaa

SEQ ID NO: 1197845 - RNA, 19 nt, Artificial Sequence
  Description of Artificial Sequence: Synthetic oligonucleotide
  Antisense strand to SEQ ID NO: 1197844
uucucugugacucuuuguc

SEQ ID NO: 1197846 - RNA, 19 nt, Artificial Sequence
  Description of Artificial Sequence: Synthetic oligonucleotide
  Sense strand starting at position 999 of SEQ ID NO: 916964
acucuuugauauguugaga

SEQ ID NO: 1197847 - RNA, 19 nt, Artificial Sequence
  Description of Artificial Sequence: Synthetic oligonucleotide
  Antisense strand to SEQ ID NO: 1197846
ucucaacauaucaaagagu

SEQ ID NO: 1197848 - RNA, 19 nt, Artificial Sequence
  Description of Artificial Sequence: Synthetic oligonucleotide
  Sense strand starting at position 1002 of SEQ ID NO: 916964
cuuugauauguugagauuc

SEQ ID NO: 1197849 - RNA, 19 nt, Artificial Sequence
  Description of Artificial Sequence: Synthetic oligonucleotide
  Antisense strand to SEQ ID NO: 1197848
gaaucucaacauaucaaag

SEQ ID NO: 1197850 - RNA, 19 nt, Artificial Sequence
  Description of Artificial Sequence: Synthetic oligonucleotide
  Sense strand starting at position 1010 of SEQ ID NO: 916964
uguugagauucugcuuaca

SEQ ID NO: 1197851 - RNA, 19 nt, Artificial Sequence
  Description of Artificial Sequence: Synthetic oligonucleotide
  Antisense strand to SEQ ID NO: 1197850
uguaagcagaaucucaaca

SEQ ID NO: 1197852 - RNA, 19 nt, Artificial Sequence
  Description of Artificial Sequence: Synthetic oligonucleotide
  Sense strand starting at position 1013 of SEQ ID NO: 916964
ugagauucugcuuacacaa

SEQ ID NO: 1197853 - RNA, 19 nt, Artificial Sequence
  Description of Artificial Sequence: Synthetic oligonucleotide
  Antisense strand to SEQ ID NO: 1197852
uuguguaagcagaaucuca

SEQ ID NO: 1197854 - RNA, 19 nt, Artificial Sequence
  Description of Artificial Sequence: Synthetic oligonucleotide
  Sense strand starting at position 1071 of SEQ ID NO: 916964
augucuuguaaaugaggga

SEQ ID NO: 1197855 - RNA, 19 nt, Artificial Sequence
  Description of Artificial Sequence: Synthetic oligonucleotide
  Antisense strand to SEQ ID NO: 1197854
ucccucauuuacaagacau

SEQ ID NO: 1197856 - RNA, 19 nt, Artificial Sequence
  Description of Artificial Sequence: Synthetic oligonucleotide
  Sense strand starting at position 1416 of SEQ ID NO: 916964
auaauaacacucggaagua

SEQ ID NO: 1197857 - RNA, 19 nt, Artificial Sequence
  Description of Artificial Sequence: Synthetic oligonucleotide
  Antisense strand to SEQ ID NO: 1197856
uacuuccgaguguuauuau

SEQ ID NO: 1197858 - RNA, 19 nt, Artificial Sequence
  Description of Artificial Sequence: Synthetic oligonucleotide
  Sense strand starting at position 1429 of SEQ ID NO: 916964
gaaguauguugggcuacca

SEQ ID NO: 1197859 - RNA, 19 nt, Artificial Sequence
  Description of Artificial Sequence: Synthetic oligonucleotide
  Antisense strand to SEQ ID NO: 1197858
ugguagcccaacauacuuc

SEQ ID NO: 1197860 - RNA, 19 nt, Artificial Sequence
  Description of Artificial Sequence: Synthetic oligonucleotide
  Sense strand starting at position 1496 of SEQ ID NO: 916964
agaggaauugccugagcaa

SEQ ID NO: 1197861 - RNA, 19 nt, Artificial Sequence
  Description of Artificial Sequence: Synthetic oligonucleotide
  Antisense strand to SEQ ID NO: 1197860
uugcucaggcaauuccucu

SEQ ID NO: 1197862 - RNA, 19 nt, Artificial Sequence
  Description of Artificial Sequence: Synthetic oligonucleotide
  Sense strand starting at position 1497 of SEQ ID NO: 916964
gaggaauugccugagcaau

SEQ ID NO: 1197863 - RNA, 19 nt, Artificial Sequence
  Description of Artificial Sequence: Synthetic oligonucleotide
  Antisense strand to SEQ ID NO: 1197862
auugcucaggcaauuccuc

SEQ ID NO: 1197864 - RNA, 19 nt, Artificial Sequence
  Description of Artificial Sequence: Synthetic oligonucleotide
  Sense strand starting at position 1499 of SEQ ID NO: 916964
ggaauugccugagcaaugu

SEQ ID NO: 1197865 - RNA, 19 nt, Artificial Sequence
  Description of Artificial Sequence: Synthetic oligonucleotide
  Antisense strand to SEQ ID NO: 1197864
acauugcucaggcaauucc

SEQ ID NO: 1197866 - RNA, 19 nt, Artificial Sequence
  Description of Artificial Sequence: Synthetic oligonucleotide
  Sense strand starting at position 1505 of SEQ ID NO: 916964
gccugagcaauguagggau

SEQ ID NO: 1197867 - RNA, 19 nt, Artificial Sequence
  Description of Artificial Sequence: Synthetic oligonucleotide
  Antisense strand to SEQ ID NO: 1197866
aucccuacauugcucaggc

SEQ ID NO: 1197868 - RNA, 19 nt, Artificial Sequence
  Description of Artificial Sequence: Synthetic oligonucleotide
  Sense strand starting at position 1652 of SEQ ID NO: 916964
ccuggugcacgccaagaau

SEQ ID NO: 1197869 - RNA, 19 nt, Artificial Sequence
  Description of Artificial Sequence: Synthetic oligonucleotide
  Antisense strand to SEQ ID NO: 1197868
auucuuggcgugcaccagg

SEQ ID NO: 1197870 - RNA, 19 nt, Artificial Sequence
  Description of Artificial Sequence: Synthetic oligonucleotide
  Sense strand starting at position 1711 of SEQ ID NO: 916964
gcgucuaugguccaaaugu

SEQ ID NO: 1197871 - RNA, 19 nt, Artificial Sequence
  Description of Artificial Sequence: Synthetic oligonucleotide
  Antisense strand to SEQ ID NO: 1197870
acauuuggaccauagacgc

SEQ ID NO: 1197872 - RNA, 19 nt, Artificial Sequence
  Description of Artificial Sequence: Synthetic oligonucleotide
  Sense strand starting at position 2410 of SEQ ID NO: 916964
ggugguuaccaucacguga

SEQ ID NO: 1197873 - RNA, 19 nt, Artificial Sequence
  Description of Artificial Sequence: Synthetic oligonucleotide
  Antisense strand to SEQ ID NO: 1197872
ucacgugaugguaaccacc

SEQ ID NO: 1197874 - RNA, 19 nt, Artificial Sequence
  Description of Artificial Sequence: Synthetic oligonucleotide
  Sense strand starting at position 2414 of SEQ ID NO: 916964
guuaccaucacgugaaggu

SEQ ID NO: 1197875 - RNA, 19 nt, Artificial Sequence
  Description of Artificial Sequence: Synthetic oligonucleotide
  Antisense strand to SEQ ID NO: 1197874
accuucacgugaugguaac

SEQ ID NO: 1197876 - RNA, 19 nt, Artificial Sequence
  Description of Artificial Sequence: Synthetic oligonucleotide
  Sense strand starting at position 2460 of SEQ ID NO: 916964
guaagucagugguccucaa

SEQ ID NO: 1197877 - RNA, 19 nt, Artificial Sequence
  Description of Artificial Sequence: Synthetic oligonucleotide
  Antisense strand to SEQ ID NO: 1197876
uugaggaccacugacuuac

SEQ ID NO: 1197878 - RNA, 19 nt, Artificial Sequence
  Description of Artificial Sequence: Synthetic oligonucleotide
  Sense strand starting at position 2464 of SEQ ID NO: 916964
gucagugguccucaaaccu

SEQ ID NO: 1197879 - RNA, 19 nt, Artificial Sequence
  Description of Artificial Sequence: Synthetic oligonucleotide
  Antisense strand to SEQ ID NO: 1197878
agguuugaggaccacugac

SEQ ID NO: 1197880 - RNA, 19 nt, Artificial Sequence
  Description of Artificial Sequence: Synthetic oligonucleotide
  Sense strand starting at position 2489 of SEQ ID NO: 916964
gcgugagaaucaccagaua

SEQ ID NO: 1197881 - RNA, 19 nt, Artificial Sequence
  Description of Artificial Sequence: Synthetic oligonucleotide
  Antisense strand to SEQ ID NO: 1197880
uaucuggugauucucacgc

SEQ ID NO: 1197882 - RNA, 19 nt, Artificial Sequence
  Description of Artificial Sequence: Synthetic oligonucleotide
  Sense strand starting at position 2526 of SEQ ID NO: 916964
agggacuccugucucuaaa

SEQ ID NO: 1197883 - RNA, 19 nt, Artificial Sequence
  Description of Artificial Sequence: Synthetic oligonucleotide
  Antisense strand to SEQ ID NO: 1197882
uuuagagacaggagucccu

SEQ ID NO: 1197884 - RNA, 19 nt, Artificial Sequence
  Description of Artificial Sequence: Synthetic oligonucleotide
  Sense strand starting at position 2767 of SEQ ID NO: 916964
cccaucugagaguaucagu

SEQ ID NO: 1197885 - RNA, 19 nt, Artificial Sequence
  Description of Artificial Sequence: Synthetic oligonucleotide
  Antisense strand to SEQ ID NO: 1197884
acugauacucucagauggg

SEQ ID NO: 1197886 - RNA, 19 nt, Artificial Sequence
  Description of Artificial Sequence: Synthetic oligonucleotide
  Sense strand starting at position 2803 of SEQ ID NO: 916964
agguguguucaauguacaa

SEQ ID NO: 1197887 - RNA, 19 nt, Artificial Sequence
  Description of Artificial Sequence: Synthetic oligonucleotide
  Antisense strand to SEQ ID NO: 1197886
uuguacauugaacacaccu

SEQ ID NO: 1197888 - RNA, 19 nt, Artificial Sequence
  Description of Artificial Sequence: Synthetic oligonucleotide
  Sense strand starting at position 2840 of SEQ ID NO: 916964
ggcauaaguagauggaagu

SEQ ID NO: 1197889 - RNA, 19 nt, Artificial Sequence
  Description of Artificial Sequence: Synthetic oligonucleotide
  Antisense strand to SEQ ID NO: 1197888
acuuccaucuacuuaugcc

SEQ ID NO: 1197890 - RNA, 19 nt, Artificial Sequence
  Description of Artificial Sequence: Synthetic oligonucleotide
  Sense strand starting at position 2841 of SEQ ID NO: 916964
gcauaaguagauggaaguu

SEQ ID NO: 1197891 - RNA, 19 nt, Artificial Sequence
  Description of Artificial Sequence: Synthetic oligonucleotide
  Antisense strand to SEQ ID NO: 1197890
aacuuccaucuacuuaugc

SEQ ID NO: 1197892 - RNA, 19 nt, Artificial Sequence
  Description of Artificial Sequence: Synthetic oligonucleotide
  Sense strand starting at position 3159 of SEQ ID NO: 916964
gccgauaacuuucuauuau

SEQ ID NO: 1197893 - RNA, 19 nt, Artificial Sequence
  Description of Artificial Sequence: Synthetic oligonucleotide
  Antisense strand to SEQ ID NO: 1197892
auaauagaaaguuaucggc

SEQ ID NO: 1197894 - RNA, 19 nt, Artificial Sequence
  Description of Artificial Sequence: Synthetic oligonucleotide
  Sense strand starting at position 3178 of SEQ ID NO: 916964
agucuuauauuggugguga

SEQ ID NO: 1197895 - RNA, 19 nt, Artificial Sequence
  Description of Artificial Sequence: Synthetic oligonucleotide
  Antisense strand to SEQ ID NO: 1197894
ucaccaccaauauaagacu

SEQ ID NO: 1197896 - RNA, 19 nt, Artificial Sequence
  Description of Artificial Sequence: Synthetic oligonucleotide
  Sense strand starting at position 3180 of SEQ ID NO: 916964
ucuuauauugguggugagu

SEQ ID NO: 1197897 - RNA, 19 nt, Artificial Sequence
  Description of Artificial Sequence: Synthetic oligonucleotide
  Antisense strand to SEQ ID NO: 1197896
acucaccaccaauauaaga

SEQ ID NO: 1197898 - RNA, 19 nt, Artificial Sequence
  Description of Artificial Sequence: Synthetic oligonucleotide
  Sense strand starting at position 3227 of SEQ ID NO: 916964
uuauaacucgugugcuaca

SEQ ID NO: 1197899 - RNA, 19 nt, Artificial Sequence
  Description of Artificial Sequence: Synthetic oligonucleotide
  Antisense strand to SEQ ID NO: 1197898
uguagcacacgaguuauaa

SEQ ID NO: 1197900 - RNA, 19 nt, Artificial Sequence
  Description of Artificial Sequence: Synthetic oligonucleotide
  Sense strand starting at position 3228 of SEQ ID NO: 916964
uauaacucgugugcuacaa

SEQ ID NO: 1197901 - RNA, 19 nt, Artificial Sequence
  Description of Artificial Sequence: Synthetic oligonucleotide
  Antisense strand to SEQ ID NO: 1197900
uuguagcacacgaguuaua

SEQ ID NO: 1197902 - RNA, 19 nt, Artificial Sequence
  Description of Artificial Sequence: Synthetic oligonucleotide
  Sense strand starting at position 3232 of SEQ ID NO: 916964
acucgugugcuacaaguau

SEQ ID NO: 1197903 - RNA, 19 nt, Artificial Sequence
  Description of Artificial Sequence: Synthetic oligonucleotide
  Antisense strand to SEQ ID NO: 1197902
auacuuguagcacacgagu

SEQ ID NO: 1197904 - RNA, 19 nt, Artificial Sequence
  Description of Artificial Sequence: Synthetic oligonucleotide
  Sense strand starting at position 3236 of SEQ ID NO: 916964
gugugcuacaaguauuaca

SEQ ID NO: 1197905 - RNA, 19 nt, Artificial Sequence
  Description of Artificial Sequence: Synthetic oligonucleotide
  Antisense strand to SEQ ID NO: 1197904
uguaauacuuguagcacac

SEQ ID NO: 1197906 - RNA, 19 nt, Artificial Sequence
  Description of Artificial Sequence: Synthetic oligonucleotide
  Sense strand starting at position 3968 of SEQ ID NO: 916964
uuccuaguccauggaauga

SEQ ID NO: 1197907 - RNA, 19 nt, Artificial Sequence
  Description of Artificial Sequence: Synthetic oligonucleotide
  Antisense strand to SEQ ID NO: 1197906
ucauuccauggacuaggaa

SEQ ID NO: 1197908 - RNA, 19 nt, Artificial Sequence
  Description of Artificial Sequence: Synthetic oligonucleotide
  Sense strand starting at position 206 of SEQ ID NO: 916965
ggacuaagucugggcucua

SEQ ID NO: 1197909 - RNA, 19 nt, Artificial Sequence
  Description of Artificial Sequence: Synthetic oligonucleotide
  Antisense strand to SEQ ID NO: 1197908
uagagcccagacuuagucc

SEQ ID NO: 1197910 - RNA, 19 nt, Artificial Sequence
  Description of Artificial Sequence: Synthetic oligonucleotide
  Sense strand starting at position 207 of SEQ ID NO: 916965
gacuaagucugggcucuaa

SEQ ID NO: 1197911 - RNA, 19 nt, Artificial Sequence
  Description of Artificial Sequence: Synthetic oligonucleotide
  Antisense strand to SEQ ID NO: 1197910
uuagagcccagacuuaguc

SEQ ID NO: 1197912 - RNA, 19 nt, Artificial Sequence
  Description of Artificial Sequence: Synthetic oligonucleotide
  Sense strand starting at position 276 of SEQ ID NO: 916965
gcuuuagaaucagucuuaa

SEQ ID NO: 1197913 - RNA, 19 nt, Artificial Sequence
  Description of Artificial Sequence: Synthetic oligonucleotide
  Antisense strand to SEQ ID NO: 1197912
uuaagacugauucuaaagc

SEQ ID NO: 1197914 - RNA, 19 nt, Artificial Sequence
  Description of Artificial Sequence: Synthetic oligonucleotide
  Sense strand starting at position 680 of SEQ ID NO: 916965
cagggugaugcaugaaauc

SEQ ID NO: 1197915 - RNA, 19 nt, Artificial Sequence
  Description of Artificial Sequence: Synthetic oligonucleotide
  Antisense strand to SEQ ID NO: 1197914
gauuucaugcaucacccug

SEQ ID NO: 1197916 - RNA, 19 nt, Artificial Sequence
  Description of Artificial Sequence: Synthetic oligonucleotide
  Sense strand starting at position 756 of SEQ ID NO: 916965
agauuaacucauuauccgu

SEQ ID NO: 1197917 - RNA, 19 nt, Artificial Sequence
  Description of Artificial Sequence: Synthetic oligonucleotide
  Antisense strand to SEQ ID NO: 1197916
acggauaaugaguuaaucu

SEQ ID NO: 1197918 - RNA, 19 nt, Artificial Sequence
  Description of Artificial Sequence: Synthetic oligonucleotide
  Sense strand starting at position 845 of SEQ ID NO: 916965
aggacaacuuguccaguuu

SEQ ID NO: 1197919 - RNA, 19 nt, Artificial Sequence
  Description of Artificial Sequence: Synthetic oligonucleotide
  Antisense strand to SEQ ID NO: 1197918
aaacuggacaaguuguccu

SEQ ID NO: 1197920 - RNA, 19 nt, Artificial Sequence
  Description of Artificial Sequence: Synthetic oligonucleotide
  Sense strand starting at position 973 of SEQ ID NO: 916965
uuuaguaaccgcgucucua

SEQ ID NO: 1197921 - RNA, 19 nt, Artificial Sequence
  Description of Artificial Sequence: Synthetic oligonucleotide
  Antisense strand to SEQ ID NO: 1197920
uagagacgcgguuacuaaa

SEQ ID NO: 1197922 - RNA, 19 nt, Artificial Sequence
  Description of Artificial Sequence: Synthetic oligonucleotide
  Sense strand starting at position 974 of SEQ ID NO: 916965
uuaguaaccgcgucucuau

SEQ ID NO: 1197923 - RNA, 19 nt, Artificial Sequence
  Description of Artificial Sequence: Synthetic oligonucleotide
  Antisense strand to SEQ ID NO: 1197922
auagagacgcgguuacuaa

SEQ ID NO: 1197924 - RNA, 19 nt, Artificial Sequence
  Description of Artificial Sequence: Synthetic oligonucleotide
  Sense strand starting at position 984 of SEQ ID NO: 916965
cgucucuaucuugacuaga

SEQ ID NO: 1197925 - RNA, 19 nt, Artificial Sequence
  Description of Artificial Sequence: Synthetic oligonucleotide
  Antisense strand to SEQ ID NO: 1197924
ucuagucaagauagagacg

SEQ ID NO: 1197926 - RNA, 19 nt, Artificial Sequence
  Description of Artificial Sequence: Synthetic oligonucleotide
  Sense strand starting at position 1047 of SEQ ID NO: 916965
ugugaaacugcuuacuuaa

SEQ ID NO: 1197927 - RNA, 19 nt, Artificial Sequence
  Description of Artificial Sequence: Synthetic oligonucleotide
  Antisense strand to SEQ ID NO: 1197926
uuaaguaagcaguuucaca

SEQ ID NO: 1197928 - RNA, 19 nt, Artificial Sequence
  Description of Artificial Sequence: Synthetic oligonucleotide
  Sense strand starting at position 1534 of SEQ ID NO: 916965
guaccuguccagcaggauu

SEQ ID NO: 1197929 - RNA, 19 nt, Artificial Sequence
  Description of Artificial Sequence: Synthetic oligonucleotide
  Antisense strand to SEQ ID NO: 1197928
aauccugcuggacagguac

SEQ ID NO: 1197930 - RNA, 19 nt, Artificial Sequence
  Description of Artificial Sequence: Synthetic oligonucleotide
  Sense strand starting at position 1652 of SEQ ID NO: 916965
gcaguucgaggucaaacaa

SEQ ID NO: 1197931 - RNA, 19 nt, Artificial Sequence
  Description of Artificial Sequence: Synthetic oligonucleotide
  Antisense strand to SEQ ID NO: 1197930
uuguuugaccucgaacugc

SEQ ID NO: 1197932 - RNA, 19 nt, Artificial Sequence
  Description of Artificial Sequence: Synthetic oligonucleotide
  Sense strand starting at position 2150 of SEQ ID NO: 916965
gagaaacagucuucgucag

SEQ ID NO: 1197933 - RNA, 19 nt, Artificial Sequence
  Description of Artificial Sequence: Synthetic oligonucleotide
  Antisense strand to SEQ ID NO: 1197932
cugacgaagacuguuucuc

SEQ ID NO: 1197934 - RNA, 19 nt, Artificial Sequence
  Description of Artificial Sequence: Synthetic oligonucleotide
  Sense strand starting at position 2277 of SEQ ID NO: 916965
gugagaaguguuuacggaa

SEQ ID NO: 1197935 - RNA, 19 nt, Artificial Sequence
  Description of Artificial Sequence: Synthetic oligonucleotide
  Antisense strand to SEQ ID NO: 1197934
uuccguaaacacuucucac

SEQ ID NO: 1197936 - RNA, 19 nt, Artificial Sequence
  Description of Artificial Sequence: Synthetic oligonucleotide
  Sense strand starting at position 2528 of SEQ ID NO: 916965
aguggagugccggacagau

SEQ ID NO: 1197937 - RNA, 19 nt, Artificial Sequence
  Description of Artificial Sequence: Synthetic oligonucleotide
  Antisense strand to SEQ ID NO: 1197936
aucuguccggcacuccacu

SEQ ID NO: 1197938 - RNA, 19 nt, Artificial Sequence
  Description of Artificial Sequence: Synthetic oligonucleotide
  Sense strand starting at position 2744 of SEQ ID NO: 916965
gggucaucuccaguugcgu

SEQ ID NO: 1197939 - RNA, 19 nt, Artificial Sequence
  Description of Artificial Sequence: Synthetic oligonucleotide
  Antisense strand to SEQ ID NO: 1197938
acgcaacuggagaugaccc

SEQ ID NO: 1197940 - RNA, 19 nt, Artificial Sequence
  Description of Artificial Sequence: Synthetic oligonucleotide
  Sense strand starting at position 2906 of SEQ ID NO: 916965
caccuaucuccgggagaag

SEQ ID NO: 1197941 - RNA, 19 nt, Artificial Sequence
  Description of Artificial Sequence: Synthetic oligonucleotide
  Antisense strand to SEQ ID NO: 1197940
cuucucccggagauaggug

SEQ ID NO: 1197942 - RNA, 19 nt, Artificial Sequence
  Description of Artificial Sequence: Synthetic oligonucleotide
  Sense strand starting at position 2907 of SEQ ID NO: 916965
accuaucuccgggagaagu

SEQ ID NO: 1197943 - RNA, 19 nt, Artificial Sequence
  Description of Artificial Sequence: Synthetic oligonucleotide
  Antisense strand to SEQ ID NO: 1197942
acuucucccggagauaggu

SEQ ID NO: 1197944 - RNA, 19 nt, Artificial Sequence
  Description of Artificial Sequence: Synthetic oligonucleotide
  Sense strand starting at position 2909 of SEQ ID NO: 916965
cuaucuccgggagaaguuu

SEQ ID NO: 1197945 - RNA, 19 nt, Artificial Sequence
  Description of Artificial Sequence: Synthetic oligonucleotide
  Antisense strand to SEQ ID NO: 1197944
aaacuucucccggagauag

SEQ ID NO: 1197946 - RNA, 19 nt, Artificial Sequence
  Description of Artificial Sequence: Synthetic oligonucleotide
  Sense strand starting at position 3072 of SEQ ID NO: 916965
guguaaaucggugcuguau

SEQ ID NO: 1197947 - RNA, 19 nt, Artificial Sequence
  Description of Artificial Sequence: Synthetic oligonucleotide
  Antisense strand to SEQ ID NO: 1197946
auacagcaccgauuuacac

SEQ ID NO: 1197948 - RNA, 19 nt, Artificial Sequence
  Description of Artificial Sequence: Synthetic oligonucleotide
  Sense strand starting at position 3083 of SEQ ID NO: 916965
ugcuguauuacuugggaaa

SEQ ID NO: 1197949 - RNA, 19 nt, Artificial Sequence
  Description of Artificial Sequence: Synthetic oligonucleotide
  Antisense strand to SEQ ID NO: 1197948
uuucccaaguaauacagca

SEQ ID NO: 1197950 - RNA, 19 nt, Artificial Sequence
  Description of Artificial Sequence: Synthetic oligonucleotide
  Sense strand starting at position 3084 of SEQ ID NO: 916965
gcuguauuacuugggaaau

SEQ ID NO: 1197951 - RNA, 19 nt, Artificial Sequence
  Description of Artificial Sequence: Synthetic oligonucleotide
  Antisense strand to SEQ ID NO: 1197950
auuucccaaguaauacagc

SEQ ID NO: 1197952 - RNA, 19 nt, Artificial Sequence
  Description of Artificial Sequence: Synthetic oligonucleotide
  Sense strand starting at position 3131 of SEQ ID NO: 916965
guuuguauagacuaaagua

SEQ ID NO: 1197953 - RNA, 19 nt, Artificial Sequence
  Description of Artificial Sequence: Synthetic oligonucleotide
  Antisense strand to SEQ ID NO: 1197952
uacuuuagucuauacaaac

SEQ ID NO: 1197954 - RNA, 19 nt, Artificial Sequence
  Description of Artificial Sequence: Synthetic oligonucleotide
  Sense strand starting at position 3163 of SEQ ID NO: 916965
ccgaaauuaugucuggauu

SEQ ID NO: 1197955 - RNA, 19 nt, Artificial Sequence
  Description of Artificial Sequence: Synthetic oligonucleotide
  Antisense strand to SEQ ID NO: 1197954
aauccagacauaauuucgg

SEQ ID NO: 1197956 - RNA, 19 nt, Artificial Sequence
  Description of Artificial Sequence: Synthetic oligonucleotide
  Sense strand starting at position 3164 of SEQ ID NO: 916965
cgaaauuaugucuggauug

SEQ ID NO: 1197957 - RNA, 19 nt, Artificial Sequence
  Description of Artificial Sequence: Synthetic oligonucleotide
  Antisense strand to SEQ ID NO: 1197956
caauccagacauaauuucg

SEQ ID NO: 1197958 - RNA, 19 nt, Artificial Sequence
  Description of Artificial Sequence: Synthetic oligonucleotide
  Sense strand starting at position 3166 of SEQ ID NO: 916965
aaauuaugucuggauugug

SEQ ID NO: 1197959 - RNA, 19 nt, Artificial Sequence
  Description of Artificial Sequence: Synthetic oligonucleotide
  Antisense strand to SEQ ID NO: 1197958
cacaauccagacauaauuu

SEQ ID NO: 1197960 - RNA, 19 nt, Artificial Sequence
  Description of Artificial Sequence: Synthetic oligonucleotide
  Sense strand starting at position 3175 of SEQ ID NO: 916965
cuggauuguggaggcagau

SEQ ID NO: 1197961 - RNA, 19 nt, Artificial Sequence
  Description of Artificial Sequence: Synthetic oligonucleotide
  Antisense strand to SEQ ID NO: 1197960
aucugccuccacaauccag

SEQ ID NO: 1197962 - RNA, 19 nt, Artificial Sequence
  Description of Artificial Sequence: Synthetic oligonucleotide
  Sense strand starting at position 3357 of SEQ ID NO: 916965
auagcuauuuccuuggguu

SEQ ID NO: 1197963 - RNA, 19 nt, Artificial Sequence
  Description of Artificial Sequence: Synthetic oligonucleotide
  Antisense strand to SEQ ID NO: 1197962
aacccaaggaaauagcuau

SEQ ID NO: 1197964 - RNA, 19 nt, Artificial Sequence
  Description of Artificial Sequence: Synthetic oligonucleotide
  Sense strand starting at position 3358 of SEQ ID NO: 916965
uagcuauuuccuuggguua

SEQ ID NO: 1197965 - RNA, 19 nt, Artificial Sequence
  Description of Artificial Sequence: Synthetic oligonucleotide
  Antisense strand to SEQ ID NO: 1197964
uaacccaaggaaauagcua

SEQ ID NO: 1197966 - RNA, 19 nt, Artificial Sequence
  Description of Artificial Sequence: Synthetic oligonucleotide
  Sense strand starting at position 3359 of SEQ ID NO: 916965
agcuauuuccuuggguuau

SEQ ID NO: 1197967 - RNA, 19 nt, Artificial Sequence
  Description of Artificial Sequence: Synthetic oligonucleotide
  Antisense strand to SEQ ID NO: 1197966
auaacccaaggaaauagcu

SEQ ID NO: 1197968 - RNA, 19 nt, Artificial Sequence
  Description of Artificial Sequence: Synthetic oligonucleotide
  Sense strand starting at position 3391 of SEQ ID NO: 916965
ugaaauaaagcaugugaag

SEQ ID NO: 1197969 - RNA, 19 nt, Artificial Sequence
  Description of Artificial Sequence: Synthetic oligonucleotide
  Antisense strand to SEQ ID NO: 1197968
cuucacaugcuuuauuuca

SEQ ID NO: 1197970 - RNA, 19 nt, Artificial Sequence
  Description of Artificial Sequence: Synthetic oligonucleotide
  Sense strand starting at position 3450 of SEQ ID NO: 916965
auugaaauucuuuggcaaa

SEQ ID NO: 1197971 - RNA, 19 nt, Artificial Sequence
  Description of Artificial Sequence: Synthetic oligonucleotide
  Antisense strand to SEQ ID NO: 1197970
uuugccaaagaauuucaau

SEQ ID NO: 1197972 - RNA, 19 nt, Artificial Sequence
  Description of Artificial Sequence: Synthetic oligonucleotide
  Sense strand starting at position 3487 of SEQ ID NO: 916965
gcuggugaucuguauaaau

SEQ ID NO: 1197973 - RNA, 19 nt, Artificial Sequence
  Description of Artificial Sequence: Synthetic oligonucleotide
  Antisense strand to SEQ ID NO: 1197972
auuuauacagaucaccagc

SEQ ID NO: 1197974 - RNA, 19 nt, Artificial Sequence
  Description of Artificial Sequence: Synthetic oligonucleotide
  Sense strand starting at position 3632 of SEQ ID NO: 916965
auuugugucauucguugga

SEQ ID NO: 1197975 - RNA, 19 nt, Artificial Sequence
  Description of Artificial Sequence: Synthetic oligonucleotide
  Antisense strand to SEQ ID NO: 1197974
uccaacgaaugacacaaau

SEQ ID NO: 1197976 - RNA, 19 nt, Artificial Sequence
  Description of Artificial Sequence: Synthetic oligonucleotide
  Sense strand starting at position 3639 of SEQ ID NO: 916965
ucauucguuggauaaguaa

SEQ ID NO: 1197977 - RNA, 19 nt, Artificial Sequence
  Description of Artificial Sequence: Synthetic oligonucleotide
  Antisense strand to SEQ ID NO: 1197976
uuacuuauccaacgaauga

SEQ ID NO: 1197978 - RNA, 19 nt, Artificial Sequence
  Description of Artificial Sequence: Synthetic oligonucleotide
  Sense strand starting at position 3774 of SEQ ID NO: 916965
ucugguaauucugugacaa

SEQ ID NO: 1197979 - RNA, 19 nt, Artificial Sequence
  Description of Artificial Sequence: Synthetic oligonucleotide
  Antisense strand to SEQ ID NO: 1197978
uugucacagaauuaccaga

SEQ ID NO: 1197980 - RNA, 19 nt, Artificial Sequence
  Description of Artificial Sequence: Synthetic oligonucleotide
  Sense strand starting at position 3775 of SEQ ID NO: 916965
cugguaauucugugacaau

SEQ ID NO: 1197981 - RNA, 19 nt, Artificial Sequence
  Description of Artificial Sequence: Synthetic oligonucleotide
  Antisense strand to SEQ ID NO: 1197980
auugucacagaauuaccag

SEQ ID NO: 1197982 - RNA, 19 nt, Artificial Sequence
  Description of Artificial Sequence: Synthetic oligonucleotide
  Sense strand starting at position 3849 of SEQ ID NO: 916965
ugagcuaugacauaaguug

SEQ ID NO: 1197983 - RNA, 19 nt, Artificial Sequence
  Description of Artificial Sequence: Synthetic oligonucleotide
  Antisense strand to SEQ ID NO: 1197982
caacuuaugucauagcuca

SEQ ID NO: 1197984 - RNA, 19 nt, Artificial Sequence
  Description of Artificial Sequence: Synthetic oligonucleotide
  Sense strand starting at position 3896 of SEQ ID NO: 916965
guccuuuauacuggaguga

SEQ ID NO: 1197985 - RNA, 19 nt, Artificial Sequence
  Description of Artificial Sequence: Synthetic oligonucleotide
  Antisense strand to SEQ ID NO: 1197984
ucacuccaguauaaaggac

SEQ ID NO: 1197986 - RNA, 19 nt, Artificial Sequence
  Description of Artificial Sequence: Synthetic oligonucleotide
  Sense strand starting at position 3954 of SEQ ID NO: 916965
ucagauauguagcucucaa

SEQ ID NO: 1197987 - RNA, 19 nt, Artificial Sequence
  Description of Artificial Sequence: Synthetic oligonucleotide
  Antisense strand to SEQ ID NO: 1197986
uugagagcuacauaucuga

SEQ ID NO: 1197988 - RNA, 19 nt, Artificial Sequence
  Description of Artificial Sequence: Synthetic oligonucleotide
  Sense strand starting at position 464 of SEQ ID NO: 916966
agacuuaagugagauauaa

SEQ ID NO: 1197989 - RNA, 19 nt, Artificial Sequence
  Description of Artificial Sequence: Synthetic oligonucleotide
  Antisense strand to SEQ ID NO: 1197988
uuauaucucacuuaagucu

SEQ ID NO: 1197990 - RNA, 19 nt, Artificial Sequence
  Description of Artificial Sequence: Synthetic oligonucleotide
  Sense strand starting at position 472 of SEQ ID NO: 916966
gugagauauaaucacgcca

SEQ ID NO: 1197991 - RNA, 19 nt, Artificial Sequence
  Description of Artificial Sequence: Synthetic oligonucleotide
  Antisense strand to SEQ ID NO: 1197990
uggcgugauuauaucucac

SEQ ID NO: 1197992 - RNA, 19 nt, Artificial Sequence
  Description of Artificial Sequence: Synthetic oligonucleotide
  Sense strand starting at position 640 of SEQ ID NO: 916966
cuuuaagaaucggcugcua

SEQ ID NO: 1197993 - RNA, 19 nt, Artificial Sequence
  Description of Artificial Sequence: Synthetic oligonucleotide
  Antisense strand to SEQ ID NO: 1197992
uagcagccgauucuuaaag

SEQ ID NO: 1197994 - RNA, 19 nt, Artificial Sequence
  Description of Artificial Sequence: Synthetic oligonucleotide
  Sense strand starting at position 642 of SEQ ID NO: 916966
uuaagaaucggcugcuaug

SEQ ID NO: 1197995 - RNA, 19 nt, Artificial Sequence
  Description of Artificial Sequence: Synthetic oligonucleotide
  Antisense strand to SEQ ID NO: 1197994
cauagcagccgauucuuaa

SEQ ID NO: 1197996 - RNA, 19 nt, Artificial Sequence
  Description of Artificial Sequence: Synthetic oligonucleotide
  Sense strand starting at position 703 of SEQ ID NO: 916966
ucaaucuuagcgggucaca

SEQ ID NO: 1197997 - RNA, 19 nt, Artificial Sequence
  Description of Artificial Sequence: Synthetic oligonucleotide
  Antisense strand to SEQ ID NO: 1197996
ugugacccgcuaagauuga

SEQ ID NO: 1197998 - RNA, 19 nt, Artificial Sequence
  Description of Artificial Sequence: Synthetic oligonucleotide
  Sense strand starting at position 785 of SEQ ID NO: 916966
ucuggagugcagugguaau

SEQ ID NO: 1197999 - RNA, 19 nt, Artificial Sequence
  Description of Artificial Sequence: Synthetic oligonucleotide
  Antisense strand to SEQ ID NO: 1197998
auuaccacugcacuccaga

SEQ ID NO: 1198000 - RNA, 19 nt, Artificial Sequence
  Description of Artificial Sequence: Synthetic oligonucleotide
  Sense strand starting at position 1012 of SEQ ID NO: 916966
ccagccaaacgucaaauua

SEQ ID NO: 1198001 - RNA, 19 nt, Artificial Sequence
  Description of Artificial Sequence: Synthetic oligonucleotide
  Antisense strand to SEQ ID NO: 1198000
uaauuugacguuuggcugg

SEQ ID NO: 1198002 - RNA, 19 nt, Artificial Sequence
  Description of Artificial Sequence: Synthetic oligonucleotide
  Sense strand starting at position 1046 of SEQ ID NO: 916966
ccacuaaauguguaauucu

SEQ ID NO: 1198003 - RNA, 19 nt, Artificial Sequence
  Description of Artificial Sequence: Synthetic oligonucleotide
  Antisense strand to SEQ ID NO: 1198002
agaauuacacauuuagugg

SEQ ID NO: 1198004 - RNA, 19 nt, Artificial Sequence
  Description of Artificial Sequence: Synthetic oligonucleotide
  Sense strand starting at position 1049 of SEQ ID NO: 916966
cuaaauguguaauucuaga

SEQ ID NO: 1198005 - RNA, 19 nt, Artificial Sequence
  Description of Artificial Sequence: Synthetic oligonucleotide
  Antisense strand to SEQ ID NO: 1198004
ucuagaauuacacauuuag

SEQ ID NO: 1198006 - RNA, 19 nt, Artificial Sequence
  Description of Artificial Sequence: Synthetic oligonucleotide
  Sense strand starting at position 1104 of SEQ ID NO: 916966
acauaugacuccuaagaag

SEQ ID NO: 1198007 - RNA, 19 nt, Artificial Sequence
  Description of Artificial Sequence: Synthetic oligonucleotide
  Antisense strand to SEQ ID NO: 1198006
cuucuuaggagucauaugu

SEQ ID NO: 1198008 - RNA, 19 nt, Artificial Sequence
  Description of Artificial Sequence: Synthetic oligonucleotide
  Sense strand starting at position 1107 of SEQ ID NO: 916966
uaugacuccuaagaaguga

SEQ ID NO: 1198009 - RNA, 19 nt, Artificial Sequence
  Description of Artificial Sequence: Synthetic oligonucleotide
  Antisense strand to SEQ ID NO: 1198008
ucacuucuuaggagucaua

SEQ ID NO: 1198010 - RNA, 19 nt, Artificial Sequence
  Description of Artificial Sequence: Synthetic oligonucleotide
  Sense strand starting at position 1204 of SEQ ID NO: 916966
agagaagggucuuaacaua

SEQ ID NO: 1198011 - RNA, 19 nt, Artificial Sequence
  Description of Artificial Sequence: Synthetic oligonucleotide
  Antisense strand to SEQ ID NO: 1198010
uauguuaagacccuucucu

SEQ ID NO: 1198012 - RNA, 19 nt, Artificial Sequence
  Description of Artificial Sequence: Synthetic oligonucleotide
  Sense strand starting at position 1212 of SEQ ID NO: 916966
gucuuaacauagucacauu

SEQ ID NO: 1198013 - RNA, 19 nt, Artificial Sequence
  Description of Artificial Sequence: Synthetic oligonucleotide
  Antisense strand to SEQ ID NO: 1198012
aaugugacuauguuaagac

SEQ ID NO: 1198014 - RNA, 19 nt, Artificial Sequence
  Description of Artificial Sequence: Synthetic oligonucleotide
  Sense strand starting at position 1222 of SEQ ID NO: 916966
agucacauuuaguaagaua

SEQ ID NO: 1198015 - RNA, 19 nt, Artificial Sequence
  Description of Artificial Sequence: Synthetic oligonucleotide
  Antisense strand to SEQ ID NO: 1198014
uaucuuacuaaaugugacu

SEQ ID NO: 1198016 - RNA, 19 nt, Artificial Sequence
  Description of Artificial Sequence: Synthetic oligonucleotide
  Sense strand starting at position 1246 of SEQ ID NO: 916966
uuggccucucuuuaaguga

SEQ ID NO: 1198017 - RNA, 19 nt, Artificial Sequence
  Description of Artificial Sequence: Synthetic oligonucleotide
  Antisense strand to SEQ ID NO: 1198016
ucacuuaaagagaggccaa

SEQ ID NO: 1198018 - RNA, 19 nt, Artificial Sequence
  Description of Artificial Sequence: Synthetic oligonucleotide
  Sense strand starting at position 1316 of SEQ ID NO: 916966
cgucuugggcugcaagaau

SEQ ID NO: 1198019 - RNA, 19 nt, Artificial Sequence
  Description of Artificial Sequence: Synthetic oligonucleotide
  Antisense strand to SEQ ID NO: 1198018
auucuugcagcccaagacg

SEQ ID NO: 1198020 - RNA, 19 nt, Artificial Sequence
  Description of Artificial Sequence: Synthetic oligonucleotide
  Sense strand starting at position 1350 of SEQ ID NO: 916966
gcaucacuguugucuggga

SEQ ID NO: 1198021 - RNA, 19 nt, Artificial Sequence
  Description of Artificial Sequence: Synthetic oligonucleotide
  Antisense strand to SEQ ID NO: 1198020
ucccagacaacagugaugc

SEQ ID NO: 1198022 - RNA, 19 nt, Artificial Sequence
  Description of Artificial Sequence: Synthetic oligonucleotide
  Sense strand starting at position 1430 of SEQ ID NO: 916966
ucauuuaccugacagugau

SEQ ID NO: 1198023 - RNA, 19 nt, Artificial Sequence
  Description of Artificial Sequence: Synthetic oligonucleotide
  Antisense strand to SEQ ID NO: 1198022
aucacugucagguaaauga

SEQ ID NO: 1198024 - RNA, 19 nt, Artificial Sequence
  Description of Artificial Sequence: Synthetic oligonucleotide
  Sense strand starting at position 1456 of SEQ ID NO: 916966
gcuacuucucaggguuauu

SEQ ID NO: 1198025 - RNA, 19 nt, Artificial Sequence
  Description of Artificial Sequence: Synthetic oligonucleotide
  Antisense strand to SEQ ID NO: 1198024
aauaacccugagaaguagc

SEQ ID NO: 1198026 - RNA, 19 nt, Artificial Sequence
  Description of Artificial Sequence: Synthetic oligonucleotide
  Sense strand starting at position 1461 of SEQ ID NO: 916966
uucucaggguuauuguuua

SEQ ID NO: 1198027 - RNA, 19 nt, Artificial Sequence
  Description of Artificial Sequence: Synthetic oligonucleotide
  Antisense strand to SEQ ID NO: 1198026
uaaacaauaacccugagaa

SEQ ID NO: 1198028 - RNA, 19 nt, Artificial Sequence
  Description of Artificial Sequence: Synthetic oligonucleotide
  Sense strand starting at position 1465 of SEQ ID NO: 916966
caggguuauuguuuagaga

SEQ ID NO: 1198029 - RNA, 19 nt, Artificial Sequence
  Description of Artificial Sequence: Synthetic oligonucleotide
  Antisense strand to SEQ ID NO: 1198028
ucucuaaacaauaacccug

SEQ ID NO: 1198030 - RNA, 19 nt, Artificial Sequence
  Description of Artificial Sequence: Synthetic oligonucleotide
  Sense strand starting at position 1522 of SEQ ID NO: 916966
guaagugcucaauaagagu

SEQ ID NO: 1198031 - RNA, 19 nt, Artificial Sequence
  Description of Artificial Sequence: Synthetic oligonucleotide
  Antisense strand to SEQ ID NO: 1198030
acucuuauugagcacuuac

SEQ ID NO: 1198032 - RNA, 19 nt, Artificial Sequence
  Description of Artificial Sequence: Synthetic oligonucleotide
  Sense strand starting at position 2339 of SEQ ID NO: 916966
aggagauccugagucaguu

SEQ ID NO: 1198033 - RNA, 19 nt, Artificial Sequence
  Description of Artificial Sequence: Synthetic oligonucleotide
  Antisense strand to SEQ ID NO: 1198032
aacugacucaggaucuccu

SEQ ID NO: 1198034 - RNA, 19 nt, Artificial Sequence
  Description of Artificial Sequence: Synthetic oligonucleotide
  Sense strand starting at position 2345 of SEQ ID NO: 916966
uccugagucaguuagucua

SEQ ID NO: 1198035 - RNA, 19 nt, Artificial Sequence
  Description of Artificial Sequence: Synthetic oligonucleotide
  Antisense strand to SEQ ID NO: 1198034
uagacuaacugacucagga

SEQ ID NO: 1198036 - RNA, 19 nt, Artificial Sequence
  Description of Artificial Sequence: Synthetic oligonucleotide
  Sense strand starting at position 2726 of SEQ ID NO: 916966
aacaaauguccggacgcaa

SEQ ID NO: 1198037 - RNA, 19 nt, Artificial Sequence
  Description of Artificial Sequence: Synthetic oligonucleotide
  Antisense strand to SEQ ID NO: 1198036
uugcguccggacauuuguu

SEQ ID NO: 1198038 - RNA, 19 nt, Artificial Sequence
  Description of Artificial Sequence: Synthetic oligonucleotide
  Sense strand starting at position 2747 of SEQ ID NO: 916966
agaugaguuggacggaaau

SEQ ID NO: 1198039 - RNA, 19 nt, Artificial Sequence
  Description of Artificial Sequence: Synthetic oligonucleotide
  Antisense strand to SEQ ID NO: 1198038
auuuccguccaacucaucu

SEQ ID NO: 1198040 - RNA, 19 nt, Artificial Sequence
  Description of Artificial Sequence: Synthetic oligonucleotide
  Sense strand starting at position 2822 of SEQ ID NO: 916966
cugugagaucacugucucu

SEQ ID NO: 1198041 - RNA, 19 nt, Artificial Sequence
  Description of Artificial Sequence: Synthetic oligonucleotide
  Antisense strand to SEQ ID NO: 1198040
agagacagugaucucacag

SEQ ID NO: 1198042 - RNA, 19 nt, Artificial Sequence
  Description of Artificial Sequence: Synthetic oligonucleotide
  Sense strand starting at position 2825 of SEQ ID NO: 916966
ugagaucacugucucugaa

SEQ ID NO: 1198043 - RNA, 19 nt, Artificial Sequence
  Description of Artificial Sequence: Synthetic oligonucleotide
  Antisense strand to SEQ ID NO: 1198042
uucagagacagugaucuca

SEQ ID NO: 1198044 - RNA, 19 nt, Artificial Sequence
  Description of Artificial Sequence: Synthetic oligonucleotide
  Sense strand starting at position 2827 of SEQ ID NO: 916966
agaucacugucucugaauu

SEQ ID NO: 1198045 - RNA, 19 nt, Artificial Sequence
  Description of Artificial Sequence: Synthetic oligonucleotide
  Antisense strand to SEQ ID NO: 1198044
aauucagagacagugaucu

SEQ ID NO: 1198046 - RNA, 19 nt, Artificial Sequence
  Description of Artificial Sequence: Synthetic oligonucleotide
  Sense strand starting at position 2900 of SEQ ID NO: 916966
cucacaagguugccagaua

SEQ ID NO: 1198047 - RNA, 19 nt, Artificial Sequence
  Description of Artificial Sequence: Synthetic oligonucleotide
  Antisense strand to SEQ ID NO: 1198046
uaucuggcaaccuugugag

SEQ ID NO: 1198048 - RNA, 19 nt, Artificial Sequence
  Description of Artificial Sequence: Synthetic oligonucleotide
  Sense strand starting at position 2916 of SEQ ID NO: 916966
auaacuucugucugcugua

SEQ ID NO: 1198049 - RNA, 19 nt, Artificial Sequence
  Description of Artificial Sequence: Synthetic oligonucleotide
  Antisense strand to SEQ ID NO: 1198048
uacagcagacagaaguuau

SEQ ID NO: 1198050 - RNA, 19 nt, Artificial Sequence
  Description of Artificial Sequence: Synthetic oligonucleotide
  Sense strand starting at position 2998 of SEQ ID NO: 916966
cacuauguugaucaggcua

SEQ ID NO: 1198051 - RNA, 19 nt, Artificial Sequence
  Description of Artificial Sequence: Synthetic oligonucleotide
  Antisense strand to SEQ ID NO: 1198050
uagccugaucaacauagug

SEQ ID NO: 1198052 - RNA, 19 nt, Artificial Sequence
  Description of Artificial Sequence: Synthetic oligonucleotide
  Sense strand starting at position 3248 of SEQ ID NO: 916966
ugggcuuauuuaggaggua

SEQ ID NO: 1198053 - RNA, 19 nt, Artificial Sequence
  Description of Artificial Sequence: Synthetic oligonucleotide
  Antisense strand to SEQ ID NO: 1198052
uaccuccuaaauaagccca

SEQ ID NO: 1198054 - RNA, 19 nt, Artificial Sequence
  Description of Artificial Sequence: Synthetic oligonucleotide
  Sense strand starting at position 3321 of SEQ ID NO: 916966
gaaguagaugucgaaguac

SEQ ID NO: 1198055 - RNA, 19 nt, Artificial Sequence
  Description of Artificial Sequence: Synthetic oligonucleotide
  Antisense strand to SEQ ID NO: 1198054
guacuucgacaucuacuuc

SEQ ID NO: 1198056 - RNA, 19 nt, Artificial Sequence
  Description of Artificial Sequence: Synthetic oligonucleotide
  Sense strand starting at position 3520 of SEQ ID NO: 916966
guggaaggaucgccucagu

SEQ ID NO: 1198057 - RNA, 19 nt, Artificial Sequence
  Description of Artificial Sequence: Synthetic oligonucleotide
  Antisense strand to SEQ ID NO: 1198056
acugaggcgauccuuccac

SEQ ID NO: 1198058 - RNA, 19 nt, Artificial Sequence
  Description of Artificial Sequence: Synthetic oligonucleotide
  Sense strand starting at position 3712 of SEQ ID NO: 916966
gugauaucuuuagcaccuu

SEQ ID NO: 1198059 - RNA, 19 nt, Artificial Sequence
  Description of Artificial Sequence: Synthetic oligonucleotide
  Antisense strand to SEQ ID NO: 1198058
aaggugcuaaagauaucac

SEQ ID NO: 1198060 - RNA, 19 nt, Artificial Sequence
  Description of Artificial Sequence: Synthetic oligonucleotide
  Sense strand starting at position 3806 of SEQ ID NO: 916966
ucugcaaaggauugcuuua

SEQ ID NO: 1198061 - RNA, 19 nt, Artificial Sequence
  Description of Artificial Sequence: Synthetic oligonucleotide
  Antisense strand to SEQ ID NO: 1198060
uaaagcaauccuuugcaga

SEQ ID NO: 1198062 - RNA, 19 nt, Artificial Sequence
  Description of Artificial Sequence: Synthetic oligonucleotide
  Sense strand starting at position 3821 of SEQ ID NO: 916966
uuuagcaucugacugaaau

SEQ ID NO: 1198063 - RNA, 19 nt, Artificial Sequence
  Description of Artificial Sequence: Synthetic oligonucleotide
  Antisense strand to SEQ ID NO: 1198062
auuucagucagaugcuaaa

SEQ ID NO: 1198064 - RNA, 19 nt, Artificial Sequence
  Description of Artificial Sequence: Synthetic oligonucleotide
  Sense strand starting at position 3822 of SEQ ID NO: 916966
uuagcaucugacugaaauu

SEQ ID NO: 1198065 - RNA, 19 nt, Artificial Sequence
  Description of Artificial Sequence: Synthetic oligonucleotide
  Antisense strand to SEQ ID NO: 1198064
aauuucagucagaugcuaa

SEQ ID NO: 1198066 - RNA, 19 nt, Artificial Sequence
  Description of Artificial Sequence: Synthetic oligonucleotide
  Sense strand starting at position 3832 of SEQ ID NO: 916966
acugaaauucuggacugcu

SEQ ID NO: 1198067 - RNA, 19 nt, Artificial Sequence
  Description of Artificial Sequence: Synthetic oligonucleotide
  Antisense strand to SEQ ID NO: 1198066
agcaguccagaauuucagu

SEQ ID NO: 1198068 - RNA, 19 nt, Artificial Sequence
  Description of Artificial Sequence: Synthetic oligonucleotide
  Sense strand starting at position 544 of SEQ ID NO: 916967
agacuuaagugagauauaa

SEQ ID NO: 1198069 - RNA, 19 nt, Artificial Sequence
  Description of Artificial Sequence: Synthetic oligonucleotide
  Antisense strand to SEQ ID NO: 1198068
uuauaucucacuuaagucu

SEQ ID NO: 1198070 - RNA, 19 nt, Artificial Sequence
  Description of Artificial Sequence: Synthetic oligonucleotide
  Sense strand starting at position 552 of SEQ ID NO: 916967
gugagauauaaucacgcca

SEQ ID NO: 1198071 - RNA, 19 nt, Artificial Sequence
  Description of Artificial Sequence: Synthetic oligonucleotide
  Antisense strand to SEQ ID NO: 1198070
uggcgugauuauaucucac

SEQ ID NO: 1198072 - RNA, 19 nt, Artificial Sequence
  Description of Artificial Sequence: Synthetic oligonucleotide
  Sense strand starting at position 720 of SEQ ID NO: 916967
cuuuaagaaucggcugcua

SEQ ID NO: 1198073 - RNA, 19 nt, Artificial Sequence
  Description of Artificial Sequence: Synthetic oligonucleotide
  Antisense strand to SEQ ID NO: 1198072
uagcagccgauucuuaaag

SEQ ID NO: 1198074 - RNA, 19 nt, Artificial Sequence
  Description of Artificial Sequence: Synthetic oligonucleotide
  Sense strand starting at position 722 of SEQ ID NO: 916967
uuaagaaucggcugcuaug

SEQ ID NO: 1198075 - RNA, 19 nt, Artificial Sequence
  Description of Artificial Sequence: Synthetic oligonucleotide
  Antisense strand to SEQ ID NO: 1198074
cauagcagccgauucuuaa

SEQ ID NO: 1198076 - RNA, 19 nt, Artificial Sequence
  Description of Artificial Sequence: Synthetic oligonucleotide
  Sense strand starting at position 783 of SEQ ID NO: 916967
ucaaucuuagcgggucaca

SEQ ID NO: 1198077 - RNA, 19 nt, Artificial Sequence
  Description of Artificial Sequence: Synthetic oligonucleotide
  Antisense strand to SEQ ID NO: 1198076
ugugacccgcuaagauuga

SEQ ID NO: 1198078 - RNA, 19 nt, Artificial Sequence
  Description of Artificial Sequence: Synthetic oligonucleotide
  Sense strand starting at position 865 of SEQ ID NO: 916967
ucuggagugcagugguaau

SEQ ID NO: 1198079 - RNA, 19 nt, Artificial Sequence
  Description of Artificial Sequence: Synthetic oligonucleotide
  Antisense strand to SEQ ID NO: 1198078
auuaccacugcacuccaga

SEQ ID NO: 1198080 - RNA, 19 nt, Artificial Sequence
  Description of Artificial Sequence: Synthetic oligonucleotide
  Sense strand starting at position 1092 of SEQ ID NO: 916967
ccagccaaacgucaaauua

SEQ ID NO: 1198081 - RNA, 19 nt, Artificial Sequence
  Description of Artificial Sequence: Synthetic oligonucleotide
  Antisense strand to SEQ ID NO: 1198080
uaauuugacguuuggcugg

SEQ ID NO: 1198082 - RNA, 19 nt, Artificial Sequence
  Description of Artificial Sequence: Synthetic oligonucleotide
  Sense strand starting at position 1126 of SEQ ID NO: 916967
ccacuaaauguguaauucu

SEQ ID NO: 1198083 - RNA, 19 nt, Artificial Sequence
  Description of Artificial Sequence: Synthetic oligonucleotide
  Antisense strand to SEQ ID NO: 1198082
agaauuacacauuuagugg

SEQ ID NO: 1198084 - RNA, 19 nt, Artificial Sequence
  Description of Artificial Sequence: Synthetic oligonucleotide
  Sense strand starting at position 1129 of SEQ ID NO: 916967
cuaaauguguaauucuaga

SEQ ID NO: 1198085 - RNA, 19 nt, Artificial Sequence
  Description of Artificial Sequence: Synthetic oligonucleotide
  Antisense strand to SEQ ID NO: 1198084
ucuagaauuacacauuuag

SEQ ID NO: 1198086 - RNA, 19 nt, Artificial Sequence
  Description of Artificial Sequence: Synthetic oligonucleotide
  Sense strand starting at position 1184 of SEQ ID NO: 916967
acauaugacuccuaagaag

SEQ ID NO: 1198087 - RNA, 19 nt, Artificial Sequence
  Description of Artificial Sequence: Synthetic oligonucleotide
  Antisense strand to SEQ ID NO: 1198086
cuucuuaggagucauaugu

SEQ ID NO: 1198088 - RNA, 19 nt, Artificial Sequence
  Description of Artificial Sequence: Synthetic oligonucleotide
  Sense strand starting at position 1187 of SEQ ID NO: 916967
uaugacuccuaagaaguga

SEQ ID NO: 1198089 - RNA, 19 nt, Artificial Sequence
  Description of Artificial Sequence: Synthetic oligonucleotide
  Antisense strand to SEQ ID NO: 1198088
ucacuucuuaggagucaua

SEQ ID NO: 1198090 - RNA, 19 nt, Artificial Sequence
  Description of Artificial Sequence: Synthetic oligonucleotide
  Sense strand starting at position 1284 of SEQ ID NO: 916967
agagaagggucuuaacaua

SEQ ID NO: 1198091 - RNA, 19 nt, Artificial Sequence
  Description of Artificial Sequence: Synthetic oligonucleotide
  Antisense strand to SEQ ID NO: 1198090
uauguuaagacccuucucu

SEQ ID NO: 1198092 - RNA, 19 nt, Artificial Sequence
  Description of Artificial Sequence: Synthetic oligonucleotide
  Sense strand starting at position 1292 of SEQ ID NO: 916967
gucuuaacauagucacauu

SEQ ID NO: 1198093 - RNA, 19 nt, Artificial Sequence
  Description of Artificial Sequence: Synthetic oligonucleotide
  Antisense strand to SEQ ID NO: 1198092
aaugugacuauguuaagac

SEQ ID NO: 1198094 - RNA, 19 nt, Artificial Sequence
  Description of Artificial Sequence: Synthetic oligonucleotide
  Sense strand starting at position 1302 of SEQ ID NO: 916967
agucacauuuaguaagaua

SEQ ID NO: 1198095 - RNA, 19 nt, Artificial Sequence
  Description of Artificial Sequence: Synthetic oligonucleotide
  Antisense strand to SEQ ID NO: 1198094
uaucuuacuaaaugugacu

SEQ ID NO: 1198096 - RNA, 19 nt, Artificial Sequence
  Description of Artificial Sequence: Synthetic oligonucleotide
  Sense strand starting at position 1326 of SEQ ID NO: 916967
uuggccucucuuuaaguga

SEQ ID NO: 1198097 - RNA, 19 nt, Artificial Sequence
  Description of Artificial Sequence: Synthetic oligonucleotide
  Antisense strand to SEQ ID NO: 1198096
ucacuuaaagagaggccaa

SEQ ID NO: 1198098 - RNA, 19 nt, Artificial Sequence
  Description of Artificial Sequence: Synthetic oligonucleotide
  Sense strand starting at position 1396 of SEQ ID NO: 916967
cgucuugggcugcaagaau

SEQ ID NO: 1198099 - RNA, 19 nt, Artificial Sequence
  Description of Artificial Sequence: Synthetic oligonucleotide
  Antisense strand to SEQ ID NO: 1198098
auucuugcagcccaagacg

SEQ ID NO: 1198100 - RNA, 19 nt, Artificial Sequence
  Description of Artificial Sequence: Synthetic oligonucleotide
  Sense strand starting at position 1430 of SEQ ID NO: 916967
gcaucacuguugucuggga

SEQ ID NO: 1198101 - RNA, 19 nt, Artificial Sequence
  Description of Artificial Sequence: Synthetic oligonucleotide
  Antisense strand to SEQ ID NO: 1198100
ucccagacaacagugaugc

SEQ ID NO: 1198102 - RNA, 19 nt, Artificial Sequence
  Description of Artificial Sequence: Synthetic oligonucleotide
  Sense strand starting at position 1510 of SEQ ID NO: 916967
ucauuuaccugacagugau

SEQ ID NO: 1198103 - RNA, 19 nt, Artificial Sequence
  Description of Artificial Sequence: Synthetic oligonucleotide
  Antisense strand to SEQ ID NO: 1198102
aucacugucagguaaauga

SEQ ID NO: 1198104 - RNA, 19 nt, Artificial Sequence
  Description of Artificial Sequence: Synthetic oligonucleotide
  Sense strand starting at position 1536 of SEQ ID NO: 916967
gcuacuucucaggguuauu

SEQ ID NO: 1198105 - RNA, 19 nt, Artificial Sequence
  Description of Artificial Sequence: Synthetic oligonucleotide
  Antisense strand to SEQ ID NO: 1198104
aauaacccugagaaguagc

SEQ ID NO: 1198106 - RNA, 19 nt, Artificial Sequence
  Description of Artificial Sequence: Synthetic oligonucleotide
  Sense strand starting at position 1541 of SEQ ID NO: 916967
uucucaggguuauuguuua

SEQ ID NO: 1198107 - RNA, 19 nt, Artificial Sequence
  Description of Artificial Sequence: Synthetic oligonucleotide
  Antisense strand to SEQ ID NO: 1198106
uaaacaauaacccugagaa

SEQ ID NO: 1198108 - RNA, 19 nt, Artificial Sequence
  Description of Artificial Sequence: Synthetic oligonucleotide
  Sense strand starting at position 1545 of SEQ ID NO: 916967
caggguuauuguuuagaga

SEQ ID NO: 1198109 - RNA, 19 nt, Artificial Sequence
  Description of Artificial Sequence: Synthetic oligonucleotide
  Antisense strand to SEQ ID NO: 1198108
ucucuaaacaauaacccug

SEQ ID NO: 1198110 - RNA, 19 nt, Artificial Sequence
  Description of Artificial Sequence: Synthetic oligonucleotide
  Sense strand starting at position 1602 of SEQ ID NO: 916967
guaagugcucaauaagagu

SEQ ID NO: 1198111 - RNA, 19 nt, Artificial Sequence
  Description of Artificial Sequence: Synthetic oligonucleotide
  Antisense strand to SEQ ID NO: 1198110
acucuuauugagcacuuac

SEQ ID NO: 1198112 - RNA, 19 nt, Artificial Sequence
  Description of Artificial Sequence: Synthetic oligonucleotide
  Sense strand starting at position 2419 of SEQ ID NO: 916967
aggagauccugagucaguu

SEQ ID NO: 1198113 - RNA, 19 nt, Artificial Sequence
  Description of Artificial Sequence: Synthetic oligonucleotide
  Antisense strand to SEQ ID NO: 1198112
aacugacucaggaucuccu

SEQ ID NO: 1198114 - RNA, 19 nt, Artificial Sequence
  Description of Artificial Sequence: Synthetic oligonucleotide
  Sense strand starting at position 2425 of SEQ ID NO: 916967
uccugagucaguuagucua

SEQ ID NO: 1198115 - RNA, 19 nt, Artificial Sequence
  Description of Artificial Sequence: Synthetic oligonucleotide
  Antisense strand to SEQ ID NO: 1198114
uagacuaacugacucagga

SEQ ID NO: 1198116 - RNA, 19 nt, Artificial Sequence
  Description of Artificial Sequence: Synthetic oligonucleotide
  Sense strand starting at position 2806 of SEQ ID NO: 916967
aacaaauguccggacgcaa

SEQ ID NO: 1198117 - RNA, 19 nt, Artificial Sequence
  Description of Artificial Sequence: Synthetic oligonucleotide
  Antisense strand to SEQ ID NO: 1198116
uugcguccggacauuuguu

SEQ ID NO: 1198118 - RNA, 19 nt, Artificial Sequence
  Description of Artificial Sequence: Synthetic oligonucleotide
  Sense strand starting at position 2827 of SEQ ID NO: 916967
agaugaguuggacggaaau

SEQ ID NO: 1198119 - RNA, 19 nt, Artificial Sequence
  Description of Artificial Sequence: Synthetic oligonucleotide
  Antisense strand to SEQ ID NO: 1198118
auuuccguccaacucaucu

SEQ ID NO: 1198120 - RNA, 19 nt, Artificial Sequence
  Description of Artificial Sequence: Synthetic oligonucleotide
  Sense strand starting at position 2902 of SEQ ID NO: 916967
cugugagaucacugucucu

SEQ ID NO: 1198121 - RNA, 19 nt, Artificial Sequence
  Description of Artificial Sequence: Synthetic oligonucleotide
  Antisense strand to SEQ ID NO: 1198120
agagacagugaucucacag

SEQ ID NO: 1198122 - RNA, 19 nt, Artificial Sequence
  Description of Artificial Sequence: Synthetic oligonucleotide
  Sense strand starting at position 2905 of SEQ ID NO: 916967
ugagaucacugucucugaa

SEQ ID NO: 1198123 - RNA, 19 nt, Artificial Sequence
  Description of Artificial Sequence: Synthetic oligonucleotide
  Antisense strand to SEQ ID NO: 1198122
uucagagacagugaucuca

SEQ ID NO: 1198124 - RNA, 19 nt, Artificial Sequence
  Description of Artificial Sequence: Synthetic oligonucleotide
  Sense strand starting at position 2907 of SEQ ID NO: 916967
agaucacugucucugaauu

SEQ ID NO: 1198125 - RNA, 19 nt, Artificial Sequence
  Description of Artificial Sequence: Synthetic oligonucleotide
  Antisense strand to SEQ ID NO: 1198124
aauucagagacagugaucu

SEQ ID NO: 1198126 - RNA, 19 nt, Artificial Sequence
  Description of Artificial Sequence: Synthetic oligonucleotide
  Sense strand starting at position 2980 of SEQ ID NO: 916967
cucacaagguugccagaua

SEQ ID NO: 1198127 - RNA, 19 nt, Artificial Sequence
  Description of Artificial Sequence: Synthetic oligonucleotide
  Antisense strand to SEQ ID NO: 1198126
uaucuggcaaccuugugag

SEQ ID NO: 1198128 - RNA, 19 nt, Artificial Sequence
  Description of Artificial Sequence: Synthetic oligonucleotide
  Sense strand starting at position 2996 of SEQ ID NO: 916967
auaacuucugucugcugua

SEQ ID NO: 1198129 - RNA, 19 nt, Artificial Sequence
  Description of Artificial Sequence: Synthetic oligonucleotide
  Antisense strand to SEQ ID NO: 1198128
uacagcagacagaaguuau

SEQ ID NO: 1198130 - RNA, 19 nt, Artificial Sequence
  Description of Artificial Sequence: Synthetic oligonucleotide
  Sense strand starting at position 3078 of SEQ ID NO: 916967
cacuauguugaucaggcua

SEQ ID NO: 1198131 - RNA, 19 nt, Artificial Sequence
  Description of Artificial Sequence: Synthetic oligonucleotide
  Antisense strand to SEQ ID NO: 1198130
uagccugaucaacauagug

SEQ ID NO: 1198132 - RNA, 19 nt, Artificial Sequence
  Description of Artificial Sequence: Synthetic oligonucleotide
  Sense strand starting at position 3328 of SEQ ID NO: 916967
ugggcuuauuuaggaggua

SEQ ID NO: 1198133 - RNA, 19 nt, Artificial Sequence
  Description of Artificial Sequence: Synthetic oligonucleotide
  Antisense strand to SEQ ID NO: 1198132
uaccuccuaaauaagccca

SEQ ID NO: 1198134 - RNA, 19 nt, Artificial Sequence
  Description of Artificial Sequence: Synthetic oligonucleotide
  Sense strand starting at position 3401 of SEQ ID NO: 916967
gaaguagaugucgaaguac

SEQ ID NO: 1198135 - RNA, 19 nt, Artificial Sequence
  Description of Artificial Sequence: Synthetic oligonucleotide
  Antisense strand to SEQ ID NO: 1198134
guacuucgacaucuacuuc

SEQ ID NO: 1198136 - RNA, 19 nt, Artificial Sequence
  Description of Artificial Sequence: Synthetic oligonucleotide
  Sense strand starting at position 3600 of SEQ ID NO: 916967
guggaaggaucgccucagu

SEQ ID NO: 1198137 - RNA, 19 nt, Artificial Sequence
  Description of Artificial Sequence: Synthetic oligonucleotide
  Antisense strand to SEQ ID NO: 1198136
acugaggcgauccuuccac

SEQ ID NO: 1198138 - RNA, 19 nt, Artificial Sequence
  Description of Artificial Sequence: Synthetic oligonucleotide
  Sense strand starting at position 3792 of SEQ ID NO: 916967
gugauaucuuuagcaccuu

SEQ ID NO: 1198139 - RNA, 19 nt, Artificial Sequence
  Description of Artificial Sequence: Synthetic oligonucleotide
  Antisense strand to SEQ ID NO: 1198138
aaggugcuaaagauaucac

SEQ ID NO: 1198140 - RNA, 19 nt, Artificial Sequence
  Description of Artificial Sequence: Synthetic oligonucleotide
  Sense strand starting at position 3886 of SEQ ID NO: 916967
ucugcaaaggauugcuuua

SEQ ID NO: 1198141 - RNA, 19 nt, Artificial Sequence
  Description of Artificial Sequence: Synthetic oligonucleotide
  Antisense strand to SEQ ID NO: 1198140
uaaagcaauccuuugcaga

SEQ ID NO: 1198142 - RNA, 19 nt, Artificial Sequence
  Description of Artificial Sequence: Synthetic oligonucleotide
  Sense strand starting at position 3901 of SEQ ID NO: 916967
uuuagcaucugacugaaau

SEQ ID NO: 1198143 - RNA, 19 nt, Artificial Sequence
  Description of Artificial Sequence: Synthetic oligonucleotide
  Antisense strand to SEQ ID NO: 1198142
auuucagucagaugcuaaa

SEQ ID NO: 1198144 - RNA, 19 nt, Artificial Sequence
  Description of Artificial Sequence: Synthetic oligonucleotide
  Sense strand starting at position 3902 of SEQ ID NO: 916967
uuagcaucugacugaaauu

SEQ ID NO: 1198145 - RNA, 19 nt, Artificial Sequence
  Description of Artificial Sequence: Synthetic oligonucleotide
  Antisense strand to SEQ ID NO: 1198144
aauuucagucagaugcuaa

SEQ ID NO: 1198146 - RNA, 19 nt, Artificial Sequence
  Description of Artificial Sequence: Synthetic oligonucleotide
  Sense strand starting at position 3912 of SEQ ID NO: 916967
acugaaauucuggacugcu

SEQ ID NO: 1198147 - RNA, 19 nt, Artificial Sequence
  Description of Artificial Sequence: Synthetic oligonucleotide
  Antisense strand to SEQ ID NO: 1198146
agcaguccagaauuucagu

SEQ ID NO: 1198148 - RNA, 19 nt, Artificial Sequence
  Description of Artificial Sequence: Synthetic oligonucleotide
  Sense strand starting at position 23 of SEQ ID NO: 916968
cucagaguugggcaagauc

SEQ ID NO: 1198149 - RNA, 19 nt, Artificial Sequence
  Description of Artificial Sequence: Synthetic oligonucleotide
  Antisense strand to SEQ ID NO: 1198148
gaucuugcccaacucugag

SEQ ID NO: 1198150 - RNA, 19 nt, Artificial Sequence
  Description of Artificial Sequence: Synthetic oligonucleotide
  Sense strand starting at position 26 of SEQ ID NO: 916968
agaguugggcaagaucagu

SEQ ID NO: 1198151 - RNA, 19 nt, Artificial Sequence
  Description of Artificial Sequence: Synthetic oligonucleotide
  Antisense strand to SEQ ID NO: 1198150
acugaucuugcccaacucu

SEQ ID NO: 1198152 - RNA, 19 nt, Artificial Sequence
  Description of Artificial Sequence: Synthetic oligonucleotide
  Sense strand starting at position 31 of SEQ ID NO: 916968
ugggcaagaucagugguua

SEQ ID NO: 1198153 - RNA, 19 nt, Artificial Sequence
  Description of Artificial Sequence: Synthetic oligonucleotide
  Antisense strand to SEQ ID NO: 1198152
uaaccacugaucuugccca

SEQ ID NO: 1198154 - RNA, 19 nt, Artificial Sequence
  Description of Artificial Sequence: Synthetic oligonucleotide
  Sense strand starting at position 32 of SEQ ID NO: 916968
gggcaagaucagugguuau

SEQ ID NO: 1198155 - RNA, 19 nt, Artificial Sequence
  Description of Artificial Sequence: Synthetic oligonucleotide
  Antisense strand to SEQ ID NO: 1198154
auaaccacugaucuugccc

SEQ ID NO: 1198156 - RNA, 19 nt, Artificial Sequence
  Description of Artificial Sequence: Synthetic oligonucleotide
  Sense strand starting at position 552 of SEQ ID NO: 916968
gaggucucgcuauguuaca

SEQ ID NO: 1198157 - RNA, 19 nt, Artificial Sequence
  Description of Artificial Sequence: Synthetic oligonucleotide
  Antisense strand to SEQ ID NO: 1198156
uguaacauagcgagaccuc

SEQ ID NO: 1198158 - RNA, 19 nt, Artificial Sequence
  Description of Artificial Sequence: Synthetic oligonucleotide
  Sense strand starting at position 616 of SEQ ID NO: 916968
cucccaaagcgcuaugagu

SEQ ID NO: 1198159 - RNA, 19 nt, Artificial Sequence
  Description of Artificial Sequence: Synthetic oligonucleotide
  Antisense strand to SEQ ID NO: 1198158
acucauagcgcuuugggag

SEQ ID NO: 1198160 - RNA, 19 nt, Artificial Sequence
  Description of Artificial Sequence: Synthetic oligonucleotide
  Sense strand starting at position 680 of SEQ ID NO: 916968
ugacccauuugaugaucua

SEQ ID NO: 1198161 - RNA, 19 nt, Artificial Sequence
  Description of Artificial Sequence: Synthetic oligonucleotide
  Antisense strand to SEQ ID NO: 1198160
uagaucaucaaauggguca

SEQ ID NO: 1198162 - RNA, 19 nt, Artificial Sequence
  Description of Artificial Sequence: Synthetic oligonucleotide
  Sense strand starting at position 709 of SEQ ID NO: 916968
gugacccucucaucagaaa

SEQ ID NO: 1198163 - RNA, 19 nt, Artificial Sequence
  Description of Artificial Sequence: Synthetic oligonucleotide
  Antisense strand to SEQ ID NO: 1198162
uuucugaugagagggucac

SEQ ID NO: 1198164 - RNA, 19 nt, Artificial Sequence
  Description of Artificial Sequence: Synthetic oligonucleotide
  Sense strand starting at position 873 of SEQ ID NO: 916968
uguugagagcauggagaaa

SEQ ID NO: 1198165 - RNA, 19 nt, Artificial Sequence
  Description of Artificial Sequence: Synthetic oligonucleotide
  Antisense strand to SEQ ID NO: 1198164
uuucuccaugcucucaaca

SEQ ID NO: 1198166 - RNA, 19 nt, Artificial Sequence
  Description of Artificial Sequence: Synthetic oligonucleotide
  Sense strand starting at position 891 of SEQ ID NO: 916968
agccaugccuuguuaaaua

SEQ ID NO: 1198167 - RNA, 19 nt, Artificial Sequence
  Description of Artificial Sequence: Synthetic oligonucleotide
  Antisense strand to SEQ ID NO: 1198166
uauuuaacaaggcauggcu

SEQ ID NO: 1198168 - RNA, 19 nt, Artificial Sequence
  Description of Artificial Sequence: Synthetic oligonucleotide
  Sense strand starting at position 1193 of SEQ ID NO: 916968
gugacaaccucucugaacu

SEQ ID NO: 1198169 - RNA, 19 nt, Artificial Sequence
  Description of Artificial Sequence: Synthetic oligonucleotide
  Antisense strand to SEQ ID NO: 1198168
aguucagagagguugucac

SEQ ID NO: 1198170 - RNA, 19 nt, Artificial Sequence
  Description of Artificial Sequence: Synthetic oligonucleotide
  Sense strand starting at position 1210 of SEQ ID NO: 916968
cuuguuucuuccuugguca

SEQ ID NO: 1198171 - RNA, 19 nt, Artificial Sequence
  Description of Artificial Sequence: Synthetic oligonucleotide
  Antisense strand to SEQ ID NO: 1198170
ugaccaaggaagaaacaag

SEQ ID NO: 1198172 - RNA, 19 nt, Artificial Sequence
  Description of Artificial Sequence: Synthetic oligonucleotide
  Sense strand starting at position 1211 of SEQ ID NO: 916968
uuguuucuuccuuggucaa

SEQ ID NO: 1198173 - RNA, 19 nt, Artificial Sequence
  Description of Artificial Sequence: Synthetic oligonucleotide
  Antisense strand to SEQ ID NO: 1198172
uugaccaaggaagaaacaa

SEQ ID NO: 1198174 - RNA, 19 nt, Artificial Sequence
  Description of Artificial Sequence: Synthetic oligonucleotide
  Sense strand starting at position 1212 of SEQ ID NO: 916968
uguuucuuccuuggucaaa

SEQ ID NO: 1198175 - RNA, 19 nt, Artificial Sequence
  Description of Artificial Sequence: Synthetic oligonucleotide
  Antisense strand to SEQ ID NO: 1198174
uuugaccaaggaagaaaca

SEQ ID NO: 1198176 - RNA, 19 nt, Artificial Sequence
  Description of Artificial Sequence: Synthetic oligonucleotide
  Sense strand starting at position 1213 of SEQ ID NO: 916968
guuucuuccuuggucaaag

SEQ ID NO: 1198177 - RNA, 19 nt, Artificial Sequence
  Description of Artificial Sequence: Synthetic oligonucleotide
  Antisense strand to SEQ ID NO: 1198176
cuuugaccaaggaagaaac

SEQ ID NO: 1198178 - RNA, 19 nt, Artificial Sequence
  Description of Artificial Sequence: Synthetic oligonucleotide
  Sense strand starting at position 1241 of SEQ ID NO: 916968
agauauuacuguucuuacu

SEQ ID NO: 1198179 - RNA, 19 nt, Artificial Sequence
  Description of Artificial Sequence: Synthetic oligonucleotide
  Antisense strand to SEQ ID NO: 1198178
aguaagaacaguaauaucu

SEQ ID NO: 1198180 - RNA, 19 nt, Artificial Sequence
  Description of Artificial Sequence: Synthetic oligonucleotide
  Sense strand starting at position 1267 of SEQ ID NO: 916968
ugggaugaugcacgauguu

SEQ ID NO: 1198181 - RNA, 19 nt, Artificial Sequence
  Description of Artificial Sequence: Synthetic oligonucleotide
  Antisense strand to SEQ ID NO: 1198180
aacaucgugcaucauccca

SEQ ID NO: 1198182 - RNA, 19 nt, Artificial Sequence
  Description of Artificial Sequence: Synthetic oligonucleotide
  Sense strand starting at position 1384 of SEQ ID NO: 916968
ugcgacuuugcagagaaca

SEQ ID NO: 1198183 - RNA, 19 nt, Artificial Sequence
  Description of Artificial Sequence: Synthetic oligonucleotide
  Antisense strand to SEQ ID NO: 1198182
uguucucugcaaagucgca

SEQ ID NO: 1198184 - RNA, 19 nt, Artificial Sequence
  Description of Artificial Sequence: Synthetic oligonucleotide
  Sense strand starting at position 1636 of SEQ ID NO: 916968
ggguuagcaguggaagaau

SEQ ID NO: 1198185 - RNA, 19 nt, Artificial Sequence
  Description of Artificial Sequence: Synthetic oligonucleotide
  Antisense strand to SEQ ID NO: 1198184
auucuuccacugcuaaccc

SEQ ID NO: 1198186 - RNA, 19 nt, Artificial Sequence
  Description of Artificial Sequence: Synthetic oligonucleotide
  Sense strand starting at position 1687 of SEQ ID NO: 916968
ggcguugucgacucccgaa

SEQ ID NO: 1198187 - RNA, 19 nt, Artificial Sequence
  Description of Artificial Sequence: Synthetic oligonucleotide
  Antisense strand to SEQ ID NO: 1198186
uucgggagucgacaacgcc

SEQ ID NO: 1198188 - RNA, 19 nt, Artificial Sequence
  Description of Artificial Sequence: Synthetic oligonucleotide
  Sense strand starting at position 2158 of SEQ ID NO: 916968
ccacuuaguaccuggguga

SEQ ID NO: 1198189 - RNA, 19 nt, Artificial Sequence
  Description of Artificial Sequence: Synthetic oligonucleotide
  Antisense strand to SEQ ID NO: 1198188
ucacccagguacuaagugg

SEQ ID NO: 1198190 - RNA, 19 nt, Artificial Sequence
  Description of Artificial Sequence: Synthetic oligonucleotide
  Sense strand starting at position 2399 of SEQ ID NO: 916968
gggacuugcuccuuaauaa

SEQ ID NO: 1198191 - RNA, 19 nt, Artificial Sequence
  Description of Artificial Sequence: Synthetic oligonucleotide
  Antisense strand to SEQ ID NO: 1198190
uuauuaaggagcaaguccc

SEQ ID NO: 1198192 - RNA, 19 nt, Artificial Sequence
  Description of Artificial Sequence: Synthetic oligonucleotide
  Sense strand starting at position 2400 of SEQ ID NO: 916968
ggacuugcuccuuaauaaa

SEQ ID NO: 1198193 - RNA, 19 nt, Artificial Sequence
  Description of Artificial Sequence: Synthetic oligonucleotide
  Antisense strand to SEQ ID NO: 1198192
uuuauuaaggagcaagucc

SEQ ID NO: 1198194 - RNA, 19 nt, Artificial Sequence
  Description of Artificial Sequence: Synthetic oligonucleotide
  Sense strand starting at position 2472 of SEQ ID NO: 916968
ugccgcgcuguguuuauua

SEQ ID NO: 1198195 - RNA, 19 nt, Artificial Sequence
  Description of Artificial Sequence: Synthetic oligonucleotide
  Antisense strand to SEQ ID NO: 1198194
uaauaaacacagcgcggca

SEQ ID NO: 1198196 - RNA, 19 nt, Artificial Sequence
  Description of Artificial Sequence: Synthetic oligonucleotide
  Sense strand starting at position 2479 of SEQ ID NO: 916968
cuguguuuauuaucuuuac

SEQ ID NO: 1198197 - RNA, 19 nt, Artificial Sequence
  Description of Artificial Sequence: Synthetic oligonucleotide
  Antisense strand to SEQ ID NO: 1198196
guaaagauaauaaacacag

SEQ ID NO: 1198198 - RNA, 19 nt, Artificial Sequence
  Description of Artificial Sequence: Synthetic oligonucleotide
  Sense strand starting at position 2491 of SEQ ID NO: 916968
ucuuuacuaucguuuauga

SEQ ID NO: 1198199 - RNA, 19 nt, Artificial Sequence
  Description of Artificial Sequence: Synthetic oligonucleotide
  Antisense strand to SEQ ID NO: 1198198
ucauaaacgauaguaaaga

SEQ ID NO: 1198200 - RNA, 19 nt, Artificial Sequence
  Description of Artificial Sequence: Synthetic oligonucleotide
  Sense strand starting at position 2493 of SEQ ID NO: 916968
uuuacuaucguuuaugaug

SEQ ID NO: 1198201 - RNA, 19 nt, Artificial Sequence
  Description of Artificial Sequence: Synthetic oligonucleotide
  Antisense strand to SEQ ID NO: 1198200
caucauaaacgauaguaaa

SEQ ID NO: 1198202 - RNA, 19 nt, Artificial Sequence
  Description of Artificial Sequence: Synthetic oligonucleotide
  Sense strand starting at position 2813 of SEQ ID NO: 916968
ggagaauuguaugaaucug

SEQ ID NO: 1198203 - RNA, 19 nt, Artificial Sequence
  Description of Artificial Sequence: Synthetic oligonucleotide
  Antisense strand to SEQ ID NO: 1198202
cagauucauacaauucucc

SEQ ID NO: 1198204 - RNA, 19 nt, Artificial Sequence
  Description of Artificial Sequence: Synthetic oligonucleotide
  Sense strand starting at position 3245 of SEQ ID NO: 916968
uuauaucaguagccucaga

SEQ ID NO: 1198205 - RNA, 19 nt, Artificial Sequence
  Description of Artificial Sequence: Synthetic oligonucleotide
  Antisense strand to SEQ ID NO: 1198204
ucugaggcuacugauauaa

SEQ ID NO: 1198206 - RNA, 19 nt, Artificial Sequence
  Description of Artificial Sequence: Synthetic oligonucleotide
  Sense strand starting at position 3336 of SEQ ID NO: 916968
ucgccuucccuccacagau

SEQ ID NO: 1198207 - RNA, 19 nt, Artificial Sequence
  Description of Artificial Sequence: Synthetic oligonucleotide
  Antisense strand to SEQ ID NO: 1198206
aucuguggagggaaggcga

SEQ ID NO: 1198208 - RNA, 19 nt, Artificial Sequence
  Description of Artificial Sequence: Synthetic oligonucleotide
  Sense strand starting at position 3383 of SEQ ID NO: 916968
agucaaccucucuaaguuu

SEQ ID NO: 1198209 - RNA, 19 nt, Artificial Sequence
  Description of Artificial Sequence: Synthetic oligonucleotide
  Antisense strand to SEQ ID NO: 1198208
aaacuuagagagguugacu

SEQ ID NO: 1198210 - RNA, 19 nt, Artificial Sequence
  Description of Artificial Sequence: Synthetic oligonucleotide
  Sense strand starting at position 3518 of SEQ ID NO: 916968
cucaguuaaugaucaguua

SEQ ID NO: 1198211 - RNA, 19 nt, Artificial Sequence
  Description of Artificial Sequence: Synthetic oligonucleotide
  Antisense strand to SEQ ID NO: 1198210
uaacugaucauuaacugag

SEQ ID NO: 1198212 - RNA, 19 nt, Artificial Sequence
  Description of Artificial Sequence: Synthetic oligonucleotide
  Sense strand starting at position 3521 of SEQ ID NO: 916968
aguuaaugaucaguuacuu

SEQ ID NO: 1198213 - RNA, 19 nt, Artificial Sequence
  Description of Artificial Sequence: Synthetic oligonucleotide
  Antisense strand to SEQ ID NO: 1198212
aaguaacugaucauuaacu

SEQ ID NO: 1198214 - RNA, 19 nt, Artificial Sequence
  Description of Artificial Sequence: Synthetic oligonucleotide
  Sense strand starting at position 3526 of SEQ ID NO: 916968
augaucaguuacuuguuaa

SEQ ID NO: 1198215 - RNA, 19 nt, Artificial Sequence
  Description of Artificial Sequence: Synthetic oligonucleotide
  Antisense strand to SEQ ID NO: 1198214
uuaacaaguaacugaucau

SEQ ID NO: 1198216 - RNA, 19 nt, Artificial Sequence
  Description of Artificial Sequence: Synthetic oligonucleotide
  Sense strand starting at position 3529 of SEQ ID NO: 916968
aucaguuacuuguuaacua

SEQ ID NO: 1198217 - RNA, 19 nt, Artificial Sequence
  Description of Artificial Sequence: Synthetic oligonucleotide
  Antisense strand to SEQ ID NO: 1198216
uaguuaacaaguaacugau

SEQ ID NO: 1198218 - RNA, 19 nt, Artificial Sequence
  Description of Artificial Sequence: Synthetic oligonucleotide
  Sense strand starting at position 3545 of SEQ ID NO: 916968
cuaucagagagguggugua

SEQ ID NO: 1198219 - RNA, 19 nt, Artificial Sequence
  Description of Artificial Sequence: Synthetic oligonucleotide
  Antisense strand to SEQ ID NO: 1198218
uacaccaccucucugauag

SEQ ID NO: 1198220 - RNA, 19 nt, Artificial Sequence
  Description of Artificial Sequence: Synthetic oligonucleotide
  Sense strand starting at position 3557 of SEQ ID NO: 916968
ugguguauccuuuagcuga

SEQ ID NO: 1198221 - RNA, 19 nt, Artificial Sequence
  Description of Artificial Sequence: Synthetic oligonucleotide
  Antisense strand to SEQ ID NO: 1198220
ucagcuaaaggauacacca

SEQ ID NO: 1198222 - RNA, 19 nt, Artificial Sequence
  Description of Artificial Sequence: Synthetic oligonucleotide
  Sense strand starting at position 3559 of SEQ ID NO: 916968
guguauccuuuagcugaga

SEQ ID NO: 1198223 - RNA, 19 nt, Artificial Sequence
  Description of Artificial Sequence: Synthetic oligonucleotide
  Antisense strand to SEQ ID NO: 1198222
ucucagcuaaaggauacac

SEQ ID NO: 1198224 - RNA, 19 nt, Artificial Sequence
  Description of Artificial Sequence: Synthetic oligonucleotide
  Sense strand starting at position 3591 of SEQ ID NO: 916968
cagcauuguggcugacuga

SEQ ID NO: 1198225 - RNA, 19 nt, Artificial Sequence
  Description of Artificial Sequence: Synthetic oligonucleotide
  Antisense strand to SEQ ID NO: 1198224
ucagucagccacaaugcug

SEQ ID NO: 1198226 - RNA, 19 nt, Artificial Sequence
  Description of Artificial Sequence: Synthetic oligonucleotide
  Sense strand starting at position 3622 of SEQ ID NO: 916968
aguaaauguuugccauuau

SEQ ID NO: 1198227 - RNA, 19 nt, Artificial Sequence
  Description of Artificial Sequence: Synthetic oligonucleotide
  Antisense strand to SEQ ID NO: 1198226
auaauggcaaacauuuacu

SEQ ID NO: 1198228 - RNA, 19 nt, Artificial Sequence
  Description of Artificial Sequence: Synthetic oligonucleotide
  Sense strand starting at position 395 of SEQ ID NO: 916969
ucuugauuagcacagucaa

SEQ ID NO: 1198229 - RNA, 19 nt, Artificial Sequence
  Description of Artificial Sequence: Synthetic oligonucleotide
  Antisense strand to SEQ ID NO: 1198228
uugacugugcuaaucaaga

SEQ ID NO: 1198230 - RNA, 19 nt, Artificial Sequence
  Description of Artificial Sequence: Synthetic oligonucleotide
  Sense strand starting at position 548 of SEQ ID NO: 916969
ugaagucaggccgacauau

SEQ ID NO: 1198231 - RNA, 19 nt, Artificial Sequence
  Description of Artificial Sequence: Synthetic oligonucleotide
  Antisense strand to SEQ ID NO: 1198230
auaugucggccugacuuca

SEQ ID NO: 1198232 - RNA, 19 nt, Artificial Sequence
  Description of Artificial Sequence: Synthetic oligonucleotide
  Sense strand starting at position 609 of SEQ ID NO: 916969
gcuguaagacccugaauaa

SEQ ID NO: 1198233 - RNA, 19 nt, Artificial Sequence
  Description of Artificial Sequence: Synthetic oligonucleotide
  Antisense strand to SEQ ID NO: 1198232
uuauucagggucuuacagc

SEQ ID NO: 1198234 - RNA, 19 nt, Artificial Sequence
  Description of Artificial Sequence: Synthetic oligonucleotide
  Sense strand starting at position 629 of SEQ ID NO: 916969
gucuuacaauguguaauuu

SEQ ID NO: 1198235 - RNA, 19 nt, Artificial Sequence
  Description of Artificial Sequence: Synthetic oligonucleotide
  Antisense strand to SEQ ID NO: 1198234
aaauuacacauuguaagac

SEQ ID NO: 1198236 - RNA, 19 nt, Artificial Sequence
  Description of Artificial Sequence: Synthetic oligonucleotide
  Sense strand starting at position 644 of SEQ ID NO: 916969
auuuauucuuggcccaagu

SEQ ID NO: 1198237 - RNA, 19 nt, Artificial Sequence
  Description of Artificial Sequence: Synthetic oligonucleotide
  Antisense strand to SEQ ID NO: 1198236
acuugggccaagaauaaau

SEQ ID NO: 1198238 - RNA, 19 nt, Artificial Sequence
  Description of Artificial Sequence: Synthetic oligonucleotide
  Sense strand starting at position 729 of SEQ ID NO: 916969
uuguaaaguucuucuggga

SEQ ID NO: 1198239 - RNA, 19 nt, Artificial Sequence
  Description of Artificial Sequence: Synthetic oligonucleotide
  Antisense strand to SEQ ID NO: 1198238
ucccagaagaacuuuacaa

SEQ ID NO: 1198240 - RNA, 19 nt, Artificial Sequence
  Description of Artificial Sequence: Synthetic oligonucleotide
  Sense strand starting at position 757 of SEQ ID NO: 916969
aguaauuuauuccaggacu

SEQ ID NO: 1198241 - RNA, 19 nt, Artificial Sequence
  Description of Artificial Sequence: Synthetic oligonucleotide
  Antisense strand to SEQ ID NO: 1198240
aguccuggaauaaauuacu

SEQ ID NO: 1198242 - RNA, 19 nt, Artificial Sequence
  Description of Artificial Sequence: Synthetic oligonucleotide
  Sense strand starting at position 925 of SEQ ID NO: 916969
ugaacaggcccauauaagu

SEQ ID NO: 1198243 - RNA, 19 nt, Artificial Sequence
  Description of Artificial Sequence: Synthetic oligonucleotide
  Antisense strand to SEQ ID NO: 1198242
acuuauaugggccuguuca

SEQ ID NO: 1198244 - RNA, 19 nt, Artificial Sequence
  Description of Artificial Sequence: Synthetic oligonucleotide
  Sense strand starting at position 1228 of SEQ ID NO: 916969
uagauugacuacucgagag

SEQ ID NO: 1198245 - RNA, 19 nt, Artificial Sequence
  Description of Artificial Sequence: Synthetic oligonucleotide
  Antisense strand to SEQ ID NO: 1198244
cucucgaguagucaaucua

SEQ ID NO: 1198246 - RNA, 19 nt, Artificial Sequence
  Description of Artificial Sequence: Synthetic oligonucleotide
  Sense strand starting at position 1230 of SEQ ID NO: 916969
gauugacuacucgagagug

SEQ ID NO: 1198247 - RNA, 19 nt, Artificial Sequence
  Description of Artificial Sequence: Synthetic oligonucleotide
  Antisense strand to SEQ ID NO: 1198246
cacucucgaguagucaauc

SEQ ID NO: 1198248 - RNA, 19 nt, Artificial Sequence
  Description of Artificial Sequence: Synthetic oligonucleotide
  Sense strand starting at position 1232 of SEQ ID NO: 916969
uugacuacucgagagugua

SEQ ID NO: 1198249 - RNA, 19 nt, Artificial Sequence
  Description of Artificial Sequence: Synthetic oligonucleotide
  Antisense strand to SEQ ID NO: 1198248
uacacucucgaguagucaa

SEQ ID NO: 1198250 - RNA, 19 nt, Artificial Sequence
  Description of Artificial Sequence: Synthetic oligonucleotide
  Sense strand starting at position 1278 of SEQ ID NO: 916969
acccgugacccuuaaaguu

SEQ ID NO: 1198251 - RNA, 19 nt, Artificial Sequence
  Description of Artificial Sequence: Synthetic oligonucleotide
  Antisense strand to SEQ ID NO: 1198250
aacuuuaagggucacgggu

SEQ ID NO: 1198252 - RNA, 19 nt, Artificial Sequence
  Description of Artificial Sequence: Synthetic oligonucleotide
  Sense strand starting at position 1371 of SEQ ID NO: 916969
ggaaauguucgacacucau

SEQ ID NO: 1198253 - RNA, 19 nt, Artificial Sequence
  Description of Artificial Sequence: Synthetic oligonucleotide
  Antisense strand to SEQ ID NO: 1198252
augagugucgaacauuucc

SEQ ID NO: 1198254 - RNA, 19 nt, Artificial Sequence
  Description of Artificial Sequence: Synthetic oligonucleotide
  Sense strand starting at position 1649 of SEQ ID NO: 916969
guauuccggccgggauuua

SEQ ID NO: 1198255 - RNA, 19 nt, Artificial Sequence
  Description of Artificial Sequence: Synthetic oligonucleotide
  Antisense strand to SEQ ID NO: 1198254
uaaaucccggccggaauac

SEQ ID NO: 1198256 - RNA, 19 nt, Artificial Sequence
  Description of Artificial Sequence: Synthetic oligonucleotide
  Sense strand starting at position 2212 of SEQ ID NO: 916969
guguauaugggaugaugac

SEQ ID NO: 1198257 - RNA, 19 nt, Artificial Sequence
  Description of Artificial Sequence: Synthetic oligonucleotide
  Antisense strand to SEQ ID NO: 1198256
gucaucaucccauauacac

SEQ ID NO: 1198258 - RNA, 19 nt, Artificial Sequence
  Description of Artificial Sequence: Synthetic oligonucleotide
  Sense strand starting at position 2231 of SEQ ID NO: 916969
gcuuaucagcauuaucuag

SEQ ID NO: 1198259 - RNA, 19 nt, Artificial Sequence
  Description of Artificial Sequence: Synthetic oligonucleotide
  Antisense strand to SEQ ID NO: 1198258
cuagauaaugcugauaagc

SEQ ID NO: 1198260 - RNA, 19 nt, Artificial Sequence
  Description of Artificial Sequence: Synthetic oligonucleotide
  Sense strand starting at position 2290 of SEQ ID NO: 916969
ugcauuaucagguaaugag

SEQ ID NO: 1198261 - RNA, 19 nt, Artificial Sequence
  Description of Artificial Sequence: Synthetic oligonucleotide
  Antisense strand to SEQ ID NO: 1198260
cucauuaccugauaaugca

SEQ ID NO: 1198262 - RNA, 19 nt, Artificial Sequence
  Description of Artificial Sequence: Synthetic oligonucleotide
  Sense strand starting at position 2386 of SEQ ID NO: 916969
cugugaaaugagggugaau

SEQ ID NO: 1198263 - RNA, 19 nt, Artificial Sequence
  Description of Artificial Sequence: Synthetic oligonucleotide
  Antisense strand to SEQ ID NO: 1198262
auucacccucauuucacag

SEQ ID NO: 1198264 - RNA, 19 nt, Artificial Sequence
  Description of Artificial Sequence: Synthetic oligonucleotide
  Sense strand starting at position 2388 of SEQ ID NO: 916969
gugaaaugagggugaaugu

SEQ ID NO: 1198265 - RNA, 19 nt, Artificial Sequence
  Description of Artificial Sequence: Synthetic oligonucleotide
  Antisense strand to SEQ ID NO: 1198264
acauucacccucauuucac

SEQ ID NO: 1198266 - RNA, 19 nt, Artificial Sequence
  Description of Artificial Sequence: Synthetic oligonucleotide
  Sense strand starting at position 2484 of SEQ ID NO: 916969
ugacgucuacgagacuaga

SEQ ID NO: 1198267 - RNA, 19 nt, Artificial Sequence
  Description of Artificial Sequence: Synthetic oligonucleotide
  Antisense strand to SEQ ID NO: 1198266
ucuagucucguagacguca

SEQ ID NO: 1198268 - RNA, 19 nt, Artificial Sequence
  Description of Artificial Sequence: Synthetic oligonucleotide
  Sense strand starting at position 2653 of SEQ ID NO: 916969
guguuuguacuuuauuaag

SEQ ID NO: 1198269 - RNA, 19 nt, Artificial Sequence
  Description of Artificial Sequence: Synthetic oligonucleotide
  Antisense strand to SEQ ID NO: 1198268
cuuaauaaaguacaaacac

SEQ ID NO: 1198270 - RNA, 19 nt, Artificial Sequence
  Description of Artificial Sequence: Synthetic oligonucleotide
  Sense strand starting at position 2655 of SEQ ID NO: 916969
guuuguacuuuauuaagga

SEQ ID NO: 1198271 - RNA, 19 nt, Artificial Sequence
  Description of Artificial Sequence: Synthetic oligonucleotide
  Antisense strand to SEQ ID NO: 1198270
uccuuaauaaaguacaaac

SEQ ID NO: 1198272 - RNA, 19 nt, Artificial Sequence
  Description of Artificial Sequence: Synthetic oligonucleotide
  Sense strand starting at position 2703 of SEQ ID NO: 916969
ucuaguuugcaggaugaug

SEQ ID NO: 1198273 - RNA, 19 nt, Artificial Sequence
  Description of Artificial Sequence: Synthetic oligonucleotide
  Antisense strand to SEQ ID NO: 1198272
caucauccugcaaacuaga

SEQ ID NO: 1198274 - RNA, 19 nt, Artificial Sequence
  Description of Artificial Sequence: Synthetic oligonucleotide
  Sense strand starting at position 2705 of SEQ ID NO: 916969
uaguuugcaggaugaugaa

SEQ ID NO: 1198275 - RNA, 19 nt, Artificial Sequence
  Description of Artificial Sequence: Synthetic oligonucleotide
  Antisense strand to SEQ ID NO: 1198274
uucaucauccugcaaacua

SEQ ID NO: 1198276 - RNA, 19 nt, Artificial Sequence
  Description of Artificial Sequence: Synthetic oligonucleotide
  Sense strand starting at position 2794 of SEQ ID NO: 916969
gugguuuacagccacagaa

SEQ ID NO: 1198277 - RNA, 19 nt, Artificial Sequence
  Description of Artificial Sequence: Synthetic oligonucleotide
  Antisense strand to SEQ ID NO: 1198276
uucuguggcuguaaaccac

SEQ ID NO: 1198278 - RNA, 19 nt, Artificial Sequence
  Description of Artificial Sequence: Synthetic oligonucleotide
  Sense strand starting at position 2796 of SEQ ID NO: 916969
gguuuacagccacagaagu

SEQ ID NO: 1198279 - RNA, 19 nt, Artificial Sequence
  Description of Artificial Sequence: Synthetic oligonucleotide
  Antisense strand to SEQ ID NO: 1198278
acuucuguggcuguaaacc

SEQ ID NO: 1198280 - RNA, 19 nt, Artificial Sequence
  Description of Artificial Sequence: Synthetic oligonucleotide
  Sense strand starting at position 2831 of SEQ ID NO: 916969
ugaucugugagcugggaga

SEQ ID NO: 1198281 - RNA, 19 nt, Artificial Sequence
  Description of Artificial Sequence: Synthetic oligonucleotide
  Antisense strand to SEQ ID NO: 1198280
ucucccagcucacagauca

SEQ ID NO: 1198282 - RNA, 19 nt, Artificial Sequence
  Description of Artificial Sequence: Synthetic oligonucleotide
  Sense strand starting at position 2856 of SEQ ID NO: 916969
uggcucugugcuccaugua

SEQ ID NO: 1198283 - RNA, 19 nt, Artificial Sequence
  Description of Artificial Sequence: Synthetic oligonucleotide
  Antisense strand to SEQ ID NO: 1198282
uacauggagcacagagcca

SEQ ID NO: 1198284 - RNA, 19 nt, Artificial Sequence
  Description of Artificial Sequence: Synthetic oligonucleotide
  Sense strand starting at position 2942 of SEQ ID NO: 916969
uuuaaaguuugagugaaac

SEQ ID NO: 1198285 - RNA, 19 nt, Artificial Sequence
  Description of Artificial Sequence: Synthetic oligonucleotide
  Antisense strand to SEQ ID NO: 1198284
guuucacucaaacuuuaaa

SEQ ID NO: 1198286 - RNA, 19 nt, Artificial Sequence
  Description of Artificial Sequence: Synthetic oligonucleotide
  Sense strand starting at position 2944 of SEQ ID NO: 916969
uaaaguuugagugaaacgu

SEQ ID NO: 1198287 - RNA, 19 nt, Artificial Sequence
  Description of Artificial Sequence: Synthetic oligonucleotide
  Antisense strand to SEQ ID NO: 1198286
acguuucacucaaacuuua

SEQ ID NO: 1198288 - RNA, 19 nt, Artificial Sequence
  Description of Artificial Sequence: Synthetic oligonucleotide
  Sense strand starting at position 2994 of SEQ ID NO: 916969
uguccauuaguagacacua

SEQ ID NO: 1198289 - RNA, 19 nt, Artificial Sequence
  Description of Artificial Sequence: Synthetic oligonucleotide
  Antisense strand to SEQ ID NO: 1198288
uagugucuacuaauggaca

SEQ ID NO: 1198290 - RNA, 19 nt, Artificial Sequence
  Description of Artificial Sequence: Synthetic oligonucleotide
  Sense strand starting at position 3040 of SEQ ID NO: 916969
caaugaauauauguugagu

SEQ ID NO: 1198291 - RNA, 19 nt, Artificial Sequence
  Description of Artificial Sequence: Synthetic oligonucleotide
  Antisense strand to SEQ ID NO: 1198290
acucaacauauauucauug

SEQ ID NO: 1198292 - RNA, 19 nt, Artificial Sequence
  Description of Artificial Sequence: Synthetic oligonucleotide
  Sense strand starting at position 3098 of SEQ ID NO: 916969
ucaggaccaucgucuagaa

SEQ ID NO: 1198293 - RNA, 19 nt, Artificial Sequence
  Description of Artificial Sequence: Synthetic oligonucleotide
  Antisense strand to SEQ ID NO: 1198292
uucuagacgaugguccuga

SEQ ID NO: 1198294 - RNA, 19 nt, Artificial Sequence
  Description of Artificial Sequence: Synthetic oligonucleotide
  Sense strand starting at position 3132 of SEQ ID NO: 916969
uggcuugccucaguuauuu

SEQ ID NO: 1198295 - RNA, 19 nt, Artificial Sequence
  Description of Artificial Sequence: Synthetic oligonucleotide
  Antisense strand to SEQ ID NO: 1198294
aaauaacugaggcaagcca

SEQ ID NO: 1198296 - RNA, 19 nt, Artificial Sequence
  Description of Artificial Sequence: Synthetic oligonucleotide
  Sense strand starting at position 3225 of SEQ ID NO: 916969
gugugaagagaguaaacuu

SEQ ID NO: 1198297 - RNA, 19 nt, Artificial Sequence
  Description of Artificial Sequence: Synthetic oligonucleotide
  Antisense strand to SEQ ID NO: 1198296
aaguuuacucucuucacac

SEQ ID NO: 1198298 - RNA, 19 nt, Artificial Sequence
  Description of Artificial Sequence: Synthetic oligonucleotide
  Sense strand starting at position 3695 of SEQ ID NO: 916969
ggaguugucggugaggaca

SEQ ID NO: 1198299 - RNA, 19 nt, Artificial Sequence
  Description of Artificial Sequence: Synthetic oligonucleotide
  Antisense strand to SEQ ID NO: 1198298
uguccucaccgacaacucc

SEQ ID NO: 1198300 - RNA, 19 nt, Artificial Sequence
  Description of Artificial Sequence: Synthetic oligonucleotide
  Sense strand starting at position 3786 of SEQ ID NO: 916969
ugcaucugagucuggaaga

SEQ ID NO: 1198301 - RNA, 19 nt, Artificial Sequence
  Description of Artificial Sequence: Synthetic oligonucleotide
  Antisense strand to SEQ ID NO: 1198300
ucuuccagacucagaugca

SEQ ID NO: 1198302 - RNA, 19 nt, Artificial Sequence
  Description of Artificial Sequence: Synthetic oligonucleotide
  Sense strand starting at position 3864 of SEQ ID NO: 916969
cugggaacuuccuuguaaa

SEQ ID NO: 1198303 - RNA, 19 nt, Artificial Sequence
  Description of Artificial Sequence: Synthetic oligonucleotide
  Antisense strand to SEQ ID NO: 1198302
uuuacaaggaaguucccag

SEQ ID NO: 1198304 - RNA, 19 nt, Artificial Sequence
  Description of Artificial Sequence: Synthetic oligonucleotide
  Sense strand starting at position 3865 of SEQ ID NO: 916969
ugggaacuuccuuguaaac

SEQ ID NO: 1198305 - RNA, 19 nt, Artificial Sequence
  Description of Artificial Sequence: Synthetic oligonucleotide
  Antisense strand to SEQ ID NO: 1198304
guuuacaaggaaguuccca

SEQ ID NO: 1198306 - RNA, 19 nt, Artificial Sequence
  Description of Artificial Sequence: Synthetic oligonucleotide
  Sense strand starting at position 3875 of SEQ ID NO: 916969
cuuguaaacuuccugaaga

SEQ ID NO: 1198307 - RNA, 19 nt, Artificial Sequence
  Description of Artificial Sequence: Synthetic oligonucleotide
  Antisense strand to SEQ ID NO: 1198306
ucuucaggaaguuuacaag

SEQ ID NO: 1198308 - RNA, 19 nt, Artificial Sequence
  Description of Artificial Sequence: Synthetic oligonucleotide
  Sense strand starting at position 94 of SEQ ID NO: 916970
aguaguucaggcugguaua

SEQ ID NO: 1198309 - RNA, 19 nt, Artificial Sequence
  Description of Artificial Sequence: Synthetic oligonucleotide
  Antisense strand to SEQ ID NO: 1198308
uauaccagccugaacuacu

SEQ ID NO: 1198310 - RNA, 19 nt, Artificial Sequence
  Description of Artificial Sequence: Synthetic oligonucleotide
  Sense strand starting at position 107 of SEQ ID NO: 916970
gguauaccucccuguuugu

SEQ ID NO: 1198311 - RNA, 19 nt, Artificial Sequence
  Description of Artificial Sequence: Synthetic oligonucleotide
  Antisense strand to SEQ ID NO: 1198310
acaaacagggagguauacc

SEQ ID NO: 1198312 - RNA, 19 nt, Artificial Sequence
  Description of Artificial Sequence: Synthetic oligonucleotide
  Sense strand starting at position 309 of SEQ ID NO: 916970
agacccucgcccugagaaa

SEQ ID NO: 1198313 - RNA, 19 nt, Artificial Sequence
  Description of Artificial Sequence: Synthetic oligonucleotide
  Antisense strand to SEQ ID NO: 1198312
uuucucagggcgagggucu

SEQ ID NO: 1198314 - RNA, 19 nt, Artificial Sequence
  Description of Artificial Sequence: Synthetic oligonucleotide
  Sense strand starting at position 594 of SEQ ID NO: 916970
ccuucucacgcagacauau

SEQ ID NO: 1198315 - RNA, 19 nt, Artificial Sequence
  Description of Artificial Sequence: Synthetic oligonucleotide
  Antisense strand to SEQ ID NO: 1198314
auaugucugcgugagaagg

SEQ ID NO: 1198316 - RNA, 19 nt, Artificial Sequence
  Description of Artificial Sequence: Synthetic oligonucleotide
  Sense strand starting at position 833 of SEQ ID NO: 916970
ccuggaucgauccacuagu

SEQ ID NO: 1198317 - RNA, 19 nt, Artificial Sequence
  Description of Artificial Sequence: Synthetic oligonucleotide
  Antisense strand to SEQ ID NO: 1198316
acuaguggaucgauccagg

SEQ ID NO: 1198318 - RNA, 19 nt, Artificial Sequence
  Description of Artificial Sequence: Synthetic oligonucleotide
  Sense strand starting at position 2503 of SEQ ID NO: 916970
gcuuuagcucuuuccguuu

SEQ ID NO: 1198319 - RNA, 19 nt, Artificial Sequence
  Description of Artificial Sequence: Synthetic oligonucleotide
  Antisense strand to SEQ ID NO: 1198318
aaacggaaagagcuaaagc

SEQ ID NO: 1198320 - RNA, 19 nt, Artificial Sequence
  Description of Artificial Sequence: Synthetic oligonucleotide
  Sense strand starting at position 2592 of SEQ ID NO: 916970
guuugaaguccauguggca

SEQ ID NO: 1198321 - RNA, 19 nt, Artificial Sequence
  Description of Artificial Sequence: Synthetic oligonucleotide
  Antisense strand to SEQ ID NO: 1198320
ugccacauggacuucaaac

SEQ ID NO: 1198322 - RNA, 19 nt, Artificial Sequence
  Description of Artificial Sequence: Synthetic oligonucleotide
  Sense strand starting at position 2630 of SEQ ID NO: 916970
ggcucagugacucaaugaa

SEQ ID NO: 1198323 - RNA, 19 nt, Artificial Sequence
  Description of Artificial Sequence: Synthetic oligonucleotide
  Antisense strand to SEQ ID NO: 1198322
uucauugagucacugagcc

SEQ ID NO: 1198324 - RNA, 19 nt, Artificial Sequence
  Description of Artificial Sequence: Synthetic oligonucleotide
  Sense strand starting at position 2652 of SEQ ID NO: 916970
ucaucuaagaugugugaug

SEQ ID NO: 1198325 - RNA, 19 nt, Artificial Sequence
  Description of Artificial Sequence: Synthetic oligonucleotide
  Antisense strand to SEQ ID NO: 1198324
caucacacaucuuagauga

SEQ ID NO: 1198326 - RNA, 19 nt, Artificial Sequence
  Description of Artificial Sequence: Synthetic oligonucleotide
  Sense strand starting at position 2653 of SEQ ID NO: 916970
caucuaagaugugugauga

SEQ ID NO: 1198327 - RNA, 19 nt, Artificial Sequence
  Description of Artificial Sequence: Synthetic oligonucleotide
  Antisense strand to SEQ ID NO: 1198326
ucaucacacaucuuagaug

SEQ ID NO: 1198328 - RNA, 19 nt, Artificial Sequence
  Description of Artificial Sequence: Synthetic oligonucleotide
  Sense strand starting at position 2654 of SEQ ID NO: 916970
aucuaagaugugugaugag

SEQ ID NO: 1198329 - RNA, 19 nt, Artificial Sequence
  Description of Artificial Sequence: Synthetic oligonucleotide
  Antisense strand to SEQ ID NO: 1198328
cucaucacacaucuuagau

SEQ ID NO: 1198330 - RNA, 19 nt, Artificial Sequence
  Description of Artificial Sequence: Synthetic oligonucleotide
  Sense strand starting at position 2663 of SEQ ID NO: 916970
gugugaugaguccagauac

SEQ ID NO: 1198331 - RNA, 19 nt, Artificial Sequence
  Description of Artificial Sequence: Synthetic oligonucleotide
  Antisense strand to SEQ ID NO: 1198330
guaucuggacucaucacac

SEQ ID NO: 1198332 - RNA, 19 nt, Artificial Sequence
  Description of Artificial Sequence: Synthetic oligonucleotide
  Sense strand starting at position 2673 of SEQ ID NO: 916970
uccagauacugugaagauc

SEQ ID NO: 1198333 - RNA, 19 nt, Artificial Sequence
  Description of Artificial Sequence: Synthetic oligonucleotide
  Antisense strand to SEQ ID NO: 1198332
gaucuucacaguaucugga

SEQ ID NO: 1198334 - RNA, 19 nt, Artificial Sequence
  Description of Artificial Sequence: Synthetic oligonucleotide
  Sense strand starting at position 3001 of SEQ ID NO: 916970
ggugguugucuagaucuua

SEQ ID NO: 1198335 - RNA, 19 nt, Artificial Sequence
  Description of Artificial Sequence: Synthetic oligonucleotide
  Antisense strand to SEQ ID NO: 1198334
uaagaucuagacaaccacc

SEQ ID NO: 1198336 - RNA, 19 nt, Artificial Sequence
  Description of Artificial Sequence: Synthetic oligonucleotide
  Sense strand starting at position 3048 of SEQ ID NO: 916970
aagacagaguaaugucuga

SEQ ID NO: 1198337 - RNA, 19 nt, Artificial Sequence
  Description of Artificial Sequence: Synthetic oligonucleotide
  Antisense strand to SEQ ID NO: 1198336
ucagacauuacucugucuu

SEQ ID NO: 1198338 - RNA, 19 nt, Artificial Sequence
  Description of Artificial Sequence: Synthetic oligonucleotide
  Sense strand starting at position 3053 of SEQ ID NO: 916970
agaguaaugucugauuuau

SEQ ID NO: 1198339 - RNA, 19 nt, Artificial Sequence
  Description of Artificial Sequence: Synthetic oligonucleotide
  Antisense strand to SEQ ID NO: 1198338
auaaaucagacauuacucu

SEQ ID NO: 1198340 - RNA, 19 nt, Artificial Sequence
  Description of Artificial Sequence: Synthetic oligonucleotide
  Sense strand starting at position 3091 of SEQ ID NO: 916970
cagccuggugccugggaua

SEQ ID NO: 1198341 - RNA, 19 nt, Artificial Sequence
  Description of Artificial Sequence: Synthetic oligonucleotide
  Antisense strand to SEQ ID NO: 1198340
uaucccaggcaccaggcug

SEQ ID NO: 1198342 - RNA, 19 nt, Artificial Sequence
  Description of Artificial Sequence: Synthetic oligonucleotide
  Sense strand starting at position 3108 of SEQ ID NO: 916970
uagggaagugcaugauaaa

SEQ ID NO: 1198343 - RNA, 19 nt, Artificial Sequence
  Description of Artificial Sequence: Synthetic oligonucleotide
  Antisense strand to SEQ ID NO: 1198342
uuuaucaugcacuucccua

SEQ ID NO: 1198344 - RNA, 19 nt, Artificial Sequence
  Description of Artificial Sequence: Synthetic oligonucleotide
  Sense strand starting at position 3120 of SEQ ID NO: 916970
ugauaaaugcugcauaaau

SEQ ID NO: 1198345 - RNA, 19 nt, Artificial Sequence
  Description of Artificial Sequence: Synthetic oligonucleotide
  Antisense strand to SEQ ID NO: 1198344
auuuaugcagcauuuauca

SEQ ID NO: 1198346 - RNA, 19 nt, Artificial Sequence
  Description of Artificial Sequence: Synthetic oligonucleotide
  Sense strand starting at position 3146 of SEQ ID NO: 916970
aauugcuaccguggaagau

SEQ ID NO: 1198347 - RNA, 19 nt, Artificial Sequence
  Description of Artificial Sequence: Synthetic oligonucleotide
  Antisense strand to SEQ ID NO: 1198346
aucuuccacgguagcaauu

SEQ ID NO: 1198348 - RNA, 19 nt, Artificial Sequence
  Description of Artificial Sequence: Synthetic oligonucleotide
  Sense strand starting at position 3147 of SEQ ID NO: 916970
auugcuaccguggaagaua

SEQ ID NO: 1198349 - RNA, 19 nt, Artificial Sequence
  Description of Artificial Sequence: Synthetic oligonucleotide
  Antisense strand to SEQ ID NO: 1198348
uaucuuccacgguagcaau

SEQ ID NO: 1198350 - RNA, 19 nt, Artificial Sequence
  Description of Artificial Sequence: Synthetic oligonucleotide
  Sense strand starting at position 3169 of SEQ ID NO: 916970
aaaggaaagugcuaucgau

SEQ ID NO: 1198351 - RNA, 19 nt, Artificial Sequence
  Description of Artificial Sequence: Synthetic oligonucleotide
  Antisense strand to SEQ ID NO: 1198350
aucgauagcacuuuccuuu

SEQ ID NO: 1198352 - RNA, 19 nt, Artificial Sequence
  Description of Artificial Sequence: Synthetic oligonucleotide
  Sense strand starting at position 3175 of SEQ ID NO: 916970
aagugcuaucgaugccaaa

SEQ ID NO: 1198353 - RNA, 19 nt, Artificial Sequence
  Description of Artificial Sequence: Synthetic oligonucleotide
  Antisense strand to SEQ ID NO: 1198352
uuuggcaucgauagcacuu

SEQ ID NO: 1198354 - RNA, 19 nt, Artificial Sequence
  Description of Artificial Sequence: Synthetic oligonucleotide
  Sense strand starting at position 3186 of SEQ ID NO: 916970
augccaaaguuguuuccaa

SEQ ID NO: 1198355 - RNA, 19 nt, Artificial Sequence
  Description of Artificial Sequence: Synthetic oligonucleotide
  Antisense strand to SEQ ID NO: 1198354
uuggaaacaacuuuggcau

SEQ ID NO: 1198356 - RNA, 19 nt, Artificial Sequence
  Description of Artificial Sequence: Synthetic oligonucleotide
  Sense strand starting at position 3190 of SEQ ID NO: 916970
caaaguuguuuccaagaga

SEQ ID NO: 1198357 - RNA, 19 nt, Artificial Sequence
  Description of Artificial Sequence: Synthetic oligonucleotide
  Antisense strand to SEQ ID NO: 1198356
ucucuuggaaacaacuuug

SEQ ID NO: 1198358 - RNA, 19 nt, Artificial Sequence
  Description of Artificial Sequence: Synthetic oligonucleotide
  Sense strand starting at position 3193 of SEQ ID NO: 916970
aguuguuuccaagagaggu

SEQ ID NO: 1198359 - RNA, 19 nt, Artificial Sequence
  Description of Artificial Sequence: Synthetic oligonucleotide
  Antisense strand to SEQ ID NO: 1198358
accucucuuggaaacaacu

SEQ ID NO: 1198360 - RNA, 19 nt, Artificial Sequence
  Description of Artificial Sequence: Synthetic oligonucleotide
  Sense strand starting at position 3195 of SEQ ID NO: 916970
uuguuuccaagagagguau

SEQ ID NO: 1198361 - RNA, 19 nt, Artificial Sequence
  Description of Artificial Sequence: Synthetic oligonucleotide
  Antisense strand to SEQ ID NO: 1198360
auaccucucuuggaaacaa

SEQ ID NO: 1198362 - RNA, 19 nt, Artificial Sequence
  Description of Artificial Sequence: Synthetic oligonucleotide
  Sense strand starting at position 3226 of SEQ ID NO: 916970
ucaagcaaugacugagcua

SEQ ID NO: 1198363 - RNA, 19 nt, Artificial Sequence
  Description of Artificial Sequence: Synthetic oligonucleotide
  Antisense strand to SEQ ID NO: 1198362
uagcucagucauugcuuga

SEQ ID NO: 1198364 - RNA, 19 nt, Artificial Sequence
  Description of Artificial Sequence: Synthetic oligonucleotide
  Sense strand starting at position 3295 of SEQ ID NO: 916970
auagaugaauugugguauu

SEQ ID NO: 1198365 - RNA, 19 nt, Artificial Sequence
  Description of Artificial Sequence: Synthetic oligonucleotide
  Antisense strand to SEQ ID NO: 1198364
aauaccacaauucaucuau

SEQ ID NO: 1198366 - RNA, 19 nt, Artificial Sequence
  Description of Artificial Sequence: Synthetic oligonucleotide
  Sense strand starting at position 3298 of SEQ ID NO: 916970
gaugaauugugguauucuu

SEQ ID NO: 1198367 - RNA, 19 nt, Artificial Sequence
  Description of Artificial Sequence: Synthetic oligonucleotide
  Antisense strand to SEQ ID NO: 1198366
aagaauaccacaauucauc

SEQ ID NO: 1198368 - RNA, 19 nt, Artificial Sequence
  Description of Artificial Sequence: Synthetic oligonucleotide
  Sense strand starting at position 3306 of SEQ ID NO: 916970
gugguauucuuguuaaaua

SEQ ID NO: 1198369 - RNA, 19 nt, Artificial Sequence
  Description of Artificial Sequence: Synthetic oligonucleotide
  Antisense strand to SEQ ID NO: 1198368
uauuuaacaagaauaccac

SEQ ID NO: 1198370 - RNA, 19 nt, Artificial Sequence
  Description of Artificial Sequence: Synthetic oligonucleotide
  Sense strand starting at position 3332 of SEQ ID NO: 916970
auaucaaggcuuggucaca

SEQ ID NO: 1198371 - RNA, 19 nt, Artificial Sequence
  Description of Artificial Sequence: Synthetic oligonucleotide
  Antisense strand to SEQ ID NO: 1198370
ugugaccaagccuugauau

SEQ ID NO: 1198372 - RNA, 19 nt, Artificial Sequence
  Description of Artificial Sequence: Synthetic oligonucleotide
  Sense strand starting at position 3706 of SEQ ID NO: 916970
ucagcaaucauuggagugu

SEQ ID NO: 1198373 - RNA, 19 nt, Artificial Sequence
  Description of Artificial Sequence: Synthetic oligonucleotide
  Antisense strand to SEQ ID NO: 1198372
acacuccaaugauugcuga

SEQ ID NO: 1198374 - RNA, 19 nt, Artificial Sequence
  Description of Artificial Sequence: Synthetic oligonucleotide
  Sense strand starting at position 3710 of SEQ ID NO: 916970
caaucauuggaguguuugu

SEQ ID NO: 1198375 - RNA, 19 nt, Artificial Sequence
  Description of Artificial Sequence: Synthetic oligonucleotide
  Antisense strand to SEQ ID NO: 1198374
acaaacacuccaaugauug

SEQ ID NO: 1198376 - RNA, 19 nt, Artificial Sequence
  Description of Artificial Sequence: Synthetic oligonucleotide
  Sense strand starting at position 3715 of SEQ ID NO: 916970
auuggaguguuuguugacu

SEQ ID NO: 1198377 - RNA, 19 nt, Artificial Sequence
  Description of Artificial Sequence: Synthetic oligonucleotide
  Antisense strand to SEQ ID NO: 1198376
agucaacaaacacuccaau

SEQ ID NO: 1198378 - RNA, 19 nt, Artificial Sequence
  Description of Artificial Sequence: Synthetic oligonucleotide
  Sense strand starting at position 3759 of SEQ ID NO: 916970
aggucccuuuccucaagua

SEQ ID NO: 1198379 - RNA, 19 nt, Artificial Sequence
  Description of Artificial Sequence: Synthetic oligonucleotide
  Antisense strand to SEQ ID NO: 1198378
uacuugaggaaagggaccu

SEQ ID NO: 1198380 - RNA, 19 nt, Artificial Sequence
  Description of Artificial Sequence: Synthetic oligonucleotide
  Sense strand starting at position 3778 of SEQ ID NO: 916970
guuccagucuaggugagaa

SEQ ID NO: 1198381 - RNA, 19 nt, Artificial Sequence
  Description of Artificial Sequence: Synthetic oligonucleotide
  Antisense strand to SEQ ID NO: 1198380
uucucaccuagacuggaac

SEQ ID NO: 1198382 - RNA, 19 nt, Artificial Sequence
  Description of Artificial Sequence: Synthetic oligonucleotide
  Sense strand starting at position 3866 of SEQ ID NO: 916970
ugaucuagcucuugaggau

SEQ ID NO: 1198383 - RNA, 19 nt, Artificial Sequence
  Description of Artificial Sequence: Synthetic oligonucleotide
  Antisense strand to SEQ ID NO: 1198382
auccucaagagcuagauca

SEQ ID NO: 1198384 - RNA, 19 nt, Artificial Sequence
  Description of Artificial Sequence: Synthetic oligonucleotide
  Sense strand starting at position 3973 of SEQ ID NO: 916970
guguuuagcgaagcuaugu

SEQ ID NO: 1198385 - RNA, 19 nt, Artificial Sequence
  Description of Artificial Sequence: Synthetic oligonucleotide
  Antisense strand to SEQ ID NO: 1198384
acauagcuucgcuaaacac

SEQ ID NO: 1198386 - RNA, 19 nt, Artificial Sequence
  Description of Artificial Sequence: Synthetic oligonucleotide
  Sense strand starting at position 3978 of SEQ ID NO: 916970
uagcgaagcuauguaaacu

SEQ ID NO: 1198387 - RNA, 19 nt, Artificial Sequence
  Description of Artificial Sequence: Synthetic oligonucleotide
  Antisense strand to SEQ ID NO: 1198386
aguuuacauagcuucgcua

SEQ ID NO: 1198388 - RNA, 19 nt, Artificial Sequence
  Description of Artificial Sequence: Synthetic oligonucleotide
  Sense strand starting at position 107 of SEQ ID NO: 916971
ugagguguuucccacaaga

SEQ ID NO: 1198389 - RNA, 19 nt, Artificial Sequence
  Description of Artificial Sequence: Synthetic oligonucleotide
  Antisense strand to SEQ ID NO: 1198388
ucuugugggaaacaccuca

SEQ ID NO: 1198390 - RNA, 19 nt, Artificial Sequence
  Description of Artificial Sequence: Synthetic oligonucleotide
  Sense strand starting at position 109 of SEQ ID NO: 916971
agguguuucccacaagaac

SEQ ID NO: 1198391 - RNA, 19 nt, Artificial Sequence
  Description of Artificial Sequence: Synthetic oligonucleotide
  Antisense strand to SEQ ID NO: 1198390
guucuugugggaaacaccu

SEQ ID NO: 1198392 - RNA, 19 nt, Artificial Sequence
  Description of Artificial Sequence: Synthetic oligonucleotide
  Sense strand starting at position 218 of SEQ ID NO: 916971
acaugauauccacguugaa

SEQ ID NO: 1198393 - RNA, 19 nt, Artificial Sequence
  Description of Artificial Sequence: Synthetic oligonucleotide
  Antisense strand to SEQ ID NO: 1198392
uucaacguggauaucaugu

SEQ ID NO: 1198394 - RNA, 19 nt, Artificial Sequence
  Description of Artificial Sequence: Synthetic oligonucleotide
  Sense strand starting at position 230 of SEQ ID NO: 916971
cguugaagcccucaugcaa

SEQ ID NO: 1198395 - RNA, 19 nt, Artificial Sequence
  Description of Artificial Sequence: Synthetic oligonucleotide
  Antisense strand to SEQ ID NO: 1198394
uugcaugagggcuucaacg

SEQ ID NO: 1198396 - RNA, 19 nt, Artificial Sequence
  Description of Artificial Sequence: Synthetic oligonucleotide
  Sense strand starting at position 311 of SEQ ID NO: 916971
ggauucuucuacuggguua

SEQ ID NO: 1198397 - RNA, 19 nt, Artificial Sequence
  Description of Artificial Sequence: Synthetic oligonucleotide
  Antisense strand to SEQ ID NO: 1198396
uaacccaguagaagaaucc

SEQ ID NO: 1198398 - RNA, 19 nt, Artificial Sequence
  Description of Artificial Sequence: Synthetic oligonucleotide
  Sense strand starting at position 364 of SEQ ID NO: 916971
aguaguucaggcugguaua

SEQ ID NO: 1198399 - RNA, 19 nt, Artificial Sequence
  Description of Artificial Sequence: Synthetic oligonucleotide
  Antisense strand to SEQ ID NO: 1198398
uauaccagccugaacuacu

SEQ ID NO: 1198400 - RNA, 19 nt, Artificial Sequence
  Description of Artificial Sequence: Synthetic oligonucleotide
  Sense strand starting at position 377 of SEQ ID NO: 916971
gguauaccucccuguuugu

SEQ ID NO: 1198401 - RNA, 19 nt, Artificial Sequence
  Description of Artificial Sequence: Synthetic oligonucleotide
  Antisense strand to SEQ ID NO: 1198400
acaaacagggagguauacc

SEQ ID NO: 1198402 - RNA, 19 nt, Artificial Sequence
  Description of Artificial Sequence: Synthetic oligonucleotide
  Sense strand starting at position 579 of SEQ ID NO: 916971
agacccucgcccugagaaa

SEQ ID NO: 1198403 - RNA, 19 nt, Artificial Sequence
  Description of Artificial Sequence: Synthetic oligonucleotide
  Antisense strand to SEQ ID NO: 1198402
uuucucagggcgagggucu

SEQ ID NO: 1198404 - RNA, 19 nt, Artificial Sequence
  Description of Artificial Sequence: Synthetic oligonucleotide
  Sense strand starting at position 864 of SEQ ID NO: 916971
ccuucucacgcagacauau

SEQ ID NO: 1198405 - RNA, 19 nt, Artificial Sequence
  Description of Artificial Sequence: Synthetic oligonucleotide
  Antisense strand to SEQ ID NO: 1198404
auaugucugcgugagaagg

SEQ ID NO: 1198406 - RNA, 19 nt, Artificial Sequence
  Description of Artificial Sequence: Synthetic oligonucleotide
  Sense strand starting at position 1103 of SEQ ID NO: 916971
ccuggaucgauccacuagu

SEQ ID NO: 1198407 - RNA, 19 nt, Artificial Sequence
  Description of Artificial Sequence: Synthetic oligonucleotide
  Antisense strand to SEQ ID NO: 1198406
acuaguggaucgauccagg

SEQ ID NO: 1198408 - RNA, 19 nt, Artificial Sequence
  Description of Artificial Sequence: Synthetic oligonucleotide
  Sense strand starting at position 2773 of SEQ ID NO: 916971
gcuuuagcucuuuccguuu

SEQ ID NO: 1198409 - RNA, 19 nt, Artificial Sequence
  Description of Artificial Sequence: Synthetic oligonucleotide
  Antisense strand to SEQ ID NO: 1198408
aaacggaaagagcuaaagc

SEQ ID NO: 1198410 - RNA, 19 nt, Artificial Sequence
  Description of Artificial Sequence: Synthetic oligonucleotide
  Sense strand starting at position 2862 of SEQ ID NO: 916971
guuugaaguccauguggca

SEQ ID NO: 1198411 - RNA, 19 nt, Artificial Sequence
  Description of Artificial Sequence: Synthetic oligonucleotide
  Antisense strand to SEQ ID NO: 1198410
ugccacauggacuucaaac

SEQ ID NO: 1198412 - RNA, 19 nt, Artificial Sequence
  Description of Artificial Sequence: Synthetic oligonucleotide
  Sense strand starting at position 2900 of SEQ ID NO: 916971
ggcucagugacucaaugaa

SEQ ID NO: 1198413 - RNA, 19 nt, Artificial Sequence
  Description of Artificial Sequence: Synthetic oligonucleotide
  Antisense strand to SEQ ID NO: 1198412
uucauugagucacugagcc

SEQ ID NO: 1198414 - RNA, 19 nt, Artificial Sequence
  Description of Artificial Sequence: Synthetic oligonucleotide
  Sense strand starting at position 2922 of SEQ ID NO: 916971
ucaucuaagaugugugaug

SEQ ID NO: 1198415 - RNA, 19 nt, Artificial Sequence
  Description of Artificial Sequence: Synthetic oligonucleotide
  Antisense strand to SEQ ID NO: 1198414
caucacacaucuuagauga

SEQ ID NO: 1198416 - RNA, 19 nt, Artificial Sequence
  Description of Artificial Sequence: Synthetic oligonucleotide
  Sense strand starting at position 2923 of SEQ ID NO: 916971
caucuaagaugugugauga

SEQ ID NO: 1198417 - RNA, 19 nt, Artificial Sequence
  Description of Artificial Sequence: Synthetic oligonucleotide
  Antisense strand to SEQ ID NO: 1198416
ucaucacacaucuuagaug

SEQ ID NO: 1198418 - RNA, 19 nt, Artificial Sequence
  Description of Artificial Sequence: Synthetic oligonucleotide
  Sense strand starting at position 2924 of SEQ ID NO: 916971
aucuaagaugugugaugag

SEQ ID NO: 1198419 - RNA, 19 nt, Artificial Sequence
  Description of Artificial Sequence: Synthetic oligonucleotide
  Antisense strand to SEQ ID NO: 1198418
cucaucacacaucuuagau

SEQ ID NO: 1198420 - RNA, 19 nt, Artificial Sequence
  Description of Artificial Sequence: Synthetic oligonucleotide
  Sense strand starting at position 2933 of SEQ ID NO: 916971
gugugaugaguccagauac

SEQ ID NO: 1198421 - RNA, 19 nt, Artificial Sequence
  Description of Artificial Sequence: Synthetic oligonucleotide
  Antisense strand to SEQ ID NO: 1198420
guaucuggacucaucacac

SEQ ID NO: 1198422 - RNA, 19 nt, Artificial Sequence
  Description of Artificial Sequence: Synthetic oligonucleotide
  Sense strand starting at position 2943 of SEQ ID NO: 916971
uccagauacugugaagauc

SEQ ID NO: 1198423 - RNA, 19 nt, Artificial Sequence
  Description of Artificial Sequence: Synthetic oligonucleotide
  Antisense strand to SEQ ID NO: 1198422
gaucuucacaguaucugga

SEQ ID NO: 1198424 - RNA, 19 nt, Artificial Sequence
  Description of Artificial Sequence: Synthetic oligonucleotide
  Sense strand starting at position 3271 of SEQ ID NO: 916971
ggugguugucuagaucuua

SEQ ID NO: 1198425 - RNA, 19 nt, Artificial Sequence
  Description of Artificial Sequence: Synthetic oligonucleotide
  Antisense strand to SEQ ID NO: 1198424
uaagaucuagacaaccacc

SEQ ID NO: 1198426 - RNA, 19 nt, Artificial Sequence
  Description of Artificial Sequence: Synthetic oligonucleotide
  Sense strand starting at position 3318 of SEQ ID NO: 916971
aagacagaguaaugucuga

SEQ ID NO: 1198427 - RNA, 19 nt, Artificial Sequence
  Description of Artificial Sequence: Synthetic oligonucleotide
  Antisense strand to SEQ ID NO: 1198426
ucagacauuacucugucuu

SEQ ID NO: 1198428 - RNA, 19 nt, Artificial Sequence
  Description of Artificial Sequence: Synthetic oligonucleotide
  Sense strand starting at position 3323 of SEQ ID NO: 916971
agaguaaugucugauuuau

SEQ ID NO: 1198429 - RNA, 19 nt, Artificial Sequence
  Description of Artificial Sequence: Synthetic oligonucleotide
  Antisense strand to SEQ ID NO: 1198428
auaaaucagacauuacucu

SEQ ID NO: 1198430 - RNA, 19 nt, Artificial Sequence
  Description of Artificial Sequence: Synthetic oligonucleotide
  Sense strand starting at position 3361 of SEQ ID NO: 916971
cagccuggugccugggaua

SEQ ID NO: 1198431 - RNA, 19 nt, Artificial Sequence
  Description of Artificial Sequence: Synthetic oligonucleotide
  Antisense strand to SEQ ID NO: 1198430
uaucccaggcaccaggcug

SEQ ID NO: 1198432 - RNA, 19 nt, Artificial Sequence
  Description of Artificial Sequence: Synthetic oligonucleotide
  Sense strand starting at position 3378 of SEQ ID NO: 916971
uagggaagugcaugauaaa

SEQ ID NO: 1198433 - RNA, 19 nt, Artificial Sequence
  Description of Artificial Sequence: Synthetic oligonucleotide
  Antisense strand to SEQ ID NO: 1198432
uuuaucaugcacuucccua

SEQ ID NO: 1198434 - RNA, 19 nt, Artificial Sequence
  Description of Artificial Sequence: Synthetic oligonucleotide
  Sense strand starting at position 3390 of SEQ ID NO: 916971
ugauaaaugcugcauaaau

SEQ ID NO: 1198435 - RNA, 19 nt, Artificial Sequence
  Description of Artificial Sequence: Synthetic oligonucleotide
  Antisense strand to SEQ ID NO: 1198434
auuuaugcagcauuuauca

SEQ ID NO: 1198436 - RNA, 19 nt, Artificial Sequence
  Description of Artificial Sequence: Synthetic oligonucleotide
  Sense strand starting at position 3413 of SEQ ID NO: 916971
aacaauugcuaccguggaa

SEQ ID NO: 1198437 - RNA, 19 nt, Artificial Sequence
  Description of Artificial Sequence: Synthetic oligonucleotide
  Antisense strand to SEQ ID NO: 1198436
uuccacgguagcaauuguu

SEQ ID NO: 1198438 - RNA, 19 nt, Artificial Sequence
  Description of Artificial Sequence: Synthetic oligonucleotide
  Sense strand starting at position 3416 of SEQ ID NO: 916971
aauugcuaccguggaagau

SEQ ID NO: 1198439 - RNA, 19 nt, Artificial Sequence
  Description of Artificial Sequence: Synthetic oligonucleotide
  Antisense strand to SEQ ID NO: 1198438
aucuuccacgguagcaauu

SEQ ID NO: 1198440 - RNA, 19 nt, Artificial Sequence
  Description of Artificial Sequence: Synthetic oligonucleotide
  Sense strand starting at position 3417 of SEQ ID NO: 916971
auugcuaccguggaagaua

SEQ ID NO: 1198441 - RNA, 19 nt, Artificial Sequence
  Description of Artificial Sequence: Synthetic oligonucleotide
  Antisense strand to SEQ ID NO: 1198440
uaucuuccacgguagcaau

SEQ ID NO: 1198442 - RNA, 19 nt, Artificial Sequence
  Description of Artificial Sequence: Synthetic oligonucleotide
  Sense strand starting at position 3439 of SEQ ID NO: 916971
aaaggaaagugcuaucgau

SEQ ID NO: 1198443 - RNA, 19 nt, Artificial Sequence
  Description of Artificial Sequence: Synthetic oligonucleotide
  Antisense strand to SEQ ID NO: 1198442
aucgauagcacuuuccuuu

SEQ ID NO: 1198444 - RNA, 19 nt, Artificial Sequence
  Description of Artificial Sequence: Synthetic oligonucleotide
  Sense strand starting at position 3445 of SEQ ID NO: 916971
aagugcuaucgaugccaaa

SEQ ID NO: 1198445 - RNA, 19 nt, Artificial Sequence
  Description of Artificial Sequence: Synthetic oligonucleotide
  Antisense strand to SEQ ID NO: 1198444
uuuggcaucgauagcacuu

SEQ ID NO: 1198446 - RNA, 19 nt, Artificial Sequence
  Description of Artificial Sequence: Synthetic oligonucleotide
  Sense strand starting at position 3456 of SEQ ID NO: 916971
augccaaaguuguuuccaa

SEQ ID NO: 1198447 - RNA, 19 nt, Artificial Sequence
  Description of Artificial Sequence: Synthetic oligonucleotide
  Antisense strand to SEQ ID NO: 1198446
uuggaaacaacuuuggcau

SEQ ID NO: 1198448 - RNA, 19 nt, Artificial Sequence
  Description of Artificial Sequence: Synthetic oligonucleotide
  Sense strand starting at position 3460 of SEQ ID NO: 916971
caaaguuguuuccaagaga

SEQ ID NO: 1198449 - RNA, 19 nt, Artificial Sequence
  Description of Artificial Sequence: Synthetic oligonucleotide
  Antisense strand to SEQ ID NO: 1198448
ucucuuggaaacaacuuug

SEQ ID NO: 1198450 - RNA, 19 nt, Artificial Sequence
  Description of Artificial Sequence: Synthetic oligonucleotide
  Sense strand starting at position 3463 of SEQ ID NO: 916971
aguuguuuccaagagaggu

SEQ ID NO: 1198451 - RNA, 19 nt, Artificial Sequence
  Description of Artificial Sequence: Synthetic oligonucleotide
  Antisense strand to SEQ ID NO: 1198450
accucucuuggaaacaacu

SEQ ID NO: 1198452 - RNA, 19 nt, Artificial Sequence
  Description of Artificial Sequence: Synthetic oligonucleotide
  Sense strand starting at position 3465 of SEQ ID NO: 916971
uuguuuccaagagagguau

SEQ ID NO: 1198453 - RNA, 19 nt, Artificial Sequence
  Description of Artificial Sequence: Synthetic oligonucleotide
  Antisense strand to SEQ ID NO: 1198452
auaccucucuuggaaacaa

SEQ ID NO: 1198454 - RNA, 19 nt, Artificial Sequence
  Description of Artificial Sequence: Synthetic oligonucleotide
  Sense strand starting at position 3496 of SEQ ID NO: 916971
ucaagcaaugacugagcua

SEQ ID NO: 1198455 - RNA, 19 nt, Artificial Sequence
  Description of Artificial Sequence: Synthetic oligonucleotide
  Antisense strand to SEQ ID NO: 1198454
uagcucagucauugcuuga

SEQ ID NO: 1198456 - RNA, 19 nt, Artificial Sequence
  Description of Artificial Sequence: Synthetic oligonucleotide
  Sense strand starting at position 3565 of SEQ ID NO: 916971
auagaugaauugugguauu

SEQ ID NO: 1198457 - RNA, 19 nt, Artificial Sequence
  Description of Artificial Sequence: Synthetic oligonucleotide
  Antisense strand to SEQ ID NO: 1198456
aauaccacaauucaucuau

SEQ ID NO: 1198458 - RNA, 19 nt, Artificial Sequence
  Description of Artificial Sequence: Synthetic oligonucleotide
  Sense strand starting at position 3568 of SEQ ID NO: 916971
gaugaauugugguauucuu

SEQ ID NO: 1198459 - RNA, 19 nt, Artificial Sequence
  Description of Artificial Sequence: Synthetic oligonucleotide
  Antisense strand to SEQ ID NO: 1198458
aagaauaccacaauucauc

SEQ ID NO: 1198460 - RNA, 19 nt, Artificial Sequence
  Description of Artificial Sequence: Synthetic oligonucleotide
  Sense strand starting at position 3576 of SEQ ID NO: 916971
gugguauucuuguuaaaua

SEQ ID NO: 1198461 - RNA, 19 nt, Artificial Sequence
  Description of Artificial Sequence: Synthetic oligonucleotide
  Antisense strand to SEQ ID NO: 1198460
uauuuaacaagaauaccac

SEQ ID NO: 1198462 - RNA, 19 nt, Artificial Sequence
  Description of Artificial Sequence: Synthetic oligonucleotide
  Sense strand starting at position 3602 of SEQ ID NO: 916971
auaucaaggcuuggucaca

SEQ ID NO: 1198463 - RNA, 19 nt, Artificial Sequence
  Description of Artificial Sequence: Synthetic oligonucleotide
  Antisense strand to SEQ ID NO: 1198462
ugugaccaagccuugauau

SEQ ID NO: 1198464 - RNA, 19 nt, Artificial Sequence
  Description of Artificial Sequence: Synthetic oligonucleotide
  Sense strand starting at position 3976 of SEQ ID NO: 916971
ucagcaaucauuggagugu

SEQ ID NO: 1198465 - RNA, 19 nt, Artificial Sequence
  Description of Artificial Sequence: Synthetic oligonucleotide
  Antisense strand to SEQ ID NO: 1198464
acacuccaaugauugcuga

SEQ ID NO: 1198466 - RNA, 19 nt, Artificial Sequence
  Description of Artificial Sequence: Synthetic oligonucleotide
  Sense strand starting at position 3980 of SEQ ID NO: 916971
caaucauuggaguguuugu

SEQ ID NO: 1198467 - RNA, 19 nt, Artificial Sequence
  Description of Artificial Sequence: Synthetic oligonucleotide
  Antisense strand to SEQ ID NO: 1198466
acaaacacuccaaugauug

SEQ ID NO: 1198468 - RNA, 19 nt, Artificial Sequence
  Description of Artificial Sequence: Synthetic oligonucleotide
  Sense strand starting at position 214 of SEQ ID NO: 916972
uggcauuagcagcagauau

SEQ ID NO: 1198469 - RNA, 19 nt, Artificial Sequence
  Description of Artificial Sequence: Synthetic oligonucleotide
  Antisense strand to SEQ ID NO: 1198468
auaucugcugcuaaugcca

SEQ ID NO: 1198470 - RNA, 19 nt, Artificial Sequence
  Description of Artificial Sequence: Synthetic oligonucleotide
  Sense strand starting at position 227 of SEQ ID NO: 916972
agauauggauguugucagu

SEQ ID NO: 1198471 - RNA, 19 nt, Artificial Sequence
  Description of Artificial Sequence: Synthetic oligonucleotide
  Antisense strand to SEQ ID NO: 1198470
acugacaacauccauaucu

SEQ ID NO: 1198472 - RNA, 19 nt, Artificial Sequence
  Description of Artificial Sequence: Synthetic oligonucleotide
  Sense strand starting at position 230 of SEQ ID NO: 916972
uauggauguugucagugga

SEQ ID NO: 1198473 - RNA, 19 nt, Artificial Sequence
  Description of Artificial Sequence: Synthetic oligonucleotide
  Antisense strand to SEQ ID NO: 1198472
uccacugacaacauccaua

SEQ ID NO: 1198474 - RNA, 19 nt, Artificial Sequence
  Description of Artificial Sequence: Synthetic oligonucleotide
  Sense strand starting at position 234 of SEQ ID NO: 916972
gauguugucaguggaaagc

SEQ ID NO: 1198475 - RNA, 19 nt, Artificial Sequence
  Description of Artificial Sequence: Synthetic oligonucleotide
  Antisense strand to SEQ ID NO: 1198474
gcuuuccacugacaacauc

SEQ ID NO: 1198476 - RNA, 19 nt, Artificial Sequence
  Description of Artificial Sequence: Synthetic oligonucleotide
  Sense strand starting at position 369 of SEQ ID NO: 916972
gcuggaggauaccuggaua

SEQ ID NO: 1198477 - RNA, 19 nt, Artificial Sequence
  Description of Artificial Sequence: Synthetic oligonucleotide
  Antisense strand to SEQ ID NO: 1198476
uauccagguauccuccagc

SEQ ID NO: 1198478 - RNA, 19 nt, Artificial Sequence
  Description of Artificial Sequence: Synthetic oligonucleotide
  Sense strand starting at position 578 of SEQ ID NO: 916972
ggcugaggaagcugaaauu

SEQ ID NO: 1198479 - RNA, 19 nt, Artificial Sequence
  Description of Artificial Sequence: Synthetic oligonucleotide
  Antisense strand to SEQ ID NO: 1198478
aauuucagcuuccucagcc

SEQ ID NO: 1198480 - RNA, 19 nt, Artificial Sequence
  Description of Artificial Sequence: Synthetic oligonucleotide
  Sense strand starting at position 997 of SEQ ID NO: 916972
aucagauucccaggaucua

SEQ ID NO: 1198481 - RNA, 19 nt, Artificial Sequence
  Description of Artificial Sequence: Synthetic oligonucleotide
  Antisense strand to SEQ ID NO: 1198480
uagauccugggaaucugau

SEQ ID NO: 1198482 - RNA, 19 nt, Artificial Sequence
  Description of Artificial Sequence: Synthetic oligonucleotide
  Sense strand starting at position 1026 of SEQ ID NO: 916972
agugucagccugugaucuu

SEQ ID NO: 1198483 - RNA, 19 nt, Artificial Sequence
  Description of Artificial Sequence: Synthetic oligonucleotide
  Antisense strand to SEQ ID NO: 1198482
aagaucacaggcugacacu

SEQ ID NO: 1198484 - RNA, 19 nt, Artificial Sequence
  Description of Artificial Sequence: Synthetic oligonucleotide
  Sense strand starting at position 1117 of SEQ ID NO: 916972
gauccauggucuugagauu

SEQ ID NO: 1198485 - RNA, 19 nt, Artificial Sequence
  Description of Artificial Sequence: Synthetic oligonucleotide
  Antisense strand to SEQ ID NO: 1198484
aaucucaagaccauggauc

SEQ ID NO: 1198486 - RNA, 19 nt, Artificial Sequence
  Description of Artificial Sequence: Synthetic oligonucleotide
  Sense strand starting at position 1159 of SEQ ID NO: 916972
gggugagaauucuggucuc

SEQ ID NO: 1198487 - RNA, 19 nt, Artificial Sequence
  Description of Artificial Sequence: Synthetic oligonucleotide
  Antisense strand to SEQ ID NO: 1198486
gagaccagaauucucaccc

SEQ ID NO: 1198488 - RNA, 19 nt, Artificial Sequence
  Description of Artificial Sequence: Synthetic oligonucleotide
  Sense strand starting at position 1310 of SEQ ID NO: 916972
ucccgaguguguccugaga

SEQ ID NO: 1198489 - RNA, 19 nt, Artificial Sequence
  Description of Artificial Sequence: Synthetic oligonucleotide
  Antisense strand to SEQ ID NO: 1198488
ucucaggacacacucggga

SEQ ID NO: 1198490 - RNA, 19 nt, Artificial Sequence
  Description of Artificial Sequence: Synthetic oligonucleotide
  Sense strand starting at position 1312 of SEQ ID NO: 916972
ccgaguguguccugagagu

SEQ ID NO: 1198491 - RNA, 19 nt, Artificial Sequence
  Description of Artificial Sequence: Synthetic oligonucleotide
  Antisense strand to SEQ ID NO: 1198490
acucucaggacacacucgg

SEQ ID NO: 1198492 - RNA, 19 nt, Artificial Sequence
  Description of Artificial Sequence: Synthetic oligonucleotide
  Sense strand starting at position 1375 of SEQ ID NO: 916972
cucguuaugaaguaggaaa

SEQ ID NO: 1198493 - RNA, 19 nt, Artificial Sequence
  Description of Artificial Sequence: Synthetic oligonucleotide
  Antisense strand to SEQ ID NO: 1198492
uuuccuacuucauaacgag

SEQ ID NO: 1198494 - RNA, 19 nt, Artificial Sequence
  Description of Artificial Sequence: Synthetic oligonucleotide
  Sense strand starting at position 1458 of SEQ ID NO: 916972
gacugcuuugcucagguuu

SEQ ID NO: 1198495 - RNA, 19 nt, Artificial Sequence
  Description of Artificial Sequence: Synthetic oligonucleotide
  Antisense strand to SEQ ID NO: 1198494
aaaccugagcaaagcaguc

SEQ ID NO: 1198496 - RNA, 19 nt, Artificial Sequence
  Description of Artificial Sequence: Synthetic oligonucleotide
  Sense strand starting at position 1541 of SEQ ID NO: 916972
gguuucugcuccugacaca

SEQ ID NO: 1198497 - RNA, 19 nt, Artificial Sequence
  Description of Artificial Sequence: Synthetic oligonucleotide
  Antisense strand to SEQ ID NO: 1198496
ugugucaggagcagaaacc

SEQ ID NO: 1198498 - RNA, 19 nt, Artificial Sequence
  Description of Artificial Sequence: Synthetic oligonucleotide
  Sense strand starting at position 2012 of SEQ ID NO: 916972
cucucauuugcaugguauu

SEQ ID NO: 1198499 - RNA, 19 nt, Artificial Sequence
  Description of Artificial Sequence: Synthetic oligonucleotide
  Antisense strand to SEQ ID NO: 1198498
aauaccaugcaaaugagag

SEQ ID NO: 1198500 - RNA, 19 nt, Artificial Sequence
  Description of Artificial Sequence: Synthetic oligonucleotide
  Sense strand starting at position 2015 of SEQ ID NO: 916972
ucauuugcaugguauuuau

SEQ ID NO: 1198501 - RNA, 19 nt, Artificial Sequence
  Description of Artificial Sequence: Synthetic oligonucleotide
  Antisense strand to SEQ ID NO: 1198500
auaaauaccaugcaaauga

SEQ ID NO: 1198502 - RNA, 19 nt, Artificial Sequence
  Description of Artificial Sequence: Synthetic oligonucleotide
  Sense strand starting at position 2022 of SEQ ID NO: 916972
caugguauuuauugaaugu

SEQ ID NO: 1198503 - RNA, 19 nt, Artificial Sequence
  Description of Artificial Sequence: Synthetic oligonucleotide
  Antisense strand to SEQ ID NO: 1198502
acauucaauaaauaccaug

SEQ ID NO: 1198504 - RNA, 19 nt, Artificial Sequence
  Description of Artificial Sequence: Synthetic oligonucleotide
  Sense strand starting at position 2029 of SEQ ID NO: 916972
uuuauugaaugucccagua

SEQ ID NO: 1198505 - RNA, 19 nt, Artificial Sequence
  Description of Artificial Sequence: Synthetic oligonucleotide
  Antisense strand to SEQ ID NO: 1198504
uacugggacauucaauaaa

SEQ ID NO: 1198506 - RNA, 19 nt, Artificial Sequence
  Description of Artificial Sequence: Synthetic oligonucleotide
  Sense strand starting at position 2125 of SEQ ID NO: 916972
auggguucccugggaugaa

SEQ ID NO: 1198507 - RNA, 19 nt, Artificial Sequence
  Description of Artificial Sequence: Synthetic oligonucleotide
  Antisense strand to SEQ ID NO: 1198506
uucaucccagggaacccau

SEQ ID NO: 1198508 - RNA, 19 nt, Artificial Sequence
  Description of Artificial Sequence: Synthetic oligonucleotide
  Sense strand starting at position 2276 of SEQ ID NO: 916972
ccaggauauccuggccaga

SEQ ID NO: 1198509 - RNA, 19 nt, Artificial Sequence
  Description of Artificial Sequence: Synthetic oligonucleotide
  Antisense strand to SEQ ID NO: 1198508
ucuggccaggauauccugg

SEQ ID NO: 1198510 - RNA, 19 nt, Artificial Sequence
  Description of Artificial Sequence: Synthetic oligonucleotide
  Sense strand starting at position 2278 of SEQ ID NO: 916972
aggauauccuggccagaag

SEQ ID NO: 1198511 - RNA, 19 nt, Artificial Sequence
  Description of Artificial Sequence: Synthetic oligonucleotide
  Antisense strand to SEQ ID NO: 1198510
cuucuggccaggauauccu

SEQ ID NO: 1198512 - RNA, 19 nt, Artificial Sequence
  Description of Artificial Sequence: Synthetic oligonucleotide
  Sense strand starting at position 2788 of SEQ ID NO: 916972
augggaucccuaugagcca

SEQ ID NO: 1198513 - RNA, 19 nt, Artificial Sequence
  Description of Artificial Sequence: Synthetic oligonucleotide
  Antisense strand to SEQ ID NO: 1198512
uggcucauagggaucccau

SEQ ID NO: 1198514 - RNA, 19 nt, Artificial Sequence
  Description of Artificial Sequence: Synthetic oligonucleotide
  Sense strand starting at position 2940 of SEQ ID NO: 916972
uccgaagucuuggguuugu

SEQ ID NO: 1198515 - RNA, 19 nt, Artificial Sequence
  Description of Artificial Sequence: Synthetic oligonucleotide
  Antisense strand to SEQ ID NO: 1198514
acaaacccaagacuucgga

SEQ ID NO: 1198516 - RNA, 19 nt, Artificial Sequence
  Description of Artificial Sequence: Synthetic oligonucleotide
  Sense strand starting at position 2950 of SEQ ID NO: 916972
uggguuuguuuggagaaac

SEQ ID NO: 1198517 - RNA, 19 nt, Artificial Sequence
  Description of Artificial Sequence: Synthetic oligonucleotide
  Antisense strand to SEQ ID NO: 1198516
guuucuccaaacaaaccca

SEQ ID NO: 1198518 - RNA, 19 nt, Artificial Sequence
  Description of Artificial Sequence: Synthetic oligonucleotide
  Sense strand starting at position 2990 of SEQ ID NO: 916972
ucuggaaauagcugugguu

SEQ ID NO: 1198519 - RNA, 19 nt, Artificial Sequence
  Description of Artificial Sequence: Synthetic oligonucleotide
  Antisense strand to SEQ ID NO: 1198518
aaccacagcuauuuccaga

SEQ ID NO: 1198520 - RNA, 19 nt, Artificial Sequence
  Description of Artificial Sequence: Synthetic oligonucleotide
  Sense strand starting at position 2993 of SEQ ID NO: 916972
ggaaauagcugugguugga

SEQ ID NO: 1198521 - RNA, 19 nt, Artificial Sequence
  Description of Artificial Sequence: Synthetic oligonucleotide
  Antisense strand to SEQ ID NO: 1198520
uccaaccacagcuauuucc

SEQ ID NO: 1198522 - RNA, 19 nt, Artificial Sequence
  Description of Artificial Sequence: Synthetic oligonucleotide
  Sense strand starting at position 3185 of SEQ ID NO: 916972
gccucugucccacauguga

SEQ ID NO: 1198523 - RNA, 19 nt, Artificial Sequence
  Description of Artificial Sequence: Synthetic oligonucleotide
  Antisense strand to SEQ ID NO: 1198522
ucacaugugggacagaggc

SEQ ID NO: 1198524 - RNA, 19 nt, Artificial Sequence
  Description of Artificial Sequence: Synthetic oligonucleotide
  Sense strand starting at position 19 of SEQ ID NO: 916973
gccugcuggaguugugcaa

SEQ ID NO: 1198525 - RNA, 19 nt, Artificial Sequence
  Description of Artificial Sequence: Synthetic oligonucleotide
  Antisense strand to SEQ ID NO: 1198524
uugcacaacuccagcaggc

SEQ ID NO: 1198526 - RNA, 19 nt, Artificial Sequence
  Description of Artificial Sequence: Synthetic oligonucleotide
  Sense strand starting at position 23 of SEQ ID NO: 916973
gcuggaguugugcaacaca

SEQ ID NO: 1198527 - RNA, 19 nt, Artificial Sequence
  Description of Artificial Sequence: Synthetic oligonucleotide
  Antisense strand to SEQ ID NO: 1198526
uguguugcacaacuccagc

SEQ ID NO: 1198528 - RNA, 19 nt, Artificial Sequence
  Description of Artificial Sequence: Synthetic oligonucleotide
  Sense strand starting at position 184 of SEQ ID NO: 916973
ucagcuuuccuaggcugaa

SEQ ID NO: 1198529 - RNA, 19 nt, Artificial Sequence
  Description of Artificial Sequence: Synthetic oligonucleotide
  Antisense strand to SEQ ID NO: 1198528
uucagccuaggaaagcuga

SEQ ID NO: 1198530 - RNA, 19 nt, Artificial Sequence
  Description of Artificial Sequence: Synthetic oligonucleotide
  Sense strand starting at position 464 of SEQ ID NO: 916973
gugugaugcccuuguggaa

SEQ ID NO: 1198531 - RNA, 19 nt, Artificial Sequence
  Description of Artificial Sequence: Synthetic oligonucleotide
  Antisense strand to SEQ ID NO: 1198530
uuccacaagggcaucacac

SEQ ID NO: 1198532 - RNA, 19 nt, Artificial Sequence
  Description of Artificial Sequence: Synthetic oligonucleotide
  Sense strand starting at position 519 of SEQ ID NO: 916973
aggguacucccugacucuu

SEQ ID NO: 1198533 - RNA, 19 nt, Artificial Sequence
  Description of Artificial Sequence: Synthetic oligonucleotide
  Antisense strand to SEQ ID NO: 1198532
aagagucagggaguacccu

SEQ ID NO: 1198534 - RNA, 19 nt, Artificial Sequence
  Description of Artificial Sequence: Synthetic oligonucleotide
  Sense strand starting at position 591 of SEQ ID NO: 916973
ccaaacauauguguuguau

SEQ ID NO: 1198535 - RNA, 19 nt, Artificial Sequence
  Description of Artificial Sequence: Synthetic oligonucleotide
  Antisense strand to SEQ ID NO: 1198534
auacaacacauauguuugg

SEQ ID NO: 1198536 - RNA, 19 nt, Artificial Sequence
  Description of Artificial Sequence: Synthetic oligonucleotide
  Sense strand starting at position 593 of SEQ ID NO: 916973
aaacauauguguuguaugu

SEQ ID NO: 1198537 - RNA, 19 nt, Artificial Sequence
  Description of Artificial Sequence: Synthetic oligonucleotide
  Antisense strand to SEQ ID NO: 1198536
acauacaacacauauguuu

SEQ ID NO: 1198538 - RNA, 19 nt, Artificial Sequence
  Description of Artificial Sequence: Synthetic oligonucleotide
  Sense strand starting at position 595 of SEQ ID NO: 916973
acauauguguuguauguca

SEQ ID NO: 1198539 - RNA, 19 nt, Artificial Sequence
  Description of Artificial Sequence: Synthetic oligonucleotide
  Antisense strand to SEQ ID NO: 1198538
ugacauacaacacauaugu

SEQ ID NO: 1198540 - RNA, 19 nt, Artificial Sequence
  Description of Artificial Sequence: Synthetic oligonucleotide
  Sense strand starting at position 597 of SEQ ID NO: 916973
auauguguuguaugucagu

SEQ ID NO: 1198541 - RNA, 19 nt, Artificial Sequence
  Description of Artificial Sequence: Synthetic oligonucleotide
  Antisense strand to SEQ ID NO: 1198540
acugacauacaacacauau

SEQ ID NO: 1198542 - RNA, 19 nt, Artificial Sequence
  Description of Artificial Sequence: Synthetic oligonucleotide
  Sense strand starting at position 603 of SEQ ID NO: 916973
guuguaugucaguccugca

SEQ ID NO: 1198543 - RNA, 19 nt, Artificial Sequence
  Description of Artificial Sequence: Synthetic oligonucleotide
  Antisense strand to SEQ ID NO: 1198542
ugcaggacugacauacaac

SEQ ID NO: 1198544 - RNA, 19 nt, Artificial Sequence
  Description of Artificial Sequence: Synthetic oligonucleotide
  Sense strand starting at position 720 of SEQ ID NO: 916973
cggucagaacaacauguuu

SEQ ID NO: 1198545 - RNA, 19 nt, Artificial Sequence
  Description of Artificial Sequence: Synthetic oligonucleotide
  Antisense strand to SEQ ID NO: 1198544
aaacauguuguucugaccg

SEQ ID NO: 1198546 - RNA, 19 nt, Artificial Sequence
  Description of Artificial Sequence: Synthetic oligonucleotide
  Sense strand starting at position 759 of SEQ ID NO: 916973
gcagacagcaauuguguaa

SEQ ID NO: 1198547 - RNA, 19 nt, Artificial Sequence
  Description of Artificial Sequence: Synthetic oligonucleotide
  Antisense strand to SEQ ID NO: 1198546
uuacacaauugcugucugc

SEQ ID NO: 1198548 - RNA, 19 nt, Artificial Sequence
  Description of Artificial Sequence: Synthetic oligonucleotide
  Sense strand starting at position 784 of SEQ ID NO: 916973
uggucaugcuggagggaaa

SEQ ID NO: 1198549 - RNA, 19 nt, Artificial Sequence
  Description of Artificial Sequence: Synthetic oligonucleotide
  Antisense strand to SEQ ID NO: 1198548
uuucccuccagcaugacca

SEQ ID NO: 1198550 - RNA, 19 nt, Artificial Sequence
  Description of Artificial Sequence: Synthetic oligonucleotide
  Sense strand starting at position 803 of SEQ ID NO: 916973
cagauagaagccugucacu

SEQ ID NO: 1198551 - RNA, 19 nt, Artificial Sequence
  Description of Artificial Sequence: Synthetic oligonucleotide
  Antisense strand to SEQ ID NO: 1198550
agugacaggcuucuaucug

SEQ ID NO: 1198552 - RNA, 19 nt, Artificial Sequence
  Description of Artificial Sequence: Synthetic oligonucleotide
  Sense strand starting at position 825 of SEQ ID NO: 916973
gagagauguuuagcuggcu

SEQ ID NO: 1198553 - RNA, 19 nt, Artificial Sequence
  Description of Artificial Sequence: Synthetic oligonucleotide
  Antisense strand to SEQ ID NO: 1198552
agccagcuaaacaucucuc

SEQ ID NO: 1198554 - RNA, 19 nt, Artificial Sequence
  Description of Artificial Sequence: Synthetic oligonucleotide
  Sense strand starting at position 826 of SEQ ID NO: 916973
agagauguuuagcuggcuu

SEQ ID NO: 1198555 - RNA, 19 nt, Artificial Sequence
  Description of Artificial Sequence: Synthetic oligonucleotide
  Antisense strand to SEQ ID NO: 1198554
aagccagcuaaacaucucu

SEQ ID NO: 1198556 - RNA, 19 nt, Artificial Sequence
  Description of Artificial Sequence: Synthetic oligonucleotide
  Sense strand starting at position 894 of SEQ ID NO: 916973
ucacgcauugaaugagaaa

SEQ ID NO: 1198557 - RNA, 19 nt, Artificial Sequence
  Description of Artificial Sequence: Synthetic oligonucleotide
  Antisense strand to SEQ ID NO: 1198556
uuucucauucaaugcguga

SEQ ID NO: 1198558 - RNA, 19 nt, Artificial Sequence
  Description of Artificial Sequence: Synthetic oligonucleotide
  Sense strand starting at position 897 of SEQ ID NO: 916973
cgcauugaaugagaaagga

SEQ ID NO: 1198559 - RNA, 19 nt, Artificial Sequence
  Description of Artificial Sequence: Synthetic oligonucleotide
  Antisense strand to SEQ ID NO: 1198558
uccuuucucauucaaugcg

SEQ ID NO: 1198560 - RNA, 19 nt, Artificial Sequence
  Description of Artificial Sequence: Synthetic oligonucleotide
  Sense strand starting at position 1316 of SEQ ID NO: 916973
uggcauuagcagcagauau

SEQ ID NO: 1198561 - RNA, 19 nt, Artificial Sequence
  Description of Artificial Sequence: Synthetic oligonucleotide
  Antisense strand to SEQ ID NO: 1198560
auaucugcugcuaaugcca

SEQ ID NO: 1198562 - RNA, 19 nt, Artificial Sequence
  Description of Artificial Sequence: Synthetic oligonucleotide
  Sense strand starting at position 1329 of SEQ ID NO: 916973
agauauggauguugucagu

SEQ ID NO: 1198563 - RNA, 19 nt, Artificial Sequence
  Description of Artificial Sequence: Synthetic oligonucleotide
  Antisense strand to SEQ ID NO: 1198562
acugacaacauccauaucu

SEQ ID NO: 1198564 - RNA, 19 nt, Artificial Sequence
  Description of Artificial Sequence: Synthetic oligonucleotide
  Sense strand starting at position 1332 of SEQ ID NO: 916973
uauggauguugucagugga

SEQ ID NO: 1198565 - RNA, 19 nt, Artificial Sequence
  Description of Artificial Sequence: Synthetic oligonucleotide
  Antisense strand to SEQ ID NO: 1198564
uccacugacaacauccaua

SEQ ID NO: 1198566 - RNA, 19 nt, Artificial Sequence
  Description of Artificial Sequence: Synthetic oligonucleotide
  Sense strand starting at position 1336 of SEQ ID NO: 916973
gauguugucaguggaaagc

SEQ ID NO: 1198567 - RNA, 19 nt, Artificial Sequence
  Description of Artificial Sequence: Synthetic oligonucleotide
  Antisense strand to SEQ ID NO: 1198566
gcuuuccacugacaacauc

SEQ ID NO: 1198568 - RNA, 19 nt, Artificial Sequence
  Description of Artificial Sequence: Synthetic oligonucleotide
  Sense strand starting at position 1471 of SEQ ID NO: 916973
gcuggaggauaccuggaua

SEQ ID NO: 1198569 - RNA, 19 nt, Artificial Sequence
  Description of Artificial Sequence: Synthetic oligonucleotide
  Antisense strand to SEQ ID NO: 1198568
uauccagguauccuccagc

SEQ ID NO: 1198570 - RNA, 19 nt, Artificial Sequence
  Description of Artificial Sequence: Synthetic oligonucleotide
  Sense strand starting at position 1680 of SEQ ID NO: 916973
ggcugaggaagcugaaauu

SEQ ID NO: 1198571 - RNA, 19 nt, Artificial Sequence
  Description of Artificial Sequence: Synthetic oligonucleotide
  Antisense strand to SEQ ID NO: 1198570
aauuucagcuuccucagcc

SEQ ID NO: 1198572 - RNA, 19 nt, Artificial Sequence
  Description of Artificial Sequence: Synthetic oligonucleotide
  Sense strand starting at position 2099 of SEQ ID NO: 916973
aucagauucccaggaucua

SEQ ID NO: 1198573 - RNA, 19 nt, Artificial Sequence
  Description of Artificial Sequence: Synthetic oligonucleotide
  Antisense strand to SEQ ID NO: 1198572
uagauccugggaaucugau

SEQ ID NO: 1198574 - RNA, 19 nt, Artificial Sequence
  Description of Artificial Sequence: Synthetic oligonucleotide
  Sense strand starting at position 2128 of SEQ ID NO: 916973
agugucagccugugaucuu

SEQ ID NO: 1198575 - RNA, 19 nt, Artificial Sequence
  Description of Artificial Sequence: Synthetic oligonucleotide
  Antisense strand to SEQ ID NO: 1198574
aagaucacaggcugacacu

SEQ ID NO: 1198576 - RNA, 19 nt, Artificial Sequence
  Description of Artificial Sequence: Synthetic oligonucleotide
  Sense strand starting at position 2219 of SEQ ID NO: 916973
gauccauggucuugagauu

SEQ ID NO: 1198577 - RNA, 19 nt, Artificial Sequence
  Description of Artificial Sequence: Synthetic oligonucleotide
  Antisense strand to SEQ ID NO: 1198576
aaucucaagaccauggauc

SEQ ID NO: 1198578 - RNA, 19 nt, Artificial Sequence
  Description of Artificial Sequence: Synthetic oligonucleotide
  Sense strand starting at position 2261 of SEQ ID NO: 916973
gggugagaauucuggucuc

SEQ ID NO: 1198579 - RNA, 19 nt, Artificial Sequence
  Description of Artificial Sequence: Synthetic oligonucleotide
  Antisense strand to SEQ ID NO: 1198578
gagaccagaauucucaccc

SEQ ID NO: 1198580 - RNA, 19 nt, Artificial Sequence
  Description of Artificial Sequence: Synthetic oligonucleotide
  Sense strand starting at position 2412 of SEQ ID NO: 916973
ucccgaguguguccugaga

SEQ ID NO: 1198581 - RNA, 19 nt, Artificial Sequence
  Description of Artificial Sequence: Synthetic oligonucleotide
  Antisense strand to SEQ ID NO: 1198580
ucucaggacacacucggga

SEQ ID NO: 1198582 - RNA, 19 nt, Artificial Sequence
  Description of Artificial Sequence: Synthetic oligonucleotide
  Sense strand starting at position 2477 of SEQ ID NO: 916973
cucguuaugaaguaggaaa

SEQ ID NO: 1198583 - RNA, 19 nt, Artificial Sequence
  Description of Artificial Sequence: Synthetic oligonucleotide
  Antisense strand to SEQ ID NO: 1198582
uuuccuacuucauaacgag

SEQ ID NO: 1198584 - RNA, 19 nt, Artificial Sequence
  Description of Artificial Sequence: Synthetic oligonucleotide
  Sense strand starting at position 2560 of SEQ ID NO: 916973
gacugcuuugcucagguuu

SEQ ID NO: 1198585 - RNA, 19 nt, Artificial Sequence
  Description of Artificial Sequence: Synthetic oligonucleotide
  Antisense strand to SEQ ID NO: 1198584
aaaccugagcaaagcaguc

SEQ ID NO: 1198586 - RNA, 19 nt, Artificial Sequence
  Description of Artificial Sequence: Synthetic oligonucleotide
  Sense strand starting at position 2643 of SEQ ID NO: 916973
gguuucugcuccugacaca

SEQ ID NO: 1198587 - RNA, 19 nt, Artificial Sequence
  Description of Artificial Sequence: Synthetic oligonucleotide
  Antisense strand to SEQ ID NO: 1198586
ugugucaggagcagaaacc

SEQ ID NO: 1198588 - RNA, 19 nt, Artificial Sequence
  Description of Artificial Sequence: Synthetic oligonucleotide
  Sense strand starting at position 3114 of SEQ ID NO: 916973
cucucauuugcaugguauu

SEQ ID NO: 1198589 - RNA, 19 nt, Artificial Sequence
  Description of Artificial Sequence: Synthetic oligonucleotide
  Antisense strand to SEQ ID NO: 1198588
aauaccaugcaaaugagag

SEQ ID NO: 1198590 - RNA, 19 nt, Artificial Sequence
  Description of Artificial Sequence: Synthetic oligonucleotide
  Sense strand starting at position 3117 of SEQ ID NO: 916973
ucauuugcaugguauuuau

SEQ ID NO: 1198591 - RNA, 19 nt, Artificial Sequence
  Description of Artificial Sequence: Synthetic oligonucleotide
  Antisense strand to SEQ ID NO: 1198590
auaaauaccaugcaaauga

SEQ ID NO: 1198592 - RNA, 19 nt, Artificial Sequence
  Description of Artificial Sequence: Synthetic oligonucleotide
  Sense strand starting at position 3124 of SEQ ID NO: 916973
caugguauuuauugaaugu

SEQ ID NO: 1198593 - RNA, 19 nt, Artificial Sequence
  Description of Artificial Sequence: Synthetic oligonucleotide
  Antisense strand to SEQ ID NO: 1198592
acauucaauaaauaccaug

SEQ ID NO: 1198594 - RNA, 19 nt, Artificial Sequence
  Description of Artificial Sequence: Synthetic oligonucleotide
  Sense strand starting at position 3131 of SEQ ID NO: 916973
uuuauugaaugucccagua

SEQ ID NO: 1198595 - RNA, 19 nt, Artificial Sequence
  Description of Artificial Sequence: Synthetic oligonucleotide
  Antisense strand to SEQ ID NO: 1198594
uacugggacauucaauaaa

SEQ ID NO: 1198596 - RNA, 19 nt, Artificial Sequence
  Description of Artificial Sequence: Synthetic oligonucleotide
  Sense strand starting at position 3227 of SEQ ID NO: 916973
auggguucccugggaugaa

SEQ ID NO: 1198597 - RNA, 19 nt, Artificial Sequence
  Description of Artificial Sequence: Synthetic oligonucleotide
  Antisense strand to SEQ ID NO: 1198596
uucaucccagggaacccau

SEQ ID NO: 1198598 - RNA, 19 nt, Artificial Sequence
  Description of Artificial Sequence: Synthetic oligonucleotide
  Sense strand starting at position 3378 of SEQ ID NO: 916973
ccaggauauccuggccaga

SEQ ID NO: 1198599 - RNA, 19 nt, Artificial Sequence
  Description of Artificial Sequence: Synthetic oligonucleotide
  Antisense strand to SEQ ID NO: 1198598
ucuggccaggauauccugg

SEQ ID NO: 1198600 - RNA, 19 nt, Artificial Sequence
  Description of Artificial Sequence: Synthetic oligonucleotide
  Sense strand starting at position 3380 of SEQ ID NO: 916973
aggauauccuggccagaag

SEQ ID NO: 1198601 - RNA, 19 nt, Artificial Sequence
  Description of Artificial Sequence: Synthetic oligonucleotide
  Antisense strand to SEQ ID NO: 1198600
cuucuggccaggauauccu

SEQ ID NO: 1198602 - RNA, 19 nt, Artificial Sequence
  Description of Artificial Sequence: Synthetic oligonucleotide
  Sense strand starting at position 3890 of SEQ ID NO: 916973
augggaucccuaugagcca

SEQ ID NO: 1198603 - RNA, 19 nt, Artificial Sequence
  Description of Artificial Sequence: Synthetic oligonucleotide
  Antisense strand to SEQ ID NO: 1198602
uggcucauagggaucccau

SEQ ID NO: 1198604 - RNA, 19 nt, Artificial Sequence
  Description of Artificial Sequence: Synthetic oligonucleotide
  Sense strand starting at position 89 of SEQ ID NO: 916974
cucucauuugcaugguauu

SEQ ID NO: 1198605 - RNA, 19 nt, Artificial Sequence
  Description of Artificial Sequence: Synthetic oligonucleotide
  Antisense strand to SEQ ID NO: 1198604
aauaccaugcaaaugagag

SEQ ID NO: 1198606 - RNA, 19 nt, Artificial Sequence
  Description of Artificial Sequence: Synthetic oligonucleotide
  Sense strand starting at position 92 of SEQ ID NO: 916974
ucauuugcaugguauuuau

SEQ ID NO: 1198607 - RNA, 19 nt, Artificial Sequence
  Description of Artificial Sequence: Synthetic oligonucleotide
  Antisense strand to SEQ ID NO: 1198606
auaaauaccaugcaaauga

SEQ ID NO: 1198608 - RNA, 19 nt, Artificial Sequence
  Description of Artificial Sequence: Synthetic oligonucleotide
  Sense strand starting at position 106 of SEQ ID NO: 916974
uuuauugaaugucccagua

SEQ ID NO: 1198609 - RNA, 19 nt, Artificial Sequence
  Description of Artificial Sequence: Synthetic oligonucleotide
  Antisense strand to SEQ ID NO: 1198608
uacugggacauucaauaaa

SEQ ID NO: 1198610 - RNA, 19 nt, Artificial Sequence
  Description of Artificial Sequence: Synthetic oligonucleotide
  Sense strand starting at position 202 of SEQ ID NO: 916974
auggguucccugggaugaa

SEQ ID NO: 1198611 - RNA, 19 nt, Artificial Sequence
  Description of Artificial Sequence: Synthetic oligonucleotide
  Antisense strand to SEQ ID NO: 1198610
uucaucccagggaacccau

SEQ ID NO: 1198612 - RNA, 19 nt, Artificial Sequence
  Description of Artificial Sequence: Synthetic oligonucleotide
  Sense strand starting at position 353 of SEQ ID NO: 916974
ccaggauauccuggccaga

SEQ ID NO: 1198613 - RNA, 19 nt, Artificial Sequence
  Description of Artificial Sequence: Synthetic oligonucleotide
  Antisense strand to SEQ ID NO: 1198612
ucuggccaggauauccugg

SEQ ID NO: 1198614 - RNA, 19 nt, Artificial Sequence
  Description of Artificial Sequence: Synthetic oligonucleotide
  Sense strand starting at position 355 of SEQ ID NO: 916974
aggauauccuggccagaag

SEQ ID NO: 1198615 - RNA, 19 nt, Artificial Sequence
  Description of Artificial Sequence: Synthetic oligonucleotide
  Antisense strand to SEQ ID NO: 1198614
cuucuggccaggauauccu

SEQ ID NO: 1198616 - RNA, 19 nt, Artificial Sequence
  Description of Artificial Sequence: Synthetic oligonucleotide
  Sense strand starting at position 865 of SEQ ID NO: 916974
augggaucccuaugagcca

SEQ ID NO: 1198617 - RNA, 19 nt, Artificial Sequence
  Description of Artificial Sequence: Synthetic oligonucleotide
  Antisense strand to SEQ ID NO: 1198616
uggcucauagggaucccau

SEQ ID NO: 1198618 - RNA, 19 nt, Artificial Sequence
  Description of Artificial Sequence: Synthetic oligonucleotide
  Sense strand starting at position 1067 of SEQ ID NO: 916974
ucuggaaauagcugugguu

SEQ ID NO: 1198619 - RNA, 19 nt, Artificial Sequence
  Description of Artificial Sequence: Synthetic oligonucleotide
  Antisense strand to SEQ ID NO: 1198618
aaccacagcuauuuccaga

SEQ ID NO: 1198620 - RNA, 19 nt, Artificial Sequence
  Description of Artificial Sequence: Synthetic oligonucleotide
  Sense strand starting at position 1262 of SEQ ID NO: 916974
gccucugucccacauguga

SEQ ID NO: 1198621 - RNA, 19 nt, Artificial Sequence
  Description of Artificial Sequence: Synthetic oligonucleotide
  Antisense strand to SEQ ID NO: 1198620
ucacaugugggacagaggc

SEQ ID NO: 1198622 - RNA, 19 nt, Artificial Sequence
  Description of Artificial Sequence: Synthetic oligonucleotide
  Sense strand starting at position 2338 of SEQ ID NO: 916974
gccugaaucaggugaagac

SEQ ID NO: 1198623 - RNA, 19 nt, Artificial Sequence
  Description of Artificial Sequence: Synthetic oligonucleotide
  Antisense strand to SEQ ID NO: 1198622
gucuucaccugauucaggc

SEQ ID NO: 1198624 - RNA, 19 nt, Artificial Sequence
  Description of Artificial Sequence: Synthetic oligonucleotide
  Sense strand starting at position 2348 of SEQ ID NO: 916974
ggugaagacaccugguguu

SEQ ID NO: 1198625 - RNA, 19 nt, Artificial Sequence
  Description of Artificial Sequence: Synthetic oligonucleotide
  Antisense strand to SEQ ID NO: 1198624
aacaccaggugucuucacc

SEQ ID NO: 1198626 - RNA, 19 nt, Artificial Sequence
  Description of Artificial Sequence: Synthetic oligonucleotide
  Sense strand starting at position 2372 of SEQ ID NO: 916974
uggcccaagucauuggaca

SEQ ID NO: 1198627 - RNA, 19 nt, Artificial Sequence
  Description of Artificial Sequence: Synthetic oligonucleotide
  Antisense strand to SEQ ID NO: 1198626
uguccaaugacuugggcca

SEQ ID NO: 1198628 - RNA, 19 nt, Artificial Sequence
  Description of Artificial Sequence: Synthetic oligonucleotide
  Sense strand starting at position 2418 of SEQ ID NO: 916974
agacuucuccugggcuagu

SEQ ID NO: 1198629 - RNA, 19 nt, Artificial Sequence
  Description of Artificial Sequence: Synthetic oligonucleotide
  Antisense strand to SEQ ID NO: 1198628
acuagcccaggagaagucu

SEQ ID NO: 1198630 - RNA, 19 nt, Artificial Sequence
  Description of Artificial Sequence: Synthetic oligonucleotide
  Sense strand starting at position 2419 of SEQ ID NO: 916974
gacuucuccugggcuagua

SEQ ID NO: 1198631 - RNA, 19 nt, Artificial Sequence
  Description of Artificial Sequence: Synthetic oligonucleotide
  Antisense strand to SEQ ID NO: 1198630
uacuagcccaggagaaguc

SEQ ID NO: 1198632 - RNA, 19 nt, Artificial Sequence
  Description of Artificial Sequence: Synthetic oligonucleotide
  Sense strand starting at position 2427 of SEQ ID NO: 916974
cugggcuaguauucucaaa

SEQ ID NO: 1198633 - RNA, 19 nt, Artificial Sequence
  Description of Artificial Sequence: Synthetic oligonucleotide
  Antisense strand to SEQ ID NO: 1198632
uuugagaauacuagcccag

SEQ ID NO: 1198634 - RNA, 19 nt, Artificial Sequence
  Description of Artificial Sequence: Synthetic oligonucleotide
  Sense strand starting at position 2429 of SEQ ID NO: 916974
gggcuaguauucucaaagg

SEQ ID NO: 1198635 - RNA, 19 nt, Artificial Sequence
  Description of Artificial Sequence: Synthetic oligonucleotide
  Antisense strand to SEQ ID NO: 1198634
ccuuugagaauacuagccc

SEQ ID NO: 1198636 - RNA, 19 nt, Artificial Sequence
  Description of Artificial Sequence: Synthetic oligonucleotide
  Sense strand starting at position 2843 of SEQ ID NO: 916974
ccgucauucccaguucgca

SEQ ID NO: 1198637 - RNA, 19 nt, Artificial Sequence
  Description of Artificial Sequence: Synthetic oligonucleotide
  Antisense strand to SEQ ID NO: 1198636
ugcgaacugggaaugacgg

SEQ ID NO: 1198638 - RNA, 19 nt, Artificial Sequence
  Description of Artificial Sequence: Synthetic oligonucleotide
  Sense strand starting at position 2859 of SEQ ID NO: 916974
gcaggagaccucugagaag

SEQ ID NO: 1198639 - RNA, 19 nt, Artificial Sequence
  Description of Artificial Sequence: Synthetic oligonucleotide
  Antisense strand to SEQ ID NO: 1198638
cuucucagaggucuccugc

SEQ ID NO: 1198640 - RNA, 19 nt, Artificial Sequence
  Description of Artificial Sequence: Synthetic oligonucleotide
  Sense strand starting at position 2870 of SEQ ID NO: 916974
cugagaaggucuuccuuac

SEQ ID NO: 1198641 - RNA, 19 nt, Artificial Sequence
  Description of Artificial Sequence: Synthetic oligonucleotide
  Antisense strand to SEQ ID NO: 1198640
guaaggaagaccuucucag

SEQ ID NO: 1198642 - RNA, 19 nt, Artificial Sequence
  Description of Artificial Sequence: Synthetic oligonucleotide
  Sense strand starting at position 2920 of SEQ ID NO: 916974
gauggaaguucuuucuaug

SEQ ID NO: 1198643 - RNA, 19 nt, Artificial Sequence
  Description of Artificial Sequence: Synthetic oligonucleotide
  Antisense strand to SEQ ID NO: 1198642
cauagaaagaacuuccauc

SEQ ID NO: 1198644 - RNA, 19 nt, Artificial Sequence
  Description of Artificial Sequence: Synthetic oligonucleotide
  Sense strand starting at position 3123 of SEQ ID NO: 916974
cguccuuuagcagugagca

SEQ ID NO: 1198645 - RNA, 19 nt, Artificial Sequence
  Description of Artificial Sequence: Synthetic oligonucleotide
  Antisense strand to SEQ ID NO: 1198644
ugcucacugcuaaaggacg

SEQ ID NO: 1198646 - RNA, 19 nt, Artificial Sequence
  Description of Artificial Sequence: Synthetic oligonucleotide
  Sense strand starting at position 3136 of SEQ ID NO: 916974
ugagcacuuccugaaacuu

SEQ ID NO: 1198647 - RNA, 19 nt, Artificial Sequence
  Description of Artificial Sequence: Synthetic oligonucleotide
  Antisense strand to SEQ ID NO: 1198646
aaguuucaggaagugcuca

SEQ ID NO: 1198648 - RNA, 19 nt, Artificial Sequence
  Description of Artificial Sequence: Synthetic oligonucleotide
  Sense strand starting at position 3208 of SEQ ID NO: 916974
gaaggaagguuggaauucu

SEQ ID NO: 1198649 - RNA, 19 nt, Artificial Sequence
  Description of Artificial Sequence: Synthetic oligonucleotide
  Antisense strand to SEQ ID NO: 1198648
agaauuccaaccuuccuuc

SEQ ID NO: 1198650 - RNA, 19 nt, Artificial Sequence
  Description of Artificial Sequence: Synthetic oligonucleotide
  Sense strand starting at position 3346 of SEQ ID NO: 916974
ggcugagaagucugguucu

SEQ ID NO: 1198651 - RNA, 19 nt, Artificial Sequence
  Description of Artificial Sequence: Synthetic oligonucleotide
  Antisense strand to SEQ ID NO: 1198650
agaaccagacuucucagcc

SEQ ID NO: 1198652 - RNA, 19 nt, Artificial Sequence
  Description of Artificial Sequence: Synthetic oligonucleotide
  Sense strand starting at position 3349 of SEQ ID NO: 916974
ugagaagucugguucucau

SEQ ID NO: 1198653 - RNA, 19 nt, Artificial Sequence
  Description of Artificial Sequence: Synthetic oligonucleotide
  Antisense strand to SEQ ID NO: 1198652
augagaaccagacuucuca

SEQ ID NO: 1198654 - RNA, 19 nt, Artificial Sequence
  Description of Artificial Sequence: Synthetic oligonucleotide
  Sense strand starting at position 3378 of SEQ ID NO: 916974
uggagcaccugauuccaau

SEQ ID NO: 1198655 - RNA, 19 nt, Artificial Sequence
  Description of Artificial Sequence: Synthetic oligonucleotide
  Antisense strand to SEQ ID NO: 1198654
auuggaaucaggugcucca

SEQ ID NO: 1198656 - RNA, 19 nt, Artificial Sequence
  Description of Artificial Sequence: Synthetic oligonucleotide
  Sense strand starting at position 3410 of SEQ ID NO: 916974
agaagagucugugaagaag

SEQ ID NO: 1198657 - RNA, 19 nt, Artificial Sequence
  Description of Artificial Sequence: Synthetic oligonucleotide
  Antisense strand to SEQ ID NO: 1198656
cuucuucacagacucuucu

SEQ ID NO: 1198658 - RNA, 19 nt, Artificial Sequence
  Description of Artificial Sequence: Synthetic oligonucleotide
  Sense strand starting at position 3420 of SEQ ID NO: 916974
gugaagaagugcgugauga

SEQ ID NO: 1198659 - RNA, 19 nt, Artificial Sequence
  Description of Artificial Sequence: Synthetic oligonucleotide
  Antisense strand to SEQ ID NO: 1198658
ucaucacgcacuucuucac

SEQ ID NO: 1198660 - RNA, 19 nt, Artificial Sequence
  Description of Artificial Sequence: Synthetic oligonucleotide
  Sense strand starting at position 3421 of SEQ ID NO: 916974
ugaagaagugcgugaugac

SEQ ID NO: 1198661 - RNA, 19 nt, Artificial Sequence
  Description of Artificial Sequence: Synthetic oligonucleotide
  Antisense strand to SEQ ID NO: 1198660
gucaucacgcacuucuuca

SEQ ID NO: 1198662 - RNA, 19 nt, Artificial Sequence
  Description of Artificial Sequence: Synthetic oligonucleotide
  Sense strand starting at position 3422 of SEQ ID NO: 916974
gaagaagugcgugaugacu

SEQ ID NO: 1198663 - RNA, 19 nt, Artificial Sequence
  Description of Artificial Sequence: Synthetic oligonucleotide
  Antisense strand to SEQ ID NO: 1198662
agucaucacgcacuucuuc

SEQ ID NO: 1198664 - RNA, 19 nt, Artificial Sequence
  Description of Artificial Sequence: Synthetic oligonucleotide
  Sense strand starting at position 3479 of SEQ ID NO: 916974
gguggauaugguugggacu

SEQ ID NO: 1198665 - RNA, 19 nt, Artificial Sequence
  Description of Artificial Sequence: Synthetic oligonucleotide
  Antisense strand to SEQ ID NO: 1198664
agucccaaccauauccacc

SEQ ID NO: 1198666 - RNA, 19 nt, Artificial Sequence
  Description of Artificial Sequence: Synthetic oligonucleotide
  Sense strand starting at position 3525 of SEQ ID NO: 916974
uugaguugguguccaauag

SEQ ID NO: 1198667 - RNA, 19 nt, Artificial Sequence
  Description of Artificial Sequence: Synthetic oligonucleotide
  Antisense strand to SEQ ID NO: 1198666
cuauuggacaccaacucaa

SEQ ID NO: 1198668 - RNA, 19 nt, Artificial Sequence
  Description of Artificial Sequence: Synthetic oligonucleotide
  Sense strand starting at position 3526 of SEQ ID NO: 916974
ugaguugguguccaauaga

SEQ ID NO: 1198669 - RNA, 19 nt, Artificial Sequence
  Description of Artificial Sequence: Synthetic oligonucleotide
  Antisense strand to SEQ ID NO: 1198668
ucuauuggacaccaacuca

SEQ ID NO: 1198670 - RNA, 19 nt, Artificial Sequence
  Description of Artificial Sequence: Synthetic oligonucleotide
  Sense strand starting at position 3529 of SEQ ID NO: 916974
guugguguccaauagacag

SEQ ID NO: 1198671 - RNA, 19 nt, Artificial Sequence
  Description of Artificial Sequence: Synthetic oligonucleotide
  Antisense strand to SEQ ID NO: 1198670
cugucuauuggacaccaac

SEQ ID NO: 1198672 - RNA, 19 nt, Artificial Sequence
  Description of Artificial Sequence: Synthetic oligonucleotide
  Sense strand starting at position 3722 of SEQ ID NO: 916974
aagguugucccauguauuu

SEQ ID NO: 1198673 - RNA, 19 nt, Artificial Sequence
  Description of Artificial Sequence: Synthetic oligonucleotide
  Antisense strand to SEQ ID NO: 1198672
aaauacaugggacaaccuu

SEQ ID NO: 1198674 - RNA, 19 nt, Artificial Sequence
  Description of Artificial Sequence: Synthetic oligonucleotide
  Sense strand starting at position 3750 of SEQ ID NO: 916974
uugauuauguaaucgagaa

SEQ ID NO: 1198675 - RNA, 19 nt, Artificial Sequence
  Description of Artificial Sequence: Synthetic oligonucleotide
  Antisense strand to SEQ ID NO: 1198674
uucucgauuacauaaucaa

SEQ ID NO: 1198676 - RNA, 19 nt, Artificial Sequence
  Description of Artificial Sequence: Synthetic oligonucleotide
  Sense strand starting at position 3751 of SEQ ID NO: 916974
ugauuauguaaucgagaau

SEQ ID NO: 1198677 - RNA, 19 nt, Artificial Sequence
  Description of Artificial Sequence: Synthetic oligonucleotide
  Antisense strand to SEQ ID NO: 1198676
auucucgauuacauaauca

SEQ ID NO: 1198678 - RNA, 19 nt, Artificial Sequence
  Description of Artificial Sequence: Synthetic oligonucleotide
  Sense strand starting at position 3754 of SEQ ID NO: 916974
uuauguaaucgagaaucau

SEQ ID NO: 1198679 - RNA, 19 nt, Artificial Sequence
  Description of Artificial Sequence: Synthetic oligonucleotide
  Antisense strand to SEQ ID NO: 1198678
augauucucgauuacauaa

SEQ ID NO: 1198680 - RNA, 19 nt, Artificial Sequence
  Description of Artificial Sequence: Synthetic oligonucleotide
  Sense strand starting at position 3772 of SEQ ID NO: 916974
ugagauaauuaaguguguu

SEQ ID NO: 1198681 - RNA, 19 nt, Artificial Sequence
  Description of Artificial Sequence: Synthetic oligonucleotide
  Antisense strand to SEQ ID NO: 1198680
aacacacuuaauuaucuca

SEQ ID NO: 1198682 - RNA, 19 nt, Artificial Sequence
  Description of Artificial Sequence: Synthetic oligonucleotide
  Sense strand starting at position 3871 of SEQ ID NO: 916974
gauggaugccaugggagua

SEQ ID NO: 1198683 - RNA, 19 nt, Artificial Sequence
  Description of Artificial Sequence: Synthetic oligonucleotide
  Antisense strand to SEQ ID NO: 1198682
uacucccauggcauccauc

SEQ ID NO: 1198684 - RNA, 19 nt, Artificial Sequence
  Description of Artificial Sequence: Synthetic oligonucleotide
  Sense strand starting at position 97 of SEQ ID NO: 916975
gagggcacaugagaaauaa

SEQ ID NO: 1198685 - RNA, 19 nt, Artificial Sequence
  Description of Artificial Sequence: Synthetic oligonucleotide
  Antisense strand to SEQ ID NO: 1198684
uuauuucucaugugcccuc

SEQ ID NO: 1198686 - RNA, 19 nt, Artificial Sequence
  Description of Artificial Sequence: Synthetic oligonucleotide
  Sense strand starting at position 136 of SEQ ID NO: 916975
gcaaguaagagcuagagga

SEQ ID NO: 1198687 - RNA, 19 nt, Artificial Sequence
  Description of Artificial Sequence: Synthetic oligonucleotide
  Antisense strand to SEQ ID NO: 1198686
uccucuagcucuuacuugc

SEQ ID NO: 1198688 - RNA, 19 nt, Artificial Sequence
  Description of Artificial Sequence: Synthetic oligonucleotide
  Sense strand starting at position 171 of SEQ ID NO: 916975
ucauauuagucuucggauu

SEQ ID NO: 1198689 - RNA, 19 nt, Artificial Sequence
  Description of Artificial Sequence: Synthetic oligonucleotide
  Antisense strand to SEQ ID NO: 1198688
aauccgaagacuaauauga

SEQ ID NO: 1198690 - RNA, 19 nt, Artificial Sequence
  Description of Artificial Sequence: Synthetic oligonucleotide
  Sense strand starting at position 172 of SEQ ID NO: 916975
cauauuagucuucggauug

SEQ ID NO: 1198691 - RNA, 19 nt, Artificial Sequence
  Description of Artificial Sequence: Synthetic oligonucleotide
  Antisense strand to SEQ ID NO: 1198690
caauccgaagacuaauaug

SEQ ID NO: 1198692 - RNA, 19 nt, Artificial Sequence
  Description of Artificial Sequence: Synthetic oligonucleotide
  Sense strand starting at position 182 of SEQ ID NO: 916975
uucggauugaagugcauaa

SEQ ID NO: 1198693 - RNA, 19 nt, Artificial Sequence
  Description of Artificial Sequence: Synthetic oligonucleotide
  Antisense strand to SEQ ID NO: 1198692
uuaugcacuucaauccgaa

SEQ ID NO: 1198694 - RNA, 19 nt, Artificial Sequence
  Description of Artificial Sequence: Synthetic oligonucleotide
  Sense strand starting at position 336 of SEQ ID NO: 916975
gguggauucuuccagucug

SEQ ID NO: 1198695 - RNA, 19 nt, Artificial Sequence
  Description of Artificial Sequence: Synthetic oligonucleotide
  Antisense strand to SEQ ID NO: 1198694
cagacuggaagaauccacc

SEQ ID NO: 1198696 - RNA, 19 nt, Artificial Sequence
  Description of Artificial Sequence: Synthetic oligonucleotide
  Sense strand starting at position 467 of SEQ ID NO: 916975
aggguaccauauuauauau

SEQ ID NO: 1198697 - RNA, 19 nt, Artificial Sequence
  Description of Artificial Sequence: Synthetic oligonucleotide
  Antisense strand to SEQ ID NO: 1198696
auauauaauaugguacccu

SEQ ID NO: 1198698 - RNA, 19 nt, Artificial Sequence
  Description of Artificial Sequence: Synthetic oligonucleotide
  Sense strand starting at position 501 of SEQ ID NO: 916975
uuacuucuuuaguuggaua

SEQ ID NO: 1198699 - RNA, 19 nt, Artificial Sequence
  Description of Artificial Sequence: Synthetic oligonucleotide
  Antisense strand to SEQ ID NO: 1198698
uauccaacuaaagaaguaa

SEQ ID NO: 1198700 - RNA, 19 nt, Artificial Sequence
  Description of Artificial Sequence: Synthetic oligonucleotide
  Sense strand starting at position 503 of SEQ ID NO: 916975
acuucuuuaguuggauauu

SEQ ID NO: 1198701 - RNA, 19 nt, Artificial Sequence
  Description of Artificial Sequence: Synthetic oligonucleotide
  Antisense strand to SEQ ID NO: 1198700
aauauccaacuaaagaagu

SEQ ID NO: 1198702 - RNA, 19 nt, Artificial Sequence
  Description of Artificial Sequence: Synthetic oligonucleotide
  Sense strand starting at position 504 of SEQ ID NO: 916975
cuucuuuaguuggauauuu

SEQ ID NO: 1198703 - RNA, 19 nt, Artificial Sequence
  Description of Artificial Sequence: Synthetic oligonucleotide
  Antisense strand to SEQ ID NO: 1198702
aaauauccaacuaaagaag

SEQ ID NO: 1198704 - RNA, 19 nt, Artificial Sequence
  Description of Artificial Sequence: Synthetic oligonucleotide
  Sense strand starting at position 512 of SEQ ID NO: 916975
guuggauauuucuauaucu

SEQ ID NO: 1198705 - RNA, 19 nt, Artificial Sequence
  Description of Artificial Sequence: Synthetic oligonucleotide
  Antisense strand to SEQ ID NO: 1198704
agauauagaaauauccaac

SEQ ID NO: 1198706 - RNA, 19 nt, Artificial Sequence
  Description of Artificial Sequence: Synthetic oligonucleotide
  Sense strand starting at position 556 of SEQ ID NO: 916975
gacguauaagugcgugcau

SEQ ID NO: 1198707 - RNA, 19 nt, Artificial Sequence
  Description of Artificial Sequence: Synthetic oligonucleotide
  Antisense strand to SEQ ID NO: 1198706
augcacgcacuuauacguc

SEQ ID NO: 1198708 - RNA, 19 nt, Artificial Sequence
  Description of Artificial Sequence: Synthetic oligonucleotide
  Sense strand starting at position 557 of SEQ ID NO: 916975
acguauaagugcgugcaua

SEQ ID NO: 1198709 - RNA, 19 nt, Artificial Sequence
  Description of Artificial Sequence: Synthetic oligonucleotide
  Antisense strand to SEQ ID NO: 1198708
uaugcacgcacuuauacgu

SEQ ID NO: 1198710 - RNA, 19 nt, Artificial Sequence
  Description of Artificial Sequence: Synthetic oligonucleotide
  Sense strand starting at position 558 of SEQ ID NO: 916975
cguauaagugcgugcauac

SEQ ID NO: 1198711 - RNA, 19 nt, Artificial Sequence
  Description of Artificial Sequence: Synthetic oligonucleotide
  Antisense strand to SEQ ID NO: 1198710
guaugcacgcacuuauacg

SEQ ID NO: 1198712 - RNA, 19 nt, Artificial Sequence
  Description of Artificial Sequence: Synthetic oligonucleotide
  Sense strand starting at position 612 of SEQ ID NO: 916975
uccaguucuccuggaaagg

SEQ ID NO: 1198713 - RNA, 19 nt, Artificial Sequence
  Description of Artificial Sequence: Synthetic oligonucleotide
  Antisense strand to SEQ ID NO: 1198712
ccuuuccaggagaacugga

SEQ ID NO: 1198714 - RNA, 19 nt, Artificial Sequence
  Description of Artificial Sequence: Synthetic oligonucleotide
  Sense strand starting at position 692 of SEQ ID NO: 916975
cccucucuuggugaucaau

SEQ ID NO: 1198715 - RNA, 19 nt, Artificial Sequence
  Description of Artificial Sequence: Synthetic oligonucleotide
  Antisense strand to SEQ ID NO: 1198714
auugaucaccaagagaggg

SEQ ID NO: 1198716 - RNA, 19 nt, Artificial Sequence
  Description of Artificial Sequence: Synthetic oligonucleotide
  Sense strand starting at position 694 of SEQ ID NO: 916975
cucucuuggugaucaauac

SEQ ID NO: 1198717 - RNA, 19 nt, Artificial Sequence
  Description of Artificial Sequence: Synthetic oligonucleotide
  Antisense strand to SEQ ID NO: 1198716
guauugaucaccaagagag

SEQ ID NO: 1198718 - RNA, 19 nt, Artificial Sequence
  Description of Artificial Sequence: Synthetic oligonucleotide
  Sense strand starting at position 695 of SEQ ID NO: 916975
ucucuuggugaucaauacu

SEQ ID NO: 1198719 - RNA, 19 nt, Artificial Sequence
  Description of Artificial Sequence: Synthetic oligonucleotide
  Antisense strand to SEQ ID NO: 1198718
aguauugaucaccaagaga

SEQ ID NO: 1198720 - RNA, 19 nt, Artificial Sequence
  Description of Artificial Sequence: Synthetic oligonucleotide
  Sense strand starting at position 748 of SEQ ID NO: 916975
ggagcuagcucuuucccaa

SEQ ID NO: 1198721 - RNA, 19 nt, Artificial Sequence
  Description of Artificial Sequence: Synthetic oligonucleotide
  Antisense strand to SEQ ID NO: 1198720
uugggaaagagcuagcucc

SEQ ID NO: 1198722 - RNA, 19 nt, Artificial Sequence
  Description of Artificial Sequence: Synthetic oligonucleotide
  Sense strand starting at position 780 of SEQ ID NO: 916975
cccauuuccugagcgucua

SEQ ID NO: 1198723 - RNA, 19 nt, Artificial Sequence
  Description of Artificial Sequence: Synthetic oligonucleotide
  Antisense strand to SEQ ID NO: 1198722
uagacgcucaggaaauggg

SEQ ID NO: 1198724 - RNA, 19 nt, Artificial Sequence
  Description of Artificial Sequence: Synthetic oligonucleotide
  Sense strand starting at position 790 of SEQ ID NO: 916975
gagcgucuaccagguacua

SEQ ID NO: 1198725 - RNA, 19 nt, Artificial Sequence
  Description of Artificial Sequence: Synthetic oligonucleotide
  Antisense strand to SEQ ID NO: 1198724
uaguaccugguagacgcuc

SEQ ID NO: 1198726 - RNA, 19 nt, Artificial Sequence
  Description of Artificial Sequence: Synthetic oligonucleotide
  Sense strand starting at position 809 of SEQ ID NO: 916975
ggagaacucuuacaacaga

SEQ ID NO: 1198727 - RNA, 19 nt, Artificial Sequence
  Description of Artificial Sequence: Synthetic oligonucleotide
  Antisense strand to SEQ ID NO: 1198726
ucuguuguaagaguucucc

SEQ ID NO: 1198728 - RNA, 19 nt, Artificial Sequence
  Description of Artificial Sequence: Synthetic oligonucleotide
  Sense strand starting at position 1042 of SEQ ID NO: 916975
gcugaacucgggcagagaa

SEQ ID NO: 1198729 - RNA, 19 nt, Artificial Sequence
  Description of Artificial Sequence: Synthetic oligonucleotide
  Antisense strand to SEQ ID NO: 1198728
uucucugcccgaguucagc

SEQ ID NO: 1198730 - RNA, 19 nt, Artificial Sequence
  Description of Artificial Sequence: Synthetic oligonucleotide
  Sense strand starting at position 2286 of SEQ ID NO: 916975
uccagaucuuaggagggaa

SEQ ID NO: 1198731 - RNA, 19 nt, Artificial Sequence
  Description of Artificial Sequence: Synthetic oligonucleotide
  Antisense strand to SEQ ID NO: 1198730
uucccuccuaagaucugga

SEQ ID NO: 1198732 - RNA, 19 nt, Artificial Sequence
  Description of Artificial Sequence: Synthetic oligonucleotide
  Sense strand starting at position 2325 of SEQ ID NO: 916975
gaagucagcgagcaugaaa

SEQ ID NO: 1198733 - RNA, 19 nt, Artificial Sequence
  Description of Artificial Sequence: Synthetic oligonucleotide
  Antisense strand to SEQ ID NO: 1198732
uuucaugcucgcugacuuc

SEQ ID NO: 1198734 - RNA, 19 nt, Artificial Sequence
  Description of Artificial Sequence: Synthetic oligonucleotide
  Sense strand starting at position 2897 of SEQ ID NO: 916975
uagggaaguucuggguuaa

SEQ ID NO: 1198735 - RNA, 19 nt, Artificial Sequence
  Description of Artificial Sequence: Synthetic oligonucleotide
  Antisense strand to SEQ ID NO: 1198734
uuaacccagaacuucccua

SEQ ID NO: 1198736 - RNA, 19 nt, Artificial Sequence
  Description of Artificial Sequence: Synthetic oligonucleotide
  Sense strand starting at position 2898 of SEQ ID NO: 916975
agggaaguucuggguuaag

SEQ ID NO: 1198737 - RNA, 19 nt, Artificial Sequence
  Description of Artificial Sequence: Synthetic oligonucleotide
  Antisense strand to SEQ ID NO: 1198736
cuuaacccagaacuucccu

SEQ ID NO: 1198738 - RNA, 19 nt, Artificial Sequence
  Description of Artificial Sequence: Synthetic oligonucleotide
  Sense strand starting at position 2963 of SEQ ID NO: 916975
gaugcuguugccuguguaa

SEQ ID NO: 1198739 - RNA, 19 nt, Artificial Sequence
  Description of Artificial Sequence: Synthetic oligonucleotide
  Antisense strand to SEQ ID NO: 1198738
uuacacaggcaacagcauc

SEQ ID NO: 1198740 - RNA, 19 nt, Artificial Sequence
  Description of Artificial Sequence: Synthetic oligonucleotide
  Sense strand starting at position 2965 of SEQ ID NO: 916975
ugcuguugccuguguaaug

SEQ ID NO: 1198741 - RNA, 19 nt, Artificial Sequence
  Description of Artificial Sequence: Synthetic oligonucleotide
  Antisense strand to SEQ ID NO: 1198740
cauuacacaggcaacagca

SEQ ID NO: 1198742 - RNA, 19 nt, Artificial Sequence
  Description of Artificial Sequence: Synthetic oligonucleotide
  Sense strand starting at position 2966 of SEQ ID NO: 916975
gcuguugccuguguaaugu

SEQ ID NO: 1198743 - RNA, 19 nt, Artificial Sequence
  Description of Artificial Sequence: Synthetic oligonucleotide
  Antisense strand to SEQ ID NO: 1198742
acauuacacaggcaacagc

SEQ ID NO: 1198744 - RNA, 19 nt, Artificial Sequence
  Description of Artificial Sequence: Synthetic oligonucleotide
  Sense strand starting at position 3187 of SEQ ID NO: 916975
gguaucaggucuguucuga

SEQ ID NO: 1198745 - RNA, 19 nt, Artificial Sequence
  Description of Artificial Sequence: Synthetic oligonucleotide
  Antisense strand to SEQ ID NO: 1198744
ucagaacagaccugauacc

SEQ ID NO: 1198746 - RNA, 19 nt, Artificial Sequence
  Description of Artificial Sequence: Synthetic oligonucleotide
  Sense strand starting at position 3195 of SEQ ID NO: 916975
gucuguucugaacguuagu

SEQ ID NO: 1198747 - RNA, 19 nt, Artificial Sequence
  Description of Artificial Sequence: Synthetic oligonucleotide
  Antisense strand to SEQ ID NO: 1198746
acuaacguucagaacagac

SEQ ID NO: 1198748 - RNA, 19 nt, Artificial Sequence
  Description of Artificial Sequence: Synthetic oligonucleotide
  Sense strand starting at position 3201 of SEQ ID NO: 916975
ucugaacguuagucucgau

SEQ ID NO: 1198749 - RNA, 19 nt, Artificial Sequence
  Description of Artificial Sequence: Synthetic oligonucleotide
  Antisense strand to SEQ ID NO: 1198748
aucgagacuaacguucaga

SEQ ID NO: 1198750 - RNA, 19 nt, Artificial Sequence
  Description of Artificial Sequence: Synthetic oligonucleotide
  Sense strand starting at position 3205 of SEQ ID NO: 916975
aacguuagucucgaugaua

SEQ ID NO: 1198751 - RNA, 19 nt, Artificial Sequence
  Description of Artificial Sequence: Synthetic oligonucleotide
  Antisense strand to SEQ ID NO: 1198750
uaucaucgagacuaacguu

SEQ ID NO: 1198752 - RNA, 19 nt, Artificial Sequence
  Description of Artificial Sequence: Synthetic oligonucleotide
  Sense strand starting at position 3208 of SEQ ID NO: 916975
guuagucucgaugauaaau

SEQ ID NO: 1198753 - RNA, 19 nt, Artificial Sequence
  Description of Artificial Sequence: Synthetic oligonucleotide
  Antisense strand to SEQ ID NO: 1198752
auuuaucaucgagacuaac

SEQ ID NO: 1198754 - RNA, 19 nt, Artificial Sequence
  Description of Artificial Sequence: Synthetic oligonucleotide
  Sense strand starting at position 3210 of SEQ ID NO: 916975
uagucucgaugauaaaugu

SEQ ID NO: 1198755 - RNA, 19 nt, Artificial Sequence
  Description of Artificial Sequence: Synthetic oligonucleotide
  Antisense strand to SEQ ID NO: 1198754
acauuuaucaucgagacua

SEQ ID NO: 1198756 - RNA, 19 nt, Artificial Sequence
  Description of Artificial Sequence: Synthetic oligonucleotide
  Sense strand starting at position 3654 of SEQ ID NO: 916975
aauggugugcgucugaagu

SEQ ID NO: 1198757 - RNA, 19 nt, Artificial Sequence
  Description of Artificial Sequence: Synthetic oligonucleotide
  Antisense strand to SEQ ID NO: 1198756
acuucagacgcacaccauu

SEQ ID NO: 1198758 - RNA, 19 nt, Artificial Sequence
  Description of Artificial Sequence: Synthetic oligonucleotide
  Sense strand starting at position 3822 of SEQ ID NO: 916975
gccugucugcacucguaga

SEQ ID NO: 1198759 - RNA, 19 nt, Artificial Sequence
  Description of Artificial Sequence: Synthetic oligonucleotide
  Antisense strand to SEQ ID NO: 1198758
ucuacgagugcagacaggc

SEQ ID NO: 1198760 - RNA, 19 nt, Artificial Sequence
  Description of Artificial Sequence: Synthetic oligonucleotide
  Sense strand starting at position 3827 of SEQ ID NO: 916975
ucugcacucguagagcuaa

SEQ ID NO: 1198761 - RNA, 19 nt, Artificial Sequence
  Description of Artificial Sequence: Synthetic oligonucleotide
  Antisense strand to SEQ ID NO: 1198760
uuagcucuacgagugcaga

SEQ ID NO: 1198762 - RNA, 19 nt, Artificial Sequence
  Description of Artificial Sequence: Synthetic oligonucleotide
  Sense strand starting at position 3982 of SEQ ID NO: 916975
uuuaaaggauucuggaaac

SEQ ID NO: 1198763 - RNA, 19 nt, Artificial Sequence
  Description of Artificial Sequence: Synthetic oligonucleotide
  Antisense strand to SEQ ID NO: 1198762
guuuccagaauccuuuaaa

SEQ ID NO: 1198764 - RNA, 19 nt, Artificial Sequence
  Description of Artificial Sequence: Synthetic oligonucleotide
  Sense strand starting at position 31 of SEQ ID NO: 916976
aaagguagguagucauaau

SEQ ID NO: 1198765 - RNA, 19 nt, Artificial Sequence
  Description of Artificial Sequence: Synthetic oligonucleotide
  Antisense strand to SEQ ID NO: 1198764
auuaugacuaccuaccuuu

SEQ ID NO: 1198766 - RNA, 19 nt, Artificial Sequence
  Description of Artificial Sequence: Synthetic oligonucleotide
  Sense strand starting at position 127 of SEQ ID NO: 916976
uuuagagcugauuaugguu

SEQ ID NO: 1198767 - RNA, 19 nt, Artificial Sequence
  Description of Artificial Sequence: Synthetic oligonucleotide
  Antisense strand to SEQ ID NO: 1198766
aaccauaaucagcucuaaa

SEQ ID NO: 1198768 - RNA, 19 nt, Artificial Sequence
  Description of Artificial Sequence: Synthetic oligonucleotide
  Sense strand starting at position 133 of SEQ ID NO: 916976
gcugauuaugguuaccuga

SEQ ID NO: 1198769 - RNA, 19 nt, Artificial Sequence
  Description of Artificial Sequence: Synthetic oligonucleotide
  Antisense strand to SEQ ID NO: 1198768
ucagguaaccauaaucagc

SEQ ID NO: 1198770 - RNA, 19 nt, Artificial Sequence
  Description of Artificial Sequence: Synthetic oligonucleotide
  Sense strand starting at position 493 of SEQ ID NO: 916976
gugauuaugaagcaguuua

SEQ ID NO: 1198771 - RNA, 19 nt, Artificial Sequence
  Description of Artificial Sequence: Synthetic oligonucleotide
  Antisense strand to SEQ ID NO: 1198770
uaaacugcuucauaaucac

SEQ ID NO: 1198772 - RNA, 19 nt, Artificial Sequence
  Description of Artificial Sequence: Synthetic oligonucleotide
  Sense strand starting at position 574 of SEQ ID NO: 916976
gagagaaucugccuggaau

SEQ ID NO: 1198773 - RNA, 19 nt, Artificial Sequence
  Description of Artificial Sequence: Synthetic oligonucleotide
  Antisense strand to SEQ ID NO: 1198772
auuccaggcagauucucuc

SEQ ID NO: 1198774 - RNA, 19 nt, Artificial Sequence
  Description of Artificial Sequence: Synthetic oligonucleotide
  Sense strand starting at position 575 of SEQ ID NO: 916976
agagaaucugccuggaauu

SEQ ID NO: 1198775 - RNA, 19 nt, Artificial Sequence
  Description of Artificial Sequence: Synthetic oligonucleotide
  Antisense strand to SEQ ID NO: 1198774
aauuccaggcagauucucu

SEQ ID NO: 1198776 - RNA, 19 nt, Artificial Sequence
  Description of Artificial Sequence: Synthetic oligonucleotide
  Sense strand starting at position 576 of SEQ ID NO: 916976
gagaaucugccuggaauuc

SEQ ID NO: 1198777 - RNA, 19 nt, Artificial Sequence
  Description of Artificial Sequence: Synthetic oligonucleotide
  Antisense strand to SEQ ID NO: 1198776
gaauuccaggcagauucuc

SEQ ID NO: 1198778 - RNA, 19 nt, Artificial Sequence
  Description of Artificial Sequence: Synthetic oligonucleotide
  Sense strand starting at position 808 of SEQ ID NO: 916976
aguggauaauuaucauuag

SEQ ID NO: 1198779 - RNA, 19 nt, Artificial Sequence
  Description of Artificial Sequence: Synthetic oligonucleotide
  Antisense strand to SEQ ID NO: 1198778
cuaaugauaauuauccacu

SEQ ID NO: 1198780 - RNA, 19 nt, Artificial Sequence
  Description of Artificial Sequence: Synthetic oligonucleotide
  Sense strand starting at position 811 of SEQ ID NO: 916976
ggauaauuaucauuaguag

SEQ ID NO: 1198781 - RNA, 19 nt, Artificial Sequence
  Description of Artificial Sequence: Synthetic oligonucleotide
  Antisense strand to SEQ ID NO: 1198780
cuacuaaugauaauuaucc

SEQ ID NO: 1198782 - RNA, 19 nt, Artificial Sequence
  Description of Artificial Sequence: Synthetic oligonucleotide
  Sense strand starting at position 1018 of SEQ ID NO: 916976
gggccuuggaaucagagua

SEQ ID NO: 1198783 - RNA, 19 nt, Artificial Sequence
  Description of Artificial Sequence: Synthetic oligonucleotide
  Antisense strand to SEQ ID NO: 1198782
uacucugauuccaaggccc

SEQ ID NO: 1198784 - RNA, 19 nt, Artificial Sequence
  Description of Artificial Sequence: Synthetic oligonucleotide
  Sense strand starting at position 1061 of SEQ ID NO: 916976
gucugcuuucugcauauuu

SEQ ID NO: 1198785 - RNA, 19 nt, Artificial Sequence
  Description of Artificial Sequence: Synthetic oligonucleotide
  Antisense strand to SEQ ID NO: 1198784
aaauaugcagaaagcagac

SEQ ID NO: 1198786 - RNA, 19 nt, Artificial Sequence
  Description of Artificial Sequence: Synthetic oligonucleotide
  Sense strand starting at position 1063 of SEQ ID NO: 916976
cugcuuucugcauauuugu

SEQ ID NO: 1198787 - RNA, 19 nt, Artificial Sequence
  Description of Artificial Sequence: Synthetic oligonucleotide
  Antisense strand to SEQ ID NO: 1198786
acaaauaugcagaaagcag

SEQ ID NO: 1198788 - RNA, 19 nt, Artificial Sequence
  Description of Artificial Sequence: Synthetic oligonucleotide
  Sense strand starting at position 1072 of SEQ ID NO: 916976
gcauauuuguccuugguaa

SEQ ID NO: 1198789 - RNA, 19 nt, Artificial Sequence
  Description of Artificial Sequence: Synthetic oligonucleotide
  Antisense strand to SEQ ID NO: 1198788
uuaccaaggacaaauaugc

SEQ ID NO: 1198790 - RNA, 19 nt, Artificial Sequence
  Description of Artificial Sequence: Synthetic oligonucleotide
  Sense strand starting at position 1138 of SEQ ID NO: 916976
ugucuugcuguguuacuca

SEQ ID NO: 1198791 - RNA, 19 nt, Artificial Sequence
  Description of Artificial Sequence: Synthetic oligonucleotide
  Antisense strand to SEQ ID NO: 1198790
ugaguaacacagcaagaca

SEQ ID NO: 1198792 - RNA, 19 nt, Artificial Sequence
  Description of Artificial Sequence: Synthetic oligonucleotide
  Sense strand starting at position 1329 of SEQ ID NO: 916976
gucccugauguauaaaggu

SEQ ID NO: 1198793 - RNA, 19 nt, Artificial Sequence
  Description of Artificial Sequence: Synthetic oligonucleotide
  Antisense strand to SEQ ID NO: 1198792
accuuuauacaucagggac

SEQ ID NO: 1198794 - RNA, 19 nt, Artificial Sequence
  Description of Artificial Sequence: Synthetic oligonucleotide
  Sense strand starting at position 1342 of SEQ ID NO: 916976
aaagguggugcuuaauaag

SEQ ID NO: 1198795 - RNA, 19 nt, Artificial Sequence
  Description of Artificial Sequence: Synthetic oligonucleotide
  Antisense strand to SEQ ID NO: 1198794
cuuauuaagcaccaccuuu

SEQ ID NO: 1198796 - RNA, 19 nt, Artificial Sequence
  Description of Artificial Sequence: Synthetic oligonucleotide
  Sense strand starting at position 1521 of SEQ ID NO: 916976
aucuguguuaagcagagau

SEQ ID NO: 1198797 - RNA, 19 nt, Artificial Sequence
  Description of Artificial Sequence: Synthetic oligonucleotide
  Antisense strand to SEQ ID NO: 1198796
aucucugcuuaacacagau

SEQ ID NO: 1198798 - RNA, 19 nt, Artificial Sequence
  Description of Artificial Sequence: Synthetic oligonucleotide
  Sense strand starting at position 1523 of SEQ ID NO: 916976
cuguguuaagcagagauaa

SEQ ID NO: 1198799 - RNA, 19 nt, Artificial Sequence
  Description of Artificial Sequence: Synthetic oligonucleotide
  Antisense strand to SEQ ID NO: 1198798
uuaucucugcuuaacacag

SEQ ID NO: 1198800 - RNA, 19 nt, Artificial Sequence
  Description of Artificial Sequence: Synthetic oligonucleotide
  Sense strand starting at position 1897 of SEQ ID NO: 916976
caaagaauauuagugguuu

SEQ ID NO: 1198801 - RNA, 19 nt, Artificial Sequence
  Description of Artificial Sequence: Synthetic oligonucleotide
  Antisense strand to SEQ ID NO: 1198800
aaaccacuaauauucuuug

SEQ ID NO: 1198802 - RNA, 19 nt, Artificial Sequence
  Description of Artificial Sequence: Synthetic oligonucleotide
  Sense strand starting at position 2170 of SEQ ID NO: 916976
caugauguggcccauaaga

SEQ ID NO: 1198803 - RNA, 19 nt, Artificial Sequence
  Description of Artificial Sequence: Synthetic oligonucleotide
  Antisense strand to SEQ ID NO: 1198802
ucuuaugggccacaucaug

SEQ ID NO: 1198804 - RNA, 19 nt, Artificial Sequence
  Description of Artificial Sequence: Synthetic oligonucleotide
  Sense strand starting at position 2392 of SEQ ID NO: 916976
ugucacucagguuggaaga

SEQ ID NO: 1198805 - RNA, 19 nt, Artificial Sequence
  Description of Artificial Sequence: Synthetic oligonucleotide
  Antisense strand to SEQ ID NO: 1198804
ucuuccaaccugagugaca

SEQ ID NO: 1198806 - RNA, 19 nt, Artificial Sequence
  Description of Artificial Sequence: Synthetic oligonucleotide
  Sense strand starting at position 2393 of SEQ ID NO: 916976
gucacucagguuggaagau

SEQ ID NO: 1198807 - RNA, 19 nt, Artificial Sequence
  Description of Artificial Sequence: Synthetic oligonucleotide
  Antisense strand to SEQ ID NO: 1198806
aucuuccaaccugagugac

SEQ ID NO: 1198808 - RNA, 19 nt, Artificial Sequence
  Description of Artificial Sequence: Synthetic oligonucleotide
  Sense strand starting at position 2457 of SEQ ID NO: 916976
gacuucuauugucuaagga

SEQ ID NO: 1198809 - RNA, 19 nt, Artificial Sequence
  Description of Artificial Sequence: Synthetic oligonucleotide
  Antisense strand to SEQ ID NO: 1198808
uccuuagacaauagaaguc

SEQ ID NO: 1198810 - RNA, 19 nt, Artificial Sequence
  Description of Artificial Sequence: Synthetic oligonucleotide
  Sense strand starting at position 2501 of SEQ ID NO: 916976
gagagauguuacuugguaa

SEQ ID NO: 1198811 - RNA, 19 nt, Artificial Sequence
  Description of Artificial Sequence: Synthetic oligonucleotide
  Antisense strand to SEQ ID NO: 1198810
uuaccaaguaacaucucuc

SEQ ID NO: 1198812 - RNA, 19 nt, Artificial Sequence
  Description of Artificial Sequence: Synthetic oligonucleotide
  Sense strand starting at position 2502 of SEQ ID NO: 916976
agagauguuacuugguaaa

SEQ ID NO: 1198813 - RNA, 19 nt, Artificial Sequence
  Description of Artificial Sequence: Synthetic oligonucleotide
  Antisense strand to SEQ ID NO: 1198812
uuuaccaaguaacaucucu

SEQ ID NO: 1198814 - RNA, 19 nt, Artificial Sequence
  Description of Artificial Sequence: Synthetic oligonucleotide
  Sense strand starting at position 2504 of SEQ ID NO: 916976
agauguuacuugguaaaua

SEQ ID NO: 1198815 - RNA, 19 nt, Artificial Sequence
  Description of Artificial Sequence: Synthetic oligonucleotide
  Antisense strand to SEQ ID NO: 1198814
uauuuaccaaguaacaucu

SEQ ID NO: 1198816 - RNA, 19 nt, Artificial Sequence
  Description of Artificial Sequence: Synthetic oligonucleotide
  Sense strand starting at position 2595 of SEQ ID NO: 916976
auaagcguagcugaauaaa

SEQ ID NO: 1198817 - RNA, 19 nt, Artificial Sequence
  Description of Artificial Sequence: Synthetic oligonucleotide
  Antisense strand to SEQ ID NO: 1198816
uuuauucagcuacgcuuau

SEQ ID NO: 1198818 - RNA, 19 nt, Artificial Sequence
  Description of Artificial Sequence: Synthetic oligonucleotide
  Sense strand starting at position 2690 of SEQ ID NO: 916976
uuaagaaaggcuuguauaa

SEQ ID NO: 1198819 - RNA, 19 nt, Artificial Sequence
  Description of Artificial Sequence: Synthetic oligonucleotide
  Antisense strand to SEQ ID NO: 1198818
uuauacaagccuuucuuaa

SEQ ID NO: 1198820 - RNA, 19 nt, Artificial Sequence
  Description of Artificial Sequence: Synthetic oligonucleotide
  Sense strand starting at position 3407 of SEQ ID NO: 916976
guugguagcgugguuguaa

SEQ ID NO: 1198821 - RNA, 19 nt, Artificial Sequence
  Description of Artificial Sequence: Synthetic oligonucleotide
  Antisense strand to SEQ ID NO: 1198820
uuacaaccacgcuaccaac

SEQ ID NO: 1198822 - RNA, 19 nt, Artificial Sequence
  Description of Artificial Sequence: Synthetic oligonucleotide
  Sense strand starting at position 3421 of SEQ ID NO: 916976
uguaaaugguuucuaaaca

SEQ ID NO: 1198823 - RNA, 19 nt, Artificial Sequence
  Description of Artificial Sequence: Synthetic oligonucleotide
  Antisense strand to SEQ ID NO: 1198822
uguuuagaaaccauuuaca

SEQ ID NO: 1198824 - RNA, 19 nt, Artificial Sequence
  Description of Artificial Sequence: Synthetic oligonucleotide
  Sense strand starting at position 3451 of SEQ ID NO: 916976
augcgaauaacucagaugu

SEQ ID NO: 1198825 - RNA, 19 nt, Artificial Sequence
  Description of Artificial Sequence: Synthetic oligonucleotide
  Antisense strand to SEQ ID NO: 1198824
acaucugaguuauucgcau

SEQ ID NO: 1198826 - RNA, 19 nt, Artificial Sequence
  Description of Artificial Sequence: Synthetic oligonucleotide
  Sense strand starting at position 3501 of SEQ ID NO: 916976
ucagcuuguuauuucugau

SEQ ID NO: 1198827 - RNA, 19 nt, Artificial Sequence
  Description of Artificial Sequence: Synthetic oligonucleotide
  Antisense strand to SEQ ID NO: 1198826
aucagaaauaacaagcuga

SEQ ID NO: 1198828 - RNA, 19 nt, Artificial Sequence
  Description of Artificial Sequence: Synthetic oligonucleotide
  Sense strand starting at position 3594 of SEQ ID NO: 916976
uugugagaucuuuaucucu

SEQ ID NO: 1198829 - RNA, 19 nt, Artificial Sequence
  Description of Artificial Sequence: Synthetic oligonucleotide
  Antisense strand to SEQ ID NO: 1198828
agagauaaagaucucacaa

SEQ ID NO: 1198830 - RNA, 19 nt, Artificial Sequence
  Description of Artificial Sequence: Synthetic oligonucleotide
  Sense strand starting at position 3596 of SEQ ID NO: 916976
gugagaucuuuaucucuaa

SEQ ID NO: 1198831 - RNA, 19 nt, Artificial Sequence
  Description of Artificial Sequence: Synthetic oligonucleotide
  Antisense strand to SEQ ID NO: 1198830
uuagagauaaagaucucac

SEQ ID NO: 1198832 - RNA, 19 nt, Artificial Sequence
  Description of Artificial Sequence: Synthetic oligonucleotide
  Sense strand starting at position 3635 of SEQ ID NO: 916976
ugagucugauacuuggaca

SEQ ID NO: 1198833 - RNA, 19 nt, Artificial Sequence
  Description of Artificial Sequence: Synthetic oligonucleotide
  Antisense strand to SEQ ID NO: 1198832
uguccaaguaucagacuca

SEQ ID NO: 1198834 - RNA, 19 nt, Artificial Sequence
  Description of Artificial Sequence: Synthetic oligonucleotide
  Sense strand starting at position 3749 of SEQ ID NO: 916976
gguauacagagucacuagu

SEQ ID NO: 1198835 - RNA, 19 nt, Artificial Sequence
  Description of Artificial Sequence: Synthetic oligonucleotide
  Antisense strand to SEQ ID NO: 1198834
acuagugacucuguauacc

SEQ ID NO: 1198836 - RNA, 19 nt, Artificial Sequence
  Description of Artificial Sequence: Synthetic oligonucleotide
  Sense strand starting at position 3762 of SEQ ID NO: 916976
acuaguacuucccuggaua

SEQ ID NO: 1198837 - RNA, 19 nt, Artificial Sequence
  Description of Artificial Sequence: Synthetic oligonucleotide
  Antisense strand to SEQ ID NO: 1198836
uauccagggaaguacuagu

SEQ ID NO: 1198838 - RNA, 19 nt, Artificial Sequence
  Description of Artificial Sequence: Synthetic oligonucleotide
  Sense strand starting at position 3765 of SEQ ID NO: 916976
aguacuucccuggauaucu

SEQ ID NO: 1198839 - RNA, 19 nt, Artificial Sequence
  Description of Artificial Sequence: Synthetic oligonucleotide
  Antisense strand to SEQ ID NO: 1198838
agauauccagggaaguacu

SEQ ID NO: 1198840 - RNA, 19 nt, Artificial Sequence
  Description of Artificial Sequence: Synthetic oligonucleotide
  Sense strand starting at position 3776 of SEQ ID NO: 916976
ggauaucuccuguaaaugc

SEQ ID NO: 1198841 - RNA, 19 nt, Artificial Sequence
  Description of Artificial Sequence: Synthetic oligonucleotide
  Antisense strand to SEQ ID NO: 1198840
gcauuuacaggagauaucc

SEQ ID NO: 1198842 - RNA, 19 nt, Artificial Sequence
  Description of Artificial Sequence: Synthetic oligonucleotide
  Sense strand starting at position 3923 of SEQ ID NO: 916976
gguggaggaucuuuccacu

SEQ ID NO: 1198843 - RNA, 19 nt, Artificial Sequence
  Description of Artificial Sequence: Synthetic oligonucleotide
  Antisense strand to SEQ ID NO: 1198842
aguggaaagauccuccacc

SEQ ID NO: 1198844 - RNA, 19 nt, Artificial Sequence
  Description of Artificial Sequence: Synthetic oligonucleotide
  Sense strand starting at position 499 of SEQ ID NO: 916977
guugguagcgugguuguaa

SEQ ID NO: 1198845 - RNA, 19 nt, Artificial Sequence
  Description of Artificial Sequence: Synthetic oligonucleotide
  Antisense strand to SEQ ID NO: 1198844
uuacaaccacgcuaccaac

SEQ ID NO: 1198846 - RNA, 19 nt, Artificial Sequence
  Description of Artificial Sequence: Synthetic oligonucleotide
  Sense strand starting at position 513 of SEQ ID NO: 916977
uguaaaugguuucuaaaca

SEQ ID NO: 1198847 - RNA, 19 nt, Artificial Sequence
  Description of Artificial Sequence: Synthetic oligonucleotide
  Antisense strand to SEQ ID NO: 1198846
uguuuagaaaccauuuaca

SEQ ID NO: 1198848 - RNA, 19 nt, Artificial Sequence
  Description of Artificial Sequence: Synthetic oligonucleotide
  Sense strand starting at position 543 of SEQ ID NO: 916977
augcgaauaacucagaugu

SEQ ID NO: 1198849 - RNA, 19 nt, Artificial Sequence
  Description of Artificial Sequence: Synthetic oligonucleotide
  Antisense strand to SEQ ID NO: 1198848
acaucugaguuauucgcau

SEQ ID NO: 1198850 - RNA, 19 nt, Artificial Sequence
  Description of Artificial Sequence: Synthetic oligonucleotide
  Sense strand starting at position 593 of SEQ ID NO: 916977
ucagcuuguuauuucugau

SEQ ID NO: 1198851 - RNA, 19 nt, Artificial Sequence
  Description of Artificial Sequence: Synthetic oligonucleotide
  Antisense strand to SEQ ID NO: 1198850
aucagaaauaacaagcuga

SEQ ID NO: 1198852 - RNA, 19 nt, Artificial Sequence
  Description of Artificial Sequence: Synthetic oligonucleotide
  Sense strand starting at position 686 of SEQ ID NO: 916977
uugugagaucuuuaucucu

SEQ ID NO: 1198853 - RNA, 19 nt, Artificial Sequence
  Description of Artificial Sequence: Synthetic oligonucleotide
  Antisense strand to SEQ ID NO: 1198852
agagauaaagaucucacaa

SEQ ID NO: 1198854 - RNA, 19 nt, Artificial Sequence
  Description of Artificial Sequence: Synthetic oligonucleotide
  Sense strand starting at position 688 of SEQ ID NO: 916977
gugagaucuuuaucucuaa

SEQ ID NO: 1198855 - RNA, 19 nt, Artificial Sequence
  Description of Artificial Sequence: Synthetic oligonucleotide
  Antisense strand to SEQ ID NO: 1198854
uuagagauaaagaucucac

SEQ ID NO: 1198856 - RNA, 19 nt, Artificial Sequence
  Description of Artificial Sequence: Synthetic oligonucleotide
  Sense strand starting at position 727 of SEQ ID NO: 916977
ugagucugauacuuggaca

SEQ ID NO: 1198857 - RNA, 19 nt, Artificial Sequence
  Description of Artificial Sequence: Synthetic oligonucleotide
  Antisense strand to SEQ ID NO: 1198856
uguccaaguaucagacuca

SEQ ID NO: 1198858 - RNA, 19 nt, Artificial Sequence
  Description of Artificial Sequence: Synthetic oligonucleotide
  Sense strand starting at position 841 of SEQ ID NO: 916977
gguauacagagucacuagu

SEQ ID NO: 1198859 - RNA, 19 nt, Artificial Sequence
  Description of Artificial Sequence: Synthetic oligonucleotide
  Antisense strand to SEQ ID NO: 1198858
acuagugacucuguauacc

SEQ ID NO: 1198860 - RNA, 19 nt, Artificial Sequence
  Description of Artificial Sequence: Synthetic oligonucleotide
  Sense strand starting at position 854 of SEQ ID NO: 916977
acuaguacuucccuggaua

SEQ ID NO: 1198861 - RNA, 19 nt, Artificial Sequence
  Description of Artificial Sequence: Synthetic oligonucleotide
  Antisense strand to SEQ ID NO: 1198860
uauccagggaaguacuagu

SEQ ID NO: 1198862 - RNA, 19 nt, Artificial Sequence
  Description of Artificial Sequence: Synthetic oligonucleotide
  Sense strand starting at position 857 of SEQ ID NO: 916977
aguacuucccuggauaucu

SEQ ID NO: 1198863 - RNA, 19 nt, Artificial Sequence
  Description of Artificial Sequence: Synthetic oligonucleotide
  Antisense strand to SEQ ID NO: 1198862
agauauccagggaaguacu

SEQ ID NO: 1198864 - RNA, 19 nt, Artificial Sequence
  Description of Artificial Sequence: Synthetic oligonucleotide
  Sense strand starting at position 868 of SEQ ID NO: 916977
ggauaucuccuguaaaugc

SEQ ID NO: 1198865 - RNA, 19 nt, Artificial Sequence
  Description of Artificial Sequence: Synthetic oligonucleotide
  Antisense strand to SEQ ID NO: 1198864
gcauuuacaggagauaucc

SEQ ID NO: 1198866 - RNA, 19 nt, Artificial Sequence
  Description of Artificial Sequence: Synthetic oligonucleotide
  Sense strand starting at position 1015 of SEQ ID NO: 916977
gguggaggaucuuuccacu

SEQ ID NO: 1198867 - RNA, 19 nt, Artificial Sequence
  Description of Artificial Sequence: Synthetic oligonucleotide
  Antisense strand to SEQ ID NO: 1198866
aguggaaagauccuccacc

SEQ ID NO: 1198868 - RNA, 19 nt, Artificial Sequence
  Description of Artificial Sequence: Synthetic oligonucleotide
  Sense strand starting at position 1127 of SEQ ID NO: 916977
uuauguaggucacugagaa

SEQ ID NO: 1198869 - RNA, 19 nt, Artificial Sequence
  Description of Artificial Sequence: Synthetic oligonucleotide
  Antisense strand to SEQ ID NO: 1198868
uucucagugaccuacauaa

SEQ ID NO: 1198870 - RNA, 19 nt, Artificial Sequence
  Description of Artificial Sequence: Synthetic oligonucleotide
  Sense strand starting at position 1128 of SEQ ID NO: 916977
uauguaggucacugagaag

SEQ ID NO: 1198871 - RNA, 19 nt, Artificial Sequence
  Description of Artificial Sequence: Synthetic oligonucleotide
  Antisense strand to SEQ ID NO: 1198870
cuucucagugaccuacaua

SEQ ID NO: 1198872 - RNA, 19 nt, Artificial Sequence
  Description of Artificial Sequence: Synthetic oligonucleotide
  Sense strand starting at position 1159 of SEQ ID NO: 916977
ucuaucuaucuuugagaug

SEQ ID NO: 1198873 - RNA, 19 nt, Artificial Sequence
  Description of Artificial Sequence: Synthetic oligonucleotide
  Antisense strand to SEQ ID NO: 1198872
caucucaaagauagauaga

SEQ ID NO: 1198874 - RNA, 19 nt, Artificial Sequence
  Description of Artificial Sequence: Synthetic oligonucleotide
  Sense strand starting at position 1183 of SEQ ID NO: 916977
ccugaaaucugguccugau

SEQ ID NO: 1198875 - RNA, 19 nt, Artificial Sequence
  Description of Artificial Sequence: Synthetic oligonucleotide
  Antisense strand to SEQ ID NO: 1198874
aucaggaccagauuucagg

SEQ ID NO: 1198876 - RNA, 19 nt, Artificial Sequence
  Description of Artificial Sequence: Synthetic oligonucleotide
  Sense strand starting at position 1221 of SEQ ID NO: 916977
ugagccucccggugaauuu

SEQ ID NO: 1198877 - RNA, 19 nt, Artificial Sequence
  Description of Artificial Sequence: Synthetic oligonucleotide
  Antisense strand to SEQ ID NO: 1198876
aaauucaccgggaggcuca

SEQ ID NO: 1198878 - RNA, 19 nt, Artificial Sequence
  Description of Artificial Sequence: Synthetic oligonucleotide
  Sense strand starting at position 1302 of SEQ ID NO: 916977
aguuuaucucaacaaguuu

SEQ ID NO: 1198879 - RNA, 19 nt, Artificial Sequence
  Description of Artificial Sequence: Synthetic oligonucleotide
  Antisense strand to SEQ ID NO: 1198878
aaacuuguugagauaaacu

SEQ ID NO: 1198880 - RNA, 19 nt, Artificial Sequence
  Description of Artificial Sequence: Synthetic oligonucleotide
  Sense strand starting at position 1410 of SEQ ID NO: 916977
uagaguagggccugaaaug

SEQ ID NO: 1198881 - RNA, 19 nt, Artificial Sequence
  Description of Artificial Sequence: Synthetic oligonucleotide
  Antisense strand to SEQ ID NO: 1198880
cauuucaggcccuacucua

SEQ ID NO: 1198882 - RNA, 19 nt, Artificial Sequence
  Description of Artificial Sequence: Synthetic oligonucleotide
  Sense strand starting at position 1433 of SEQ ID NO: 916977
cgggaaacuucuuccuuga

SEQ ID NO: 1198883 - RNA, 19 nt, Artificial Sequence
  Description of Artificial Sequence: Synthetic oligonucleotide
  Antisense strand to SEQ ID NO: 1198882
ucaaggaagaaguuucccg

SEQ ID NO: 1198884 - RNA, 19 nt, Artificial Sequence
  Description of Artificial Sequence: Synthetic oligonucleotide
  Sense strand starting at position 1435 of SEQ ID NO: 916977
ggaaacuucuuccuugaga

SEQ ID NO: 1198885 - RNA, 19 nt, Artificial Sequence
  Description of Artificial Sequence: Synthetic oligonucleotide
  Antisense strand to SEQ ID NO: 1198884
ucucaaggaagaaguuucc

SEQ ID NO: 1198886 - RNA, 19 nt, Artificial Sequence
  Description of Artificial Sequence: Synthetic oligonucleotide
  Sense strand starting at position 1476 of SEQ ID NO: 916977
uggaaauugcagcaacaau

SEQ ID NO: 1198887 - RNA, 19 nt, Artificial Sequence
  Description of Artificial Sequence: Synthetic oligonucleotide
  Antisense strand to SEQ ID NO: 1198886
auuguugcugcaauuucca

SEQ ID NO: 1198888 - RNA, 19 nt, Artificial Sequence
  Description of Artificial Sequence: Synthetic oligonucleotide
  Sense strand starting at position 1515 of SEQ ID NO: 916977
aagaacuuugcaggugaga

SEQ ID NO: 1198889 - RNA, 19 nt, Artificial Sequence
  Description of Artificial Sequence: Synthetic oligonucleotide
  Antisense strand to SEQ ID NO: 1198888
ucucaccugcaaaguucuu

SEQ ID NO: 1198890 - RNA, 19 nt, Artificial Sequence
  Description of Artificial Sequence: Synthetic oligonucleotide
  Sense strand starting at position 1524 of SEQ ID NO: 916977
gcaggugagaaaggugaaa

SEQ ID NO: 1198891 - RNA, 19 nt, Artificial Sequence
  Description of Artificial Sequence: Synthetic oligonucleotide
  Antisense strand to SEQ ID NO: 1198890
uuucaccuuucucaccugc

SEQ ID NO: 1198892 - RNA, 19 nt, Artificial Sequence
  Description of Artificial Sequence: Synthetic oligonucleotide
  Sense strand starting at position 1665 of SEQ ID NO: 916977
uucuccuaggcauaaugau

SEQ ID NO: 1198893 - RNA, 19 nt, Artificial Sequence
  Description of Artificial Sequence: Synthetic oligonucleotide
  Antisense strand to SEQ ID NO: 1198892
aucauuaugccuaggagaa

SEQ ID NO: 1198894 - RNA, 19 nt, Artificial Sequence
  Description of Artificial Sequence: Synthetic oligonucleotide
  Sense strand starting at position 1673 of SEQ ID NO: 916977
ggcauaaugauggaugcuu

SEQ ID NO: 1198895 - RNA, 19 nt, Artificial Sequence
  Description of Artificial Sequence: Synthetic oligonucleotide
  Antisense strand to SEQ ID NO: 1198894
aagcauccaucauuaugcc

SEQ ID NO: 1198896 - RNA, 19 nt, Artificial Sequence
  Description of Artificial Sequence: Synthetic oligonucleotide
  Sense strand starting at position 1703 of SEQ ID NO: 916977
guaagaguggugggagauu

SEQ ID NO: 1198897 - RNA, 19 nt, Artificial Sequence
  Description of Artificial Sequence: Synthetic oligonucleotide
  Antisense strand to SEQ ID NO: 1198896
aaucucccaccacucuuac

SEQ ID NO: 1198898 - RNA, 19 nt, Artificial Sequence
  Description of Artificial Sequence: Synthetic oligonucleotide
  Sense strand starting at position 1918 of SEQ ID NO: 916977
aggugaagcaagugagaaa

SEQ ID NO: 1198899 - RNA, 19 nt, Artificial Sequence
  Description of Artificial Sequence: Synthetic oligonucleotide
  Antisense strand to SEQ ID NO: 1198898
uuucucacuugcuucaccu

SEQ ID NO: 1198900 - RNA, 19 nt, Artificial Sequence
  Description of Artificial Sequence: Synthetic oligonucleotide
  Sense strand starting at position 2275 of SEQ ID NO: 916977
uccacugcugcagauaaau

SEQ ID NO: 1198901 - RNA, 19 nt, Artificial Sequence
  Description of Artificial Sequence: Synthetic oligonucleotide
  Antisense strand to SEQ ID NO: 1198900
auuuaucugcagcagugga

SEQ ID NO: 1198902 - RNA, 19 nt, Artificial Sequence
  Description of Artificial Sequence: Synthetic oligonucleotide
  Sense strand starting at position 2596 of SEQ ID NO: 916977
cgguuacacccugaagaug

SEQ ID NO: 1198903 - RNA, 19 nt, Artificial Sequence
  Description of Artificial Sequence: Synthetic oligonucleotide
  Antisense strand to SEQ ID NO: 1198902
caucuucaggguguaaccg

SEQ ID NO: 1198904 - RNA, 19 nt, Artificial Sequence
  Description of Artificial Sequence: Synthetic oligonucleotide
  Sense strand starting at position 3004 of SEQ ID NO: 916977
ggacaacuccauugaguau

SEQ ID NO: 1198905 - RNA, 19 nt, Artificial Sequence
  Description of Artificial Sequence: Synthetic oligonucleotide
  Antisense strand to SEQ ID NO: 1198904
auacucaauggaguugucc

SEQ ID NO: 1198906 - RNA, 19 nt, Artificial Sequence
  Description of Artificial Sequence: Synthetic oligonucleotide
  Sense strand starting at position 3106 of SEQ ID NO: 916977
ucaaguauaaugugaggaa

SEQ ID NO: 1198907 - RNA, 19 nt, Artificial Sequence
  Description of Artificial Sequence: Synthetic oligonucleotide
  Antisense strand to SEQ ID NO: 1198906
uuccucacauuauacuuga

SEQ ID NO: 1198908 - RNA, 19 nt, Artificial Sequence
  Description of Artificial Sequence: Synthetic oligonucleotide
  Sense strand starting at position 3212 of SEQ ID NO: 916977
ggacauaguagaugcuaaa

SEQ ID NO: 1198909 - RNA, 19 nt, Artificial Sequence
  Description of Artificial Sequence: Synthetic oligonucleotide
  Antisense strand to SEQ ID NO: 1198908
uuuagcaucuacuaugucc

SEQ ID NO: 1198910 - RNA, 19 nt, Artificial Sequence
  Description of Artificial Sequence: Synthetic oligonucleotide
  Sense strand starting at position 3414 of SEQ ID NO: 916977
uuuccaauauguuugggaa

SEQ ID NO: 1198911 - RNA, 19 nt, Artificial Sequence
  Description of Artificial Sequence: Synthetic oligonucleotide
  Antisense strand to SEQ ID NO: 1198910
uucccaaacauauuggaaa

SEQ ID NO: 1198912 - RNA, 19 nt, Artificial Sequence
  Description of Artificial Sequence: Synthetic oligonucleotide
  Sense strand starting at position 3415 of SEQ ID NO: 916977
uuccaauauguuugggaaa

SEQ ID NO: 1198913 - RNA, 19 nt, Artificial Sequence
  Description of Artificial Sequence: Synthetic oligonucleotide
  Antisense strand to SEQ ID NO: 1198912
uuucccaaacauauuggaa

SEQ ID NO: 1198914 - RNA, 19 nt, Artificial Sequence
  Description of Artificial Sequence: Synthetic oligonucleotide
  Sense strand starting at position 3439 of SEQ ID NO: 916977
aauauaacuucgguaggga

SEQ ID NO: 1198915 - RNA, 19 nt, Artificial Sequence
  Description of Artificial Sequence: Synthetic oligonucleotide
  Antisense strand to SEQ ID NO: 1198914
ucccuaccgaaguuauauu

SEQ ID NO: 1198916 - RNA, 19 nt, Artificial Sequence
  Description of Artificial Sequence: Synthetic oligonucleotide
  Sense strand starting at position 3520 of SEQ ID NO: 916977
guaccugagggccaaugau

SEQ ID NO: 1198917 - RNA, 19 nt, Artificial Sequence
  Description of Artificial Sequence: Synthetic oligonucleotide
  Antisense strand to SEQ ID NO: 1198916
aucauuggcccucagguac

SEQ ID NO: 1198918 - RNA, 19 nt, Artificial Sequence
  Description of Artificial Sequence: Synthetic oligonucleotide
  Sense strand starting at position 3613 of SEQ ID NO: 916977
uaacauugauaguuugaug

SEQ ID NO: 1198919 - RNA, 19 nt, Artificial Sequence
  Description of Artificial Sequence: Synthetic oligonucleotide
  Antisense strand to SEQ ID NO: 1198918
caucaaacuaucaauguua

SEQ ID NO: 1198920 - RNA, 19 nt, Artificial Sequence
  Description of Artificial Sequence: Synthetic oligonucleotide
  Sense strand starting at position 3752 of SEQ ID NO: 916977
guuguagagcuauaagaau

SEQ ID NO: 1198921 - RNA, 19 nt, Artificial Sequence
  Description of Artificial Sequence: Synthetic oligonucleotide
  Antisense strand to SEQ ID NO: 1198920
auucuuauagcucuacaac

SEQ ID NO: 1198922 - RNA, 19 nt, Artificial Sequence
  Description of Artificial Sequence: Synthetic oligonucleotide
  Sense strand starting at position 3810 of SEQ ID NO: 916977
gcaaaugcucaagaaauug

SEQ ID NO: 1198923 - RNA, 19 nt, Artificial Sequence
  Description of Artificial Sequence: Synthetic oligonucleotide
  Antisense strand to SEQ ID NO: 1198922
caauuucuugagcauuugc

SEQ ID NO: 1198924 - RNA, 19 nt, Artificial Sequence
  Description of Artificial Sequence: Synthetic oligonucleotide
  Sense strand starting at position 72 of SEQ ID NO: 916978
gguaaucacuauccaagag

SEQ ID NO: 1198925 - RNA, 19 nt, Artificial Sequence
  Description of Artificial Sequence: Synthetic oligonucleotide
  Antisense strand to SEQ ID NO: 1198924
cucuuggauagugauuacc

SEQ ID NO: 1198926 - RNA, 19 nt, Artificial Sequence
  Description of Artificial Sequence: Synthetic oligonucleotide
  Sense strand starting at position 171 of SEQ ID NO: 916978
uguggaauuauagguaggu

SEQ ID NO: 1198927 - RNA, 19 nt, Artificial Sequence
  Description of Artificial Sequence: Synthetic oligonucleotide
  Antisense strand to SEQ ID NO: 1198926
accuaccuauaauuccaca

SEQ ID NO: 1198928 - RNA, 19 nt, Artificial Sequence
  Description of Artificial Sequence: Synthetic oligonucleotide
  Sense strand starting at position 172 of SEQ ID NO: 916978
guggaauuauagguaggua

SEQ ID NO: 1198929 - RNA, 19 nt, Artificial Sequence
  Description of Artificial Sequence: Synthetic oligonucleotide
  Antisense strand to SEQ ID NO: 1198928
uaccuaccuauaauuccac

SEQ ID NO: 1198930 - RNA, 19 nt, Artificial Sequence
  Description of Artificial Sequence: Synthetic oligonucleotide
  Sense strand starting at position 175 of SEQ ID NO: 916978
gaauuauagguagguauaa

SEQ ID NO: 1198931 - RNA, 19 nt, Artificial Sequence
  Description of Artificial Sequence: Synthetic oligonucleotide
  Antisense strand to SEQ ID NO: 1198930
uuauaccuaccuauaauuc

SEQ ID NO: 1198932 - RNA, 19 nt, Artificial Sequence
  Description of Artificial Sequence: Synthetic oligonucleotide
  Sense strand starting at position 281 of SEQ ID NO: 916978
acccuuagacuguauuauu

SEQ ID NO: 1198933 - RNA, 19 nt, Artificial Sequence
  Description of Artificial Sequence: Synthetic oligonucleotide
  Antisense strand to SEQ ID NO: 1198932
aauaauacagucuaagggu

SEQ ID NO: 1198934 - RNA, 19 nt, Artificial Sequence
  Description of Artificial Sequence: Synthetic oligonucleotide
  Sense strand starting at position 347 of SEQ ID NO: 916978
aaguuauuagcuuaugguu

SEQ ID NO: 1198935 - RNA, 19 nt, Artificial Sequence
  Description of Artificial Sequence: Synthetic oligonucleotide
  Antisense strand to SEQ ID NO: 1198934
aaccauaagcuaauaacuu

SEQ ID NO: 1198936 - RNA, 19 nt, Artificial Sequence
  Description of Artificial Sequence: Synthetic oligonucleotide
  Sense strand starting at position 453 of SEQ ID NO: 916978
caggguuuaucuuuguaga

SEQ ID NO: 1198937 - RNA, 19 nt, Artificial Sequence
  Description of Artificial Sequence: Synthetic oligonucleotide
  Antisense strand to SEQ ID NO: 1198936
ucuacaaagauaaacccug

SEQ ID NO: 1198938 - RNA, 19 nt, Artificial Sequence
  Description of Artificial Sequence: Synthetic oligonucleotide
  Sense strand starting at position 454 of SEQ ID NO: 916978
aggguuuaucuuuguagag

SEQ ID NO: 1198939 - RNA, 19 nt, Artificial Sequence
  Description of Artificial Sequence: Synthetic oligonucleotide
  Antisense strand to SEQ ID NO: 1198938
cucuacaaagauaaacccu

SEQ ID NO: 1198940 - RNA, 19 nt, Artificial Sequence
  Description of Artificial Sequence: Synthetic oligonucleotide
  Sense strand starting at position 464 of SEQ ID NO: 916978
uuuguagagcaugagugaa

SEQ ID NO: 1198941 - RNA, 19 nt, Artificial Sequence
  Description of Artificial Sequence: Synthetic oligonucleotide
  Antisense strand to SEQ ID NO: 1198940
uucacucaugcucuacaaa

SEQ ID NO: 1198942 - RNA, 19 nt, Artificial Sequence
  Description of Artificial Sequence: Synthetic oligonucleotide
  Sense strand starting at position 508 of SEQ ID NO: 916978
ucuuguauuucugugaauu

SEQ ID NO: 1198943 - RNA, 19 nt, Artificial Sequence
  Description of Artificial Sequence: Synthetic oligonucleotide
  Antisense strand to SEQ ID NO: 1198942
aauucacagaaauacaaga

SEQ ID NO: 1198944 - RNA, 19 nt, Artificial Sequence
  Description of Artificial Sequence: Synthetic oligonucleotide
  Sense strand starting at position 543 of SEQ ID NO: 916978
aacgaaauauguucuaagu

SEQ ID NO: 1198945 - RNA, 19 nt, Artificial Sequence
  Description of Artificial Sequence: Synthetic oligonucleotide
  Antisense strand to SEQ ID NO: 1198944
acuuagaacauauuucguu

SEQ ID NO: 1198946 - RNA, 19 nt, Artificial Sequence
  Description of Artificial Sequence: Synthetic oligonucleotide
  Sense strand starting at position 556 of SEQ ID NO: 916978
cuaagucaaugagcauauu

SEQ ID NO: 1198947 - RNA, 19 nt, Artificial Sequence
  Description of Artificial Sequence: Synthetic oligonucleotide
  Antisense strand to SEQ ID NO: 1198946
aauaugcucauugacuuag

SEQ ID NO: 1198948 - RNA, 19 nt, Artificial Sequence
  Description of Artificial Sequence: Synthetic oligonucleotide
  Sense strand starting at position 661 of SEQ ID NO: 916978
acucaagaguaguuaauga

SEQ ID NO: 1198949 - RNA, 19 nt, Artificial Sequence
  Description of Artificial Sequence: Synthetic oligonucleotide
  Antisense strand to SEQ ID NO: 1198948
ucauuaacuacucuugagu

SEQ ID NO: 1198950 - RNA, 19 nt, Artificial Sequence
  Description of Artificial Sequence: Synthetic oligonucleotide
  Sense strand starting at position 1005 of SEQ ID NO: 916978
aagaauggguuucuuuaug

SEQ ID NO: 1198951 - RNA, 19 nt, Artificial Sequence
  Description of Artificial Sequence: Synthetic oligonucleotide
  Antisense strand to SEQ ID NO: 1198950
cauaaagaaacccauucuu

SEQ ID NO: 1198952 - RNA, 19 nt, Artificial Sequence
  Description of Artificial Sequence: Synthetic oligonucleotide
  Sense strand starting at position 1065 of SEQ ID NO: 916978
ugagccauuccuggaggga

SEQ ID NO: 1198953 - RNA, 19 nt, Artificial Sequence
  Description of Artificial Sequence: Synthetic oligonucleotide
  Antisense strand to SEQ ID NO: 1198952
ucccuccaggaauggcuca

SEQ ID NO: 1198954 - RNA, 19 nt, Artificial Sequence
  Description of Artificial Sequence: Synthetic oligonucleotide
  Sense strand starting at position 1097 of SEQ ID NO: 916978
gcagaaguuguccauucug

SEQ ID NO: 1198955 - RNA, 19 nt, Artificial Sequence
  Description of Artificial Sequence: Synthetic oligonucleotide
  Antisense strand to SEQ ID NO: 1198954
cagaauggacaacuucugc

SEQ ID NO: 1198956 - RNA, 19 nt, Artificial Sequence
  Description of Artificial Sequence: Synthetic oligonucleotide
  Sense strand starting at position 1175 of SEQ ID NO: 916978
guauacugagccuaagaac

SEQ ID NO: 1198957 - RNA, 19 nt, Artificial Sequence
  Description of Artificial Sequence: Synthetic oligonucleotide
  Antisense strand to SEQ ID NO: 1198956
guucuuaggcucaguauac

SEQ ID NO: 1198958 - RNA, 19 nt, Artificial Sequence
  Description of Artificial Sequence: Synthetic oligonucleotide
  Sense strand starting at position 1226 of SEQ ID NO: 916978
uuuaaaguaucucugagga

SEQ ID NO: 1198959 - RNA, 19 nt, Artificial Sequence
  Description of Artificial Sequence: Synthetic oligonucleotide
  Antisense strand to SEQ ID NO: 1198958
uccucagagauacuuuaaa

SEQ ID NO: 1198960 - RNA, 19 nt, Artificial Sequence
  Description of Artificial Sequence: Synthetic oligonucleotide
  Sense strand starting at position 1327 of SEQ ID NO: 916978
ugcucugcaguagaaauaa

SEQ ID NO: 1198961 - RNA, 19 nt, Artificial Sequence
  Description of Artificial Sequence: Synthetic oligonucleotide
  Antisense strand to SEQ ID NO: 1198960
uuauuucuacugcagagca

SEQ ID NO: 1198962 - RNA, 19 nt, Artificial Sequence
  Description of Artificial Sequence: Synthetic oligonucleotide
  Sense strand starting at position 1368 of SEQ ID NO: 916978
cagcaagaaugaucagguu

SEQ ID NO: 1198963 - RNA, 19 nt, Artificial Sequence
  Description of Artificial Sequence: Synthetic oligonucleotide
  Antisense strand to SEQ ID NO: 1198962
aaccugaucauucuugcug

SEQ ID NO: 1198964 - RNA, 19 nt, Artificial Sequence
  Description of Artificial Sequence: Synthetic oligonucleotide
  Sense strand starting at position 1397 of SEQ ID NO: 916978
uuuguuacacaauguaaga

SEQ ID NO: 1198965 - RNA, 19 nt, Artificial Sequence
  Description of Artificial Sequence: Synthetic oligonucleotide
  Antisense strand to SEQ ID NO: 1198964
ucuuacauuguguaacaaa

SEQ ID NO: 1198966 - RNA, 19 nt, Artificial Sequence
  Description of Artificial Sequence: Synthetic oligonucleotide
  Sense strand starting at position 1667 of SEQ ID NO: 916978
cugaguuuccaggaguugu

SEQ ID NO: 1198967 - RNA, 19 nt, Artificial Sequence
  Description of Artificial Sequence: Synthetic oligonucleotide
  Antisense strand to SEQ ID NO: 1198966
acaacuccuggaaacucag

SEQ ID NO: 1198968 - RNA, 19 nt, Artificial Sequence
  Description of Artificial Sequence: Synthetic oligonucleotide
  Sense strand starting at position 1801 of SEQ ID NO: 916978
acacuagaucacugugaga

SEQ ID NO: 1198969 - RNA, 19 nt, Artificial Sequence
  Description of Artificial Sequence: Synthetic oligonucleotide
  Antisense strand to SEQ ID NO: 1198968
ucucacagugaucuagugu

SEQ ID NO: 1198970 - RNA, 19 nt, Artificial Sequence
  Description of Artificial Sequence: Synthetic oligonucleotide
  Sense strand starting at position 1803 of SEQ ID NO: 916978
acuagaucacugugagaac

SEQ ID NO: 1198971 - RNA, 19 nt, Artificial Sequence
  Description of Artificial Sequence: Synthetic oligonucleotide
  Antisense strand to SEQ ID NO: 1198970
guucucacagugaucuagu

SEQ ID NO: 1198972 - RNA, 19 nt, Artificial Sequence
  Description of Artificial Sequence: Synthetic oligonucleotide
  Sense strand starting at position 1814 of SEQ ID NO: 916978
gugagaacugaacgaaauc

SEQ ID NO: 1198973 - RNA, 19 nt, Artificial Sequence
  Description of Artificial Sequence: Synthetic oligonucleotide
  Antisense strand to SEQ ID NO: 1198972
gauuucguucaguucucac

SEQ ID NO: 1198974 - RNA, 19 nt, Artificial Sequence
  Description of Artificial Sequence: Synthetic oligonucleotide
  Sense strand starting at position 1932 of SEQ ID NO: 916978
agaggaauacaccguauau

SEQ ID NO: 1198975 - RNA, 19 nt, Artificial Sequence
  Description of Artificial Sequence: Synthetic oligonucleotide
  Antisense strand to SEQ ID NO: 1198974
auauacgguguauuccucu

SEQ ID NO: 1198976 - RNA, 19 nt, Artificial Sequence
  Description of Artificial Sequence: Synthetic oligonucleotide
  Sense strand starting at position 2012 of SEQ ID NO: 916978
gaaagugcccaagauguca

SEQ ID NO: 1198977 - RNA, 19 nt, Artificial Sequence
  Description of Artificial Sequence: Synthetic oligonucleotide
  Antisense strand to SEQ ID NO: 1198976
ugacaucuugggcacuuuc

SEQ ID NO: 1198978 - RNA, 19 nt, Artificial Sequence
  Description of Artificial Sequence: Synthetic oligonucleotide
  Sense strand starting at position 2213 of SEQ ID NO: 916978
agcucugagaaguguagga

SEQ ID NO: 1198979 - RNA, 19 nt, Artificial Sequence
  Description of Artificial Sequence: Synthetic oligonucleotide
  Antisense strand to SEQ ID NO: 1198978
uccuacacuucucagagcu

SEQ ID NO: 1198980 - RNA, 19 nt, Artificial Sequence
  Description of Artificial Sequence: Synthetic oligonucleotide
  Sense strand starting at position 2222 of SEQ ID NO: 916978
aaguguaggaaagguacua

SEQ ID NO: 1198981 - RNA, 19 nt, Artificial Sequence
  Description of Artificial Sequence: Synthetic oligonucleotide
  Antisense strand to SEQ ID NO: 1198980
uaguaccuuuccuacacuu

SEQ ID NO: 1198982 - RNA, 19 nt, Artificial Sequence
  Description of Artificial Sequence: Synthetic oligonucleotide
  Sense strand starting at position 2260 of SEQ ID NO: 916978
aagucuuagagaggugagu

SEQ ID NO: 1198983 - RNA, 19 nt, Artificial Sequence
  Description of Artificial Sequence: Synthetic oligonucleotide
  Antisense strand to SEQ ID NO: 1198982
acucaccucucuaagacuu

SEQ ID NO: 1198984 - RNA, 19 nt, Artificial Sequence
  Description of Artificial Sequence: Synthetic oligonucleotide
  Sense strand starting at position 2262 of SEQ ID NO: 916978
gucuuagagaggugaguga

SEQ ID NO: 1198985 - RNA, 19 nt, Artificial Sequence
  Description of Artificial Sequence: Synthetic oligonucleotide
  Antisense strand to SEQ ID NO: 1198984
ucacucaccucucuaagac

SEQ ID NO: 1198986 - RNA, 19 nt, Artificial Sequence
  Description of Artificial Sequence: Synthetic oligonucleotide
  Sense strand starting at position 2893 of SEQ ID NO: 916978
gugauacucccucaucaua

SEQ ID NO: 1198987 - RNA, 19 nt, Artificial Sequence
  Description of Artificial Sequence: Synthetic oligonucleotide
  Antisense strand to SEQ ID NO: 1198986
uaugaugagggaguaucac

SEQ ID NO: 1198988 - RNA, 19 nt, Artificial Sequence
  Description of Artificial Sequence: Synthetic oligonucleotide
  Sense strand starting at position 3007 of SEQ ID NO: 916978
ggacaugccuagcucauuu

SEQ ID NO: 1198989 - RNA, 19 nt, Artificial Sequence
  Description of Artificial Sequence: Synthetic oligonucleotide
  Antisense strand to SEQ ID NO: 1198988
aaaugagcuaggcaugucc

SEQ ID NO: 1198990 - RNA, 19 nt, Artificial Sequence
  Description of Artificial Sequence: Synthetic oligonucleotide
  Sense strand starting at position 3061 of SEQ ID NO: 916978
cucuaaauaccgggauaag

SEQ ID NO: 1198991 - RNA, 19 nt, Artificial Sequence
  Description of Artificial Sequence: Synthetic oligonucleotide
  Antisense strand to SEQ ID NO: 1198990
cuuaucccgguauuuagag

SEQ ID NO: 1198992 - RNA, 19 nt, Artificial Sequence
  Description of Artificial Sequence: Synthetic oligonucleotide
  Sense strand starting at position 3165 of SEQ ID NO: 916978
uucucaggguaaucgaaau

SEQ ID NO: 1198993 - RNA, 19 nt, Artificial Sequence
  Description of Artificial Sequence: Synthetic oligonucleotide
  Antisense strand to SEQ ID NO: 1198992
auuucgauuacccugagaa

SEQ ID NO: 1198994 - RNA, 19 nt, Artificial Sequence
  Description of Artificial Sequence: Synthetic oligonucleotide
  Sense strand starting at position 3176 of SEQ ID NO: 916978
aucgaaaugcuguauuaga

SEQ ID NO: 1198995 - RNA, 19 nt, Artificial Sequence
  Description of Artificial Sequence: Synthetic oligonucleotide
  Antisense strand to SEQ ID NO: 1198994
ucuaauacagcauuucgau

SEQ ID NO: 1198996 - RNA, 19 nt, Artificial Sequence
  Description of Artificial Sequence: Synthetic oligonucleotide
  Sense strand starting at position 3215 of SEQ ID NO: 916978
uuaagaauguugucuacca

SEQ ID NO: 1198997 - RNA, 19 nt, Artificial Sequence
  Description of Artificial Sequence: Synthetic oligonucleotide
  Antisense strand to SEQ ID NO: 1198996
ugguagacaacauucuuaa

SEQ ID NO: 1198998 - RNA, 19 nt, Artificial Sequence
  Description of Artificial Sequence: Synthetic oligonucleotide
  Sense strand starting at position 3216 of SEQ ID NO: 916978
uaagaauguugucuaccag

SEQ ID NO: 1198999 - RNA, 19 nt, Artificial Sequence
  Description of Artificial Sequence: Synthetic oligonucleotide
  Antisense strand to SEQ ID NO: 1198998
cugguagacaacauucuua

SEQ ID NO: 1199000 - RNA, 19 nt, Artificial Sequence
  Description of Artificial Sequence: Synthetic oligonucleotide
  Sense strand starting at position 3222 of SEQ ID NO: 916978
uguugucuaccagaaucuu

SEQ ID NO: 1199001 - RNA, 19 nt, Artificial Sequence
  Description of Artificial Sequence: Synthetic oligonucleotide
  Antisense strand to SEQ ID NO: 1199000
aagauucugguagacaaca

SEQ ID NO: 1199002 - RNA, 19 nt, Artificial Sequence
  Description of Artificial Sequence: Synthetic oligonucleotide
  Sense strand starting at position 3869 of SEQ ID NO: 916978
ugaaacucuccaggucuua

SEQ ID NO: 1199003 - RNA, 19 nt, Artificial Sequence
  Description of Artificial Sequence: Synthetic oligonucleotide
  Antisense strand to SEQ ID NO: 1199002
uaagaccuggagaguuuca

SEQ ID NO: 1199004 - RNA, 19 nt, Artificial Sequence
  Description of Artificial Sequence: Synthetic oligonucleotide
  Sense strand starting at position 557 of SEQ ID NO: 916979
aucaacaacuggcuugaua

SEQ ID NO: 1199005 - RNA, 19 nt, Artificial Sequence
  Description of Artificial Sequence: Synthetic oligonucleotide
  Antisense strand to SEQ ID NO: 1199004
uaucaagccaguuguugau

SEQ ID NO: 1199006 - RNA, 19 nt, Artificial Sequence
  Description of Artificial Sequence: Synthetic oligonucleotide
  Sense strand starting at position 909 of SEQ ID NO: 916979
ucugguuacuaaucaggga

SEQ ID NO: 1199007 - RNA, 19 nt, Artificial Sequence
  Description of Artificial Sequence: Synthetic oligonucleotide
  Antisense strand to SEQ ID NO: 1199006
ucccugauuaguaaccaga

SEQ ID NO: 1199008 - RNA, 19 nt, Artificial Sequence
  Description of Artificial Sequence: Synthetic oligonucleotide
  Sense strand starting at position 1102 of SEQ ID NO: 916979
gugucuauccgccuuuguu

SEQ ID NO: 1199009 - RNA, 19 nt, Artificial Sequence
  Description of Artificial Sequence: Synthetic oligonucleotide
  Antisense strand to SEQ ID NO: 1199008
aacaaaggcggauagacac

SEQ ID NO: 1199010 - RNA, 19 nt, Artificial Sequence
  Description of Artificial Sequence: Synthetic oligonucleotide
  Sense strand starting at position 1103 of SEQ ID NO: 916979
ugucuauccgccuuuguua

SEQ ID NO: 1199011 - RNA, 19 nt, Artificial Sequence
  Description of Artificial Sequence: Synthetic oligonucleotide
  Antisense strand to SEQ ID NO: 1199010
uaacaaaggcggauagaca

SEQ ID NO: 1199012 - RNA, 19 nt, Artificial Sequence
  Description of Artificial Sequence: Synthetic oligonucleotide
  Sense strand starting at position 1104 of SEQ ID NO: 916979
gucuauccgccuuuguuau

SEQ ID NO: 1199013 - RNA, 19 nt, Artificial Sequence
  Description of Artificial Sequence: Synthetic oligonucleotide
  Antisense strand to SEQ ID NO: 1199012
auaacaaaggcggauagac

SEQ ID NO: 1199014 - RNA, 19 nt, Artificial Sequence
  Description of Artificial Sequence: Synthetic oligonucleotide
  Sense strand starting at position 1128 of SEQ ID NO: 916979
agguguagggucugggaaa

SEQ ID NO: 1199015 - RNA, 19 nt, Artificial Sequence
  Description of Artificial Sequence: Synthetic oligonucleotide
  Antisense strand to SEQ ID NO: 1199014
uuucccagacccuacaccu

SEQ ID NO: 1199016 - RNA, 19 nt, Artificial Sequence
  Description of Artificial Sequence: Synthetic oligonucleotide
  Sense strand starting at position 1332 of SEQ ID NO: 916979
ggguaauucuacccaacag

SEQ ID NO: 1199017 - RNA, 19 nt, Artificial Sequence
  Description of Artificial Sequence: Synthetic oligonucleotide
  Antisense strand to SEQ ID NO: 1199016
cuguuggguagaauuaccc

SEQ ID NO: 1199018 - RNA, 19 nt, Artificial Sequence
  Description of Artificial Sequence: Synthetic oligonucleotide
  Sense strand starting at position 1429 of SEQ ID NO: 916979
cugcucugugcacaacuaa

SEQ ID NO: 1199019 - RNA, 19 nt, Artificial Sequence
  Description of Artificial Sequence: Synthetic oligonucleotide
  Antisense strand to SEQ ID NO: 1199018
uuaguugugcacagagcag

SEQ ID NO: 1199020 - RNA, 19 nt, Artificial Sequence
  Description of Artificial Sequence: Synthetic oligonucleotide
  Sense strand starting at position 1582 of SEQ ID NO: 916979
cccacuccucuugagaguu

SEQ ID NO: 1199021 - RNA, 19 nt, Artificial Sequence
  Description of Artificial Sequence: Synthetic oligonucleotide
  Antisense strand to SEQ ID NO: 1199020
aacucucaagaggaguggg

SEQ ID NO: 1199022 - RNA, 19 nt, Artificial Sequence
  Description of Artificial Sequence: Synthetic oligonucleotide
  Sense strand starting at position 1592 of SEQ ID NO: 916979
uugagaguucguaguggug

SEQ ID NO: 1199023 - RNA, 19 nt, Artificial Sequence
  Description of Artificial Sequence: Synthetic oligonucleotide
  Antisense strand to SEQ ID NO: 1199022
caccacuacgaacucucaa

SEQ ID NO: 1199024 - RNA, 19 nt, Artificial Sequence
  Description of Artificial Sequence: Synthetic oligonucleotide
  Sense strand starting at position 1838 of SEQ ID NO: 916979
cgacuucucgcccucugua

SEQ ID NO: 1199025 - RNA, 19 nt, Artificial Sequence
  Description of Artificial Sequence: Synthetic oligonucleotide
  Antisense strand to SEQ ID NO: 1199024
uacagagggcgagaagucg

SEQ ID NO: 1199026 - RNA, 19 nt, Artificial Sequence
  Description of Artificial Sequence: Synthetic oligonucleotide
  Sense strand starting at position 2003 of SEQ ID NO: 916979
gcugucguucgccuauaaa

SEQ ID NO: 1199027 - RNA, 19 nt, Artificial Sequence
  Description of Artificial Sequence: Synthetic oligonucleotide
  Antisense strand to SEQ ID NO: 1199026
uuuauaggcgaacgacagc

SEQ ID NO: 1199028 - RNA, 19 nt, Artificial Sequence
  Description of Artificial Sequence: Synthetic oligonucleotide
  Sense strand starting at position 2136 of SEQ ID NO: 916979
acguguauccguguaguua

SEQ ID NO: 1199029 - RNA, 19 nt, Artificial Sequence
  Description of Artificial Sequence: Synthetic oligonucleotide
  Antisense strand to SEQ ID NO: 1199028
uaacuacacggauacacgu

SEQ ID NO: 1199030 - RNA, 19 nt, Artificial Sequence
  Description of Artificial Sequence: Synthetic oligonucleotide
  Sense strand starting at position 2286 of SEQ ID NO: 916979
gcgcuugcuccugcccaua

SEQ ID NO: 1199031 - RNA, 19 nt, Artificial Sequence
  Description of Artificial Sequence: Synthetic oligonucleotide
  Antisense strand to SEQ ID NO: 1199030
uaugggcaggagcaagcgc

SEQ ID NO: 1199032 - RNA, 19 nt, Artificial Sequence
  Description of Artificial Sequence: Synthetic oligonucleotide
  Sense strand starting at position 2334 of SEQ ID NO: 916979
aggucaagacccugcauaa

SEQ ID NO: 1199033 - RNA, 19 nt, Artificial Sequence
  Description of Artificial Sequence: Synthetic oligonucleotide
  Antisense strand to SEQ ID NO: 1199032
uuaugcagggucuugaccu

SEQ ID NO: 1199034 - RNA, 19 nt, Artificial Sequence
  Description of Artificial Sequence: Synthetic oligonucleotide
  Sense strand starting at position 2394 of SEQ ID NO: 916979
ucuaaugcauuugaacaga

SEQ ID NO: 1199035 - RNA, 19 nt, Artificial Sequence
  Description of Artificial Sequence: Synthetic oligonucleotide
  Antisense strand to SEQ ID NO: 1199034
ucuguucaaaugcauuaga

SEQ ID NO: 1199036 - RNA, 19 nt, Artificial Sequence
  Description of Artificial Sequence: Synthetic oligonucleotide
  Sense strand starting at position 2871 of SEQ ID NO: 916979
agaacaauugcuuaauguc

SEQ ID NO: 1199037 - RNA, 19 nt, Artificial Sequence
  Description of Artificial Sequence: Synthetic oligonucleotide
  Antisense strand to SEQ ID NO: 1199036
gacauuaagcaauuguucu

SEQ ID NO: 1199038 - RNA, 19 nt, Artificial Sequence
  Description of Artificial Sequence: Synthetic oligonucleotide
  Sense strand starting at position 2892 of SEQ ID NO: 916979
agauuuagcuuccucguuu

SEQ ID NO: 1199039 - RNA, 19 nt, Artificial Sequence
  Description of Artificial Sequence: Synthetic oligonucleotide
  Antisense strand to SEQ ID NO: 1199038
aaacgaggaagcuaaaucu

SEQ ID NO: 1199040 - RNA, 19 nt, Artificial Sequence
  Description of Artificial Sequence: Synthetic oligonucleotide
  Sense strand starting at position 2895 of SEQ ID NO: 916979
uuuagcuuccucguuugua

SEQ ID NO: 1199041 - RNA, 19 nt, Artificial Sequence
  Description of Artificial Sequence: Synthetic oligonucleotide
  Antisense strand to SEQ ID NO: 1199040
uacaaacgaggaagcuaaa

SEQ ID NO: 1199042 - RNA, 19 nt, Artificial Sequence
  Description of Artificial Sequence: Synthetic oligonucleotide
  Sense strand starting at position 2924 of SEQ ID NO: 916979
ggaguaacuuuaucugcuc

SEQ ID NO: 1199043 - RNA, 19 nt, Artificial Sequence
  Description of Artificial Sequence: Synthetic oligonucleotide
  Antisense strand to SEQ ID NO: 1199042
gagcagauaaaguuacucc

SEQ ID NO: 1199044 - RNA, 19 nt, Artificial Sequence
  Description of Artificial Sequence: Synthetic oligonucleotide
  Sense strand starting at position 2944 of SEQ ID NO: 916979
accuuccuccuuugaggau

SEQ ID NO: 1199045 - RNA, 19 nt, Artificial Sequence
  Description of Artificial Sequence: Synthetic oligonucleotide
  Antisense strand to SEQ ID NO: 1199044
auccucaaaggaggaaggu

SEQ ID NO: 1199046 - RNA, 19 nt, Artificial Sequence
  Description of Artificial Sequence: Synthetic oligonucleotide
  Sense strand starting at position 2951 of SEQ ID NO: 916979
uccuuugaggauugaguaa

SEQ ID NO: 1199047 - RNA, 19 nt, Artificial Sequence
  Description of Artificial Sequence: Synthetic oligonucleotide
  Antisense strand to SEQ ID NO: 1199046
uuacucaauccucaaagga

SEQ ID NO: 1199048 - RNA, 19 nt, Artificial Sequence
  Description of Artificial Sequence: Synthetic oligonucleotide
  Sense strand starting at position 2964 of SEQ ID NO: 916979
gaguaauaauggccauugu

SEQ ID NO: 1199049 - RNA, 19 nt, Artificial Sequence
  Description of Artificial Sequence: Synthetic oligonucleotide
  Antisense strand to SEQ ID NO: 1199048
acaauggccauuauuacuc

SEQ ID NO: 1199050 - RNA, 19 nt, Artificial Sequence
  Description of Artificial Sequence: Synthetic oligonucleotide
  Sense strand starting at position 2974 of SEQ ID NO: 916979
ggccauuguuuauuaagua

SEQ ID NO: 1199051 - RNA, 19 nt, Artificial Sequence
  Description of Artificial Sequence: Synthetic oligonucleotide
  Antisense strand to SEQ ID NO: 1199050
uacuuaauaaacaauggcc

SEQ ID NO: 1199052 - RNA, 19 nt, Artificial Sequence
  Description of Artificial Sequence: Synthetic oligonucleotide
  Sense strand starting at position 3011 of SEQ ID NO: 916979
uuuauuacacuaugaguag

SEQ ID NO: 1199053 - RNA, 19 nt, Artificial Sequence
  Description of Artificial Sequence: Synthetic oligonucleotide
  Antisense strand to SEQ ID NO: 1199052
cuacucauaguguaauaaa

SEQ ID NO: 1199054 - RNA, 19 nt, Artificial Sequence
  Description of Artificial Sequence: Synthetic oligonucleotide
  Sense strand starting at position 3034 of SEQ ID NO: 916979
caaagcgaucuuggaauua

SEQ ID NO: 1199055 - RNA, 19 nt, Artificial Sequence
  Description of Artificial Sequence: Synthetic oligonucleotide
  Antisense strand to SEQ ID NO: 1199054
uaauuccaagaucgcuuug

SEQ ID NO: 1199056 - RNA, 19 nt, Artificial Sequence
  Description of Artificial Sequence: Synthetic oligonucleotide
  Sense strand starting at position 3102 of SEQ ID NO: 916979
aggcuaagcccuuaaauug

SEQ ID NO: 1199057 - RNA, 19 nt, Artificial Sequence
  Description of Artificial Sequence: Synthetic oligonucleotide
  Antisense strand to SEQ ID NO: 1199056
caauuuaagggcuuagccu

SEQ ID NO: 1199058 - RNA, 19 nt, Artificial Sequence
  Description of Artificial Sequence: Synthetic oligonucleotide
  Sense strand starting at position 3113 of SEQ ID NO: 916979
uuaaauuggccggagcuaa

SEQ ID NO: 1199059 - RNA, 19 nt, Artificial Sequence
  Description of Artificial Sequence: Synthetic oligonucleotide
  Antisense strand to SEQ ID NO: 1199058
uuagcuccggccaauuuaa

SEQ ID NO: 1199060 - RNA, 19 nt, Artificial Sequence
  Description of Artificial Sequence: Synthetic oligonucleotide
  Sense strand starting at position 3178 of SEQ ID NO: 916979
guuacaagacauugccuuu

SEQ ID NO: 1199061 - RNA, 19 nt, Artificial Sequence
  Description of Artificial Sequence: Synthetic oligonucleotide
  Antisense strand to SEQ ID NO: 1199060
aaaggcaaugucuuguaac

SEQ ID NO: 1199062 - RNA, 19 nt, Artificial Sequence
  Description of Artificial Sequence: Synthetic oligonucleotide
  Sense strand starting at position 3181 of SEQ ID NO: 916979
acaagacauugccuuuaug

SEQ ID NO: 1199063 - RNA, 19 nt, Artificial Sequence
  Description of Artificial Sequence: Synthetic oligonucleotide
  Antisense strand to SEQ ID NO: 1199062
cauaaaggcaaugucuugu

SEQ ID NO: 1199064 - RNA, 19 nt, Artificial Sequence
  Description of Artificial Sequence: Synthetic oligonucleotide
  Sense strand starting at position 3184 of SEQ ID NO: 916979
agacauugccuuuauguga

SEQ ID NO: 1199065 - RNA, 19 nt, Artificial Sequence
  Description of Artificial Sequence: Synthetic oligonucleotide
  Antisense strand to SEQ ID NO: 1199064
ucacauaaaggcaaugucu

SEQ ID NO: 1199066 - RNA, 19 nt, Artificial Sequence
  Description of Artificial Sequence: Synthetic oligonucleotide
  Sense strand starting at position 3217 of SEQ ID NO: 916979
uguuguauuccguugcuga

SEQ ID NO: 1199067 - RNA, 19 nt, Artificial Sequence
  Description of Artificial Sequence: Synthetic oligonucleotide
  Antisense strand to SEQ ID NO: 1199066
ucagcaacggaauacaaca

SEQ ID NO: 1199068 - RNA, 19 nt, Artificial Sequence
  Description of Artificial Sequence: Synthetic oligonucleotide
  Sense strand starting at position 3436 of SEQ ID NO: 916979
gagagaaguugacaugaag

SEQ ID NO: 1199069 - RNA, 19 nt, Artificial Sequence
  Description of Artificial Sequence: Synthetic oligonucleotide
  Antisense strand to SEQ ID NO: 1199068
cuucaugucaacuucucuc

SEQ ID NO: 1199070 - RNA, 19 nt, Artificial Sequence
  Description of Artificial Sequence: Synthetic oligonucleotide
  Sense strand starting at position 3516 of SEQ ID NO: 916979
ggcuuaaaccugccgucuu

SEQ ID NO: 1199071 - RNA, 19 nt, Artificial Sequence
  Description of Artificial Sequence: Synthetic oligonucleotide
  Antisense strand to SEQ ID NO: 1199070
aagacggcagguuuaagcc

SEQ ID NO: 1199072 - RNA, 19 nt, Artificial Sequence
  Description of Artificial Sequence: Synthetic oligonucleotide
  Sense strand starting at position 3539 of SEQ ID NO: 916979
ugguaagcccuaggaucaa

SEQ ID NO: 1199073 - RNA, 19 nt, Artificial Sequence
  Description of Artificial Sequence: Synthetic oligonucleotide
  Antisense strand to SEQ ID NO: 1199072
uugauccuagggcuuacca

SEQ ID NO: 1199074 - RNA, 19 nt, Artificial Sequence
  Description of Artificial Sequence: Synthetic oligonucleotide
  Sense strand starting at position 3558 of SEQ ID NO: 916979
agucuuagcucauucugga

SEQ ID NO: 1199075 - RNA, 19 nt, Artificial Sequence
  Description of Artificial Sequence: Synthetic oligonucleotide
  Antisense strand to SEQ ID NO: 1199074
uccagaaugagcuaagacu

SEQ ID NO: 1199076 - RNA, 19 nt, Artificial Sequence
  Description of Artificial Sequence: Synthetic oligonucleotide
  Sense strand starting at position 3563 of SEQ ID NO: 916979
uagcucauucuggagacau

SEQ ID NO: 1199077 - RNA, 19 nt, Artificial Sequence
  Description of Artificial Sequence: Synthetic oligonucleotide
  Antisense strand to SEQ ID NO: 1199076
augucuccagaaugagcua

SEQ ID NO: 1199078 - RNA, 19 nt, Artificial Sequence
  Description of Artificial Sequence: Synthetic oligonucleotide
  Sense strand starting at position 3565 of SEQ ID NO: 916979
gcucauucuggagacauuc

SEQ ID NO: 1199079 - RNA, 19 nt, Artificial Sequence
  Description of Artificial Sequence: Synthetic oligonucleotide
  Antisense strand to SEQ ID NO: 1199078
gaaugucuccagaaugagc

SEQ ID NO: 1199080 - RNA, 19 nt, Artificial Sequence
  Description of Artificial Sequence: Synthetic oligonucleotide
  Sense strand starting at position 3695 of SEQ ID NO: 916979
uggagaucugagggcucaa

SEQ ID NO: 1199081 - RNA, 19 nt, Artificial Sequence
  Description of Artificial Sequence: Synthetic oligonucleotide
  Antisense strand to SEQ ID NO: 1199080
uugagcccucagaucucca

SEQ ID NO: 1199082 - RNA, 19 nt, Artificial Sequence
  Description of Artificial Sequence: Synthetic oligonucleotide
  Sense strand starting at position 3742 of SEQ ID NO: 916979
gauagagucuuggucucuc

SEQ ID NO: 1199083 - RNA, 19 nt, Artificial Sequence
  Description of Artificial Sequence: Synthetic oligonucleotide
  Antisense strand to SEQ ID NO: 1199082
gagagaccaagacucuauc

SEQ ID NO: 1199084 - RNA, 19 nt, Artificial Sequence
  Description of Artificial Sequence: Synthetic oligonucleotide
  Sense strand starting at position 254 of SEQ ID NO: 916980
uaaguuaggucucugaaug

SEQ ID NO: 1199085 - RNA, 19 nt, Artificial Sequence
  Description of Artificial Sequence: Synthetic oligonucleotide
  Antisense strand to SEQ ID NO: 1199084
cauucagagaccuaacuua

SEQ ID NO: 1199086 - RNA, 19 nt, Artificial Sequence
  Description of Artificial Sequence: Synthetic oligonucleotide
  Sense strand starting at position 319 of SEQ ID NO: 916980
uucuaaauuccaggagggu

SEQ ID NO: 1199087 - RNA, 19 nt, Artificial Sequence
  Description of Artificial Sequence: Synthetic oligonucleotide
  Antisense strand to SEQ ID NO: 1199086
acccuccuggaauuuagaa

SEQ ID NO: 1199088 - RNA, 19 nt, Artificial Sequence
  Description of Artificial Sequence: Synthetic oligonucleotide
  Sense strand starting at position 346 of SEQ ID NO: 916980
ucuggauccuuagcacaau

SEQ ID NO: 1199089 - RNA, 19 nt, Artificial Sequence
  Description of Artificial Sequence: Synthetic oligonucleotide
  Antisense strand to SEQ ID NO: 1199088
auugugcuaaggauccaga

SEQ ID NO: 1199090 - RNA, 19 nt, Artificial Sequence
  Description of Artificial Sequence: Synthetic oligonucleotide
  Sense strand starting at position 374 of SEQ ID NO: 916980
uuaggaacuccguacauau

SEQ ID NO: 1199091 - RNA, 19 nt, Artificial Sequence
  Description of Artificial Sequence: Synthetic oligonucleotide
  Antisense strand to SEQ ID NO: 1199090
auauguacggaguuccuaa

SEQ ID NO: 1199092 - RNA, 19 nt, Artificial Sequence
  Description of Artificial Sequence: Synthetic oligonucleotide
  Sense strand starting at position 493 of SEQ ID NO: 916980
guucguaauagguagggaa

SEQ ID NO: 1199093 - RNA, 19 nt, Artificial Sequence
  Description of Artificial Sequence: Synthetic oligonucleotide
  Antisense strand to SEQ ID NO: 1199092
uucccuaccuauuacgaac

SEQ ID NO: 1199094 - RNA, 19 nt, Artificial Sequence
  Description of Artificial Sequence: Synthetic oligonucleotide
  Sense strand starting at position 631 of SEQ ID NO: 916980
ggcacuugcagagaaggua

SEQ ID NO: 1199095 - RNA, 19 nt, Artificial Sequence
  Description of Artificial Sequence: Synthetic oligonucleotide
  Antisense strand to SEQ ID NO: 1199094
uaccuucucugcaagugcc

SEQ ID NO: 1199096 - RNA, 19 nt, Artificial Sequence
  Description of Artificial Sequence: Synthetic oligonucleotide
  Sense strand starting at position 646 of SEQ ID NO: 916980
gguaaacauuuacagagua

SEQ ID NO: 1199097 - RNA, 19 nt, Artificial Sequence
  Description of Artificial Sequence: Synthetic oligonucleotide
  Antisense strand to SEQ ID NO: 1199096
uacucuguaaauguuuacc

SEQ ID NO: 1199098 - RNA, 19 nt, Artificial Sequence
  Description of Artificial Sequence: Synthetic oligonucleotide
  Sense strand starting at position 858 of SEQ ID NO: 916980
ucaauuccuccgcagaauu

SEQ ID NO: 1199099 - RNA, 19 nt, Artificial Sequence
  Description of Artificial Sequence: Synthetic oligonucleotide
  Antisense strand to SEQ ID NO: 1199098
aauucugcggaggaauuga

SEQ ID NO: 1199100 - RNA, 19 nt, Artificial Sequence
  Description of Artificial Sequence: Synthetic oligonucleotide
  Sense strand starting at position 869 of SEQ ID NO: 916980
gcagaauuacuaugugacu

SEQ ID NO: 1199101 - RNA, 19 nt, Artificial Sequence
  Description of Artificial Sequence: Synthetic oligonucleotide
  Antisense strand to SEQ ID NO: 1199100
agucacauaguaauucugc

SEQ ID NO: 1199102 - RNA, 19 nt, Artificial Sequence
  Description of Artificial Sequence: Synthetic oligonucleotide
  Sense strand starting at position 968 of SEQ ID NO: 916980
ggugauugcugauugggaa

SEQ ID NO: 1199103 - RNA, 19 nt, Artificial Sequence
  Description of Artificial Sequence: Synthetic oligonucleotide
  Antisense strand to SEQ ID NO: 1199102
uucccaaucagcaaucacc

SEQ ID NO: 1199104 - RNA, 19 nt, Artificial Sequence
  Description of Artificial Sequence: Synthetic oligonucleotide
  Sense strand starting at position 969 of SEQ ID NO: 916980
gugauugcugauugggaag

SEQ ID NO: 1199105 - RNA, 19 nt, Artificial Sequence
  Description of Artificial Sequence: Synthetic oligonucleotide
  Antisense strand to SEQ ID NO: 1199104
cuucccaaucagcaaucac

SEQ ID NO: 1199106 - RNA, 19 nt, Artificial Sequence
  Description of Artificial Sequence: Synthetic oligonucleotide
  Sense strand starting at position 1026 of SEQ ID NO: 916980
cggucuaacagaggaauaa

SEQ ID NO: 1199107 - RNA, 19 nt, Artificial Sequence
  Description of Artificial Sequence: Synthetic oligonucleotide
  Antisense strand to SEQ ID NO: 1199106
uuauuccucuguuagaccg

SEQ ID NO: 1199108 - RNA, 19 nt, Artificial Sequence
  Description of Artificial Sequence: Synthetic oligonucleotide
  Sense strand starting at position 2194 of SEQ ID NO: 916980
gacccaguccguuaggaaa

SEQ ID NO: 1199109 - RNA, 19 nt, Artificial Sequence
  Description of Artificial Sequence: Synthetic oligonucleotide
  Antisense strand to SEQ ID NO: 1199108
uuuccuaacggacuggguc

SEQ ID NO: 1199110 - RNA, 19 nt, Artificial Sequence
  Description of Artificial Sequence: Synthetic oligonucleotide
  Sense strand starting at position 2366 of SEQ ID NO: 916980
aucagugacgacgauaaua

SEQ ID NO: 1199111 - RNA, 19 nt, Artificial Sequence
  Description of Artificial Sequence: Synthetic oligonucleotide
  Antisense strand to SEQ ID NO: 1199110
uauuaucgucgucacugau

SEQ ID NO: 1199112 - RNA, 19 nt, Artificial Sequence
  Description of Artificial Sequence: Synthetic oligonucleotide
  Sense strand starting at position 2620 of SEQ ID NO: 916980
gucucauccgccuucugua

SEQ ID NO: 1199113 - RNA, 19 nt, Artificial Sequence
  Description of Artificial Sequence: Synthetic oligonucleotide
  Antisense strand to SEQ ID NO: 1199112
uacagaaggcggaugagac

SEQ ID NO: 1199114 - RNA, 19 nt, Artificial Sequence
  Description of Artificial Sequence: Synthetic oligonucleotide
  Sense strand starting at position 2875 of SEQ ID NO: 916980
ucggaagagcuguauccuu

SEQ ID NO: 1199115 - RNA, 19 nt, Artificial Sequence
  Description of Artificial Sequence: Synthetic oligonucleotide
  Antisense strand to SEQ ID NO: 1199114
aaggauacagcucuuccga

SEQ ID NO: 1199116 - RNA, 19 nt, Artificial Sequence
  Description of Artificial Sequence: Synthetic oligonucleotide
  Sense strand starting at position 2941 of SEQ ID NO: 916980
cauuacuaggucugugaga

SEQ ID NO: 1199117 - RNA, 19 nt, Artificial Sequence
  Description of Artificial Sequence: Synthetic oligonucleotide
  Antisense strand to SEQ ID NO: 1199116
ucucacagaccuaguaaug

SEQ ID NO: 1199118 - RNA, 19 nt, Artificial Sequence
  Description of Artificial Sequence: Synthetic oligonucleotide
  Sense strand starting at position 2954 of SEQ ID NO: 916980
gugagacgaguguaacuuu

SEQ ID NO: 1199119 - RNA, 19 nt, Artificial Sequence
  Description of Artificial Sequence: Synthetic oligonucleotide
  Antisense strand to SEQ ID NO: 1199118
aaaguuacacucgucucac

SEQ ID NO: 1199120 - RNA, 19 nt, Artificial Sequence
  Description of Artificial Sequence: Synthetic oligonucleotide
  Sense strand starting at position 2957 of SEQ ID NO: 916980
agacgaguguaacuuugaa

SEQ ID NO: 1199121 - RNA, 19 nt, Artificial Sequence
  Description of Artificial Sequence: Synthetic oligonucleotide
  Antisense strand to SEQ ID NO: 1199120
uucaaaguuacacucgucu

SEQ ID NO: 1199122 - RNA, 19 nt, Artificial Sequence
  Description of Artificial Sequence: Synthetic oligonucleotide
  Sense strand starting at position 2988 of SEQ ID NO: 916980
cuuauuucucccuguguca

SEQ ID NO: 1199123 - RNA, 19 nt, Artificial Sequence
  Description of Artificial Sequence: Synthetic oligonucleotide
  Antisense strand to SEQ ID NO: 1199122
ugacacagggagaaauaag

SEQ ID NO: 1199124 - RNA, 19 nt, Artificial Sequence
  Description of Artificial Sequence: Synthetic oligonucleotide
  Sense strand starting at position 2990 of SEQ ID NO: 916980
uauuucucccugugucagu

SEQ ID NO: 1199125 - RNA, 19 nt, Artificial Sequence
  Description of Artificial Sequence: Synthetic oligonucleotide
  Antisense strand to SEQ ID NO: 1199124
acugacacagggagaaaua

SEQ ID NO: 1199126 - RNA, 19 nt, Artificial Sequence
  Description of Artificial Sequence: Synthetic oligonucleotide
  Sense strand starting at position 3003 of SEQ ID NO: 916980
gucaguauacuuuaaguug

SEQ ID NO: 1199127 - RNA, 19 nt, Artificial Sequence
  Description of Artificial Sequence: Synthetic oligonucleotide
  Antisense strand to SEQ ID NO: 1199126
caacuuaaaguauacugac

SEQ ID NO: 1199128 - RNA, 19 nt, Artificial Sequence
  Description of Artificial Sequence: Synthetic oligonucleotide
  Sense strand starting at position 3095 of SEQ ID NO: 916980
uguggauuggguuaagcuu

SEQ ID NO: 1199129 - RNA, 19 nt, Artificial Sequence
  Description of Artificial Sequence: Synthetic oligonucleotide
  Antisense strand to SEQ ID NO: 1199128
aagcuuaacccaauccaca

SEQ ID NO: 1199130 - RNA, 19 nt, Artificial Sequence
  Description of Artificial Sequence: Synthetic oligonucleotide
  Sense strand starting at position 3101 of SEQ ID NO: 916980
uuggguuaagcuuaugaaa

SEQ ID NO: 1199131 - RNA, 19 nt, Artificial Sequence
  Description of Artificial Sequence: Synthetic oligonucleotide
  Antisense strand to SEQ ID NO: 1199130
uuucauaagcuuaacccaa

SEQ ID NO: 1199132 - RNA, 19 nt, Artificial Sequence
  Description of Artificial Sequence: Synthetic oligonucleotide
  Sense strand starting at position 3143 of SEQ ID NO: 916980
guaauaauaccuuagaagc

SEQ ID NO: 1199133 - RNA, 19 nt, Artificial Sequence
  Description of Artificial Sequence: Synthetic oligonucleotide
  Antisense strand to SEQ ID NO: 1199132
gcuucuaagguauuauuac

SEQ ID NO: 1199134 - RNA, 19 nt, Artificial Sequence
  Description of Artificial Sequence: Synthetic oligonucleotide
  Sense strand starting at position 3213 of SEQ ID NO: 916980
auaugaaguugacuuggau

SEQ ID NO: 1199135 - RNA, 19 nt, Artificial Sequence
  Description of Artificial Sequence: Synthetic oligonucleotide
  Antisense strand to SEQ ID NO: 1199134
auccaagucaacuucauau

SEQ ID NO: 1199136 - RNA, 19 nt, Artificial Sequence
  Description of Artificial Sequence: Synthetic oligonucleotide
  Sense strand starting at position 3220 of SEQ ID NO: 916980
guugacuuggauuguuaga

SEQ ID NO: 1199137 - RNA, 19 nt, Artificial Sequence
  Description of Artificial Sequence: Synthetic oligonucleotide
  Antisense strand to SEQ ID NO: 1199136
ucuaacaauccaagucaac

SEQ ID NO: 1199138 - RNA, 19 nt, Artificial Sequence
  Description of Artificial Sequence: Synthetic oligonucleotide
  Sense strand starting at position 3222 of SEQ ID NO: 916980
ugacuuggauuguuagaga

SEQ ID NO: 1199139 - RNA, 19 nt, Artificial Sequence
  Description of Artificial Sequence: Synthetic oligonucleotide
  Antisense strand to SEQ ID NO: 1199138
ucucuaacaauccaaguca

SEQ ID NO: 1199140 - RNA, 19 nt, Artificial Sequence
  Description of Artificial Sequence: Synthetic oligonucleotide
  Sense strand starting at position 3525 of SEQ ID NO: 916980
guguaacuucgugcugacu

SEQ ID NO: 1199141 - RNA, 19 nt, Artificial Sequence
  Description of Artificial Sequence: Synthetic oligonucleotide
  Antisense strand to SEQ ID NO: 1199140
agucagcacgaaguuacac

SEQ ID NO: 1199142 - RNA, 19 nt, Artificial Sequence
  Description of Artificial Sequence: Synthetic oligonucleotide
  Sense strand starting at position 3528 of SEQ ID NO: 916980
uaacuucgugcugacuaaa

SEQ ID NO: 1199143 - RNA, 19 nt, Artificial Sequence
  Description of Artificial Sequence: Synthetic oligonucleotide
  Antisense strand to SEQ ID NO: 1199142
uuuagucagcacgaaguua

SEQ ID NO: 1199144 - RNA, 19 nt, Artificial Sequence
  Description of Artificial Sequence: Synthetic oligonucleotide
  Sense strand starting at position 3531 of SEQ ID NO: 916980
cuucgugcugacuaaauga

SEQ ID NO: 1199145 - RNA, 19 nt, Artificial Sequence
  Description of Artificial Sequence: Synthetic oligonucleotide
  Antisense strand to SEQ ID NO: 1199144
ucauuuagucagcacgaag

SEQ ID NO: 1199146 - RNA, 19 nt, Artificial Sequence
  Description of Artificial Sequence: Synthetic oligonucleotide
  Sense strand starting at position 3593 of SEQ ID NO: 916980
auacguuagaguggaggaa

SEQ ID NO: 1199147 - RNA, 19 nt, Artificial Sequence
  Description of Artificial Sequence: Synthetic oligonucleotide
  Antisense strand to SEQ ID NO: 1199146
uuccuccacucuaacguau

SEQ ID NO: 1199148 - RNA, 19 nt, Artificial Sequence
  Description of Artificial Sequence: Synthetic oligonucleotide
  Sense strand starting at position 3594 of SEQ ID NO: 916980
uacguuagaguggaggaau

SEQ ID NO: 1199149 - RNA, 19 nt, Artificial Sequence
  Description of Artificial Sequence: Synthetic oligonucleotide
  Antisense strand to SEQ ID NO: 1199148
auuccuccacucuaacgua

SEQ ID NO: 1199150 - RNA, 19 nt, Artificial Sequence
  Description of Artificial Sequence: Synthetic oligonucleotide
  Sense strand starting at position 3604 of SEQ ID NO: 916980
uggaggaauguguaugcga

SEQ ID NO: 1199151 - RNA, 19 nt, Artificial Sequence
  Description of Artificial Sequence: Synthetic oligonucleotide
  Antisense strand to SEQ ID NO: 1199150
ucgcauacacauuccucca

SEQ ID NO: 1199152 - RNA, 19 nt, Artificial Sequence
  Description of Artificial Sequence: Synthetic oligonucleotide
  Sense strand starting at position 3627 of SEQ ID NO: 916980
ggagauuacggguaaguug

SEQ ID NO: 1199153 - RNA, 19 nt, Artificial Sequence
  Description of Artificial Sequence: Synthetic oligonucleotide
  Antisense strand to SEQ ID NO: 1199152
caacuuacccguaaucucc

SEQ ID NO: 1199154 - RNA, 19 nt, Artificial Sequence
  Description of Artificial Sequence: Synthetic oligonucleotide
  Sense strand starting at position 3791 of SEQ ID NO: 916980
uugacuuaaucugugauca

SEQ ID NO: 1199155 - RNA, 19 nt, Artificial Sequence
  Description of Artificial Sequence: Synthetic oligonucleotide
  Antisense strand to SEQ ID NO: 1199154
ugaucacagauuaagucaa

SEQ ID NO: 1199156 - RNA, 19 nt, Artificial Sequence
  Description of Artificial Sequence: Synthetic oligonucleotide
  Sense strand starting at position 3792 of SEQ ID NO: 916980
ugacuuaaucugugaucau

SEQ ID NO: 1199157 - RNA, 19 nt, Artificial Sequence
  Description of Artificial Sequence: Synthetic oligonucleotide
  Antisense strand to SEQ ID NO: 1199156
augaucacagauuaaguca

SEQ ID NO: 1199158 - RNA, 19 nt, Artificial Sequence
  Description of Artificial Sequence: Synthetic oligonucleotide
  Sense strand starting at position 3796 of SEQ ID NO: 916980
uuaaucugugaucauugca

SEQ ID NO: 1199159 - RNA, 19 nt, Artificial Sequence
  Description of Artificial Sequence: Synthetic oligonucleotide
  Antisense strand to SEQ ID NO: 1199158
ugcaaugaucacagauuaa

SEQ ID NO: 1199160 - RNA, 19 nt, Artificial Sequence
  Description of Artificial Sequence: Synthetic oligonucleotide
  Sense strand starting at position 3905 of SEQ ID NO: 916980
gacaguuauuuggaagaca

SEQ ID NO: 1199161 - RNA, 19 nt, Artificial Sequence
  Description of Artificial Sequence: Synthetic oligonucleotide
  Antisense strand to SEQ ID NO: 1199160
ugucuuccaaauaacuguc

SEQ ID NO: 1199162 - RNA, 19 nt, Artificial Sequence
  Description of Artificial Sequence: Synthetic oligonucleotide
  Sense strand starting at position 3969 of SEQ ID NO: 916980
cucaaaugucaugauguaa

SEQ ID NO: 1199163 - RNA, 19 nt, Artificial Sequence
  Description of Artificial Sequence: Synthetic oligonucleotide
  Antisense strand to SEQ ID NO: 1199162
uuacaucaugacauuugag

SEQ ID NO: 1199164 - RNA, 19 nt, Artificial Sequence
  Description of Artificial Sequence: Synthetic oligonucleotide
  Sense strand starting at position 53 of SEQ ID NO: 916981
gcuaaagauuuggaggcau

SEQ ID NO: 1199165 - RNA, 19 nt, Artificial Sequence
  Description of Artificial Sequence: Synthetic oligonucleotide
  Antisense strand to SEQ ID NO: 1199164
augccuccaaaucuuuagc

SEQ ID NO: 1199166 - RNA, 19 nt, Artificial Sequence
  Description of Artificial Sequence: Synthetic oligonucleotide
  Sense strand starting at position 65 of SEQ ID NO: 916981
gaggcaucaggauguaaga

SEQ ID NO: 1199167 - RNA, 19 nt, Artificial Sequence
  Description of Artificial Sequence: Synthetic oligonucleotide
  Antisense strand to SEQ ID NO: 1199166
ucuuacauccugaugccuc

SEQ ID NO: 1199168 - RNA, 19 nt, Artificial Sequence
  Description of Artificial Sequence: Synthetic oligonucleotide
  Sense strand starting at position 185 of SEQ ID NO: 916981
acuugaguuccuuaagggu

SEQ ID NO: 1199169 - RNA, 19 nt, Artificial Sequence
  Description of Artificial Sequence: Synthetic oligonucleotide
  Antisense strand to SEQ ID NO: 1199168
acccuuaaggaacucaagu

SEQ ID NO: 1199170 - RNA, 19 nt, Artificial Sequence
  Description of Artificial Sequence: Synthetic oligonucleotide
  Sense strand starting at position 203 of SEQ ID NO: 916981
ucgggaacucuccauccua

SEQ ID NO: 1199171 - RNA, 19 nt, Artificial Sequence
  Description of Artificial Sequence: Synthetic oligonucleotide
  Antisense strand to SEQ ID NO: 1199170
uaggauggagaguucccga

SEQ ID NO: 1199172 - RNA, 19 nt, Artificial Sequence
  Description of Artificial Sequence: Synthetic oligonucleotide
  Sense strand starting at position 266 of SEQ ID NO: 916981
uuaggagcucaguaaccuu

SEQ ID NO: 1199173 - RNA, 19 nt, Artificial Sequence
  Description of Artificial Sequence: Synthetic oligonucleotide
  Antisense strand to SEQ ID NO: 1199172
aagguuacugagcuccuaa

SEQ ID NO: 1199174 - RNA, 19 nt, Artificial Sequence
  Description of Artificial Sequence: Synthetic oligonucleotide
  Sense strand starting at position 295 of SEQ ID NO: 916981
uuuauugagcuguaucagu

SEQ ID NO: 1199175 - RNA, 19 nt, Artificial Sequence
  Description of Artificial Sequence: Synthetic oligonucleotide
  Antisense strand to SEQ ID NO: 1199174
acugauacagcucaauaaa

SEQ ID NO: 1199176 - RNA, 19 nt, Artificial Sequence
  Description of Artificial Sequence: Synthetic oligonucleotide
  Sense strand starting at position 430 of SEQ ID NO: 916981
aagagaaguucgcuuggca

SEQ ID NO: 1199177 - RNA, 19 nt, Artificial Sequence
  Description of Artificial Sequence: Synthetic oligonucleotide
  Antisense strand to SEQ ID NO: 1199176
ugccaagcgaacuucucuu

SEQ ID NO: 1199178 - RNA, 19 nt, Artificial Sequence
  Description of Artificial Sequence: Synthetic oligonucleotide
  Sense strand starting at position 537 of SEQ ID NO: 916981
ccaggagucaggugcguaa

SEQ ID NO: 1199179 - RNA, 19 nt, Artificial Sequence
  Description of Artificial Sequence: Synthetic oligonucleotide
  Antisense strand to SEQ ID NO: 1199178
uuacgcaccugacuccugg

SEQ ID NO: 1199180 - RNA, 19 nt, Artificial Sequence
  Description of Artificial Sequence: Synthetic oligonucleotide
  Sense strand starting at position 539 of SEQ ID NO: 916981
aggagucaggugcguaaga

SEQ ID NO: 1199181 - RNA, 19 nt, Artificial Sequence
  Description of Artificial Sequence: Synthetic oligonucleotide
  Antisense strand to SEQ ID NO: 1199180
ucuuacgcaccugacuccu

SEQ ID NO: 1199182 - RNA, 19 nt, Artificial Sequence
  Description of Artificial Sequence: Synthetic oligonucleotide
  Sense strand starting at position 541 of SEQ ID NO: 916981
gagucaggugcguaagaga

SEQ ID NO: 1199183 - RNA, 19 nt, Artificial Sequence
  Description of Artificial Sequence: Synthetic oligonucleotide
  Antisense strand to SEQ ID NO: 1199182
ucucuuacgcaccugacuc

SEQ ID NO: 1199184 - RNA, 19 nt, Artificial Sequence
  Description of Artificial Sequence: Synthetic oligonucleotide
  Sense strand starting at position 629 of SEQ ID NO: 916981
gcuaacuguggguggucaa

SEQ ID NO: 1199185 - RNA, 19 nt, Artificial Sequence
  Description of Artificial Sequence: Synthetic oligonucleotide
  Antisense strand to SEQ ID NO: 1199184
uugaccacccacaguuagc

SEQ ID NO: 1199186 - RNA, 19 nt, Artificial Sequence
  Description of Artificial Sequence: Synthetic oligonucleotide
  Sense strand starting at position 630 of SEQ ID NO: 916981
cuaacuguggguggucaaa

SEQ ID NO: 1199187 - RNA, 19 nt, Artificial Sequence
  Description of Artificial Sequence: Synthetic oligonucleotide
  Antisense strand to SEQ ID NO: 1199186
uuugaccacccacaguuag

SEQ ID NO: 1199188 - RNA, 19 nt, Artificial Sequence
  Description of Artificial Sequence: Synthetic oligonucleotide
  Sense strand starting at position 632 of SEQ ID NO: 916981
aacuguggguggucaaaga

SEQ ID NO: 1199189 - RNA, 19 nt, Artificial Sequence
  Description of Artificial Sequence: Synthetic oligonucleotide
  Antisense strand to SEQ ID NO: 1199188
ucuuugaccacccacaguu

SEQ ID NO: 1199190 - RNA, 19 nt, Artificial Sequence
  Description of Artificial Sequence: Synthetic oligonucleotide
  Sense strand starting at position 682 of SEQ ID NO: 916981
cuuuacuuuguacaaagua

SEQ ID NO: 1199191 - RNA, 19 nt, Artificial Sequence
  Description of Artificial Sequence: Synthetic oligonucleotide
  Antisense strand to SEQ ID NO: 1199190
uacuuuguacaaaguaaag

SEQ ID NO: 1199192 - RNA, 19 nt, Artificial Sequence
  Description of Artificial Sequence: Synthetic oligonucleotide
  Sense strand starting at position 1450 of SEQ ID NO: 916981
gagugagaaauccguucca

SEQ ID NO: 1199193 - RNA, 19 nt, Artificial Sequence
  Description of Artificial Sequence: Synthetic oligonucleotide
  Antisense strand to SEQ ID NO: 1199192
uggaacggauuucucacuc

SEQ ID NO: 1199194 - RNA, 19 nt, Artificial Sequence
  Description of Artificial Sequence: Synthetic oligonucleotide
  Sense strand starting at position 1485 of SEQ ID NO: 916981
aguaaagcggccugugaau

SEQ ID NO: 1199195 - RNA, 19 nt, Artificial Sequence
  Description of Artificial Sequence: Synthetic oligonucleotide
  Antisense strand to SEQ ID NO: 1199194
auucacaggccgcuuuacu

SEQ ID NO: 1199196 - RNA, 19 nt, Artificial Sequence
  Description of Artificial Sequence: Synthetic oligonucleotide
  Sense strand starting at position 1549 of SEQ ID NO: 916981
aggucucaacuagaugcua

SEQ ID NO: 1199197 - RNA, 19 nt, Artificial Sequence
  Description of Artificial Sequence: Synthetic oligonucleotide
  Antisense strand to SEQ ID NO: 1199196
uagcaucuaguugagaccu

SEQ ID NO: 1199198 - RNA, 19 nt, Artificial Sequence
  Description of Artificial Sequence: Synthetic oligonucleotide
  Sense strand starting at position 1591 of SEQ ID NO: 916981
ggcacuuucuguucuaauu

SEQ ID NO: 1199199 - RNA, 19 nt, Artificial Sequence
  Description of Artificial Sequence: Synthetic oligonucleotide
  Antisense strand to SEQ ID NO: 1199198
aauuagaacagaaagugcc

SEQ ID NO: 1199200 - RNA, 19 nt, Artificial Sequence
  Description of Artificial Sequence: Synthetic oligonucleotide
  Sense strand starting at position 2055 of SEQ ID NO: 916981
ggagauuggugaagaagga

SEQ ID NO: 1199201 - RNA, 19 nt, Artificial Sequence
  Description of Artificial Sequence: Synthetic oligonucleotide
  Antisense strand to SEQ ID NO: 1199200
uccuucuucaccaaucucc

SEQ ID NO: 1199202 - RNA, 19 nt, Artificial Sequence
  Description of Artificial Sequence: Synthetic oligonucleotide
  Sense strand starting at position 2104 of SEQ ID NO: 916981
uuaugugaggucgaucuaa

SEQ ID NO: 1199203 - RNA, 19 nt, Artificial Sequence
  Description of Artificial Sequence: Synthetic oligonucleotide
  Antisense strand to SEQ ID NO: 1199202
uuagaucgaccucacauaa

SEQ ID NO: 1199204 - RNA, 19 nt, Artificial Sequence
  Description of Artificial Sequence: Synthetic oligonucleotide
  Sense strand starting at position 2125 of SEQ ID NO: 916981
aucacagcgcuaugaauuu

SEQ ID NO: 1199205 - RNA, 19 nt, Artificial Sequence
  Description of Artificial Sequence: Synthetic oligonucleotide
  Antisense strand to SEQ ID NO: 1199204
aaauucauagcgcugugau

SEQ ID NO: 1199206 - RNA, 19 nt, Artificial Sequence
  Description of Artificial Sequence: Synthetic oligonucleotide
  Sense strand starting at position 2207 of SEQ ID NO: 916981
cuucuagucaagcggacua

SEQ ID NO: 1199207 - RNA, 19 nt, Artificial Sequence
  Description of Artificial Sequence: Synthetic oligonucleotide
  Antisense strand to SEQ ID NO: 1199206
uaguccgcuugacuagaag

SEQ ID NO: 1199208 - RNA, 19 nt, Artificial Sequence
  Description of Artificial Sequence: Synthetic oligonucleotide
  Sense strand starting at position 2209 of SEQ ID NO: 916981
ucuagucaagcggacuauu

SEQ ID NO: 1199209 - RNA, 19 nt, Artificial Sequence
  Description of Artificial Sequence: Synthetic oligonucleotide
  Antisense strand to SEQ ID NO: 1199208
aauaguccgcuugacuaga

SEQ ID NO: 1199210 - RNA, 19 nt, Artificial Sequence
  Description of Artificial Sequence: Synthetic oligonucleotide
  Sense strand starting at position 2232 of SEQ ID NO: 916981
gucuuaaauaguuaguuag

SEQ ID NO: 1199211 - RNA, 19 nt, Artificial Sequence
  Description of Artificial Sequence: Synthetic oligonucleotide
  Antisense strand to SEQ ID NO: 1199210
cuaacuaacuauuuaagac

SEQ ID NO: 1199212 - RNA, 19 nt, Artificial Sequence
  Description of Artificial Sequence: Synthetic oligonucleotide
  Sense strand starting at position 2297 of SEQ ID NO: 916981
gaggaauggucuucuggga

SEQ ID NO: 1199213 - RNA, 19 nt, Artificial Sequence
  Description of Artificial Sequence: Synthetic oligonucleotide
  Antisense strand to SEQ ID NO: 1199212
ucccagaagaccauuccuc

SEQ ID NO: 1199214 - RNA, 19 nt, Artificial Sequence
  Description of Artificial Sequence: Synthetic oligonucleotide
  Sense strand starting at position 2327 of SEQ ID NO: 916981
cguuguauuauagguauaa

SEQ ID NO: 1199215 - RNA, 19 nt, Artificial Sequence
  Description of Artificial Sequence: Synthetic oligonucleotide
  Antisense strand to SEQ ID NO: 1199214
uuauaccuauaauacaacg

SEQ ID NO: 1199216 - RNA, 19 nt, Artificial Sequence
  Description of Artificial Sequence: Synthetic oligonucleotide
  Sense strand starting at position 2561 of SEQ ID NO: 916981
gcgaugaucgugccuguga

SEQ ID NO: 1199217 - RNA, 19 nt, Artificial Sequence
  Description of Artificial Sequence: Synthetic oligonucleotide
  Antisense strand to SEQ ID NO: 1199216
ucacaggcacgaucaucgc

SEQ ID NO: 1199218 - RNA, 19 nt, Artificial Sequence
  Description of Artificial Sequence: Synthetic oligonucleotide
  Sense strand starting at position 2576 of SEQ ID NO: 916981
gugaauauccauugcacuc

SEQ ID NO: 1199219 - RNA, 19 nt, Artificial Sequence
  Description of Artificial Sequence: Synthetic oligonucleotide
  Antisense strand to SEQ ID NO: 1199218
gagugcaauggauauucac

SEQ ID NO: 1199220 - RNA, 19 nt, Artificial Sequence
  Description of Artificial Sequence: Synthetic oligonucleotide
  Sense strand starting at position 2817 of SEQ ID NO: 916981
gcagaaagaugccauuuga

SEQ ID NO: 1199221 - RNA, 19 nt, Artificial Sequence
  Description of Artificial Sequence: Synthetic oligonucleotide
  Antisense strand to SEQ ID NO: 1199220
ucaaauggcaucuuucugc

SEQ ID NO: 1199222 - RNA, 19 nt, Artificial Sequence
  Description of Artificial Sequence: Synthetic oligonucleotide
  Sense strand starting at position 2941 of SEQ ID NO: 916981
cuguguuggccuuagggaa

SEQ ID NO: 1199223 - RNA, 19 nt, Artificial Sequence
  Description of Artificial Sequence: Synthetic oligonucleotide
  Antisense strand to SEQ ID NO: 1199222
uucccuaaggccaacacag

SEQ ID NO: 1199224 - RNA, 19 nt, Artificial Sequence
  Description of Artificial Sequence: Synthetic oligonucleotide
  Sense strand starting at position 2945 of SEQ ID NO: 916981
guuggccuuagggaacaau

SEQ ID NO: 1199225 - RNA, 19 nt, Artificial Sequence
  Description of Artificial Sequence: Synthetic oligonucleotide
  Antisense strand to SEQ ID NO: 1199224
auuguucccuaaggccaac

SEQ ID NO: 1199226 - RNA, 19 nt, Artificial Sequence
  Description of Artificial Sequence: Synthetic oligonucleotide
  Sense strand starting at position 3103 of SEQ ID NO: 916981
gagauccauuaugucagaa

SEQ ID NO: 1199227 - RNA, 19 nt, Artificial Sequence
  Description of Artificial Sequence: Synthetic oligonucleotide
  Antisense strand to SEQ ID NO: 1199226
uucugacauaauggaucuc

SEQ ID NO: 1199228 - RNA, 19 nt, Artificial Sequence
  Description of Artificial Sequence: Synthetic oligonucleotide
  Sense strand starting at position 3148 of SEQ ID NO: 916981
acagguuuacguggcuuua

SEQ ID NO: 1199229 - RNA, 19 nt, Artificial Sequence
  Description of Artificial Sequence: Synthetic oligonucleotide
  Antisense strand to SEQ ID NO: 1199228
uaaagccacguaaaccugu

SEQ ID NO: 1199230 - RNA, 19 nt, Artificial Sequence
  Description of Artificial Sequence: Synthetic oligonucleotide
  Sense strand starting at position 3150 of SEQ ID NO: 916981
agguuuacguggcuuuaca

SEQ ID NO: 1199231 - RNA, 19 nt, Artificial Sequence
  Description of Artificial Sequence: Synthetic oligonucleotide
  Antisense strand to SEQ ID NO: 1199230
uguaaagccacguaaaccu

SEQ ID NO: 1199232 - RNA, 19 nt, Artificial Sequence
  Description of Artificial Sequence: Synthetic oligonucleotide
  Sense strand starting at position 3227 of SEQ ID NO: 916981
gggcaagcaucccuaagau

SEQ ID NO: 1199233 - RNA, 19 nt, Artificial Sequence
  Description of Artificial Sequence: Synthetic oligonucleotide
  Antisense strand to SEQ ID NO: 1199232
aucuuagggaugcuugccc

SEQ ID NO: 1199234 - RNA, 19 nt, Artificial Sequence
  Description of Artificial Sequence: Synthetic oligonucleotide
  Sense strand starting at position 3239 of SEQ ID NO: 916981
cuaagauaaguaggcuaua

SEQ ID NO: 1199235 - RNA, 19 nt, Artificial Sequence
  Description of Artificial Sequence: Synthetic oligonucleotide
  Antisense strand to SEQ ID NO: 1199234
uauagccuacuuaucuuag

SEQ ID NO: 1199236 - RNA, 19 nt, Artificial Sequence
  Description of Artificial Sequence: Synthetic oligonucleotide
  Sense strand starting at position 3240 of SEQ ID NO: 916981
uaagauaaguaggcuauau

SEQ ID NO: 1199237 - RNA, 19 nt, Artificial Sequence
  Description of Artificial Sequence: Synthetic oligonucleotide
  Antisense strand to SEQ ID NO: 1199236
auauagccuacuuaucuua

SEQ ID NO: 1199238 - RNA, 19 nt, Artificial Sequence
  Description of Artificial Sequence: Synthetic oligonucleotide
  Sense strand starting at position 3395 of SEQ ID NO: 916981
cugccucgugugaggagua

SEQ ID NO: 1199239 - RNA, 19 nt, Artificial Sequence
  Description of Artificial Sequence: Synthetic oligonucleotide
  Antisense strand to SEQ ID NO: 1199238
uacuccucacacgaggcag

SEQ ID NO: 1199240 - RNA, 19 nt, Artificial Sequence
  Description of Artificial Sequence: Synthetic oligonucleotide
  Sense strand starting at position 3408 of SEQ ID NO: 916981
ggaguaacucccugcuucu

SEQ ID NO: 1199241 - RNA, 19 nt, Artificial Sequence
  Description of Artificial Sequence: Synthetic oligonucleotide
  Antisense strand to SEQ ID NO: 1199240
agaagcagggaguuacucc

SEQ ID NO: 1199242 - RNA, 19 nt, Artificial Sequence
  Description of Artificial Sequence: Synthetic oligonucleotide
  Sense strand starting at position 3948 of SEQ ID NO: 916981
gacagacagucucucagaa

SEQ ID NO: 1199243 - RNA, 19 nt, Artificial Sequence
  Description of Artificial Sequence: Synthetic oligonucleotide
  Antisense strand to SEQ ID NO: 1199242
uucugagagacugucuguc

SEQ ID NO: 1199244 - RNA, 19 nt, Artificial Sequence
  Description of Artificial Sequence: Synthetic oligonucleotide
  Sense strand starting at position 265 of SEQ ID NO: 916982
aucccauucugaguucuca

SEQ ID NO: 1199245 - RNA, 19 nt, Artificial Sequence
  Description of Artificial Sequence: Synthetic oligonucleotide
  Antisense strand to SEQ ID NO: 1199244
ugagaacucagaaugggau

SEQ ID NO: 1199246 - RNA, 19 nt, Artificial Sequence
  Description of Artificial Sequence: Synthetic oligonucleotide
  Sense strand starting at position 273 of SEQ ID NO: 916982
cugaguucucacugagaug

SEQ ID NO: 1199247 - RNA, 19 nt, Artificial Sequence
  Description of Artificial Sequence: Synthetic oligonucleotide
  Antisense strand to SEQ ID NO: 1199246
caucucagugagaacucag

SEQ ID NO: 1199248 - RNA, 19 nt, Artificial Sequence
  Description of Artificial Sequence: Synthetic oligonucleotide
  Sense strand starting at position 699 of SEQ ID NO: 916982
aauagaacuucguugauuc

SEQ ID NO: 1199249 - RNA, 19 nt, Artificial Sequence
  Description of Artificial Sequence: Synthetic oligonucleotide
  Antisense strand to SEQ ID NO: 1199248
gaaucaacgaaguucuauu

SEQ ID NO: 1199250 - RNA, 19 nt, Artificial Sequence
  Description of Artificial Sequence: Synthetic oligonucleotide
  Sense strand starting at position 701 of SEQ ID NO: 916982
uagaacuucguugauucuu

SEQ ID NO: 1199251 - RNA, 19 nt, Artificial Sequence
  Description of Artificial Sequence: Synthetic oligonucleotide
  Antisense strand to SEQ ID NO: 1199250
aagaaucaacgaaguucua

SEQ ID NO: 1199252 - RNA, 19 nt, Artificial Sequence
  Description of Artificial Sequence: Synthetic oligonucleotide
  Sense strand starting at position 772 of SEQ ID NO: 916982
auuuauggaugacaaguua

SEQ ID NO: 1199253 - RNA, 19 nt, Artificial Sequence
  Description of Artificial Sequence: Synthetic oligonucleotide
  Antisense strand to SEQ ID NO: 1199252
uaacuugucauccauaaau

SEQ ID NO: 1199254 - RNA, 19 nt, Artificial Sequence
  Description of Artificial Sequence: Synthetic oligonucleotide
  Sense strand starting at position 803 of SEQ ID NO: 916982
agcugcaaugauugggaau

SEQ ID NO: 1199255 - RNA, 19 nt, Artificial Sequence
  Description of Artificial Sequence: Synthetic oligonucleotide
  Antisense strand to SEQ ID NO: 1199254
auucccaaucauugcagcu

SEQ ID NO: 1199256 - RNA, 19 nt, Artificial Sequence
  Description of Artificial Sequence: Synthetic oligonucleotide
  Sense strand starting at position 804 of SEQ ID NO: 916982
gcugcaaugauugggaauu

SEQ ID NO: 1199257 - RNA, 19 nt, Artificial Sequence
  Description of Artificial Sequence: Synthetic oligonucleotide
  Antisense strand to SEQ ID NO: 1199256
aauucccaaucauugcagc

SEQ ID NO: 1199258 - RNA, 19 nt, Artificial Sequence
  Description of Artificial Sequence: Synthetic oligonucleotide
  Sense strand starting at position 823 of SEQ ID NO: 916982
uugugaucucuguaaacga

SEQ ID NO: 1199259 - RNA, 19 nt, Artificial Sequence
  Description of Artificial Sequence: Synthetic oligonucleotide
  Antisense strand to SEQ ID NO: 1199258
ucguuuacagagaucacaa

SEQ ID NO: 1199260 - RNA, 19 nt, Artificial Sequence
  Description of Artificial Sequence: Synthetic oligonucleotide
  Sense strand starting at position 866 of SEQ ID NO: 916982
uccuguuggauaugagaca

SEQ ID NO: 1199261 - RNA, 19 nt, Artificial Sequence
  Description of Artificial Sequence: Synthetic oligonucleotide
  Antisense strand to SEQ ID NO: 1199260
ugucucauauccaacagga

SEQ ID NO: 1199262 - RNA, 19 nt, Artificial Sequence
  Description of Artificial Sequence: Synthetic oligonucleotide
  Sense strand starting at position 1022 of SEQ ID NO: 916982
gcugaacuuguagaauuga

SEQ ID NO: 1199263 - RNA, 19 nt, Artificial Sequence
  Description of Artificial Sequence: Synthetic oligonucleotide
  Antisense strand to SEQ ID NO: 1199262
ucaauucuacaaguucagc

SEQ ID NO: 1199264 - RNA, 19 nt, Artificial Sequence
  Description of Artificial Sequence: Synthetic oligonucleotide
  Sense strand starting at position 1030 of SEQ ID NO: 916982
uguagaauugaggguauac

SEQ ID NO: 1199265 - RNA, 19 nt, Artificial Sequence
  Description of Artificial Sequence: Synthetic oligonucleotide
  Antisense strand to SEQ ID NO: 1199264
guauacccucaauucuaca

SEQ ID NO: 1199266 - RNA, 19 nt, Artificial Sequence
  Description of Artificial Sequence: Synthetic oligonucleotide
  Sense strand starting at position 1088 of SEQ ID NO: 916982
guccuuuauuucucauugu

SEQ ID NO: 1199267 - RNA, 19 nt, Artificial Sequence
  Description of Artificial Sequence: Synthetic oligonucleotide
  Antisense strand to SEQ ID NO: 1199266
acaaugagaaauaaaggac

SEQ ID NO: 1199268 - RNA, 19 nt, Artificial Sequence
  Description of Artificial Sequence: Synthetic oligonucleotide
  Sense strand starting at position 1097 of SEQ ID NO: 916982
uucucauugugaguaugga

SEQ ID NO: 1199269 - RNA, 19 nt, Artificial Sequence
  Description of Artificial Sequence: Synthetic oligonucleotide
  Antisense strand to SEQ ID NO: 1199268
uccauacucacaaugagaa

SEQ ID NO: 1199270 - RNA, 19 nt, Artificial Sequence
  Description of Artificial Sequence: Synthetic oligonucleotide
  Sense strand starting at position 1098 of SEQ ID NO: 916982
ucucauugugaguauggaa

SEQ ID NO: 1199271 - RNA, 19 nt, Artificial Sequence
  Description of Artificial Sequence: Synthetic oligonucleotide
  Antisense strand to SEQ ID NO: 1199270
uuccauacucacaaugaga

SEQ ID NO: 1199272 - RNA, 19 nt, Artificial Sequence
  Description of Artificial Sequence: Synthetic oligonucleotide
  Sense strand starting at position 1283 of SEQ ID NO: 916982
agucauuaagccgcuaguu

SEQ ID NO: 1199273 - RNA, 19 nt, Artificial Sequence
  Description of Artificial Sequence: Synthetic oligonucleotide
  Antisense strand to SEQ ID NO: 1199272
aacuagcggcuuaaugacu

SEQ ID NO: 1199274 - RNA, 19 nt, Artificial Sequence
  Description of Artificial Sequence: Synthetic oligonucleotide
  Sense strand starting at position 1405 of SEQ ID NO: 916982
gagauaauacuguguuaaa

SEQ ID NO: 1199275 - RNA, 19 nt, Artificial Sequence
  Description of Artificial Sequence: Synthetic oligonucleotide
  Antisense strand to SEQ ID NO: 1199274
uuuaacacaguauuaucuc

SEQ ID NO: 1199276 - RNA, 19 nt, Artificial Sequence
  Description of Artificial Sequence: Synthetic oligonucleotide
  Sense strand starting at position 1456 of SEQ ID NO: 916982
ccgcuaaaugaggagguua

SEQ ID NO: 1199277 - RNA, 19 nt, Artificial Sequence
  Description of Artificial Sequence: Synthetic oligonucleotide
  Antisense strand to SEQ ID NO: 1199276
uaaccuccucauuuagcgg

SEQ ID NO: 1199278 - RNA, 19 nt, Artificial Sequence
  Description of Artificial Sequence: Synthetic oligonucleotide
  Sense strand starting at position 1458 of SEQ ID NO: 916982
gcuaaaugaggagguuaau

SEQ ID NO: 1199279 - RNA, 19 nt, Artificial Sequence
  Description of Artificial Sequence: Synthetic oligonucleotide
  Antisense strand to SEQ ID NO: 1199278
auuaaccuccucauuuagc

SEQ ID NO: 1199280 - RNA, 19 nt, Artificial Sequence
  Description of Artificial Sequence: Synthetic oligonucleotide
  Sense strand starting at position 1478 of SEQ ID NO: 916982
guaagaccuccuuagccau

SEQ ID NO: 1199281 - RNA, 19 nt, Artificial Sequence
  Description of Artificial Sequence: Synthetic oligonucleotide
  Antisense strand to SEQ ID NO: 1199280
auggcuaaggaggucuuac

SEQ ID NO: 1199282 - RNA, 19 nt, Artificial Sequence
  Description of Artificial Sequence: Synthetic oligonucleotide
  Sense strand starting at position 2133 of SEQ ID NO: 916982
ccaggaaguccuggcuuga

SEQ ID NO: 1199283 - RNA, 19 nt, Artificial Sequence
  Description of Artificial Sequence: Synthetic oligonucleotide
  Antisense strand to SEQ ID NO: 1199282
ucaagccaggacuuccugg

SEQ ID NO: 1199284 - RNA, 19 nt, Artificial Sequence
  Description of Artificial Sequence: Synthetic oligonucleotide
  Sense strand starting at position 2186 of SEQ ID NO: 916982
aggcaaacccacugugaaa

SEQ ID NO: 1199285 - RNA, 19 nt, Artificial Sequence
  Description of Artificial Sequence: Synthetic oligonucleotide
  Antisense strand to SEQ ID NO: 1199284
uuucacaguggguuugccu

SEQ ID NO: 1199286 - RNA, 19 nt, Artificial Sequence
  Description of Artificial Sequence: Synthetic oligonucleotide
  Sense strand starting at position 2245 of SEQ ID NO: 916982
uccuguuuccguguuuaac

SEQ ID NO: 1199287 - RNA, 19 nt, Artificial Sequence
  Description of Artificial Sequence: Synthetic oligonucleotide
  Antisense strand to SEQ ID NO: 1199286
guuaaacacggaaacagga

SEQ ID NO: 1199288 - RNA, 19 nt, Artificial Sequence
  Description of Artificial Sequence: Synthetic oligonucleotide
  Sense strand starting at position 2285 of SEQ ID NO: 916982
agaggaaucaguugcuaaa

SEQ ID NO: 1199289 - RNA, 19 nt, Artificial Sequence
  Description of Artificial Sequence: Synthetic oligonucleotide
  Antisense strand to SEQ ID NO: 1199288
uuuagcaacugauuccucu

SEQ ID NO: 1199290 - RNA, 19 nt, Artificial Sequence
  Description of Artificial Sequence: Synthetic oligonucleotide
  Sense strand starting at position 2385 of SEQ ID NO: 916982
gcuguuuguguagugguua

SEQ ID NO: 1199291 - RNA, 19 nt, Artificial Sequence
  Description of Artificial Sequence: Synthetic oligonucleotide
  Antisense strand to SEQ ID NO: 1199290
uaaccacuacacaaacagc

SEQ ID NO: 1199292 - RNA, 19 nt, Artificial Sequence
  Description of Artificial Sequence: Synthetic oligonucleotide
  Sense strand starting at position 2452 of SEQ ID NO: 916982
agcgaaauauccucgaaga

SEQ ID NO: 1199293 - RNA, 19 nt, Artificial Sequence
  Description of Artificial Sequence: Synthetic oligonucleotide
  Antisense strand to SEQ ID NO: 1199292
ucuucgaggauauuucgcu

SEQ ID NO: 1199294 - RNA, 19 nt, Artificial Sequence
  Description of Artificial Sequence: Synthetic oligonucleotide
  Sense strand starting at position 2513 of SEQ ID NO: 916982
ugcuguuugagggacagua

SEQ ID NO: 1199295 - RNA, 19 nt, Artificial Sequence
  Description of Artificial Sequence: Synthetic oligonucleotide
  Antisense strand to SEQ ID NO: 1199294
uacugucccucaaacagca

SEQ ID NO: 1199296 - RNA, 19 nt, Artificial Sequence
  Description of Artificial Sequence: Synthetic oligonucleotide
  Sense strand starting at position 2523 of SEQ ID NO: 916982
gggacaguaguccauguga

SEQ ID NO: 1199297 - RNA, 19 nt, Artificial Sequence
  Description of Artificial Sequence: Synthetic oligonucleotide
  Antisense strand to SEQ ID NO: 1199296
ucacauggacuacuguccc

SEQ ID NO: 1199298 - RNA, 19 nt, Artificial Sequence
  Description of Artificial Sequence: Synthetic oligonucleotide
  Sense strand starting at position 2525 of SEQ ID NO: 916982
gacaguaguccaugugaca

SEQ ID NO: 1199299 - RNA, 19 nt, Artificial Sequence
  Description of Artificial Sequence: Synthetic oligonucleotide
  Antisense strand to SEQ ID NO: 1199298
ugucacauggacuacuguc

SEQ ID NO: 1199300 - RNA, 19 nt, Artificial Sequence
  Description of Artificial Sequence: Synthetic oligonucleotide
  Sense strand starting at position 2541 of SEQ ID NO: 916982
acagauggcucaucgauga

SEQ ID NO: 1199301 - RNA, 19 nt, Artificial Sequence
  Description of Artificial Sequence: Synthetic oligonucleotide
  Antisense strand to SEQ ID NO: 1199300
ucaucgaugagccaucugu

SEQ ID NO: 1199302 - RNA, 19 nt, Artificial Sequence
  Description of Artificial Sequence: Synthetic oligonucleotide
  Sense strand starting at position 2564 of SEQ ID NO: 916982
gaauuagacgcauagacuu

SEQ ID NO: 1199303 - RNA, 19 nt, Artificial Sequence
  Description of Artificial Sequence: Synthetic oligonucleotide
  Antisense strand to SEQ ID NO: 1199302
aagucuaugcgucuaauuc

SEQ ID NO: 1199304 - RNA, 19 nt, Artificial Sequence
  Description of Artificial Sequence: Synthetic oligonucleotide
  Sense strand starting at position 2718 of SEQ ID NO: 916982
gugaccauaaugugaagaa

SEQ ID NO: 1199305 - RNA, 19 nt, Artificial Sequence
  Description of Artificial Sequence: Synthetic oligonucleotide
  Antisense strand to SEQ ID NO: 1199304
uucuucacauuauggucac

SEQ ID NO: 1199306 - RNA, 19 nt, Artificial Sequence
  Description of Artificial Sequence: Synthetic oligonucleotide
  Sense strand starting at position 2722 of SEQ ID NO: 916982
ccauaaugugaagaagugu

SEQ ID NO: 1199307 - RNA, 19 nt, Artificial Sequence
  Description of Artificial Sequence: Synthetic oligonucleotide
  Antisense strand to SEQ ID NO: 1199306
acacuucuucacauuaugg

SEQ ID NO: 1199308 - RNA, 19 nt, Artificial Sequence
  Description of Artificial Sequence: Synthetic oligonucleotide
  Sense strand starting at position 2787 of SEQ ID NO: 916982
acuauugaggacugucuca

SEQ ID NO: 1199309 - RNA, 19 nt, Artificial Sequence
  Description of Artificial Sequence: Synthetic oligonucleotide
  Antisense strand to SEQ ID NO: 1199308
ugagacaguccucaauagu

SEQ ID NO: 1199310 - RNA, 19 nt, Artificial Sequence
  Description of Artificial Sequence: Synthetic oligonucleotide
  Sense strand starting at position 2967 of SEQ ID NO: 916982
uggugaaacugaccuaaca

SEQ ID NO: 1199311 - RNA, 19 nt, Artificial Sequence
  Description of Artificial Sequence: Synthetic oligonucleotide
  Antisense strand to SEQ ID NO: 1199310
uguuaggucaguuucacca

SEQ ID NO: 1199312 - RNA, 19 nt, Artificial Sequence
  Description of Artificial Sequence: Synthetic oligonucleotide
  Sense strand starting at position 3271 of SEQ ID NO: 916982
cuauaacccucaguagaug

SEQ ID NO: 1199313 - RNA, 19 nt, Artificial Sequence
  Description of Artificial Sequence: Synthetic oligonucleotide
  Antisense strand to SEQ ID NO: 1199312
caucuacugaggguuauag

SEQ ID NO: 1199314 - RNA, 19 nt, Artificial Sequence
  Description of Artificial Sequence: Synthetic oligonucleotide
  Sense strand starting at position 3574 of SEQ ID NO: 916982
gguagacuuggcuacguaa

SEQ ID NO: 1199315 - RNA, 19 nt, Artificial Sequence
  Description of Artificial Sequence: Synthetic oligonucleotide
  Antisense strand to SEQ ID NO: 1199314
uuacguagccaagucuacc

SEQ ID NO: 1199316 - RNA, 19 nt, Artificial Sequence
  Description of Artificial Sequence: Synthetic oligonucleotide
  Sense strand starting at position 3818 of SEQ ID NO: 916982
aaacauccaguguggauaa

SEQ ID NO: 1199317 - RNA, 19 nt, Artificial Sequence
  Description of Artificial Sequence: Synthetic oligonucleotide
  Antisense strand to SEQ ID NO: 1199316
uuauccacacuggauguuu

SEQ ID NO: 1199318 - RNA, 19 nt, Artificial Sequence
  Description of Artificial Sequence: Synthetic oligonucleotide
  Sense strand starting at position 3851 of SEQ ID NO: 916982
aggcauucuuagguaggga

SEQ ID NO: 1199319 - RNA, 19 nt, Artificial Sequence
  Description of Artificial Sequence: Synthetic oligonucleotide
  Antisense strand to SEQ ID NO: 1199318
ucccuaccuaagaaugccu

SEQ ID NO: 1199320 - RNA, 19 nt, Artificial Sequence
  Description of Artificial Sequence: Synthetic oligonucleotide
  Sense strand starting at position 3852 of SEQ ID NO: 916982
ggcauucuuagguagggau

SEQ ID NO: 1199321 - RNA, 19 nt, Artificial Sequence
  Description of Artificial Sequence: Synthetic oligonucleotide
  Antisense strand to SEQ ID NO: 1199320
aucccuaccuaagaaugcc

SEQ ID NO: 1199322 - RNA, 19 nt, Artificial Sequence
  Description of Artificial Sequence: Synthetic oligonucleotide
  Sense strand starting at position 3887 of SEQ ID NO: 916982
uuaauaaaguaaucggcau

SEQ ID NO: 1199323 - RNA, 19 nt, Artificial Sequence
  Description of Artificial Sequence: Synthetic oligonucleotide
  Antisense strand to SEQ ID NO: 1199322
augccgauuacuuuauuaa

SEQ ID NO: 1199324 - RNA, 19 nt, Artificial Sequence
  Description of Artificial Sequence: Synthetic oligonucleotide
  Sense strand starting at position 188 of SEQ ID NO: 916983
auggauguauuugaagaca

SEQ ID NO: 1199325 - RNA, 19 nt, Artificial Sequence
  Description of Artificial Sequence: Synthetic oligonucleotide
  Antisense strand to SEQ ID NO: 1199324
ugucuucaaauacauccau

SEQ ID NO: 1199326 - RNA, 19 nt, Artificial Sequence
  Description of Artificial Sequence: Synthetic oligonucleotide
  Sense strand starting at position 245 of SEQ ID NO: 916983
uacugauuguaucuagagu

SEQ ID NO: 1199327 - RNA, 19 nt, Artificial Sequence
  Description of Artificial Sequence: Synthetic oligonucleotide
  Antisense strand to SEQ ID NO: 1199326
acucuagauacaaucagua

SEQ ID NO: 1199328 - RNA, 19 nt, Artificial Sequence
  Description of Artificial Sequence: Synthetic oligonucleotide
  Sense strand starting at position 285 of SEQ ID NO: 916983
aagugaaauggugguucca

SEQ ID NO: 1199329 - RNA, 19 nt, Artificial Sequence
  Description of Artificial Sequence: Synthetic oligonucleotide
  Antisense strand to SEQ ID NO: 1199328
uggaaccaccauuucacuu

SEQ ID NO: 1199330 - RNA, 19 nt, Artificial Sequence
  Description of Artificial Sequence: Synthetic oligonucleotide
  Sense strand starting at position 330 of SEQ ID NO: 916983
aguuaauagguauagaguu

SEQ ID NO: 1199331 - RNA, 19 nt, Artificial Sequence
  Description of Artificial Sequence: Synthetic oligonucleotide
  Antisense strand to SEQ ID NO: 1199330
aacucuauaccuauuaacu

SEQ ID NO: 1199332 - RNA, 19 nt, Artificial Sequence
  Description of Artificial Sequence: Synthetic oligonucleotide
  Sense strand starting at position 373 of SEQ ID NO: 916983
cuggauauuggaugguaua

SEQ ID NO: 1199333 - RNA, 19 nt, Artificial Sequence
  Description of Artificial Sequence: Synthetic oligonucleotide
  Antisense strand to SEQ ID NO: 1199332
uauaccauccaauauccag

SEQ ID NO: 1199334 - RNA, 19 nt, Artificial Sequence
  Description of Artificial Sequence: Synthetic oligonucleotide
  Sense strand starting at position 374 of SEQ ID NO: 916983
uggauauuggaugguauau

SEQ ID NO: 1199335 - RNA, 19 nt, Artificial Sequence
  Description of Artificial Sequence: Synthetic oligonucleotide
  Antisense strand to SEQ ID NO: 1199334
auauaccauccaauaucca

SEQ ID NO: 1199336 - RNA, 19 nt, Artificial Sequence
  Description of Artificial Sequence: Synthetic oligonucleotide
  Sense strand starting at position 383 of SEQ ID NO: 916983
gaugguauauaaguuuagu

SEQ ID NO: 1199337 - RNA, 19 nt, Artificial Sequence
  Description of Artificial Sequence: Synthetic oligonucleotide
  Antisense strand to SEQ ID NO: 1199336
acuaaacuuauauaccauc

SEQ ID NO: 1199338 - RNA, 19 nt, Artificial Sequence
  Description of Artificial Sequence: Synthetic oligonucleotide
  Sense strand starting at position 386 of SEQ ID NO: 916983
gguauauaaguuuagucua

SEQ ID NO: 1199339 - RNA, 19 nt, Artificial Sequence
  Description of Artificial Sequence: Synthetic oligonucleotide
  Antisense strand to SEQ ID NO: 1199338
uagacuaaacuuauauacc

SEQ ID NO: 1199340 - RNA, 19 nt, Artificial Sequence
  Description of Artificial Sequence: Synthetic oligonucleotide
  Sense strand starting at position 442 of SEQ ID NO: 916983
guucucgguauauagugaa

SEQ ID NO: 1199341 - RNA, 19 nt, Artificial Sequence
  Description of Artificial Sequence: Synthetic oligonucleotide
  Antisense strand to SEQ ID NO: 1199340
uucacuauauaccgagaac

SEQ ID NO: 1199342 - RNA, 19 nt, Artificial Sequence
  Description of Artificial Sequence: Synthetic oligonucleotide
  Sense strand starting at position 446 of SEQ ID NO: 916983
ucgguauauagugaacuau

SEQ ID NO: 1199343 - RNA, 19 nt, Artificial Sequence
  Description of Artificial Sequence: Synthetic oligonucleotide
  Antisense strand to SEQ ID NO: 1199342
auaguucacuauauaccga

SEQ ID NO: 1199344 - RNA, 19 nt, Artificial Sequence
  Description of Artificial Sequence: Synthetic oligonucleotide
  Sense strand starting at position 455 of SEQ ID NO: 916983
agugaacuauaaccuagua

SEQ ID NO: 1199345 - RNA, 19 nt, Artificial Sequence
  Description of Artificial Sequence: Synthetic oligonucleotide
  Antisense strand to SEQ ID NO: 1199344
uacuagguuauaguucacu

SEQ ID NO: 1199346 - RNA, 19 nt, Artificial Sequence
  Description of Artificial Sequence: Synthetic oligonucleotide
  Sense strand starting at position 494 of SEQ ID NO: 916983
ugaaccaaucacugaguuu

SEQ ID NO: 1199347 - RNA, 19 nt, Artificial Sequence
  Description of Artificial Sequence: Synthetic oligonucleotide
  Antisense strand to SEQ ID NO: 1199346
aaacucagugauugguuca

SEQ ID NO: 1199348 - RNA, 19 nt, Artificial Sequence
  Description of Artificial Sequence: Synthetic oligonucleotide
  Sense strand starting at position 765 of SEQ ID NO: 916983
agugcacaaccaugugaau

SEQ ID NO: 1199349 - RNA, 19 nt, Artificial Sequence
  Description of Artificial Sequence: Synthetic oligonucleotide
  Antisense strand to SEQ ID NO: 1199348
auucacaugguugugcacu

SEQ ID NO: 1199350 - RNA, 19 nt, Artificial Sequence
  Description of Artificial Sequence: Synthetic oligonucleotide
  Sense strand starting at position 942 of SEQ ID NO: 916983
agauucuuggugcaucaga

SEQ ID NO: 1199351 - RNA, 19 nt, Artificial Sequence
  Description of Artificial Sequence: Synthetic oligonucleotide
  Antisense strand to SEQ ID NO: 1199350
ucugaugcaccaagaaucu

SEQ ID NO: 1199352 - RNA, 19 nt, Artificial Sequence
  Description of Artificial Sequence: Synthetic oligonucleotide
  Sense strand starting at position 985 of SEQ ID NO: 916983
gaacaaguucuaggcacua

SEQ ID NO: 1199353 - RNA, 19 nt, Artificial Sequence
  Description of Artificial Sequence: Synthetic oligonucleotide
  Antisense strand to SEQ ID NO: 1199352
uagugccuagaacuuguuc

SEQ ID NO: 1199354 - RNA, 19 nt, Artificial Sequence
  Description of Artificial Sequence: Synthetic oligonucleotide
  Sense strand starting at position 990 of SEQ ID NO: 916983
aguucuaggcacuaagauu

SEQ ID NO: 1199355 - RNA, 19 nt, Artificial Sequence
  Description of Artificial Sequence: Synthetic oligonucleotide
  Antisense strand to SEQ ID NO: 1199354
aaucuuagugccuagaacu

SEQ ID NO: 1199356 - RNA, 19 nt, Artificial Sequence
  Description of Artificial Sequence: Synthetic oligonucleotide
  Sense strand starting at position 998 of SEQ ID NO: 916983
gcacuaagauucuuagcac

SEQ ID NO: 1199357 - RNA, 19 nt, Artificial Sequence
  Description of Artificial Sequence: Synthetic oligonucleotide
  Antisense strand to SEQ ID NO: 1199356
gugcuaagaaucuuagugc

SEQ ID NO: 1199358 - RNA, 19 nt, Artificial Sequence
  Description of Artificial Sequence: Synthetic oligonucleotide
  Sense strand starting at position 1093 of SEQ ID NO: 916983
cggcgaucaaaugaccaaa

SEQ ID NO: 1199359 - RNA, 19 nt, Artificial Sequence
  Description of Artificial Sequence: Synthetic oligonucleotide
  Antisense strand to SEQ ID NO: 1199358
uuuggucauuugaucgccg

SEQ ID NO: 1199360 - RNA, 19 nt, Artificial Sequence
  Description of Artificial Sequence: Synthetic oligonucleotide
  Sense strand starting at position 1124 of SEQ ID NO: 916983
auggcuuccacguagauga

SEQ ID NO: 1199361 - RNA, 19 nt, Artificial Sequence
  Description of Artificial Sequence: Synthetic oligonucleotide
  Antisense strand to SEQ ID NO: 1199360
ucaucuacguggaagccau

SEQ ID NO: 1199362 - RNA, 19 nt, Artificial Sequence
  Description of Artificial Sequence: Synthetic oligonucleotide
  Sense strand starting at position 1135 of SEQ ID NO: 916983
guagaugaagcugagcauu

SEQ ID NO: 1199363 - RNA, 19 nt, Artificial Sequence
  Description of Artificial Sequence: Synthetic oligonucleotide
  Antisense strand to SEQ ID NO: 1199362
aaugcucagcuucaucuac

SEQ ID NO: 1199364 - RNA, 19 nt, Artificial Sequence
  Description of Artificial Sequence: Synthetic oligonucleotide
  Sense strand starting at position 1322 of SEQ ID NO: 916983
agcacaggacgguaaauau

SEQ ID NO: 1199365 - RNA, 19 nt, Artificial Sequence
  Description of Artificial Sequence: Synthetic oligonucleotide
  Antisense strand to SEQ ID NO: 1199364
auauuuaccguccugugcu

SEQ ID NO: 1199366 - RNA, 19 nt, Artificial Sequence
  Description of Artificial Sequence: Synthetic oligonucleotide
  Sense strand starting at position 1404 of SEQ ID NO: 916983
gucagucacagugaucaac

SEQ ID NO: 1199367 - RNA, 19 nt, Artificial Sequence
  Description of Artificial Sequence: Synthetic oligonucleotide
  Antisense strand to SEQ ID NO: 1199366
guugaucacugugacugac

SEQ ID NO: 1199368 - RNA, 19 nt, Artificial Sequence
  Description of Artificial Sequence: Synthetic oligonucleotide
  Sense strand starting at position 1424 of SEQ ID NO: 916983
gacucauuuccacgacguu

SEQ ID NO: 1199369 - RNA, 19 nt, Artificial Sequence
  Description of Artificial Sequence: Synthetic oligonucleotide
  Antisense strand to SEQ ID NO: 1199368
aacgucguggaaaugaguc

SEQ ID NO: 1199370 - RNA, 19 nt, Artificial Sequence
  Description of Artificial Sequence: Synthetic oligonucleotide
  Sense strand starting at position 1674 of SEQ ID NO: 916983
cugugagucccaggagaug

SEQ ID NO: 1199371 - RNA, 19 nt, Artificial Sequence
  Description of Artificial Sequence: Synthetic oligonucleotide
  Antisense strand to SEQ ID NO: 1199370
caucuccugggacucacag

SEQ ID NO: 1199372 - RNA, 19 nt, Artificial Sequence
  Description of Artificial Sequence: Synthetic oligonucleotide
  Sense strand starting at position 2092 of SEQ ID NO: 916983
cgucaucugaagugaaacu

SEQ ID NO: 1199373 - RNA, 19 nt, Artificial Sequence
  Description of Artificial Sequence: Synthetic oligonucleotide
  Antisense strand to SEQ ID NO: 1199372
aguuucacuucagaugacg

SEQ ID NO: 1199374 - RNA, 19 nt, Artificial Sequence
  Description of Artificial Sequence: Synthetic oligonucleotide
  Sense strand starting at position 2454 of SEQ ID NO: 916983
aguugcuaaagugauagaa

SEQ ID NO: 1199375 - RNA, 19 nt, Artificial Sequence
  Description of Artificial Sequence: Synthetic oligonucleotide
  Antisense strand to SEQ ID NO: 1199374
uucuaucacuuuagcaacu

SEQ ID NO: 1199376 - RNA, 19 nt, Artificial Sequence
  Description of Artificial Sequence: Synthetic oligonucleotide
  Sense strand starting at position 2616 of SEQ ID NO: 916983
aggcuuucugaaugaagua

SEQ ID NO: 1199377 - RNA, 19 nt, Artificial Sequence
  Description of Artificial Sequence: Synthetic oligonucleotide
  Antisense strand to SEQ ID NO: 1199376
uacuucauucagaaagccu

SEQ ID NO: 1199378 - RNA, 19 nt, Artificial Sequence
  Description of Artificial Sequence: Synthetic oligonucleotide
  Sense strand starting at position 2617 of SEQ ID NO: 916983
ggcuuucugaaugaaguaa

SEQ ID NO: 1199379 - RNA, 19 nt, Artificial Sequence
  Description of Artificial Sequence: Synthetic oligonucleotide
  Antisense strand to SEQ ID NO: 1199378
uuacuucauucagaaagcc

SEQ ID NO: 1199380 - RNA, 19 nt, Artificial Sequence
  Description of Artificial Sequence: Synthetic oligonucleotide
  Sense strand starting at position 2670 of SEQ ID NO: 916983
gagaaagagcagugaugua

SEQ ID NO: 1199381 - RNA, 19 nt, Artificial Sequence
  Description of Artificial Sequence: Synthetic oligonucleotide
  Antisense strand to SEQ ID NO: 1199380
uacaucacugcucuuucuc

SEQ ID NO: 1199382 - RNA, 19 nt, Artificial Sequence
  Description of Artificial Sequence: Synthetic oligonucleotide
  Sense strand starting at position 2703 of SEQ ID NO: 916983
ggaccaacgucugcaaaga

SEQ ID NO: 1199383 - RNA, 19 nt, Artificial Sequence
  Description of Artificial Sequence: Synthetic oligonucleotide
  Antisense strand to SEQ ID NO: 1199382
ucuuugcagacguuggucc

SEQ ID NO: 1199384 - RNA, 19 nt, Artificial Sequence
  Description of Artificial Sequence: Synthetic oligonucleotide
  Sense strand starting at position 2794 of SEQ ID NO: 916983
agaucauccuaggccagaa

SEQ ID NO: 1199385 - RNA, 19 nt, Artificial Sequence
  Description of Artificial Sequence: Synthetic oligonucleotide
  Antisense strand to SEQ ID NO: 1199384
uucuggccuaggaugaucu

SEQ ID NO: 1199386 - RNA, 19 nt, Artificial Sequence
  Description of Artificial Sequence: Synthetic oligonucleotide
  Sense strand starting at position 2893 of SEQ ID NO: 916983
uggcaaauacaauggauua

SEQ ID NO: 1199387 - RNA, 19 nt, Artificial Sequence
  Description of Artificial Sequence: Synthetic oligonucleotide
  Antisense strand to SEQ ID NO: 1199386
uaauccauuguauuugcca

SEQ ID NO: 1199388 - RNA, 19 nt, Artificial Sequence
  Description of Artificial Sequence: Synthetic oligonucleotide
  Sense strand starting at position 2968 of SEQ ID NO: 916983
agaguagugucauccuagg

SEQ ID NO: 1199389 - RNA, 19 nt, Artificial Sequence
  Description of Artificial Sequence: Synthetic oligonucleotide
  Antisense strand to SEQ ID NO: 1199388
ccuaggaugacacuacucu

SEQ ID NO: 1199390 - RNA, 19 nt, Artificial Sequence
  Description of Artificial Sequence: Synthetic oligonucleotide
  Sense strand starting at position 3006 of SEQ ID NO: 916983
augaguuuacucugaucua

SEQ ID NO: 1199391 - RNA, 19 nt, Artificial Sequence
  Description of Artificial Sequence: Synthetic oligonucleotide
  Antisense strand to SEQ ID NO: 1199390
uagaucagaguaaacucau

SEQ ID NO: 1199392 - RNA, 19 nt, Artificial Sequence
  Description of Artificial Sequence: Synthetic oligonucleotide
  Sense strand starting at position 3092 of SEQ ID NO: 916983
uguggaacagucuauucua

SEQ ID NO: 1199393 - RNA, 19 nt, Artificial Sequence
  Description of Artificial Sequence: Synthetic oligonucleotide
  Antisense strand to SEQ ID NO: 1199392
uagaauagacuguuccaca

SEQ ID NO: 1199394 - RNA, 19 nt, Artificial Sequence
  Description of Artificial Sequence: Synthetic oligonucleotide
  Sense strand starting at position 3095 of SEQ ID NO: 916983
ggaacagucuauucuaaac

SEQ ID NO: 1199395 - RNA, 19 nt, Artificial Sequence
  Description of Artificial Sequence: Synthetic oligonucleotide
  Antisense strand to SEQ ID NO: 1199394
guuuagaauagacuguucc

SEQ ID NO: 1199396 - RNA, 19 nt, Artificial Sequence
  Description of Artificial Sequence: Synthetic oligonucleotide
  Sense strand starting at position 3550 of SEQ ID NO: 916983
ggauauggccucuaucucu

SEQ ID NO: 1199397 - RNA, 19 nt, Artificial Sequence
  Description of Artificial Sequence: Synthetic oligonucleotide
  Antisense strand to SEQ ID NO: 1199396
agagauagaggccauaucc

SEQ ID NO: 1199398 - RNA, 19 nt, Artificial Sequence
  Description of Artificial Sequence: Synthetic oligonucleotide
  Sense strand starting at position 3571 of SEQ ID NO: 916983
agucacucuccaggugaga

SEQ ID NO: 1199399 - RNA, 19 nt, Artificial Sequence
  Description of Artificial Sequence: Synthetic oligonucleotide
  Antisense strand to SEQ ID NO: 1199398
ucucaccuggagagugacu

SEQ ID NO: 1199400 - RNA, 19 nt, Artificial Sequence
  Description of Artificial Sequence: Synthetic oligonucleotide
  Sense strand starting at position 3706 of SEQ ID NO: 916983
cgccguaauaauggaauuu

SEQ ID NO: 1199401 - RNA, 19 nt, Artificial Sequence
  Description of Artificial Sequence: Synthetic oligonucleotide
  Antisense strand to SEQ ID NO: 1199400
aaauuccauuauuacggcg

SEQ ID NO: 1199402 - RNA, 19 nt, Artificial Sequence
  Description of Artificial Sequence: Synthetic oligonucleotide
  Sense strand starting at position 3788 of SEQ ID NO: 916983
agcaaaguuugauccuuua

SEQ ID NO: 1199403 - RNA, 19 nt, Artificial Sequence
  Description of Artificial Sequence: Synthetic oligonucleotide
  Antisense strand to SEQ ID NO: 1199402
uaaaggaucaaacuuugcu

SEQ ID NO: 1199404 - RNA, 19 nt, Artificial Sequence
  Description of Artificial Sequence: Synthetic oligonucleotide
  Sense strand starting at position 171 of SEQ ID NO: 916984
guauaaagagcgcgaacua

SEQ ID NO: 1199405 - RNA, 19 nt, Artificial Sequence
  Description of Artificial Sequence: Synthetic oligonucleotide
  Antisense strand to SEQ ID NO: 1199404
uaguucgcgcucuuuauac

SEQ ID NO: 1199406 - RNA, 19 nt, Artificial Sequence
  Description of Artificial Sequence: Synthetic oligonucleotide
  Sense strand starting at position 172 of SEQ ID NO: 916984
uauaaagagcgcgaacuau

SEQ ID NO: 1199407 - RNA, 19 nt, Artificial Sequence
  Description of Artificial Sequence: Synthetic oligonucleotide
  Antisense strand to SEQ ID NO: 1199406
auaguucgcgcucuuuaua

SEQ ID NO: 1199408 - RNA, 19 nt, Artificial Sequence
  Description of Artificial Sequence: Synthetic oligonucleotide
  Sense strand starting at position 178 of SEQ ID NO: 916984
gagcgcgaacuauaucuau

SEQ ID NO: 1199409 - RNA, 19 nt, Artificial Sequence
  Description of Artificial Sequence: Synthetic oligonucleotide
  Antisense strand to SEQ ID NO: 1199408
auagauauaguucgcgcuc

SEQ ID NO: 1199410 - RNA, 19 nt, Artificial Sequence
  Description of Artificial Sequence: Synthetic oligonucleotide
  Sense strand starting at position 181 of SEQ ID NO: 916984
cgcgaacuauaucuauaau

SEQ ID NO: 1199411 - RNA, 19 nt, Artificial Sequence
  Description of Artificial Sequence: Synthetic oligonucleotide
  Antisense strand to SEQ ID NO: 1199410
auuauagauauaguucgcg

SEQ ID NO: 1199412 - RNA, 19 nt, Artificial Sequence
  Description of Artificial Sequence: Synthetic oligonucleotide
  Sense strand starting at position 464 of SEQ ID NO: 916984
augagaauugaaugcacca

SEQ ID NO: 1199413 - RNA, 19 nt, Artificial Sequence
  Description of Artificial Sequence: Synthetic oligonucleotide
  Antisense strand to SEQ ID NO: 1199412
uggugcauucaauucucau

SEQ ID NO: 1199414 - RNA, 19 nt, Artificial Sequence
  Description of Artificial Sequence: Synthetic oligonucleotide
  Sense strand starting at position 583 of SEQ ID NO: 916984
auaaauaaaucgcuugagu

SEQ ID NO: 1199415 - RNA, 19 nt, Artificial Sequence
  Description of Artificial Sequence: Synthetic oligonucleotide
  Antisense strand to SEQ ID NO: 1199414
acucaagcgauuuauuuau

SEQ ID NO: 1199416 - RNA, 19 nt, Artificial Sequence
  Description of Artificial Sequence: Synthetic oligonucleotide
  Sense strand starting at position 585 of SEQ ID NO: 916984
aaauaaaucgcuugaguuc

SEQ ID NO: 1199417 - RNA, 19 nt, Artificial Sequence
  Description of Artificial Sequence: Synthetic oligonucleotide
  Antisense strand to SEQ ID NO: 1199416
gaacucaagcgauuuauuu

SEQ ID NO: 1199418 - RNA, 19 nt, Artificial Sequence
  Description of Artificial Sequence: Synthetic oligonucleotide
  Sense strand starting at position 586 of SEQ ID NO: 916984
aauaaaucgcuugaguucu

SEQ ID NO: 1199419 - RNA, 19 nt, Artificial Sequence
  Description of Artificial Sequence: Synthetic oligonucleotide
  Antisense strand to SEQ ID NO: 1199418
agaacucaagcgauuuauu

SEQ ID NO: 1199420 - RNA, 19 nt, Artificial Sequence
  Description of Artificial Sequence: Synthetic oligonucleotide
  Sense strand starting at position 598 of SEQ ID NO: 916984
gaguucuggaguugguaag

SEQ ID NO: 1199421 - RNA, 19 nt, Artificial Sequence
  Description of Artificial Sequence: Synthetic oligonucleotide
  Antisense strand to SEQ ID NO: 1199420
cuuaccaacuccagaacuc

SEQ ID NO: 1199422 - RNA, 19 nt, Artificial Sequence
  Description of Artificial Sequence: Synthetic oligonucleotide
  Sense strand starting at position 731 of SEQ ID NO: 916984
aggagaggucaagguucaa

SEQ ID NO: 1199423 - RNA, 19 nt, Artificial Sequence
  Description of Artificial Sequence: Synthetic oligonucleotide
  Antisense strand to SEQ ID NO: 1199422
uugaaccuugaccucuccu

SEQ ID NO: 1199424 - RNA, 19 nt, Artificial Sequence
  Description of Artificial Sequence: Synthetic oligonucleotide
  Sense strand starting at position 859 of SEQ ID NO: 916984
ccagauaaauaacggaaga

SEQ ID NO: 1199425 - RNA, 19 nt, Artificial Sequence
  Description of Artificial Sequence: Synthetic oligonucleotide
  Antisense strand to SEQ ID NO: 1199424
ucuuccguuauuuaucugg

SEQ ID NO: 1199426 - RNA, 19 nt, Artificial Sequence
  Description of Artificial Sequence: Synthetic oligonucleotide
  Sense strand starting at position 902 of SEQ ID NO: 916984
gauuguauuucucaagggu

SEQ ID NO: 1199427 - RNA, 19 nt, Artificial Sequence
  Description of Artificial Sequence: Synthetic oligonucleotide
  Antisense strand to SEQ ID NO: 1199426
acccuugagaaauacaauc

SEQ ID NO: 1199428 - RNA, 19 nt, Artificial Sequence
  Description of Artificial Sequence: Synthetic oligonucleotide
  Sense strand starting at position 1060 of SEQ ID NO: 916984
guguguauacgcaggucau

SEQ ID NO: 1199429 - RNA, 19 nt, Artificial Sequence
  Description of Artificial Sequence: Synthetic oligonucleotide
  Antisense strand to SEQ ID NO: 1199428
augaccugcguauacacac

SEQ ID NO: 1199430 - RNA, 19 nt, Artificial Sequence
  Description of Artificial Sequence: Synthetic oligonucleotide
  Sense strand starting at position 1073 of SEQ ID NO: 916984
ggucauaagaaauguguuu

SEQ ID NO: 1199431 - RNA, 19 nt, Artificial Sequence
  Description of Artificial Sequence: Synthetic oligonucleotide
  Antisense strand to SEQ ID NO: 1199430
aaacacauuucuuaugacc

SEQ ID NO: 1199432 - RNA, 19 nt, Artificial Sequence
  Description of Artificial Sequence: Synthetic oligonucleotide
  Sense strand starting at position 1078 of SEQ ID NO: 916984
uaagaaauguguuuaugca

SEQ ID NO: 1199433 - RNA, 19 nt, Artificial Sequence
  Description of Artificial Sequence: Synthetic oligonucleotide
  Antisense strand to SEQ ID NO: 1199432
ugcauaaacacauuucuua

SEQ ID NO: 1199434 - RNA, 19 nt, Artificial Sequence
  Description of Artificial Sequence: Synthetic oligonucleotide
  Sense strand starting at position 1079 of SEQ ID NO: 916984
aagaaauguguuuaugcaa

SEQ ID NO: 1199435 - RNA, 19 nt, Artificial Sequence
  Description of Artificial Sequence: Synthetic oligonucleotide
  Antisense strand to SEQ ID NO: 1199434
uugcauaaacacauuucuu

SEQ ID NO: 1199436 - RNA, 19 nt, Artificial Sequence
  Description of Artificial Sequence: Synthetic oligonucleotide
  Sense strand starting at position 1092 of SEQ ID NO: 916984
augcaauuccgguaucuuu

SEQ ID NO: 1199437 - RNA, 19 nt, Artificial Sequence
  Description of Artificial Sequence: Synthetic oligonucleotide
  Antisense strand to SEQ ID NO: 1199436
aaagauaccggaauugcau

SEQ ID NO: 1199438 - RNA, 19 nt, Artificial Sequence
  Description of Artificial Sequence: Synthetic oligonucleotide
  Sense strand starting at position 1099 of SEQ ID NO: 916984
uccgguaucuuuccagaau

SEQ ID NO: 1199439 - RNA, 19 nt, Artificial Sequence
  Description of Artificial Sequence: Synthetic oligonucleotide
  Antisense strand to SEQ ID NO: 1199438
auucuggaaagauaccgga

SEQ ID NO: 1199440 - RNA, 19 nt, Artificial Sequence
  Description of Artificial Sequence: Synthetic oligonucleotide
  Sense strand starting at position 1242 of SEQ ID NO: 916984
gcccuucuacuggguuaca

SEQ ID NO: 1199441 - RNA, 19 nt, Artificial Sequence
  Description of Artificial Sequence: Synthetic oligonucleotide
  Antisense strand to SEQ ID NO: 1199440
uguaacccaguagaagggc

SEQ ID NO: 1199442 - RNA, 19 nt, Artificial Sequence
  Description of Artificial Sequence: Synthetic oligonucleotide
  Sense strand starting at position 1245 of SEQ ID NO: 916984
cuucuacuggguuacacau

SEQ ID NO: 1199443 - RNA, 19 nt, Artificial Sequence
  Description of Artificial Sequence: Synthetic oligonucleotide
  Antisense strand to SEQ ID NO: 1199442
auguguaacccaguagaag

SEQ ID NO: 1199444 - RNA, 19 nt, Artificial Sequence
  Description of Artificial Sequence: Synthetic oligonucleotide
  Sense strand starting at position 1353 of SEQ ID NO: 916984
gcuggcaccggguaguaau

SEQ ID NO: 1199445 - RNA, 19 nt, Artificial Sequence
  Description of Artificial Sequence: Synthetic oligonucleotide
  Antisense strand to SEQ ID NO: 1199444
auuacuacccggugccagc

SEQ ID NO: 1199446 - RNA, 19 nt, Artificial Sequence
  Description of Artificial Sequence: Synthetic oligonucleotide
  Sense strand starting at position 1364 of SEQ ID NO: 916984
guaguaauucuacacucag

SEQ ID NO: 1199447 - RNA, 19 nt, Artificial Sequence
  Description of Artificial Sequence: Synthetic oligonucleotide
  Antisense strand to SEQ ID NO: 1199446
cugaguguagaauuacuac

SEQ ID NO: 1199448 - RNA, 19 nt, Artificial Sequence
  Description of Artificial Sequence: Synthetic oligonucleotide
  Sense strand starting at position 2117 of SEQ ID NO: 916984
ugccacucuugcucagaca

SEQ ID NO: 1199449 - RNA, 19 nt, Artificial Sequence
  Description of Artificial Sequence: Synthetic oligonucleotide
  Antisense strand to SEQ ID NO: 1199448
ugucugagcaagaguggca

SEQ ID NO: 1199450 - RNA, 19 nt, Artificial Sequence
  Description of Artificial Sequence: Synthetic oligonucleotide
  Sense strand starting at position 2417 of SEQ ID NO: 916984
gagcuugucgaucaagacu

SEQ ID NO: 1199451 - RNA, 19 nt, Artificial Sequence
  Description of Artificial Sequence: Synthetic oligonucleotide
  Antisense strand to SEQ ID NO: 1199450
agucuugaucgacaagcuc

SEQ ID NO: 1199452 - RNA, 19 nt, Artificial Sequence
  Description of Artificial Sequence: Synthetic oligonucleotide
  Sense strand starting at position 2470 of SEQ ID NO: 916984
cgcuuucuuaccguaguaa

SEQ ID NO: 1199453 - RNA, 19 nt, Artificial Sequence
  Description of Artificial Sequence: Synthetic oligonucleotide
  Antisense strand to SEQ ID NO: 1199452
uuacuacgguaagaaagcg

SEQ ID NO: 1199454 - RNA, 19 nt, Artificial Sequence
  Description of Artificial Sequence: Synthetic oligonucleotide
  Sense strand starting at position 2471 of SEQ ID NO: 916984
gcuuucuuaccguaguaag

SEQ ID NO: 1199455 - RNA, 19 nt, Artificial Sequence
  Description of Artificial Sequence: Synthetic oligonucleotide
  Antisense strand to SEQ ID NO: 1199454
cuuacuacgguaagaaagc

SEQ ID NO: 1199456 - RNA, 19 nt, Artificial Sequence
  Description of Artificial Sequence: Synthetic oligonucleotide
  Sense strand starting at position 2508 of SEQ ID NO: 916984
gcugccucuaguggagaaa

SEQ ID NO: 1199457 - RNA, 19 nt, Artificial Sequence
  Description of Artificial Sequence: Synthetic oligonucleotide
  Antisense strand to SEQ ID NO: 1199456
uuucuccacuagaggcagc

SEQ ID NO: 1199458 - RNA, 19 nt, Artificial Sequence
  Description of Artificial Sequence: Synthetic oligonucleotide
  Sense strand starting at position 2590 of SEQ ID NO: 916984
uugggauucuggcuuuagu

SEQ ID NO: 1199459 - RNA, 19 nt, Artificial Sequence
  Description of Artificial Sequence: Synthetic oligonucleotide
  Antisense strand to SEQ ID NO: 1199458
acuaaagccagaaucccaa

SEQ ID NO: 1199460 - RNA, 19 nt, Artificial Sequence
  Description of Artificial Sequence: Synthetic oligonucleotide
  Sense strand starting at position 2593 of SEQ ID NO: 916984
ggauucuggcuuuagucuu

SEQ ID NO: 1199461 - RNA, 19 nt, Artificial Sequence
  Description of Artificial Sequence: Synthetic oligonucleotide
  Antisense strand to SEQ ID NO: 1199460
aagacuaaagccagaaucc

SEQ ID NO: 1199462 - RNA, 19 nt, Artificial Sequence
  Description of Artificial Sequence: Synthetic oligonucleotide
  Sense strand starting at position 2609 of SEQ ID NO: 916984
cuugucaugcaguguuaaa

SEQ ID NO: 1199463 - RNA, 19 nt, Artificial Sequence
  Description of Artificial Sequence: Synthetic oligonucleotide
  Antisense strand to SEQ ID NO: 1199462
uuuaacacugcaugacaag

SEQ ID NO: 1199464 - RNA, 19 nt, Artificial Sequence
  Description of Artificial Sequence: Synthetic oligonucleotide
  Sense strand starting at position 2685 of SEQ ID NO: 916984
gcgauuuacugugaaacua

SEQ ID NO: 1199465 - RNA, 19 nt, Artificial Sequence
  Description of Artificial Sequence: Synthetic oligonucleotide
  Antisense strand to SEQ ID NO: 1199464
uaguuucacaguaaaucgc

SEQ ID NO: 1199466 - RNA, 19 nt, Artificial Sequence
  Description of Artificial Sequence: Synthetic oligonucleotide
  Sense strand starting at position 2746 of SEQ ID NO: 916984
ucucuagaguaugcgagaa

SEQ ID NO: 1199467 - RNA, 19 nt, Artificial Sequence
  Description of Artificial Sequence: Synthetic oligonucleotide
  Antisense strand to SEQ ID NO: 1199466
uucucgcauacucuagaga

SEQ ID NO: 1199468 - RNA, 19 nt, Artificial Sequence
  Description of Artificial Sequence: Synthetic oligonucleotide
  Sense strand starting at position 2848 of SEQ ID NO: 916984
uacaaauauccaggguaug

SEQ ID NO: 1199469 - RNA, 19 nt, Artificial Sequence
  Description of Artificial Sequence: Synthetic oligonucleotide
  Antisense strand to SEQ ID NO: 1199468
cauacccuggauauuugua

SEQ ID NO: 1199470 - RNA, 19 nt, Artificial Sequence
  Description of Artificial Sequence: Synthetic oligonucleotide
  Sense strand starting at position 2862 of SEQ ID NO: 916984
guaugauucucaguaggca

SEQ ID NO: 1199471 - RNA, 19 nt, Artificial Sequence
  Description of Artificial Sequence: Synthetic oligonucleotide
  Antisense strand to SEQ ID NO: 1199470
ugccuacugagaaucauac

SEQ ID NO: 1199472 - RNA, 19 nt, Artificial Sequence
  Description of Artificial Sequence: Synthetic oligonucleotide
  Sense strand starting at position 2863 of SEQ ID NO: 916984
uaugauucucaguaggcaa

SEQ ID NO: 1199473 - RNA, 19 nt, Artificial Sequence
  Description of Artificial Sequence: Synthetic oligonucleotide
  Antisense strand to SEQ ID NO: 1199472
uugccuacugagaaucaua

SEQ ID NO: 1199474 - RNA, 19 nt, Artificial Sequence
  Description of Artificial Sequence: Synthetic oligonucleotide
  Sense strand starting at position 3410 of SEQ ID NO: 916984
cgcuugagaggguagugau

SEQ ID NO: 1199475 - RNA, 19 nt, Artificial Sequence
  Description of Artificial Sequence: Synthetic oligonucleotide
  Antisense strand to SEQ ID NO: 1199474
aucacuacccucucaagcg

SEQ ID NO: 1199476 - RNA, 19 nt, Artificial Sequence
  Description of Artificial Sequence: Synthetic oligonucleotide
  Sense strand starting at position 3775 of SEQ ID NO: 916984
ugauuuauguaguacacuu

SEQ ID NO: 1199477 - RNA, 19 nt, Artificial Sequence
  Description of Artificial Sequence: Synthetic oligonucleotide
  Antisense strand to SEQ ID NO: 1199476
aaguguacuacauaaauca

SEQ ID NO: 1199478 - RNA, 19 nt, Artificial Sequence
  Description of Artificial Sequence: Synthetic oligonucleotide
  Sense strand starting at position 3849 of SEQ ID NO: 916984
gaguacagauaguaaauaa

SEQ ID NO: 1199479 - RNA, 19 nt, Artificial Sequence
  Description of Artificial Sequence: Synthetic oligonucleotide
  Antisense strand to SEQ ID NO: 1199478
uuauuuacuaucuguacuc

SEQ ID NO: 1199480 - RNA, 19 nt, Artificial Sequence
  Description of Artificial Sequence: Synthetic oligonucleotide
  Sense strand starting at position 3856 of SEQ ID NO: 916984
gauaguaaauaagggauca

SEQ ID NO: 1199481 - RNA, 19 nt, Artificial Sequence
  Description of Artificial Sequence: Synthetic oligonucleotide
  Antisense strand to SEQ ID NO: 1199480
ugaucccuuauuuacuauc

SEQ ID NO: 1199482 - RNA, 19 nt, Artificial Sequence
  Description of Artificial Sequence: Synthetic oligonucleotide
  Sense strand starting at position 3960 of SEQ ID NO: 916984
gggucaaauccgugucaca

SEQ ID NO: 1199483 - RNA, 19 nt, Artificial Sequence
  Description of Artificial Sequence: Synthetic oligonucleotide
  Antisense strand to SEQ ID NO: 1199482
ugugacacggauuugaccc

SEQ ID NO: 1199484 - RNA, 19 nt, Artificial Sequence
  Description of Artificial Sequence: Synthetic oligonucleotide
  Sense strand starting at position 165 of SEQ ID NO: 916985
augagaauugaaugcacca

SEQ ID NO: 1199485 - RNA, 19 nt, Artificial Sequence
  Description of Artificial Sequence: Synthetic oligonucleotide
  Antisense strand to SEQ ID NO: 1199484
uggugcauucaauucucau

SEQ ID NO: 1199486 - RNA, 19 nt, Artificial Sequence
  Description of Artificial Sequence: Synthetic oligonucleotide
  Sense strand starting at position 284 of SEQ ID NO: 916985
auaaauaaaucgcuugagu

SEQ ID NO: 1199487 - RNA, 19 nt, Artificial Sequence
  Description of Artificial Sequence: Synthetic oligonucleotide
  Antisense strand to SEQ ID NO: 1199486
acucaagcgauuuauuuau

SEQ ID NO: 1199488 - RNA, 19 nt, Artificial Sequence
  Description of Artificial Sequence: Synthetic oligonucleotide
  Sense strand starting at position 286 of SEQ ID NO: 916985
aaauaaaucgcuugaguuc

SEQ ID NO: 1199489 - RNA, 19 nt, Artificial Sequence
  Description of Artificial Sequence: Synthetic oligonucleotide
  Antisense strand to SEQ ID NO: 1199488
gaacucaagcgauuuauuu

SEQ ID NO: 1199490 - RNA, 19 nt, Artificial Sequence
  Description of Artificial Sequence: Synthetic oligonucleotide
  Sense strand starting at position 287 of SEQ ID NO: 916985
aauaaaucgcuugaguucu

SEQ ID NO: 1199491 - RNA, 19 nt, Artificial Sequence
  Description of Artificial Sequence: Synthetic oligonucleotide
  Antisense strand to SEQ ID NO: 1199490
agaacucaagcgauuuauu

SEQ ID NO: 1199492 - RNA, 19 nt, Artificial Sequence
  Description of Artificial Sequence: Synthetic oligonucleotide
  Sense strand starting at position 299 of SEQ ID NO: 916985
gaguucuggaguugguaag

SEQ ID NO: 1199493 - RNA, 19 nt, Artificial Sequence
  Description of Artificial Sequence: Synthetic oligonucleotide
  Antisense strand to SEQ ID NO: 1199492
cuuaccaacuccagaacuc

SEQ ID NO: 1199494 - RNA, 19 nt, Artificial Sequence
  Description of Artificial Sequence: Synthetic oligonucleotide
  Sense strand starting at position 432 of SEQ ID NO: 916985
aggagaggucaagguucaa

SEQ ID NO: 1199495 - RNA, 19 nt, Artificial Sequence
  Description of Artificial Sequence: Synthetic oligonucleotide
  Antisense strand to SEQ ID NO: 1199494
uugaaccuugaccucuccu

SEQ ID NO: 1199496 - RNA, 19 nt, Artificial Sequence
  Description of Artificial Sequence: Synthetic oligonucleotide
  Sense strand starting at position 560 of SEQ ID NO: 916985
ccagauaaauaacggaaga

SEQ ID NO: 1199497 - RNA, 19 nt, Artificial Sequence
  Description of Artificial Sequence: Synthetic oligonucleotide
  Antisense strand to SEQ ID NO: 1199496
ucuuccguuauuuaucugg

SEQ ID NO: 1199498 - RNA, 19 nt, Artificial Sequence
  Description of Artificial Sequence: Synthetic oligonucleotide
  Sense strand starting at position 603 of SEQ ID NO: 916985
gauuguauuucucaagggu

SEQ ID NO: 1199499 - RNA, 19 nt, Artificial Sequence
  Description of Artificial Sequence: Synthetic oligonucleotide
  Antisense strand to SEQ ID NO: 1199498
acccuugagaaauacaauc

SEQ ID NO: 1199500 - RNA, 19 nt, Artificial Sequence
  Description of Artificial Sequence: Synthetic oligonucleotide
  Sense strand starting at position 761 of SEQ ID NO: 916985
guguguauacgcaggucau

SEQ ID NO: 1199501 - RNA, 19 nt, Artificial Sequence
  Description of Artificial Sequence: Synthetic oligonucleotide
  Antisense strand to SEQ ID NO: 1199500
augaccugcguauacacac

SEQ ID NO: 1199502 - RNA, 19 nt, Artificial Sequence
  Description of Artificial Sequence: Synthetic oligonucleotide
  Sense strand starting at position 774 of SEQ ID NO: 916985
ggucauaagaaauguguuu

SEQ ID NO: 1199503 - RNA, 19 nt, Artificial Sequence
  Description of Artificial Sequence: Synthetic oligonucleotide
  Antisense strand to SEQ ID NO: 1199502
aaacacauuucuuaugacc

SEQ ID NO: 1199504 - RNA, 19 nt, Artificial Sequence
  Description of Artificial Sequence: Synthetic oligonucleotide
  Sense strand starting at position 779 of SEQ ID NO: 916985
uaagaaauguguuuaugca

SEQ ID NO: 1199505 - RNA, 19 nt, Artificial Sequence
  Description of Artificial Sequence: Synthetic oligonucleotide
  Antisense strand to SEQ ID NO: 1199504
ugcauaaacacauuucuua

SEQ ID NO: 1199506 - RNA, 19 nt, Artificial Sequence
  Description of Artificial Sequence: Synthetic oligonucleotide
  Sense strand starting at position 780 of SEQ ID NO: 916985
aagaaauguguuuaugcaa

SEQ ID NO: 1199507 - RNA, 19 nt, Artificial Sequence
  Description of Artificial Sequence: Synthetic oligonucleotide
  Antisense strand to SEQ ID NO: 1199506
uugcauaaacacauuucuu

SEQ ID NO: 1199508 - RNA, 19 nt, Artificial Sequence
  Description of Artificial Sequence: Synthetic oligonucleotide
  Sense strand starting at position 793 of SEQ ID NO: 916985
augcaauuccgguaucuuu

SEQ ID NO: 1199509 - RNA, 19 nt, Artificial Sequence
  Description of Artificial Sequence: Synthetic oligonucleotide
  Antisense strand to SEQ ID NO: 1199508
aaagauaccggaauugcau

SEQ ID NO: 1199510 - RNA, 19 nt, Artificial Sequence
  Description of Artificial Sequence: Synthetic oligonucleotide
  Sense strand starting at position 800 of SEQ ID NO: 916985
uccgguaucuuuccagaau

SEQ ID NO: 1199511 - RNA, 19 nt, Artificial Sequence
  Description of Artificial Sequence: Synthetic oligonucleotide
  Antisense strand to SEQ ID NO: 1199510
auucuggaaagauaccgga

SEQ ID NO: 1199512 - RNA, 19 nt, Artificial Sequence
  Description of Artificial Sequence: Synthetic oligonucleotide
  Sense strand starting at position 943 of SEQ ID NO: 916985
gcccuucuacuggguuaca

SEQ ID NO: 1199513 - RNA, 19 nt, Artificial Sequence
  Description of Artificial Sequence: Synthetic oligonucleotide
  Antisense strand to SEQ ID NO: 1199512
uguaacccaguagaagggc

SEQ ID NO: 1199514 - RNA, 19 nt, Artificial Sequence
  Description of Artificial Sequence: Synthetic oligonucleotide
  Sense strand starting at position 946 of SEQ ID NO: 916985
cuucuacuggguuacacau

SEQ ID NO: 1199515 - RNA, 19 nt, Artificial Sequence
  Description of Artificial Sequence: Synthetic oligonucleotide
  Antisense strand to SEQ ID NO: 1199514
auguguaacccaguagaag

SEQ ID NO: 1199516 - RNA, 19 nt, Artificial Sequence
  Description of Artificial Sequence: Synthetic oligonucleotide
  Sense strand starting at position 1054 of SEQ ID NO: 916985
gcuggcaccggguaguaau

SEQ ID NO: 1199517 - RNA, 19 nt, Artificial Sequence
  Description of Artificial Sequence: Synthetic oligonucleotide
  Antisense strand to SEQ ID NO: 1199516
auuacuacccggugccagc

SEQ ID NO: 1199518 - RNA, 19 nt, Artificial Sequence
  Description of Artificial Sequence: Synthetic oligonucleotide
  Sense strand starting at position 1065 of SEQ ID NO: 916985
guaguaauucuacacucag

SEQ ID NO: 1199519 - RNA, 19 nt, Artificial Sequence
  Description of Artificial Sequence: Synthetic oligonucleotide
  Antisense strand to SEQ ID NO: 1199518
cugaguguagaauuacuac

SEQ ID NO: 1199520 - RNA, 19 nt, Artificial Sequence
  Description of Artificial Sequence: Synthetic oligonucleotide
  Sense strand starting at position 1818 of SEQ ID NO: 916985
ugccacucuugcucagaca

SEQ ID NO: 1199521 - RNA, 19 nt, Artificial Sequence
  Description of Artificial Sequence: Synthetic oligonucleotide
  Antisense strand to SEQ ID NO: 1199520
ugucugagcaagaguggca

SEQ ID NO: 1199522 - RNA, 19 nt, Artificial Sequence
  Description of Artificial Sequence: Synthetic oligonucleotide
  Sense strand starting at position 2118 of SEQ ID NO: 916985
gagcuugucgaucaagacu

SEQ ID NO: 1199523 - RNA, 19 nt, Artificial Sequence
  Description of Artificial Sequence: Synthetic oligonucleotide
  Antisense strand to SEQ ID NO: 1199522
agucuugaucgacaagcuc

SEQ ID NO: 1199524 - RNA, 19 nt, Artificial Sequence
  Description of Artificial Sequence: Synthetic oligonucleotide
  Sense strand starting at position 2171 of SEQ ID NO: 916985
cgcuuucuuaccguaguaa

SEQ ID NO: 1199525 - RNA, 19 nt, Artificial Sequence
  Description of Artificial Sequence: Synthetic oligonucleotide
  Antisense strand to SEQ ID NO: 1199524
uuacuacgguaagaaagcg

SEQ ID NO: 1199526 - RNA, 19 nt, Artificial Sequence
  Description of Artificial Sequence: Synthetic oligonucleotide
  Sense strand starting at position 2172 of SEQ ID NO: 916985
gcuuucuuaccguaguaag

SEQ ID NO: 1199527 - RNA, 19 nt, Artificial Sequence
  Description of Artificial Sequence: Synthetic oligonucleotide
  Antisense strand to SEQ ID NO: 1199526
cuuacuacgguaagaaagc

SEQ ID NO: 1199528 - RNA, 19 nt, Artificial Sequence
  Description of Artificial Sequence: Synthetic oligonucleotide
  Sense strand starting at position 2209 of SEQ ID NO: 916985
gcugccucuaguggagaaa

SEQ ID NO: 1199529 - RNA, 19 nt, Artificial Sequence
  Description of Artificial Sequence: Synthetic oligonucleotide
  Antisense strand to SEQ ID NO: 1199528
uuucuccacuagaggcagc

SEQ ID NO: 1199530 - RNA, 19 nt, Artificial Sequence
  Description of Artificial Sequence: Synthetic oligonucleotide
  Sense strand starting at position 2291 of SEQ ID NO: 916985
uugggauucuggcuuuagu

SEQ ID NO: 1199531 - RNA, 19 nt, Artificial Sequence
  Description of Artificial Sequence: Synthetic oligonucleotide
  Antisense strand to SEQ ID NO: 1199530
acuaaagccagaaucccaa

SEQ ID NO: 1199532 - RNA, 19 nt, Artificial Sequence
  Description of Artificial Sequence: Synthetic oligonucleotide
  Sense strand starting at position 2294 of SEQ ID NO: 916985
ggauucuggcuuuagucuu

SEQ ID NO: 1199533 - RNA, 19 nt, Artificial Sequence
  Description of Artificial Sequence: Synthetic oligonucleotide
  Antisense strand to SEQ ID NO: 1199532
aagacuaaagccagaaucc

SEQ ID NO: 1199534 - RNA, 19 nt, Artificial Sequence
  Description of Artificial Sequence: Synthetic oligonucleotide
  Sense strand starting at position 2310 of SEQ ID NO: 916985
cuugucaugcaguguuaaa

SEQ ID NO: 1199535 - RNA, 19 nt, Artificial Sequence
  Description of Artificial Sequence: Synthetic oligonucleotide
  Antisense strand to SEQ ID NO: 1199534
uuuaacacugcaugacaag

SEQ ID NO: 1199536 - RNA, 19 nt, Artificial Sequence
  Description of Artificial Sequence: Synthetic oligonucleotide
  Sense strand starting at position 2386 of SEQ ID NO: 916985
gcgauuuacugugaaacua

SEQ ID NO: 1199537 - RNA, 19 nt, Artificial Sequence
  Description of Artificial Sequence: Synthetic oligonucleotide
  Antisense strand to SEQ ID NO: 1199536
uaguuucacaguaaaucgc

SEQ ID NO: 1199538 - RNA, 19 nt, Artificial Sequence
  Description of Artificial Sequence: Synthetic oligonucleotide
  Sense strand starting at position 2447 of SEQ ID NO: 916985
ucucuagaguaugcgagaa

SEQ ID NO: 1199539 - RNA, 19 nt, Artificial Sequence
  Description of Artificial Sequence: Synthetic oligonucleotide
  Antisense strand to SEQ ID NO: 1199538
uucucgcauacucuagaga

SEQ ID NO: 1199540 - RNA, 19 nt, Artificial Sequence
  Description of Artificial Sequence: Synthetic oligonucleotide
  Sense strand starting at position 2549 of SEQ ID NO: 916985
uacaaauauccaggguaug

SEQ ID NO: 1199541 - RNA, 19 nt, Artificial Sequence
  Description of Artificial Sequence: Synthetic oligonucleotide
  Antisense strand to SEQ ID NO: 1199540
cauacccuggauauuugua

SEQ ID NO: 1199542 - RNA, 19 nt, Artificial Sequence
  Description of Artificial Sequence: Synthetic oligonucleotide
  Sense strand starting at position 2563 of SEQ ID NO: 916985
guaugauucucaguaggca

SEQ ID NO: 1199543 - RNA, 19 nt, Artificial Sequence
  Description of Artificial Sequence: Synthetic oligonucleotide
  Antisense strand to SEQ ID NO: 1199542
ugccuacugagaaucauac

SEQ ID NO: 1199544 - RNA, 19 nt, Artificial Sequence
  Description of Artificial Sequence: Synthetic oligonucleotide
  Sense strand starting at position 2564 of SEQ ID NO: 916985
uaugauucucaguaggcaa

SEQ ID NO: 1199545 - RNA, 19 nt, Artificial Sequence
  Description of Artificial Sequence: Synthetic oligonucleotide
  Antisense strand to SEQ ID NO: 1199544
uugccuacugagaaucaua

SEQ ID NO: 1199546 - RNA, 19 nt, Artificial Sequence
  Description of Artificial Sequence: Synthetic oligonucleotide
  Sense strand starting at position 3111 of SEQ ID NO: 916985
cgcuugagaggguagugau

SEQ ID NO: 1199547 - RNA, 19 nt, Artificial Sequence
  Description of Artificial Sequence: Synthetic oligonucleotide
  Antisense strand to SEQ ID NO: 1199546
aucacuacccucucaagcg

SEQ ID NO: 1199548 - RNA, 19 nt, Artificial Sequence
  Description of Artificial Sequence: Synthetic oligonucleotide
  Sense strand starting at position 3471 of SEQ ID NO: 916985
gauagugauuuauguagua

SEQ ID NO: 1199549 - RNA, 19 nt, Artificial Sequence
  Description of Artificial Sequence: Synthetic oligonucleotide
  Antisense strand to SEQ ID NO: 1199548
uacuacauaaaucacuauc

SEQ ID NO: 1199550 - RNA, 19 nt, Artificial Sequence
  Description of Artificial Sequence: Synthetic oligonucleotide
  Sense strand starting at position 3476 of SEQ ID NO: 916985
ugauuuauguaguacacuu

SEQ ID NO: 1199551 - RNA, 19 nt, Artificial Sequence
  Description of Artificial Sequence: Synthetic oligonucleotide
  Antisense strand to SEQ ID NO: 1199550
aaguguacuacauaaauca

SEQ ID NO: 1199552 - RNA, 19 nt, Artificial Sequence
  Description of Artificial Sequence: Synthetic oligonucleotide
  Sense strand starting at position 3550 of SEQ ID NO: 916985
gaguacagauaguaaauaa

SEQ ID NO: 1199553 - RNA, 19 nt, Artificial Sequence
  Description of Artificial Sequence: Synthetic oligonucleotide
  Antisense strand to SEQ ID NO: 1199552
uuauuuacuaucuguacuc

SEQ ID NO: 1199554 - RNA, 19 nt, Artificial Sequence
  Description of Artificial Sequence: Synthetic oligonucleotide
  Sense strand starting at position 3557 of SEQ ID NO: 916985
gauaguaaauaagggauca

SEQ ID NO: 1199555 - RNA, 19 nt, Artificial Sequence
  Description of Artificial Sequence: Synthetic oligonucleotide
  Antisense strand to SEQ ID NO: 1199554
ugaucccuuauuuacuauc

SEQ ID NO: 1199556 - RNA, 19 nt, Artificial Sequence
  Description of Artificial Sequence: Synthetic oligonucleotide
  Sense strand starting at position 3661 of SEQ ID NO: 916985
gggucaaauccgugucaca

SEQ ID NO: 1199557 - RNA, 19 nt, Artificial Sequence
  Description of Artificial Sequence: Synthetic oligonucleotide
  Antisense strand to SEQ ID NO: 1199556
ugugacacggauuugaccc

SEQ ID NO: 1199558 - RNA, 19 nt, Artificial Sequence
  Description of Artificial Sequence: Synthetic oligonucleotide
  Sense strand starting at position 3703 of SEQ ID NO: 916985
uucgucaugucuuuaacua

SEQ ID NO: 1199559 - RNA, 19 nt, Artificial Sequence
  Description of Artificial Sequence: Synthetic oligonucleotide
  Antisense strand to SEQ ID NO: 1199558
uaguuaaagacaugacgaa

SEQ ID NO: 1199560 - RNA, 19 nt, Artificial Sequence
  Description of Artificial Sequence: Synthetic oligonucleotide
  Sense strand starting at position 3704 of SEQ ID NO: 916985
ucgucaugucuuuaacuau

SEQ ID NO: 1199561 - RNA, 19 nt, Artificial Sequence
  Description of Artificial Sequence: Synthetic oligonucleotide
  Antisense strand to SEQ ID NO: 1199560
auaguuaaagacaugacga

SEQ ID NO: 1199562 - RNA, 19 nt, Artificial Sequence
  Description of Artificial Sequence: Synthetic oligonucleotide
  Sense strand starting at position 3786 of SEQ ID NO: 916985
acagacuucuccucgaacu

SEQ ID NO: 1199563 - RNA, 19 nt, Artificial Sequence
  Description of Artificial Sequence: Synthetic oligonucleotide
  Antisense strand to SEQ ID NO: 1199562
aguucgaggagaagucugu

SEQ ID NO: 1199564 - RNA, 19 nt, Artificial Sequence
  Description of Artificial Sequence: Synthetic oligonucleotide
  Sense strand starting at position 11 of SEQ ID NO: 916986
gcuuaagcuguagaaugaa

SEQ ID NO: 1199565 - RNA, 19 nt, Artificial Sequence
  Description of Artificial Sequence: Synthetic oligonucleotide
  Antisense strand to SEQ ID NO: 1199564
uucauucuacagcuuaagc

SEQ ID NO: 1199566 - RNA, 19 nt, Artificial Sequence
  Description of Artificial Sequence: Synthetic oligonucleotide
  Sense strand starting at position 72 of SEQ ID NO: 916986
uaacucguuggguaauaau

SEQ ID NO: 1199567 - RNA, 19 nt, Artificial Sequence
  Description of Artificial Sequence: Synthetic oligonucleotide
  Antisense strand to SEQ ID NO: 1199566
auuauuacccaacgaguua

SEQ ID NO: 1199568 - RNA, 19 nt, Artificial Sequence
  Description of Artificial Sequence: Synthetic oligonucleotide
  Sense strand starting at position 147 of SEQ ID NO: 916986
gggucaccacugcaaugau

SEQ ID NO: 1199569 - RNA, 19 nt, Artificial Sequence
  Description of Artificial Sequence: Synthetic oligonucleotide
  Antisense strand to SEQ ID NO: 1199568
aucauugcaguggugaccc

SEQ ID NO: 1199570 - RNA, 19 nt, Artificial Sequence
  Description of Artificial Sequence: Synthetic oligonucleotide
  Sense strand starting at position 207 of SEQ ID NO: 916986
gaagcaugcagucaggaga

SEQ ID NO: 1199571 - RNA, 19 nt, Artificial Sequence
  Description of Artificial Sequence: Synthetic oligonucleotide
  Antisense strand to SEQ ID NO: 1199570
ucuccugacugcaugcuuc

SEQ ID NO: 1199572 - RNA, 19 nt, Artificial Sequence
  Description of Artificial Sequence: Synthetic oligonucleotide
  Sense strand starting at position 220 of SEQ ID NO: 916986
aggagaaagcccuguaauu

SEQ ID NO: 1199573 - RNA, 19 nt, Artificial Sequence
  Description of Artificial Sequence: Synthetic oligonucleotide
  Antisense strand to SEQ ID NO: 1199572
aauuacagggcuuucuccu

SEQ ID NO: 1199574 - RNA, 19 nt, Artificial Sequence
  Description of Artificial Sequence: Synthetic oligonucleotide
  Sense strand starting at position 1018 of SEQ ID NO: 916986
ugugucaauauagagaagu

SEQ ID NO: 1199575 - RNA, 19 nt, Artificial Sequence
  Description of Artificial Sequence: Synthetic oligonucleotide
  Antisense strand to SEQ ID NO: 1199574
acuucucuauauugacaca

SEQ ID NO: 1199576 - RNA, 19 nt, Artificial Sequence
  Description of Artificial Sequence: Synthetic oligonucleotide
  Sense strand starting at position 1068 of SEQ ID NO: 916986
gauuuccugugagaucaaa

SEQ ID NO: 1199577 - RNA, 19 nt, Artificial Sequence
  Description of Artificial Sequence: Synthetic oligonucleotide
  Antisense strand to SEQ ID NO: 1199576
uuugaucucacaggaaauc

SEQ ID NO: 1199578 - RNA, 19 nt, Artificial Sequence
  Description of Artificial Sequence: Synthetic oligonucleotide
  Sense strand starting at position 1391 of SEQ ID NO: 916986
aacucagagccugguuaga

SEQ ID NO: 1199579 - RNA, 19 nt, Artificial Sequence
  Description of Artificial Sequence: Synthetic oligonucleotide
  Antisense strand to SEQ ID NO: 1199578
ucuaaccaggcucugaguu

SEQ ID NO: 1199580 - RNA, 19 nt, Artificial Sequence
  Description of Artificial Sequence: Synthetic oligonucleotide
  Sense strand starting at position 1555 of SEQ ID NO: 916986
ggagacuggugguucauua

SEQ ID NO: 1199581 - RNA, 19 nt, Artificial Sequence
  Description of Artificial Sequence: Synthetic oligonucleotide
  Antisense strand to SEQ ID NO: 1199580
uaaugaaccaccagucucc

SEQ ID NO: 1199582 - RNA, 19 nt, Artificial Sequence
  Description of Artificial Sequence: Synthetic oligonucleotide
  Sense strand starting at position 1575 of SEQ ID NO: 916986
gcguuuaggcaguuuaagu

SEQ ID NO: 1199583 - RNA, 19 nt, Artificial Sequence
  Description of Artificial Sequence: Synthetic oligonucleotide
  Antisense strand to SEQ ID NO: 1199582
acuuaaacugccuaaacgc

SEQ ID NO: 1199584 - RNA, 19 nt, Artificial Sequence
  Description of Artificial Sequence: Synthetic oligonucleotide
  Sense strand starting at position 1683 of SEQ ID NO: 916986
ggcaucucccaggauauua

SEQ ID NO: 1199585 - RNA, 19 nt, Artificial Sequence
  Description of Artificial Sequence: Synthetic oligonucleotide
  Antisense strand to SEQ ID NO: 1199584
uaauauccugggagaugcc

SEQ ID NO: 1199586 - RNA, 19 nt, Artificial Sequence
  Description of Artificial Sequence: Synthetic oligonucleotide
  Sense strand starting at position 1830 of SEQ ID NO: 916986
gcccgaggcauuugaaucu

SEQ ID NO: 1199587 - RNA, 19 nt, Artificial Sequence
  Description of Artificial Sequence: Synthetic oligonucleotide
  Antisense strand to SEQ ID NO: 1199586
agauucaaaugccucgggc

SEQ ID NO: 1199588 - RNA, 19 nt, Artificial Sequence
  Description of Artificial Sequence: Synthetic oligonucleotide
  Sense strand starting at position 1908 of SEQ ID NO: 916986
uggagauacugcucacauu

SEQ ID NO: 1199589 - RNA, 19 nt, Artificial Sequence
  Description of Artificial Sequence: Synthetic oligonucleotide
  Antisense strand to SEQ ID NO: 1199588
aaugugagcaguaucucca

SEQ ID NO: 1199590 - RNA, 19 nt, Artificial Sequence
  Description of Artificial Sequence: Synthetic oligonucleotide
  Sense strand starting at position 2036 of SEQ ID NO: 916986
gcucuuugugcagucagca

SEQ ID NO: 1199591 - RNA, 19 nt, Artificial Sequence
  Description of Artificial Sequence: Synthetic oligonucleotide
  Antisense strand to SEQ ID NO: 1199590
ugcugacugcacaaagagc

SEQ ID NO: 1199592 - RNA, 19 nt, Artificial Sequence
  Description of Artificial Sequence: Synthetic oligonucleotide
  Sense strand starting at position 2121 of SEQ ID NO: 916986
cgacucugggauugcaaga

SEQ ID NO: 1199593 - RNA, 19 nt, Artificial Sequence
  Description of Artificial Sequence: Synthetic oligonucleotide
  Antisense strand to SEQ ID NO: 1199592
ucuugcaaucccagagucg

SEQ ID NO: 1199594 - RNA, 19 nt, Artificial Sequence
  Description of Artificial Sequence: Synthetic oligonucleotide
  Sense strand starting at position 2128 of SEQ ID NO: 916986
gggauugcaagaggacauu

SEQ ID NO: 1199595 - RNA, 19 nt, Artificial Sequence
  Description of Artificial Sequence: Synthetic oligonucleotide
  Antisense strand to SEQ ID NO: 1199594
aauguccucuugcaauccc

SEQ ID NO: 1199596 - RNA, 19 nt, Artificial Sequence
  Description of Artificial Sequence: Synthetic oligonucleotide
  Sense strand starting at position 2198 of SEQ ID NO: 916986
ccuuguuaggcagagcaaa

SEQ ID NO: 1199597 - RNA, 19 nt, Artificial Sequence
  Description of Artificial Sequence: Synthetic oligonucleotide
  Antisense strand to SEQ ID NO: 1199596
uuugcucugccuaacaagg

SEQ ID NO: 1199598 - RNA, 19 nt, Artificial Sequence
  Description of Artificial Sequence: Synthetic oligonucleotide
  Sense strand starting at position 2238 of SEQ ID NO: 916986
aguaaacaccaaugugaug

SEQ ID NO: 1199599 - RNA, 19 nt, Artificial Sequence
  Description of Artificial Sequence: Synthetic oligonucleotide
  Antisense strand to SEQ ID NO: 1199598
caucacauugguguuuacu

SEQ ID NO: 1199600 - RNA, 19 nt, Artificial Sequence
  Description of Artificial Sequence: Synthetic oligonucleotide
  Sense strand starting at position 2320 of SEQ ID NO: 916986
ucaggagacucucuguuga

SEQ ID NO: 1199601 - RNA, 19 nt, Artificial Sequence
  Description of Artificial Sequence: Synthetic oligonucleotide
  Antisense strand to SEQ ID NO: 1199600
ucaacagagagucuccuga

SEQ ID NO: 1199602 - RNA, 19 nt, Artificial Sequence
  Description of Artificial Sequence: Synthetic oligonucleotide
  Sense strand starting at position 2322 of SEQ ID NO: 916986
aggagacucucuguugauu

SEQ ID NO: 1199603 - RNA, 19 nt, Artificial Sequence
  Description of Artificial Sequence: Synthetic oligonucleotide
  Antisense strand to SEQ ID NO: 1199602
aaucaacagagagucuccu

SEQ ID NO: 1199604 - RNA, 19 nt, Artificial Sequence
  Description of Artificial Sequence: Synthetic oligonucleotide
  Sense strand starting at position 2567 of SEQ ID NO: 916986
cagaaaggcuugucagaag

SEQ ID NO: 1199605 - RNA, 19 nt, Artificial Sequence
  Description of Artificial Sequence: Synthetic oligonucleotide
  Antisense strand to SEQ ID NO: 1199604
cuucugacaagccuuucug

SEQ ID NO: 1199606 - RNA, 19 nt, Artificial Sequence
  Description of Artificial Sequence: Synthetic oligonucleotide
  Sense strand starting at position 2582 of SEQ ID NO: 916986
gaaggugaaucaguuagac

SEQ ID NO: 1199607 - RNA, 19 nt, Artificial Sequence
  Description of Artificial Sequence: Synthetic oligonucleotide
  Antisense strand to SEQ ID NO: 1199606
gucuaacugauucaccuuc

SEQ ID NO: 1199608 - RNA, 19 nt, Artificial Sequence
  Description of Artificial Sequence: Synthetic oligonucleotide
  Sense strand starting at position 2606 of SEQ ID NO: 916986
aguaaagauuuggaggacu

SEQ ID NO: 1199609 - RNA, 19 nt, Artificial Sequence
  Description of Artificial Sequence: Synthetic oligonucleotide
  Antisense strand to SEQ ID NO: 1199608
aguccuccaaaucuuuacu

SEQ ID NO: 1199610 - RNA, 19 nt, Artificial Sequence
  Description of Artificial Sequence: Synthetic oligonucleotide
  Sense strand starting at position 2872 of SEQ ID NO: 916986
gguggucgugagaggucua

SEQ ID NO: 1199611 - RNA, 19 nt, Artificial Sequence
  Description of Artificial Sequence: Synthetic oligonucleotide
  Antisense strand to SEQ ID NO: 1199610
uagaccucucacgaccacc

SEQ ID NO: 1199612 - RNA, 19 nt, Artificial Sequence
  Description of Artificial Sequence: Synthetic oligonucleotide
  Sense strand starting at position 2877 of SEQ ID NO: 916986
ucgugagaggucuaugaag

SEQ ID NO: 1199613 - RNA, 19 nt, Artificial Sequence
  Description of Artificial Sequence: Synthetic oligonucleotide
  Antisense strand to SEQ ID NO: 1199612
cuucauagaccucucacga

SEQ ID NO: 1199614 - RNA, 19 nt, Artificial Sequence
  Description of Artificial Sequence: Synthetic oligonucleotide
  Sense strand starting at position 2879 of SEQ ID NO: 916986
gugagaggucuaugaagga

SEQ ID NO: 1199615 - RNA, 19 nt, Artificial Sequence
  Description of Artificial Sequence: Synthetic oligonucleotide
  Antisense strand to SEQ ID NO: 1199614
uccuucauagaccucucac

SEQ ID NO: 1199616 - RNA, 19 nt, Artificial Sequence
  Description of Artificial Sequence: Synthetic oligonucleotide
  Sense strand starting at position 3068 of SEQ ID NO: 916986
cacagacguccugaugaac

SEQ ID NO: 1199617 - RNA, 19 nt, Artificial Sequence
  Description of Artificial Sequence: Synthetic oligonucleotide
  Antisense strand to SEQ ID NO: 1199616
guucaucaggacgucugug

SEQ ID NO: 1199618 - RNA, 19 nt, Artificial Sequence
  Description of Artificial Sequence: Synthetic oligonucleotide
  Sense strand starting at position 3393 of SEQ ID NO: 916986
accuuugcagcagauuaua

SEQ ID NO: 1199619 - RNA, 19 nt, Artificial Sequence
  Description of Artificial Sequence: Synthetic oligonucleotide
  Antisense strand to SEQ ID NO: 1199618
uauaaucugcugcaaaggu

SEQ ID NO: 1199620 - RNA, 19 nt, Artificial Sequence
  Description of Artificial Sequence: Synthetic oligonucleotide
  Sense strand starting at position 3460 of SEQ ID NO: 916986
aggcacagauucucaaaua

SEQ ID NO: 1199621 - RNA, 19 nt, Artificial Sequence
  Description of Artificial Sequence: Synthetic oligonucleotide
  Antisense strand to SEQ ID NO: 1199620
uauuugagaaucugugccu

SEQ ID NO: 1199622 - RNA, 19 nt, Artificial Sequence
  Description of Artificial Sequence: Synthetic oligonucleotide
  Sense strand starting at position 3479 of SEQ ID NO: 916986
uuugaauugccacaaguca

SEQ ID NO: 1199623 - RNA, 19 nt, Artificial Sequence
  Description of Artificial Sequence: Synthetic oligonucleotide
  Antisense strand to SEQ ID NO: 1199622
ugacuuguggcaauucaaa

SEQ ID NO: 1199624 - RNA, 19 nt, Artificial Sequence
  Description of Artificial Sequence: Synthetic oligonucleotide
  Sense strand starting at position 3681 of SEQ ID NO: 916986
ccuaauaaaggcuagucaa

SEQ ID NO: 1199625 - RNA, 19 nt, Artificial Sequence
  Description of Artificial Sequence: Synthetic oligonucleotide
  Antisense strand to SEQ ID NO: 1199624
uugacuagccuuuauuagg

SEQ ID NO: 1199626 - RNA, 19 nt, Artificial Sequence
  Description of Artificial Sequence: Synthetic oligonucleotide
  Sense strand starting at position 3723 of SEQ ID NO: 916986
uguaauauuuaagaggaag

SEQ ID NO: 1199627 - RNA, 19 nt, Artificial Sequence
  Description of Artificial Sequence: Synthetic oligonucleotide
  Antisense strand to SEQ ID NO: 1199626
cuuccucuuaaauauuaca

SEQ ID NO: 1199628 - RNA, 19 nt, Artificial Sequence
  Description of Artificial Sequence: Synthetic oligonucleotide
  Sense strand starting at position 3735 of SEQ ID NO: 916986
gaggaagagugucuaucaa

SEQ ID NO: 1199629 - RNA, 19 nt, Artificial Sequence
  Description of Artificial Sequence: Synthetic oligonucleotide
  Antisense strand to SEQ ID NO: 1199628
uugauagacacucuuccuc

SEQ ID NO: 1199630 - RNA, 19 nt, Artificial Sequence
  Description of Artificial Sequence: Synthetic oligonucleotide
  Sense strand starting at position 3835 of SEQ ID NO: 916986
uggaucuugccuuaaacca

SEQ ID NO: 1199631 - RNA, 19 nt, Artificial Sequence
  Description of Artificial Sequence: Synthetic oligonucleotide
  Antisense strand to SEQ ID NO: 1199630
ugguuuaaggcaagaucca

SEQ ID NO: 1199632 - RNA, 19 nt, Artificial Sequence
  Description of Artificial Sequence: Synthetic oligonucleotide
  Sense strand starting at position 3855 of SEQ ID NO: 916986
auguuaagucaauaguaca

SEQ ID NO: 1199633 - RNA, 19 nt, Artificial Sequence
  Description of Artificial Sequence: Synthetic oligonucleotide
  Antisense strand to SEQ ID NO: 1199632
uguacuauugacuuaacau

SEQ ID NO: 1199634 - RNA, 19 nt, Artificial Sequence
  Description of Artificial Sequence: Synthetic oligonucleotide
  Sense strand starting at position 3867 of SEQ ID NO: 916986
uaguacacuccguauauga

SEQ ID NO: 1199635 - RNA, 19 nt, Artificial Sequence
  Description of Artificial Sequence: Synthetic oligonucleotide
  Antisense strand to SEQ ID NO: 1199634
ucauauacggaguguacua

SEQ ID NO: 1199636 - RNA, 19 nt, Artificial Sequence
  Description of Artificial Sequence: Synthetic oligonucleotide
  Sense strand starting at position 3869 of SEQ ID NO: 916986
guacacuccguauaugaga

SEQ ID NO: 1199637 - RNA, 19 nt, Artificial Sequence
  Description of Artificial Sequence: Synthetic oligonucleotide
  Antisense strand to SEQ ID NO: 1199636
ucucauauacggaguguac

SEQ ID NO: 1199638 - RNA, 19 nt, Artificial Sequence
  Description of Artificial Sequence: Synthetic oligonucleotide
  Sense strand starting at position 3878 of SEQ ID NO: 916986
guauaugagacguauauac

SEQ ID NO: 1199639 - RNA, 19 nt, Artificial Sequence
  Description of Artificial Sequence: Synthetic oligonucleotide
  Antisense strand to SEQ ID NO: 1199638
guauauacgucucauauac

SEQ ID NO: 1199640 - RNA, 19 nt, Artificial Sequence
  Description of Artificial Sequence: Synthetic oligonucleotide
  Sense strand starting at position 3880 of SEQ ID NO: 916986
auaugagacguauauacuu

SEQ ID NO: 1199641 - RNA, 19 nt, Artificial Sequence
  Description of Artificial Sequence: Synthetic oligonucleotide
  Antisense strand to SEQ ID NO: 1199640
aaguauauacgucucauau

SEQ ID NO: 1199642 - RNA, 19 nt, Artificial Sequence
  Description of Artificial Sequence: Synthetic oligonucleotide
  Sense strand starting at position 3897 of SEQ ID NO: 916986
uuucuuugcuaggucauuu

SEQ ID NO: 1199643 - RNA, 19 nt, Artificial Sequence
  Description of Artificial Sequence: Synthetic oligonucleotide
  Antisense strand to SEQ ID NO: 1199642
aaaugaccuagcaaagaaa

SEQ ID NO: 1199644 - RNA, 19 nt, Artificial Sequence
  Description of Artificial Sequence: Synthetic oligonucleotide
  Sense strand starting at position 58 of SEQ ID NO: 916987
gcagaaacacucugcaguu

SEQ ID NO: 1199645 - RNA, 19 nt, Artificial Sequence
  Description of Artificial Sequence: Synthetic oligonucleotide
  Antisense strand to SEQ ID NO: 1199644
aacugcagaguguuucugc

SEQ ID NO: 1199646 - RNA, 19 nt, Artificial Sequence
  Description of Artificial Sequence: Synthetic oligonucleotide
  Sense strand starting at position 148 of SEQ ID NO: 916987
gguuaugaagagugaguuu

SEQ ID NO: 1199647 - RNA, 19 nt, Artificial Sequence
  Description of Artificial Sequence: Synthetic oligonucleotide
  Antisense strand to SEQ ID NO: 1199646
aaacucacucuucauaacc

SEQ ID NO: 1199648 - RNA, 19 nt, Artificial Sequence
  Description of Artificial Sequence: Synthetic oligonucleotide
  Sense strand starting at position 193 of SEQ ID NO: 916987
ccacuuaaaugaguugaca

SEQ ID NO: 1199649 - RNA, 19 nt, Artificial Sequence
  Description of Artificial Sequence: Synthetic oligonucleotide
  Antisense strand to SEQ ID NO: 1199648
ugucaacucauuuaagugg

SEQ ID NO: 1199650 - RNA, 19 nt, Artificial Sequence
  Description of Artificial Sequence: Synthetic oligonucleotide
  Sense strand starting at position 201 of SEQ ID NO: 916987
augaguugacaaugagcca

SEQ ID NO: 1199651 - RNA, 19 nt, Artificial Sequence
  Description of Artificial Sequence: Synthetic oligonucleotide
  Antisense strand to SEQ ID NO: 1199650
uggcucauugucaacucau

SEQ ID NO: 1199652 - RNA, 19 nt, Artificial Sequence
  Description of Artificial Sequence: Synthetic oligonucleotide
  Sense strand starting at position 224 of SEQ ID NO: 916987
ucccgcuaagauuacuaau

SEQ ID NO: 1199653 - RNA, 19 nt, Artificial Sequence
  Description of Artificial Sequence: Synthetic oligonucleotide
  Antisense strand to SEQ ID NO: 1199652
auuaguaaucuuagcggga

SEQ ID NO: 1199654 - RNA, 19 nt, Artificial Sequence
  Description of Artificial Sequence: Synthetic oligonucleotide
  Sense strand starting at position 226 of SEQ ID NO: 916987
ccgcuaagauuacuaaucu

SEQ ID NO: 1199655 - RNA, 19 nt, Artificial Sequence
  Description of Artificial Sequence: Synthetic oligonucleotide
  Antisense strand to SEQ ID NO: 1199654
agauuaguaaucuuagcgg

SEQ ID NO: 1199656 - RNA, 19 nt, Artificial Sequence
  Description of Artificial Sequence: Synthetic oligonucleotide
  Sense strand starting at position 340 of SEQ ID NO: 916987
aaugcauucgaagaugauc

SEQ ID NO: 1199657 - RNA, 19 nt, Artificial Sequence
  Description of Artificial Sequence: Synthetic oligonucleotide
  Antisense strand to SEQ ID NO: 1199656
gaucaucuucgaaugcauu

SEQ ID NO: 1199658 - RNA, 19 nt, Artificial Sequence
  Description of Artificial Sequence: Synthetic oligonucleotide
  Sense strand starting at position 408 of SEQ ID NO: 916987
aaugucuaccuguggguaa

SEQ ID NO: 1199659 - RNA, 19 nt, Artificial Sequence
  Description of Artificial Sequence: Synthetic oligonucleotide
  Antisense strand to SEQ ID NO: 1199658
uuacccacagguagacauu

SEQ ID NO: 1199660 - RNA, 19 nt, Artificial Sequence
  Description of Artificial Sequence: Synthetic oligonucleotide
  Sense strand starting at position 513 of SEQ ID NO: 916987
acaagagaauuguaagauu

SEQ ID NO: 1199661 - RNA, 19 nt, Artificial Sequence
  Description of Artificial Sequence: Synthetic oligonucleotide
  Antisense strand to SEQ ID NO: 1199660
aaucuuacaauucucuugu

SEQ ID NO: 1199662 - RNA, 19 nt, Artificial Sequence
  Description of Artificial Sequence: Synthetic oligonucleotide
  Sense strand starting at position 516 of SEQ ID NO: 916987
agagaauuguaagauugag

SEQ ID NO: 1199663 - RNA, 19 nt, Artificial Sequence
  Description of Artificial Sequence: Synthetic oligonucleotide
  Antisense strand to SEQ ID NO: 1199662
cucaaucuuacaauucucu

SEQ ID NO: 1199664 - RNA, 19 nt, Artificial Sequence
  Description of Artificial Sequence: Synthetic oligonucleotide
  Sense strand starting at position 528 of SEQ ID NO: 916987
gauugagaugagugcauga

SEQ ID NO: 1199665 - RNA, 19 nt, Artificial Sequence
  Description of Artificial Sequence: Synthetic oligonucleotide
  Antisense strand to SEQ ID NO: 1199664
ucaugcacucaucucaauc

SEQ ID NO: 1199666 - RNA, 19 nt, Artificial Sequence
  Description of Artificial Sequence: Synthetic oligonucleotide
  Sense strand starting at position 533 of SEQ ID NO: 916987
agaugagugcaugagguau

SEQ ID NO: 1199667 - RNA, 19 nt, Artificial Sequence
  Description of Artificial Sequence: Synthetic oligonucleotide
  Antisense strand to SEQ ID NO: 1199666
auaccucaugcacucaucu

SEQ ID NO: 1199668 - RNA, 19 nt, Artificial Sequence
  Description of Artificial Sequence: Synthetic oligonucleotide
  Sense strand starting at position 537 of SEQ ID NO: 916987
gagugcaugagguauuauu

SEQ ID NO: 1199669 - RNA, 19 nt, Artificial Sequence
  Description of Artificial Sequence: Synthetic oligonucleotide
  Antisense strand to SEQ ID NO: 1199668
aauaauaccucaugcacuc

SEQ ID NO: 1199670 - RNA, 19 nt, Artificial Sequence
  Description of Artificial Sequence: Synthetic oligonucleotide
  Sense strand starting at position 858 of SEQ ID NO: 916987
ccaguucucggacaagcga

SEQ ID NO: 1199671 - RNA, 19 nt, Artificial Sequence
  Description of Artificial Sequence: Synthetic oligonucleotide
  Antisense strand to SEQ ID NO: 1199670
ucgcuuguccgagaacugg

SEQ ID NO: 1199672 - RNA, 19 nt, Artificial Sequence
  Description of Artificial Sequence: Synthetic oligonucleotide
  Sense strand starting at position 942 of SEQ ID NO: 916987
ggaggugcuuuguuaaaug

SEQ ID NO: 1199673 - RNA, 19 nt, Artificial Sequence
  Description of Artificial Sequence: Synthetic oligonucleotide
  Antisense strand to SEQ ID NO: 1199672
cauuuaacaaagcaccucc

SEQ ID NO: 1199674 - RNA, 19 nt, Artificial Sequence
  Description of Artificial Sequence: Synthetic oligonucleotide
  Sense strand starting at position 2172 of SEQ ID NO: 916987
gcugaaaguugauuccauc

SEQ ID NO: 1199675 - RNA, 19 nt, Artificial Sequence
  Description of Artificial Sequence: Synthetic oligonucleotide
  Antisense strand to SEQ ID NO: 1199674
gauggaaucaacuuucagc

SEQ ID NO: 1199676 - RNA, 19 nt, Artificial Sequence
  Description of Artificial Sequence: Synthetic oligonucleotide
  Sense strand starting at position 2241 of SEQ ID NO: 916987
acacuaucuguugacuuau

SEQ ID NO: 1199677 - RNA, 19 nt, Artificial Sequence
  Description of Artificial Sequence: Synthetic oligonucleotide
  Antisense strand to SEQ ID NO: 1199676
auaagucaacagauagugu

SEQ ID NO: 1199678 - RNA, 19 nt, Artificial Sequence
  Description of Artificial Sequence: Synthetic oligonucleotide
  Sense strand starting at position 2292 of SEQ ID NO: 916987
aguugacacuugccuuaaa

SEQ ID NO: 1199679 - RNA, 19 nt, Artificial Sequence
  Description of Artificial Sequence: Synthetic oligonucleotide
  Antisense strand to SEQ ID NO: 1199678
uuuaaggcaagugucaacu

SEQ ID NO: 1199680 - RNA, 19 nt, Artificial Sequence
  Description of Artificial Sequence: Synthetic oligonucleotide
  Sense strand starting at position 2293 of SEQ ID NO: 916987
guugacacuugccuuaaau

SEQ ID NO: 1199681 - RNA, 19 nt, Artificial Sequence
  Description of Artificial Sequence: Synthetic oligonucleotide
  Antisense strand to SEQ ID NO: 1199680
auuuaaggcaagugucaac

SEQ ID NO: 1199682 - RNA, 19 nt, Artificial Sequence
  Description of Artificial Sequence: Synthetic oligonucleotide
  Sense strand starting at position 2435 of SEQ ID NO: 916987
ccaugauugcccugagcau

SEQ ID NO: 1199683 - RNA, 19 nt, Artificial Sequence
  Description of Artificial Sequence: Synthetic oligonucleotide
  Antisense strand to SEQ ID NO: 1199682
augcucagggcaaucaugg

SEQ ID NO: 1199684 - RNA, 19 nt, Artificial Sequence
  Description of Artificial Sequence: Synthetic oligonucleotide
  Sense strand starting at position 2436 of SEQ ID NO: 916987
caugauugcccugagcaua

SEQ ID NO: 1199685 - RNA, 19 nt, Artificial Sequence
  Description of Artificial Sequence: Synthetic oligonucleotide
  Antisense strand to SEQ ID NO: 1199684
uaugcucagggcaaucaug

SEQ ID NO: 1199686 - RNA, 19 nt, Artificial Sequence
  Description of Artificial Sequence: Synthetic oligonucleotide
  Sense strand starting at position 2830 of SEQ ID NO: 916987
ccagcuuaccuuuauguuu

SEQ ID NO: 1199687 - RNA, 19 nt, Artificial Sequence
  Description of Artificial Sequence: Synthetic oligonucleotide
  Antisense strand to SEQ ID NO: 1199686
aaacauaaagguaagcugg

SEQ ID NO: 1199688 - RNA, 19 nt, Artificial Sequence
  Description of Artificial Sequence: Synthetic oligonucleotide
  Sense strand starting at position 3054 of SEQ ID NO: 916987
gcagcuguuccagagagga

SEQ ID NO: 1199689 - RNA, 19 nt, Artificial Sequence
  Description of Artificial Sequence: Synthetic oligonucleotide
  Antisense strand to SEQ ID NO: 1199688
uccucucuggaacagcugc

SEQ ID NO: 1199690 - RNA, 19 nt, Artificial Sequence
  Description of Artificial Sequence: Synthetic oligonucleotide
  Sense strand starting at position 3109 of SEQ ID NO: 916987
ggauuucccucauaggguu

SEQ ID NO: 1199691 - RNA, 19 nt, Artificial Sequence
  Description of Artificial Sequence: Synthetic oligonucleotide
  Antisense strand to SEQ ID NO: 1199690
aacccuaugagggaaaucc

SEQ ID NO: 1199692 - RNA, 19 nt, Artificial Sequence
  Description of Artificial Sequence: Synthetic oligonucleotide
  Sense strand starting at position 3270 of SEQ ID NO: 916987
agaaucuucguucaagggu

SEQ ID NO: 1199693 - RNA, 19 nt, Artificial Sequence
  Description of Artificial Sequence: Synthetic oligonucleotide
  Antisense strand to SEQ ID NO: 1199692
acccuugaacgaagauucu

SEQ ID NO: 1199694 - RNA, 19 nt, Artificial Sequence
  Description of Artificial Sequence: Synthetic oligonucleotide
  Sense strand starting at position 3297 of SEQ ID NO: 916987
cagccuuauucugugggaa

SEQ ID NO: 1199695 - RNA, 19 nt, Artificial Sequence
  Description of Artificial Sequence: Synthetic oligonucleotide
  Antisense strand to SEQ ID NO: 1199694
uucccacagaauaaggcug

SEQ ID NO: 1199696 - RNA, 19 nt, Artificial Sequence
  Description of Artificial Sequence: Synthetic oligonucleotide
  Sense strand starting at position 3298 of SEQ ID NO: 916987
agccuuauucugugggaac

SEQ ID NO: 1199697 - RNA, 19 nt, Artificial Sequence
  Description of Artificial Sequence: Synthetic oligonucleotide
  Antisense strand to SEQ ID NO: 1199696
guucccacagaauaaggcu

SEQ ID NO: 1199698 - RNA, 19 nt, Artificial Sequence
  Description of Artificial Sequence: Synthetic oligonucleotide
  Sense strand starting at position 3317 of SEQ ID NO: 916987
uggguagcuguuggaaauu

SEQ ID NO: 1199699 - RNA, 19 nt, Artificial Sequence
  Description of Artificial Sequence: Synthetic oligonucleotide
  Antisense strand to SEQ ID NO: 1199698
aauuuccaacagcuaccca

SEQ ID NO: 1199700 - RNA, 19 nt, Artificial Sequence
  Description of Artificial Sequence: Synthetic oligonucleotide
  Sense strand starting at position 3369 of SEQ ID NO: 916987
guuuaaggagaagguauau

SEQ ID NO: 1199701 - RNA, 19 nt, Artificial Sequence
  Description of Artificial Sequence: Synthetic oligonucleotide
  Antisense strand to SEQ ID NO: 1199700
auauaccuucuccuuaaac

SEQ ID NO: 1199702 - RNA, 19 nt, Artificial Sequence
  Description of Artificial Sequence: Synthetic oligonucleotide
  Sense strand starting at position 3397 of SEQ ID NO: 916987
gggugaagcagcgauugaa

SEQ ID NO: 1199703 - RNA, 19 nt, Artificial Sequence
  Description of Artificial Sequence: Synthetic oligonucleotide
  Antisense strand to SEQ ID NO: 1199702
uucaaucgcugcuucaccc

SEQ ID NO: 1199704 - RNA, 19 nt, Artificial Sequence
  Description of Artificial Sequence: Synthetic oligonucleotide
  Sense strand starting at position 3400 of SEQ ID NO: 916987
ugaagcagcgauugaagau

SEQ ID NO: 1199705 - RNA, 19 nt, Artificial Sequence
  Description of Artificial Sequence: Synthetic oligonucleotide
  Antisense strand to SEQ ID NO: 1199704
aucuucaaucgcugcuuca

SEQ ID NO: 1199706 - RNA, 19 nt, Artificial Sequence
  Description of Artificial Sequence: Synthetic oligonucleotide
  Sense strand starting at position 3407 of SEQ ID NO: 916987
gcgauugaagaugggcaaa

SEQ ID NO: 1199707 - RNA, 19 nt, Artificial Sequence
  Description of Artificial Sequence: Synthetic oligonucleotide
  Antisense strand to SEQ ID NO: 1199706
uuugcccaucuucaaucgc

SEQ ID NO: 1199708 - RNA, 19 nt, Artificial Sequence
  Description of Artificial Sequence: Synthetic oligonucleotide
  Sense strand starting at position 3549 of SEQ ID NO: 916987
gaggcagcccucuaugaau

SEQ ID NO: 1199709 - RNA, 19 nt, Artificial Sequence
  Description of Artificial Sequence: Synthetic oligonucleotide
  Antisense strand to SEQ ID NO: 1199708
auucauagagggcugccuc

SEQ ID NO: 1199710 - RNA, 19 nt, Artificial Sequence
  Description of Artificial Sequence: Synthetic oligonucleotide
  Sense strand starting at position 3610 of SEQ ID NO: 916987
aagcaaugugcaggauaau

SEQ ID NO: 1199711 - RNA, 19 nt, Artificial Sequence
  Description of Artificial Sequence: Synthetic oligonucleotide
  Antisense strand to SEQ ID NO: 1199710
auuauccugcacauugcuu

SEQ ID NO: 1199712 - RNA, 19 nt, Artificial Sequence
  Description of Artificial Sequence: Synthetic oligonucleotide
  Sense strand starting at position 3611 of SEQ ID NO: 916987
agcaaugugcaggauaaua

SEQ ID NO: 1199713 - RNA, 19 nt, Artificial Sequence
  Description of Artificial Sequence: Synthetic oligonucleotide
  Antisense strand to SEQ ID NO: 1199712
uauuauccugcacauugcu

SEQ ID NO: 1199714 - RNA, 19 nt, Artificial Sequence
  Description of Artificial Sequence: Synthetic oligonucleotide
  Sense strand starting at position 3675 of SEQ ID NO: 916987
cuucuacaugcacgacaua

SEQ ID NO: 1199715 - RNA, 19 nt, Artificial Sequence
  Description of Artificial Sequence: Synthetic oligonucleotide
  Antisense strand to SEQ ID NO: 1199714
uaugucgugcauguagaag

SEQ ID NO: 1199716 - RNA, 19 nt, Artificial Sequence
  Description of Artificial Sequence: Synthetic oligonucleotide
  Sense strand starting at position 3678 of SEQ ID NO: 916987
cuacaugcacgacauauau

SEQ ID NO: 1199717 - RNA, 19 nt, Artificial Sequence
  Description of Artificial Sequence: Synthetic oligonucleotide
  Antisense strand to SEQ ID NO: 1199716
auauaugucgugcauguag

SEQ ID NO: 1199718 - RNA, 19 nt, Artificial Sequence
  Description of Artificial Sequence: Synthetic oligonucleotide
  Sense strand starting at position 3689 of SEQ ID NO: 916987
acauauaucugggaggaua

SEQ ID NO: 1199719 - RNA, 19 nt, Artificial Sequence
  Description of Artificial Sequence: Synthetic oligonucleotide
  Antisense strand to SEQ ID NO: 1199718
uauccucccagauauaugu

SEQ ID NO: 1199720 - RNA, 19 nt, Artificial Sequence
  Description of Artificial Sequence: Synthetic oligonucleotide
  Sense strand starting at position 3826 of SEQ ID NO: 916987
uuuauacugugggcauaua

SEQ ID NO: 1199721 - RNA, 19 nt, Artificial Sequence
  Description of Artificial Sequence: Synthetic oligonucleotide
  Antisense strand to SEQ ID NO: 1199720
uauaugcccacaguauaaa

SEQ ID NO: 1199722 - RNA, 19 nt, Artificial Sequence
  Description of Artificial Sequence: Synthetic oligonucleotide
  Sense strand starting at position 3827 of SEQ ID NO: 916987
uuauacugugggcauauau

SEQ ID NO: 1199723 - RNA, 19 nt, Artificial Sequence
  Description of Artificial Sequence: Synthetic oligonucleotide
  Antisense strand to SEQ ID NO: 1199722
auauaugcccacaguauaa

SEQ ID NO: 1199724 - RNA, 19 nt, Artificial Sequence
  Description of Artificial Sequence: Synthetic oligonucleotide
  Sense strand starting at position 145 of SEQ ID NO: 916988
gagcgagacuugguccaaa

SEQ ID NO: 1199725 - RNA, 19 nt, Artificial Sequence
  Description of Artificial Sequence: Synthetic oligonucleotide
  Antisense strand to SEQ ID NO: 1199724
uuuggaccaagucucgcuc

SEQ ID NO: 1199726 - RNA, 19 nt, Artificial Sequence
  Description of Artificial Sequence: Synthetic oligonucleotide
  Sense strand starting at position 211 of SEQ ID NO: 916988
gcuucacuucgguaaguga

SEQ ID NO: 1199727 - RNA, 19 nt, Artificial Sequence
  Description of Artificial Sequence: Synthetic oligonucleotide
  Antisense strand to SEQ ID NO: 1199726
ucacuuaccgaagugaagc

SEQ ID NO: 1199728 - RNA, 19 nt, Artificial Sequence
  Description of Artificial Sequence: Synthetic oligonucleotide
  Sense strand starting at position 214 of SEQ ID NO: 916988
ucacuucgguaagugauaa

SEQ ID NO: 1199729 - RNA, 19 nt, Artificial Sequence
  Description of Artificial Sequence: Synthetic oligonucleotide
  Antisense strand to SEQ ID NO: 1199728
uuaucacuuaccgaaguga

SEQ ID NO: 1199730 - RNA, 19 nt, Artificial Sequence
  Description of Artificial Sequence: Synthetic oligonucleotide
  Sense strand starting at position 364 of SEQ ID NO: 916988
ccuuaaauguggucucuaa

SEQ ID NO: 1199731 - RNA, 19 nt, Artificial Sequence
  Description of Artificial Sequence: Synthetic oligonucleotide
  Antisense strand to SEQ ID NO: 1199730
uuagagaccacauuuaagg

SEQ ID NO: 1199732 - RNA, 19 nt, Artificial Sequence
  Description of Artificial Sequence: Synthetic oligonucleotide
  Sense strand starting at position 375 of SEQ ID NO: 916988
gucucuaacuggccuaaua

SEQ ID NO: 1199733 - RNA, 19 nt, Artificial Sequence
  Description of Artificial Sequence: Synthetic oligonucleotide
  Antisense strand to SEQ ID NO: 1199732
uauuaggccaguuagagac

SEQ ID NO: 1199734 - RNA, 19 nt, Artificial Sequence
  Description of Artificial Sequence: Synthetic oligonucleotide
  Sense strand starting at position 467 of SEQ ID NO: 916988
cugcaucccugguugacau

SEQ ID NO: 1199735 - RNA, 19 nt, Artificial Sequence
  Description of Artificial Sequence: Synthetic oligonucleotide
  Antisense strand to SEQ ID NO: 1199734
augucaaccagggaugcag

SEQ ID NO: 1199736 - RNA, 19 nt, Artificial Sequence
  Description of Artificial Sequence: Synthetic oligonucleotide
  Sense strand starting at position 477 of SEQ ID NO: 916988
gguugacaucuugauugca

SEQ ID NO: 1199737 - RNA, 19 nt, Artificial Sequence
  Description of Artificial Sequence: Synthetic oligonucleotide
  Antisense strand to SEQ ID NO: 1199736
ugcaaucaagaugucaacc

SEQ ID NO: 1199738 - RNA, 19 nt, Artificial Sequence
  Description of Artificial Sequence: Synthetic oligonucleotide
  Sense strand starting at position 479 of SEQ ID NO: 916988
uugacaucuugauugcaac

SEQ ID NO: 1199739 - RNA, 19 nt, Artificial Sequence
  Description of Artificial Sequence: Synthetic oligonucleotide
  Antisense strand to SEQ ID NO: 1199738
guugcaaucaagaugucaa

SEQ ID NO: 1199740 - RNA, 19 nt, Artificial Sequence
  Description of Artificial Sequence: Synthetic oligonucleotide
  Sense strand starting at position 657 of SEQ ID NO: 916988
ggaauucugcuuuaucuga

SEQ ID NO: 1199741 - RNA, 19 nt, Artificial Sequence
  Description of Artificial Sequence: Synthetic oligonucleotide
  Antisense strand to SEQ ID NO: 1199740
ucagauaaagcagaauucc

SEQ ID NO: 1199742 - RNA, 19 nt, Artificial Sequence
  Description of Artificial Sequence: Synthetic oligonucleotide
  Sense strand starting at position 801 of SEQ ID NO: 916988
cuugcauaacuucgagacu

SEQ ID NO: 1199743 - RNA, 19 nt, Artificial Sequence
  Description of Artificial Sequence: Synthetic oligonucleotide
  Antisense strand to SEQ ID NO: 1199742
agucucgaaguuaugcaag

SEQ ID NO: 1199744 - RNA, 19 nt, Artificial Sequence
  Description of Artificial Sequence: Synthetic oligonucleotide
  Sense strand starting at position 804 of SEQ ID NO: 916988
gcauaacuucgagacugua

SEQ ID NO: 1199745 - RNA, 19 nt, Artificial Sequence
  Description of Artificial Sequence: Synthetic oligonucleotide
  Antisense strand to SEQ ID NO: 1199744
uacagucucgaaguuaugc

SEQ ID NO: 1199746 - RNA, 19 nt, Artificial Sequence
  Description of Artificial Sequence: Synthetic oligonucleotide
  Sense strand starting at position 807 of SEQ ID NO: 916988
uaacuucgagacuguaaua

SEQ ID NO: 1199747 - RNA, 19 nt, Artificial Sequence
  Description of Artificial Sequence: Synthetic oligonucleotide
  Antisense strand to SEQ ID NO: 1199746
uauuacagucucgaaguua

SEQ ID NO: 1199748 - RNA, 19 nt, Artificial Sequence
  Description of Artificial Sequence: Synthetic oligonucleotide
  Sense strand starting at position 820 of SEQ ID NO: 916988
guaauaguugaucgcuaaa

SEQ ID NO: 1199749 - RNA, 19 nt, Artificial Sequence
  Description of Artificial Sequence: Synthetic oligonucleotide
  Antisense strand to SEQ ID NO: 1199748
uuuagcgaucaacuauuac

SEQ ID NO: 1199750 - RNA, 19 nt, Artificial Sequence
  Description of Artificial Sequence: Synthetic oligonucleotide
  Sense strand starting at position 822 of SEQ ID NO: 916988
aauaguugaucgcuaaauu

SEQ ID NO: 1199751 - RNA, 19 nt, Artificial Sequence
  Description of Artificial Sequence: Synthetic oligonucleotide
  Antisense strand to SEQ ID NO: 1199750
aauuuagcgaucaacuauu

SEQ ID NO: 1199752 - RNA, 19 nt, Artificial Sequence
  Description of Artificial Sequence: Synthetic oligonucleotide
  Sense strand starting at position 823 of SEQ ID NO: 916988
auaguugaucgcuaaauuc

SEQ ID NO: 1199753 - RNA, 19 nt, Artificial Sequence
  Description of Artificial Sequence: Synthetic oligonucleotide
  Antisense strand to SEQ ID NO: 1199752
gaauuuagcgaucaacuau

SEQ ID NO: 1199754 - RNA, 19 nt, Artificial Sequence
  Description of Artificial Sequence: Synthetic oligonucleotide
  Sense strand starting at position 841 of SEQ ID NO: 916988
cuuagcuaaguguaagagu

SEQ ID NO: 1199755 - RNA, 19 nt, Artificial Sequence
  Description of Artificial Sequence: Synthetic oligonucleotide
  Antisense strand to SEQ ID NO: 1199754
acucuuacacuuagcuaag

SEQ ID NO: 1199756 - RNA, 19 nt, Artificial Sequence
  Description of Artificial Sequence: Synthetic oligonucleotide
  Sense strand starting at position 969 of SEQ ID NO: 916988
augcuagcaggugaauuaa

SEQ ID NO: 1199757 - RNA, 19 nt, Artificial Sequence
  Description of Artificial Sequence: Synthetic oligonucleotide
  Antisense strand to SEQ ID NO: 1199756
uuaauucaccugcuagcau

SEQ ID NO: 1199758 - RNA, 19 nt, Artificial Sequence
  Description of Artificial Sequence: Synthetic oligonucleotide
  Sense strand starting at position 1043 of SEQ ID NO: 916988
agggacugcugguuucuua

SEQ ID NO: 1199759 - RNA, 19 nt, Artificial Sequence
  Description of Artificial Sequence: Synthetic oligonucleotide
  Antisense strand to SEQ ID NO: 1199758
uaagaaaccagcagucccu

SEQ ID NO: 1199760 - RNA, 19 nt, Artificial Sequence
  Description of Artificial Sequence: Synthetic oligonucleotide
  Sense strand starting at position 1047 of SEQ ID NO: 916988
acugcugguuucuuaaacu

SEQ ID NO: 1199761 - RNA, 19 nt, Artificial Sequence
  Description of Artificial Sequence: Synthetic oligonucleotide
  Antisense strand to SEQ ID NO: 1199760
aguuuaagaaaccagcagu

SEQ ID NO: 1199762 - RNA, 19 nt, Artificial Sequence
  Description of Artificial Sequence: Synthetic oligonucleotide
  Sense strand starting at position 1063 of SEQ ID NO: 916988
acuccugucuucuccugau

SEQ ID NO: 1199763 - RNA, 19 nt, Artificial Sequence
  Description of Artificial Sequence: Synthetic oligonucleotide
  Antisense strand to SEQ ID NO: 1199762
aucaggagaagacaggagu

SEQ ID NO: 1199764 - RNA, 19 nt, Artificial Sequence
  Description of Artificial Sequence: Synthetic oligonucleotide
  Sense strand starting at position 1067 of SEQ ID NO: 916988
cugucuucuccugauacuu

SEQ ID NO: 1199765 - RNA, 19 nt, Artificial Sequence
  Description of Artificial Sequence: Synthetic oligonucleotide
  Antisense strand to SEQ ID NO: 1199764
aaguaucaggagaagacag

SEQ ID NO: 1199766 - RNA, 19 nt, Artificial Sequence
  Description of Artificial Sequence: Synthetic oligonucleotide
  Sense strand starting at position 1124 of SEQ ID NO: 916988
cccaucucuccuuggcaga

SEQ ID NO: 1199767 - RNA, 19 nt, Artificial Sequence
  Description of Artificial Sequence: Synthetic oligonucleotide
  Antisense strand to SEQ ID NO: 1199766
ucugccaaggagagauggg

SEQ ID NO: 1199768 - RNA, 19 nt, Artificial Sequence
  Description of Artificial Sequence: Synthetic oligonucleotide
  Sense strand starting at position 1125 of SEQ ID NO: 916988
ccaucucuccuuggcagaa

SEQ ID NO: 1199769 - RNA, 19 nt, Artificial Sequence
  Description of Artificial Sequence: Synthetic oligonucleotide
  Antisense strand to SEQ ID NO: 1199768
uucugccaaggagagaugg

SEQ ID NO: 1199770 - RNA, 19 nt, Artificial Sequence
  Description of Artificial Sequence: Synthetic oligonucleotide
  Sense strand starting at position 1181 of SEQ ID NO: 916988
accuuaagguugcuucuau

SEQ ID NO: 1199771 - RNA, 19 nt, Artificial Sequence
  Description of Artificial Sequence: Synthetic oligonucleotide
  Antisense strand to SEQ ID NO: 1199770
auagaagcaaccuuaaggu

SEQ ID NO: 1199772 - RNA, 19 nt, Artificial Sequence
  Description of Artificial Sequence: Synthetic oligonucleotide
  Sense strand starting at position 1227 of SEQ ID NO: 916988
ccuagcacucaauagguuu

SEQ ID NO: 1199773 - RNA, 19 nt, Artificial Sequence
  Description of Artificial Sequence: Synthetic oligonucleotide
  Antisense strand to SEQ ID NO: 1199772
aaaccuauugagugcuagg

SEQ ID NO: 1199774 - RNA, 19 nt, Artificial Sequence
  Description of Artificial Sequence: Synthetic oligonucleotide
  Sense strand starting at position 1301 of SEQ ID NO: 916988
agcauuaauccguaacacg

SEQ ID NO: 1199775 - RNA, 19 nt, Artificial Sequence
  Description of Artificial Sequence: Synthetic oligonucleotide
  Antisense strand to SEQ ID NO: 1199774
cguguuacggauuaaugcu

SEQ ID NO: 1199776 - RNA, 19 nt, Artificial Sequence
  Description of Artificial Sequence: Synthetic oligonucleotide
  Sense strand starting at position 1358 of SEQ ID NO: 916988
agcuaacugugacugagaa

SEQ ID NO: 1199777 - RNA, 19 nt, Artificial Sequence
  Description of Artificial Sequence: Synthetic oligonucleotide
  Antisense strand to SEQ ID NO: 1199776
uucucagucacaguuagcu

SEQ ID NO: 1199778 - RNA, 19 nt, Artificial Sequence
  Description of Artificial Sequence: Synthetic oligonucleotide
  Sense strand starting at position 1359 of SEQ ID NO: 916988
gcuaacugugacugagaag

SEQ ID NO: 1199779 - RNA, 19 nt, Artificial Sequence
  Description of Artificial Sequence: Synthetic oligonucleotide
  Antisense strand to SEQ ID NO: 1199778
cuucucagucacaguuagc

SEQ ID NO: 1199780 - RNA, 19 nt, Artificial Sequence
  Description of Artificial Sequence: Synthetic oligonucleotide
  Sense strand starting at position 1426 of SEQ ID NO: 916988
gcgagagguuccaacagga

SEQ ID NO: 1199781 - RNA, 19 nt, Artificial Sequence
  Description of Artificial Sequence: Synthetic oligonucleotide
  Antisense strand to SEQ ID NO: 1199780
uccuguuggaaccucucgc

SEQ ID NO: 1199782 - RNA, 19 nt, Artificial Sequence
  Description of Artificial Sequence: Synthetic oligonucleotide
  Sense strand starting at position 1446 of SEQ ID NO: 916988
cccgucguucaaggagaaa

SEQ ID NO: 1199783 - RNA, 19 nt, Artificial Sequence
  Description of Artificial Sequence: Synthetic oligonucleotide
  Antisense strand to SEQ ID NO: 1199782
uuucuccuugaacgacggg

SEQ ID NO: 1199784 - RNA, 19 nt, Artificial Sequence
  Description of Artificial Sequence: Synthetic oligonucleotide
  Sense strand starting at position 2237 of SEQ ID NO: 916988
cccucuuaggauuguccaa

SEQ ID NO: 1199785 - RNA, 19 nt, Artificial Sequence
  Description of Artificial Sequence: Synthetic oligonucleotide
  Antisense strand to SEQ ID NO: 1199784
uuggacaauccuaagaggg

SEQ ID NO: 1199786 - RNA, 19 nt, Artificial Sequence
  Description of Artificial Sequence: Synthetic oligonucleotide
  Sense strand starting at position 2239 of SEQ ID NO: 916988
cucuuaggauuguccaaga

SEQ ID NO: 1199787 - RNA, 19 nt, Artificial Sequence
  Description of Artificial Sequence: Synthetic oligonucleotide
  Antisense strand to SEQ ID NO: 1199786
ucuuggacaauccuaagag

SEQ ID NO: 1199788 - RNA, 19 nt, Artificial Sequence
  Description of Artificial Sequence: Synthetic oligonucleotide
  Sense strand starting at position 2969 of SEQ ID NO: 916988
ggguguuuauuuguuuguu

SEQ ID NO: 1199789 - RNA, 19 nt, Artificial Sequence
  Description of Artificial Sequence: Synthetic oligonucleotide
  Antisense strand to SEQ ID NO: 1199788
aacaaacaaauaaacaccc

SEQ ID NO: 1199790 - RNA, 19 nt, Artificial Sequence
  Description of Artificial Sequence: Synthetic oligonucleotide
  Sense strand starting at position 2977 of SEQ ID NO: 916988
auuuguuuguuugcuuaga

SEQ ID NO: 1199791 - RNA, 19 nt, Artificial Sequence
  Description of Artificial Sequence: Synthetic oligonucleotide
  Antisense strand to SEQ ID NO: 1199790
ucuaagcaaacaaacaaau

SEQ ID NO: 1199792 - RNA, 19 nt, Artificial Sequence
  Description of Artificial Sequence: Synthetic oligonucleotide
  Sense strand starting at position 3253 of SEQ ID NO: 916988
uaucuuuaccuagguggua

SEQ ID NO: 1199793 - RNA, 19 nt, Artificial Sequence
  Description of Artificial Sequence: Synthetic oligonucleotide
  Antisense strand to SEQ ID NO: 1199792
uaccaccuagguaaagaua

SEQ ID NO: 1199794 - RNA, 19 nt, Artificial Sequence
  Description of Artificial Sequence: Synthetic oligonucleotide
  Sense strand starting at position 3268 of SEQ ID NO: 916988
gguagauacguggaugucu

SEQ ID NO: 1199795 - RNA, 19 nt, Artificial Sequence
  Description of Artificial Sequence: Synthetic oligonucleotide
  Antisense strand to SEQ ID NO: 1199794
agacauccacguaucuacc

SEQ ID NO: 1199796 - RNA, 19 nt, Artificial Sequence
  Description of Artificial Sequence: Synthetic oligonucleotide
  Sense strand starting at position 3273 of SEQ ID NO: 916988
auacguggaugucuacauu

SEQ ID NO: 1199797 - RNA, 19 nt, Artificial Sequence
  Description of Artificial Sequence: Synthetic oligonucleotide
  Antisense strand to SEQ ID NO: 1199796
aauguagacauccacguau

SEQ ID NO: 1199798 - RNA, 19 nt, Artificial Sequence
  Description of Artificial Sequence: Synthetic oligonucleotide
  Sense strand starting at position 3886 of SEQ ID NO: 916988
cucuguuuacaaugcagau

SEQ ID NO: 1199799 - RNA, 19 nt, Artificial Sequence
  Description of Artificial Sequence: Synthetic oligonucleotide
  Antisense strand to SEQ ID NO: 1199798
aucugcauuguaaacagag

SEQ ID NO: 1199800 - RNA, 19 nt, Artificial Sequence
  Description of Artificial Sequence: Synthetic oligonucleotide
  Sense strand starting at position 3908 of SEQ ID NO: 916988
guccuagugaauuacuguu

SEQ ID NO: 1199801 - RNA, 19 nt, Artificial Sequence
  Description of Artificial Sequence: Synthetic oligonucleotide
  Antisense strand to SEQ ID NO: 1199800
aacaguaauucacuaggac

SEQ ID NO: 1199802 - RNA, 19 nt, Artificial Sequence
  Description of Artificial Sequence: Synthetic oligonucleotide
  Sense strand starting at position 3910 of SEQ ID NO: 916988
ccuagugaauuacuguuau

SEQ ID NO: 1199803 - RNA, 19 nt, Artificial Sequence
  Description of Artificial Sequence: Synthetic oligonucleotide
  Antisense strand to SEQ ID NO: 1199802
auaacaguaauucacuagg

SEQ ID NO: 1199804 - RNA, 19 nt, Artificial Sequence
  Description of Artificial Sequence: Synthetic oligonucleotide
  Sense strand starting at position 54 of SEQ ID NO: 916989
gagauaucuugcuugggca

SEQ ID NO: 1199805 - RNA, 19 nt, Artificial Sequence
  Description of Artificial Sequence: Synthetic oligonucleotide
  Antisense strand to SEQ ID NO: 1199804
ugcccaagcaagauaucuc

SEQ ID NO: 1199806 - RNA, 19 nt, Artificial Sequence
  Description of Artificial Sequence: Synthetic oligonucleotide
  Sense strand starting at position 55 of SEQ ID NO: 916989
agauaucuugcuugggcaa

SEQ ID NO: 1199807 - RNA, 19 nt, Artificial Sequence
  Description of Artificial Sequence: Synthetic oligonucleotide
  Antisense strand to SEQ ID NO: 1199806
uugcccaagcaagauaucu

SEQ ID NO: 1199808 - RNA, 19 nt, Artificial Sequence
  Description of Artificial Sequence: Synthetic oligonucleotide
  Sense strand starting at position 56 of SEQ ID NO: 916989
gauaucuugcuugggcaaa

SEQ ID NO: 1199809 - RNA, 19 nt, Artificial Sequence
  Description of Artificial Sequence: Synthetic oligonucleotide
  Antisense strand to SEQ ID NO: 1199808
uuugcccaagcaagauauc

SEQ ID NO: 1199810 - RNA, 19 nt, Artificial Sequence
  Description of Artificial Sequence: Synthetic oligonucleotide
  Sense strand starting at position 100 of SEQ ID NO: 916989
auaagaacauguguaguuu

SEQ ID NO: 1199811 - RNA, 19 nt, Artificial Sequence
  Description of Artificial Sequence: Synthetic oligonucleotide
  Antisense strand to SEQ ID NO: 1199810
aaacuacacauguucuuau

SEQ ID NO: 1199812 - RNA, 19 nt, Artificial Sequence
  Description of Artificial Sequence: Synthetic oligonucleotide
  Sense strand starting at position 149 of SEQ ID NO: 916989
gaaagagauuagggacaga

SEQ ID NO: 1199813 - RNA, 19 nt, Artificial Sequence
  Description of Artificial Sequence: Synthetic oligonucleotide
  Antisense strand to SEQ ID NO: 1199812
ucugucccuaaucucuuuc

SEQ ID NO: 1199814 - RNA, 19 nt, Artificial Sequence
  Description of Artificial Sequence: Synthetic oligonucleotide
  Sense strand starting at position 160 of SEQ ID NO: 916989
gggacagaaguagguauua

SEQ ID NO: 1199815 - RNA, 19 nt, Artificial Sequence
  Description of Artificial Sequence: Synthetic oligonucleotide
  Antisense strand to SEQ ID NO: 1199814
uaauaccuacuucuguccc

SEQ ID NO: 1199816 - RNA, 19 nt, Artificial Sequence
  Description of Artificial Sequence: Synthetic oligonucleotide
  Sense strand starting at position 170 of SEQ ID NO: 916989
uagguauuaacaggugaga

SEQ ID NO: 1199817 - RNA, 19 nt, Artificial Sequence
  Description of Artificial Sequence: Synthetic oligonucleotide
  Antisense strand to SEQ ID NO: 1199816
ucucaccuguuaauaccua

SEQ ID NO: 1199818 - RNA, 19 nt, Artificial Sequence
  Description of Artificial Sequence: Synthetic oligonucleotide
  Sense strand starting at position 172 of SEQ ID NO: 916989
gguauuaacaggugagaag

SEQ ID NO: 1199819 - RNA, 19 nt, Artificial Sequence
  Description of Artificial Sequence: Synthetic oligonucleotide
  Antisense strand to SEQ ID NO: 1199818
cuucucaccuguuaauacc

SEQ ID NO: 1199820 - RNA, 19 nt, Artificial Sequence
  Description of Artificial Sequence: Synthetic oligonucleotide
  Sense strand starting at position 464 of SEQ ID NO: 916989
aggguagugauguggaagu

SEQ ID NO: 1199821 - RNA, 19 nt, Artificial Sequence
  Description of Artificial Sequence: Synthetic oligonucleotide
  Antisense strand to SEQ ID NO: 1199820
acuuccacaucacuacccu

SEQ ID NO: 1199822 - RNA, 19 nt, Artificial Sequence
  Description of Artificial Sequence: Synthetic oligonucleotide
  Sense strand starting at position 525 of SEQ ID NO: 916989
ggcagagucgucgaaucuc

SEQ ID NO: 1199823 - RNA, 19 nt, Artificial Sequence
  Description of Artificial Sequence: Synthetic oligonucleotide
  Antisense strand to SEQ ID NO: 1199822
gagauucgacgacucugcc

SEQ ID NO: 1199824 - RNA, 19 nt, Artificial Sequence
  Description of Artificial Sequence: Synthetic oligonucleotide
  Sense strand starting at position 621 of SEQ ID NO: 916989
uucugugacucuccagcua

SEQ ID NO: 1199825 - RNA, 19 nt, Artificial Sequence
  Description of Artificial Sequence: Synthetic oligonucleotide
  Antisense strand to SEQ ID NO: 1199824
uagcuggagagucacagaa

SEQ ID NO: 1199826 - RNA, 19 nt, Artificial Sequence
  Description of Artificial Sequence: Synthetic oligonucleotide
  Sense strand starting at position 649 of SEQ ID NO: 916989
agacuuucugagggccaau

SEQ ID NO: 1199827 - RNA, 19 nt, Artificial Sequence
  Description of Artificial Sequence: Synthetic oligonucleotide
  Antisense strand to SEQ ID NO: 1199826
auuggcccucagaaagucu

SEQ ID NO: 1199828 - RNA, 19 nt, Artificial Sequence
  Description of Artificial Sequence: Synthetic oligonucleotide
  Sense strand starting at position 676 of SEQ ID NO: 916989
aguaauagaugauccugua

SEQ ID NO: 1199829 - RNA, 19 nt, Artificial Sequence
  Description of Artificial Sequence: Synthetic oligonucleotide
  Antisense strand to SEQ ID NO: 1199828
uacaggaucaucuauuacu

SEQ ID NO: 1199830 - RNA, 19 nt, Artificial Sequence
  Description of Artificial Sequence: Synthetic oligonucleotide
  Sense strand starting at position 814 of SEQ ID NO: 916989
ugucccaauccuugugaca

SEQ ID NO: 1199831 - RNA, 19 nt, Artificial Sequence
  Description of Artificial Sequence: Synthetic oligonucleotide
  Antisense strand to SEQ ID NO: 1199830
ugucacaaggauugggaca

SEQ ID NO: 1199832 - RNA, 19 nt, Artificial Sequence
  Description of Artificial Sequence: Synthetic oligonucleotide
  Sense strand starting at position 823 of SEQ ID NO: 916989
ccuugugacagcgauaaag

SEQ ID NO: 1199833 - RNA, 19 nt, Artificial Sequence
  Description of Artificial Sequence: Synthetic oligonucleotide
  Antisense strand to SEQ ID NO: 1199832
cuuuaucgcugucacaagg

SEQ ID NO: 1199834 - RNA, 19 nt, Artificial Sequence
  Description of Artificial Sequence: Synthetic oligonucleotide
  Sense strand starting at position 825 of SEQ ID NO: 916989
uugugacagcgauaaagaa

SEQ ID NO: 1199835 - RNA, 19 nt, Artificial Sequence
  Description of Artificial Sequence: Synthetic oligonucleotide
  Antisense strand to SEQ ID NO: 1199834
uucuuuaucgcugucacaa

SEQ ID NO: 1199836 - RNA, 19 nt, Artificial Sequence
  Description of Artificial Sequence: Synthetic oligonucleotide
  Sense strand starting at position 833 of SEQ ID NO: 916989
gcgauaaagaaaugugccu

SEQ ID NO: 1199837 - RNA, 19 nt, Artificial Sequence
  Description of Artificial Sequence: Synthetic oligonucleotide
  Antisense strand to SEQ ID NO: 1199836
aggcacauuucuuuaucgc

SEQ ID NO: 1199838 - RNA, 19 nt, Artificial Sequence
  Description of Artificial Sequence: Synthetic oligonucleotide
  Sense strand starting at position 838 of SEQ ID NO: 916989
aaagaaaugugccugucaa

SEQ ID NO: 1199839 - RNA, 19 nt, Artificial Sequence
  Description of Artificial Sequence: Synthetic oligonucleotide
  Antisense strand to SEQ ID NO: 1199838
uugacaggcacauuucuuu

SEQ ID NO: 1199840 - RNA, 19 nt, Artificial Sequence
  Description of Artificial Sequence: Synthetic oligonucleotide
  Sense strand starting at position 839 of SEQ ID NO: 916989
aagaaaugugccugucaac

SEQ ID NO: 1199841 - RNA, 19 nt, Artificial Sequence
  Description of Artificial Sequence: Synthetic oligonucleotide
  Antisense strand to SEQ ID NO: 1199840
guugacaggcacauuucuu

SEQ ID NO: 1199842 - RNA, 19 nt, Artificial Sequence
  Description of Artificial Sequence: Synthetic oligonucleotide
  Sense strand starting at position 873 of SEQ ID NO: 916989
gagcgaacugaauguucca

SEQ ID NO: 1199843 - RNA, 19 nt, Artificial Sequence
  Description of Artificial Sequence: Synthetic oligonucleotide
  Antisense strand to SEQ ID NO: 1199842
uggaacauucaguucgcuc

SEQ ID NO: 1199844 - RNA, 19 nt, Artificial Sequence
  Description of Artificial Sequence: Synthetic oligonucleotide
  Sense strand starting at position 978 of SEQ ID NO: 916989
aguguauuaagucaguuga

SEQ ID NO: 1199845 - RNA, 19 nt, Artificial Sequence
  Description of Artificial Sequence: Synthetic oligonucleotide
  Antisense strand to SEQ ID NO: 1199844
ucaacugacuuaauacacu

SEQ ID NO: 1199846 - RNA, 19 nt, Artificial Sequence
  Description of Artificial Sequence: Synthetic oligonucleotide
  Sense strand starting at position 1011 of SEQ ID NO: 916989
agggcacugucucuauuau

SEQ ID NO: 1199847 - RNA, 19 nt, Artificial Sequence
  Description of Artificial Sequence: Synthetic oligonucleotide
  Antisense strand to SEQ ID NO: 1199846
auaauagagacagugcccu

SEQ ID NO: 1199848 - RNA, 19 nt, Artificial Sequence
  Description of Artificial Sequence: Synthetic oligonucleotide
  Sense strand starting at position 1012 of SEQ ID NO: 916989
gggcacugucucuauuaug

SEQ ID NO: 1199849 - RNA, 19 nt, Artificial Sequence
  Description of Artificial Sequence: Synthetic oligonucleotide
  Antisense strand to SEQ ID NO: 1199848
cauaauagagacagugccc

SEQ ID NO: 1199850 - RNA, 19 nt, Artificial Sequence
  Description of Artificial Sequence: Synthetic oligonucleotide
  Sense strand starting at position 1029 of SEQ ID NO: 916989
ugguauuacugccuagaag

SEQ ID NO: 1199851 - RNA, 19 nt, Artificial Sequence
  Description of Artificial Sequence: Synthetic oligonucleotide
  Antisense strand to SEQ ID NO: 1199850
cuucuaggcaguaauacca

SEQ ID NO: 1199852 - RNA, 19 nt, Artificial Sequence
  Description of Artificial Sequence: Synthetic oligonucleotide
  Sense strand starting at position 1030 of SEQ ID NO: 916989
gguauuacugccuagaaga

SEQ ID NO: 1199853 - RNA, 19 nt, Artificial Sequence
  Description of Artificial Sequence: Synthetic oligonucleotide
  Antisense strand to SEQ ID NO: 1199852
ucuucuaggcaguaauacc

SEQ ID NO: 1199854 - RNA, 19 nt, Artificial Sequence
  Description of Artificial Sequence: Synthetic oligonucleotide
  Sense strand starting at position 1049 of SEQ ID NO: 916989
aaaguugucugggcagaca

SEQ ID NO: 1199855 - RNA, 19 nt, Artificial Sequence
  Description of Artificial Sequence: Synthetic oligonucleotide
  Antisense strand to SEQ ID NO: 1199854
ugucugcccagacaacuuu

SEQ ID NO: 1199856 - RNA, 19 nt, Artificial Sequence
  Description of Artificial Sequence: Synthetic oligonucleotide
  Sense strand starting at position 1101 of SEQ ID NO: 916989
agggaaucaucccuccaug

SEQ ID NO: 1199857 - RNA, 19 nt, Artificial Sequence
  Description of Artificial Sequence: Synthetic oligonucleotide
  Antisense strand to SEQ ID NO: 1199856
cauggagggaugauucccu

SEQ ID NO: 1199858 - RNA, 19 nt, Artificial Sequence
  Description of Artificial Sequence: Synthetic oligonucleotide
  Sense strand starting at position 1387 of SEQ ID NO: 916989
acagaaaucgcuuguuucu

SEQ ID NO: 1199859 - RNA, 19 nt, Artificial Sequence
  Description of Artificial Sequence: Synthetic oligonucleotide
  Antisense strand to SEQ ID NO: 1199858
agaaacaagcgauuucugu

SEQ ID NO: 1199860 - RNA, 19 nt, Artificial Sequence
  Description of Artificial Sequence: Synthetic oligonucleotide
  Sense strand starting at position 1389 of SEQ ID NO: 916989
agaaaucgcuuguuucuau

SEQ ID NO: 1199861 - RNA, 19 nt, Artificial Sequence
  Description of Artificial Sequence: Synthetic oligonucleotide
  Antisense strand to SEQ ID NO: 1199860
auagaaacaagcgauuucu

SEQ ID NO: 1199862 - RNA, 19 nt, Artificial Sequence
  Description of Artificial Sequence: Synthetic oligonucleotide
  Sense strand starting at position 1390 of SEQ ID NO: 916989
gaaaucgcuuguuucuaua

SEQ ID NO: 1199863 - RNA, 19 nt, Artificial Sequence
  Description of Artificial Sequence: Synthetic oligonucleotide
  Antisense strand to SEQ ID NO: 1199862
uauagaaacaagcgauuuc

SEQ ID NO: 1199864 - RNA, 19 nt, Artificial Sequence
  Description of Artificial Sequence: Synthetic oligonucleotide
  Sense strand starting at position 1455 of SEQ ID NO: 916989
ucccaacaccuguacgauu

SEQ ID NO: 1199865 - RNA, 19 nt, Artificial Sequence
  Description of Artificial Sequence: Synthetic oligonucleotide
  Antisense strand to SEQ ID NO: 1199864
aaucguacagguguuggga

SEQ ID NO: 1199866 - RNA, 19 nt, Artificial Sequence
  Description of Artificial Sequence: Synthetic oligonucleotide
  Sense strand starting at position 2145 of SEQ ID NO: 916989
ucugcuguucgcuagauag

SEQ ID NO: 1199867 - RNA, 19 nt, Artificial Sequence
  Description of Artificial Sequence: Synthetic oligonucleotide
  Antisense strand to SEQ ID NO: 1199866
cuaucuagcgaacagcaga

SEQ ID NO: 1199868 - RNA, 19 nt, Artificial Sequence
  Description of Artificial Sequence: Synthetic oligonucleotide
  Sense strand starting at position 2313 of SEQ ID NO: 916989
cggauaaacugccuuugca

SEQ ID NO: 1199869 - RNA, 19 nt, Artificial Sequence
  Description of Artificial Sequence: Synthetic oligonucleotide
  Antisense strand to SEQ ID NO: 1199868
ugcaaaggcaguuuauccg

SEQ ID NO: 1199870 - RNA, 19 nt, Artificial Sequence
  Description of Artificial Sequence: Synthetic oligonucleotide
  Sense strand starting at position 2622 of SEQ ID NO: 916989
ucccuauugcuccaaggga

SEQ ID NO: 1199871 - RNA, 19 nt, Artificial Sequence
  Description of Artificial Sequence: Synthetic oligonucleotide
  Antisense strand to SEQ ID NO: 1199870
ucccuuggagcaauaggga

SEQ ID NO: 1199872 - RNA, 19 nt, Artificial Sequence
  Description of Artificial Sequence: Synthetic oligonucleotide
  Sense strand starting at position 2988 of SEQ ID NO: 916989
augaaucagcucugggcaa

SEQ ID NO: 1199873 - RNA, 19 nt, Artificial Sequence
  Description of Artificial Sequence: Synthetic oligonucleotide
  Antisense strand to SEQ ID NO: 1199872
uugcccagagcugauucau

SEQ ID NO: 1199874 - RNA, 19 nt, Artificial Sequence
  Description of Artificial Sequence: Synthetic oligonucleotide
  Sense strand starting at position 3014 of SEQ ID NO: 916989
ggagaacccguccggcaau

SEQ ID NO: 1199875 - RNA, 19 nt, Artificial Sequence
  Description of Artificial Sequence: Synthetic oligonucleotide
  Antisense strand to SEQ ID NO: 1199874
auugccggacggguucucc

SEQ ID NO: 1199876 - RNA, 19 nt, Artificial Sequence
  Description of Artificial Sequence: Synthetic oligonucleotide
  Sense strand starting at position 3017 of SEQ ID NO: 916989
gaacccguccggcaauuau

SEQ ID NO: 1199877 - RNA, 19 nt, Artificial Sequence
  Description of Artificial Sequence: Synthetic oligonucleotide
  Antisense strand to SEQ ID NO: 1199876
auaauugccggacggguuc

SEQ ID NO: 1199878 - RNA, 19 nt, Artificial Sequence
  Description of Artificial Sequence: Synthetic oligonucleotide
  Sense strand starting at position 3242 of SEQ ID NO: 916989
ggaguagauucauucggua

SEQ ID NO: 1199879 - RNA, 19 nt, Artificial Sequence
  Description of Artificial Sequence: Synthetic oligonucleotide
  Antisense strand to SEQ ID NO: 1199878
uaccgaaugaaucuacucc

SEQ ID NO: 1199880 - RNA, 19 nt, Artificial Sequence
  Description of Artificial Sequence: Synthetic oligonucleotide
  Sense strand starting at position 3764 of SEQ ID NO: 916989
aggagauauucugaaaugg

SEQ ID NO: 1199881 - RNA, 19 nt, Artificial Sequence
  Description of Artificial Sequence: Synthetic oligonucleotide
  Antisense strand to SEQ ID NO: 1199880
ccauuucagaauaucuccu

SEQ ID NO: 1199882 - RNA, 19 nt, Artificial Sequence
  Description of Artificial Sequence: Synthetic oligonucleotide
  Sense strand starting at position 3937 of SEQ ID NO: 916989
cccacugagucuuuaguaa

SEQ ID NO: 1199883 - RNA, 19 nt, Artificial Sequence
  Description of Artificial Sequence: Synthetic oligonucleotide
  Antisense strand to SEQ ID NO: 1199882
uuacuaaagacucaguggg

SEQ ID NO: 1199884 - RNA, 19 nt, Artificial Sequence
  Description of Artificial Sequence: Synthetic oligonucleotide
  Sense strand starting at position 170 of SEQ ID NO: 916990
caaacugguuguccaugau

SEQ ID NO: 1199885 - RNA, 19 nt, Artificial Sequence
  Description of Artificial Sequence: Synthetic oligonucleotide
  Antisense strand to SEQ ID NO: 1199884
aucauggacaaccaguuug

SEQ ID NO: 1199886 - RNA, 19 nt, Artificial Sequence
  Description of Artificial Sequence: Synthetic oligonucleotide
  Sense strand starting at position 174 of SEQ ID NO: 916990
cugguuguccaugauugga

SEQ ID NO: 1199887 - RNA, 19 nt, Artificial Sequence
  Description of Artificial Sequence: Synthetic oligonucleotide
  Antisense strand to SEQ ID NO: 1199886
uccaaucauggacaaccag

SEQ ID NO: 1199888 - RNA, 19 nt, Artificial Sequence
  Description of Artificial Sequence: Synthetic oligonucleotide
  Sense strand starting at position 193 of SEQ ID NO: 916990
uccuguuaucacuguugac

SEQ ID NO: 1199889 - RNA, 19 nt, Artificial Sequence
  Description of Artificial Sequence: Synthetic oligonucleotide
  Antisense strand to SEQ ID NO: 1199888
gucaacagugauaacagga

SEQ ID NO: 1199890 - RNA, 19 nt, Artificial Sequence
  Description of Artificial Sequence: Synthetic oligonucleotide
  Sense strand starting at position 197 of SEQ ID NO: 916990
guuaucacuguugacuauu

SEQ ID NO: 1199891 - RNA, 19 nt, Artificial Sequence
  Description of Artificial Sequence: Synthetic oligonucleotide
  Antisense strand to SEQ ID NO: 1199890
aauagucaacagugauaac

SEQ ID NO: 1199892 - RNA, 19 nt, Artificial Sequence
  Description of Artificial Sequence: Synthetic oligonucleotide
  Sense strand starting at position 206 of SEQ ID NO: 916990
guugacuauuuauacacau

SEQ ID NO: 1199893 - RNA, 19 nt, Artificial Sequence
  Description of Artificial Sequence: Synthetic oligonucleotide
  Antisense strand to SEQ ID NO: 1199892
auguguauaaauagucaac

SEQ ID NO: 1199894 - RNA, 19 nt, Artificial Sequence
  Description of Artificial Sequence: Synthetic oligonucleotide
  Sense strand starting at position 278 of SEQ ID NO: 916990
uuguauauguucucuuaca

SEQ ID NO: 1199895 - RNA, 19 nt, Artificial Sequence
  Description of Artificial Sequence: Synthetic oligonucleotide
  Antisense strand to SEQ ID NO: 1199894
uguaagagaacauauacaa

SEQ ID NO: 1199896 - RNA, 19 nt, Artificial Sequence
  Description of Artificial Sequence: Synthetic oligonucleotide
  Sense strand starting at position 279 of SEQ ID NO: 916990
uguauauguucucuuacau

SEQ ID NO: 1199897 - RNA, 19 nt, Artificial Sequence
  Description of Artificial Sequence: Synthetic oligonucleotide
  Antisense strand to SEQ ID NO: 1199896
auguaagagaacauauaca

SEQ ID NO: 1199898 - RNA, 19 nt, Artificial Sequence
  Description of Artificial Sequence: Synthetic oligonucleotide
  Sense strand starting at position 423 of SEQ ID NO: 916990
cccauuaauuggcuuuagu

SEQ ID NO: 1199899 - RNA, 19 nt, Artificial Sequence
  Description of Artificial Sequence: Synthetic oligonucleotide
  Antisense strand to SEQ ID NO: 1199898
acuaaagccaauuaauggg

SEQ ID NO: 1199900 - RNA, 19 nt, Artificial Sequence
  Description of Artificial Sequence: Synthetic oligonucleotide
  Sense strand starting at position 500 of SEQ ID NO: 916990
gagacagucuucucuguug

SEQ ID NO: 1199901 - RNA, 19 nt, Artificial Sequence
  Description of Artificial Sequence: Synthetic oligonucleotide
  Antisense strand to SEQ ID NO: 1199900
caacagagaagacugucuc

SEQ ID NO: 1199902 - RNA, 19 nt, Artificial Sequence
  Description of Artificial Sequence: Synthetic oligonucleotide
  Sense strand starting at position 652 of SEQ ID NO: 916990
cuacuuauuguagagacga

SEQ ID NO: 1199903 - RNA, 19 nt, Artificial Sequence
  Description of Artificial Sequence: Synthetic oligonucleotide
  Antisense strand to SEQ ID NO: 1199902
ucgucucuacaauaaguag

SEQ ID NO: 1199904 - RNA, 19 nt, Artificial Sequence
  Description of Artificial Sequence: Synthetic oligonucleotide
  Sense strand starting at position 762 of SEQ ID NO: 916990
acccuuuagcuuggugaga

SEQ ID NO: 1199905 - RNA, 19 nt, Artificial Sequence
  Description of Artificial Sequence: Synthetic oligonucleotide
  Antisense strand to SEQ ID NO: 1199904
ucucaccaagcuaaagggu

SEQ ID NO: 1199906 - RNA, 19 nt, Artificial Sequence
  Description of Artificial Sequence: Synthetic oligonucleotide
  Sense strand starting at position 851 of SEQ ID NO: 916990
gcgccaguucgccuuuaca

SEQ ID NO: 1199907 - RNA, 19 nt, Artificial Sequence
  Description of Artificial Sequence: Synthetic oligonucleotide
  Antisense strand to SEQ ID NO: 1199906
uguaaaggcgaacuggcgc

SEQ ID NO: 1199908 - RNA, 19 nt, Artificial Sequence
  Description of Artificial Sequence: Synthetic oligonucleotide
  Sense strand starting at position 892 of SEQ ID NO: 916990
ccaacaugccugugcauaa

SEQ ID NO: 1199909 - RNA, 19 nt, Artificial Sequence
  Description of Artificial Sequence: Synthetic oligonucleotide
  Antisense strand to SEQ ID NO: 1199908
uuaugcacaggcauguugg

SEQ ID NO: 1199910 - RNA, 19 nt, Artificial Sequence
  Description of Artificial Sequence: Synthetic oligonucleotide
  Sense strand starting at position 922 of SEQ ID NO: 916990
uuagaaaugcccuguuucu

SEQ ID NO: 1199911 - RNA, 19 nt, Artificial Sequence
  Description of Artificial Sequence: Synthetic oligonucleotide
  Antisense strand to SEQ ID NO: 1199910
agaaacagggcauuucuaa

SEQ ID NO: 1199912 - RNA, 19 nt, Artificial Sequence
  Description of Artificial Sequence: Synthetic oligonucleotide
  Sense strand starting at position 1032 of SEQ ID NO: 916990
ggcugaaucucugucucuu

SEQ ID NO: 1199913 - RNA, 19 nt, Artificial Sequence
  Description of Artificial Sequence: Synthetic oligonucleotide
  Antisense strand to SEQ ID NO: 1199912
aagagacagagauucagcc

SEQ ID NO: 1199914 - RNA, 19 nt, Artificial Sequence
  Description of Artificial Sequence: Synthetic oligonucleotide
  Sense strand starting at position 1330 of SEQ ID NO: 916990
gauuacagacgugagucaa

SEQ ID NO: 1199915 - RNA, 19 nt, Artificial Sequence
  Description of Artificial Sequence: Synthetic oligonucleotide
  Antisense strand to SEQ ID NO: 1199914
uugacucacgucuguaauc

SEQ ID NO: 1199916 - RNA, 19 nt, Artificial Sequence
  Description of Artificial Sequence: Synthetic oligonucleotide
  Sense strand starting at position 1391 of SEQ ID NO: 916990
uguuuagaucauuauuccu

SEQ ID NO: 1199917 - RNA, 19 nt, Artificial Sequence
  Description of Artificial Sequence: Synthetic oligonucleotide
  Antisense strand to SEQ ID NO: 1199916
aggaauaaugaucuaaaca

SEQ ID NO: 1199918 - RNA, 19 nt, Artificial Sequence
  Description of Artificial Sequence: Synthetic oligonucleotide
  Sense strand starting at position 1749 of SEQ ID NO: 916990
gagaauaacggcugaacuu

SEQ ID NO: 1199919 - RNA, 19 nt, Artificial Sequence
  Description of Artificial Sequence: Synthetic oligonucleotide
  Antisense strand to SEQ ID NO: 1199918
aaguucagccguuauucuc

SEQ ID NO: 1199920 - RNA, 19 nt, Artificial Sequence
  Description of Artificial Sequence: Synthetic oligonucleotide
  Sense strand starting at position 1756 of SEQ ID NO: 916990
acggcugaacuugacuaau

SEQ ID NO: 1199921 - RNA, 19 nt, Artificial Sequence
  Description of Artificial Sequence: Synthetic oligonucleotide
  Antisense strand to SEQ ID NO: 1199920
auuagucaaguucagccgu

SEQ ID NO: 1199922 - RNA, 19 nt, Artificial Sequence
  Description of Artificial Sequence: Synthetic oligonucleotide
  Sense strand starting at position 1758 of SEQ ID NO: 916990
ggcugaacuugacuaauag

SEQ ID NO: 1199923 - RNA, 19 nt, Artificial Sequence
  Description of Artificial Sequence: Synthetic oligonucleotide
  Antisense strand to SEQ ID NO: 1199922
cuauuagucaaguucagcc

SEQ ID NO: 1199924 - RNA, 19 nt, Artificial Sequence
  Description of Artificial Sequence: Synthetic oligonucleotide
  Sense strand starting at position 1839 of SEQ ID NO: 916990
gaugguaggccuugucauc

SEQ ID NO: 1199925 - RNA, 19 nt, Artificial Sequence
  Description of Artificial Sequence: Synthetic oligonucleotide
  Antisense strand to SEQ ID NO: 1199924
gaugacaaggccuaccauc

SEQ ID NO: 1199926 - RNA, 19 nt, Artificial Sequence
  Description of Artificial Sequence: Synthetic oligonucleotide
  Sense strand starting at position 1848 of SEQ ID NO: 916990
ccuugucaucuucgaagga

SEQ ID NO: 1199927 - RNA, 19 nt, Artificial Sequence
  Description of Artificial Sequence: Synthetic oligonucleotide
  Antisense strand to SEQ ID NO: 1199926
uccuucgaagaugacaagg

SEQ ID NO: 1199928 - RNA, 19 nt, Artificial Sequence
  Description of Artificial Sequence: Synthetic oligonucleotide
  Sense strand starting at position 2463 of SEQ ID NO: 916990
gcuggauuccgggagcuga

SEQ ID NO: 1199929 - RNA, 19 nt, Artificial Sequence
  Description of Artificial Sequence: Synthetic oligonucleotide
  Antisense strand to SEQ ID NO: 1199928
ucagcucccggaauccagc

SEQ ID NO: 1199930 - RNA, 19 nt, Artificial Sequence
  Description of Artificial Sequence: Synthetic oligonucleotide
  Sense strand starting at position 2483 of SEQ ID NO: 916990
gggagguggucuguagcaa

SEQ ID NO: 1199931 - RNA, 19 nt, Artificial Sequence
  Description of Artificial Sequence: Synthetic oligonucleotide
  Antisense strand to SEQ ID NO: 1199930
uugcuacagaccaccuccc

SEQ ID NO: 1199932 - RNA, 19 nt, Artificial Sequence
  Description of Artificial Sequence: Synthetic oligonucleotide
  Sense strand starting at position 2537 of SEQ ID NO: 916990
uggacucugagcggagaau

SEQ ID NO: 1199933 - RNA, 19 nt, Artificial Sequence
  Description of Artificial Sequence: Synthetic oligonucleotide
  Antisense strand to SEQ ID NO: 1199932
auucuccgcucagagucca

SEQ ID NO: 1199934 - RNA, 19 nt, Artificial Sequence
  Description of Artificial Sequence: Synthetic oligonucleotide
  Sense strand starting at position 2861 of SEQ ID NO: 916990
cugcuuugcagugugcaaa

SEQ ID NO: 1199935 - RNA, 19 nt, Artificial Sequence
  Description of Artificial Sequence: Synthetic oligonucleotide
  Antisense strand to SEQ ID NO: 1199934
uuugcacacugcaaagcag

SEQ ID NO: 1199936 - RNA, 19 nt, Artificial Sequence
  Description of Artificial Sequence: Synthetic oligonucleotide
  Sense strand starting at position 2907 of SEQ ID NO: 916990
uagugcaagcgugaagaau

SEQ ID NO: 1199937 - RNA, 19 nt, Artificial Sequence
  Description of Artificial Sequence: Synthetic oligonucleotide
  Antisense strand to SEQ ID NO: 1199936
auucuucacgcuugcacua

SEQ ID NO: 1199938 - RNA, 19 nt, Artificial Sequence
  Description of Artificial Sequence: Synthetic oligonucleotide
  Sense strand starting at position 2976 of SEQ ID NO: 916990
cgucgguggccuguuagaa

SEQ ID NO: 1199939 - RNA, 19 nt, Artificial Sequence
  Description of Artificial Sequence: Synthetic oligonucleotide
  Antisense strand to SEQ ID NO: 1199938
uucuaacaggccaccgacg

SEQ ID NO: 1199940 - RNA, 19 nt, Artificial Sequence
  Description of Artificial Sequence: Synthetic oligonucleotide
  Sense strand starting at position 3094 of SEQ ID NO: 916990
gcacgaccuuuauugugaa

SEQ ID NO: 1199941 - RNA, 19 nt, Artificial Sequence
  Description of Artificial Sequence: Synthetic oligonucleotide
  Antisense strand to SEQ ID NO: 1199940
uucacaauaaaggucgugc

SEQ ID NO: 1199942 - RNA, 19 nt, Artificial Sequence
  Description of Artificial Sequence: Synthetic oligonucleotide
  Sense strand starting at position 3137 of SEQ ID NO: 916990
gugugcuucuuaucagaau

SEQ ID NO: 1199943 - RNA, 19 nt, Artificial Sequence
  Description of Artificial Sequence: Synthetic oligonucleotide
  Antisense strand to SEQ ID NO: 1199942
auucugauaagaagcacac

SEQ ID NO: 1199944 - RNA, 19 nt, Artificial Sequence
  Description of Artificial Sequence: Synthetic oligonucleotide
  Sense strand starting at position 3262 of SEQ ID NO: 916990
auagcuguuguaggaaaca

SEQ ID NO: 1199945 - RNA, 19 nt, Artificial Sequence
  Description of Artificial Sequence: Synthetic oligonucleotide
  Antisense strand to SEQ ID NO: 1199944
uguuuccuacaacagcuau

SEQ ID NO: 1199946 - RNA, 19 nt, Artificial Sequence
  Description of Artificial Sequence: Synthetic oligonucleotide
  Sense strand starting at position 3375 of SEQ ID NO: 916990
uagggauccuggccugagu

SEQ ID NO: 1199947 - RNA, 19 nt, Artificial Sequence
  Description of Artificial Sequence: Synthetic oligonucleotide
  Antisense strand to SEQ ID NO: 1199946
acucaggccaggaucccua

SEQ ID NO: 1199948 - RNA, 19 nt, Artificial Sequence
  Description of Artificial Sequence: Synthetic oligonucleotide
  Sense strand starting at position 3377 of SEQ ID NO: 916990
gggauccuggccugaguaa

SEQ ID NO: 1199949 - RNA, 19 nt, Artificial Sequence
  Description of Artificial Sequence: Synthetic oligonucleotide
  Antisense strand to SEQ ID NO: 1199948
uuacucaggccaggauccc

SEQ ID NO: 1199950 - RNA, 19 nt, Artificial Sequence
  Description of Artificial Sequence: Synthetic oligonucleotide
  Sense strand starting at position 3378 of SEQ ID NO: 916990
ggauccuggccugaguaaa

SEQ ID NO: 1199951 - RNA, 19 nt, Artificial Sequence
  Description of Artificial Sequence: Synthetic oligonucleotide
  Antisense strand to SEQ ID NO: 1199950
uuuacucaggccaggaucc

SEQ ID NO: 1199952 - RNA, 19 nt, Artificial Sequence
  Description of Artificial Sequence: Synthetic oligonucleotide
  Sense strand starting at position 3403 of SEQ ID NO: 916990
guuggaaaugguggcugaa

SEQ ID NO: 1199953 - RNA, 19 nt, Artificial Sequence
  Description of Artificial Sequence: Synthetic oligonucleotide
  Antisense strand to SEQ ID NO: 1199952
uucagccaccauuuccaac

SEQ ID NO: 1199954 - RNA, 19 nt, Artificial Sequence
  Description of Artificial Sequence: Synthetic oligonucleotide
  Sense strand starting at position 3574 of SEQ ID NO: 916990
agaaguaguugucuccagu

SEQ ID NO: 1199955 - RNA, 19 nt, Artificial Sequence
  Description of Artificial Sequence: Synthetic oligonucleotide
  Antisense strand to SEQ ID NO: 1199954
acuggagacaacuacuucu

SEQ ID NO: 1199956 - RNA, 19 nt, Artificial Sequence
  Description of Artificial Sequence: Synthetic oligonucleotide
  Sense strand starting at position 3580 of SEQ ID NO: 916990
aguugucuccagugguuga

SEQ ID NO: 1199957 - RNA, 19 nt, Artificial Sequence
  Description of Artificial Sequence: Synthetic oligonucleotide
  Antisense strand to SEQ ID NO: 1199956
ucaaccacuggagacaacu

SEQ ID NO: 1199958 - RNA, 19 nt, Artificial Sequence
  Description of Artificial Sequence: Synthetic oligonucleotide
  Sense strand starting at position 3581 of SEQ ID NO: 916990
guugucuccagugguugaa

SEQ ID NO: 1199959 - RNA, 19 nt, Artificial Sequence
  Description of Artificial Sequence: Synthetic oligonucleotide
  Antisense strand to SEQ ID NO: 1199958
uucaaccacuggagacaac

SEQ ID NO: 1199960 - RNA, 19 nt, Artificial Sequence
  Description of Artificial Sequence: Synthetic oligonucleotide
  Sense strand starting at position 3948 of SEQ ID NO: 916990
gagcaaauacuccgucuca

SEQ ID NO: 1199961 - RNA, 19 nt, Artificial Sequence
  Description of Artificial Sequence: Synthetic oligonucleotide
  Antisense strand to SEQ ID NO: 1199960
ugagacggaguauuugcuc

SEQ ID NO: 1199962 - RNA, 19 nt, Artificial Sequence
  Description of Artificial Sequence: Synthetic oligonucleotide
  Sense strand starting at position 3949 of SEQ ID NO: 916990
agcaaauacuccgucucaa

SEQ ID NO: 1199963 - RNA, 19 nt, Artificial Sequence
  Description of Artificial Sequence: Synthetic oligonucleotide
  Antisense strand to SEQ ID NO: 1199962
uugagacggaguauuugcu

SEQ ID NO: 1199964 - RNA, 19 nt, Artificial Sequence
  Description of Artificial Sequence: Synthetic oligonucleotide
  Sense strand starting at position 189 of SEQ ID NO: 916991
cagugauuuguuugcaaua

SEQ ID NO: 1199965 - RNA, 19 nt, Artificial Sequence
  Description of Artificial Sequence: Synthetic oligonucleotide
  Antisense strand to SEQ ID NO: 1199964
uauugcaaacaaaucacug

SEQ ID NO: 1199966 - RNA, 19 nt, Artificial Sequence
  Description of Artificial Sequence: Synthetic oligonucleotide
  Sense strand starting at position 238 of SEQ ID NO: 916991
accuguaauguccgcauuu

SEQ ID NO: 1199967 - RNA, 19 nt, Artificial Sequence
  Description of Artificial Sequence: Synthetic oligonucleotide
  Antisense strand to SEQ ID NO: 1199966
aaaugcggacauuacaggu

SEQ ID NO: 1199968 - RNA, 19 nt, Artificial Sequence
  Description of Artificial Sequence: Synthetic oligonucleotide
  Sense strand starting at position 239 of SEQ ID NO: 916991
ccuguaauguccgcauuuc

SEQ ID NO: 1199969 - RNA, 19 nt, Artificial Sequence
  Description of Artificial Sequence: Synthetic oligonucleotide
  Antisense strand to SEQ ID NO: 1199968
gaaaugcggacauuacagg

SEQ ID NO: 1199970 - RNA, 19 nt, Artificial Sequence
  Description of Artificial Sequence: Synthetic oligonucleotide
  Sense strand starting at position 240 of SEQ ID NO: 916991
cuguaauguccgcauuucu

SEQ ID NO: 1199971 - RNA, 19 nt, Artificial Sequence
  Description of Artificial Sequence: Synthetic oligonucleotide
  Antisense strand to SEQ ID NO: 1199970
agaaaugcggacauuacag

SEQ ID NO: 1199972 - RNA, 19 nt, Artificial Sequence
  Description of Artificial Sequence: Synthetic oligonucleotide
  Sense strand starting at position 484 of SEQ ID NO: 916991
gcccgacuccaugaaagaa

SEQ ID NO: 1199973 - RNA, 19 nt, Artificial Sequence
  Description of Artificial Sequence: Synthetic oligonucleotide
  Antisense strand to SEQ ID NO: 1199972
uucuuucauggagucgggc

SEQ ID NO: 1199974 - RNA, 19 nt, Artificial Sequence
  Description of Artificial Sequence: Synthetic oligonucleotide
  Sense strand starting at position 776 of SEQ ID NO: 916991
guauauccauggucaaaug

SEQ ID NO: 1199975 - RNA, 19 nt, Artificial Sequence
  Description of Artificial Sequence: Synthetic oligonucleotide
  Antisense strand to SEQ ID NO: 1199974
cauuugaccauggauauac

SEQ ID NO: 1199976 - RNA, 19 nt, Artificial Sequence
  Description of Artificial Sequence: Synthetic oligonucleotide
  Sense strand starting at position 787 of SEQ ID NO: 916991
gucaaaugucaauacuuua

SEQ ID NO: 1199977 - RNA, 19 nt, Artificial Sequence
  Description of Artificial Sequence: Synthetic oligonucleotide
  Antisense strand to SEQ ID NO: 1199976
uaaaguauugacauuugac

SEQ ID NO: 1199978 - RNA, 19 nt, Artificial Sequence
  Description of Artificial Sequence: Synthetic oligonucleotide
  Sense strand starting at position 855 of SEQ ID NO: 916991
auuggaagaccuuguuucu

SEQ ID NO: 1199979 - RNA, 19 nt, Artificial Sequence
  Description of Artificial Sequence: Synthetic oligonucleotide
  Antisense strand to SEQ ID NO: 1199978
agaaacaaggucuuccaau

SEQ ID NO: 1199980 - RNA, 19 nt, Artificial Sequence
  Description of Artificial Sequence: Synthetic oligonucleotide
  Sense strand starting at position 858 of SEQ ID NO: 916991
ggaagaccuuguuucugaa

SEQ ID NO: 1199981 - RNA, 19 nt, Artificial Sequence
  Description of Artificial Sequence: Synthetic oligonucleotide
  Antisense strand to SEQ ID NO: 1199980
uucagaaacaaggucuucc

SEQ ID NO: 1199982 - RNA, 19 nt, Artificial Sequence
  Description of Artificial Sequence: Synthetic oligonucleotide
  Sense strand starting at position 889 of SEQ ID NO: 916991
cccuguagcuuccuagaag

SEQ ID NO: 1199983 - RNA, 19 nt, Artificial Sequence
  Description of Artificial Sequence: Synthetic oligonucleotide
  Antisense strand to SEQ ID NO: 1199982
cuucuaggaagcuacaggg

SEQ ID NO: 1199984 - RNA, 19 nt, Artificial Sequence
  Description of Artificial Sequence: Synthetic oligonucleotide
  Sense strand starting at position 903 of SEQ ID NO: 916991
agaaguccuuccuuggauu

SEQ ID NO: 1199985 - RNA, 19 nt, Artificial Sequence
  Description of Artificial Sequence: Synthetic oligonucleotide
  Antisense strand to SEQ ID NO: 1199984
aauccaaggaaggacuucu

SEQ ID NO: 1199986 - RNA, 19 nt, Artificial Sequence
  Description of Artificial Sequence: Synthetic oligonucleotide
  Sense strand starting at position 1003 of SEQ ID NO: 916991
guuccugauaagcauguga

SEQ ID NO: 1199987 - RNA, 19 nt, Artificial Sequence
  Description of Artificial Sequence: Synthetic oligonucleotide
  Antisense strand to SEQ ID NO: 1199986
ucacaugcuuaucaggaac

SEQ ID NO: 1199988 - RNA, 19 nt, Artificial Sequence
  Description of Artificial Sequence: Synthetic oligonucleotide
  Sense strand starting at position 1005 of SEQ ID NO: 916991
uccugauaagcaugugaug

SEQ ID NO: 1199989 - RNA, 19 nt, Artificial Sequence
  Description of Artificial Sequence: Synthetic oligonucleotide
  Antisense strand to SEQ ID NO: 1199988
caucacaugcuuaucagga

SEQ ID NO: 1199990 - RNA, 19 nt, Artificial Sequence
  Description of Artificial Sequence: Synthetic oligonucleotide
  Sense strand starting at position 1007 of SEQ ID NO: 916991
cugauaagcaugugauguu

SEQ ID NO: 1199991 - RNA, 19 nt, Artificial Sequence
  Description of Artificial Sequence: Synthetic oligonucleotide
  Antisense strand to SEQ ID NO: 1199990
aacaucacaugcuuaucag

SEQ ID NO: 1199992 - RNA, 19 nt, Artificial Sequence
  Description of Artificial Sequence: Synthetic oligonucleotide
  Sense strand starting at position 1161 of SEQ ID NO: 916991
uuuagucacgaugaaguua

SEQ ID NO: 1199993 - RNA, 19 nt, Artificial Sequence
  Description of Artificial Sequence: Synthetic oligonucleotide
  Antisense strand to SEQ ID NO: 1199992
uaacuucaucgugacuaaa

SEQ ID NO: 1199994 - RNA, 19 nt, Artificial Sequence
  Description of Artificial Sequence: Synthetic oligonucleotide
  Sense strand starting at position 1166 of SEQ ID NO: 916991
ucacgaugaaguuagcaaa

SEQ ID NO: 1199995 - RNA, 19 nt, Artificial Sequence
  Description of Artificial Sequence: Synthetic oligonucleotide
  Antisense strand to SEQ ID NO: 1199994
uuugcuaacuucaucguga

SEQ ID NO: 1199996 - RNA, 19 nt, Artificial Sequence
  Description of Artificial Sequence: Synthetic oligonucleotide
  Sense strand starting at position 1288 of SEQ ID NO: 916991
cuaggaaucgcugaagcaa

SEQ ID NO: 1199997 - RNA, 19 nt, Artificial Sequence
  Description of Artificial Sequence: Synthetic oligonucleotide
  Antisense strand to SEQ ID NO: 1199996
uugcuucagcgauuccuag

SEQ ID NO: 1199998 - RNA, 19 nt, Artificial Sequence
  Description of Artificial Sequence: Synthetic oligonucleotide
  Sense strand starting at position 2199 of SEQ ID NO: 916991
acuggaauguccucgaaga

SEQ ID NO: 1199999 - RNA, 19 nt, Artificial Sequence
  Description of Artificial Sequence: Synthetic oligonucleotide
  Antisense strand to SEQ ID NO: 1199998
ucuucgaggacauuccagu

SEQ ID NO: 1200000 - RNA, 19 nt, Artificial Sequence
  Description of Artificial Sequence: Synthetic oligonucleotide
  Sense strand starting at position 2200 of SEQ ID NO: 916991
cuggaauguccucgaagag

SEQ ID NO: 1200001 - RNA, 19 nt, Artificial Sequence
  Description of Artificial Sequence: Synthetic oligonucleotide
  Antisense strand to SEQ ID NO: 1200000
cucuucgaggacauuccag

SEQ ID NO: 1200002 - RNA, 19 nt, Artificial Sequence
  Description of Artificial Sequence: Synthetic oligonucleotide
  Sense strand starting at position 2572 of SEQ ID NO: 916991
aaaugauaccucugcggca

SEQ ID NO: 1200003 - RNA, 19 nt, Artificial Sequence
  Description of Artificial Sequence: Synthetic oligonucleotide
  Antisense strand to SEQ ID NO: 1200002
ugccgcagagguaucauuu

SEQ ID NO: 1200004 - RNA, 19 nt, Artificial Sequence
  Description of Artificial Sequence: Synthetic oligonucleotide
  Sense strand starting at position 2662 of SEQ ID NO: 916991
guauguguggccucuguuu

SEQ ID NO: 1200005 - RNA, 19 nt, Artificial Sequence
  Description of Artificial Sequence: Synthetic oligonucleotide
  Antisense strand to SEQ ID NO: 1200004
aaacagaggccacacauac

SEQ ID NO: 1200006 - RNA, 19 nt, Artificial Sequence
  Description of Artificial Sequence: Synthetic oligonucleotide
  Sense strand starting at position 2775 of SEQ ID NO: 916991
ggaaguuaucacuagugua

SEQ ID NO: 1200007 - RNA, 19 nt, Artificial Sequence
  Description of Artificial Sequence: Synthetic oligonucleotide
  Antisense strand to SEQ ID NO: 1200006
uacacuagugauaacuucc

SEQ ID NO: 1200008 - RNA, 19 nt, Artificial Sequence
  Description of Artificial Sequence: Synthetic oligonucleotide
  Sense strand starting at position 2915 of SEQ ID NO: 916991
cugagauguccgcggauuu

SEQ ID NO: 1200009 - RNA, 19 nt, Artificial Sequence
  Description of Artificial Sequence: Synthetic oligonucleotide
  Antisense strand to SEQ ID NO: 1200008
aaauccgcggacaucucag

SEQ ID NO: 1200010 - RNA, 19 nt, Artificial Sequence
  Description of Artificial Sequence: Synthetic oligonucleotide
  Sense strand starting at position 2969 of SEQ ID NO: 916991
uaggguaguuuaucugcau

SEQ ID NO: 1200011 - RNA, 19 nt, Artificial Sequence
  Description of Artificial Sequence: Synthetic oligonucleotide
  Antisense strand to SEQ ID NO: 1200010
augcagauaaacuacccua

SEQ ID NO: 1200012 - RNA, 19 nt, Artificial Sequence
  Description of Artificial Sequence: Synthetic oligonucleotide
  Sense strand starting at position 2970 of SEQ ID NO: 916991
aggguaguuuaucugcaua

SEQ ID NO: 1200013 - RNA, 19 nt, Artificial Sequence
  Description of Artificial Sequence: Synthetic oligonucleotide
  Antisense strand to SEQ ID NO: 1200012
uaugcagauaaacuacccu

SEQ ID NO: 1200014 - RNA, 19 nt, Artificial Sequence
  Description of Artificial Sequence: Synthetic oligonucleotide
  Sense strand starting at position 2975 of SEQ ID NO: 916991
aguuuaucugcauaggcau

SEQ ID NO: 1200015 - RNA, 19 nt, Artificial Sequence
  Description of Artificial Sequence: Synthetic oligonucleotide
  Antisense strand to SEQ ID NO: 1200014
augccuaugcagauaaacu

SEQ ID NO: 1200016 - RNA, 19 nt, Artificial Sequence
  Description of Artificial Sequence: Synthetic oligonucleotide
  Sense strand starting at position 2978 of SEQ ID NO: 916991
uuaucugcauaggcauaau

SEQ ID NO: 1200017 - RNA, 19 nt, Artificial Sequence
  Description of Artificial Sequence: Synthetic oligonucleotide
  Antisense strand to SEQ ID NO: 1200016
auuaugccuaugcagauaa

SEQ ID NO: 1200018 - RNA, 19 nt, Artificial Sequence
  Description of Artificial Sequence: Synthetic oligonucleotide
  Sense strand starting at position 3091 of SEQ ID NO: 916991
uauauaugagagugaacuc

SEQ ID NO: 1200019 - RNA, 19 nt, Artificial Sequence
  Description of Artificial Sequence: Synthetic oligonucleotide
  Antisense strand to SEQ ID NO: 1200018
gaguucacucucauauaua

SEQ ID NO: 1200020 - RNA, 19 nt, Artificial Sequence
  Description of Artificial Sequence: Synthetic oligonucleotide
  Sense strand starting at position 3133 of SEQ ID NO: 916991
cuacaugggugucuacuaa

SEQ ID NO: 1200021 - RNA, 19 nt, Artificial Sequence
  Description of Artificial Sequence: Synthetic oligonucleotide
  Antisense strand to SEQ ID NO: 1200020
uuaguagacacccauguag

SEQ ID NO: 1200022 - RNA, 19 nt, Artificial Sequence
  Description of Artificial Sequence: Synthetic oligonucleotide
  Sense strand starting at position 3305 of SEQ ID NO: 916991
uuuguaaugcuuuaacaag

SEQ ID NO: 1200023 - RNA, 19 nt, Artificial Sequence
  Description of Artificial Sequence: Synthetic oligonucleotide
  Antisense strand to SEQ ID NO: 1200022
cuuguuaaagcauuacaaa

SEQ ID NO: 1200024 - RNA, 19 nt, Artificial Sequence
  Description of Artificial Sequence: Synthetic oligonucleotide
  Sense strand starting at position 3330 of SEQ ID NO: 916991
cagaaagaguuguugccua

SEQ ID NO: 1200025 - RNA, 19 nt, Artificial Sequence
  Description of Artificial Sequence: Synthetic oligonucleotide
  Antisense strand to SEQ ID NO: 1200024
uaggcaacaacucuuucug

SEQ ID NO: 1200026 - RNA, 19 nt, Artificial Sequence
  Description of Artificial Sequence: Synthetic oligonucleotide
  Sense strand starting at position 3335 of SEQ ID NO: 916991
agaguuguugccuaugcua

SEQ ID NO: 1200027 - RNA, 19 nt, Artificial Sequence
  Description of Artificial Sequence: Synthetic oligonucleotide
  Antisense strand to SEQ ID NO: 1200026
uagcauaggcaacaacucu

SEQ ID NO: 1200028 - RNA, 19 nt, Artificial Sequence
  Description of Artificial Sequence: Synthetic oligonucleotide
  Sense strand starting at position 3457 of SEQ ID NO: 916991
ucaugauuguauccuuagu

SEQ ID NO: 1200029 - RNA, 19 nt, Artificial Sequence
  Description of Artificial Sequence: Synthetic oligonucleotide
  Antisense strand to SEQ ID NO: 1200028
acuaaggauacaaucauga

SEQ ID NO: 1200030 - RNA, 19 nt, Artificial Sequence
  Description of Artificial Sequence: Synthetic oligonucleotide
  Sense strand starting at position 3459 of SEQ ID NO: 916991
augauuguauccuuaguac

SEQ ID NO: 1200031 - RNA, 19 nt, Artificial Sequence
  Description of Artificial Sequence: Synthetic oligonucleotide
  Antisense strand to SEQ ID NO: 1200030
guacuaaggauacaaucau

SEQ ID NO: 1200032 - RNA, 19 nt, Artificial Sequence
  Description of Artificial Sequence: Synthetic oligonucleotide
  Sense strand starting at position 3462 of SEQ ID NO: 916991
auuguauccuuaguaccua

SEQ ID NO: 1200033 - RNA, 19 nt, Artificial Sequence
  Description of Artificial Sequence: Synthetic oligonucleotide
  Antisense strand to SEQ ID NO: 1200032
uagguacuaaggauacaau

SEQ ID NO: 1200034 - RNA, 19 nt, Artificial Sequence
  Description of Artificial Sequence: Synthetic oligonucleotide
  Sense strand starting at position 3493 of SEQ ID NO: 916991
auaguaauggcucauagau

SEQ ID NO: 1200035 - RNA, 19 nt, Artificial Sequence
  Description of Artificial Sequence: Synthetic oligonucleotide
  Antisense strand to SEQ ID NO: 1200034
aucuaugagccauuacuau

SEQ ID NO: 1200036 - RNA, 19 nt, Artificial Sequence
  Description of Artificial Sequence: Synthetic oligonucleotide
  Sense strand starting at position 3537 of SEQ ID NO: 916991
auuauauuccacugugcuu

SEQ ID NO: 1200037 - RNA, 19 nt, Artificial Sequence
  Description of Artificial Sequence: Synthetic oligonucleotide
  Antisense strand to SEQ ID NO: 1200036
aagcacaguggaauauaau

SEQ ID NO: 1200038 - RNA, 19 nt, Artificial Sequence
  Description of Artificial Sequence: Synthetic oligonucleotide
  Sense strand starting at position 3595 of SEQ ID NO: 916991
aacuguuacacguggguaa

SEQ ID NO: 1200039 - RNA, 19 nt, Artificial Sequence
  Description of Artificial Sequence: Synthetic oligonucleotide
  Antisense strand to SEQ ID NO: 1200038
uuacccacguguaacaguu

SEQ ID NO: 1200040 - RNA, 19 nt, Artificial Sequence
  Description of Artificial Sequence: Synthetic oligonucleotide
  Sense strand starting at position 3606 of SEQ ID NO: 916991
guggguaacuguuuaacaa

SEQ ID NO: 1200041 - RNA, 19 nt, Artificial Sequence
  Description of Artificial Sequence: Synthetic oligonucleotide
  Antisense strand to SEQ ID NO: 1200040
uuguuaaacaguuacccac

SEQ ID NO: 1200042 - RNA, 19 nt, Artificial Sequence
  Description of Artificial Sequence: Synthetic oligonucleotide
  Sense strand starting at position 3723 of SEQ ID NO: 916991
aauacugaggucuguaauu

SEQ ID NO: 1200043 - RNA, 19 nt, Artificial Sequence
  Description of Artificial Sequence: Synthetic oligonucleotide
  Antisense strand to SEQ ID NO: 1200042
aauuacagaccucaguauu

SEQ ID NO: 1200044 - RNA, 19 nt, Artificial Sequence
  Description of Artificial Sequence: Synthetic oligonucleotide
  Sense strand starting at position 97 of SEQ ID NO: 916992
ccacccugagucgacaaau

SEQ ID NO: 1200045 - RNA, 19 nt, Artificial Sequence
  Description of Artificial Sequence: Synthetic oligonucleotide
  Antisense strand to SEQ ID NO: 1200044
auuugucgacucagggugg

SEQ ID NO: 1200046 - RNA, 19 nt, Artificial Sequence
  Description of Artificial Sequence: Synthetic oligonucleotide
  Sense strand starting at position 199 of SEQ ID NO: 916992
agugaaaccucuuuagcuc

SEQ ID NO: 1200047 - RNA, 19 nt, Artificial Sequence
  Description of Artificial Sequence: Synthetic oligonucleotide
  Antisense strand to SEQ ID NO: 1200046
gagcuaaagagguuucacu

SEQ ID NO: 1200048 - RNA, 19 nt, Artificial Sequence
  Description of Artificial Sequence: Synthetic oligonucleotide
  Sense strand starting at position 200 of SEQ ID NO: 916992
gugaaaccucuuuagcucu

SEQ ID NO: 1200049 - RNA, 19 nt, Artificial Sequence
  Description of Artificial Sequence: Synthetic oligonucleotide
  Antisense strand to SEQ ID NO: 1200048
agagcuaaagagguuucac

SEQ ID NO: 1200050 - RNA, 19 nt, Artificial Sequence
  Description of Artificial Sequence: Synthetic oligonucleotide
  Sense strand starting at position 801 of SEQ ID NO: 916992
cuugguauaucccagagga

SEQ ID NO: 1200051 - RNA, 19 nt, Artificial Sequence
  Description of Artificial Sequence: Synthetic oligonucleotide
  Antisense strand to SEQ ID NO: 1200050
uccucugggauauaccaag

SEQ ID NO: 1200052 - RNA, 19 nt, Artificial Sequence
  Description of Artificial Sequence: Synthetic oligonucleotide
  Sense strand starting at position 1041 of SEQ ID NO: 916992
uggcaaaugcccuaagaug

SEQ ID NO: 1200053 - RNA, 19 nt, Artificial Sequence
  Description of Artificial Sequence: Synthetic oligonucleotide
  Antisense strand to SEQ ID NO: 1200052
caucuuagggcauuugcca

SEQ ID NO: 1200054 - RNA, 19 nt, Artificial Sequence
  Description of Artificial Sequence: Synthetic oligonucleotide
  Sense strand starting at position 1225 of SEQ ID NO: 916992
ggguguucugguuggagca

SEQ ID NO: 1200055 - RNA, 19 nt, Artificial Sequence
  Description of Artificial Sequence: Synthetic oligonucleotide
  Antisense strand to SEQ ID NO: 1200054
ugcuccaaccagaacaccc

SEQ ID NO: 1200056 - RNA, 19 nt, Artificial Sequence
  Description of Artificial Sequence: Synthetic oligonucleotide
  Sense strand starting at position 1767 of SEQ ID NO: 916992
cccagagugcuccaacagu

SEQ ID NO: 1200057 - RNA, 19 nt, Artificial Sequence
  Description of Artificial Sequence: Synthetic oligonucleotide
  Antisense strand to SEQ ID NO: 1200056
acuguuggagcacucuggg

SEQ ID NO: 1200058 - RNA, 19 nt, Artificial Sequence
  Description of Artificial Sequence: Synthetic oligonucleotide
  Sense strand starting at position 1791 of SEQ ID NO: 916992
gucccuaagcuccaagaua

SEQ ID NO: 1200059 - RNA, 19 nt, Artificial Sequence
  Description of Artificial Sequence: Synthetic oligonucleotide
  Antisense strand to SEQ ID NO: 1200058
uaucuuggagcuuagggac

SEQ ID NO: 1200060 - RNA, 19 nt, Artificial Sequence
  Description of Artificial Sequence: Synthetic oligonucleotide
  Sense strand starting at position 1848 of SEQ ID NO: 916992
ucaccaguuccuuggcgua

SEQ ID NO: 1200061 - RNA, 19 nt, Artificial Sequence
  Description of Artificial Sequence: Synthetic oligonucleotide
  Antisense strand to SEQ ID NO: 1200060
uacgccaaggaacugguga

SEQ ID NO: 1200062 - RNA, 19 nt, Artificial Sequence
  Description of Artificial Sequence: Synthetic oligonucleotide
  Sense strand starting at position 2297 of SEQ ID NO: 916992
uucagaggccucuggaagu

SEQ ID NO: 1200063 - RNA, 19 nt, Artificial Sequence
  Description of Artificial Sequence: Synthetic oligonucleotide
  Antisense strand to SEQ ID NO: 1200062
acuuccagaggccucugaa

SEQ ID NO: 1200064 - RNA, 19 nt, Artificial Sequence
  Description of Artificial Sequence: Synthetic oligonucleotide
  Sense strand starting at position 2465 of SEQ ID NO: 916992
guuucccauuuguagggau

SEQ ID NO: 1200065 - RNA, 19 nt, Artificial Sequence
  Description of Artificial Sequence: Synthetic oligonucleotide
  Antisense strand to SEQ ID NO: 1200064
aucccuacaaaugggaaac

SEQ ID NO: 1200066 - RNA, 19 nt, Artificial Sequence
  Description of Artificial Sequence: Synthetic oligonucleotide
  Sense strand starting at position 2553 of SEQ ID NO: 916992
augauaguagcuugaauag

SEQ ID NO: 1200067 - RNA, 19 nt, Artificial Sequence
  Description of Artificial Sequence: Synthetic oligonucleotide
  Antisense strand to SEQ ID NO: 1200066
cuauucaagcuacuaucau

SEQ ID NO: 1200068 - RNA, 19 nt, Artificial Sequence
  Description of Artificial Sequence: Synthetic oligonucleotide
  Sense strand starting at position 2605 of SEQ ID NO: 916992
gaggcagggugaguucuaa

SEQ ID NO: 1200069 - RNA, 19 nt, Artificial Sequence
  Description of Artificial Sequence: Synthetic oligonucleotide
  Antisense strand to SEQ ID NO: 1200068
uuagaacucacccugccuc

SEQ ID NO: 1200070 - RNA, 19 nt, Artificial Sequence
  Description of Artificial Sequence: Synthetic oligonucleotide
  Sense strand starting at position 2688 of SEQ ID NO: 916992
ugaggaguccuguggauua

SEQ ID NO: 1200071 - RNA, 19 nt, Artificial Sequence
  Description of Artificial Sequence: Synthetic oligonucleotide
  Antisense strand to SEQ ID NO: 1200070
uaauccacaggacuccuca

SEQ ID NO: 1200072 - RNA, 19 nt, Artificial Sequence
  Description of Artificial Sequence: Synthetic oligonucleotide
  Sense strand starting at position 2752 of SEQ ID NO: 916992
uucggcaagugcucaauga

SEQ ID NO: 1200073 - RNA, 19 nt, Artificial Sequence
  Description of Artificial Sequence: Synthetic oligonucleotide
  Antisense strand to SEQ ID NO: 1200072
ucauugagcacuugccgaa

SEQ ID NO: 1200074 - RNA, 19 nt, Artificial Sequence
  Description of Artificial Sequence: Synthetic oligonucleotide
  Sense strand starting at position 2753 of SEQ ID NO: 916992
ucggcaagugcucaaugaa

SEQ ID NO: 1200075 - RNA, 19 nt, Artificial Sequence
  Description of Artificial Sequence: Synthetic oligonucleotide
  Antisense strand to SEQ ID NO: 1200074
uucauugagcacuugccga

SEQ ID NO: 1200076 - RNA, 19 nt, Artificial Sequence
  Description of Artificial Sequence: Synthetic oligonucleotide
  Sense strand starting at position 2756 of SEQ ID NO: 916992
gcaagugcucaaugaacac

SEQ ID NO: 1200077 - RNA, 19 nt, Artificial Sequence
  Description of Artificial Sequence: Synthetic oligonucleotide
  Antisense strand to SEQ ID NO: 1200076
guguucauugagcacuugc

SEQ ID NO: 1200078 - RNA, 19 nt, Artificial Sequence
  Description of Artificial Sequence: Synthetic oligonucleotide
  Sense strand starting at position 2799 of SEQ ID NO: 916992
aagcaaguuccagagguga

SEQ ID NO: 1200079 - RNA, 19 nt, Artificial Sequence
  Description of Artificial Sequence: Synthetic oligonucleotide
  Antisense strand to SEQ ID NO: 1200078
ucaccucuggaacuugcuu

SEQ ID NO: 1200080 - RNA, 19 nt, Artificial Sequence
  Description of Artificial Sequence: Synthetic oligonucleotide
  Sense strand starting at position 2801 of SEQ ID NO: 916992
gcaaguuccagaggugaau

SEQ ID NO: 1200081 - RNA, 19 nt, Artificial Sequence
  Description of Artificial Sequence: Synthetic oligonucleotide
  Antisense strand to SEQ ID NO: 1200080
auucaccucuggaacuugc

SEQ ID NO: 1200082 - RNA, 19 nt, Artificial Sequence
  Description of Artificial Sequence: Synthetic oligonucleotide
  Sense strand starting at position 2981 of SEQ ID NO: 916992
agggcaugccuguguauga

SEQ ID NO: 1200083 - RNA, 19 nt, Artificial Sequence
  Description of Artificial Sequence: Synthetic oligonucleotide
  Antisense strand to SEQ ID NO: 1200082
ucauacacaggcaugcccu

SEQ ID NO: 1200084 - RNA, 19 nt, Artificial Sequence
  Description of Artificial Sequence: Synthetic oligonucleotide
  Sense strand starting at position 3026 of SEQ ID NO: 916992
aaaggcauuccgcauggaa

SEQ ID NO: 1200085 - RNA, 19 nt, Artificial Sequence
  Description of Artificial Sequence: Synthetic oligonucleotide
  Antisense strand to SEQ ID NO: 1200084
uuccaugcggaaugccuuu

SEQ ID NO: 1200086 - RNA, 19 nt, Artificial Sequence
  Description of Artificial Sequence: Synthetic oligonucleotide
  Sense strand starting at position 3061 of SEQ ID NO: 916992
agguaugguggcugggaau

SEQ ID NO: 1200087 - RNA, 19 nt, Artificial Sequence
  Description of Artificial Sequence: Synthetic oligonucleotide
  Antisense strand to SEQ ID NO: 1200086
auucccagccaccauaccu

SEQ ID NO: 1200088 - RNA, 19 nt, Artificial Sequence
  Description of Artificial Sequence: Synthetic oligonucleotide
  Sense strand starting at position 3104 of SEQ ID NO: 916992
uuagauuaggcuggagcau

SEQ ID NO: 1200089 - RNA, 19 nt, Artificial Sequence
  Description of Artificial Sequence: Synthetic oligonucleotide
  Antisense strand to SEQ ID NO: 1200088
augcuccagccuaaucuaa

SEQ ID NO: 1200090 - RNA, 19 nt, Artificial Sequence
  Description of Artificial Sequence: Synthetic oligonucleotide
  Sense strand starting at position 3138 of SEQ ID NO: 916992
ucauguaguaagggucaga

SEQ ID NO: 1200091 - RNA, 19 nt, Artificial Sequence
  Description of Artificial Sequence: Synthetic oligonucleotide
  Antisense strand to SEQ ID NO: 1200090
ucugacccuuacuacauga

SEQ ID NO: 1200092 - RNA, 19 nt, Artificial Sequence
  Description of Artificial Sequence: Synthetic oligonucleotide
  Sense strand starting at position 3141 of SEQ ID NO: 916992
uguaguaagggucagagau

SEQ ID NO: 1200093 - RNA, 19 nt, Artificial Sequence
  Description of Artificial Sequence: Synthetic oligonucleotide
  Antisense strand to SEQ ID NO: 1200092
aucucugacccuuacuaca

SEQ ID NO: 1200094 - RNA, 19 nt, Artificial Sequence
  Description of Artificial Sequence: Synthetic oligonucleotide
  Sense strand starting at position 3174 of SEQ ID NO: 916992
ggcuaaagucucggaaggu

SEQ ID NO: 1200095 - RNA, 19 nt, Artificial Sequence
  Description of Artificial Sequence: Synthetic oligonucleotide
  Antisense strand to SEQ ID NO: 1200094
accuuccgagacuuuagcc

SEQ ID NO: 1200096 - RNA, 19 nt, Artificial Sequence
  Description of Artificial Sequence: Synthetic oligonucleotide
  Sense strand starting at position 3251 of SEQ ID NO: 916992
cgugcucucuggguaggaa

SEQ ID NO: 1200097 - RNA, 19 nt, Artificial Sequence
  Description of Artificial Sequence: Synthetic oligonucleotide
  Antisense strand to SEQ ID NO: 1200096
uuccuacccagagagcacg

SEQ ID NO: 1200098 - RNA, 19 nt, Artificial Sequence
  Description of Artificial Sequence: Synthetic oligonucleotide
  Sense strand starting at position 3283 of SEQ ID NO: 916992
aucauuguucccugcaaug

SEQ ID NO: 1200099 - RNA, 19 nt, Artificial Sequence
  Description of Artificial Sequence: Synthetic oligonucleotide
  Antisense strand to SEQ ID NO: 1200098
cauugcagggaacaaugau

SEQ ID NO: 1200100 - RNA, 19 nt, Artificial Sequence
  Description of Artificial Sequence: Synthetic oligonucleotide
  Sense strand starting at position 3285 of SEQ ID NO: 916992
cauuguucccugcaauggu

SEQ ID NO: 1200101 - RNA, 19 nt, Artificial Sequence
  Description of Artificial Sequence: Synthetic oligonucleotide
  Antisense strand to SEQ ID NO: 1200100
accauugcagggaacaaug

SEQ ID NO: 1200102 - RNA, 19 nt, Artificial Sequence
  Description of Artificial Sequence: Synthetic oligonucleotide
  Sense strand starting at position 3341 of SEQ ID NO: 916992
gucauuugcuugggaaaua

SEQ ID NO: 1200103 - RNA, 19 nt, Artificial Sequence
  Description of Artificial Sequence: Synthetic oligonucleotide
  Antisense strand to SEQ ID NO: 1200102
uauuucccaagcaaaugac

SEQ ID NO: 1200104 - RNA, 19 nt, Artificial Sequence
  Description of Artificial Sequence: Synthetic oligonucleotide
  Sense strand starting at position 3342 of SEQ ID NO: 916992
ucauuugcuugggaaauaa

SEQ ID NO: 1200105 - RNA, 19 nt, Artificial Sequence
  Description of Artificial Sequence: Synthetic oligonucleotide
  Antisense strand to SEQ ID NO: 1200104
uuauuucccaagcaaauga

SEQ ID NO: 1200106 - RNA, 19 nt, Artificial Sequence
  Description of Artificial Sequence: Synthetic oligonucleotide
  Sense strand starting at position 3403 of SEQ ID NO: 916992
cugcaucuucgagggaaca

SEQ ID NO: 1200107 - RNA, 19 nt, Artificial Sequence
  Description of Artificial Sequence: Synthetic oligonucleotide
  Antisense strand to SEQ ID NO: 1200106
uguucccucgaagaugcag

SEQ ID NO: 1200108 - RNA, 19 nt, Artificial Sequence
  Description of Artificial Sequence: Synthetic oligonucleotide
  Sense strand starting at position 3506 of SEQ ID NO: 916992
gcagcugugcccgcuuuaa

SEQ ID NO: 1200109 - RNA, 19 nt, Artificial Sequence
  Description of Artificial Sequence: Synthetic oligonucleotide
  Antisense strand to SEQ ID NO: 1200108
uuaaagcgggcacagcugc

SEQ ID NO: 1200110 - RNA, 19 nt, Artificial Sequence
  Description of Artificial Sequence: Synthetic oligonucleotide
  Sense strand starting at position 3552 of SEQ ID NO: 916992
ugaccugucuuagaccaga

SEQ ID NO: 1200111 - RNA, 19 nt, Artificial Sequence
  Description of Artificial Sequence: Synthetic oligonucleotide
  Antisense strand to SEQ ID NO: 1200110
ucuggucuaagacagguca

SEQ ID NO: 1200112 - RNA, 19 nt, Artificial Sequence
  Description of Artificial Sequence: Synthetic oligonucleotide
  Sense strand starting at position 3555 of SEQ ID NO: 916992
ccugucuuagaccagacau

SEQ ID NO: 1200113 - RNA, 19 nt, Artificial Sequence
  Description of Artificial Sequence: Synthetic oligonucleotide
  Antisense strand to SEQ ID NO: 1200112
augucuggucuaagacagg

SEQ ID NO: 1200114 - RNA, 19 nt, Artificial Sequence
  Description of Artificial Sequence: Synthetic oligonucleotide
  Sense strand starting at position 3821 of SEQ ID NO: 916992
guaguaaguguuggagaca

SEQ ID NO: 1200115 - RNA, 19 nt, Artificial Sequence
  Description of Artificial Sequence: Synthetic oligonucleotide
  Antisense strand to SEQ ID NO: 1200114
ugucuccaacacuuacuac

SEQ ID NO: 1200116 - RNA, 19 nt, Artificial Sequence
  Description of Artificial Sequence: Synthetic oligonucleotide
  Sense strand starting at position 3824 of SEQ ID NO: 916992
guaaguguuggagacauug

SEQ ID NO: 1200117 - RNA, 19 nt, Artificial Sequence
  Description of Artificial Sequence: Synthetic oligonucleotide
  Antisense strand to SEQ ID NO: 1200116
caaugucuccaacacuuac

SEQ ID NO: 1200118 - RNA, 19 nt, Artificial Sequence
  Description of Artificial Sequence: Synthetic oligonucleotide
  Sense strand starting at position 3905 of SEQ ID NO: 916992
uggaggguuuguucuggga

SEQ ID NO: 1200119 - RNA, 19 nt, Artificial Sequence
  Description of Artificial Sequence: Synthetic oligonucleotide
  Antisense strand to SEQ ID NO: 1200118
ucccagaacaaacccucca

SEQ ID NO: 1200120 - RNA, 19 nt, Artificial Sequence
  Description of Artificial Sequence: Synthetic oligonucleotide
  Sense strand starting at position 3909 of SEQ ID NO: 916992
ggguuuguucugggaucug

SEQ ID NO: 1200121 - RNA, 19 nt, Artificial Sequence
  Description of Artificial Sequence: Synthetic oligonucleotide
  Antisense strand to SEQ ID NO: 1200120
cagaucccagaacaaaccc

SEQ ID NO: 1200122 - RNA, 19 nt, Artificial Sequence
  Description of Artificial Sequence: Synthetic oligonucleotide
  Sense strand starting at position 3945 of SEQ ID NO: 916992
caaugauaguagcuugaau

SEQ ID NO: 1200123 - RNA, 19 nt, Artificial Sequence
  Description of Artificial Sequence: Synthetic oligonucleotide
  Antisense strand to SEQ ID NO: 1200122
auucaagcuacuaucauug

SEQ ID NO: 1200124 - RNA, 19 nt, Artificial Sequence
  Description of Artificial Sequence: Synthetic oligonucleotide
  Sense strand starting at position 501 of SEQ ID NO: 916993
acaagaaguggcugagucu

SEQ ID NO: 1200125 - RNA, 19 nt, Artificial Sequence
  Description of Artificial Sequence: Synthetic oligonucleotide
  Antisense strand to SEQ ID NO: 1200124
agacucagccacuucuugu

SEQ ID NO: 1200126 - RNA, 19 nt, Artificial Sequence
  Description of Artificial Sequence: Synthetic oligonucleotide
  Sense strand starting at position 502 of SEQ ID NO: 916993
caagaaguggcugagucuu

SEQ ID NO: 1200127 - RNA, 19 nt, Artificial Sequence
  Description of Artificial Sequence: Synthetic oligonucleotide
  Antisense strand to SEQ ID NO: 1200126
aagacucagccacuucuug

SEQ ID NO: 1200128 - RNA, 19 nt, Artificial Sequence
  Description of Artificial Sequence: Synthetic oligonucleotide
  Sense strand starting at position 512 of SEQ ID NO: 916993
cugagucuucuccguggga

SEQ ID NO: 1200129 - RNA, 19 nt, Artificial Sequence
  Description of Artificial Sequence: Synthetic oligonucleotide
  Antisense strand to SEQ ID NO: 1200128
ucccacggagaagacucag

SEQ ID NO: 1200130 - RNA, 19 nt, Artificial Sequence
  Description of Artificial Sequence: Synthetic oligonucleotide
  Sense strand starting at position 514 of SEQ ID NO: 916993
gagucuucuccgugggagu

SEQ ID NO: 1200131 - RNA, 19 nt, Artificial Sequence
  Description of Artificial Sequence: Synthetic oligonucleotide
  Antisense strand to SEQ ID NO: 1200130
acucccacggagaagacuc

SEQ ID NO: 1200132 - RNA, 19 nt, Artificial Sequence
  Description of Artificial Sequence: Synthetic oligonucleotide
  Sense strand starting at position 693 of SEQ ID NO: 916993
ucugucuauugaucagaau

SEQ ID NO: 1200133 - RNA, 19 nt, Artificial Sequence
  Description of Artificial Sequence: Synthetic oligonucleotide
  Antisense strand to SEQ ID NO: 1200132
auucugaucaauagacaga

SEQ ID NO: 1200134 - RNA, 19 nt, Artificial Sequence
  Description of Artificial Sequence: Synthetic oligonucleotide
  Sense strand starting at position 694 of SEQ ID NO: 916993
cugucuauugaucagaauc

SEQ ID NO: 1200135 - RNA, 19 nt, Artificial Sequence
  Description of Artificial Sequence: Synthetic oligonucleotide
  Antisense strand to SEQ ID NO: 1200134
gauucugaucaauagacag

SEQ ID NO: 1200136 - RNA, 19 nt, Artificial Sequence
  Description of Artificial Sequence: Synthetic oligonucleotide
  Sense strand starting at position 696 of SEQ ID NO: 916993
gucuauugaucagaaucua

SEQ ID NO: 1200137 - RNA, 19 nt, Artificial Sequence
  Description of Artificial Sequence: Synthetic oligonucleotide
  Antisense strand to SEQ ID NO: 1200136
uagauucugaucaauagac

SEQ ID NO: 1200138 - RNA, 19 nt, Artificial Sequence
  Description of Artificial Sequence: Synthetic oligonucleotide
  Sense strand starting at position 714 of SEQ ID NO: 916993
acaaccacgugucuagaaa

SEQ ID NO: 1200139 - RNA, 19 nt, Artificial Sequence
  Description of Artificial Sequence: Synthetic oligonucleotide
  Antisense strand to SEQ ID NO: 1200138
uuucuagacacgugguugu

SEQ ID NO: 1200140 - RNA, 19 nt, Artificial Sequence
  Description of Artificial Sequence: Synthetic oligonucleotide
  Sense strand starting at position 822 of SEQ ID NO: 916993
ggacaaugucacugcucca

SEQ ID NO: 1200141 - RNA, 19 nt, Artificial Sequence
  Description of Artificial Sequence: Synthetic oligonucleotide
  Antisense strand to SEQ ID NO: 1200140
uggagcagugacauugucc

SEQ ID NO: 1200142 - RNA, 19 nt, Artificial Sequence
  Description of Artificial Sequence: Synthetic oligonucleotide
  Sense strand starting at position 827 of SEQ ID NO: 916993
augucacugcuccaaauga

SEQ ID NO: 1200143 - RNA, 19 nt, Artificial Sequence
  Description of Artificial Sequence: Synthetic oligonucleotide
  Antisense strand to SEQ ID NO: 1200142
ucauuuggagcagugacau

SEQ ID NO: 1200144 - RNA, 19 nt, Artificial Sequence
  Description of Artificial Sequence: Synthetic oligonucleotide
  Sense strand starting at position 854 of SEQ ID NO: 916993
gggugauagugugcaaugu

SEQ ID NO: 1200145 - RNA, 19 nt, Artificial Sequence
  Description of Artificial Sequence: Synthetic oligonucleotide
  Antisense strand to SEQ ID NO: 1200144
acauugcacacuaucaccc

SEQ ID NO: 1200146 - RNA, 19 nt, Artificial Sequence
  Description of Artificial Sequence: Synthetic oligonucleotide
  Sense strand starting at position 855 of SEQ ID NO: 916993
ggugauagugugcaaugua

SEQ ID NO: 1200147 - RNA, 19 nt, Artificial Sequence
  Description of Artificial Sequence: Synthetic oligonucleotide
  Antisense strand to SEQ ID NO: 1200146
uacauugcacacuaucacc

SEQ ID NO: 1200148 - RNA, 19 nt, Artificial Sequence
  Description of Artificial Sequence: Synthetic oligonucleotide
  Sense strand starting at position 858 of SEQ ID NO: 916993
gauagugugcaauguaauu

SEQ ID NO: 1200149 - RNA, 19 nt, Artificial Sequence
  Description of Artificial Sequence: Synthetic oligonucleotide
  Antisense strand to SEQ ID NO: 1200148
aauuacauugcacacuauc

SEQ ID NO: 1200150 - RNA, 19 nt, Artificial Sequence
  Description of Artificial Sequence: Synthetic oligonucleotide
  Sense strand starting at position 950 of SEQ ID NO: 916993
ccgagucccucuuggucaa

SEQ ID NO: 1200151 - RNA, 19 nt, Artificial Sequence
  Description of Artificial Sequence: Synthetic oligonucleotide
  Antisense strand to SEQ ID NO: 1200150
uugaccaagagggacucgg

SEQ ID NO: 1200152 - RNA, 19 nt, Artificial Sequence
  Description of Artificial Sequence: Synthetic oligonucleotide
  Sense strand starting at position 1148 of SEQ ID NO: 916993
gaaggauagagcugggagu

SEQ ID NO: 1200153 - RNA, 19 nt, Artificial Sequence
  Description of Artificial Sequence: Synthetic oligonucleotide
  Antisense strand to SEQ ID NO: 1200152
acucccagcucuauccuuc

SEQ ID NO: 1200154 - RNA, 19 nt, Artificial Sequence
  Description of Artificial Sequence: Synthetic oligonucleotide
  Sense strand starting at position 1150 of SEQ ID NO: 916993
aggauagagcugggaguuu

SEQ ID NO: 1200155 - RNA, 19 nt, Artificial Sequence
  Description of Artificial Sequence: Synthetic oligonucleotide
  Antisense strand to SEQ ID NO: 1200154
aaacucccagcucuauccu

SEQ ID NO: 1200156 - RNA, 19 nt, Artificial Sequence
  Description of Artificial Sequence: Synthetic oligonucleotide
  Sense strand starting at position 1210 of SEQ ID NO: 916993
agaugcucuccacgccaaa

SEQ ID NO: 1200157 - RNA, 19 nt, Artificial Sequence
  Description of Artificial Sequence: Synthetic oligonucleotide
  Antisense strand to SEQ ID NO: 1200156
uuuggcguggagagcaucu

SEQ ID NO: 1200158 - RNA, 19 nt, Artificial Sequence
  Description of Artificial Sequence: Synthetic oligonucleotide
  Sense strand starting at position 1450 of SEQ ID NO: 916993
cugggcuguucucuuugaa

SEQ ID NO: 1200159 - RNA, 19 nt, Artificial Sequence
  Description of Artificial Sequence: Synthetic oligonucleotide
  Antisense strand to SEQ ID NO: 1200158
uucaaagagaacagcccag

SEQ ID NO: 1200160 - RNA, 19 nt, Artificial Sequence
  Description of Artificial Sequence: Synthetic oligonucleotide
  Sense strand starting at position 1453 of SEQ ID NO: 916993
ggcuguucucuuugaacca

SEQ ID NO: 1200161 - RNA, 19 nt, Artificial Sequence
  Description of Artificial Sequence: Synthetic oligonucleotide
  Antisense strand to SEQ ID NO: 1200160
ugguucaaagagaacagcc

SEQ ID NO: 1200162 - RNA, 19 nt, Artificial Sequence
  Description of Artificial Sequence: Synthetic oligonucleotide
  Sense strand starting at position 2160 of SEQ ID NO: 916993
gccucugcgccuccagaau

SEQ ID NO: 1200163 - RNA, 19 nt, Artificial Sequence
  Description of Artificial Sequence: Synthetic oligonucleotide
  Antisense strand to SEQ ID NO: 1200162
auucuggaggcgcagaggc

SEQ ID NO: 1200164 - RNA, 19 nt, Artificial Sequence
  Description of Artificial Sequence: Synthetic oligonucleotide
  Sense strand starting at position 2175 of SEQ ID NO: 916993
gaaucugucucuuccagga

SEQ ID NO: 1200165 - RNA, 19 nt, Artificial Sequence
  Description of Artificial Sequence: Synthetic oligonucleotide
  Antisense strand to SEQ ID NO: 1200164
uccuggaagagacagauuc

SEQ ID NO: 1200166 - RNA, 19 nt, Artificial Sequence
  Description of Artificial Sequence: Synthetic oligonucleotide
  Sense strand starting at position 2179 of SEQ ID NO: 916993
cugucucuuccaggaagag

SEQ ID NO: 1200167 - RNA, 19 nt, Artificial Sequence
  Description of Artificial Sequence: Synthetic oligonucleotide
  Antisense strand to SEQ ID NO: 1200166
cucuuccuggaagagacag

SEQ ID NO: 1200168 - RNA, 19 nt, Artificial Sequence
  Description of Artificial Sequence: Synthetic oligonucleotide
  Sense strand starting at position 2180 of SEQ ID NO: 916993
ugucucuuccaggaagagu

SEQ ID NO: 1200169 - RNA, 19 nt, Artificial Sequence
  Description of Artificial Sequence: Synthetic oligonucleotide
  Antisense strand to SEQ ID NO: 1200168
acucuuccuggaagagaca

SEQ ID NO: 1200170 - RNA, 19 nt, Artificial Sequence
  Description of Artificial Sequence: Synthetic oligonucleotide
  Sense strand starting at position 2227 of SEQ ID NO: 916993
cagagauuauuugacuuag

SEQ ID NO: 1200171 - RNA, 19 nt, Artificial Sequence
  Description of Artificial Sequence: Synthetic oligonucleotide
  Antisense strand to SEQ ID NO: 1200170
cuaagucaaauaaucucug

SEQ ID NO: 1200172 - RNA, 19 nt, Artificial Sequence
  Description of Artificial Sequence: Synthetic oligonucleotide
  Sense strand starting at position 2238 of SEQ ID NO: 916993
ugacuuagauuguguguuu

SEQ ID NO: 1200173 - RNA, 19 nt, Artificial Sequence
  Description of Artificial Sequence: Synthetic oligonucleotide
  Antisense strand to SEQ ID NO: 1200172
aaacacacaaucuaaguca

SEQ ID NO: 1200174 - RNA, 19 nt, Artificial Sequence
  Description of Artificial Sequence: Synthetic oligonucleotide
  Sense strand starting at position 2321 of SEQ ID NO: 916993
uggucauugccugacuuga

SEQ ID NO: 1200175 - RNA, 19 nt, Artificial Sequence
  Description of Artificial Sequence: Synthetic oligonucleotide
  Antisense strand to SEQ ID NO: 1200174
ucaagucaggcaaugacca

SEQ ID NO: 1200176 - RNA, 19 nt, Artificial Sequence
  Description of Artificial Sequence: Synthetic oligonucleotide
  Sense strand starting at position 2433 of SEQ ID NO: 916993
ucacguugucauuauuaug

SEQ ID NO: 1200177 - RNA, 19 nt, Artificial Sequence
  Description of Artificial Sequence: Synthetic oligonucleotide
  Antisense strand to SEQ ID NO: 1200176
cauaauaaugacaacguga

SEQ ID NO: 1200178 - RNA, 19 nt, Artificial Sequence
  Description of Artificial Sequence: Synthetic oligonucleotide
  Sense strand starting at position 2445 of SEQ ID NO: 916993
uauuaugugcugcagcuaa

SEQ ID NO: 1200179 - RNA, 19 nt, Artificial Sequence
  Description of Artificial Sequence: Synthetic oligonucleotide
  Antisense strand to SEQ ID NO: 1200178
uuagcugcagcacauaaua

SEQ ID NO: 1200180 - RNA, 19 nt, Artificial Sequence
  Description of Artificial Sequence: Synthetic oligonucleotide
  Sense strand starting at position 2511 of SEQ ID NO: 916993
agcuguuucugucgcucaa

SEQ ID NO: 1200181 - RNA, 19 nt, Artificial Sequence
  Description of Artificial Sequence: Synthetic oligonucleotide
  Antisense strand to SEQ ID NO: 1200180
uugagcgacagaaacagcu

SEQ ID NO: 1200182 - RNA, 19 nt, Artificial Sequence
  Description of Artificial Sequence: Synthetic oligonucleotide
  Sense strand starting at position 2515 of SEQ ID NO: 916993
guuucugucgcucaaggga

SEQ ID NO: 1200183 - RNA, 19 nt, Artificial Sequence
  Description of Artificial Sequence: Synthetic oligonucleotide
  Antisense strand to SEQ ID NO: 1200182
ucccuugagcgacagaaac

SEQ ID NO: 1200184 - RNA, 19 nt, Artificial Sequence
  Description of Artificial Sequence: Synthetic oligonucleotide
  Sense strand starting at position 2577 of SEQ ID NO: 916993
ugccaaguccugcaagaac

SEQ ID NO: 1200185 - RNA, 19 nt, Artificial Sequence
  Description of Artificial Sequence: Synthetic oligonucleotide
  Antisense strand to SEQ ID NO: 1200184
guucuugcaggacuuggca

SEQ ID NO: 1200186 - RNA, 19 nt, Artificial Sequence
  Description of Artificial Sequence: Synthetic oligonucleotide
  Sense strand starting at position 2753 of SEQ ID NO: 916993
ugacaccuguguuacuuua

SEQ ID NO: 1200187 - RNA, 19 nt, Artificial Sequence
  Description of Artificial Sequence: Synthetic oligonucleotide
  Antisense strand to SEQ ID NO: 1200186
uaaaguaacacagguguca

SEQ ID NO: 1200188 - RNA, 19 nt, Artificial Sequence
  Description of Artificial Sequence: Synthetic oligonucleotide
  Sense strand starting at position 3077 of SEQ ID NO: 916993
cccuguguucguugcuaaa

SEQ ID NO: 1200189 - RNA, 19 nt, Artificial Sequence
  Description of Artificial Sequence: Synthetic oligonucleotide
  Antisense strand to SEQ ID NO: 1200188
uuuagcaacgaacacaggg

SEQ ID NO: 1200190 - RNA, 19 nt, Artificial Sequence
  Description of Artificial Sequence: Synthetic oligonucleotide
  Sense strand starting at position 3080 of SEQ ID NO: 916993
uguguucguugcuaaagcu

SEQ ID NO: 1200191 - RNA, 19 nt, Artificial Sequence
  Description of Artificial Sequence: Synthetic oligonucleotide
  Antisense strand to SEQ ID NO: 1200190
agcuuuagcaacgaacaca

SEQ ID NO: 1200192 - RNA, 19 nt, Artificial Sequence
  Description of Artificial Sequence: Synthetic oligonucleotide
  Sense strand starting at position 3163 of SEQ ID NO: 916993
aggagaccuuguuucuaca

SEQ ID NO: 1200193 - RNA, 19 nt, Artificial Sequence
  Description of Artificial Sequence: Synthetic oligonucleotide
  Antisense strand to SEQ ID NO: 1200192
uguagaaacaaggucuccu

SEQ ID NO: 1200194 - RNA, 19 nt, Artificial Sequence
  Description of Artificial Sequence: Synthetic oligonucleotide
  Sense strand starting at position 3250 of SEQ ID NO: 916993
ccaagaauuccuugggccu

SEQ ID NO: 1200195 - RNA, 19 nt, Artificial Sequence
  Description of Artificial Sequence: Synthetic oligonucleotide
  Antisense strand to SEQ ID NO: 1200194
aggcccaaggaauucuugg

SEQ ID NO: 1200196 - RNA, 19 nt, Artificial Sequence
  Description of Artificial Sequence: Synthetic oligonucleotide
  Sense strand starting at position 3734 of SEQ ID NO: 916993
cuagaaaucugagaggaag

SEQ ID NO: 1200197 - RNA, 19 nt, Artificial Sequence
  Description of Artificial Sequence: Synthetic oligonucleotide
  Antisense strand to SEQ ID NO: 1200196
cuuccucucagauuucuag

SEQ ID NO: 1200198 - RNA, 19 nt, Artificial Sequence
  Description of Artificial Sequence: Synthetic oligonucleotide
  Sense strand starting at position 3745 of SEQ ID NO: 916993
agaggaaggugucagcaaa

SEQ ID NO: 1200199 - RNA, 19 nt, Artificial Sequence
  Description of Artificial Sequence: Synthetic oligonucleotide
  Antisense strand to SEQ ID NO: 1200198
uuugcugacaccuuccucu

SEQ ID NO: 1200200 - RNA, 19 nt, Artificial Sequence
  Description of Artificial Sequence: Synthetic oligonucleotide
  Sense strand starting at position 3900 of SEQ ID NO: 916993
ucuucuuuccugugugcau

SEQ ID NO: 1200201 - RNA, 19 nt, Artificial Sequence
  Description of Artificial Sequence: Synthetic oligonucleotide
  Antisense strand to SEQ ID NO: 1200200
augcacacaggaaagaaga

SEQ ID NO: 1200202 - RNA, 19 nt, Artificial Sequence
  Description of Artificial Sequence: Synthetic oligonucleotide
  Sense strand starting at position 3 of SEQ ID NO: 916994
caagguuguugccuuauuu

SEQ ID NO: 1200203 - RNA, 19 nt, Artificial Sequence
  Description of Artificial Sequence: Synthetic oligonucleotide
  Antisense strand to SEQ ID NO: 1200202
aaauaaggcaacaaccuug

SEQ ID NO: 1200204 - RNA, 19 nt, Artificial Sequence
  Description of Artificial Sequence: Synthetic oligonucleotide
  Sense strand starting at position 72 of SEQ ID NO: 916994
gcaagaauggugcagagua

SEQ ID NO: 1200205 - RNA, 19 nt, Artificial Sequence
  Description of Artificial Sequence: Synthetic oligonucleotide
  Antisense strand to SEQ ID NO: 1200204
uacucugcaccauucuugc

SEQ ID NO: 1200206 - RNA, 19 nt, Artificial Sequence
  Description of Artificial Sequence: Synthetic oligonucleotide
  Sense strand starting at position 103 of SEQ ID NO: 916994
ugggcuguccaggaucaua

SEQ ID NO: 1200207 - RNA, 19 nt, Artificial Sequence
  Description of Artificial Sequence: Synthetic oligonucleotide
  Antisense strand to SEQ ID NO: 1200206
uaugauccuggacagccca

SEQ ID NO: 1200208 - RNA, 19 nt, Artificial Sequence
  Description of Artificial Sequence: Synthetic oligonucleotide
  Sense strand starting at position 227 of SEQ ID NO: 916994
agaucugaucaugaugcuu

SEQ ID NO: 1200209 - RNA, 19 nt, Artificial Sequence
  Description of Artificial Sequence: Synthetic oligonucleotide
  Antisense strand to SEQ ID NO: 1200208
aagcaucaugaucagaucu

SEQ ID NO: 1200210 - RNA, 19 nt, Artificial Sequence
  Description of Artificial Sequence: Synthetic oligonucleotide
  Sense strand starting at position 290 of SEQ ID NO: 916994
ucaucuggccuccaugauu

SEQ ID NO: 1200211 - RNA, 19 nt, Artificial Sequence
  Description of Artificial Sequence: Synthetic oligonucleotide
  Antisense strand to SEQ ID NO: 1200210
aaucauggaggccagauga

SEQ ID NO: 1200212 - RNA, 19 nt, Artificial Sequence
  Description of Artificial Sequence: Synthetic oligonucleotide
  Sense strand starting at position 472 of SEQ ID NO: 916994
acacacuuccaucguagaa

SEQ ID NO: 1200213 - RNA, 19 nt, Artificial Sequence
  Description of Artificial Sequence: Synthetic oligonucleotide
  Antisense strand to SEQ ID NO: 1200212
uucuacgauggaagugugu

SEQ ID NO: 1200214 - RNA, 19 nt, Artificial Sequence
  Description of Artificial Sequence: Synthetic oligonucleotide
  Sense strand starting at position 476 of SEQ ID NO: 916994
acuuccaucguagaaucuu

SEQ ID NO: 1200215 - RNA, 19 nt, Artificial Sequence
  Description of Artificial Sequence: Synthetic oligonucleotide
  Antisense strand to SEQ ID NO: 1200214
aagauucuacgauggaagu

SEQ ID NO: 1200216 - RNA, 19 nt, Artificial Sequence
  Description of Artificial Sequence: Synthetic oligonucleotide
  Sense strand starting at position 496 of SEQ ID NO: 916994
acaucuuggcacugaauga

SEQ ID NO: 1200217 - RNA, 19 nt, Artificial Sequence
  Description of Artificial Sequence: Synthetic oligonucleotide
  Antisense strand to SEQ ID NO: 1200216
ucauucagugccaagaugu

SEQ ID NO: 1200218 - RNA, 19 nt, Artificial Sequence
  Description of Artificial Sequence: Synthetic oligonucleotide
  Sense strand starting at position 563 of SEQ ID NO: 916994
gaggacaagucacugucuu

SEQ ID NO: 1200219 - RNA, 19 nt, Artificial Sequence
  Description of Artificial Sequence: Synthetic oligonucleotide
  Antisense strand to SEQ ID NO: 1200218
aagacagugacuuguccuc

SEQ ID NO: 1200220 - RNA, 19 nt, Artificial Sequence
  Description of Artificial Sequence: Synthetic oligonucleotide
  Sense strand starting at position 564 of SEQ ID NO: 916994
aggacaagucacugucuua

SEQ ID NO: 1200221 - RNA, 19 nt, Artificial Sequence
  Description of Artificial Sequence: Synthetic oligonucleotide
  Antisense strand to SEQ ID NO: 1200220
uaagacagugacuuguccu

SEQ ID NO: 1200222 - RNA, 19 nt, Artificial Sequence
  Description of Artificial Sequence: Synthetic oligonucleotide
  Sense strand starting at position 567 of SEQ ID NO: 916994
acaagucacugucuuaaag

SEQ ID NO: 1200223 - RNA, 19 nt, Artificial Sequence
  Description of Artificial Sequence: Synthetic oligonucleotide
  Antisense strand to SEQ ID NO: 1200222
cuuuaagacagugacuugu

SEQ ID NO: 1200224 - RNA, 19 nt, Artificial Sequence
  Description of Artificial Sequence: Synthetic oligonucleotide
  Sense strand starting at position 577 of SEQ ID NO: 916994
gucuuaaaggcauagaguu

SEQ ID NO: 1200225 - RNA, 19 nt, Artificial Sequence
  Description of Artificial Sequence: Synthetic oligonucleotide
  Antisense strand to SEQ ID NO: 1200224
aacucuaugccuuuaagac

SEQ ID NO: 1200226 - RNA, 19 nt, Artificial Sequence
  Description of Artificial Sequence: Synthetic oligonucleotide
  Sense strand starting at position 867 of SEQ ID NO: 916994
auuugagauucccaggaca

SEQ ID NO: 1200227 - RNA, 19 nt, Artificial Sequence
  Description of Artificial Sequence: Synthetic oligonucleotide
  Antisense strand to SEQ ID NO: 1200226
uguccugggaaucucaaau

SEQ ID NO: 1200228 - RNA, 19 nt, Artificial Sequence
  Description of Artificial Sequence: Synthetic oligonucleotide
  Sense strand starting at position 869 of SEQ ID NO: 916994
uugagauucccaggacauc

SEQ ID NO: 1200229 - RNA, 19 nt, Artificial Sequence
  Description of Artificial Sequence: Synthetic oligonucleotide
  Antisense strand to SEQ ID NO: 1200228
gauguccugggaaucucaa

SEQ ID NO: 1200230 - RNA, 19 nt, Artificial Sequence
  Description of Artificial Sequence: Synthetic oligonucleotide
  Sense strand starting at position 878 of SEQ ID NO: 916994
ccaggacaucucuguucca

SEQ ID NO: 1200231 - RNA, 19 nt, Artificial Sequence
  Description of Artificial Sequence: Synthetic oligonucleotide
  Antisense strand to SEQ ID NO: 1200230
uggaacagagauguccugg

SEQ ID NO: 1200232 - RNA, 19 nt, Artificial Sequence
  Description of Artificial Sequence: Synthetic oligonucleotide
  Sense strand starting at position 881 of SEQ ID NO: 916994
ggacaucucuguuccaaca

SEQ ID NO: 1200233 - RNA, 19 nt, Artificial Sequence
  Description of Artificial Sequence: Synthetic oligonucleotide
  Antisense strand to SEQ ID NO: 1200232
uguuggaacagagaugucc

SEQ ID NO: 1200234 - RNA, 19 nt, Artificial Sequence
  Description of Artificial Sequence: Synthetic oligonucleotide
  Sense strand starting at position 941 of SEQ ID NO: 916994
auuagauggcaccagcaua

SEQ ID NO: 1200235 - RNA, 19 nt, Artificial Sequence
  Description of Artificial Sequence: Synthetic oligonucleotide
  Antisense strand to SEQ ID NO: 1200234
uaugcuggugccaucuaau

SEQ ID NO: 1200236 - RNA, 19 nt, Artificial Sequence
  Description of Artificial Sequence: Synthetic oligonucleotide
  Sense strand starting at position 976 of SEQ ID NO: 916994
uggaaucugcuugguagga

SEQ ID NO: 1200237 - RNA, 19 nt, Artificial Sequence
  Description of Artificial Sequence: Synthetic oligonucleotide
  Antisense strand to SEQ ID NO: 1200236
uccuaccaagcagauucca

SEQ ID NO: 1200238 - RNA, 19 nt, Artificial Sequence
  Description of Artificial Sequence: Synthetic oligonucleotide
  Sense strand starting at position 1169 of SEQ ID NO: 916994
auauguuuaucuguaggau

SEQ ID NO: 1200239 - RNA, 19 nt, Artificial Sequence
  Description of Artificial Sequence: Synthetic oligonucleotide
  Antisense strand to SEQ ID NO: 1200238
auccuacagauaaacauau

SEQ ID NO: 1200240 - RNA, 19 nt, Artificial Sequence
  Description of Artificial Sequence: Synthetic oligonucleotide
  Sense strand starting at position 1170 of SEQ ID NO: 916994
uauguuuaucuguaggaug

SEQ ID NO: 1200241 - RNA, 19 nt, Artificial Sequence
  Description of Artificial Sequence: Synthetic oligonucleotide
  Antisense strand to SEQ ID NO: 1200240
cauccuacagauaaacaua

SEQ ID NO: 1200242 - RNA, 19 nt, Artificial Sequence
  Description of Artificial Sequence: Synthetic oligonucleotide
  Sense strand starting at position 1281 of SEQ ID NO: 916994
aucaaauggugccugagaa

SEQ ID NO: 1200243 - RNA, 19 nt, Artificial Sequence
  Description of Artificial Sequence: Synthetic oligonucleotide
  Antisense strand to SEQ ID NO: 1200242
uucucaggcaccauuugau

SEQ ID NO: 1200244 - RNA, 19 nt, Artificial Sequence
  Description of Artificial Sequence: Synthetic oligonucleotide
  Sense strand starting at position 1282 of SEQ ID NO: 916994
ucaaauggugccugagaag

SEQ ID NO: 1200245 - RNA, 19 nt, Artificial Sequence
  Description of Artificial Sequence: Synthetic oligonucleotide
  Antisense strand to SEQ ID NO: 1200244
cuucucaggcaccauuuga

SEQ ID NO: 1200246 - RNA, 19 nt, Artificial Sequence
  Description of Artificial Sequence: Synthetic oligonucleotide
  Sense strand starting at position 1322 of SEQ ID NO: 916994
gugaaaucccagcauauca

SEQ ID NO: 1200247 - RNA, 19 nt, Artificial Sequence
  Description of Artificial Sequence: Synthetic oligonucleotide
  Antisense strand to SEQ ID NO: 1200246
ugauaugcugggauuucac

SEQ ID NO: 1200248 - RNA, 19 nt, Artificial Sequence
  Description of Artificial Sequence: Synthetic oligonucleotide
  Sense strand starting at position 1594 of SEQ ID NO: 916994
ucaaaugaaugcucugaau

SEQ ID NO: 1200249 - RNA, 19 nt, Artificial Sequence
  Description of Artificial Sequence: Synthetic oligonucleotide
  Antisense strand to SEQ ID NO: 1200248
auucagagcauucauuuga

SEQ ID NO: 1200250 - RNA, 19 nt, Artificial Sequence
  Description of Artificial Sequence: Synthetic oligonucleotide
  Sense strand starting at position 1612 of SEQ ID NO: 916994
uugugaacucaagguauaa

SEQ ID NO: 1200251 - RNA, 19 nt, Artificial Sequence
  Description of Artificial Sequence: Synthetic oligonucleotide
  Antisense strand to SEQ ID NO: 1200250
uuauaccuugaguucacaa

SEQ ID NO: 1200252 - RNA, 19 nt, Artificial Sequence
  Description of Artificial Sequence: Synthetic oligonucleotide
  Sense strand starting at position 1986 of SEQ ID NO: 916994
uuggaaaccuggcuaugaa

SEQ ID NO: 1200253 - RNA, 19 nt, Artificial Sequence
  Description of Artificial Sequence: Synthetic oligonucleotide
  Antisense strand to SEQ ID NO: 1200252
uucauagccagguuuccaa

SEQ ID NO: 1200254 - RNA, 19 nt, Artificial Sequence
  Description of Artificial Sequence: Synthetic oligonucleotide
  Sense strand starting at position 1989 of SEQ ID NO: 916994
gaaaccuggcuaugaaagu

SEQ ID NO: 1200255 - RNA, 19 nt, Artificial Sequence
  Description of Artificial Sequence: Synthetic oligonucleotide
  Antisense strand to SEQ ID NO: 1200254
acuuucauagccagguuuc

SEQ ID NO: 1200256 - RNA, 19 nt, Artificial Sequence
  Description of Artificial Sequence: Synthetic oligonucleotide
  Sense strand starting at position 2135 of SEQ ID NO: 916994
acuauuccaguguaacuua

SEQ ID NO: 1200257 - RNA, 19 nt, Artificial Sequence
  Description of Artificial Sequence: Synthetic oligonucleotide
  Antisense strand to SEQ ID NO: 1200256
uaaguuacacuggaauagu

SEQ ID NO: 1200258 - RNA, 19 nt, Artificial Sequence
  Description of Artificial Sequence: Synthetic oligonucleotide
  Sense strand starting at position 2257 of SEQ ID NO: 916994
ggaggucuggugggaguua

SEQ ID NO: 1200259 - RNA, 19 nt, Artificial Sequence
  Description of Artificial Sequence: Synthetic oligonucleotide
  Antisense strand to SEQ ID NO: 1200258
uaacucccaccagaccucc

SEQ ID NO: 1200260 - RNA, 19 nt, Artificial Sequence
  Description of Artificial Sequence: Synthetic oligonucleotide
  Sense strand starting at position 2420 of SEQ ID NO: 916994
gugggaaugcaaggacuau

SEQ ID NO: 1200261 - RNA, 19 nt, Artificial Sequence
  Description of Artificial Sequence: Synthetic oligonucleotide
  Antisense strand to SEQ ID NO: 1200260
auaguccuugcauucccac

SEQ ID NO: 1200262 - RNA, 19 nt, Artificial Sequence
  Description of Artificial Sequence: Synthetic oligonucleotide
  Sense strand starting at position 2477 of SEQ ID NO: 916994
ucuagauucuuagugauac

SEQ ID NO: 1200263 - RNA, 19 nt, Artificial Sequence
  Description of Artificial Sequence: Synthetic oligonucleotide
  Antisense strand to SEQ ID NO: 1200262
guaucacuaagaaucuaga

SEQ ID NO: 1200264 - RNA, 19 nt, Artificial Sequence
  Description of Artificial Sequence: Synthetic oligonucleotide
  Sense strand starting at position 2603 of SEQ ID NO: 916994
uccugauauguauagcaug

SEQ ID NO: 1200265 - RNA, 19 nt, Artificial Sequence
  Description of Artificial Sequence: Synthetic oligonucleotide
  Antisense strand to SEQ ID NO: 1200264
caugcuauacauaucagga

SEQ ID NO: 1200266 - RNA, 19 nt, Artificial Sequence
  Description of Artificial Sequence: Synthetic oligonucleotide
  Sense strand starting at position 2800 of SEQ ID NO: 916994
gggaguucugcuugagaag

SEQ ID NO: 1200267 - RNA, 19 nt, Artificial Sequence
  Description of Artificial Sequence: Synthetic oligonucleotide
  Antisense strand to SEQ ID NO: 1200266
cuucucaagcagaacuccc

SEQ ID NO: 1200268 - RNA, 19 nt, Artificial Sequence
  Description of Artificial Sequence: Synthetic oligonucleotide
  Sense strand starting at position 2801 of SEQ ID NO: 916994
ggaguucugcuugagaagg

SEQ ID NO: 1200269 - RNA, 19 nt, Artificial Sequence
  Description of Artificial Sequence: Synthetic oligonucleotide
  Antisense strand to SEQ ID NO: 1200268
ccuucucaagcagaacucc

SEQ ID NO: 1200270 - RNA, 19 nt, Artificial Sequence
  Description of Artificial Sequence: Synthetic oligonucleotide
  Sense strand starting at position 2841 of SEQ ID NO: 916994
gagugcugggauugauuaa

SEQ ID NO: 1200271 - RNA, 19 nt, Artificial Sequence
  Description of Artificial Sequence: Synthetic oligonucleotide
  Antisense strand to SEQ ID NO: 1200270
uuaaucaaucccagcacuc

SEQ ID NO: 1200272 - RNA, 19 nt, Artificial Sequence
  Description of Artificial Sequence: Synthetic oligonucleotide
  Sense strand starting at position 2842 of SEQ ID NO: 916994
agugcugggauugauuaau

SEQ ID NO: 1200273 - RNA, 19 nt, Artificial Sequence
  Description of Artificial Sequence: Synthetic oligonucleotide
  Antisense strand to SEQ ID NO: 1200272
auuaaucaaucccagcacu

SEQ ID NO: 1200274 - RNA, 19 nt, Artificial Sequence
  Description of Artificial Sequence: Synthetic oligonucleotide
  Sense strand starting at position 3420 of SEQ ID NO: 916994
ucuuaugagguuugaauca

SEQ ID NO: 1200275 - RNA, 19 nt, Artificial Sequence
  Description of Artificial Sequence: Synthetic oligonucleotide
  Antisense strand to SEQ ID NO: 1200274
ugauucaaaccucauaaga

SEQ ID NO: 1200276 - RNA, 19 nt, Artificial Sequence
  Description of Artificial Sequence: Synthetic oligonucleotide
  Sense strand starting at position 3854 of SEQ ID NO: 916994
acuauuauagugugggacu

SEQ ID NO: 1200277 - RNA, 19 nt, Artificial Sequence
  Description of Artificial Sequence: Synthetic oligonucleotide
  Antisense strand to SEQ ID NO: 1200276
agucccacacuauaauagu

SEQ ID NO: 1200278 - RNA, 19 nt, Artificial Sequence
  Description of Artificial Sequence: Synthetic oligonucleotide
  Sense strand starting at position 3937 of SEQ ID NO: 916994
acauuaagcugguuugaag

SEQ ID NO: 1200279 - RNA, 19 nt, Artificial Sequence
  Description of Artificial Sequence: Synthetic oligonucleotide
  Antisense strand to SEQ ID NO: 1200278
cuucaaaccagcuuaaugu

SEQ ID NO: 1200280 - RNA, 19 nt, Artificial Sequence
  Description of Artificial Sequence: Synthetic oligonucleotide
  Sense strand starting at position 3974 of SEQ ID NO: 916994
gugggugaucuauaacauc

SEQ ID NO: 1200281 - RNA, 19 nt, Artificial Sequence
  Description of Artificial Sequence: Synthetic oligonucleotide
  Antisense strand to SEQ ID NO: 1200280
gauguuauagaucacccac

SEQ ID NO: 1200282 - RNA, 19 nt, Artificial Sequence
  Description of Artificial Sequence: Synthetic oligonucleotide
  Sense strand starting at position 19 of SEQ ID NO: 916995
gugagagacuggagugaug

SEQ ID NO: 1200283 - RNA, 19 nt, Artificial Sequence
  Description of Artificial Sequence: Synthetic oligonucleotide
  Antisense strand to SEQ ID NO: 1200282
caucacuccagucucucac

SEQ ID NO: 1200284 - RNA, 19 nt, Artificial Sequence
  Description of Artificial Sequence: Synthetic oligonucleotide
  Sense strand starting at position 118 of SEQ ID NO: 916995
gcaaguguggcucugccaa

SEQ ID NO: 1200285 - RNA, 19 nt, Artificial Sequence
  Description of Artificial Sequence: Synthetic oligonucleotide
  Antisense strand to SEQ ID NO: 1200284
uuggcagagccacacuugc

SEQ ID NO: 1200286 - RNA, 19 nt, Artificial Sequence
  Description of Artificial Sequence: Synthetic oligonucleotide
  Sense strand starting at position 410 of SEQ ID NO: 916995
gacuuuaucccaggguaau

SEQ ID NO: 1200287 - RNA, 19 nt, Artificial Sequence
  Description of Artificial Sequence: Synthetic oligonucleotide
  Antisense strand to SEQ ID NO: 1200286
auuacccugggauaaaguc

SEQ ID NO: 1200288 - RNA, 19 nt, Artificial Sequence
  Description of Artificial Sequence: Synthetic oligonucleotide
  Sense strand starting at position 411 of SEQ ID NO: 916995
acuuuaucccaggguaaug

SEQ ID NO: 1200289 - RNA, 19 nt, Artificial Sequence
  Description of Artificial Sequence: Synthetic oligonucleotide
  Antisense strand to SEQ ID NO: 1200288
cauuacccugggauaaagu

SEQ ID NO: 1200290 - RNA, 19 nt, Artificial Sequence
  Description of Artificial Sequence: Synthetic oligonucleotide
  Sense strand starting at position 473 of SEQ ID NO: 916995
uugauauaacacgguuaag

SEQ ID NO: 1200291 - RNA, 19 nt, Artificial Sequence
  Description of Artificial Sequence: Synthetic oligonucleotide
  Antisense strand to SEQ ID NO: 1200290
cuuaaccguguuauaucaa

SEQ ID NO: 1200292 - RNA, 19 nt, Artificial Sequence
  Description of Artificial Sequence: Synthetic oligonucleotide
  Sense strand starting at position 499 of SEQ ID NO: 916995
ucugcuauuacggagaaug

SEQ ID NO: 1200293 - RNA, 19 nt, Artificial Sequence
  Description of Artificial Sequence: Synthetic oligonucleotide
  Antisense strand to SEQ ID NO: 1200292
cauucuccguaauagcaga

SEQ ID NO: 1200294 - RNA, 19 nt, Artificial Sequence
  Description of Artificial Sequence: Synthetic oligonucleotide
  Sense strand starting at position 603 of SEQ ID NO: 916995
caaagacgguccuuguaga

SEQ ID NO: 1200295 - RNA, 19 nt, Artificial Sequence
  Description of Artificial Sequence: Synthetic oligonucleotide
  Antisense strand to SEQ ID NO: 1200294
ucuacaaggaccgucuuug

SEQ ID NO: 1200296 - RNA, 19 nt, Artificial Sequence
  Description of Artificial Sequence: Synthetic oligonucleotide
  Sense strand starting at position 656 of SEQ ID NO: 916995
ggccauccauucuccaaga

SEQ ID NO: 1200297 - RNA, 19 nt, Artificial Sequence
  Description of Artificial Sequence: Synthetic oligonucleotide
  Antisense strand to SEQ ID NO: 1200296
ucuuggagaauggauggcc

SEQ ID NO: 1200298 - RNA, 19 nt, Artificial Sequence
  Description of Artificial Sequence: Synthetic oligonucleotide
  Sense strand starting at position 737 of SEQ ID NO: 916995
gacucuuagcuauguagag

SEQ ID NO: 1200299 - RNA, 19 nt, Artificial Sequence
  Description of Artificial Sequence: Synthetic oligonucleotide
  Antisense strand to SEQ ID NO: 1200298
cucuacauagcuaagaguc

SEQ ID NO: 1200300 - RNA, 19 nt, Artificial Sequence
  Description of Artificial Sequence: Synthetic oligonucleotide
  Sense strand starting at position 762 of SEQ ID NO: 916995
ugcuuuauauauccugaga

SEQ ID NO: 1200301 - RNA, 19 nt, Artificial Sequence
  Description of Artificial Sequence: Synthetic oligonucleotide
  Antisense strand to SEQ ID NO: 1200300
ucucaggauauauaaagca

SEQ ID NO: 1200302 - RNA, 19 nt, Artificial Sequence
  Description of Artificial Sequence: Synthetic oligonucleotide
  Sense strand starting at position 898 of SEQ ID NO: 916995
cugugugaccuggacacuu

SEQ ID NO: 1200303 - RNA, 19 nt, Artificial Sequence
  Description of Artificial Sequence: Synthetic oligonucleotide
  Antisense strand to SEQ ID NO: 1200302
aaguguccaggucacacag

SEQ ID NO: 1200304 - RNA, 19 nt, Artificial Sequence
  Description of Artificial Sequence: Synthetic oligonucleotide
  Sense strand starting at position 900 of SEQ ID NO: 916995
gugugaccuggacacuuaa

SEQ ID NO: 1200305 - RNA, 19 nt, Artificial Sequence
  Description of Artificial Sequence: Synthetic oligonucleotide
  Antisense strand to SEQ ID NO: 1200304
uuaaguguccaggucacac

SEQ ID NO: 1200306 - RNA, 19 nt, Artificial Sequence
  Description of Artificial Sequence: Synthetic oligonucleotide
  Sense strand starting at position 1080 of SEQ ID NO: 916995
ccugaucaggccugaaauc

SEQ ID NO: 1200307 - RNA, 19 nt, Artificial Sequence
  Description of Artificial Sequence: Synthetic oligonucleotide
  Antisense strand to SEQ ID NO: 1200306
gauuucaggccugaucagg

SEQ ID NO: 1200308 - RNA, 19 nt, Artificial Sequence
  Description of Artificial Sequence: Synthetic oligonucleotide
  Sense strand starting at position 1162 of SEQ ID NO: 916995
ucugguaggacuuggacau

SEQ ID NO: 1200309 - RNA, 19 nt, Artificial Sequence
  Description of Artificial Sequence: Synthetic oligonucleotide
  Antisense strand to SEQ ID NO: 1200308
auguccaaguccuaccaga

SEQ ID NO: 1200310 - RNA, 19 nt, Artificial Sequence
  Description of Artificial Sequence: Synthetic oligonucleotide
  Sense strand starting at position 1175 of SEQ ID NO: 916995
ggacaucaauuagcuauga

SEQ ID NO: 1200311 - RNA, 19 nt, Artificial Sequence
  Description of Artificial Sequence: Synthetic oligonucleotide
  Antisense strand to SEQ ID NO: 1200310
ucauagcuaauugaugucc

SEQ ID NO: 1200312 - RNA, 19 nt, Artificial Sequence
  Description of Artificial Sequence: Synthetic oligonucleotide
  Sense strand starting at position 1397 of SEQ ID NO: 916995
aggagagaccugugagcua

SEQ ID NO: 1200313 - RNA, 19 nt, Artificial Sequence
  Description of Artificial Sequence: Synthetic oligonucleotide
  Antisense strand to SEQ ID NO: 1200312
uagcucacaggucucuccu

SEQ ID NO: 1200314 - RNA, 19 nt, Artificial Sequence
  Description of Artificial Sequence: Synthetic oligonucleotide
  Sense strand starting at position 1416 of SEQ ID NO: 916995
gaaggagauuuggguguca

SEQ ID NO: 1200315 - RNA, 19 nt, Artificial Sequence
  Description of Artificial Sequence: Synthetic oligonucleotide
  Antisense strand to SEQ ID NO: 1200314
ugacacccaaaucuccuuc

SEQ ID NO: 1200316 - RNA, 19 nt, Artificial Sequence
  Description of Artificial Sequence: Synthetic oligonucleotide
  Sense strand starting at position 1532 of SEQ ID NO: 916995
agaggcuuugguggagaga

SEQ ID NO: 1200317 - RNA, 19 nt, Artificial Sequence
  Description of Artificial Sequence: Synthetic oligonucleotide
  Antisense strand to SEQ ID NO: 1200316
ucucuccaccaaagccucu

SEQ ID NO: 1200318 - RNA, 19 nt, Artificial Sequence
  Description of Artificial Sequence: Synthetic oligonucleotide
  Sense strand starting at position 1641 of SEQ ID NO: 916995
uguguuguuagagaaggca

SEQ ID NO: 1200319 - RNA, 19 nt, Artificial Sequence
  Description of Artificial Sequence: Synthetic oligonucleotide
  Antisense strand to SEQ ID NO: 1200318
ugccuucucuaacaacaca

SEQ ID NO: 1200320 - RNA, 19 nt, Artificial Sequence
  Description of Artificial Sequence: Synthetic oligonucleotide
  Sense strand starting at position 1832 of SEQ ID NO: 916995
ucaagaaguuugcugcaaa

SEQ ID NO: 1200321 - RNA, 19 nt, Artificial Sequence
  Description of Artificial Sequence: Synthetic oligonucleotide
  Antisense strand to SEQ ID NO: 1200320
uuugcagcaaacuucuuga

SEQ ID NO: 1200322 - RNA, 19 nt, Artificial Sequence
  Description of Artificial Sequence: Synthetic oligonucleotide
  Sense strand starting at position 2094 of SEQ ID NO: 916995
agccgauguuuacuauaca

SEQ ID NO: 1200323 - RNA, 19 nt, Artificial Sequence
  Description of Artificial Sequence: Synthetic oligonucleotide
  Antisense strand to SEQ ID NO: 1200322
uguauaguaaacaucggcu

SEQ ID NO: 1200324 - RNA, 19 nt, Artificial Sequence
  Description of Artificial Sequence: Synthetic oligonucleotide
  Sense strand starting at position 2097 of SEQ ID NO: 916995
cgauguuuacuauacaggu

SEQ ID NO: 1200325 - RNA, 19 nt, Artificial Sequence
  Description of Artificial Sequence: Synthetic oligonucleotide
  Antisense strand to SEQ ID NO: 1200324
accuguauaguaaacaucg

SEQ ID NO: 1200326 - RNA, 19 nt, Artificial Sequence
  Description of Artificial Sequence: Synthetic oligonucleotide
  Sense strand starting at position 2137 of SEQ ID NO: 916995
gagcucaugugcuccauuu

SEQ ID NO: 1200327 - RNA, 19 nt, Artificial Sequence
  Description of Artificial Sequence: Synthetic oligonucleotide
  Antisense strand to SEQ ID NO: 1200326
aaauggagcacaugagcuc

SEQ ID NO: 1200328 - RNA, 19 nt, Artificial Sequence
  Description of Artificial Sequence: Synthetic oligonucleotide
  Sense strand starting at position 2257 of SEQ ID NO: 916995
gucacuucggaacagagua

SEQ ID NO: 1200329 - RNA, 19 nt, Artificial Sequence
  Description of Artificial Sequence: Synthetic oligonucleotide
  Antisense strand to SEQ ID NO: 1200328
uacucuguuccgaagugac

SEQ ID NO: 1200330 - RNA, 19 nt, Artificial Sequence
  Description of Artificial Sequence: Synthetic oligonucleotide
  Sense strand starting at position 2351 of SEQ ID NO: 916995
ugcugagcuccucagaguu

SEQ ID NO: 1200331 - RNA, 19 nt, Artificial Sequence
  Description of Artificial Sequence: Synthetic oligonucleotide
  Antisense strand to SEQ ID NO: 1200330
aacucugaggagcucagca

SEQ ID NO: 1200332 - RNA, 19 nt, Artificial Sequence
  Description of Artificial Sequence: Synthetic oligonucleotide
  Sense strand starting at position 2447 of SEQ ID NO: 916995
gucauaacugggcauguga

SEQ ID NO: 1200333 - RNA, 19 nt, Artificial Sequence
  Description of Artificial Sequence: Synthetic oligonucleotide
  Antisense strand to SEQ ID NO: 1200332
ucacaugcccaguuaugac

SEQ ID NO: 1200334 - RNA, 19 nt, Artificial Sequence
  Description of Artificial Sequence: Synthetic oligonucleotide
  Sense strand starting at position 2663 of SEQ ID NO: 916995
caaagaaacucgguccuca

SEQ ID NO: 1200335 - RNA, 19 nt, Artificial Sequence
  Description of Artificial Sequence: Synthetic oligonucleotide
  Antisense strand to SEQ ID NO: 1200334
ugaggaccgaguuucuuug

SEQ ID NO: 1200336 - RNA, 19 nt, Artificial Sequence
  Description of Artificial Sequence: Synthetic oligonucleotide
  Sense strand starting at position 2713 of SEQ ID NO: 916995
aucugauaugauuguauag

SEQ ID NO: 1200337 - RNA, 19 nt, Artificial Sequence
  Description of Artificial Sequence: Synthetic oligonucleotide
  Antisense strand to SEQ ID NO: 1200336
cuauacaaucauaucagau

SEQ ID NO: 1200338 - RNA, 19 nt, Artificial Sequence
  Description of Artificial Sequence: Synthetic oligonucleotide
  Sense strand starting at position 2736 of SEQ ID NO: 916995
agcucauuccaugagacac

SEQ ID NO: 1200339 - RNA, 19 nt, Artificial Sequence
  Description of Artificial Sequence: Synthetic oligonucleotide
  Antisense strand to SEQ ID NO: 1200338
gugucucauggaaugagcu

SEQ ID NO: 1200340 - RNA, 19 nt, Artificial Sequence
  Description of Artificial Sequence: Synthetic oligonucleotide
  Sense strand starting at position 2821 of SEQ ID NO: 916995
gcuaguaagccagagagcu

SEQ ID NO: 1200341 - RNA, 19 nt, Artificial Sequence
  Description of Artificial Sequence: Synthetic oligonucleotide
  Antisense strand to SEQ ID NO: 1200340
agcucucuggcuuacuagc

SEQ ID NO: 1200342 - RNA, 19 nt, Artificial Sequence
  Description of Artificial Sequence: Synthetic oligonucleotide
  Sense strand starting at position 3090 of SEQ ID NO: 916995
gccacaauccgugcguuca

SEQ ID NO: 1200343 - RNA, 19 nt, Artificial Sequence
  Description of Artificial Sequence: Synthetic oligonucleotide
  Antisense strand to SEQ ID NO: 1200342
ugaacgcacggauuguggc

SEQ ID NO: 1200344 - RNA, 19 nt, Artificial Sequence
  Description of Artificial Sequence: Synthetic oligonucleotide
  Sense strand starting at position 3117 of SEQ ID NO: 916995
uuugaaggcuuaguaaaua

SEQ ID NO: 1200345 - RNA, 19 nt, Artificial Sequence
  Description of Artificial Sequence: Synthetic oligonucleotide
  Antisense strand to SEQ ID NO: 1200344
uauuuacuaagccuucaaa

SEQ ID NO: 1200346 - RNA, 19 nt, Artificial Sequence
  Description of Artificial Sequence: Synthetic oligonucleotide
  Sense strand starting at position 3160 of SEQ ID NO: 916995
gcuaaucacuucuccgaua

SEQ ID NO: 1200347 - RNA, 19 nt, Artificial Sequence
  Description of Artificial Sequence: Synthetic oligonucleotide
  Antisense strand to SEQ ID NO: 1200346
uaucggagaagugauuagc

SEQ ID NO: 1200348 - RNA, 19 nt, Artificial Sequence
  Description of Artificial Sequence: Synthetic oligonucleotide
  Sense strand starting at position 3165 of SEQ ID NO: 916995
ucacuucuccgauauuguc

SEQ ID NO: 1200349 - RNA, 19 nt, Artificial Sequence
  Description of Artificial Sequence: Synthetic oligonucleotide
  Antisense strand to SEQ ID NO: 1200348
gacaauaucggagaaguga

SEQ ID NO: 1200350 - RNA, 19 nt, Artificial Sequence
  Description of Artificial Sequence: Synthetic oligonucleotide
  Sense strand starting at position 3173 of SEQ ID NO: 916995
ccgauauugucauuacuuc

SEQ ID NO: 1200351 - RNA, 19 nt, Artificial Sequence
  Description of Artificial Sequence: Synthetic oligonucleotide
  Antisense strand to SEQ ID NO: 1200350
gaaguaaugacaauaucgg

SEQ ID NO: 1200352 - RNA, 19 nt, Artificial Sequence
  Description of Artificial Sequence: Synthetic oligonucleotide
  Sense strand starting at position 3470 of SEQ ID NO: 916995
ugagaaaucgcuggcauga

SEQ ID NO: 1200353 - RNA, 19 nt, Artificial Sequence
  Description of Artificial Sequence: Synthetic oligonucleotide
  Antisense strand to SEQ ID NO: 1200352
ucaugccagcgauuucuca

SEQ ID NO: 1200354 - RNA, 19 nt, Artificial Sequence
  Description of Artificial Sequence: Synthetic oligonucleotide
  Sense strand starting at position 3557 of SEQ ID NO: 916995
ucagcuaucucaguggaaa

SEQ ID NO: 1200355 - RNA, 19 nt, Artificial Sequence
  Description of Artificial Sequence: Synthetic oligonucleotide
  Antisense strand to SEQ ID NO: 1200354
uuuccacugagauagcuga

SEQ ID NO: 1200356 - RNA, 19 nt, Artificial Sequence
  Description of Artificial Sequence: Synthetic oligonucleotide
  Sense strand starting at position 3558 of SEQ ID NO: 916995
cagcuaucucaguggaaac

SEQ ID NO: 1200357 - RNA, 19 nt, Artificial Sequence
  Description of Artificial Sequence: Synthetic oligonucleotide
  Antisense strand to SEQ ID NO: 1200356
guuuccacugagauagcug

SEQ ID NO: 1200358 - RNA, 19 nt, Artificial Sequence
  Description of Artificial Sequence: Synthetic oligonucleotide
  Sense strand starting at position 3560 of SEQ ID NO: 916995
gcuaucucaguggaaacaa

SEQ ID NO: 1200359 - RNA, 19 nt, Artificial Sequence
  Description of Artificial Sequence: Synthetic oligonucleotide
  Antisense strand to SEQ ID NO: 1200358
uuguuuccacugagauagc

SEQ ID NO: 1200360 - RNA, 19 nt, Artificial Sequence
  Description of Artificial Sequence: Synthetic oligonucleotide
  Sense strand starting at position 3767 of SEQ ID NO: 916995
uuuggagucuagcuaagau

SEQ ID NO: 1200361 - RNA, 19 nt, Artificial Sequence
  Description of Artificial Sequence: Synthetic oligonucleotide
  Antisense strand to SEQ ID NO: 1200360
aucuuagcuagacuccaaa

SEQ ID NO: 1200362 - RNA, 19 nt, Artificial Sequence
  Description of Artificial Sequence: Synthetic oligonucleotide
  Sense strand starting at position 54 of SEQ ID NO: 916996
cacggaaugugagccuuaa

SEQ ID NO: 1200363 - RNA, 19 nt, Artificial Sequence
  Description of Artificial Sequence: Synthetic oligonucleotide
  Antisense strand to SEQ ID NO: 1200362
uuaaggcucacauuccgug

SEQ ID NO: 1200364 - RNA, 19 nt, Artificial Sequence
  Description of Artificial Sequence: Synthetic oligonucleotide
  Sense strand starting at position 107 of SEQ ID NO: 916996
uccaguucgccugguuaaa

SEQ ID NO: 1200365 - RNA, 19 nt, Artificial Sequence
  Description of Artificial Sequence: Synthetic oligonucleotide
  Antisense strand to SEQ ID NO: 1200364
uuuaaccaggcgaacugga

SEQ ID NO: 1200366 - RNA, 19 nt, Artificial Sequence
  Description of Artificial Sequence: Synthetic oligonucleotide
  Sense strand starting at position 109 of SEQ ID NO: 916996
caguucgccugguuaaauu

SEQ ID NO: 1200367 - RNA, 19 nt, Artificial Sequence
  Description of Artificial Sequence: Synthetic oligonucleotide
  Antisense strand to SEQ ID NO: 1200366
aauuuaaccaggcgaacug

SEQ ID NO: 1200368 - RNA, 19 nt, Artificial Sequence
  Description of Artificial Sequence: Synthetic oligonucleotide
  Sense strand starting at position 117 of SEQ ID NO: 916996
cugguuaaauucucucaag

SEQ ID NO: 1200369 - RNA, 19 nt, Artificial Sequence
  Description of Artificial Sequence: Synthetic oligonucleotide
  Antisense strand to SEQ ID NO: 1200368
cuugagagaauuuaaccag

SEQ ID NO: 1200370 - RNA, 19 nt, Artificial Sequence
  Description of Artificial Sequence: Synthetic oligonucleotide
  Sense strand starting at position 187 of SEQ ID NO: 916996
ccgccuuccucugcaaagu

SEQ ID NO: 1200371 - RNA, 19 nt, Artificial Sequence
  Description of Artificial Sequence: Synthetic oligonucleotide
  Antisense strand to SEQ ID NO: 1200370
acuuugcagaggaaggcgg

SEQ ID NO: 1200372 - RNA, 19 nt, Artificial Sequence
  Description of Artificial Sequence: Synthetic oligonucleotide
  Sense strand starting at position 196 of SEQ ID NO: 916996
ucugcaaagugcuuuacua

SEQ ID NO: 1200373 - RNA, 19 nt, Artificial Sequence
  Description of Artificial Sequence: Synthetic oligonucleotide
  Antisense strand to SEQ ID NO: 1200372
uaguaaagcacuuugcaga

SEQ ID NO: 1200374 - RNA, 19 nt, Artificial Sequence
  Description of Artificial Sequence: Synthetic oligonucleotide
  Sense strand starting at position 329 of SEQ ID NO: 916996
gcuaauuaacagcagaauu

SEQ ID NO: 1200375 - RNA, 19 nt, Artificial Sequence
  Description of Artificial Sequence: Synthetic oligonucleotide
  Antisense strand to SEQ ID NO: 1200374
aauucugcuguuaauuagc

SEQ ID NO: 1200376 - RNA, 19 nt, Artificial Sequence
  Description of Artificial Sequence: Synthetic oligonucleotide
  Sense strand starting at position 351 of SEQ ID NO: 916996
gcaccagaucgugacuguu

SEQ ID NO: 1200377 - RNA, 19 nt, Artificial Sequence
  Description of Artificial Sequence: Synthetic oligonucleotide
  Antisense strand to SEQ ID NO: 1200376
aacagucacgaucuggugc

SEQ ID NO: 1200378 - RNA, 19 nt, Artificial Sequence
  Description of Artificial Sequence: Synthetic oligonucleotide
  Sense strand starting at position 353 of SEQ ID NO: 916996
accagaucgugacuguuga

SEQ ID NO: 1200379 - RNA, 19 nt, Artificial Sequence
  Description of Artificial Sequence: Synthetic oligonucleotide
  Antisense strand to SEQ ID NO: 1200378
ucaacagucacgaucuggu

SEQ ID NO: 1200380 - RNA, 19 nt, Artificial Sequence
  Description of Artificial Sequence: Synthetic oligonucleotide
  Sense strand starting at position 580 of SEQ ID NO: 916996
auagcaaacuugucugguu

SEQ ID NO: 1200381 - RNA, 19 nt, Artificial Sequence
  Description of Artificial Sequence: Synthetic oligonucleotide
  Antisense strand to SEQ ID NO: 1200380
aaccagacaaguuugcuau

SEQ ID NO: 1200382 - RNA, 19 nt, Artificial Sequence
  Description of Artificial Sequence: Synthetic oligonucleotide
  Sense strand starting at position 583 of SEQ ID NO: 916996
gcaaacuugucugguuggu

SEQ ID NO: 1200383 - RNA, 19 nt, Artificial Sequence
  Description of Artificial Sequence: Synthetic oligonucleotide
  Antisense strand to SEQ ID NO: 1200382
accaaccagacaaguuugc

SEQ ID NO: 1200384 - RNA, 19 nt, Artificial Sequence
  Description of Artificial Sequence: Synthetic oligonucleotide
  Sense strand starting at position 587 of SEQ ID NO: 916996
acuugucugguugguguau

SEQ ID NO: 1200385 - RNA, 19 nt, Artificial Sequence
  Description of Artificial Sequence: Synthetic oligonucleotide
  Antisense strand to SEQ ID NO: 1200384
auacaccaaccagacaagu

SEQ ID NO: 1200386 - RNA, 19 nt, Artificial Sequence
  Description of Artificial Sequence: Synthetic oligonucleotide
  Sense strand starting at position 596 of SEQ ID NO: 916996
guugguguaucugggaaag

SEQ ID NO: 1200387 - RNA, 19 nt, Artificial Sequence
  Description of Artificial Sequence: Synthetic oligonucleotide
  Antisense strand to SEQ ID NO: 1200386
cuuucccagauacaccaac

SEQ ID NO: 1200388 - RNA, 19 nt, Artificial Sequence
  Description of Artificial Sequence: Synthetic oligonucleotide
  Sense strand starting at position 742 of SEQ ID NO: 916996
agagcauuaggcgggagaa

SEQ ID NO: 1200389 - RNA, 19 nt, Artificial Sequence
  Description of Artificial Sequence: Synthetic oligonucleotide
  Antisense strand to SEQ ID NO: 1200388
uucucccgccuaaugcucu

SEQ ID NO: 1200390 - RNA, 19 nt, Artificial Sequence
  Description of Artificial Sequence: Synthetic oligonucleotide
  Sense strand starting at position 1171 of SEQ ID NO: 916996
ggccgucacucccauugua

SEQ ID NO: 1200391 - RNA, 19 nt, Artificial Sequence
  Description of Artificial Sequence: Synthetic oligonucleotide
  Antisense strand to SEQ ID NO: 1200390
uacaaugggagugacggcc

SEQ ID NO: 1200392 - RNA, 19 nt, Artificial Sequence
  Description of Artificial Sequence: Synthetic oligonucleotide
  Sense strand starting at position 2418 of SEQ ID NO: 916996
ggagggugugcccgggaaa

SEQ ID NO: 1200393 - RNA, 19 nt, Artificial Sequence
  Description of Artificial Sequence: Synthetic oligonucleotide
  Antisense strand to SEQ ID NO: 1200392
uuucccgggcacacccucc

SEQ ID NO: 1200394 - RNA, 19 nt, Artificial Sequence
  Description of Artificial Sequence: Synthetic oligonucleotide
  Sense strand starting at position 2420 of SEQ ID NO: 916996
agggugugcccgggaaaga

SEQ ID NO: 1200395 - RNA, 19 nt, Artificial Sequence
  Description of Artificial Sequence: Synthetic oligonucleotide
  Antisense strand to SEQ ID NO: 1200394
ucuuucccgggcacacccu

SEQ ID NO: 1200396 - RNA, 19 nt, Artificial Sequence
  Description of Artificial Sequence: Synthetic oligonucleotide
  Sense strand starting at position 2421 of SEQ ID NO: 916996
gggugugcccgggaaagaa

SEQ ID NO: 1200397 - RNA, 19 nt, Artificial Sequence
  Description of Artificial Sequence: Synthetic oligonucleotide
  Antisense strand to SEQ ID NO: 1200396
uucuuucccgggcacaccc

SEQ ID NO: 1200398 - RNA, 19 nt, Artificial Sequence
  Description of Artificial Sequence: Synthetic oligonucleotide
  Sense strand starting at position 3050 of SEQ ID NO: 916996
ggcaauuucucugcagacu

SEQ ID NO: 1200399 - RNA, 19 nt, Artificial Sequence
  Description of Artificial Sequence: Synthetic oligonucleotide
  Antisense strand to SEQ ID NO: 1200398
agucugcagagaaauugcc

SEQ ID NO: 1200400 - RNA, 19 nt, Artificial Sequence
  Description of Artificial Sequence: Synthetic oligonucleotide
  Sense strand starting at position 3107 of SEQ ID NO: 916996
cuucguucucucuaucuuu

SEQ ID NO: 1200401 - RNA, 19 nt, Artificial Sequence
  Description of Artificial Sequence: Synthetic oligonucleotide
  Antisense strand to SEQ ID NO: 1200400
aaagauagagagaacgaag

SEQ ID NO: 1200402 - RNA, 19 nt, Artificial Sequence
  Description of Artificial Sequence: Synthetic oligonucleotide
  Sense strand starting at position 3231 of SEQ ID NO: 916996
acgcguggucugagcaguu

SEQ ID NO: 1200403 - RNA, 19 nt, Artificial Sequence
  Description of Artificial Sequence: Synthetic oligonucleotide
  Antisense strand to SEQ ID NO: 1200402
aacugcucagaccacgcgu

SEQ ID NO: 1200404 - RNA, 19 nt, Artificial Sequence
  Description of Artificial Sequence: Synthetic oligonucleotide
  Sense strand starting at position 3232 of SEQ ID NO: 916996
cgcguggucugagcaguuu

SEQ ID NO: 1200405 - RNA, 19 nt, Artificial Sequence
  Description of Artificial Sequence: Synthetic oligonucleotide
  Antisense strand to SEQ ID NO: 1200404
aaacugcucagaccacgcg

SEQ ID NO: 1200406 - RNA, 19 nt, Artificial Sequence
  Description of Artificial Sequence: Synthetic oligonucleotide
  Sense strand starting at position 3273 of SEQ ID NO: 916996
ccuugugacugggaaugaa

SEQ ID NO: 1200407 - RNA, 19 nt, Artificial Sequence
  Description of Artificial Sequence: Synthetic oligonucleotide
  Antisense strand to SEQ ID NO: 1200406
uucauucccagucacaagg

SEQ ID NO: 1200408 - RNA, 19 nt, Artificial Sequence
  Description of Artificial Sequence: Synthetic oligonucleotide
  Sense strand starting at position 3418 of SEQ ID NO: 916996
ucaccaucagugcaggaaa

SEQ ID NO: 1200409 - RNA, 19 nt, Artificial Sequence
  Description of Artificial Sequence: Synthetic oligonucleotide
  Antisense strand to SEQ ID NO: 1200408
uuuccugcacugaugguga

SEQ ID NO: 1200410 - RNA, 19 nt, Artificial Sequence
  Description of Artificial Sequence: Synthetic oligonucleotide
  Sense strand starting at position 3542 of SEQ ID NO: 916996
aggaaugagccaggcauaa

SEQ ID NO: 1200411 - RNA, 19 nt, Artificial Sequence
  Description of Artificial Sequence: Synthetic oligonucleotide
  Antisense strand to SEQ ID NO: 1200410
uuaugccuggcucauuccu

SEQ ID NO: 1200412 - RNA, 19 nt, Artificial Sequence
  Description of Artificial Sequence: Synthetic oligonucleotide
  Sense strand starting at position 3662 of SEQ ID NO: 916996
ggagaugucucccugguuu

SEQ ID NO: 1200413 - RNA, 19 nt, Artificial Sequence
  Description of Artificial Sequence: Synthetic oligonucleotide
  Antisense strand to SEQ ID NO: 1200412
aaaccagggagacaucucc

SEQ ID NO: 1200414 - RNA, 19 nt, Artificial Sequence
  Description of Artificial Sequence: Synthetic oligonucleotide
  Sense strand starting at position 3758 of SEQ ID NO: 916996
gcuugauucucauaggccu

SEQ ID NO: 1200415 - RNA, 19 nt, Artificial Sequence
  Description of Artificial Sequence: Synthetic oligonucleotide
  Antisense strand to SEQ ID NO: 1200414
aggccuaugagaaucaagc

SEQ ID NO: 1200416 - RNA, 19 nt, Artificial Sequence
  Description of Artificial Sequence: Synthetic oligonucleotide
  Sense strand starting at position 3801 of SEQ ID NO: 916996
aguggauuaugcugauaau

SEQ ID NO: 1200417 - RNA, 19 nt, Artificial Sequence
  Description of Artificial Sequence: Synthetic oligonucleotide
  Antisense strand to SEQ ID NO: 1200416
auuaucagcauaauccacu

SEQ ID NO: 1200418 - RNA, 19 nt, Artificial Sequence
  Description of Artificial Sequence: Synthetic oligonucleotide
  Sense strand starting at position 3802 of SEQ ID NO: 916996
guggauuaugcugauaauc

SEQ ID NO: 1200419 - RNA, 19 nt, Artificial Sequence
  Description of Artificial Sequence: Synthetic oligonucleotide
  Antisense strand to SEQ ID NO: 1200418
gauuaucagcauaauccac

SEQ ID NO: 1200420 - RNA, 19 nt, Artificial Sequence
  Description of Artificial Sequence: Synthetic oligonucleotide
  Sense strand starting at position 3810 of SEQ ID NO: 916996
ugcugauaaucgcccaauu

SEQ ID NO: 1200421 - RNA, 19 nt, Artificial Sequence
  Description of Artificial Sequence: Synthetic oligonucleotide
  Antisense strand to SEQ ID NO: 1200420
aauugggcgauuaucagca

SEQ ID NO: 1200422 - RNA, 19 nt, Artificial Sequence
  Description of Artificial Sequence: Synthetic oligonucleotide
  Sense strand starting at position 3812 of SEQ ID NO: 916996
cugauaaucgcccaauucu

SEQ ID NO: 1200423 - RNA, 19 nt, Artificial Sequence
  Description of Artificial Sequence: Synthetic oligonucleotide
  Antisense strand to SEQ ID NO: 1200422
agaauugggcgauuaucag

SEQ ID NO: 1200424 - RNA, 19 nt, Artificial Sequence
  Description of Artificial Sequence: Synthetic oligonucleotide
  Sense strand starting at position 3927 of SEQ ID NO: 916996
gugcuuugagccugaacau

SEQ ID NO: 1200425 - RNA, 19 nt, Artificial Sequence
  Description of Artificial Sequence: Synthetic oligonucleotide
  Antisense strand to SEQ ID NO: 1200424
auguucaggcucaaagcac

SEQ ID NO: 1200426 - RNA, 19 nt, Artificial Sequence
  Description of Artificial Sequence: Synthetic oligonucleotide
  Sense strand starting at position 3928 of SEQ ID NO: 916996
ugcuuugagccugaacauc

SEQ ID NO: 1200427 - RNA, 19 nt, Artificial Sequence
  Description of Artificial Sequence: Synthetic oligonucleotide
  Antisense strand to SEQ ID NO: 1200426
gauguucaggcucaaagca

SEQ ID NO: 1200428 - RNA, 19 nt, Artificial Sequence
  Description of Artificial Sequence: Synthetic oligonucleotide
  Sense strand starting at position 3970 of SEQ ID NO: 916996
uuuaaauguucccagcaug

SEQ ID NO: 1200429 - RNA, 19 nt, Artificial Sequence
  Description of Artificial Sequence: Synthetic oligonucleotide
  Antisense strand to SEQ ID NO: 1200428
caugcugggaacauuuaaa

SEQ ID NO: 1200430 - RNA, 19 nt, Artificial Sequence
  Description of Artificial Sequence: Synthetic oligonucleotide
  Sense strand starting at position 50 of SEQ ID NO: 916997
guaacagaccuauguaccu

SEQ ID NO: 1200431 - RNA, 19 nt, Artificial Sequence
  Description of Artificial Sequence: Synthetic oligonucleotide
  Antisense strand to SEQ ID NO: 1200430
agguacauaggucuguuac

SEQ ID NO: 1200432 - RNA, 19 nt, Artificial Sequence
  Description of Artificial Sequence: Synthetic oligonucleotide
  Sense strand starting at position 304 of SEQ ID NO: 916997
ugguuuccugugcacauua

SEQ ID NO: 1200433 - RNA, 19 nt, Artificial Sequence
  Description of Artificial Sequence: Synthetic oligonucleotide
  Antisense strand to SEQ ID NO: 1200432
uaaugugcacaggaaacca

SEQ ID NO: 1200434 - RNA, 19 nt, Artificial Sequence
  Description of Artificial Sequence: Synthetic oligonucleotide
  Sense strand starting at position 306 of SEQ ID NO: 916997
guuuccugugcacauuaua

SEQ ID NO: 1200435 - RNA, 19 nt, Artificial Sequence
  Description of Artificial Sequence: Synthetic oligonucleotide
  Antisense strand to SEQ ID NO: 1200434
uauaaugugcacaggaaac

SEQ ID NO: 1200436 - RNA, 19 nt, Artificial Sequence
  Description of Artificial Sequence: Synthetic oligonucleotide
  Sense strand starting at position 336 of SEQ ID NO: 916997
cucugaucccagggauugu

SEQ ID NO: 1200437 - RNA, 19 nt, Artificial Sequence
  Description of Artificial Sequence: Synthetic oligonucleotide
  Antisense strand to SEQ ID NO: 1200436
acaaucccugggaucagag

SEQ ID NO: 1200438 - RNA, 19 nt, Artificial Sequence
  Description of Artificial Sequence: Synthetic oligonucleotide
  Sense strand starting at position 337 of SEQ ID NO: 916997
ucugaucccagggauuguu

SEQ ID NO: 1200439 - RNA, 19 nt, Artificial Sequence
  Description of Artificial Sequence: Synthetic oligonucleotide
  Antisense strand to SEQ ID NO: 1200438
aacaaucccugggaucaga

SEQ ID NO: 1200440 - RNA, 19 nt, Artificial Sequence
  Description of Artificial Sequence: Synthetic oligonucleotide
  Sense strand starting at position 340 of SEQ ID NO: 916997
gaucccagggauuguucua

SEQ ID NO: 1200441 - RNA, 19 nt, Artificial Sequence
  Description of Artificial Sequence: Synthetic oligonucleotide
  Antisense strand to SEQ ID NO: 1200440
uagaacaaucccugggauc

SEQ ID NO: 1200442 - RNA, 19 nt, Artificial Sequence
  Description of Artificial Sequence: Synthetic oligonucleotide
  Sense strand starting at position 498 of SEQ ID NO: 916997
gcaacauaaccucagugau

SEQ ID NO: 1200443 - RNA, 19 nt, Artificial Sequence
  Description of Artificial Sequence: Synthetic oligonucleotide
  Antisense strand to SEQ ID NO: 1200442
aucacugagguuauguugc

SEQ ID NO: 1200444 - RNA, 19 nt, Artificial Sequence
  Description of Artificial Sequence: Synthetic oligonucleotide
  Sense strand starting at position 556 of SEQ ID NO: 916997
aagacuuugugcgugauaa

SEQ ID NO: 1200445 - RNA, 19 nt, Artificial Sequence
  Description of Artificial Sequence: Synthetic oligonucleotide
  Antisense strand to SEQ ID NO: 1200444
uuaucacgcacaaagucuu

SEQ ID NO: 1200446 - RNA, 19 nt, Artificial Sequence
  Description of Artificial Sequence: Synthetic oligonucleotide
  Sense strand starting at position 558 of SEQ ID NO: 916997
gacuuugugcgugauaauu

SEQ ID NO: 1200447 - RNA, 19 nt, Artificial Sequence
  Description of Artificial Sequence: Synthetic oligonucleotide
  Antisense strand to SEQ ID NO: 1200446
aauuaucacgcacaaaguc

SEQ ID NO: 1200448 - RNA, 19 nt, Artificial Sequence
  Description of Artificial Sequence: Synthetic oligonucleotide
  Sense strand starting at position 567 of SEQ ID NO: 916997
cgugauaauuggcuuugaa

SEQ ID NO: 1200449 - RNA, 19 nt, Artificial Sequence
  Description of Artificial Sequence: Synthetic oligonucleotide
  Antisense strand to SEQ ID NO: 1200448
uucaaagccaauuaucacg

SEQ ID NO: 1200450 - RNA, 19 nt, Artificial Sequence
  Description of Artificial Sequence: Synthetic oligonucleotide
  Sense strand starting at position 570 of SEQ ID NO: 916997
gauaauuggcuuugaaguu

SEQ ID NO: 1200451 - RNA, 19 nt, Artificial Sequence
  Description of Artificial Sequence: Synthetic oligonucleotide
  Antisense strand to SEQ ID NO: 1200450
aacuucaaagccaauuauc

SEQ ID NO: 1200452 - RNA, 19 nt, Artificial Sequence
  Description of Artificial Sequence: Synthetic oligonucleotide
  Sense strand starting at position 642 of SEQ ID NO: 916997
ucuugcagcacguauuaga

SEQ ID NO: 1200453 - RNA, 19 nt, Artificial Sequence
  Description of Artificial Sequence: Synthetic oligonucleotide
  Antisense strand to SEQ ID NO: 1200452
ucuaauacgugcugcaaga

SEQ ID NO: 1200454 - RNA, 19 nt, Artificial Sequence
  Description of Artificial Sequence: Synthetic oligonucleotide
  Sense strand starting at position 689 of SEQ ID NO: 916997
aguguaucuaucugcagga

SEQ ID NO: 1200455 - RNA, 19 nt, Artificial Sequence
  Description of Artificial Sequence: Synthetic oligonucleotide
  Antisense strand to SEQ ID NO: 1200454
uccugcagauagauacacu

SEQ ID NO: 1200456 - RNA, 19 nt, Artificial Sequence
  Description of Artificial Sequence: Synthetic oligonucleotide
  Sense strand starting at position 691 of SEQ ID NO: 916997
uguaucuaucugcaggaaa

SEQ ID NO: 1200457 - RNA, 19 nt, Artificial Sequence
  Description of Artificial Sequence: Synthetic oligonucleotide
  Antisense strand to SEQ ID NO: 1200456
uuuccugcagauagauaca

SEQ ID NO: 1200458 - RNA, 19 nt, Artificial Sequence
  Description of Artificial Sequence: Synthetic oligonucleotide
  Sense strand starting at position 879 of SEQ ID NO: 916997
aggaauuccugccuugaca

SEQ ID NO: 1200459 - RNA, 19 nt, Artificial Sequence
  Description of Artificial Sequence: Synthetic oligonucleotide
  Antisense strand to SEQ ID NO: 1200458
ugucaaggcaggaauuccu

SEQ ID NO: 1200460 - RNA, 19 nt, Artificial Sequence
  Description of Artificial Sequence: Synthetic oligonucleotide
  Sense strand starting at position 1198 of SEQ ID NO: 916997
ccagaaaucucccugguca

SEQ ID NO: 1200461 - RNA, 19 nt, Artificial Sequence
  Description of Artificial Sequence: Synthetic oligonucleotide
  Antisense strand to SEQ ID NO: 1200460
ugaccagggagauuucugg

SEQ ID NO: 1200462 - RNA, 19 nt, Artificial Sequence
  Description of Artificial Sequence: Synthetic oligonucleotide
  Sense strand starting at position 1200 of SEQ ID NO: 916997
agaaaucucccuggucauc

SEQ ID NO: 1200463 - RNA, 19 nt, Artificial Sequence
  Description of Artificial Sequence: Synthetic oligonucleotide
  Antisense strand to SEQ ID NO: 1200462
gaugaccagggagauuucu

SEQ ID NO: 1200464 - RNA, 19 nt, Artificial Sequence
  Description of Artificial Sequence: Synthetic oligonucleotide
  Sense strand starting at position 1964 of SEQ ID NO: 916997
gguauuuccuuuccuguuu

SEQ ID NO: 1200465 - RNA, 19 nt, Artificial Sequence
  Description of Artificial Sequence: Synthetic oligonucleotide
  Antisense strand to SEQ ID NO: 1200464
aaacaggaaaggaaauacc

SEQ ID NO: 1200466 - RNA, 19 nt, Artificial Sequence
  Description of Artificial Sequence: Synthetic oligonucleotide
  Sense strand starting at position 1975 of SEQ ID NO: 916997
uccuguuuacccgagcgaa

SEQ ID NO: 1200467 - RNA, 19 nt, Artificial Sequence
  Description of Artificial Sequence: Synthetic oligonucleotide
  Antisense strand to SEQ ID NO: 1200466
uucgcucggguaaacagga

SEQ ID NO: 1200468 - RNA, 19 nt, Artificial Sequence
  Description of Artificial Sequence: Synthetic oligonucleotide
  Sense strand starting at position 2919 of SEQ ID NO: 916997
cagggaucgcagugaggaa

SEQ ID NO: 1200469 - RNA, 19 nt, Artificial Sequence
  Description of Artificial Sequence: Synthetic oligonucleotide
  Antisense strand to SEQ ID NO: 1200468
uuccucacugcgaucccug

SEQ ID NO: 1200470 - RNA, 19 nt, Artificial Sequence
  Description of Artificial Sequence: Synthetic oligonucleotide
  Sense strand starting at position 2997 of SEQ ID NO: 916997
ccaaguuagugucccuaga

SEQ ID NO: 1200471 - RNA, 19 nt, Artificial Sequence
  Description of Artificial Sequence: Synthetic oligonucleotide
  Antisense strand to SEQ ID NO: 1200470
ucuagggacacuaacuugg

SEQ ID NO: 1200472 - RNA, 19 nt, Artificial Sequence
  Description of Artificial Sequence: Synthetic oligonucleotide
  Sense strand starting at position 2999 of SEQ ID NO: 916997
aaguuagugucccuagaaa

SEQ ID NO: 1200473 - RNA, 19 nt, Artificial Sequence
  Description of Artificial Sequence: Synthetic oligonucleotide
  Antisense strand to SEQ ID NO: 1200472
uuucuagggacacuaacuu

SEQ ID NO: 1200474 - RNA, 19 nt, Artificial Sequence
  Description of Artificial Sequence: Synthetic oligonucleotide
  Sense strand starting at position 3069 of SEQ ID NO: 916997
agacaacauugcuuugaga

SEQ ID NO: 1200475 - RNA, 19 nt, Artificial Sequence
  Description of Artificial Sequence: Synthetic oligonucleotide
  Antisense strand to SEQ ID NO: 1200474
ucucaaagcaauguugucu

SEQ ID NO: 1200476 - RNA, 19 nt, Artificial Sequence
  Description of Artificial Sequence: Synthetic oligonucleotide
  Sense strand starting at position 3071 of SEQ ID NO: 916997
acaacauugcuuugagaag

SEQ ID NO: 1200477 - RNA, 19 nt, Artificial Sequence
  Description of Artificial Sequence: Synthetic oligonucleotide
  Antisense strand to SEQ ID NO: 1200476
cuucucaaagcaauguugu

SEQ ID NO: 1200478 - RNA, 19 nt, Artificial Sequence
  Description of Artificial Sequence: Synthetic oligonucleotide
  Sense strand starting at position 3186 of SEQ ID NO: 916997
acugcuuugcuccacgaga

SEQ ID NO: 1200479 - RNA, 19 nt, Artificial Sequence
  Description of Artificial Sequence: Synthetic oligonucleotide
  Antisense strand to SEQ ID NO: 1200478
ucucguggagcaaagcagu

SEQ ID NO: 1200480 - RNA, 19 nt, Artificial Sequence
  Description of Artificial Sequence: Synthetic oligonucleotide
  Sense strand starting at position 3327 of SEQ ID NO: 916997
gucguuaucaucugacuga

SEQ ID NO: 1200481 - RNA, 19 nt, Artificial Sequence
  Description of Artificial Sequence: Synthetic oligonucleotide
  Antisense strand to SEQ ID NO: 1200480
ucagucagaugauaacgac

SEQ ID NO: 1200482 - RNA, 19 nt, Artificial Sequence
  Description of Artificial Sequence: Synthetic oligonucleotide
  Sense strand starting at position 3392 of SEQ ID NO: 916997
auaccaaugcuuuaagagu

SEQ ID NO: 1200483 - RNA, 19 nt, Artificial Sequence
  Description of Artificial Sequence: Synthetic oligonucleotide
  Antisense strand to SEQ ID NO: 1200482
acucuuaaagcauugguau

SEQ ID NO: 1200484 - RNA, 19 nt, Artificial Sequence
  Description of Artificial Sequence: Synthetic oligonucleotide
  Sense strand starting at position 3451 of SEQ ID NO: 916997
ugcuguucuaccgaagauu

SEQ ID NO: 1200485 - RNA, 19 nt, Artificial Sequence
  Description of Artificial Sequence: Synthetic oligonucleotide
  Antisense strand to SEQ ID NO: 1200484
aaucuucgguagaacagca

SEQ ID NO: 1200486 - RNA, 19 nt, Artificial Sequence
  Description of Artificial Sequence: Synthetic oligonucleotide
  Sense strand starting at position 3454 of SEQ ID NO: 916997
uguucuaccgaagauuguu

SEQ ID NO: 1200487 - RNA, 19 nt, Artificial Sequence
  Description of Artificial Sequence: Synthetic oligonucleotide
  Antisense strand to SEQ ID NO: 1200486
aacaaucuucgguagaaca

SEQ ID NO: 1200488 - RNA, 19 nt, Artificial Sequence
  Description of Artificial Sequence: Synthetic oligonucleotide
  Sense strand starting at position 3638 of SEQ ID NO: 916997
acccuaagagauugucucu

SEQ ID NO: 1200489 - RNA, 19 nt, Artificial Sequence
  Description of Artificial Sequence: Synthetic oligonucleotide
  Antisense strand to SEQ ID NO: 1200488
agagacaaucucuuagggu

SEQ ID NO: 1200490 - RNA, 19 nt, Artificial Sequence
  Description of Artificial Sequence: Synthetic oligonucleotide
  Sense strand starting at position 3641 of SEQ ID NO: 916997
cuaagagauugucucuuuc

SEQ ID NO: 1200491 - RNA, 19 nt, Artificial Sequence
  Description of Artificial Sequence: Synthetic oligonucleotide
  Antisense strand to SEQ ID NO: 1200490
gaaagagacaaucucuuag

SEQ ID NO: 1200492 - RNA, 19 nt, Artificial Sequence
  Description of Artificial Sequence: Synthetic oligonucleotide
  Sense strand starting at position 3663 of SEQ ID NO: 916997
guuucugaaguuugaacca

SEQ ID NO: 1200493 - RNA, 19 nt, Artificial Sequence
  Description of Artificial Sequence: Synthetic oligonucleotide
  Antisense strand to SEQ ID NO: 1200492
ugguucaaacuucagaaac

SEQ ID NO: 1200494 - RNA, 19 nt, Artificial Sequence
  Description of Artificial Sequence: Synthetic oligonucleotide
  Sense strand starting at position 3682 of SEQ ID NO: 916997
gcaggagagucacuggaaa

SEQ ID NO: 1200495 - RNA, 19 nt, Artificial Sequence
  Description of Artificial Sequence: Synthetic oligonucleotide
  Antisense strand to SEQ ID NO: 1200494
uuuccagugacucuccugc

SEQ ID NO: 1200496 - RNA, 19 nt, Artificial Sequence
  Description of Artificial Sequence: Synthetic oligonucleotide
  Sense strand starting at position 3734 of SEQ ID NO: 916997
gagcuaucucggcagguca

SEQ ID NO: 1200497 - RNA, 19 nt, Artificial Sequence
  Description of Artificial Sequence: Synthetic oligonucleotide
  Antisense strand to SEQ ID NO: 1200496
ugaccugccgagauagcuc

SEQ ID NO: 1200498 - RNA, 19 nt, Artificial Sequence
  Description of Artificial Sequence: Synthetic oligonucleotide
  Sense strand starting at position 3860 of SEQ ID NO: 916997
ugaugagagagcugagcuu

SEQ ID NO: 1200499 - RNA, 19 nt, Artificial Sequence
  Description of Artificial Sequence: Synthetic oligonucleotide
  Antisense strand to SEQ ID NO: 1200498
aagcucagcucucucauca

SEQ ID NO: 1200500 - RNA, 19 nt, Artificial Sequence
  Description of Artificial Sequence: Synthetic oligonucleotide
  Sense strand starting at position 3899 of SEQ ID NO: 916997
ccuggucucugagugucaa

SEQ ID NO: 1200501 - RNA, 19 nt, Artificial Sequence
  Description of Artificial Sequence: Synthetic oligonucleotide
  Antisense strand to SEQ ID NO: 1200500
uugacacucagagaccagg

SEQ ID NO: 1200502 - RNA, 19 nt, Artificial Sequence
  Description of Artificial Sequence: Synthetic oligonucleotide
  Sense strand starting at position 3900 of SEQ ID NO: 916997
cuggucucugagugucaaa

SEQ ID NO: 1200503 - RNA, 19 nt, Artificial Sequence
  Description of Artificial Sequence: Synthetic oligonucleotide
  Antisense strand to SEQ ID NO: 1200502
uuugacacucagagaccag

SEQ ID NO: 1200504 - RNA, 19 nt, Artificial Sequence
  Description of Artificial Sequence: Synthetic oligonucleotide
  Sense strand starting at position 3918 of SEQ ID NO: 916997
aauugaugcccgcacugaa

SEQ ID NO: 1200505 - RNA, 19 nt, Artificial Sequence
  Description of Artificial Sequence: Synthetic oligonucleotide
  Antisense strand to SEQ ID NO: 1200504
uucagugcgggcaucaauu

SEQ ID NO: 1200506 - RNA, 19 nt, Artificial Sequence
  Description of Artificial Sequence: Synthetic oligonucleotide
  Sense strand starting at position 3936 of SEQ ID NO: 916997
augcauaauccagguucca

SEQ ID NO: 1200507 - RNA, 19 nt, Artificial Sequence
  Description of Artificial Sequence: Synthetic oligonucleotide
  Antisense strand to SEQ ID NO: 1200506
uggaaccuggauuaugcau

SEQ ID NO: 1200508 - RNA, 19 nt, Artificial Sequence
  Description of Artificial Sequence: Synthetic oligonucleotide
  Sense strand starting at position 3976 of SEQ ID NO: 916997
ugagucuauuuguaaauca

SEQ ID NO: 1200509 - RNA, 19 nt, Artificial Sequence
  Description of Artificial Sequence: Synthetic oligonucleotide
  Antisense strand to SEQ ID NO: 1200508
ugauuuacaaauagacuca

SEQ ID NO: 1200510 - RNA, 19 nt, Artificial Sequence
  Description of Artificial Sequence: Synthetic oligonucleotide
  Sense strand starting at position 208 of SEQ ID NO: 916998
auggcaaucccuuacgaua

SEQ ID NO: 1200511 - RNA, 19 nt, Artificial Sequence
  Description of Artificial Sequence: Synthetic oligonucleotide
  Antisense strand to SEQ ID NO: 1200510
uaucguaagggauugccau

SEQ ID NO: 1200512 - RNA, 19 nt, Artificial Sequence
  Description of Artificial Sequence: Synthetic oligonucleotide
  Sense strand starting at position 262 of SEQ ID NO: 916998
uugcaaacugaccaguauu

SEQ ID NO: 1200513 - RNA, 19 nt, Artificial Sequence
  Description of Artificial Sequence: Synthetic oligonucleotide
  Antisense strand to SEQ ID NO: 1200512
aauacuggucaguuugcaa

SEQ ID NO: 1200514 - RNA, 19 nt, Artificial Sequence
  Description of Artificial Sequence: Synthetic oligonucleotide
  Sense strand starting at position 296 of SEQ ID NO: 916998
aaggaaguuuguguaaaug

SEQ ID NO: 1200515 - RNA, 19 nt, Artificial Sequence
  Description of Artificial Sequence: Synthetic oligonucleotide
  Antisense strand to SEQ ID NO: 1200514
cauuuacacaaacuuccuu

SEQ ID NO: 1200516 - RNA, 19 nt, Artificial Sequence
  Description of Artificial Sequence: Synthetic oligonucleotide
  Sense strand starting at position 314 of SEQ ID NO: 916998
ggaggcuuaugcucuaaag

SEQ ID NO: 1200517 - RNA, 19 nt, Artificial Sequence
  Description of Artificial Sequence: Synthetic oligonucleotide
  Antisense strand to SEQ ID NO: 1200516
cuuuagagcauaagccucc

SEQ ID NO: 1200518 - RNA, 19 nt, Artificial Sequence
  Description of Artificial Sequence: Synthetic oligonucleotide
  Sense strand starting at position 316 of SEQ ID NO: 916998
aggcuuaugcucuaaagca

SEQ ID NO: 1200519 - RNA, 19 nt, Artificial Sequence
  Description of Artificial Sequence: Synthetic oligonucleotide
  Antisense strand to SEQ ID NO: 1200518
ugcuuuagagcauaagccu

SEQ ID NO: 1200520 - RNA, 19 nt, Artificial Sequence
  Description of Artificial Sequence: Synthetic oligonucleotide
  Sense strand starting at position 357 of SEQ ID NO: 916998
aguccagaguaccuuauau

SEQ ID NO: 1200521 - RNA, 19 nt, Artificial Sequence
  Description of Artificial Sequence: Synthetic oligonucleotide
  Antisense strand to SEQ ID NO: 1200520
auauaagguacucuggacu

SEQ ID NO: 1200522 - RNA, 19 nt, Artificial Sequence
  Description of Artificial Sequence: Synthetic oligonucleotide
  Sense strand starting at position 372 of SEQ ID NO: 916998
auauuuaagcaauguagcu

SEQ ID NO: 1200523 - RNA, 19 nt, Artificial Sequence
  Description of Artificial Sequence: Synthetic oligonucleotide
  Antisense strand to SEQ ID NO: 1200522
agcuacauugcuuaaauau

SEQ ID NO: 1200524 - RNA, 19 nt, Artificial Sequence
  Description of Artificial Sequence: Synthetic oligonucleotide
  Sense strand starting at position 839 of SEQ ID NO: 916998
cuguaauugcuuuacaaag

SEQ ID NO: 1200525 - RNA, 19 nt, Artificial Sequence
  Description of Artificial Sequence: Synthetic oligonucleotide
  Antisense strand to SEQ ID NO: 1200524
cuuuguaaagcaauuacag

SEQ ID NO: 1200526 - RNA, 19 nt, Artificial Sequence
  Description of Artificial Sequence: Synthetic oligonucleotide
  Sense strand starting at position 930 of SEQ ID NO: 916998
agguguaacuaguccagaa

SEQ ID NO: 1200527 - RNA, 19 nt, Artificial Sequence
  Description of Artificial Sequence: Synthetic oligonucleotide
  Antisense strand to SEQ ID NO: 1200526
uucuggacuaguuacaccu

SEQ ID NO: 1200528 - RNA, 19 nt, Artificial Sequence
  Description of Artificial Sequence: Synthetic oligonucleotide
  Sense strand starting at position 932 of SEQ ID NO: 916998
guguaacuaguccagaagu

SEQ ID NO: 1200529 - RNA, 19 nt, Artificial Sequence
  Description of Artificial Sequence: Synthetic oligonucleotide
  Antisense strand to SEQ ID NO: 1200528
acuucuggacuaguuacac

SEQ ID NO: 1200530 - RNA, 19 nt, Artificial Sequence
  Description of Artificial Sequence: Synthetic oligonucleotide
  Sense strand starting at position 1082 of SEQ ID NO: 916998
uagguauaacucgaauuau

SEQ ID NO: 1200531 - RNA, 19 nt, Artificial Sequence
  Description of Artificial Sequence: Synthetic oligonucleotide
  Antisense strand to SEQ ID NO: 1200530
auaauucgaguuauaccua

SEQ ID NO: 1200532 - RNA, 19 nt, Artificial Sequence
  Description of Artificial Sequence: Synthetic oligonucleotide
  Sense strand starting at position 1133 of SEQ ID NO: 916998
acuaucauguuaguaaguu

SEQ ID NO: 1200533 - RNA, 19 nt, Artificial Sequence
  Description of Artificial Sequence: Synthetic oligonucleotide
  Antisense strand to SEQ ID NO: 1200532
aacuuacuaacaugauagu

SEQ ID NO: 1200534 - RNA, 19 nt, Artificial Sequence
  Description of Artificial Sequence: Synthetic oligonucleotide
  Sense strand starting at position 1158 of SEQ ID NO: 916998
ggcuauggaaguuaaguaa

SEQ ID NO: 1200535 - RNA, 19 nt, Artificial Sequence
  Description of Artificial Sequence: Synthetic oligonucleotide
  Antisense strand to SEQ ID NO: 1200534
uuacuuaacuuccauagcc

SEQ ID NO: 1200536 - RNA, 19 nt, Artificial Sequence
  Description of Artificial Sequence: Synthetic oligonucleotide
  Sense strand starting at position 2166 of SEQ ID NO: 916998
gcugcuagcgagguaaagu

SEQ ID NO: 1200537 - RNA, 19 nt, Artificial Sequence
  Description of Artificial Sequence: Synthetic oligonucleotide
  Antisense strand to SEQ ID NO: 1200536
acuuuaccucgcuagcagc

SEQ ID NO: 1200538 - RNA, 19 nt, Artificial Sequence
  Description of Artificial Sequence: Synthetic oligonucleotide
  Sense strand starting at position 2229 of SEQ ID NO: 916998
caccacuuagauuguggaa

SEQ ID NO: 1200539 - RNA, 19 nt, Artificial Sequence
  Description of Artificial Sequence: Synthetic oligonucleotide
  Antisense strand to SEQ ID NO: 1200538
uuccacaaucuaaguggug

SEQ ID NO: 1200540 - RNA, 19 nt, Artificial Sequence
  Description of Artificial Sequence: Synthetic oligonucleotide
  Sense strand starting at position 2242 of SEQ ID NO: 916998
guggaaauaucuguccuca

SEQ ID NO: 1200541 - RNA, 19 nt, Artificial Sequence
  Description of Artificial Sequence: Synthetic oligonucleotide
  Antisense strand to SEQ ID NO: 1200540
ugaggacagauauuuccac

SEQ ID NO: 1200542 - RNA, 19 nt, Artificial Sequence
  Description of Artificial Sequence: Synthetic oligonucleotide
  Sense strand starting at position 2244 of SEQ ID NO: 916998
ggaaauaucuguccucaca

SEQ ID NO: 1200543 - RNA, 19 nt, Artificial Sequence
  Description of Artificial Sequence: Synthetic oligonucleotide
  Antisense strand to SEQ ID NO: 1200542
ugugaggacagauauuucc

SEQ ID NO: 1200544 - RNA, 19 nt, Artificial Sequence
  Description of Artificial Sequence: Synthetic oligonucleotide
  Sense strand starting at position 2271 of SEQ ID NO: 916998
auuaaaggugugugcauuu

SEQ ID NO: 1200545 - RNA, 19 nt, Artificial Sequence
  Description of Artificial Sequence: Synthetic oligonucleotide
  Antisense strand to SEQ ID NO: 1200544
aaaugcacacaccuuuaau

SEQ ID NO: 1200546 - RNA, 19 nt, Artificial Sequence
  Description of Artificial Sequence: Synthetic oligonucleotide
  Sense strand starting at position 2321 of SEQ ID NO: 916998
ucugaaucguggcugauuu

SEQ ID NO: 1200547 - RNA, 19 nt, Artificial Sequence
  Description of Artificial Sequence: Synthetic oligonucleotide
  Antisense strand to SEQ ID NO: 1200546
aaaucagccacgauucaga

SEQ ID NO: 1200548 - RNA, 19 nt, Artificial Sequence
  Description of Artificial Sequence: Synthetic oligonucleotide
  Sense strand starting at position 2737 of SEQ ID NO: 916998
aauugcugacaguguaaga

SEQ ID NO: 1200549 - RNA, 19 nt, Artificial Sequence
  Description of Artificial Sequence: Synthetic oligonucleotide
  Antisense strand to SEQ ID NO: 1200548
ucuuacacugucagcaauu

SEQ ID NO: 1200550 - RNA, 19 nt, Artificial Sequence
  Description of Artificial Sequence: Synthetic oligonucleotide
  Sense strand starting at position 2912 of SEQ ID NO: 916998
agaaucaaaucugugaagu

SEQ ID NO: 1200551 - RNA, 19 nt, Artificial Sequence
  Description of Artificial Sequence: Synthetic oligonucleotide
  Antisense strand to SEQ ID NO: 1200550
acuucacagauuugauucu

SEQ ID NO: 1200552 - RNA, 19 nt, Artificial Sequence
  Description of Artificial Sequence: Synthetic oligonucleotide
  Sense strand starting at position 2913 of SEQ ID NO: 916998
gaaucaaaucugugaagua

SEQ ID NO: 1200553 - RNA, 19 nt, Artificial Sequence
  Description of Artificial Sequence: Synthetic oligonucleotide
  Antisense strand to SEQ ID NO: 1200552
uacuucacagauuugauuc

SEQ ID NO: 1200554 - RNA, 19 nt, Artificial Sequence
  Description of Artificial Sequence: Synthetic oligonucleotide
  Sense strand starting at position 2945 of SEQ ID NO: 916998
gugggcuuccuguacuaga

SEQ ID NO: 1200555 - RNA, 19 nt, Artificial Sequence
  Description of Artificial Sequence: Synthetic oligonucleotide
  Antisense strand to SEQ ID NO: 1200554
ucuaguacaggaagcccac

SEQ ID NO: 1200556 - RNA, 19 nt, Artificial Sequence
  Description of Artificial Sequence: Synthetic oligonucleotide
  Sense strand starting at position 2975 of SEQ ID NO: 916998
uauggucuuuaugcugaaa

SEQ ID NO: 1200557 - RNA, 19 nt, Artificial Sequence
  Description of Artificial Sequence: Synthetic oligonucleotide
  Antisense strand to SEQ ID NO: 1200556
uuucagcauaaagaccaua

SEQ ID NO: 1200558 - RNA, 19 nt, Artificial Sequence
  Description of Artificial Sequence: Synthetic oligonucleotide
  Sense strand starting at position 2978 of SEQ ID NO: 916998
ggucuuuaugcugaaaugu

SEQ ID NO: 1200559 - RNA, 19 nt, Artificial Sequence
  Description of Artificial Sequence: Synthetic oligonucleotide
  Antisense strand to SEQ ID NO: 1200558
acauuucagcauaaagacc

SEQ ID NO: 1200560 - RNA, 19 nt, Artificial Sequence
  Description of Artificial Sequence: Synthetic oligonucleotide
  Sense strand starting at position 2998 of SEQ ID NO: 916998
uuaugugccuacuuuauuu

SEQ ID NO: 1200561 - RNA, 19 nt, Artificial Sequence
  Description of Artificial Sequence: Synthetic oligonucleotide
  Antisense strand to SEQ ID NO: 1200560
aaauaaaguaggcacauaa

SEQ ID NO: 1200562 - RNA, 19 nt, Artificial Sequence
  Description of Artificial Sequence: Synthetic oligonucleotide
  Sense strand starting at position 3018 of SEQ ID NO: 916998
ugucuuagucuguucugca

SEQ ID NO: 1200563 - RNA, 19 nt, Artificial Sequence
  Description of Artificial Sequence: Synthetic oligonucleotide
  Antisense strand to SEQ ID NO: 1200562
ugcagaacagacuaagaca

SEQ ID NO: 1200564 - RNA, 19 nt, Artificial Sequence
  Description of Artificial Sequence: Synthetic oligonucleotide
  Sense strand starting at position 3036 of SEQ ID NO: 916998
auagguaaauguuuggauu

SEQ ID NO: 1200565 - RNA, 19 nt, Artificial Sequence
  Description of Artificial Sequence: Synthetic oligonucleotide
  Antisense strand to SEQ ID NO: 1200564
aauccaaacauuuaccuau

SEQ ID NO: 1200566 - RNA, 19 nt, Artificial Sequence
  Description of Artificial Sequence: Synthetic oligonucleotide
  Sense strand starting at position 3037 of SEQ ID NO: 916998
uagguaaauguuuggauua

SEQ ID NO: 1200567 - RNA, 19 nt, Artificial Sequence
  Description of Artificial Sequence: Synthetic oligonucleotide
  Antisense strand to SEQ ID NO: 1200566
uaauccaaacauuuaccua

SEQ ID NO: 1200568 - RNA, 19 nt, Artificial Sequence
  Description of Artificial Sequence: Synthetic oligonucleotide
  Sense strand starting at position 3066 of SEQ ID NO: 916998
cugacuggccaguaucaau

SEQ ID NO: 1200569 - RNA, 19 nt, Artificial Sequence
  Description of Artificial Sequence: Synthetic oligonucleotide
  Antisense strand to SEQ ID NO: 1200568
auugauacuggccagucag

SEQ ID NO: 1200570 - RNA, 19 nt, Artificial Sequence
  Description of Artificial Sequence: Synthetic oligonucleotide
  Sense strand starting at position 3077 of SEQ ID NO: 916998
guaucaauguuaccagacu

SEQ ID NO: 1200571 - RNA, 19 nt, Artificial Sequence
  Description of Artificial Sequence: Synthetic oligonucleotide
  Antisense strand to SEQ ID NO: 1200570
agucugguaacauugauac

SEQ ID NO: 1200572 - RNA, 19 nt, Artificial Sequence
  Description of Artificial Sequence: Synthetic oligonucleotide
  Sense strand starting at position 3235 of SEQ ID NO: 916998
gagugacccucucugauua

SEQ ID NO: 1200573 - RNA, 19 nt, Artificial Sequence
  Description of Artificial Sequence: Synthetic oligonucleotide
  Antisense strand to SEQ ID NO: 1200572
uaaucagagagggucacuc

SEQ ID NO: 1200574 - RNA, 19 nt, Artificial Sequence
  Description of Artificial Sequence: Synthetic oligonucleotide
  Sense strand starting at position 3254 of SEQ ID NO: 916998
guugguguucgauaggaaa

SEQ ID NO: 1200575 - RNA, 19 nt, Artificial Sequence
  Description of Artificial Sequence: Synthetic oligonucleotide
  Antisense strand to SEQ ID NO: 1200574
uuuccuaucgaacaccaac

SEQ ID NO: 1200576 - RNA, 19 nt, Artificial Sequence
  Description of Artificial Sequence: Synthetic oligonucleotide
  Sense strand starting at position 3280 of SEQ ID NO: 916998
ccuaguugugaaugucaag

SEQ ID NO: 1200577 - RNA, 19 nt, Artificial Sequence
  Description of Artificial Sequence: Synthetic oligonucleotide
  Antisense strand to SEQ ID NO: 1200576
cuugacauucacaacuagg

SEQ ID NO: 1200578 - RNA, 19 nt, Artificial Sequence
  Description of Artificial Sequence: Synthetic oligonucleotide
  Sense strand starting at position 3339 of SEQ ID NO: 916998
ccuggaugucagggaugau

SEQ ID NO: 1200579 - RNA, 19 nt, Artificial Sequence
  Description of Artificial Sequence: Synthetic oligonucleotide
  Antisense strand to SEQ ID NO: 1200578
aucaucccugacauccagg

SEQ ID NO: 1200580 - RNA, 19 nt, Artificial Sequence
  Description of Artificial Sequence: Synthetic oligonucleotide
  Sense strand starting at position 3401 of SEQ ID NO: 916998
aguagugucagugaacuga

SEQ ID NO: 1200581 - RNA, 19 nt, Artificial Sequence
  Description of Artificial Sequence: Synthetic oligonucleotide
  Antisense strand to SEQ ID NO: 1200580
ucaguucacugacacuacu

SEQ ID NO: 1200582 - RNA, 19 nt, Artificial Sequence
  Description of Artificial Sequence: Synthetic oligonucleotide
  Sense strand starting at position 3581 of SEQ ID NO: 916998
gguuaaacaugaucuugag

SEQ ID NO: 1200583 - RNA, 19 nt, Artificial Sequence
  Description of Artificial Sequence: Synthetic oligonucleotide
  Antisense strand to SEQ ID NO: 1200582
cucaagaucauguuuaacc

SEQ ID NO: 1200584 - RNA, 19 nt, Artificial Sequence
  Description of Artificial Sequence: Synthetic oligonucleotide
  Sense strand starting at position 3787 of SEQ ID NO: 916998
gguagcuuucugcaaccaa

SEQ ID NO: 1200585 - RNA, 19 nt, Artificial Sequence
  Description of Artificial Sequence: Synthetic oligonucleotide
  Antisense strand to SEQ ID NO: 1200584
uugguugcagaaagcuacc

SEQ ID NO: 1200586 - RNA, 19 nt, Artificial Sequence
  Description of Artificial Sequence: Synthetic oligonucleotide
  Sense strand starting at position 3808 of SEQ ID NO: 916998
agacguuugcguaggagug

SEQ ID NO: 1200587 - RNA, 19 nt, Artificial Sequence
  Description of Artificial Sequence: Synthetic oligonucleotide
  Antisense strand to SEQ ID NO: 1200586
cacuccuacgcaaacgucu

SEQ ID NO: 1200588 - RNA, 19 nt, Artificial Sequence
  Description of Artificial Sequence: Synthetic oligonucleotide
  Sense strand starting at position 3882 of SEQ ID NO: 916998
cugauugugggcuaguacu

SEQ ID NO: 1200589 - RNA, 19 nt, Artificial Sequence
  Description of Artificial Sequence: Synthetic oligonucleotide
  Antisense strand to SEQ ID NO: 1200588
aguacuagcccacaaucag

SEQ ID NO: 1200590 - RNA, 19 nt, Artificial Sequence
  Description of Artificial Sequence: Synthetic oligonucleotide
  Sense strand starting at position 207 of SEQ ID NO: 916999
gcacauacauuggaaugua

SEQ ID NO: 1200591 - RNA, 19 nt, Artificial Sequence
  Description of Artificial Sequence: Synthetic oligonucleotide
  Antisense strand to SEQ ID NO: 1200590
uacauuccaauguaugugc

SEQ ID NO: 1200592 - RNA, 19 nt, Artificial Sequence
  Description of Artificial Sequence: Synthetic oligonucleotide
  Sense strand starting at position 215 of SEQ ID NO: 916999
auuggaauguaauacaagu

SEQ ID NO: 1200593 - RNA, 19 nt, Artificial Sequence
  Description of Artificial Sequence: Synthetic oligonucleotide
  Antisense strand to SEQ ID NO: 1200592
acuuguauuacauuccaau

SEQ ID NO: 1200594 - RNA, 19 nt, Artificial Sequence
  Description of Artificial Sequence: Synthetic oligonucleotide
  Sense strand starting at position 891 of SEQ ID NO: 916999
aucagaagaaagugugcua

SEQ ID NO: 1200595 - RNA, 19 nt, Artificial Sequence
  Description of Artificial Sequence: Synthetic oligonucleotide
  Antisense strand to SEQ ID NO: 1200594
uagcacacuuucuucugau

SEQ ID NO: 1200596 - RNA, 19 nt, Artificial Sequence
  Description of Artificial Sequence: Synthetic oligonucleotide
  Sense strand starting at position 913 of SEQ ID NO: 916999
uagauugcuucugaaugga

SEQ ID NO: 1200597 - RNA, 19 nt, Artificial Sequence
  Description of Artificial Sequence: Synthetic oligonucleotide
  Antisense strand to SEQ ID NO: 1200596
uccauucagaagcaaucua

SEQ ID NO: 1200598 - RNA, 19 nt, Artificial Sequence
  Description of Artificial Sequence: Synthetic oligonucleotide
  Sense strand starting at position 916 of SEQ ID NO: 916999
auugcuucugaauggauua

SEQ ID NO: 1200599 - RNA, 19 nt, Artificial Sequence
  Description of Artificial Sequence: Synthetic oligonucleotide
  Antisense strand to SEQ ID NO: 1200598
uaauccauucagaagcaau

SEQ ID NO: 1200600 - RNA, 19 nt, Artificial Sequence
  Description of Artificial Sequence: Synthetic oligonucleotide
  Sense strand starting at position 927 of SEQ ID NO: 916999
auggauuaacagugugguu

SEQ ID NO: 1200601 - RNA, 19 nt, Artificial Sequence
  Description of Artificial Sequence: Synthetic oligonucleotide
  Antisense strand to SEQ ID NO: 1200600
aaccacacuguuaauccau

SEQ ID NO: 1200602 - RNA, 19 nt, Artificial Sequence
  Description of Artificial Sequence: Synthetic oligonucleotide
  Sense strand starting at position 929 of SEQ ID NO: 916999
ggauuaacagugugguuuc

SEQ ID NO: 1200603 - RNA, 19 nt, Artificial Sequence
  Description of Artificial Sequence: Synthetic oligonucleotide
  Antisense strand to SEQ ID NO: 1200602
gaaaccacacuguuaaucc

SEQ ID NO: 1200604 - RNA, 19 nt, Artificial Sequence
  Description of Artificial Sequence: Synthetic oligonucleotide
  Sense strand starting at position 1000 of SEQ ID NO: 916999
ugcauuauuuggccgguca

SEQ ID NO: 1200605 - RNA, 19 nt, Artificial Sequence
  Description of Artificial Sequence: Synthetic oligonucleotide
  Antisense strand to SEQ ID NO: 1200604
ugaccggccaaauaaugca

SEQ ID NO: 1200606 - RNA, 19 nt, Artificial Sequence
  Description of Artificial Sequence: Synthetic oligonucleotide
  Sense strand starting at position 1301 of SEQ ID NO: 916999
gcgguaaggaaucaagguu

SEQ ID NO: 1200607 - RNA, 19 nt, Artificial Sequence
  Description of Artificial Sequence: Synthetic oligonucleotide
  Antisense strand to SEQ ID NO: 1200606
aaccuugauuccuuaccgc

SEQ ID NO: 1200608 - RNA, 19 nt, Artificial Sequence
  Description of Artificial Sequence: Synthetic oligonucleotide
  Sense strand starting at position 1327 of SEQ ID NO: 916999
agcagaagauaguagagau

SEQ ID NO: 1200609 - RNA, 19 nt, Artificial Sequence
  Description of Artificial Sequence: Synthetic oligonucleotide
  Antisense strand to SEQ ID NO: 1200608
aucucuacuaucuucugcu

SEQ ID NO: 1200610 - RNA, 19 nt, Artificial Sequence
  Description of Artificial Sequence: Synthetic oligonucleotide
  Sense strand starting at position 1410 of SEQ ID NO: 916999
cucagaugguguuugcuga

SEQ ID NO: 1200611 - RNA, 19 nt, Artificial Sequence
  Description of Artificial Sequence: Synthetic oligonucleotide
  Antisense strand to SEQ ID NO: 1200610
ucagcaaacaccaucugag

SEQ ID NO: 1200612 - RNA, 19 nt, Artificial Sequence
  Description of Artificial Sequence: Synthetic oligonucleotide
  Sense strand starting at position 1411 of SEQ ID NO: 916999
ucagaugguguuugcugau

SEQ ID NO: 1200613 - RNA, 19 nt, Artificial Sequence
  Description of Artificial Sequence: Synthetic oligonucleotide
  Antisense strand to SEQ ID NO: 1200612
aucagcaaacaccaucuga

SEQ ID NO: 1200614 - RNA, 19 nt, Artificial Sequence
  Description of Artificial Sequence: Synthetic oligonucleotide
  Sense strand starting at position 1420 of SEQ ID NO: 916999
guuugcugauuugccgaau

SEQ ID NO: 1200615 - RNA, 19 nt, Artificial Sequence
  Description of Artificial Sequence: Synthetic oligonucleotide
  Antisense strand to SEQ ID NO: 1200614
auucggcaaaucagcaaac

SEQ ID NO: 1200616 - RNA, 19 nt, Artificial Sequence
  Description of Artificial Sequence: Synthetic oligonucleotide
  Sense strand starting at position 1521 of SEQ ID NO: 916999
aggcuucugcaacgagaca

SEQ ID NO: 1200617 - RNA, 19 nt, Artificial Sequence
  Description of Artificial Sequence: Synthetic oligonucleotide
  Antisense strand to SEQ ID NO: 1200616
ugucucguugcagaagccu

SEQ ID NO: 1200618 - RNA, 19 nt, Artificial Sequence
  Description of Artificial Sequence: Synthetic oligonucleotide
  Sense strand starting at position 2239 of SEQ ID NO: 916999
auuuacaacuggugugauu

SEQ ID NO: 1200619 - RNA, 19 nt, Artificial Sequence
  Description of Artificial Sequence: Synthetic oligonucleotide
  Antisense strand to SEQ ID NO: 1200618
aaucacaccaguuguaaau

SEQ ID NO: 1200620 - RNA, 19 nt, Artificial Sequence
  Description of Artificial Sequence: Synthetic oligonucleotide
  Sense strand starting at position 2241 of SEQ ID NO: 916999
uuacaacuggugugauuga

SEQ ID NO: 1200621 - RNA, 19 nt, Artificial Sequence
  Description of Artificial Sequence: Synthetic oligonucleotide
  Antisense strand to SEQ ID NO: 1200620
ucaaucacaccaguuguaa

SEQ ID NO: 1200622 - RNA, 19 nt, Artificial Sequence
  Description of Artificial Sequence: Synthetic oligonucleotide
  Sense strand starting at position 2242 of SEQ ID NO: 916999
uacaacuggugugauugau

SEQ ID NO: 1200623 - RNA, 19 nt, Artificial Sequence
  Description of Artificial Sequence: Synthetic oligonucleotide
  Antisense strand to SEQ ID NO: 1200622
aucaaucacaccaguugua

SEQ ID NO: 1200624 - RNA, 19 nt, Artificial Sequence
  Description of Artificial Sequence: Synthetic oligonucleotide
  Sense strand starting at position 2246 of SEQ ID NO: 916999
acuggugugauugauggua

SEQ ID NO: 1200625 - RNA, 19 nt, Artificial Sequence
  Description of Artificial Sequence: Synthetic oligonucleotide
  Antisense strand to SEQ ID NO: 1200624
uaccaucaaucacaccagu

SEQ ID NO: 1200626 - RNA, 19 nt, Artificial Sequence
  Description of Artificial Sequence: Synthetic oligonucleotide
  Sense strand starting at position 2251 of SEQ ID NO: 916999
ugugauugaugguaaguuu

SEQ ID NO: 1200627 - RNA, 19 nt, Artificial Sequence
  Description of Artificial Sequence: Synthetic oligonucleotide
  Antisense strand to SEQ ID NO: 1200626
aaacuuaccaucaaucaca

SEQ ID NO: 1200628 - RNA, 19 nt, Artificial Sequence
  Description of Artificial Sequence: Synthetic oligonucleotide
  Sense strand starting at position 2254 of SEQ ID NO: 916999
gauugaugguaaguuuaac

SEQ ID NO: 1200629 - RNA, 19 nt, Artificial Sequence
  Description of Artificial Sequence: Synthetic oligonucleotide
  Antisense strand to SEQ ID NO: 1200628
guuaaacuuaccaucaauc

SEQ ID NO: 1200630 - RNA, 19 nt, Artificial Sequence
  Description of Artificial Sequence: Synthetic oligonucleotide
  Sense strand starting at position 2323 of SEQ ID NO: 916999
cauagaagcugucugaagu

SEQ ID NO: 1200631 - RNA, 19 nt, Artificial Sequence
  Description of Artificial Sequence: Synthetic oligonucleotide
  Antisense strand to SEQ ID NO: 1200630
acuucagacagcuucuaug

SEQ ID NO: 1200632 - RNA, 19 nt, Artificial Sequence
  Description of Artificial Sequence: Synthetic oligonucleotide
  Sense strand starting at position 2324 of SEQ ID NO: 916999
auagaagcugucugaaguu

SEQ ID NO: 1200633 - RNA, 19 nt, Artificial Sequence
  Description of Artificial Sequence: Synthetic oligonucleotide
  Antisense strand to SEQ ID NO: 1200632
aacuucagacagcuucuau

SEQ ID NO: 1200634 - RNA, 19 nt, Artificial Sequence
  Description of Artificial Sequence: Synthetic oligonucleotide
  Sense strand starting at position 2333 of SEQ ID NO: 916999
gucugaaguuccuuccguu

SEQ ID NO: 1200635 - RNA, 19 nt, Artificial Sequence
  Description of Artificial Sequence: Synthetic oligonucleotide
  Antisense strand to SEQ ID NO: 1200634
aacggaaggaacuucagac

SEQ ID NO: 1200636 - RNA, 19 nt, Artificial Sequence
  Description of Artificial Sequence: Synthetic oligonucleotide
  Sense strand starting at position 2374 of SEQ ID NO: 916999
cgaccuuucuguuaugaga

SEQ ID NO: 1200637 - RNA, 19 nt, Artificial Sequence
  Description of Artificial Sequence: Synthetic oligonucleotide
  Antisense strand to SEQ ID NO: 1200636
ucucauaacagaaaggucg

SEQ ID NO: 1200638 - RNA, 19 nt, Artificial Sequence
  Description of Artificial Sequence: Synthetic oligonucleotide
  Sense strand starting at position 2385 of SEQ ID NO: 916999
uuaugagacgccuacaauu

SEQ ID NO: 1200639 - RNA, 19 nt, Artificial Sequence
  Description of Artificial Sequence: Synthetic oligonucleotide
  Antisense strand to SEQ ID NO: 1200638
aauuguaggcgucucauaa

SEQ ID NO: 1200640 - RNA, 19 nt, Artificial Sequence
  Description of Artificial Sequence: Synthetic oligonucleotide
  Sense strand starting at position 2387 of SEQ ID NO: 916999
augagacgccuacaauuga

SEQ ID NO: 1200641 - RNA, 19 nt, Artificial Sequence
  Description of Artificial Sequence: Synthetic oligonucleotide
  Antisense strand to SEQ ID NO: 1200640
ucaauuguaggcgucucau

SEQ ID NO: 1200642 - RNA, 19 nt, Artificial Sequence
  Description of Artificial Sequence: Synthetic oligonucleotide
  Sense strand starting at position 2402 of SEQ ID NO: 916999
uugagaucgcuuuaugagu

SEQ ID NO: 1200643 - RNA, 19 nt, Artificial Sequence
  Description of Artificial Sequence: Synthetic oligonucleotide
  Antisense strand to SEQ ID NO: 1200642
acucauaaagcgaucucaa

SEQ ID NO: 1200644 - RNA, 19 nt, Artificial Sequence
  Description of Artificial Sequence: Synthetic oligonucleotide
  Sense strand starting at position 2441 of SEQ ID NO: 916999
uuuaaagucgacugacaaa

SEQ ID NO: 1200645 - RNA, 19 nt, Artificial Sequence
  Description of Artificial Sequence: Synthetic oligonucleotide
  Antisense strand to SEQ ID NO: 1200644
uuugucagucgacuuuaaa

SEQ ID NO: 1200646 - RNA, 19 nt, Artificial Sequence
  Description of Artificial Sequence: Synthetic oligonucleotide
  Sense strand starting at position 2459 of SEQ ID NO: 916999
aagugugguucuccaaagu

SEQ ID NO: 1200647 - RNA, 19 nt, Artificial Sequence
  Description of Artificial Sequence: Synthetic oligonucleotide
  Antisense strand to SEQ ID NO: 1200646
acuuuggagaaccacacuu

SEQ ID NO: 1200648 - RNA, 19 nt, Artificial Sequence
  Description of Artificial Sequence: Synthetic oligonucleotide
  Sense strand starting at position 2468 of SEQ ID NO: 916999
ucuccaaaguccuaaagga

SEQ ID NO: 1200649 - RNA, 19 nt, Artificial Sequence
  Description of Artificial Sequence: Synthetic oligonucleotide
  Antisense strand to SEQ ID NO: 1200648
uccuuuaggacuuuggaga

SEQ ID NO: 1200650 - RNA, 19 nt, Artificial Sequence
  Description of Artificial Sequence: Synthetic oligonucleotide
  Sense strand starting at position 2621 of SEQ ID NO: 916999
cucuuaucaucuugugaga

SEQ ID NO: 1200651 - RNA, 19 nt, Artificial Sequence
  Description of Artificial Sequence: Synthetic oligonucleotide
  Antisense strand to SEQ ID NO: 1200650
ucucacaagaugauaagag

SEQ ID NO: 1200652 - RNA, 19 nt, Artificial Sequence
  Description of Artificial Sequence: Synthetic oligonucleotide
  Sense strand starting at position 2623 of SEQ ID NO: 916999
cuuaucaucuugugagaca

SEQ ID NO: 1200653 - RNA, 19 nt, Artificial Sequence
  Description of Artificial Sequence: Synthetic oligonucleotide
  Antisense strand to SEQ ID NO: 1200652
ugucucacaagaugauaag

SEQ ID NO: 1200654 - RNA, 19 nt, Artificial Sequence
  Description of Artificial Sequence: Synthetic oligonucleotide
  Sense strand starting at position 2624 of SEQ ID NO: 916999
uuaucaucuugugagacaa

SEQ ID NO: 1200655 - RNA, 19 nt, Artificial Sequence
  Description of Artificial Sequence: Synthetic oligonucleotide
  Antisense strand to SEQ ID NO: 1200654
uugucucacaagaugauaa

SEQ ID NO: 1200656 - RNA, 19 nt, Artificial Sequence
  Description of Artificial Sequence: Synthetic oligonucleotide
  Sense strand starting at position 2626 of SEQ ID NO: 916999
aucaucuugugagacaaau

SEQ ID NO: 1200657 - RNA, 19 nt, Artificial Sequence
  Description of Artificial Sequence: Synthetic oligonucleotide
  Antisense strand to SEQ ID NO: 1200656
auuugucucacaagaugau

SEQ ID NO: 1200658 - RNA, 19 nt, Artificial Sequence
  Description of Artificial Sequence: Synthetic oligonucleotide
  Sense strand starting at position 2746 of SEQ ID NO: 916999
acuccaaagccggaguuau

SEQ ID NO: 1200659 - RNA, 19 nt, Artificial Sequence
  Description of Artificial Sequence: Synthetic oligonucleotide
  Antisense strand to SEQ ID NO: 1200658
auaacuccggcuuuggagu

SEQ ID NO: 1200660 - RNA, 19 nt, Artificial Sequence
  Description of Artificial Sequence: Synthetic oligonucleotide
  Sense strand starting at position 2756 of SEQ ID NO: 916999
cggaguuauuuauauggau

SEQ ID NO: 1200661 - RNA, 19 nt, Artificial Sequence
  Description of Artificial Sequence: Synthetic oligonucleotide
  Antisense strand to SEQ ID NO: 1200660
auccauauaaauaacuccg

SEQ ID NO: 1200662 - RNA, 19 nt, Artificial Sequence
  Description of Artificial Sequence: Synthetic oligonucleotide
  Sense strand starting at position 2811 of SEQ ID NO: 916999
agcagagauccagguguuc

SEQ ID NO: 1200663 - RNA, 19 nt, Artificial Sequence
  Description of Artificial Sequence: Synthetic oligonucleotide
  Antisense strand to SEQ ID NO: 1200662
gaacaccuggaucucugcu

SEQ ID NO: 1200664 - RNA, 19 nt, Artificial Sequence
  Description of Artificial Sequence: Synthetic oligonucleotide
  Sense strand starting at position 2830 of SEQ ID NO: 916999
agaaacuguuaguagaaau

SEQ ID NO: 1200665 - RNA, 19 nt, Artificial Sequence
  Description of Artificial Sequence: Synthetic oligonucleotide
  Antisense strand to SEQ ID NO: 1200664
auuucuacuaacaguuucu

SEQ ID NO: 1200666 - RNA, 19 nt, Artificial Sequence
  Description of Artificial Sequence: Synthetic oligonucleotide
  Sense strand starting at position 3094 of SEQ ID NO: 916999
cucagcuuccuagauaggu

SEQ ID NO: 1200667 - RNA, 19 nt, Artificial Sequence
  Description of Artificial Sequence: Synthetic oligonucleotide
  Antisense strand to SEQ ID NO: 1200666
accuaucuaggaagcugag

SEQ ID NO: 1200668 - RNA, 19 nt, Artificial Sequence
  Description of Artificial Sequence: Synthetic oligonucleotide
  Sense strand starting at position 3204 of SEQ ID NO: 916999
cuguaacccuucuggaaug

SEQ ID NO: 1200669 - RNA, 19 nt, Artificial Sequence
  Description of Artificial Sequence: Synthetic oligonucleotide
  Antisense strand to SEQ ID NO: 1200668
cauuccagaaggguuacag

SEQ ID NO: 1200670 - RNA, 19 nt, Artificial Sequence
  Description of Artificial Sequence: Synthetic oligonucleotide
  Sense strand starting at position 15 of SEQ ID NO: 917000
gcaaguuacgggugcaaau

SEQ ID NO: 1200671 - RNA, 19 nt, Artificial Sequence
  Description of Artificial Sequence: Synthetic oligonucleotide
  Antisense strand to SEQ ID NO: 1200670
auuugcacccguaacuugc

SEQ ID NO: 1200672 - RNA, 19 nt, Artificial Sequence
  Description of Artificial Sequence: Synthetic oligonucleotide
  Sense strand starting at position 222 of SEQ ID NO: 917000
aggguugucccgggacagu

SEQ ID NO: 1200673 - RNA, 19 nt, Artificial Sequence
  Description of Artificial Sequence: Synthetic oligonucleotide
  Antisense strand to SEQ ID NO: 1200672
acugucccgggacaacccu

SEQ ID NO: 1200674 - RNA, 19 nt, Artificial Sequence
  Description of Artificial Sequence: Synthetic oligonucleotide
  Sense strand starting at position 787 of SEQ ID NO: 917000
ggaaacuguugccuggaca

SEQ ID NO: 1200675 - RNA, 19 nt, Artificial Sequence
  Description of Artificial Sequence: Synthetic oligonucleotide
  Antisense strand to SEQ ID NO: 1200674
uguccaggcaacaguuucc

SEQ ID NO: 1200676 - RNA, 19 nt, Artificial Sequence
  Description of Artificial Sequence: Synthetic oligonucleotide
  Sense strand starting at position 1402 of SEQ ID NO: 917000
ugccucuggccgugauuca

SEQ ID NO: 1200677 - RNA, 19 nt, Artificial Sequence
  Description of Artificial Sequence: Synthetic oligonucleotide
  Antisense strand to SEQ ID NO: 1200676
ugaaucacggccagaggca

SEQ ID NO: 1200678 - RNA, 19 nt, Artificial Sequence
  Description of Artificial Sequence: Synthetic oligonucleotide
  Sense strand starting at position 2419 of SEQ ID NO: 917000
gggagaaaugcagguagau

SEQ ID NO: 1200679 - RNA, 19 nt, Artificial Sequence
  Description of Artificial Sequence: Synthetic oligonucleotide
  Antisense strand to SEQ ID NO: 1200678
aucuaccugcauuucuccc

SEQ ID NO: 1200680 - RNA, 19 nt, Artificial Sequence
  Description of Artificial Sequence: Synthetic oligonucleotide
  Sense strand starting at position 2520 of SEQ ID NO: 917000
gcaauuguaucagugucua

SEQ ID NO: 1200681 - RNA, 19 nt, Artificial Sequence
  Description of Artificial Sequence: Synthetic oligonucleotide
  Antisense strand to SEQ ID NO: 1200680
uagacacugauacaauugc

SEQ ID NO: 1200682 - RNA, 19 nt, Artificial Sequence
  Description of Artificial Sequence: Synthetic oligonucleotide
  Sense strand starting at position 2525 of SEQ ID NO: 917000
uguaucagugucuaagcua

SEQ ID NO: 1200683 - RNA, 19 nt, Artificial Sequence
  Description of Artificial Sequence: Synthetic oligonucleotide
  Antisense strand to SEQ ID NO: 1200682
uagcuuagacacugauaca

SEQ ID NO: 1200684 - RNA, 19 nt, Artificial Sequence
  Description of Artificial Sequence: Synthetic oligonucleotide
  Sense strand starting at position 2690 of SEQ ID NO: 917000
cguagugacucuucuauga

SEQ ID NO: 1200685 - RNA, 19 nt, Artificial Sequence
  Description of Artificial Sequence: Synthetic oligonucleotide
  Antisense strand to SEQ ID NO: 1200684
ucauagaagagucacuacg

SEQ ID NO: 1200686 - RNA, 19 nt, Artificial Sequence
  Description of Artificial Sequence: Synthetic oligonucleotide
  Sense strand starting at position 2692 of SEQ ID NO: 917000
uagugacucuucuaugaga

SEQ ID NO: 1200687 - RNA, 19 nt, Artificial Sequence
  Description of Artificial Sequence: Synthetic oligonucleotide
  Antisense strand to SEQ ID NO: 1200686
ucucauagaagagucacua

SEQ ID NO: 1200688 - RNA, 19 nt, Artificial Sequence
  Description of Artificial Sequence: Synthetic oligonucleotide
  Sense strand starting at position 2694 of SEQ ID NO: 917000
gugacucuucuaugagaug

SEQ ID NO: 1200689 - RNA, 19 nt, Artificial Sequence
  Description of Artificial Sequence: Synthetic oligonucleotide
  Antisense strand to SEQ ID NO: 1200688
caucucauagaagagucac

SEQ ID NO: 1200690 - RNA, 19 nt, Artificial Sequence
  Description of Artificial Sequence: Synthetic oligonucleotide
  Sense strand starting at position 2697 of SEQ ID NO: 917000
acucuucuaugagauggua

SEQ ID NO: 1200691 - RNA, 19 nt, Artificial Sequence
  Description of Artificial Sequence: Synthetic oligonucleotide
  Antisense strand to SEQ ID NO: 1200690
uaccaucucauagaagagu

SEQ ID NO: 1200692 - RNA, 19 nt, Artificial Sequence
  Description of Artificial Sequence: Synthetic oligonucleotide
  Sense strand starting at position 2700 of SEQ ID NO: 917000
cuucuaugagaugguacau

SEQ ID NO: 1200693 - RNA, 19 nt, Artificial Sequence
  Description of Artificial Sequence: Synthetic oligonucleotide
  Antisense strand to SEQ ID NO: 1200692
auguaccaucucauagaag

SEQ ID NO: 1200694 - RNA, 19 nt, Artificial Sequence
  Description of Artificial Sequence: Synthetic oligonucleotide
  Sense strand starting at position 2713 of SEQ ID NO: 917000
guacauuauccaggucaau

SEQ ID NO: 1200695 - RNA, 19 nt, Artificial Sequence
  Description of Artificial Sequence: Synthetic oligonucleotide
  Antisense strand to SEQ ID NO: 1200694
auugaccuggauaauguac

SEQ ID NO: 1200696 - RNA, 19 nt, Artificial Sequence
  Description of Artificial Sequence: Synthetic oligonucleotide
  Sense strand starting at position 2726 of SEQ ID NO: 917000
gucaauccaugugcucaau

SEQ ID NO: 1200697 - RNA, 19 nt, Artificial Sequence
  Description of Artificial Sequence: Synthetic oligonucleotide
  Antisense strand to SEQ ID NO: 1200696
auugagcacauggauugac

SEQ ID NO: 1200698 - RNA, 19 nt, Artificial Sequence
  Description of Artificial Sequence: Synthetic oligonucleotide
  Sense strand starting at position 2798 of SEQ ID NO: 917000
ugcauuauacaguauccua

SEQ ID NO: 1200699 - RNA, 19 nt, Artificial Sequence
  Description of Artificial Sequence: Synthetic oligonucleotide
  Antisense strand to SEQ ID NO: 1200698
uaggauacuguauaaugca

SEQ ID NO: 1200700 - RNA, 19 nt, Artificial Sequence
  Description of Artificial Sequence: Synthetic oligonucleotide
  Sense strand starting at position 2855 of SEQ ID NO: 917000
gguauucugagcugcagga

SEQ ID NO: 1200701 - RNA, 19 nt, Artificial Sequence
  Description of Artificial Sequence: Synthetic oligonucleotide
  Antisense strand to SEQ ID NO: 1200700
uccugcagcucagaauacc

SEQ ID NO: 1200702 - RNA, 19 nt, Artificial Sequence
  Description of Artificial Sequence: Synthetic oligonucleotide
  Sense strand starting at position 2895 of SEQ ID NO: 917000
uugaucaugcagugucaaa

SEQ ID NO: 1200703 - RNA, 19 nt, Artificial Sequence
  Description of Artificial Sequence: Synthetic oligonucleotide
  Antisense strand to SEQ ID NO: 1200702
uuugacacugcaugaucaa

SEQ ID NO: 1200704 - RNA, 19 nt, Artificial Sequence
  Description of Artificial Sequence: Synthetic oligonucleotide
  Sense strand starting at position 2954 of SEQ ID NO: 917000
cuucuuggcuuucucagaa

SEQ ID NO: 1200705 - RNA, 19 nt, Artificial Sequence
  Description of Artificial Sequence: Synthetic oligonucleotide
  Antisense strand to SEQ ID NO: 1200704
uucugagaaagccaagaag

SEQ ID NO: 1200706 - RNA, 19 nt, Artificial Sequence
  Description of Artificial Sequence: Synthetic oligonucleotide
  Sense strand starting at position 2966 of SEQ ID NO: 917000
cucagaauauaagcugauu

SEQ ID NO: 1200707 - RNA, 19 nt, Artificial Sequence
  Description of Artificial Sequence: Synthetic oligonucleotide
  Antisense strand to SEQ ID NO: 1200706
aaucagcuuauauucugag

SEQ ID NO: 1200708 - RNA, 19 nt, Artificial Sequence
  Description of Artificial Sequence: Synthetic oligonucleotide
  Sense strand starting at position 2977 of SEQ ID NO: 917000
agcugauugccugggagau

SEQ ID NO: 1200709 - RNA, 19 nt, Artificial Sequence
  Description of Artificial Sequence: Synthetic oligonucleotide
  Antisense strand to SEQ ID NO: 1200708
aucucccaggcaaucagcu

SEQ ID NO: 1200710 - RNA, 19 nt, Artificial Sequence
  Description of Artificial Sequence: Synthetic oligonucleotide
  Sense strand starting at position 2978 of SEQ ID NO: 917000
gcugauugccugggagauu

SEQ ID NO: 1200711 - RNA, 19 nt, Artificial Sequence
  Description of Artificial Sequence: Synthetic oligonucleotide
  Antisense strand to SEQ ID NO: 1200710
aaucucccaggcaaucagc

SEQ ID NO: 1200712 - RNA, 19 nt, Artificial Sequence
  Description of Artificial Sequence: Synthetic oligonucleotide
  Sense strand starting at position 2987 of SEQ ID NO: 917000
cugggagauucucacuuau

SEQ ID NO: 1200713 - RNA, 19 nt, Artificial Sequence
  Description of Artificial Sequence: Synthetic oligonucleotide
  Antisense strand to SEQ ID NO: 1200712
auaagugagaaucucccag

SEQ ID NO: 1200714 - RNA, 19 nt, Artificial Sequence
  Description of Artificial Sequence: Synthetic oligonucleotide
  Sense strand starting at position 2989 of SEQ ID NO: 917000
gggagauucucacuuaucu

SEQ ID NO: 1200715 - RNA, 19 nt, Artificial Sequence
  Description of Artificial Sequence: Synthetic oligonucleotide
  Antisense strand to SEQ ID NO: 1200714
agauaagugagaaucuccc

SEQ ID NO: 1200716 - RNA, 19 nt, Artificial Sequence
  Description of Artificial Sequence: Synthetic oligonucleotide
  Sense strand starting at position 3077 of SEQ ID NO: 917000
cuggcucaucuuuguguca

SEQ ID NO: 1200717 - RNA, 19 nt, Artificial Sequence
  Description of Artificial Sequence: Synthetic oligonucleotide
  Antisense strand to SEQ ID NO: 1200716
ugacacaaagaugagccag

SEQ ID NO: 1200718 - RNA, 19 nt, Artificial Sequence
  Description of Artificial Sequence: Synthetic oligonucleotide
  Sense strand starting at position 3102 of SEQ ID NO: 917000
ggcacaguuccugguacaa

SEQ ID NO: 1200719 - RNA, 19 nt, Artificial Sequence
  Description of Artificial Sequence: Synthetic oligonucleotide
  Antisense strand to SEQ ID NO: 1200718
uuguaccaggaacugugcc

SEQ ID NO: 1200720 - RNA, 19 nt, Artificial Sequence
  Description of Artificial Sequence: Synthetic oligonucleotide
  Sense strand starting at position 3119 of SEQ ID NO: 917000
aagggaggugcuuaguaua

SEQ ID NO: 1200721 - RNA, 19 nt, Artificial Sequence
  Description of Artificial Sequence: Synthetic oligonucleotide
  Antisense strand to SEQ ID NO: 1200720
uauacuaagcaccucccuu

SEQ ID NO: 1200722 - RNA, 19 nt, Artificial Sequence
  Description of Artificial Sequence: Synthetic oligonucleotide
  Sense strand starting at position 3135 of SEQ ID NO: 917000
auagcuugcugggugaaca

SEQ ID NO: 1200723 - RNA, 19 nt, Artificial Sequence
  Description of Artificial Sequence: Synthetic oligonucleotide
  Antisense strand to SEQ ID NO: 1200722
uguucacccagcaagcuau

SEQ ID NO: 1200724 - RNA, 19 nt, Artificial Sequence
  Description of Artificial Sequence: Synthetic oligonucleotide
  Sense strand starting at position 3593 of SEQ ID NO: 917000
ggaggcuccuccuucuuau

SEQ ID NO: 1200725 - RNA, 19 nt, Artificial Sequence
  Description of Artificial Sequence: Synthetic oligonucleotide
  Antisense strand to SEQ ID NO: 1200724
auaagaaggaggagccucc

SEQ ID NO: 1200726 - RNA, 19 nt, Artificial Sequence
  Description of Artificial Sequence: Synthetic oligonucleotide
  Sense strand starting at position 3604 of SEQ ID NO: 917000
cuucuuauuccucagguga

SEQ ID NO: 1200727 - RNA, 19 nt, Artificial Sequence
  Description of Artificial Sequence: Synthetic oligonucleotide
  Antisense strand to SEQ ID NO: 1200726
ucaccugaggaauaagaag

SEQ ID NO: 1200728 - RNA, 19 nt, Artificial Sequence
  Description of Artificial Sequence: Synthetic oligonucleotide
  Sense strand starting at position 3649 of SEQ ID NO: 917000
ggucuucuuguagauuauc

SEQ ID NO: 1200729 - RNA, 19 nt, Artificial Sequence
  Description of Artificial Sequence: Synthetic oligonucleotide
  Antisense strand to SEQ ID NO: 1200728
gauaaucuacaagaagacc

SEQ ID NO: 1200730 - RNA, 19 nt, Artificial Sequence
  Description of Artificial Sequence: Synthetic oligonucleotide
  Sense strand starting at position 3719 of SEQ ID NO: 917000
guguguagcgugucacaau

SEQ ID NO: 1200731 - RNA, 19 nt, Artificial Sequence
  Description of Artificial Sequence: Synthetic oligonucleotide
  Antisense strand to SEQ ID NO: 1200730
auugugacacgcuacacac

SEQ ID NO: 1200732 - RNA, 19 nt, Artificial Sequence
  Description of Artificial Sequence: Synthetic oligonucleotide
  Sense strand starting at position 3726 of SEQ ID NO: 917000
gcgugucacaauuguaauu

SEQ ID NO: 1200733 - RNA, 19 nt, Artificial Sequence
  Description of Artificial Sequence: Synthetic oligonucleotide
  Antisense strand to SEQ ID NO: 1200732
aauuacaauugugacacgc

SEQ ID NO: 1200734 - RNA, 19 nt, Artificial Sequence
  Description of Artificial Sequence: Synthetic oligonucleotide
  Sense strand starting at position 3728 of SEQ ID NO: 917000
gugucacaauuguaauuua

SEQ ID NO: 1200735 - RNA, 19 nt, Artificial Sequence
  Description of Artificial Sequence: Synthetic oligonucleotide
  Antisense strand to SEQ ID NO: 1200734
uaaauuacaauugugacac

SEQ ID NO: 1200736 - RNA, 19 nt, Artificial Sequence
  Description of Artificial Sequence: Synthetic oligonucleotide
  Sense strand starting at position 3766 of SEQ ID NO: 917000
uuuguucuaucucuagacu

SEQ ID NO: 1200737 - RNA, 19 nt, Artificial Sequence
  Description of Artificial Sequence: Synthetic oligonucleotide
  Antisense strand to SEQ ID NO: 1200736
agucuagagauagaacaaa

SEQ ID NO: 1200738 - RNA, 19 nt, Artificial Sequence
  Description of Artificial Sequence: Synthetic oligonucleotide
  Sense strand starting at position 3767 of SEQ ID NO: 917000
uuguucuaucucuagacua

SEQ ID NO: 1200739 - RNA, 19 nt, Artificial Sequence
  Description of Artificial Sequence: Synthetic oligonucleotide
  Antisense strand to SEQ ID NO: 1200738
uagucuagagauagaacaa

SEQ ID NO: 1200740 - RNA, 19 nt, Artificial Sequence
  Description of Artificial Sequence: Synthetic oligonucleotide
  Sense strand starting at position 3769 of SEQ ID NO: 917000
guucuaucucuagacuaua

SEQ ID NO: 1200741 - RNA, 19 nt, Artificial Sequence
  Description of Artificial Sequence: Synthetic oligonucleotide
  Antisense strand to SEQ ID NO: 1200740
uauagucuagagauagaac

SEQ ID NO: 1200742 - RNA, 19 nt, Artificial Sequence
  Description of Artificial Sequence: Synthetic oligonucleotide
  Sense strand starting at position 3826 of SEQ ID NO: 917000
aagaauuguccuggugcau

SEQ ID NO: 1200743 - RNA, 19 nt, Artificial Sequence
  Description of Artificial Sequence: Synthetic oligonucleotide
  Antisense strand to SEQ ID NO: 1200742
augcaccaggacaauucuu

SEQ ID NO: 1200744 - RNA, 19 nt, Artificial Sequence
  Description of Artificial Sequence: Synthetic oligonucleotide
  Sense strand starting at position 3861 of SEQ ID NO: 917000
auguuucuugaaugaauug

SEQ ID NO: 1200745 - RNA, 19 nt, Artificial Sequence
  Description of Artificial Sequence: Synthetic oligonucleotide
  Antisense strand to SEQ ID NO: 1200744
caauucauucaagaaacau

SEQ ID NO: 1200746 - RNA, 19 nt, Artificial Sequence
  Description of Artificial Sequence: Synthetic oligonucleotide
  Sense strand starting at position 3942 of SEQ ID NO: 917000
auuagaauuucucagguag

SEQ ID NO: 1200747 - RNA, 19 nt, Artificial Sequence
  Description of Artificial Sequence: Synthetic oligonucleotide
  Antisense strand to SEQ ID NO: 1200746
cuaccugagaaauucuaau

SEQ ID NO: 1200748 - RNA, 19 nt, Artificial Sequence
  Description of Artificial Sequence: Synthetic oligonucleotide
  Sense strand starting at position 3944 of SEQ ID NO: 917000
uagaauuucucagguagca

SEQ ID NO: 1200749 - RNA, 19 nt, Artificial Sequence
  Description of Artificial Sequence: Synthetic oligonucleotide
  Antisense strand to SEQ ID NO: 1200748
ugcuaccugagaaauucua

SEQ ID NO: 1200750 - RNA, 19 nt, Artificial Sequence
  Description of Artificial Sequence: Synthetic oligonucleotide
  Sense strand starting at position 338 of SEQ ID NO: 917001
cuguauauuuguccaaugu

SEQ ID NO: 1200751 - RNA, 19 nt, Artificial Sequence
  Description of Artificial Sequence: Synthetic oligonucleotide
  Antisense strand to SEQ ID NO: 1200750
acauuggacaaauauacag

SEQ ID NO: 1200752 - RNA, 19 nt, Artificial Sequence
  Description of Artificial Sequence: Synthetic oligonucleotide
  Sense strand starting at position 342 of SEQ ID NO: 917001
auauuuguccaauguagca

SEQ ID NO: 1200753 - RNA, 19 nt, Artificial Sequence
  Description of Artificial Sequence: Synthetic oligonucleotide
  Antisense strand to SEQ ID NO: 1200752
ugcuacauuggacaaauau

SEQ ID NO: 1200754 - RNA, 19 nt, Artificial Sequence
  Description of Artificial Sequence: Synthetic oligonucleotide
  Sense strand starting at position 354 of SEQ ID NO: 917001
uguagcaaccguuauaauu

SEQ ID NO: 1200755 - RNA, 19 nt, Artificial Sequence
  Description of Artificial Sequence: Synthetic oligonucleotide
  Antisense strand to SEQ ID NO: 1200754
aauuauaacgguugcuaca

SEQ ID NO: 1200756 - RNA, 19 nt, Artificial Sequence
  Description of Artificial Sequence: Synthetic oligonucleotide
  Sense strand starting at position 420 of SEQ ID NO: 917001
ucugguacaucuguucuaa

SEQ ID NO: 1200757 - RNA, 19 nt, Artificial Sequence
  Description of Artificial Sequence: Synthetic oligonucleotide
  Antisense strand to SEQ ID NO: 1200756
uuagaacagauguaccaga

SEQ ID NO: 1200758 - RNA, 19 nt, Artificial Sequence
  Description of Artificial Sequence: Synthetic oligonucleotide
  Sense strand starting at position 422 of SEQ ID NO: 917001
ugguacaucuguucuaaca

SEQ ID NO: 1200759 - RNA, 19 nt, Artificial Sequence
  Description of Artificial Sequence: Synthetic oligonucleotide
  Antisense strand to SEQ ID NO: 1200758
uguuagaacagauguacca

SEQ ID NO: 1200760 - RNA, 19 nt, Artificial Sequence
  Description of Artificial Sequence: Synthetic oligonucleotide
  Sense strand starting at position 479 of SEQ ID NO: 917001
ugcauauggguuuaucaaa

SEQ ID NO: 1200761 - RNA, 19 nt, Artificial Sequence
  Description of Artificial Sequence: Synthetic oligonucleotide
  Antisense strand to SEQ ID NO: 1200760
uuugauaaacccauaugca

SEQ ID NO: 1200762 - RNA, 19 nt, Artificial Sequence
  Description of Artificial Sequence: Synthetic oligonucleotide
  Sense strand starting at position 486 of SEQ ID NO: 917001
ggguuuaucaaaggcuacu

SEQ ID NO: 1200763 - RNA, 19 nt, Artificial Sequence
  Description of Artificial Sequence: Synthetic oligonucleotide
  Antisense strand to SEQ ID NO: 1200762
aguagccuuugauaaaccc

SEQ ID NO: 1200764 - RNA, 19 nt, Artificial Sequence
  Description of Artificial Sequence: Synthetic oligonucleotide
  Sense strand starting at position 734 of SEQ ID NO: 917001
uuggaauuagcacaguguu

SEQ ID NO: 1200765 - RNA, 19 nt, Artificial Sequence
  Description of Artificial Sequence: Synthetic oligonucleotide
  Antisense strand to SEQ ID NO: 1200764
aacacugugcuaauuccaa

SEQ ID NO: 1200766 - RNA, 19 nt, Artificial Sequence
  Description of Artificial Sequence: Synthetic oligonucleotide
  Sense strand starting at position 791 of SEQ ID NO: 917001
uucucuagguguuucuaaa

SEQ ID NO: 1200767 - RNA, 19 nt, Artificial Sequence
  Description of Artificial Sequence: Synthetic oligonucleotide
  Antisense strand to SEQ ID NO: 1200766
uuuagaaacaccuagagaa

SEQ ID NO: 1200768 - RNA, 19 nt, Artificial Sequence
  Description of Artificial Sequence: Synthetic oligonucleotide
  Sense strand starting at position 992 of SEQ ID NO: 917001
cccgaagggcuccagaauu

SEQ ID NO: 1200769 - RNA, 19 nt, Artificial Sequence
  Description of Artificial Sequence: Synthetic oligonucleotide
  Antisense strand to SEQ ID NO: 1200768
aauucuggagcccuucggg

SEQ ID NO: 1200770 - RNA, 19 nt, Artificial Sequence
  Description of Artificial Sequence: Synthetic oligonucleotide
  Sense strand starting at position 1034 of SEQ ID NO: 917001
aggcgaucugauuggaagu

SEQ ID NO: 1200771 - RNA, 19 nt, Artificial Sequence
  Description of Artificial Sequence: Synthetic oligonucleotide
  Antisense strand to SEQ ID NO: 1200770
acuuccaaucagaucgccu

SEQ ID NO: 1200772 - RNA, 19 nt, Artificial Sequence
  Description of Artificial Sequence: Synthetic oligonucleotide
  Sense strand starting at position 1201 of SEQ ID NO: 917001
uagguuaggcguggagaua

SEQ ID NO: 1200773 - RNA, 19 nt, Artificial Sequence
  Description of Artificial Sequence: Synthetic oligonucleotide
  Antisense strand to SEQ ID NO: 1200772
uaucuccacgccuaaccua

SEQ ID NO: 1200774 - RNA, 19 nt, Artificial Sequence
  Description of Artificial Sequence: Synthetic oligonucleotide
  Sense strand starting at position 1292 of SEQ ID NO: 917001
gagguuuagcaacagguca

SEQ ID NO: 1200775 - RNA, 19 nt, Artificial Sequence
  Description of Artificial Sequence: Synthetic oligonucleotide
  Antisense strand to SEQ ID NO: 1200774
ugaccuguugcuaaaccuc

SEQ ID NO: 1200776 - RNA, 19 nt, Artificial Sequence
  Description of Artificial Sequence: Synthetic oligonucleotide
  Sense strand starting at position 2305 of SEQ ID NO: 917001
gaguaacggucuucggaau

SEQ ID NO: 1200777 - RNA, 19 nt, Artificial Sequence
  Description of Artificial Sequence: Synthetic oligonucleotide
  Antisense strand to SEQ ID NO: 1200776
auuccgaagaccguuacuc

SEQ ID NO: 1200778 - RNA, 19 nt, Artificial Sequence
  Description of Artificial Sequence: Synthetic oligonucleotide
  Sense strand starting at position 2327 of SEQ ID NO: 917001
gagccuucgccuuagggaa

SEQ ID NO: 1200779 - RNA, 19 nt, Artificial Sequence
  Description of Artificial Sequence: Synthetic oligonucleotide
  Antisense strand to SEQ ID NO: 1200778
uucccuaaggcgaaggcuc

SEQ ID NO: 1200780 - RNA, 19 nt, Artificial Sequence
  Description of Artificial Sequence: Synthetic oligonucleotide
  Sense strand starting at position 2467 of SEQ ID NO: 917001
aggccuuugugauuaagug

SEQ ID NO: 1200781 - RNA, 19 nt, Artificial Sequence
  Description of Artificial Sequence: Synthetic oligonucleotide
  Antisense strand to SEQ ID NO: 1200780
cacuuaaucacaaaggccu

SEQ ID NO: 1200782 - RNA, 19 nt, Artificial Sequence
  Description of Artificial Sequence: Synthetic oligonucleotide
  Sense strand starting at position 2493 of SEQ ID NO: 917001
ugaggagagacguggcuua

SEQ ID NO: 1200783 - RNA, 19 nt, Artificial Sequence
  Description of Artificial Sequence: Synthetic oligonucleotide
  Antisense strand to SEQ ID NO: 1200782
uaagccacgucucuccuca

SEQ ID NO: 1200784 - RNA, 19 nt, Artificial Sequence
  Description of Artificial Sequence: Synthetic oligonucleotide
  Sense strand starting at position 2574 of SEQ ID NO: 917001
aauugagcuccuugagagu

SEQ ID NO: 1200785 - RNA, 19 nt, Artificial Sequence
  Description of Artificial Sequence: Synthetic oligonucleotide
  Antisense strand to SEQ ID NO: 1200784
acucucaaggagcucaauu

SEQ ID NO: 1200786 - RNA, 19 nt, Artificial Sequence
  Description of Artificial Sequence: Synthetic oligonucleotide
  Sense strand starting at position 2643 of SEQ ID NO: 917001
ggcgcucgaauuuguugaa

SEQ ID NO: 1200787 - RNA, 19 nt, Artificial Sequence
  Description of Artificial Sequence: Synthetic oligonucleotide
  Antisense strand to SEQ ID NO: 1200786
uucaacaaauucgagcgcc

SEQ ID NO: 1200788 - RNA, 19 nt, Artificial Sequence
  Description of Artificial Sequence: Synthetic oligonucleotide
  Sense strand starting at position 2649 of SEQ ID NO: 917001
cgaauuuguugaagaggug

SEQ ID NO: 1200789 - RNA, 19 nt, Artificial Sequence
  Description of Artificial Sequence: Synthetic oligonucleotide
  Antisense strand to SEQ ID NO: 1200788
caccucuucaacaaauucg

SEQ ID NO: 1200790 - RNA, 19 nt, Artificial Sequence
  Description of Artificial Sequence: Synthetic oligonucleotide
  Sense strand starting at position 2661 of SEQ ID NO: 917001
agagguggguguucaguau

SEQ ID NO: 1200791 - RNA, 19 nt, Artificial Sequence
  Description of Artificial Sequence: Synthetic oligonucleotide
  Antisense strand to SEQ ID NO: 1200790
auacugaacacccaccucu

SEQ ID NO: 1200792 - RNA, 19 nt, Artificial Sequence
  Description of Artificial Sequence: Synthetic oligonucleotide
  Sense strand starting at position 2665 of SEQ ID NO: 917001
guggguguucaguaucgaa

SEQ ID NO: 1200793 - RNA, 19 nt, Artificial Sequence
  Description of Artificial Sequence: Synthetic oligonucleotide
  Antisense strand to SEQ ID NO: 1200792
uucgauacugaacacccac

SEQ ID NO: 1200794 - RNA, 19 nt, Artificial Sequence
  Description of Artificial Sequence: Synthetic oligonucleotide
  Sense strand starting at position 2681 of SEQ ID NO: 917001
gaaagagccgcggauugua

SEQ ID NO: 1200795 - RNA, 19 nt, Artificial Sequence
  Description of Artificial Sequence: Synthetic oligonucleotide
  Antisense strand to SEQ ID NO: 1200794
uacaauccgcggcucuuuc

SEQ ID NO: 1200796 - RNA, 19 nt, Artificial Sequence
  Description of Artificial Sequence: Synthetic oligonucleotide
  Sense strand starting at position 2956 of SEQ ID NO: 917001
aaugguaucgauuaacuuu

SEQ ID NO: 1200797 - RNA, 19 nt, Artificial Sequence
  Description of Artificial Sequence: Synthetic oligonucleotide
  Antisense strand to SEQ ID NO: 1200796
aaaguuaaucgauaccauu

SEQ ID NO: 1200798 - RNA, 19 nt, Artificial Sequence
  Description of Artificial Sequence: Synthetic oligonucleotide
  Sense strand starting at position 3012 of SEQ ID NO: 917001
acgggaaacuugucauacu

SEQ ID NO: 1200799 - RNA, 19 nt, Artificial Sequence
  Description of Artificial Sequence: Synthetic oligonucleotide
  Antisense strand to SEQ ID NO: 1200798
aguaugacaaguuucccgu

SEQ ID NO: 1200800 - RNA, 19 nt, Artificial Sequence
  Description of Artificial Sequence: Synthetic oligonucleotide
  Sense strand starting at position 3053 of SEQ ID NO: 917001
gucuuuaugaacugugaag

SEQ ID NO: 1200801 - RNA, 19 nt, Artificial Sequence
  Description of Artificial Sequence: Synthetic oligonucleotide
  Antisense strand to SEQ ID NO: 1200800
cuucacaguucauaaagac

SEQ ID NO: 1200802 - RNA, 19 nt, Artificial Sequence
  Description of Artificial Sequence: Synthetic oligonucleotide
  Sense strand starting at position 3055 of SEQ ID NO: 917001
cuuuaugaacugugaaguc

SEQ ID NO: 1200803 - RNA, 19 nt, Artificial Sequence
  Description of Artificial Sequence: Synthetic oligonucleotide
  Antisense strand to SEQ ID NO: 1200802
gacuucacaguucauaaag

SEQ ID NO: 1200804 - RNA, 19 nt, Artificial Sequence
  Description of Artificial Sequence: Synthetic oligonucleotide
  Sense strand starting at position 3065 of SEQ ID NO: 917001
ugugaaguccuaugcaaac

SEQ ID NO: 1200805 - RNA, 19 nt, Artificial Sequence
  Description of Artificial Sequence: Synthetic oligonucleotide
  Antisense strand to SEQ ID NO: 1200804
guuugcauaggacuucaca

SEQ ID NO: 1200806 - RNA, 19 nt, Artificial Sequence
  Description of Artificial Sequence: Synthetic oligonucleotide
  Sense strand starting at position 3099 of SEQ ID NO: 917001
ucgcaaucugauuagcgaa

SEQ ID NO: 1200807 - RNA, 19 nt, Artificial Sequence
  Description of Artificial Sequence: Synthetic oligonucleotide
  Antisense strand to SEQ ID NO: 1200806
uucgcuaaucagauugcga

SEQ ID NO: 1200808 - RNA, 19 nt, Artificial Sequence
  Description of Artificial Sequence: Synthetic oligonucleotide
  Sense strand starting at position 3177 of SEQ ID NO: 917001
guuuaucaacugcagaaua

SEQ ID NO: 1200809 - RNA, 19 nt, Artificial Sequence
  Description of Artificial Sequence: Synthetic oligonucleotide
  Antisense strand to SEQ ID NO: 1200808
uauucugcaguugauaaac

SEQ ID NO: 1200810 - RNA, 19 nt, Artificial Sequence
  Description of Artificial Sequence: Synthetic oligonucleotide
  Sense strand starting at position 3238 of SEQ ID NO: 917001
ucagaaaggacgugcuaaa

SEQ ID NO: 1200811 - RNA, 19 nt, Artificial Sequence
  Description of Artificial Sequence: Synthetic oligonucleotide
  Antisense strand to SEQ ID NO: 1200810
uuuagcacguccuuucuga

SEQ ID NO: 1200812 - RNA, 19 nt, Artificial Sequence
  Description of Artificial Sequence: Synthetic oligonucleotide
  Sense strand starting at position 3264 of SEQ ID NO: 917001
ggaugaagcuaacuuugau

SEQ ID NO: 1200813 - RNA, 19 nt, Artificial Sequence
  Description of Artificial Sequence: Synthetic oligonucleotide
  Antisense strand to SEQ ID NO: 1200812
aucaaaguuagcuucaucc

SEQ ID NO: 1200814 - RNA, 19 nt, Artificial Sequence
  Description of Artificial Sequence: Synthetic oligonucleotide
  Sense strand starting at position 3449 of SEQ ID NO: 917001
guuggaugauuagcaggau

SEQ ID NO: 1200815 - RNA, 19 nt, Artificial Sequence
  Description of Artificial Sequence: Synthetic oligonucleotide
  Antisense strand to SEQ ID NO: 1200814
auccugcuaaucauccaac

SEQ ID NO: 1200816 - RNA, 19 nt, Artificial Sequence
  Description of Artificial Sequence: Synthetic oligonucleotide
  Sense strand starting at position 3461 of SEQ ID NO: 917001
gcaggauccguggauuguu

SEQ ID NO: 1200817 - RNA, 19 nt, Artificial Sequence
  Description of Artificial Sequence: Synthetic oligonucleotide
  Antisense strand to SEQ ID NO: 1200816
aacaauccacggauccugc

SEQ ID NO: 1200818 - RNA, 19 nt, Artificial Sequence
  Description of Artificial Sequence: Synthetic oligonucleotide
  Sense strand starting at position 3473 of SEQ ID NO: 917001
gauuguuguuuauccagua

SEQ ID NO: 1200819 - RNA, 19 nt, Artificial Sequence
  Description of Artificial Sequence: Synthetic oligonucleotide
  Antisense strand to SEQ ID NO: 1200818
uacuggauaaacaacaauc

SEQ ID NO: 1200820 - RNA, 19 nt, Artificial Sequence
  Description of Artificial Sequence: Synthetic oligonucleotide
  Sense strand starting at position 3478 of SEQ ID NO: 917001
uuguuuauccaguauguga

SEQ ID NO: 1200821 - RNA, 19 nt, Artificial Sequence
  Description of Artificial Sequence: Synthetic oligonucleotide
  Antisense strand to SEQ ID NO: 1200820
ucacauacuggauaaacaa

SEQ ID NO: 1200822 - RNA, 19 nt, Artificial Sequence
  Description of Artificial Sequence: Synthetic oligonucleotide
  Sense strand starting at position 3480 of SEQ ID NO: 917001
guuuauccaguaugugaag

SEQ ID NO: 1200823 - RNA, 19 nt, Artificial Sequence
  Description of Artificial Sequence: Synthetic oligonucleotide
  Antisense strand to SEQ ID NO: 1200822
cuucacauacuggauaaac

SEQ ID NO: 1200824 - RNA, 19 nt, Artificial Sequence
  Description of Artificial Sequence: Synthetic oligonucleotide
  Sense strand starting at position 3661 of SEQ ID NO: 917001
acaaaugacugacaagauu

SEQ ID NO: 1200825 - RNA, 19 nt, Artificial Sequence
  Description of Artificial Sequence: Synthetic oligonucleotide
  Antisense strand to SEQ ID NO: 1200824
aaucuugucagucauuugu

SEQ ID NO: 1200826 - RNA, 19 nt, Artificial Sequence
  Description of Artificial Sequence: Synthetic oligonucleotide
  Sense strand starting at position 3682 of SEQ ID NO: 917001
agccacuccugggagauuu

SEQ ID NO: 1200827 - RNA, 19 nt, Artificial Sequence
  Description of Artificial Sequence: Synthetic oligonucleotide
  Antisense strand to SEQ ID NO: 1200826
aaaucucccaggaguggcu

SEQ ID NO: 1200828 - RNA, 19 nt, Artificial Sequence
  Description of Artificial Sequence: Synthetic oligonucleotide
  Sense strand starting at position 3809 of SEQ ID NO: 917001
aaacuucugguguaggagu

SEQ ID NO: 1200829 - RNA, 19 nt, Artificial Sequence
  Description of Artificial Sequence: Synthetic oligonucleotide
  Antisense strand to SEQ ID NO: 1200828
acuccuacaccagaaguuu

SEQ ID NO: 1200830 - RNA, 19 nt, Artificial Sequence
  Description of Artificial Sequence: Synthetic oligonucleotide
  Sense strand starting at position 102 of SEQ ID NO: 917002
auggcuagaacuugaugau

SEQ ID NO: 1200831 - RNA, 19 nt, Artificial Sequence
  Description of Artificial Sequence: Synthetic oligonucleotide
  Antisense strand to SEQ ID NO: 1200830
aucaucaaguucuagccau

SEQ ID NO: 1200832 - RNA, 19 nt, Artificial Sequence
  Description of Artificial Sequence: Synthetic oligonucleotide
  Sense strand starting at position 161 of SEQ ID NO: 917002
aguaaucuucuaggauaua

SEQ ID NO: 1200833 - RNA, 19 nt, Artificial Sequence
  Description of Artificial Sequence: Synthetic oligonucleotide
  Antisense strand to SEQ ID NO: 1200832
uauauccuagaagauuacu

SEQ ID NO: 1200834 - RNA, 19 nt, Artificial Sequence
  Description of Artificial Sequence: Synthetic oligonucleotide
  Sense strand starting at position 181 of SEQ ID NO: 917002
acuuguauguaaguaugaa

SEQ ID NO: 1200835 - RNA, 19 nt, Artificial Sequence
  Description of Artificial Sequence: Synthetic oligonucleotide
  Antisense strand to SEQ ID NO: 1200834
uucauacuuacauacaagu

SEQ ID NO: 1200836 - RNA, 19 nt, Artificial Sequence
  Description of Artificial Sequence: Synthetic oligonucleotide
  Sense strand starting at position 257 of SEQ ID NO: 917002
gguacuuucuauccauaug

SEQ ID NO: 1200837 - RNA, 19 nt, Artificial Sequence
  Description of Artificial Sequence: Synthetic oligonucleotide
  Antisense strand to SEQ ID NO: 1200836
cauauggauagaaaguacc

SEQ ID NO: 1200838 - RNA, 19 nt, Artificial Sequence
  Description of Artificial Sequence: Synthetic oligonucleotide
  Sense strand starting at position 267 of SEQ ID NO: 917002
auccauaugccuuauugua

SEQ ID NO: 1200839 - RNA, 19 nt, Artificial Sequence
  Description of Artificial Sequence: Synthetic oligonucleotide
  Antisense strand to SEQ ID NO: 1200838
uacaauaaggcauauggau

SEQ ID NO: 1200840 - RNA, 19 nt, Artificial Sequence
  Description of Artificial Sequence: Synthetic oligonucleotide
  Sense strand starting at position 331 of SEQ ID NO: 917002
gucacuaaauucuuuguga

SEQ ID NO: 1200841 - RNA, 19 nt, Artificial Sequence
  Description of Artificial Sequence: Synthetic oligonucleotide
  Antisense strand to SEQ ID NO: 1200840
ucacaaagaauuuagugac

SEQ ID NO: 1200842 - RNA, 19 nt, Artificial Sequence
  Description of Artificial Sequence: Synthetic oligonucleotide
  Sense strand starting at position 436 of SEQ ID NO: 917002
ugcuucuguggucaaucaa

SEQ ID NO: 1200843 - RNA, 19 nt, Artificial Sequence
  Description of Artificial Sequence: Synthetic oligonucleotide
  Antisense strand to SEQ ID NO: 1200842
uugauugaccacagaagca

SEQ ID NO: 1200844 - RNA, 19 nt, Artificial Sequence
  Description of Artificial Sequence: Synthetic oligonucleotide
  Sense strand starting at position 540 of SEQ ID NO: 917002
ugaagaaccuuguuuaacu

SEQ ID NO: 1200845 - RNA, 19 nt, Artificial Sequence
  Description of Artificial Sequence: Synthetic oligonucleotide
  Antisense strand to SEQ ID NO: 1200844
aguuaaacaagguucuuca

SEQ ID NO: 1200846 - RNA, 19 nt, Artificial Sequence
  Description of Artificial Sequence: Synthetic oligonucleotide
  Sense strand starting at position 613 of SEQ ID NO: 917002
ucuuauacuuguguaucaa

SEQ ID NO: 1200847 - RNA, 19 nt, Artificial Sequence
  Description of Artificial Sequence: Synthetic oligonucleotide
  Antisense strand to SEQ ID NO: 1200846
uugauacacaaguauaaga

SEQ ID NO: 1200848 - RNA, 19 nt, Artificial Sequence
  Description of Artificial Sequence: Synthetic oligonucleotide
  Sense strand starting at position 614 of SEQ ID NO: 917002
cuuauacuuguguaucaag

SEQ ID NO: 1200849 - RNA, 19 nt, Artificial Sequence
  Description of Artificial Sequence: Synthetic oligonucleotide
  Antisense strand to SEQ ID NO: 1200848
cuugauacacaaguauaag

SEQ ID NO: 1200850 - RNA, 19 nt, Artificial Sequence
  Description of Artificial Sequence: Synthetic oligonucleotide
  Sense strand starting at position 780 of SEQ ID NO: 917002
aacagauguugucuaauug

SEQ ID NO: 1200851 - RNA, 19 nt, Artificial Sequence
  Description of Artificial Sequence: Synthetic oligonucleotide
  Antisense strand to SEQ ID NO: 1200850
caauuagacaacaucuguu

SEQ ID NO: 1200852 - RNA, 19 nt, Artificial Sequence
  Description of Artificial Sequence: Synthetic oligonucleotide
  Sense strand starting at position 784 of SEQ ID NO: 917002
gauguugucuaauuggaag

SEQ ID NO: 1200853 - RNA, 19 nt, Artificial Sequence
  Description of Artificial Sequence: Synthetic oligonucleotide
  Antisense strand to SEQ ID NO: 1200852
cuuccaauuagacaacauc

SEQ ID NO: 1200854 - RNA, 19 nt, Artificial Sequence
  Description of Artificial Sequence: Synthetic oligonucleotide
  Sense strand starting at position 786 of SEQ ID NO: 917002
uguugucuaauuggaagga

SEQ ID NO: 1200855 - RNA, 19 nt, Artificial Sequence
  Description of Artificial Sequence: Synthetic oligonucleotide
  Antisense strand to SEQ ID NO: 1200854
uccuuccaauuagacaaca

SEQ ID NO: 1200856 - RNA, 19 nt, Artificial Sequence
  Description of Artificial Sequence: Synthetic oligonucleotide
  Sense strand starting at position 1120 of SEQ ID NO: 917002
agaguaaguguuuaccagu

SEQ ID NO: 1200857 - RNA, 19 nt, Artificial Sequence
  Description of Artificial Sequence: Synthetic oligonucleotide
  Antisense strand to SEQ ID NO: 1200856
acugguaaacacuuacucu

SEQ ID NO: 1200858 - RNA, 19 nt, Artificial Sequence
  Description of Artificial Sequence: Synthetic oligonucleotide
  Sense strand starting at position 1126 of SEQ ID NO: 917002
aguguuuaccaguaaggua

SEQ ID NO: 1200859 - RNA, 19 nt, Artificial Sequence
  Description of Artificial Sequence: Synthetic oligonucleotide
  Antisense strand to SEQ ID NO: 1200858
uaccuuacugguaaacacu

SEQ ID NO: 1200860 - RNA, 19 nt, Artificial Sequence
  Description of Artificial Sequence: Synthetic oligonucleotide
  Sense strand starting at position 1207 of SEQ ID NO: 917002
acuuuaauuucugagaggu

SEQ ID NO: 1200861 - RNA, 19 nt, Artificial Sequence
  Description of Artificial Sequence: Synthetic oligonucleotide
  Antisense strand to SEQ ID NO: 1200860
accucucagaaauuaaagu

SEQ ID NO: 1200862 - RNA, 19 nt, Artificial Sequence
  Description of Artificial Sequence: Synthetic oligonucleotide
  Sense strand starting at position 1209 of SEQ ID NO: 917002
uuuaauuucugagagguac

SEQ ID NO: 1200863 - RNA, 19 nt, Artificial Sequence
  Description of Artificial Sequence: Synthetic oligonucleotide
  Antisense strand to SEQ ID NO: 1200862
guaccucucagaaauuaaa

SEQ ID NO: 1200864 - RNA, 19 nt, Artificial Sequence
  Description of Artificial Sequence: Synthetic oligonucleotide
  Sense strand starting at position 1442 of SEQ ID NO: 917002
acagguaaccuaugcacaa

SEQ ID NO: 1200865 - RNA, 19 nt, Artificial Sequence
  Description of Artificial Sequence: Synthetic oligonucleotide
  Antisense strand to SEQ ID NO: 1200864
uugugcauagguuaccugu

SEQ ID NO: 1200866 - RNA, 19 nt, Artificial Sequence
  Description of Artificial Sequence: Synthetic oligonucleotide
  Sense strand starting at position 1577 of SEQ ID NO: 917002
ggaccagaauuuggaggua

SEQ ID NO: 1200867 - RNA, 19 nt, Artificial Sequence
  Description of Artificial Sequence: Synthetic oligonucleotide
  Antisense strand to SEQ ID NO: 1200866
uaccuccaaauucuggucc

SEQ ID NO: 1200868 - RNA, 19 nt, Artificial Sequence
  Description of Artificial Sequence: Synthetic oligonucleotide
  Sense strand starting at position 1608 of SEQ ID NO: 917002
uggucacugcaggauuaga

SEQ ID NO: 1200869 - RNA, 19 nt, Artificial Sequence
  Description of Artificial Sequence: Synthetic oligonucleotide
  Antisense strand to SEQ ID NO: 1200868
ucuaauccugcagugacca

SEQ ID NO: 1200870 - RNA, 19 nt, Artificial Sequence
  Description of Artificial Sequence: Synthetic oligonucleotide
  Sense strand starting at position 1643 of SEQ ID NO: 917002
cauggaaacggaugucuua

SEQ ID NO: 1200871 - RNA, 19 nt, Artificial Sequence
  Description of Artificial Sequence: Synthetic oligonucleotide
  Antisense strand to SEQ ID NO: 1200870
uaagacauccguuuccaug

SEQ ID NO: 1200872 - RNA, 19 nt, Artificial Sequence
  Description of Artificial Sequence: Synthetic oligonucleotide
  Sense strand starting at position 2643 of SEQ ID NO: 917002
gccuacuacguugauagau

SEQ ID NO: 1200873 - RNA, 19 nt, Artificial Sequence
  Description of Artificial Sequence: Synthetic oligonucleotide
  Antisense strand to SEQ ID NO: 1200872
aucuaucaacguaguaggc

SEQ ID NO: 1200874 - RNA, 19 nt, Artificial Sequence
  Description of Artificial Sequence: Synthetic oligonucleotide
  Sense strand starting at position 2649 of SEQ ID NO: 917002
uacguugauagaugaguga

SEQ ID NO: 1200875 - RNA, 19 nt, Artificial Sequence
  Description of Artificial Sequence: Synthetic oligonucleotide
  Antisense strand to SEQ ID NO: 1200874
ucacucaucuaucaacgua

SEQ ID NO: 1200876 - RNA, 19 nt, Artificial Sequence
  Description of Artificial Sequence: Synthetic oligonucleotide
  Sense strand starting at position 2652 of SEQ ID NO: 917002
guugauagaugagugaaua

SEQ ID NO: 1200877 - RNA, 19 nt, Artificial Sequence
  Description of Artificial Sequence: Synthetic oligonucleotide
  Antisense strand to SEQ ID NO: 1200876
uauucacucaucuaucaac

SEQ ID NO: 1200878 - RNA, 19 nt, Artificial Sequence
  Description of Artificial Sequence: Synthetic oligonucleotide
  Sense strand starting at position 2734 of SEQ ID NO: 917002
acucacuuguaugcauaga

SEQ ID NO: 1200879 - RNA, 19 nt, Artificial Sequence
  Description of Artificial Sequence: Synthetic oligonucleotide
  Antisense strand to SEQ ID NO: 1200878
ucuaugcauacaagugagu

SEQ ID NO: 1200880 - RNA, 19 nt, Artificial Sequence
  Description of Artificial Sequence: Synthetic oligonucleotide
  Sense strand starting at position 2823 of SEQ ID NO: 917002
auuauuaugugaguugaac

SEQ ID NO: 1200881 - RNA, 19 nt, Artificial Sequence
  Description of Artificial Sequence: Synthetic oligonucleotide
  Antisense strand to SEQ ID NO: 1200880
guucaacucacauaauaau

SEQ ID NO: 1200882 - RNA, 19 nt, Artificial Sequence
  Description of Artificial Sequence: Synthetic oligonucleotide
  Sense strand starting at position 2865 of SEQ ID NO: 917002
ucaaauagaggcuguaaau

SEQ ID NO: 1200883 - RNA, 19 nt, Artificial Sequence
  Description of Artificial Sequence: Synthetic oligonucleotide
  Antisense strand to SEQ ID NO: 1200882
auuuacagccucuauuuga

SEQ ID NO: 1200884 - RNA, 19 nt, Artificial Sequence
  Description of Artificial Sequence: Synthetic oligonucleotide
  Sense strand starting at position 2871 of SEQ ID NO: 917002
agaggcuguaaaugugaau

SEQ ID NO: 1200885 - RNA, 19 nt, Artificial Sequence
  Description of Artificial Sequence: Synthetic oligonucleotide
  Antisense strand to SEQ ID NO: 1200884
auucacauuuacagccucu

SEQ ID NO: 1200886 - RNA, 19 nt, Artificial Sequence
  Description of Artificial Sequence: Synthetic oligonucleotide
  Sense strand starting at position 2996 of SEQ ID NO: 917002
ugcuaauuagggugaccaa

SEQ ID NO: 1200887 - RNA, 19 nt, Artificial Sequence
  Description of Artificial Sequence: Synthetic oligonucleotide
  Antisense strand to SEQ ID NO: 1200886
uuggucacccuaauuagca

SEQ ID NO: 1200888 - RNA, 19 nt, Artificial Sequence
  Description of Artificial Sequence: Synthetic oligonucleotide
  Sense strand starting at position 2997 of SEQ ID NO: 917002
gcuaauuagggugaccaau

SEQ ID NO: 1200889 - RNA, 19 nt, Artificial Sequence
  Description of Artificial Sequence: Synthetic oligonucleotide
  Antisense strand to SEQ ID NO: 1200888
auuggucacccuaauuagc

SEQ ID NO: 1200890 - RNA, 19 nt, Artificial Sequence
  Description of Artificial Sequence: Synthetic oligonucleotide
  Sense strand starting at position 3035 of SEQ ID NO: 917002
cuguaaggauucuccaguu

SEQ ID NO: 1200891 - RNA, 19 nt, Artificial Sequence
  Description of Artificial Sequence: Synthetic oligonucleotide
  Antisense strand to SEQ ID NO: 1200890
aacuggagaauccuuacag

SEQ ID NO: 1200892 - RNA, 19 nt, Artificial Sequence
  Description of Artificial Sequence: Synthetic oligonucleotide
  Sense strand starting at position 3041 of SEQ ID NO: 917002
ggauucuccaguuggagga

SEQ ID NO: 1200893 - RNA, 19 nt, Artificial Sequence
  Description of Artificial Sequence: Synthetic oligonucleotide
  Antisense strand to SEQ ID NO: 1200892
uccuccaacuggagaaucc

SEQ ID NO: 1200894 - RNA, 19 nt, Artificial Sequence
  Description of Artificial Sequence: Synthetic oligonucleotide
  Sense strand starting at position 3311 of SEQ ID NO: 917002
agcuuuccuugauuaacag

SEQ ID NO: 1200895 - RNA, 19 nt, Artificial Sequence
  Description of Artificial Sequence: Synthetic oligonucleotide
  Antisense strand to SEQ ID NO: 1200894
cuguuaaucaaggaaagcu

SEQ ID NO: 1200896 - RNA, 19 nt, Artificial Sequence
  Description of Artificial Sequence: Synthetic oligonucleotide
  Sense strand starting at position 3339 of SEQ ID NO: 917002
gugucuuagggagauggca

SEQ ID NO: 1200897 - RNA, 19 nt, Artificial Sequence
  Description of Artificial Sequence: Synthetic oligonucleotide
  Antisense strand to SEQ ID NO: 1200896
ugccaucucccuaagacac

SEQ ID NO: 1200898 - RNA, 19 nt, Artificial Sequence
  Description of Artificial Sequence: Synthetic oligonucleotide
  Sense strand starting at position 3608 of SEQ ID NO: 917002
ugcaaaugacugcauaauu

SEQ ID NO: 1200899 - RNA, 19 nt, Artificial Sequence
  Description of Artificial Sequence: Synthetic oligonucleotide
  Antisense strand to SEQ ID NO: 1200898
aauuaugcagucauuugca

SEQ ID NO: 1200900 - RNA, 19 nt, Artificial Sequence
  Description of Artificial Sequence: Synthetic oligonucleotide
  Sense strand starting at position 3616 of SEQ ID NO: 917002
acugcauaauuugaugaua

SEQ ID NO: 1200901 - RNA, 19 nt, Artificial Sequence
  Description of Artificial Sequence: Synthetic oligonucleotide
  Antisense strand to SEQ ID NO: 1200900
uaucaucaaauuaugcagu

SEQ ID NO: 1200902 - RNA, 19 nt, Artificial Sequence
  Description of Artificial Sequence: Synthetic oligonucleotide
  Sense strand starting at position 3648 of SEQ ID NO: 917002
guauuuagguuacaaagga

SEQ ID NO: 1200903 - RNA, 19 nt, Artificial Sequence
  Description of Artificial Sequence: Synthetic oligonucleotide
  Antisense strand to SEQ ID NO: 1200902
uccuuuguaaccuaaauac

SEQ ID NO: 1200904 - RNA, 19 nt, Artificial Sequence
  Description of Artificial Sequence: Synthetic oligonucleotide
  Sense strand starting at position 3664 of SEQ ID NO: 917002
ggaaucuucuaauugaucu

SEQ ID NO: 1200905 - RNA, 19 nt, Artificial Sequence
  Description of Artificial Sequence: Synthetic oligonucleotide
  Antisense strand to SEQ ID NO: 1200904
agaucaauuagaagauucc

SEQ ID NO: 1200906 - RNA, 19 nt, Artificial Sequence
  Description of Artificial Sequence: Synthetic oligonucleotide
  Sense strand starting at position 3739 of SEQ ID NO: 917002
gggagcuacuuucuguaua

SEQ ID NO: 1200907 - RNA, 19 nt, Artificial Sequence
  Description of Artificial Sequence: Synthetic oligonucleotide
  Antisense strand to SEQ ID NO: 1200906
uauacagaaaguagcuccc

SEQ ID NO: 1200908 - RNA, 19 nt, Artificial Sequence
  Description of Artificial Sequence: Synthetic oligonucleotide
  Sense strand starting at position 3920 of SEQ ID NO: 917002
aaaggaauaugagaugaau

SEQ ID NO: 1200909 - RNA, 19 nt, Artificial Sequence
  Description of Artificial Sequence: Synthetic oligonucleotide
  Antisense strand to SEQ ID NO: 1200908
auucaucucauauuccuuu

SEQ ID NO: 1200910 - RNA, 19 nt, Artificial Sequence
  Description of Artificial Sequence: Synthetic oligonucleotide
  Sense strand starting at position 217 of SEQ ID NO: 917003
ugaagaaccuuguuuaacu

SEQ ID NO: 1200911 - RNA, 19 nt, Artificial Sequence
  Description of Artificial Sequence: Synthetic oligonucleotide
  Antisense strand to SEQ ID NO: 1200910
aguuaaacaagguucuuca

SEQ ID NO: 1200912 - RNA, 19 nt, Artificial Sequence
  Description of Artificial Sequence: Synthetic oligonucleotide
  Sense strand starting at position 291 of SEQ ID NO: 917003
cuuauacuuguguaucaag

SEQ ID NO: 1200913 - RNA, 19 nt, Artificial Sequence
  Description of Artificial Sequence: Synthetic oligonucleotide
  Antisense strand to SEQ ID NO: 1200912
cuugauacacaaguauaag

SEQ ID NO: 1200914 - RNA, 19 nt, Artificial Sequence
  Description of Artificial Sequence: Synthetic oligonucleotide
  Sense strand starting at position 457 of SEQ ID NO: 917003
aacagauguugucuaauug

SEQ ID NO: 1200915 - RNA, 19 nt, Artificial Sequence
  Description of Artificial Sequence: Synthetic oligonucleotide
  Antisense strand to SEQ ID NO: 1200914
caauuagacaacaucuguu

SEQ ID NO: 1200916 - RNA, 19 nt, Artificial Sequence
  Description of Artificial Sequence: Synthetic oligonucleotide
  Sense strand starting at position 461 of SEQ ID NO: 917003
gauguugucuaauuggaag

SEQ ID NO: 1200917 - RNA, 19 nt, Artificial Sequence
  Description of Artificial Sequence: Synthetic oligonucleotide
  Antisense strand to SEQ ID NO: 1200916
cuuccaauuagacaacauc

SEQ ID NO: 1200918 - RNA, 19 nt, Artificial Sequence
  Description of Artificial Sequence: Synthetic oligonucleotide
  Sense strand starting at position 463 of SEQ ID NO: 917003
uguugucuaauuggaagga

SEQ ID NO: 1200919 - RNA, 19 nt, Artificial Sequence
  Description of Artificial Sequence: Synthetic oligonucleotide
  Antisense strand to SEQ ID NO: 1200918
uccuuccaauuagacaaca

SEQ ID NO: 1200920 - RNA, 19 nt, Artificial Sequence
  Description of Artificial Sequence: Synthetic oligonucleotide
  Sense strand starting at position 797 of SEQ ID NO: 917003
agaguaaguguuuaccagu

SEQ ID NO: 1200921 - RNA, 19 nt, Artificial Sequence
  Description of Artificial Sequence: Synthetic oligonucleotide
  Antisense strand to SEQ ID NO: 1200920
acugguaaacacuuacucu

SEQ ID NO: 1200922 - RNA, 19 nt, Artificial Sequence
  Description of Artificial Sequence: Synthetic oligonucleotide
  Sense strand starting at position 803 of SEQ ID NO: 917003
aguguuuaccaguaaggua

SEQ ID NO: 1200923 - RNA, 19 nt, Artificial Sequence
  Description of Artificial Sequence: Synthetic oligonucleotide
  Antisense strand to SEQ ID NO: 1200922
uaccuuacugguaaacacu

SEQ ID NO: 1200924 - RNA, 19 nt, Artificial Sequence
  Description of Artificial Sequence: Synthetic oligonucleotide
  Sense strand starting at position 1119 of SEQ ID NO: 917003
acagguaaccuaugcacaa

SEQ ID NO: 1200925 - RNA, 19 nt, Artificial Sequence
  Description of Artificial Sequence: Synthetic oligonucleotide
  Antisense strand to SEQ ID NO: 1200924
uugugcauagguuaccugu

SEQ ID NO: 1200926 - RNA, 19 nt, Artificial Sequence
  Description of Artificial Sequence: Synthetic oligonucleotide
  Sense strand starting at position 1254 of SEQ ID NO: 917003
ggaccagaauuuggaggua

SEQ ID NO: 1200927 - RNA, 19 nt, Artificial Sequence
  Description of Artificial Sequence: Synthetic oligonucleotide
  Antisense strand to SEQ ID NO: 1200926
uaccuccaaauucuggucc

SEQ ID NO: 1200928 - RNA, 19 nt, Artificial Sequence
  Description of Artificial Sequence: Synthetic oligonucleotide
  Sense strand starting at position 1285 of SEQ ID NO: 917003
uggucacugcaggauuaga

SEQ ID NO: 1200929 - RNA, 19 nt, Artificial Sequence
  Description of Artificial Sequence: Synthetic oligonucleotide
  Antisense strand to SEQ ID NO: 1200928
ucuaauccugcagugacca

SEQ ID NO: 1200930 - RNA, 19 nt, Artificial Sequence
  Description of Artificial Sequence: Synthetic oligonucleotide
  Sense strand starting at position 1320 of SEQ ID NO: 917003
cauggaaacggaugucuua

SEQ ID NO: 1200931 - RNA, 19 nt, Artificial Sequence
  Description of Artificial Sequence: Synthetic oligonucleotide
  Antisense strand to SEQ ID NO: 1200930
uaagacauccguuuccaug

SEQ ID NO: 1200932 - RNA, 19 nt, Artificial Sequence
  Description of Artificial Sequence: Synthetic oligonucleotide
  Sense strand starting at position 2320 of SEQ ID NO: 917003
gccuacuacguugauagau

SEQ ID NO: 1200933 - RNA, 19 nt, Artificial Sequence
  Description of Artificial Sequence: Synthetic oligonucleotide
  Antisense strand to SEQ ID NO: 1200932
aucuaucaacguaguaggc

SEQ ID NO: 1200934 - RNA, 19 nt, Artificial Sequence
  Description of Artificial Sequence: Synthetic oligonucleotide
  Sense strand starting at position 2326 of SEQ ID NO: 917003
uacguugauagaugaguga

SEQ ID NO: 1200935 - RNA, 19 nt, Artificial Sequence
  Description of Artificial Sequence: Synthetic oligonucleotide
  Antisense strand to SEQ ID NO: 1200934
ucacucaucuaucaacgua

SEQ ID NO: 1200936 - RNA, 19 nt, Artificial Sequence
  Description of Artificial Sequence: Synthetic oligonucleotide
  Sense strand starting at position 2329 of SEQ ID NO: 917003
guugauagaugagugaaua

SEQ ID NO: 1200937 - RNA, 19 nt, Artificial Sequence
  Description of Artificial Sequence: Synthetic oligonucleotide
  Antisense strand to SEQ ID NO: 1200936
uauucacucaucuaucaac

SEQ ID NO: 1200938 - RNA, 19 nt, Artificial Sequence
  Description of Artificial Sequence: Synthetic oligonucleotide
  Sense strand starting at position 2411 of SEQ ID NO: 917003
acucacuuguaugcauaga

SEQ ID NO: 1200939 - RNA, 19 nt, Artificial Sequence
  Description of Artificial Sequence: Synthetic oligonucleotide
  Antisense strand to SEQ ID NO: 1200938
ucuaugcauacaagugagu

SEQ ID NO: 1200940 - RNA, 19 nt, Artificial Sequence
  Description of Artificial Sequence: Synthetic oligonucleotide
  Sense strand starting at position 2500 of SEQ ID NO: 917003
auuauuaugugaguugaac

SEQ ID NO: 1200941 - RNA, 19 nt, Artificial Sequence
  Description of Artificial Sequence: Synthetic oligonucleotide
  Antisense strand to SEQ ID NO: 1200940
guucaacucacauaauaau

SEQ ID NO: 1200942 - RNA, 19 nt, Artificial Sequence
  Description of Artificial Sequence: Synthetic oligonucleotide
  Sense strand starting at position 2542 of SEQ ID NO: 917003
ucaaauagaggcuguaaau

SEQ ID NO: 1200943 - RNA, 19 nt, Artificial Sequence
  Description of Artificial Sequence: Synthetic oligonucleotide
  Antisense strand to SEQ ID NO: 1200942
auuuacagccucuauuuga

SEQ ID NO: 1200944 - RNA, 19 nt, Artificial Sequence
  Description of Artificial Sequence: Synthetic oligonucleotide
  Sense strand starting at position 2548 of SEQ ID NO: 917003
agaggcuguaaaugugaau

SEQ ID NO: 1200945 - RNA, 19 nt, Artificial Sequence
  Description of Artificial Sequence: Synthetic oligonucleotide
  Antisense strand to SEQ ID NO: 1200944
auucacauuuacagccucu

SEQ ID NO: 1200946 - RNA, 19 nt, Artificial Sequence
  Description of Artificial Sequence: Synthetic oligonucleotide
  Sense strand starting at position 2673 of SEQ ID NO: 917003
ugcuaauuagggugaccaa

SEQ ID NO: 1200947 - RNA, 19 nt, Artificial Sequence
  Description of Artificial Sequence: Synthetic oligonucleotide
  Antisense strand to SEQ ID NO: 1200946
uuggucacccuaauuagca

SEQ ID NO: 1200948 - RNA, 19 nt, Artificial Sequence
  Description of Artificial Sequence: Synthetic oligonucleotide
  Sense strand starting at position 2674 of SEQ ID NO: 917003
gcuaauuagggugaccaau

SEQ ID NO: 1200949 - RNA, 19 nt, Artificial Sequence
  Description of Artificial Sequence: Synthetic oligonucleotide
  Antisense strand to SEQ ID NO: 1200948
auuggucacccuaauuagc

SEQ ID NO: 1200950 - RNA, 19 nt, Artificial Sequence
  Description of Artificial Sequence: Synthetic oligonucleotide
  Sense strand starting at position 2718 of SEQ ID NO: 917003
ggauucuccaguuggagga

SEQ ID NO: 1200951 - RNA, 19 nt, Artificial Sequence
  Description of Artificial Sequence: Synthetic oligonucleotide
  Antisense strand to SEQ ID NO: 1200950
uccuccaacuggagaaucc

SEQ ID NO: 1200952 - RNA, 19 nt, Artificial Sequence
  Description of Artificial Sequence: Synthetic oligonucleotide
  Sense strand starting at position 2988 of SEQ ID NO: 917003
agcuuuccuugauuaacag

SEQ ID NO: 1200953 - RNA, 19 nt, Artificial Sequence
  Description of Artificial Sequence: Synthetic oligonucleotide
  Antisense strand to SEQ ID NO: 1200952
cuguuaaucaaggaaagcu

SEQ ID NO: 1200954 - RNA, 19 nt, Artificial Sequence
  Description of Artificial Sequence: Synthetic oligonucleotide
  Sense strand starting at position 3016 of SEQ ID NO: 917003
gugucuuagggagauggca

SEQ ID NO: 1200955 - RNA, 19 nt, Artificial Sequence
  Description of Artificial Sequence: Synthetic oligonucleotide
  Antisense strand to SEQ ID NO: 1200954
ugccaucucccuaagacac

SEQ ID NO: 1200956 - RNA, 19 nt, Artificial Sequence
  Description of Artificial Sequence: Synthetic oligonucleotide
  Sense strand starting at position 3285 of SEQ ID NO: 917003
ugcaaaugacugcauaauu

SEQ ID NO: 1200957 - RNA, 19 nt, Artificial Sequence
  Description of Artificial Sequence: Synthetic oligonucleotide
  Antisense strand to SEQ ID NO: 1200956
aauuaugcagucauuugca

SEQ ID NO: 1200958 - RNA, 19 nt, Artificial Sequence
  Description of Artificial Sequence: Synthetic oligonucleotide
  Sense strand starting at position 3293 of SEQ ID NO: 917003
acugcauaauuugaugaua

SEQ ID NO: 1200959 - RNA, 19 nt, Artificial Sequence
  Description of Artificial Sequence: Synthetic oligonucleotide
  Antisense strand to SEQ ID NO: 1200958
uaucaucaaauuaugcagu

SEQ ID NO: 1200960 - RNA, 19 nt, Artificial Sequence
  Description of Artificial Sequence: Synthetic oligonucleotide
  Sense strand starting at position 3325 of SEQ ID NO: 917003
guauuuagguuacaaagga

SEQ ID NO: 1200961 - RNA, 19 nt, Artificial Sequence
  Description of Artificial Sequence: Synthetic oligonucleotide
  Antisense strand to SEQ ID NO: 1200960
uccuuuguaaccuaaauac

SEQ ID NO: 1200962 - RNA, 19 nt, Artificial Sequence
  Description of Artificial Sequence: Synthetic oligonucleotide
  Sense strand starting at position 3341 of SEQ ID NO: 917003
ggaaucuucuaauugaucu

SEQ ID NO: 1200963 - RNA, 19 nt, Artificial Sequence
  Description of Artificial Sequence: Synthetic oligonucleotide
  Antisense strand to SEQ ID NO: 1200962
agaucaauuagaagauucc

SEQ ID NO: 1200964 - RNA, 19 nt, Artificial Sequence
  Description of Artificial Sequence: Synthetic oligonucleotide
  Sense strand starting at position 3597 of SEQ ID NO: 917003
aaaggaauaugagaugaau

SEQ ID NO: 1200965 - RNA, 19 nt, Artificial Sequence
  Description of Artificial Sequence: Synthetic oligonucleotide
  Antisense strand to SEQ ID NO: 1200964
auucaucucauauuccuuu

SEQ ID NO: 1200966 - RNA, 19 nt, Artificial Sequence
  Description of Artificial Sequence: Synthetic oligonucleotide
  Sense strand starting at position 3731 of SEQ ID NO: 917003
cuucuaguugacugugaaa

SEQ ID NO: 1200967 - RNA, 19 nt, Artificial Sequence
  Description of Artificial Sequence: Synthetic oligonucleotide
  Antisense strand to SEQ ID NO: 1200966
uuucacagucaacuagaag

SEQ ID NO: 1200968 - RNA, 19 nt, Artificial Sequence
  Description of Artificial Sequence: Synthetic oligonucleotide
  Sense strand starting at position 3733 of SEQ ID NO: 917003
ucuaguugacugugaaaua

SEQ ID NO: 1200969 - RNA, 19 nt, Artificial Sequence
  Description of Artificial Sequence: Synthetic oligonucleotide
  Antisense strand to SEQ ID NO: 1200968
uauuucacagucaacuaga

SEQ ID NO: 1200970 - RNA, 19 nt, Artificial Sequence
  Description of Artificial Sequence: Synthetic oligonucleotide
  Sense strand starting at position 3754 of SEQ ID NO: 917003
acacgcuuauucuuagaag

SEQ ID NO: 1200971 - RNA, 19 nt, Artificial Sequence
  Description of Artificial Sequence: Synthetic oligonucleotide
  Antisense strand to SEQ ID NO: 1200970
cuucuaagaauaagcgugu

SEQ ID NO: 1200972 - RNA, 19 nt, Artificial Sequence
  Description of Artificial Sequence: Synthetic oligonucleotide
  Sense strand starting at position 3821 of SEQ ID NO: 917003
uuuaucaaguuuccaguaa

SEQ ID NO: 1200973 - RNA, 19 nt, Artificial Sequence
  Description of Artificial Sequence: Synthetic oligonucleotide
  Antisense strand to SEQ ID NO: 1200972
uuacuggaaacuugauaaa

SEQ ID NO: 1200974 - RNA, 19 nt, Artificial Sequence
  Description of Artificial Sequence: Synthetic oligonucleotide
  Sense strand starting at position 3825 of SEQ ID NO: 917003
ucaaguuuccaguaauacu

SEQ ID NO: 1200975 - RNA, 19 nt, Artificial Sequence
  Description of Artificial Sequence: Synthetic oligonucleotide
  Antisense strand to SEQ ID NO: 1200974
aguauuacuggaaacuuga

SEQ ID NO: 1200976 - RNA, 19 nt, Artificial Sequence
  Description of Artificial Sequence: Synthetic oligonucleotide
  Sense strand starting at position 3835 of SEQ ID NO: 917003
aguaauacucaagaagugu

SEQ ID NO: 1200977 - RNA, 19 nt, Artificial Sequence
  Description of Artificial Sequence: Synthetic oligonucleotide
  Antisense strand to SEQ ID NO: 1200976
acacuucuugaguauuacu

SEQ ID NO: 1200978 - RNA, 19 nt, Artificial Sequence
  Description of Artificial Sequence: Synthetic oligonucleotide
  Sense strand starting at position 3841 of SEQ ID NO: 917003
acucaagaaguguguuaac

SEQ ID NO: 1200979 - RNA, 19 nt, Artificial Sequence
  Description of Artificial Sequence: Synthetic oligonucleotide
  Antisense strand to SEQ ID NO: 1200978
guuaacacacuucuugagu

SEQ ID NO: 1200980 - RNA, 19 nt, Artificial Sequence
  Description of Artificial Sequence: Synthetic oligonucleotide
  Sense strand starting at position 3851 of SEQ ID NO: 917003
uguguuaacuacuuugaga

SEQ ID NO: 1200981 - RNA, 19 nt, Artificial Sequence
  Description of Artificial Sequence: Synthetic oligonucleotide
  Antisense strand to SEQ ID NO: 1200980
ucucaaaguaguuaacaca

SEQ ID NO: 1200982 - RNA, 19 nt, Artificial Sequence
  Description of Artificial Sequence: Synthetic oligonucleotide
  Sense strand starting at position 3853 of SEQ ID NO: 917003
uguuaacuacuuugagaga

SEQ ID NO: 1200983 - RNA, 19 nt, Artificial Sequence
  Description of Artificial Sequence: Synthetic oligonucleotide
  Antisense strand to SEQ ID NO: 1200982
ucucucaaaguaguuaaca

SEQ ID NO: 1200984 - RNA, 19 nt, Artificial Sequence
  Description of Artificial Sequence: Synthetic oligonucleotide
  Sense strand starting at position 3899 of SEQ ID NO: 917003
gucaaacccuuugcaagau

SEQ ID NO: 1200985 - RNA, 19 nt, Artificial Sequence
  Description of Artificial Sequence: Synthetic oligonucleotide
  Antisense strand to SEQ ID NO: 1200984
aucuugcaaaggguuugac

SEQ ID NO: 1200986 - RNA, 19 nt, Artificial Sequence
  Description of Artificial Sequence: Synthetic oligonucleotide
  Sense strand starting at position 3963 of SEQ ID NO: 917003
ucaaauuuguaagaaucag

SEQ ID NO: 1200987 - RNA, 19 nt, Artificial Sequence
  Description of Artificial Sequence: Synthetic oligonucleotide
  Antisense strand to SEQ ID NO: 1200986
cugauucuuacaaauuuga

SEQ ID NO: 1200988 - RNA, 19 nt, Artificial Sequence
  Description of Artificial Sequence: Synthetic oligonucleotide
  Sense strand starting at position 3969 of SEQ ID NO: 917003
uuguaagaaucaguccuaa

SEQ ID NO: 1200989 - RNA, 19 nt, Artificial Sequence
  Description of Artificial Sequence: Synthetic oligonucleotide
  Antisense strand to SEQ ID NO: 1200988
uuaggacugauucuuacaa

SEQ ID NO: 1200990 - RNA, 19 nt, Artificial Sequence
  Description of Artificial Sequence: Synthetic oligonucleotide
  Sense strand starting at position 17 of SEQ ID NO: 917004
uuagauccauugccagaua

SEQ ID NO: 1200991 - RNA, 19 nt, Artificial Sequence
  Description of Artificial Sequence: Synthetic oligonucleotide
  Antisense strand to SEQ ID NO: 1200990
uaucuggcaauggaucuaa

SEQ ID NO: 1200992 - RNA, 19 nt, Artificial Sequence
  Description of Artificial Sequence: Synthetic oligonucleotide
  Sense strand starting at position 56 of SEQ ID NO: 917004
gaauauaucugauucguaa

SEQ ID NO: 1200993 - RNA, 19 nt, Artificial Sequence
  Description of Artificial Sequence: Synthetic oligonucleotide
  Antisense strand to SEQ ID NO: 1200992
uuacgaaucagauauauuc

SEQ ID NO: 1200994 - RNA, 19 nt, Artificial Sequence
  Description of Artificial Sequence: Synthetic oligonucleotide
  Sense strand starting at position 85 of SEQ ID NO: 917004
auagaaacagucugcuaau

SEQ ID NO: 1200995 - RNA, 19 nt, Artificial Sequence
  Description of Artificial Sequence: Synthetic oligonucleotide
  Antisense strand to SEQ ID NO: 1200994
auuagcagacuguuucuau

SEQ ID NO: 1200996 - RNA, 19 nt, Artificial Sequence
  Description of Artificial Sequence: Synthetic oligonucleotide
  Sense strand starting at position 86 of SEQ ID NO: 917004
uagaaacagucugcuaaug

SEQ ID NO: 1200997 - RNA, 19 nt, Artificial Sequence
  Description of Artificial Sequence: Synthetic oligonucleotide
  Antisense strand to SEQ ID NO: 1200996
cauuagcagacuguuucua

SEQ ID NO: 1200998 - RNA, 19 nt, Artificial Sequence
  Description of Artificial Sequence: Synthetic oligonucleotide
  Sense strand starting at position 208 of SEQ ID NO: 917004
ucugaagaguggguacaau

SEQ ID NO: 1200999 - RNA, 19 nt, Artificial Sequence
  Description of Artificial Sequence: Synthetic oligonucleotide
  Antisense strand to SEQ ID NO: 1200998
auuguacccacucuucaga

SEQ ID NO: 1201000 - RNA, 19 nt, Artificial Sequence
  Description of Artificial Sequence: Synthetic oligonucleotide
  Sense strand starting at position 232 of SEQ ID NO: 917004
uccucugaugcucaugaaa

SEQ ID NO: 1201001 - RNA, 19 nt, Artificial Sequence
  Description of Artificial Sequence: Synthetic oligonucleotide
  Antisense strand to SEQ ID NO: 1201000
uuucaugagcaucagagga

SEQ ID NO: 1201002 - RNA, 19 nt, Artificial Sequence
  Description of Artificial Sequence: Synthetic oligonucleotide
  Sense strand starting at position 279 of SEQ ID NO: 917004
gcgaaauauccugaaacac

SEQ ID NO: 1201003 - RNA, 19 nt, Artificial Sequence
  Description of Artificial Sequence: Synthetic oligonucleotide
  Antisense strand to SEQ ID NO: 1201002
guguuucaggauauuucgc

SEQ ID NO: 1201004 - RNA, 19 nt, Artificial Sequence
  Description of Artificial Sequence: Synthetic oligonucleotide
  Sense strand starting at position 417 of SEQ ID NO: 917004
auuagauaacaguagcuau

SEQ ID NO: 1201005 - RNA, 19 nt, Artificial Sequence
  Description of Artificial Sequence: Synthetic oligonucleotide
  Antisense strand to SEQ ID NO: 1201004
auagcuacuguuaucuaau

SEQ ID NO: 1201006 - RNA, 19 nt, Artificial Sequence
  Description of Artificial Sequence: Synthetic oligonucleotide
  Sense strand starting at position 436 of SEQ ID NO: 917004
uuaaauacuucugcagaag

SEQ ID NO: 1201007 - RNA, 19 nt, Artificial Sequence
  Description of Artificial Sequence: Synthetic oligonucleotide
  Antisense strand to SEQ ID NO: 1201006
cuucugcagaaguauuuaa

SEQ ID NO: 1201008 - RNA, 19 nt, Artificial Sequence
  Description of Artificial Sequence: Synthetic oligonucleotide
  Sense strand starting at position 801 of SEQ ID NO: 917004
acuacagguuauucuauau

SEQ ID NO: 1201009 - RNA, 19 nt, Artificial Sequence
  Description of Artificial Sequence: Synthetic oligonucleotide
  Antisense strand to SEQ ID NO: 1201008
auauagaauaaccuguagu

SEQ ID NO: 1201010 - RNA, 19 nt, Artificial Sequence
  Description of Artificial Sequence: Synthetic oligonucleotide
  Sense strand starting at position 950 of SEQ ID NO: 917004
ggagcuaauaagugguaga

SEQ ID NO: 1201011 - RNA, 19 nt, Artificial Sequence
  Description of Artificial Sequence: Synthetic oligonucleotide
  Antisense strand to SEQ ID NO: 1201010
ucuaccacuuauuagcucc

SEQ ID NO: 1201012 - RNA, 19 nt, Artificial Sequence
  Description of Artificial Sequence: Synthetic oligonucleotide
  Sense strand starting at position 1042 of SEQ ID NO: 917004
gguguauauaacgauaauu

SEQ ID NO: 1201013 - RNA, 19 nt, Artificial Sequence
  Description of Artificial Sequence: Synthetic oligonucleotide
  Antisense strand to SEQ ID NO: 1201012
aauuaucguuauauacacc

SEQ ID NO: 1201014 - RNA, 19 nt, Artificial Sequence
  Description of Artificial Sequence: Synthetic oligonucleotide
  Sense strand starting at position 1104 of SEQ ID NO: 917004
augaauuaugcaggcaaag

SEQ ID NO: 1201015 - RNA, 19 nt, Artificial Sequence
  Description of Artificial Sequence: Synthetic oligonucleotide
  Antisense strand to SEQ ID NO: 1201014
cuuugccugcauaauucau

SEQ ID NO: 1201016 - RNA, 19 nt, Artificial Sequence
  Description of Artificial Sequence: Synthetic oligonucleotide
  Sense strand starting at position 1195 of SEQ ID NO: 917004
cuguuugacccauacagua

SEQ ID NO: 1201017 - RNA, 19 nt, Artificial Sequence
  Description of Artificial Sequence: Synthetic oligonucleotide
  Antisense strand to SEQ ID NO: 1201016
uacuguaugggucaaacag

SEQ ID NO: 1201018 - RNA, 19 nt, Artificial Sequence
  Description of Artificial Sequence: Synthetic oligonucleotide
  Sense strand starting at position 1257 of SEQ ID NO: 917004
cagacaaucuggguaaauu

SEQ ID NO: 1201019 - RNA, 19 nt, Artificial Sequence
  Description of Artificial Sequence: Synthetic oligonucleotide
  Antisense strand to SEQ ID NO: 1201018
aauuuacccagauugucug

SEQ ID NO: 1201020 - RNA, 19 nt, Artificial Sequence
  Description of Artificial Sequence: Synthetic oligonucleotide
  Sense strand starting at position 1344 of SEQ ID NO: 917004
gucagaaauuuggauaaag

SEQ ID NO: 1201021 - RNA, 19 nt, Artificial Sequence
  Description of Artificial Sequence: Synthetic oligonucleotide
  Antisense strand to SEQ ID NO: 1201020
cuuuauccaaauuucugac

SEQ ID NO: 1201022 - RNA, 19 nt, Artificial Sequence
  Description of Artificial Sequence: Synthetic oligonucleotide
  Sense strand starting at position 1549 of SEQ ID NO: 917004
guaaauauugagggucuga

SEQ ID NO: 1201023 - RNA, 19 nt, Artificial Sequence
  Description of Artificial Sequence: Synthetic oligonucleotide
  Antisense strand to SEQ ID NO: 1201022
ucagacccucaauauuuac

SEQ ID NO: 1201024 - RNA, 19 nt, Artificial Sequence
  Description of Artificial Sequence: Synthetic oligonucleotide
  Sense strand starting at position 1600 of SEQ ID NO: 917004
ucagaaucuugguuagauc

SEQ ID NO: 1201025 - RNA, 19 nt, Artificial Sequence
  Description of Artificial Sequence: Synthetic oligonucleotide
  Antisense strand to SEQ ID NO: 1201024
gaucuaaccaagauucuga

SEQ ID NO: 1201026 - RNA, 19 nt, Artificial Sequence
  Description of Artificial Sequence: Synthetic oligonucleotide
  Sense strand starting at position 1631 of SEQ ID NO: 917004
aaagaaucggauugguuua

SEQ ID NO: 1201027 - RNA, 19 nt, Artificial Sequence
  Description of Artificial Sequence: Synthetic oligonucleotide
  Antisense strand to SEQ ID NO: 1201026
uaaaccaauccgauucuuu

SEQ ID NO: 1201028 - RNA, 19 nt, Artificial Sequence
  Description of Artificial Sequence: Synthetic oligonucleotide
  Sense strand starting at position 1636 of SEQ ID NO: 917004
aucggauugguuuaugauu

SEQ ID NO: 1201029 - RNA, 19 nt, Artificial Sequence
  Description of Artificial Sequence: Synthetic oligonucleotide
  Antisense strand to SEQ ID NO: 1201028
aaucauaaaccaauccgau

SEQ ID NO: 1201030 - RNA, 19 nt, Artificial Sequence
  Description of Artificial Sequence: Synthetic oligonucleotide
  Sense strand starting at position 1641 of SEQ ID NO: 917004
auugguuuaugauuggaaa

SEQ ID NO: 1201031 - RNA, 19 nt, Artificial Sequence
  Description of Artificial Sequence: Synthetic oligonucleotide
  Antisense strand to SEQ ID NO: 1201030
uuuccaaucauaaaccaau

SEQ ID NO: 1201032 - RNA, 19 nt, Artificial Sequence
  Description of Artificial Sequence: Synthetic oligonucleotide
  Sense strand starting at position 2111 of SEQ ID NO: 917004
gcacgaugaggguaucuga

SEQ ID NO: 1201033 - RNA, 19 nt, Artificial Sequence
  Description of Artificial Sequence: Synthetic oligonucleotide
  Antisense strand to SEQ ID NO: 1201032
ucagauacccucaucgugc

SEQ ID NO: 1201034 - RNA, 19 nt, Artificial Sequence
  Description of Artificial Sequence: Synthetic oligonucleotide
  Sense strand starting at position 2272 of SEQ ID NO: 917004
ucuagaagccaguaaguau

SEQ ID NO: 1201035 - RNA, 19 nt, Artificial Sequence
  Description of Artificial Sequence: Synthetic oligonucleotide
  Antisense strand to SEQ ID NO: 1201034
auacuuacuggcuucuaga

SEQ ID NO: 1201036 - RNA, 19 nt, Artificial Sequence
  Description of Artificial Sequence: Synthetic oligonucleotide
  Sense strand starting at position 2403 of SEQ ID NO: 917004
acugcuugacuggaucauu

SEQ ID NO: 1201037 - RNA, 19 nt, Artificial Sequence
  Description of Artificial Sequence: Synthetic oligonucleotide
  Antisense strand to SEQ ID NO: 1201036
aaugauccagucaagcagu

SEQ ID NO: 1201038 - RNA, 19 nt, Artificial Sequence
  Description of Artificial Sequence: Synthetic oligonucleotide
  Sense strand starting at position 2406 of SEQ ID NO: 917004
gcuugacuggaucauuaua

SEQ ID NO: 1201039 - RNA, 19 nt, Artificial Sequence
  Description of Artificial Sequence: Synthetic oligonucleotide
  Antisense strand to SEQ ID NO: 1201038
uauaaugauccagucaagc

SEQ ID NO: 1201040 - RNA, 19 nt, Artificial Sequence
  Description of Artificial Sequence: Synthetic oligonucleotide
  Sense strand starting at position 2878 of SEQ ID NO: 917004
guggacucauaauugaaua

SEQ ID NO: 1201041 - RNA, 19 nt, Artificial Sequence
  Description of Artificial Sequence: Synthetic oligonucleotide
  Antisense strand to SEQ ID NO: 1201040
uauucaauuaugaguccac

SEQ ID NO: 1201042 - RNA, 19 nt, Artificial Sequence
  Description of Artificial Sequence: Synthetic oligonucleotide
  Sense strand starting at position 2926 of SEQ ID NO: 917004
guaaucucaguugauuaac

SEQ ID NO: 1201043 - RNA, 19 nt, Artificial Sequence
  Description of Artificial Sequence: Synthetic oligonucleotide
  Antisense strand to SEQ ID NO: 1201042
guuaaucaacugagauuac

SEQ ID NO: 1201044 - RNA, 19 nt, Artificial Sequence
  Description of Artificial Sequence: Synthetic oligonucleotide
  Sense strand starting at position 2932 of SEQ ID NO: 917004
ucaguugauuaacugaaga

SEQ ID NO: 1201045 - RNA, 19 nt, Artificial Sequence
  Description of Artificial Sequence: Synthetic oligonucleotide
  Antisense strand to SEQ ID NO: 1201044
ucuucaguuaaucaacuga

SEQ ID NO: 1201046 - RNA, 19 nt, Artificial Sequence
  Description of Artificial Sequence: Synthetic oligonucleotide
  Sense strand starting at position 3034 of SEQ ID NO: 917004
cucugcacuguggaugaau

SEQ ID NO: 1201047 - RNA, 19 nt, Artificial Sequence
  Description of Artificial Sequence: Synthetic oligonucleotide
  Antisense strand to SEQ ID NO: 1201046
auucauccacagugcagag

SEQ ID NO: 1201048 - RNA, 19 nt, Artificial Sequence
  Description of Artificial Sequence: Synthetic oligonucleotide
  Sense strand starting at position 3043 of SEQ ID NO: 917004
guggaugaauuugauccaa

SEQ ID NO: 1201049 - RNA, 19 nt, Artificial Sequence
  Description of Artificial Sequence: Synthetic oligonucleotide
  Antisense strand to SEQ ID NO: 1201048
uuggaucaaauucauccac

SEQ ID NO: 1201050 - RNA, 19 nt, Artificial Sequence
  Description of Artificial Sequence: Synthetic oligonucleotide
  Sense strand starting at position 3076 of SEQ ID NO: 917004
gaguuucuugaggaguaau

SEQ ID NO: 1201051 - RNA, 19 nt, Artificial Sequence
  Description of Artificial Sequence: Synthetic oligonucleotide
  Antisense strand to SEQ ID NO: 1201050
auuacuccucaagaaacuc

SEQ ID NO: 1201052 - RNA, 19 nt, Artificial Sequence
  Description of Artificial Sequence: Synthetic oligonucleotide
  Sense strand starting at position 3079 of SEQ ID NO: 917004
uuucuugaggaguaauugu

SEQ ID NO: 1201053 - RNA, 19 nt, Artificial Sequence
  Description of Artificial Sequence: Synthetic oligonucleotide
  Antisense strand to SEQ ID NO: 1201052
acaauuacuccucaagaaa

SEQ ID NO: 1201054 - RNA, 19 nt, Artificial Sequence
  Description of Artificial Sequence: Synthetic oligonucleotide
  Sense strand starting at position 3087 of SEQ ID NO: 917004
ggaguaauugucgggaaag

SEQ ID NO: 1201055 - RNA, 19 nt, Artificial Sequence
  Description of Artificial Sequence: Synthetic oligonucleotide
  Antisense strand to SEQ ID NO: 1201054
cuuucccgacaauuacucc

SEQ ID NO: 1201056 - RNA, 19 nt, Artificial Sequence
  Description of Artificial Sequence: Synthetic oligonucleotide
  Sense strand starting at position 3089 of SEQ ID NO: 917004
aguaauugucgggaaagua

SEQ ID NO: 1201057 - RNA, 19 nt, Artificial Sequence
  Description of Artificial Sequence: Synthetic oligonucleotide
  Antisense strand to SEQ ID NO: 1201056
uacuuucccgacaauuacu

SEQ ID NO: 1201058 - RNA, 19 nt, Artificial Sequence
  Description of Artificial Sequence: Synthetic oligonucleotide
  Sense strand starting at position 3105 of SEQ ID NO: 917004
guagauaaaguauaagcuu

SEQ ID NO: 1201059 - RNA, 19 nt, Artificial Sequence
  Description of Artificial Sequence: Synthetic oligonucleotide
  Antisense strand to SEQ ID NO: 1201058
aagcuuauacuuuaucuac

SEQ ID NO: 1201060 - RNA, 19 nt, Artificial Sequence
  Description of Artificial Sequence: Synthetic oligonucleotide
  Sense strand starting at position 3172 of SEQ ID NO: 917004
gaauuuacuggcuguguga

SEQ ID NO: 1201061 - RNA, 19 nt, Artificial Sequence
  Description of Artificial Sequence: Synthetic oligonucleotide
  Antisense strand to SEQ ID NO: 1201060
ucacacagccaguaaauuc

SEQ ID NO: 1201062 - RNA, 19 nt, Artificial Sequence
  Description of Artificial Sequence: Synthetic oligonucleotide
  Sense strand starting at position 3237 of SEQ ID NO: 917004
ccuaaauguguaugaugaa

SEQ ID NO: 1201063 - RNA, 19 nt, Artificial Sequence
  Description of Artificial Sequence: Synthetic oligonucleotide
  Antisense strand to SEQ ID NO: 1201062
uucaucauacacauuuagg

SEQ ID NO: 1201064 - RNA, 19 nt, Artificial Sequence
  Description of Artificial Sequence: Synthetic oligonucleotide
  Sense strand starting at position 3277 of SEQ ID NO: 917004
ggacuagugguauggaaug

SEQ ID NO: 1201065 - RNA, 19 nt, Artificial Sequence
  Description of Artificial Sequence: Synthetic oligonucleotide
  Antisense strand to SEQ ID NO: 1201064
cauuccauaccacuagucc

SEQ ID NO: 1201066 - RNA, 19 nt, Artificial Sequence
  Description of Artificial Sequence: Synthetic oligonucleotide
  Sense strand starting at position 3489 of SEQ ID NO: 917004
gggauuaguagugaccauu

SEQ ID NO: 1201067 - RNA, 19 nt, Artificial Sequence
  Description of Artificial Sequence: Synthetic oligonucleotide
  Antisense strand to SEQ ID NO: 1201066
aauggucacuacuaauccc

SEQ ID NO: 1201068 - RNA, 19 nt, Artificial Sequence
  Description of Artificial Sequence: Synthetic oligonucleotide
  Sense strand starting at position 3567 of SEQ ID NO: 917004
gguguuggaaaugagguua

SEQ ID NO: 1201069 - RNA, 19 nt, Artificial Sequence
  Description of Artificial Sequence: Synthetic oligonucleotide
  Antisense strand to SEQ ID NO: 1201068
uaaccucauuuccaacacc

SEQ ID NO: 1201070 - RNA, 19 nt, Artificial Sequence
  Description of Artificial Sequence: Synthetic oligonucleotide
  Sense strand starting at position 203 of SEQ ID NO: 917005
cuaauaaccugagugaucu

SEQ ID NO: 1201071 - RNA, 19 nt, Artificial Sequence
  Description of Artificial Sequence: Synthetic oligonucleotide
  Antisense strand to SEQ ID NO: 1201070
agaucacucagguuauuag

SEQ ID NO: 1201072 - RNA, 19 nt, Artificial Sequence
  Description of Artificial Sequence: Synthetic oligonucleotide
  Sense strand starting at position 204 of SEQ ID NO: 917005
uaauaaccugagugaucug

SEQ ID NO: 1201073 - RNA, 19 nt, Artificial Sequence
  Description of Artificial Sequence: Synthetic oligonucleotide
  Antisense strand to SEQ ID NO: 1201072
cagaucacucagguuauua

SEQ ID NO: 1201074 - RNA, 19 nt, Artificial Sequence
  Description of Artificial Sequence: Synthetic oligonucleotide
  Sense strand starting at position 207 of SEQ ID NO: 917005
uaaccugagugaucugaua

SEQ ID NO: 1201075 - RNA, 19 nt, Artificial Sequence
  Description of Artificial Sequence: Synthetic oligonucleotide
  Antisense strand to SEQ ID NO: 1201074
uaucagaucacucagguua

SEQ ID NO: 1201076 - RNA, 19 nt, Artificial Sequence
  Description of Artificial Sequence: Synthetic oligonucleotide
  Sense strand starting at position 267 of SEQ ID NO: 917005
uuuguaacuauugggaguu

SEQ ID NO: 1201077 - RNA, 19 nt, Artificial Sequence
  Description of Artificial Sequence: Synthetic oligonucleotide
  Antisense strand to SEQ ID NO: 1201076
aacucccaauaguuacaaa

SEQ ID NO: 1201078 - RNA, 19 nt, Artificial Sequence
  Description of Artificial Sequence: Synthetic oligonucleotide
  Sense strand starting at position 324 of SEQ ID NO: 917005
caagaccuaucaguuggaa

SEQ ID NO: 1201079 - RNA, 19 nt, Artificial Sequence
  Description of Artificial Sequence: Synthetic oligonucleotide
  Antisense strand to SEQ ID NO: 1201078
uuccaacugauaggucuug

SEQ ID NO: 1201080 - RNA, 19 nt, Artificial Sequence
  Description of Artificial Sequence: Synthetic oligonucleotide
  Sense strand starting at position 376 of SEQ ID NO: 917005
cagguaacauuugagaaac

SEQ ID NO: 1201081 - RNA, 19 nt, Artificial Sequence
  Description of Artificial Sequence: Synthetic oligonucleotide
  Antisense strand to SEQ ID NO: 1201080
guuucucaaauguuaccug

SEQ ID NO: 1201082 - RNA, 19 nt, Artificial Sequence
  Description of Artificial Sequence: Synthetic oligonucleotide
  Sense strand starting at position 509 of SEQ ID NO: 917005
uaaagugcucagcagagaa

SEQ ID NO: 1201083 - RNA, 19 nt, Artificial Sequence
  Description of Artificial Sequence: Synthetic oligonucleotide
  Antisense strand to SEQ ID NO: 1201082
uucucugcugagcacuuua

SEQ ID NO: 1201084 - RNA, 19 nt, Artificial Sequence
  Description of Artificial Sequence: Synthetic oligonucleotide
  Sense strand starting at position 723 of SEQ ID NO: 917005
aucugagacuauccaguuu

SEQ ID NO: 1201085 - RNA, 19 nt, Artificial Sequence
  Description of Artificial Sequence: Synthetic oligonucleotide
  Antisense strand to SEQ ID NO: 1201084
aaacuggauagucucagau

SEQ ID NO: 1201086 - RNA, 19 nt, Artificial Sequence
  Description of Artificial Sequence: Synthetic oligonucleotide
  Sense strand starting at position 768 of SEQ ID NO: 917005
auggcauagcucuauaaac

SEQ ID NO: 1201087 - RNA, 19 nt, Artificial Sequence
  Description of Artificial Sequence: Synthetic oligonucleotide
  Antisense strand to SEQ ID NO: 1201086
guuuauagagcuaugccau

SEQ ID NO: 1201088 - RNA, 19 nt, Artificial Sequence
  Description of Artificial Sequence: Synthetic oligonucleotide
  Sense strand starting at position 770 of SEQ ID NO: 917005
ggcauagcucuauaaacuu

SEQ ID NO: 1201089 - RNA, 19 nt, Artificial Sequence
  Description of Artificial Sequence: Synthetic oligonucleotide
  Antisense strand to SEQ ID NO: 1201088
aaguuuauagagcuaugcc

SEQ ID NO: 1201090 - RNA, 19 nt, Artificial Sequence
  Description of Artificial Sequence: Synthetic oligonucleotide
  Sense strand starting at position 791 of SEQ ID NO: 917005
cugugacaauuguuuagaa

SEQ ID NO: 1201091 - RNA, 19 nt, Artificial Sequence
  Description of Artificial Sequence: Synthetic oligonucleotide
  Antisense strand to SEQ ID NO: 1201090
uucuaaacaauugucacag

SEQ ID NO: 1201092 - RNA, 19 nt, Artificial Sequence
  Description of Artificial Sequence: Synthetic oligonucleotide
  Sense strand starting at position 792 of SEQ ID NO: 917005
ugugacaauuguuuagaau

SEQ ID NO: 1201093 - RNA, 19 nt, Artificial Sequence
  Description of Artificial Sequence: Synthetic oligonucleotide
  Antisense strand to SEQ ID NO: 1201092
auucuaaacaauugucaca

SEQ ID NO: 1201094 - RNA, 19 nt, Artificial Sequence
  Description of Artificial Sequence: Synthetic oligonucleotide
  Sense strand starting at position 793 of SEQ ID NO: 917005
gugacaauuguuuagaauc

SEQ ID NO: 1201095 - RNA, 19 nt, Artificial Sequence
  Description of Artificial Sequence: Synthetic oligonucleotide
  Antisense strand to SEQ ID NO: 1201094
gauucuaaacaauugucac

SEQ ID NO: 1201096 - RNA, 19 nt, Artificial Sequence
  Description of Artificial Sequence: Synthetic oligonucleotide
  Sense strand starting at position 1081 of SEQ ID NO: 917005
acggcaauccugcucguuu

SEQ ID NO: 1201097 - RNA, 19 nt, Artificial Sequence
  Description of Artificial Sequence: Synthetic oligonucleotide
  Antisense strand to SEQ ID NO: 1201096
aaacgagcaggauugccgu

SEQ ID NO: 1201098 - RNA, 19 nt, Artificial Sequence
  Description of Artificial Sequence: Synthetic oligonucleotide
  Sense strand starting at position 1180 of SEQ ID NO: 917005
uaaggaaacuuuguaguuu

SEQ ID NO: 1201099 - RNA, 19 nt, Artificial Sequence
  Description of Artificial Sequence: Synthetic oligonucleotide
  Antisense strand to SEQ ID NO: 1201098
aaacuacaaaguuuccuua

SEQ ID NO: 1201100 - RNA, 19 nt, Artificial Sequence
  Description of Artificial Sequence: Synthetic oligonucleotide
  Sense strand starting at position 2078 of SEQ ID NO: 917005
gccaucucaucuuuggaga

SEQ ID NO: 1201101 - RNA, 19 nt, Artificial Sequence
  Description of Artificial Sequence: Synthetic oligonucleotide
  Antisense strand to SEQ ID NO: 1201100
ucuccaaagaugagauggc

SEQ ID NO: 1201102 - RNA, 19 nt, Artificial Sequence
  Description of Artificial Sequence: Synthetic oligonucleotide
  Sense strand starting at position 2079 of SEQ ID NO: 917005
ccaucucaucuuuggagaa

SEQ ID NO: 1201103 - RNA, 19 nt, Artificial Sequence
  Description of Artificial Sequence: Synthetic oligonucleotide
  Antisense strand to SEQ ID NO: 1201102
uucuccaaagaugagaugg

SEQ ID NO: 1201104 - RNA, 19 nt, Artificial Sequence
  Description of Artificial Sequence: Synthetic oligonucleotide
  Sense strand starting at position 2103 of SEQ ID NO: 917005
acuugaagaugagaaauca

SEQ ID NO: 1201105 - RNA, 19 nt, Artificial Sequence
  Description of Artificial Sequence: Synthetic oligonucleotide
  Antisense strand to SEQ ID NO: 1201104
ugauuucucaucuucaagu

SEQ ID NO: 1201106 - RNA, 19 nt, Artificial Sequence
  Description of Artificial Sequence: Synthetic oligonucleotide
  Sense strand starting at position 2144 of SEQ ID NO: 917005
gguguuaucagugacaucu

SEQ ID NO: 1201107 - RNA, 19 nt, Artificial Sequence
  Description of Artificial Sequence: Synthetic oligonucleotide
  Antisense strand to SEQ ID NO: 1201106
agaugucacugauaacacc

SEQ ID NO: 1201108 - RNA, 19 nt, Artificial Sequence
  Description of Artificial Sequence: Synthetic oligonucleotide
  Sense strand starting at position 2317 of SEQ ID NO: 917005
ugguuaaggagugauguga

SEQ ID NO: 1201109 - RNA, 19 nt, Artificial Sequence
  Description of Artificial Sequence: Synthetic oligonucleotide
  Antisense strand to SEQ ID NO: 1201108
ucacaucacuccuuaacca

SEQ ID NO: 1201110 - RNA, 19 nt, Artificial Sequence
  Description of Artificial Sequence: Synthetic oligonucleotide
  Sense strand starting at position 2321 of SEQ ID NO: 917005
uaaggagugaugugauuga

SEQ ID NO: 1201111 - RNA, 19 nt, Artificial Sequence
  Description of Artificial Sequence: Synthetic oligonucleotide
  Antisense strand to SEQ ID NO: 1201110
ucaaucacaucacuccuua

SEQ ID NO: 1201112 - RNA, 19 nt, Artificial Sequence
  Description of Artificial Sequence: Synthetic oligonucleotide
  Sense strand starting at position 2325 of SEQ ID NO: 917005
gagugaugugauugagaaa

SEQ ID NO: 1201113 - RNA, 19 nt, Artificial Sequence
  Description of Artificial Sequence: Synthetic oligonucleotide
  Antisense strand to SEQ ID NO: 1201112
uuucucaaucacaucacuc

SEQ ID NO: 1201114 - RNA, 19 nt, Artificial Sequence
  Description of Artificial Sequence: Synthetic oligonucleotide
  Sense strand starting at position 2344 of SEQ ID NO: 917005
uaagucuugucacucagga

SEQ ID NO: 1201115 - RNA, 19 nt, Artificial Sequence
  Description of Artificial Sequence: Synthetic oligonucleotide
  Antisense strand to SEQ ID NO: 1201114
uccugagugacaagacuua

SEQ ID NO: 1201116 - RNA, 19 nt, Artificial Sequence
  Description of Artificial Sequence: Synthetic oligonucleotide
  Sense strand starting at position 2721 of SEQ ID NO: 917005
ggccuagaauacuuacaau

SEQ ID NO: 1201117 - RNA, 19 nt, Artificial Sequence
  Description of Artificial Sequence: Synthetic oligonucleotide
  Antisense strand to SEQ ID NO: 1201116
auuguaaguauucuaggcc

SEQ ID NO: 1201118 - RNA, 19 nt, Artificial Sequence
  Description of Artificial Sequence: Synthetic oligonucleotide
  Sense strand starting at position 2821 of SEQ ID NO: 917005
cugauaacuucggccagga

SEQ ID NO: 1201119 - RNA, 19 nt, Artificial Sequence
  Description of Artificial Sequence: Synthetic oligonucleotide
  Antisense strand to SEQ ID NO: 1201118
uccuggccgaaguuaucag

SEQ ID NO: 1201120 - RNA, 19 nt, Artificial Sequence
  Description of Artificial Sequence: Synthetic oligonucleotide
  Sense strand starting at position 2823 of SEQ ID NO: 917005
gauaacuucggccaggagu

SEQ ID NO: 1201121 - RNA, 19 nt, Artificial Sequence
  Description of Artificial Sequence: Synthetic oligonucleotide
  Antisense strand to SEQ ID NO: 1201120
acuccuggccgaaguuauc

SEQ ID NO: 1201122 - RNA, 19 nt, Artificial Sequence
  Description of Artificial Sequence: Synthetic oligonucleotide
  Sense strand starting at position 3097 of SEQ ID NO: 917005
acuuaaguaggugaucuuu

SEQ ID NO: 1201123 - RNA, 19 nt, Artificial Sequence
  Description of Artificial Sequence: Synthetic oligonucleotide
  Antisense strand to SEQ ID NO: 1201122
aaagaucaccuacuuaagu

SEQ ID NO: 1201124 - RNA, 19 nt, Artificial Sequence
  Description of Artificial Sequence: Synthetic oligonucleotide
  Sense strand starting at position 3397 of SEQ ID NO: 917005
aguagaaguuaguuuacag

SEQ ID NO: 1201125 - RNA, 19 nt, Artificial Sequence
  Description of Artificial Sequence: Synthetic oligonucleotide
  Antisense strand to SEQ ID NO: 1201124
cuguaaacuaacuucuacu

SEQ ID NO: 1201126 - RNA, 19 nt, Artificial Sequence
  Description of Artificial Sequence: Synthetic oligonucleotide
  Sense strand starting at position 3404 of SEQ ID NO: 917005
guuaguuuacagugauaua

SEQ ID NO: 1201127 - RNA, 19 nt, Artificial Sequence
  Description of Artificial Sequence: Synthetic oligonucleotide
  Antisense strand to SEQ ID NO: 1201126
uauaucacuguaaacuaac

SEQ ID NO: 1201128 - RNA, 19 nt, Artificial Sequence
  Description of Artificial Sequence: Synthetic oligonucleotide
  Sense strand starting at position 3479 of SEQ ID NO: 917005
ucuaauuaugcugagugau

SEQ ID NO: 1201129 - RNA, 19 nt, Artificial Sequence
  Description of Artificial Sequence: Synthetic oligonucleotide
  Antisense strand to SEQ ID NO: 1201128
aucacucagcauaauuaga

SEQ ID NO: 1201130 - RNA, 19 nt, Artificial Sequence
  Description of Artificial Sequence: Synthetic oligonucleotide
  Sense strand starting at position 3481 of SEQ ID NO: 917005
uaauuaugcugagugauug

SEQ ID NO: 1201131 - RNA, 19 nt, Artificial Sequence
  Description of Artificial Sequence: Synthetic oligonucleotide
  Antisense strand to SEQ ID NO: 1201130
caaucacucagcauaauua

SEQ ID NO: 1201132 - RNA, 19 nt, Artificial Sequence
  Description of Artificial Sequence: Synthetic oligonucleotide
  Sense strand starting at position 3491 of SEQ ID NO: 917005
gagugauuguggaagggag

SEQ ID NO: 1201133 - RNA, 19 nt, Artificial Sequence
  Description of Artificial Sequence: Synthetic oligonucleotide
  Antisense strand to SEQ ID NO: 1201132
cucccuuccacaaucacuc

SEQ ID NO: 1201134 - RNA, 19 nt, Artificial Sequence
  Description of Artificial Sequence: Synthetic oligonucleotide
  Sense strand starting at position 3544 of SEQ ID NO: 917005
ucacacauagcuugaugau

SEQ ID NO: 1201135 - RNA, 19 nt, Artificial Sequence
  Description of Artificial Sequence: Synthetic oligonucleotide
  Antisense strand to SEQ ID NO: 1201134
aucaucaagcuauguguga

SEQ ID NO: 1201136 - RNA, 19 nt, Artificial Sequence
  Description of Artificial Sequence: Synthetic oligonucleotide
  Sense strand starting at position 3551 of SEQ ID NO: 917005
uagcuugaugaugggauau

SEQ ID NO: 1201137 - RNA, 19 nt, Artificial Sequence
  Description of Artificial Sequence: Synthetic oligonucleotide
  Antisense strand to SEQ ID NO: 1201136
auaucccaucaucaagcua

SEQ ID NO: 1201138 - RNA, 19 nt, Artificial Sequence
  Description of Artificial Sequence: Synthetic oligonucleotide
  Sense strand starting at position 3634 of SEQ ID NO: 917005
ugguaccauacuggugauu

SEQ ID NO: 1201139 - RNA, 19 nt, Artificial Sequence
  Description of Artificial Sequence: Synthetic oligonucleotide
  Antisense strand to SEQ ID NO: 1201138
aaucaccaguaugguacca

SEQ ID NO: 1201140 - RNA, 19 nt, Artificial Sequence
  Description of Artificial Sequence: Synthetic oligonucleotide
  Sense strand starting at position 3674 of SEQ ID NO: 917005
cgaaaugagcacugacagu

SEQ ID NO: 1201141 - RNA, 19 nt, Artificial Sequence
  Description of Artificial Sequence: Synthetic oligonucleotide
  Antisense strand to SEQ ID NO: 1201140
acugucagugcucauuucg

SEQ ID NO: 1201142 - RNA, 19 nt, Artificial Sequence
  Description of Artificial Sequence: Synthetic oligonucleotide
  Sense strand starting at position 3816 of SEQ ID NO: 917005
guggccuuccacuaaauua

SEQ ID NO: 1201143 - RNA, 19 nt, Artificial Sequence
  Description of Artificial Sequence: Synthetic oligonucleotide
  Antisense strand to SEQ ID NO: 1201142
uaauuuaguggaaggccac

SEQ ID NO: 1201144 - RNA, 19 nt, Artificial Sequence
  Description of Artificial Sequence: Synthetic oligonucleotide
  Sense strand starting at position 3907 of SEQ ID NO: 917005
gauguuauuuccuagagaa

SEQ ID NO: 1201145 - RNA, 19 nt, Artificial Sequence
  Description of Artificial Sequence: Synthetic oligonucleotide
  Antisense strand to SEQ ID NO: 1201144
uucucuaggaaauaacauc

SEQ ID NO: 1201146 - RNA, 19 nt, Artificial Sequence
  Description of Artificial Sequence: Synthetic oligonucleotide
  Sense strand starting at position 3956 of SEQ ID NO: 917005
auaggauauuucuaucaug

SEQ ID NO: 1201147 - RNA, 19 nt, Artificial Sequence
  Description of Artificial Sequence: Synthetic oligonucleotide
  Antisense strand to SEQ ID NO: 1201146
caugauagaaauauccuau

SEQ ID NO: 1201148 - RNA, 19 nt, Artificial Sequence
  Description of Artificial Sequence: Synthetic oligonucleotide
  Sense strand starting at position 3959 of SEQ ID NO: 917005
ggauauuucuaucaugagu

SEQ ID NO: 1201149 - RNA, 19 nt, Artificial Sequence
  Description of Artificial Sequence: Synthetic oligonucleotide
  Antisense strand to SEQ ID NO: 1201148
acucaugauagaaauaucc

SEQ ID NO: 1201150 - RNA, 19 nt, Artificial Sequence
  Description of Artificial Sequence: Synthetic oligonucleotide
  Sense strand starting at position 66 of SEQ ID NO: 917006
aaggaauaauuucgguuua

SEQ ID NO: 1201151 - RNA, 19 nt, Artificial Sequence
  Description of Artificial Sequence: Synthetic oligonucleotide
  Antisense strand to SEQ ID NO: 1201150
uaaaccgaaauuauuccuu

SEQ ID NO: 1201152 - RNA, 19 nt, Artificial Sequence
  Description of Artificial Sequence: Synthetic oligonucleotide
  Sense strand starting at position 67 of SEQ ID NO: 917006
aggaauaauuucgguuuaa

SEQ ID NO: 1201153 - RNA, 19 nt, Artificial Sequence
  Description of Artificial Sequence: Synthetic oligonucleotide
  Antisense strand to SEQ ID NO: 1201152
uuaaaccgaaauuauuccu

SEQ ID NO: 1201154 - RNA, 19 nt, Artificial Sequence
  Description of Artificial Sequence: Synthetic oligonucleotide
  Sense strand starting at position 76 of SEQ ID NO: 917006
uucgguuuaaacuagugau

SEQ ID NO: 1201155 - RNA, 19 nt, Artificial Sequence
  Description of Artificial Sequence: Synthetic oligonucleotide
  Antisense strand to SEQ ID NO: 1201154
aucacuaguuuaaaccgaa

SEQ ID NO: 1201156 - RNA, 19 nt, Artificial Sequence
  Description of Artificial Sequence: Synthetic oligonucleotide
  Sense strand starting at position 173 of SEQ ID NO: 917006
ucauccuauuacgauuuga

SEQ ID NO: 1201157 - RNA, 19 nt, Artificial Sequence
  Description of Artificial Sequence: Synthetic oligonucleotide
  Antisense strand to SEQ ID NO: 1201156
ucaaaucguaauaggauga

SEQ ID NO: 1201158 - RNA, 19 nt, Artificial Sequence
  Description of Artificial Sequence: Synthetic oligonucleotide
  Sense strand starting at position 815 of SEQ ID NO: 917006
uuuaauucggcaugaaccu

SEQ ID NO: 1201159 - RNA, 19 nt, Artificial Sequence
  Description of Artificial Sequence: Synthetic oligonucleotide
  Antisense strand to SEQ ID NO: 1201158
agguucaugccgaauuaaa

SEQ ID NO: 1201160 - RNA, 19 nt, Artificial Sequence
  Description of Artificial Sequence: Synthetic oligonucleotide
  Sense strand starting at position 959 of SEQ ID NO: 917006
uagaaauuagagugucauc

SEQ ID NO: 1201161 - RNA, 19 nt, Artificial Sequence
  Description of Artificial Sequence: Synthetic oligonucleotide
  Antisense strand to SEQ ID NO: 1201160
gaugacacucuaauuucua

SEQ ID NO: 1201162 - RNA, 19 nt, Artificial Sequence
  Description of Artificial Sequence: Synthetic oligonucleotide
  Sense strand starting at position 964 of SEQ ID NO: 917006
auuagagugucaucaguug

SEQ ID NO: 1201163 - RNA, 19 nt, Artificial Sequence
  Description of Artificial Sequence: Synthetic oligonucleotide
  Antisense strand to SEQ ID NO: 1201162
caacugaugacacucuaau

SEQ ID NO: 1201164 - RNA, 19 nt, Artificial Sequence
  Description of Artificial Sequence: Synthetic oligonucleotide
  Sense strand starting at position 988 of SEQ ID NO: 917006
cagggagcgcucugagacu

SEQ ID NO: 1201165 - RNA, 19 nt, Artificial Sequence
  Description of Artificial Sequence: Synthetic oligonucleotide
  Antisense strand to SEQ ID NO: 1201164
agucucagagcgcucccug

SEQ ID NO: 1201166 - RNA, 19 nt, Artificial Sequence
  Description of Artificial Sequence: Synthetic oligonucleotide
  Sense strand starting at position 1008 of SEQ ID NO: 917006
ugcugcgagucauuucagu

SEQ ID NO: 1201167 - RNA, 19 nt, Artificial Sequence
  Description of Artificial Sequence: Synthetic oligonucleotide
  Antisense strand to SEQ ID NO: 1201166
acugaaaugacucgcagca

SEQ ID NO: 1201168 - RNA, 19 nt, Artificial Sequence
  Description of Artificial Sequence: Synthetic oligonucleotide
  Sense strand starting at position 2095 of SEQ ID NO: 917006
gagguagaaacgcaguuua

SEQ ID NO: 1201169 - RNA, 19 nt, Artificial Sequence
  Description of Artificial Sequence: Synthetic oligonucleotide
  Antisense strand to SEQ ID NO: 1201168
uaaacugcguuucuaccuc

SEQ ID NO: 1201170 - RNA, 19 nt, Artificial Sequence
  Description of Artificial Sequence: Synthetic oligonucleotide
  Sense strand starting at position 2535 of SEQ ID NO: 917006
ucuacaaucgggcacuuaa

SEQ ID NO: 1201171 - RNA, 19 nt, Artificial Sequence
  Description of Artificial Sequence: Synthetic oligonucleotide
  Antisense strand to SEQ ID NO: 1201170
uuaagugcccgauuguaga

SEQ ID NO: 1201172 - RNA, 19 nt, Artificial Sequence
  Description of Artificial Sequence: Synthetic oligonucleotide
  Sense strand starting at position 2659 of SEQ ID NO: 917006
gacaaauucgcgcuugcau

SEQ ID NO: 1201173 - RNA, 19 nt, Artificial Sequence
  Description of Artificial Sequence: Synthetic oligonucleotide
  Antisense strand to SEQ ID NO: 1201172
augcaagcgcgaauuuguc

SEQ ID NO: 1201174 - RNA, 19 nt, Artificial Sequence
  Description of Artificial Sequence: Synthetic oligonucleotide
  Sense strand starting at position 2660 of SEQ ID NO: 917006
acaaauucgcgcuugcauu

SEQ ID NO: 1201175 - RNA, 19 nt, Artificial Sequence
  Description of Artificial Sequence: Synthetic oligonucleotide
  Antisense strand to SEQ ID NO: 1201174
aaugcaagcgcgaauuugu

SEQ ID NO: 1201176 - RNA, 19 nt, Artificial Sequence
  Description of Artificial Sequence: Synthetic oligonucleotide
  Sense strand starting at position 2799 of SEQ ID NO: 917006
gauggugcauaauccuaaa

SEQ ID NO: 1201177 - RNA, 19 nt, Artificial Sequence
  Description of Artificial Sequence: Synthetic oligonucleotide
  Antisense strand to SEQ ID NO: 1201176
uuuaggauuaugcaccauc

SEQ ID NO: 1201178 - RNA, 19 nt, Artificial Sequence
  Description of Artificial Sequence: Synthetic oligonucleotide
  Sense strand starting at position 2830 of SEQ ID NO: 917006
accuauaauuaggccuaga

SEQ ID NO: 1201179 - RNA, 19 nt, Artificial Sequence
  Description of Artificial Sequence: Synthetic oligonucleotide
  Antisense strand to SEQ ID NO: 1201178
ucuaggccuaauuauaggu

SEQ ID NO: 1201180 - RNA, 19 nt, Artificial Sequence
  Description of Artificial Sequence: Synthetic oligonucleotide
  Sense strand starting at position 2918 of SEQ ID NO: 917006
aaauguuugccuggaaauu

SEQ ID NO: 1201181 - RNA, 19 nt, Artificial Sequence
  Description of Artificial Sequence: Synthetic oligonucleotide
  Antisense strand to SEQ ID NO: 1201180
aauuuccaggcaaacauuu

SEQ ID NO: 1201182 - RNA, 19 nt, Artificial Sequence
  Description of Artificial Sequence: Synthetic oligonucleotide
  Sense strand starting at position 2919 of SEQ ID NO: 917006
aauguuugccuggaaauua

SEQ ID NO: 1201183 - RNA, 19 nt, Artificial Sequence
  Description of Artificial Sequence: Synthetic oligonucleotide
  Antisense strand to SEQ ID NO: 1201182
uaauuuccaggcaaacauu

SEQ ID NO: 1201184 - RNA, 19 nt, Artificial Sequence
  Description of Artificial Sequence: Synthetic oligonucleotide
  Sense strand starting at position 2981 of SEQ ID NO: 917006
guuuaaagaugcuuucuuu

SEQ ID NO: 1201185 - RNA, 19 nt, Artificial Sequence
  Description of Artificial Sequence: Synthetic oligonucleotide
  Antisense strand to SEQ ID NO: 1201184
aaagaaagcaucuuuaaac

SEQ ID NO: 1201186 - RNA, 19 nt, Artificial Sequence
  Description of Artificial Sequence: Synthetic oligonucleotide
  Sense strand starting at position 2991 of SEQ ID NO: 917006
gcuuucuuucuagaaagga

SEQ ID NO: 1201187 - RNA, 19 nt, Artificial Sequence
  Description of Artificial Sequence: Synthetic oligonucleotide
  Antisense strand to SEQ ID NO: 1201186
uccuuucuagaaagaaagc

SEQ ID NO: 1201188 - RNA, 19 nt, Artificial Sequence
  Description of Artificial Sequence: Synthetic oligonucleotide
  Sense strand starting at position 3021 of SEQ ID NO: 917006
ggauguaggguguguuaau

SEQ ID NO: 1201189 - RNA, 19 nt, Artificial Sequence
  Description of Artificial Sequence: Synthetic oligonucleotide
  Antisense strand to SEQ ID NO: 1201188
auuaacacacccuacaucc

SEQ ID NO: 1201190 - RNA, 19 nt, Artificial Sequence
  Description of Artificial Sequence: Synthetic oligonucleotide
  Sense strand starting at position 3022 of SEQ ID NO: 917006
gauguaggguguguuaauc

SEQ ID NO: 1201191 - RNA, 19 nt, Artificial Sequence
  Description of Artificial Sequence: Synthetic oligonucleotide
  Antisense strand to SEQ ID NO: 1201190
gauuaacacacccuacauc

SEQ ID NO: 1201192 - RNA, 19 nt, Artificial Sequence
  Description of Artificial Sequence: Synthetic oligonucleotide
  Sense strand starting at position 3046 of SEQ ID NO: 917006
cccagaaucugagcuccaa

SEQ ID NO: 1201193 - RNA, 19 nt, Artificial Sequence
  Description of Artificial Sequence: Synthetic oligonucleotide
  Antisense strand to SEQ ID NO: 1201192
uuggagcucagauucuggg

SEQ ID NO: 1201194 - RNA, 19 nt, Artificial Sequence
  Description of Artificial Sequence: Synthetic oligonucleotide
  Sense strand starting at position 3113 of SEQ ID NO: 917006
ucuacauugcuagguuaga

SEQ ID NO: 1201195 - RNA, 19 nt, Artificial Sequence
  Description of Artificial Sequence: Synthetic oligonucleotide
  Antisense strand to SEQ ID NO: 1201194
ucuaaccuagcaauguaga

SEQ ID NO: 1201196 - RNA, 19 nt, Artificial Sequence
  Description of Artificial Sequence: Synthetic oligonucleotide
  Sense strand starting at position 3114 of SEQ ID NO: 917006
cuacauugcuagguuagaa

SEQ ID NO: 1201197 - RNA, 19 nt, Artificial Sequence
  Description of Artificial Sequence: Synthetic oligonucleotide
  Antisense strand to SEQ ID NO: 1201196
uucuaaccuagcaauguag

SEQ ID NO: 1201198 - RNA, 19 nt, Artificial Sequence
  Description of Artificial Sequence: Synthetic oligonucleotide
  Sense strand starting at position 3237 of SEQ ID NO: 917006
agagguaacuaauuccuuu

SEQ ID NO: 1201199 - RNA, 19 nt, Artificial Sequence
  Description of Artificial Sequence: Synthetic oligonucleotide
  Antisense strand to SEQ ID NO: 1201198
aaaggaauuaguuaccucu

SEQ ID NO: 1201200 - RNA, 19 nt, Artificial Sequence
  Description of Artificial Sequence: Synthetic oligonucleotide
  Sense strand starting at position 3290 of SEQ ID NO: 917006
ugguauuaagcucaauaau

SEQ ID NO: 1201201 - RNA, 19 nt, Artificial Sequence
  Description of Artificial Sequence: Synthetic oligonucleotide
  Antisense strand to SEQ ID NO: 1201200
auuauugagcuuaauacca

SEQ ID NO: 1201202 - RNA, 19 nt, Artificial Sequence
  Description of Artificial Sequence: Synthetic oligonucleotide
  Sense strand starting at position 3331 of SEQ ID NO: 917006
auuagcaaguuguuaggua

SEQ ID NO: 1201203 - RNA, 19 nt, Artificial Sequence
  Description of Artificial Sequence: Synthetic oligonucleotide
  Antisense strand to SEQ ID NO: 1201202
uaccuaacaacuugcuaau

SEQ ID NO: 1201204 - RNA, 19 nt, Artificial Sequence
  Description of Artificial Sequence: Synthetic oligonucleotide
  Sense strand starting at position 3336 of SEQ ID NO: 917006
caaguuguuagguagguuu

SEQ ID NO: 1201205 - RNA, 19 nt, Artificial Sequence
  Description of Artificial Sequence: Synthetic oligonucleotide
  Antisense strand to SEQ ID NO: 1201204
aaaccuaccuaacaacuug

SEQ ID NO: 1201206 - RNA, 19 nt, Artificial Sequence
  Description of Artificial Sequence: Synthetic oligonucleotide
  Sense strand starting at position 3394 of SEQ ID NO: 917006
acagcuucccuggacacau

SEQ ID NO: 1201207 - RNA, 19 nt, Artificial Sequence
  Description of Artificial Sequence: Synthetic oligonucleotide
  Antisense strand to SEQ ID NO: 1201206
auguguccagggaagcugu

SEQ ID NO: 1201208 - RNA, 19 nt, Artificial Sequence
  Description of Artificial Sequence: Synthetic oligonucleotide
  Sense strand starting at position 3454 of SEQ ID NO: 917006
ggcaaaggaccaugacuuu

SEQ ID NO: 1201209 - RNA, 19 nt, Artificial Sequence
  Description of Artificial Sequence: Synthetic oligonucleotide
  Antisense strand to SEQ ID NO: 1201208
aaagucaugguccuuugcc

SEQ ID NO: 1201210 - RNA, 19 nt, Artificial Sequence
  Description of Artificial Sequence: Synthetic oligonucleotide
  Sense strand starting at position 3460 of SEQ ID NO: 917006
ggaccaugacuuugcaaug

SEQ ID NO: 1201211 - RNA, 19 nt, Artificial Sequence
  Description of Artificial Sequence: Synthetic oligonucleotide
  Antisense strand to SEQ ID NO: 1201210
cauugcaaagucauggucc

SEQ ID NO: 1201212 - RNA, 19 nt, Artificial Sequence
  Description of Artificial Sequence: Synthetic oligonucleotide
  Sense strand starting at position 3480 of SEQ ID NO: 917006
cugguaacccaguacguau

SEQ ID NO: 1201213 - RNA, 19 nt, Artificial Sequence
  Description of Artificial Sequence: Synthetic oligonucleotide
  Antisense strand to SEQ ID NO: 1201212
auacguacuggguuaccag

SEQ ID NO: 1201214 - RNA, 19 nt, Artificial Sequence
  Description of Artificial Sequence: Synthetic oligonucleotide
  Sense strand starting at position 3491 of SEQ ID NO: 917006
guacguauaaugcaagaac

SEQ ID NO: 1201215 - RNA, 19 nt, Artificial Sequence
  Description of Artificial Sequence: Synthetic oligonucleotide
  Antisense strand to SEQ ID NO: 1201214
guucuugcauuauacguac

SEQ ID NO: 1201216 - RNA, 19 nt, Artificial Sequence
  Description of Artificial Sequence: Synthetic oligonucleotide
  Sense strand starting at position 3500 of SEQ ID NO: 917006
augcaagaacugcauucua

SEQ ID NO: 1201217 - RNA, 19 nt, Artificial Sequence
  Description of Artificial Sequence: Synthetic oligonucleotide
  Antisense strand to SEQ ID NO: 1201216
uagaaugcaguucuugcau

SEQ ID NO: 1201218 - RNA, 19 nt, Artificial Sequence
  Description of Artificial Sequence: Synthetic oligonucleotide
  Sense strand starting at position 3515 of SEQ ID NO: 917006
ucuagauacgccugaaauu

SEQ ID NO: 1201219 - RNA, 19 nt, Artificial Sequence
  Description of Artificial Sequence: Synthetic oligonucleotide
  Antisense strand to SEQ ID NO: 1201218
aauuucaggcguaucuaga

SEQ ID NO: 1201220 - RNA, 19 nt, Artificial Sequence
  Description of Artificial Sequence: Synthetic oligonucleotide
  Sense strand starting at position 3516 of SEQ ID NO: 917006
cuagauacgccugaaauua

SEQ ID NO: 1201221 - RNA, 19 nt, Artificial Sequence
  Description of Artificial Sequence: Synthetic oligonucleotide
  Antisense strand to SEQ ID NO: 1201220
uaauuucaggcguaucuag

SEQ ID NO: 1201222 - RNA, 19 nt, Artificial Sequence
  Description of Artificial Sequence: Synthetic oligonucleotide
  Sense strand starting at position 3530 of SEQ ID NO: 917006
aauuaauguuuccugggca

SEQ ID NO: 1201223 - RNA, 19 nt, Artificial Sequence
  Description of Artificial Sequence: Synthetic oligonucleotide
  Antisense strand to SEQ ID NO: 1201222
ugcccaggaaacauuaauu

SEQ ID NO: 1201224 - RNA, 19 nt, Artificial Sequence
  Description of Artificial Sequence: Synthetic oligonucleotide
  Sense strand starting at position 3649 of SEQ ID NO: 917006
ucagauucugcguacccua

SEQ ID NO: 1201225 - RNA, 19 nt, Artificial Sequence
  Description of Artificial Sequence: Synthetic oligonucleotide
  Antisense strand to SEQ ID NO: 1201224
uaggguacgcagaaucuga

SEQ ID NO: 1201226 - RNA, 19 nt, Artificial Sequence
  Description of Artificial Sequence: Synthetic oligonucleotide
  Sense strand starting at position 3825 of SEQ ID NO: 917006
ccuggucacuuuccagaaa

SEQ ID NO: 1201227 - RNA, 19 nt, Artificial Sequence
  Description of Artificial Sequence: Synthetic oligonucleotide
  Antisense strand to SEQ ID NO: 1201226
uuucuggaaagugaccagg

SEQ ID NO: 1201228 - RNA, 19 nt, Artificial Sequence
  Description of Artificial Sequence: Synthetic oligonucleotide
  Sense strand starting at position 3916 of SEQ ID NO: 917006
guaggugacccaugcaaca

SEQ ID NO: 1201229 - RNA, 19 nt, Artificial Sequence
  Description of Artificial Sequence: Synthetic oligonucleotide
  Antisense strand to SEQ ID NO: 1201228
uguugcaugggucaccuac

SEQ ID NO: 1201230 - RNA, 19 nt, Artificial Sequence
  Description of Artificial Sequence: Synthetic oligonucleotide
  Sense strand starting at position 101 of SEQ ID NO: 917007
auuggauuauagccacacu

SEQ ID NO: 1201231 - RNA, 19 nt, Artificial Sequence
  Description of Artificial Sequence: Synthetic oligonucleotide
  Antisense strand to SEQ ID NO: 1201230
aguguggcuauaauccaau

SEQ ID NO: 1201232 - RNA, 19 nt, Artificial Sequence
  Description of Artificial Sequence: Synthetic oligonucleotide
  Sense strand starting at position 597 of SEQ ID NO: 917007
uaccuaauguaguuagaug

SEQ ID NO: 1201233 - RNA, 19 nt, Artificial Sequence
  Description of Artificial Sequence: Synthetic oligonucleotide
  Antisense strand to SEQ ID NO: 1201232
caucuaacuacauuaggua

SEQ ID NO: 1201234 - RNA, 19 nt, Artificial Sequence
  Description of Artificial Sequence: Synthetic oligonucleotide
  Sense strand starting at position 809 of SEQ ID NO: 917007
gaaguuaaaugguccucua

SEQ ID NO: 1201235 - RNA, 19 nt, Artificial Sequence
  Description of Artificial Sequence: Synthetic oligonucleotide
  Antisense strand to SEQ ID NO: 1201234
uagaggaccauuuaacuuc

SEQ ID NO: 1201236 - RNA, 19 nt, Artificial Sequence
  Description of Artificial Sequence: Synthetic oligonucleotide
  Sense strand starting at position 812 of SEQ ID NO: 917007
guuaaaugguccucuauca

SEQ ID NO: 1201237 - RNA, 19 nt, Artificial Sequence
  Description of Artificial Sequence: Synthetic oligonucleotide
  Antisense strand to SEQ ID NO: 1201236
ugauagaggaccauuuaac

SEQ ID NO: 1201238 - RNA, 19 nt, Artificial Sequence
  Description of Artificial Sequence: Synthetic oligonucleotide
  Sense strand starting at position 1062 of SEQ ID NO: 917007
ggugcuguuccacaaucua

SEQ ID NO: 1201239 - RNA, 19 nt, Artificial Sequence
  Description of Artificial Sequence: Synthetic oligonucleotide
  Antisense strand to SEQ ID NO: 1201238
uagauuguggaacagcacc

SEQ ID NO: 1201240 - RNA, 19 nt, Artificial Sequence
  Description of Artificial Sequence: Synthetic oligonucleotide
  Sense strand starting at position 1092 of SEQ ID NO: 917007
gauauauuauuuggacuga

SEQ ID NO: 1201241 - RNA, 19 nt, Artificial Sequence
  Description of Artificial Sequence: Synthetic oligonucleotide
  Antisense strand to SEQ ID NO: 1201240
ucaguccaaauaauauauc

SEQ ID NO: 1201242 - RNA, 19 nt, Artificial Sequence
  Description of Artificial Sequence: Synthetic oligonucleotide
  Sense strand starting at position 1251 of SEQ ID NO: 917007
gccauaaucgauuacuuac

SEQ ID NO: 1201243 - RNA, 19 nt, Artificial Sequence
  Description of Artificial Sequence: Synthetic oligonucleotide
  Antisense strand to SEQ ID NO: 1201242
guaaguaaucgauuauggc

SEQ ID NO: 1201244 - RNA, 19 nt, Artificial Sequence
  Description of Artificial Sequence: Synthetic oligonucleotide
  Sense strand starting at position 1357 of SEQ ID NO: 917007
auucuucccugugugaaau

SEQ ID NO: 1201245 - RNA, 19 nt, Artificial Sequence
  Description of Artificial Sequence: Synthetic oligonucleotide
  Antisense strand to SEQ ID NO: 1201244
auuucacacagggaagaau

SEQ ID NO: 1201246 - RNA, 19 nt, Artificial Sequence
  Description of Artificial Sequence: Synthetic oligonucleotide
  Sense strand starting at position 1358 of SEQ ID NO: 917007
uucuucccugugugaaaua

SEQ ID NO: 1201247 - RNA, 19 nt, Artificial Sequence
  Description of Artificial Sequence: Synthetic oligonucleotide
  Antisense strand to SEQ ID NO: 1201246
uauuucacacagggaagaa

SEQ ID NO: 1201248 - RNA, 19 nt, Artificial Sequence
  Description of Artificial Sequence: Synthetic oligonucleotide
  Sense strand starting at position 1363 of SEQ ID NO: 917007
cccugugugaaauagcagu

SEQ ID NO: 1201249 - RNA, 19 nt, Artificial Sequence
  Description of Artificial Sequence: Synthetic oligonucleotide
  Antisense strand to SEQ ID NO: 1201248
acugcuauuucacacaggg

SEQ ID NO: 1201250 - RNA, 19 nt, Artificial Sequence
  Description of Artificial Sequence: Synthetic oligonucleotide
  Sense strand starting at position 1629 of SEQ ID NO: 917007
ucuagaaacugcuuaggua

SEQ ID NO: 1201251 - RNA, 19 nt, Artificial Sequence
  Description of Artificial Sequence: Synthetic oligonucleotide
  Antisense strand to SEQ ID NO: 1201250
uaccuaagcaguuucuaga

SEQ ID NO: 1201252 - RNA, 19 nt, Artificial Sequence
  Description of Artificial Sequence: Synthetic oligonucleotide
  Sense strand starting at position 1630 of SEQ ID NO: 917007
cuagaaacugcuuagguau

SEQ ID NO: 1201253 - RNA, 19 nt, Artificial Sequence
  Description of Artificial Sequence: Synthetic oligonucleotide
  Antisense strand to SEQ ID NO: 1201252
auaccuaagcaguuucuag

SEQ ID NO: 1201254 - RNA, 19 nt, Artificial Sequence
  Description of Artificial Sequence: Synthetic oligonucleotide
  Sense strand starting at position 1633 of SEQ ID NO: 917007
gaaacugcuuagguaugua

SEQ ID NO: 1201255 - RNA, 19 nt, Artificial Sequence
  Description of Artificial Sequence: Synthetic oligonucleotide
  Antisense strand to SEQ ID NO: 1201254
uacauaccuaagcaguuuc

SEQ ID NO: 1201256 - RNA, 19 nt, Artificial Sequence
  Description of Artificial Sequence: Synthetic oligonucleotide
  Sense strand starting at position 2068 of SEQ ID NO: 917007
gaggaauagguaggucagu

SEQ ID NO: 1201257 - RNA, 19 nt, Artificial Sequence
  Description of Artificial Sequence: Synthetic oligonucleotide
  Antisense strand to SEQ ID NO: 1201256
acugaccuaccuauuccuc

SEQ ID NO: 1201258 - RNA, 19 nt, Artificial Sequence
  Description of Artificial Sequence: Synthetic oligonucleotide
  Sense strand starting at position 2073 of SEQ ID NO: 917007
auagguaggucaguuuaga

SEQ ID NO: 1201259 - RNA, 19 nt, Artificial Sequence
  Description of Artificial Sequence: Synthetic oligonucleotide
  Antisense strand to SEQ ID NO: 1201258
ucuaaacugaccuaccuau

SEQ ID NO: 1201260 - RNA, 19 nt, Artificial Sequence
  Description of Artificial Sequence: Synthetic oligonucleotide
  Sense strand starting at position 2208 of SEQ ID NO: 917007
gccauuacuccugaugcua

SEQ ID NO: 1201261 - RNA, 19 nt, Artificial Sequence
  Description of Artificial Sequence: Synthetic oligonucleotide
  Antisense strand to SEQ ID NO: 1201260
uagcaucaggaguaauggc

SEQ ID NO: 1201262 - RNA, 19 nt, Artificial Sequence
  Description of Artificial Sequence: Synthetic oligonucleotide
  Sense strand starting at position 2264 of SEQ ID NO: 917007
ugcuccguggcuguaaauu

SEQ ID NO: 1201263 - RNA, 19 nt, Artificial Sequence
  Description of Artificial Sequence: Synthetic oligonucleotide
  Antisense strand to SEQ ID NO: 1201262
aauuuacagccacggagca

SEQ ID NO: 1201264 - RNA, 19 nt, Artificial Sequence
  Description of Artificial Sequence: Synthetic oligonucleotide
  Sense strand starting at position 2398 of SEQ ID NO: 917007
ugcuuuaaugaguaucacu

SEQ ID NO: 1201265 - RNA, 19 nt, Artificial Sequence
  Description of Artificial Sequence: Synthetic oligonucleotide
  Antisense strand to SEQ ID NO: 1201264
agugauacucauuaaagca

SEQ ID NO: 1201266 - RNA, 19 nt, Artificial Sequence
  Description of Artificial Sequence: Synthetic oligonucleotide
  Sense strand starting at position 2577 of SEQ ID NO: 917007
ugaggugguggagaguuaa

SEQ ID NO: 1201267 - RNA, 19 nt, Artificial Sequence
  Description of Artificial Sequence: Synthetic oligonucleotide
  Antisense strand to SEQ ID NO: 1201266
uuaacucuccaccaccuca

SEQ ID NO: 1201268 - RNA, 19 nt, Artificial Sequence
  Description of Artificial Sequence: Synthetic oligonucleotide
  Sense strand starting at position 2588 of SEQ ID NO: 917007
agaguuaacguagagguca

SEQ ID NO: 1201269 - RNA, 19 nt, Artificial Sequence
  Description of Artificial Sequence: Synthetic oligonucleotide
  Antisense strand to SEQ ID NO: 1201268
ugaccucuacguuaacucu

SEQ ID NO: 1201270 - RNA, 19 nt, Artificial Sequence
  Description of Artificial Sequence: Synthetic oligonucleotide
  Sense strand starting at position 2590 of SEQ ID NO: 917007
aguuaacguagaggucaau

SEQ ID NO: 1201271 - RNA, 19 nt, Artificial Sequence
  Description of Artificial Sequence: Synthetic oligonucleotide
  Antisense strand to SEQ ID NO: 1201270
auugaccucuacguuaacu

SEQ ID NO: 1201272 - RNA, 19 nt, Artificial Sequence
  Description of Artificial Sequence: Synthetic oligonucleotide
  Sense strand starting at position 2691 of SEQ ID NO: 917007
gggcuuacacaugguaaca

SEQ ID NO: 1201273 - RNA, 19 nt, Artificial Sequence
  Description of Artificial Sequence: Synthetic oligonucleotide
  Antisense strand to SEQ ID NO: 1201272
uguuaccauguguaagccc

SEQ ID NO: 1201274 - RNA, 19 nt, Artificial Sequence
  Description of Artificial Sequence: Synthetic oligonucleotide
  Sense strand starting at position 2841 of SEQ ID NO: 917007
uuuaguggaaggugauauu

SEQ ID NO: 1201275 - RNA, 19 nt, Artificial Sequence
  Description of Artificial Sequence: Synthetic oligonucleotide
  Antisense strand to SEQ ID NO: 1201274
aauaucaccuuccacuaaa

SEQ ID NO: 1201276 - RNA, 19 nt, Artificial Sequence
  Description of Artificial Sequence: Synthetic oligonucleotide
  Sense strand starting at position 2903 of SEQ ID NO: 917007
gugagauguggucagauug

SEQ ID NO: 1201277 - RNA, 19 nt, Artificial Sequence
  Description of Artificial Sequence: Synthetic oligonucleotide
  Antisense strand to SEQ ID NO: 1201276
caaucugaccacaucucac

SEQ ID NO: 1201278 - RNA, 19 nt, Artificial Sequence
  Description of Artificial Sequence: Synthetic oligonucleotide
  Sense strand starting at position 2971 of SEQ ID NO: 917007
acccauagccaacgugaua

SEQ ID NO: 1201279 - RNA, 19 nt, Artificial Sequence
  Description of Artificial Sequence: Synthetic oligonucleotide
  Antisense strand to SEQ ID NO: 1201278
uaucacguuggcuaugggu

SEQ ID NO: 1201280 - RNA, 19 nt, Artificial Sequence
  Description of Artificial Sequence: Synthetic oligonucleotide
  Sense strand starting at position 3011 of SEQ ID NO: 917007
acagauaguagagguuuaa

SEQ ID NO: 1201281 - RNA, 19 nt, Artificial Sequence
  Description of Artificial Sequence: Synthetic oligonucleotide
  Antisense strand to SEQ ID NO: 1201280
uuaaaccucuacuaucugu

SEQ ID NO: 1201282 - RNA, 19 nt, Artificial Sequence
  Description of Artificial Sequence: Synthetic oligonucleotide
  Sense strand starting at position 3052 of SEQ ID NO: 917007
gcagccaagucaucaaaua

SEQ ID NO: 1201283 - RNA, 19 nt, Artificial Sequence
  Description of Artificial Sequence: Synthetic oligonucleotide
  Antisense strand to SEQ ID NO: 1201282
uauuugaugacuuggcugc

SEQ ID NO: 1201284 - RNA, 19 nt, Artificial Sequence
  Description of Artificial Sequence: Synthetic oligonucleotide
  Sense strand starting at position 3063 of SEQ ID NO: 917007
aucaaauagcagugacaca

SEQ ID NO: 1201285 - RNA, 19 nt, Artificial Sequence
  Description of Artificial Sequence: Synthetic oligonucleotide
  Antisense strand to SEQ ID NO: 1201284
ugugucacugcuauuugau

SEQ ID NO: 1201286 - RNA, 19 nt, Artificial Sequence
  Description of Artificial Sequence: Synthetic oligonucleotide
  Sense strand starting at position 3201 of SEQ ID NO: 917007
ggaguucuggacuguagua

SEQ ID NO: 1201287 - RNA, 19 nt, Artificial Sequence
  Description of Artificial Sequence: Synthetic oligonucleotide
  Antisense strand to SEQ ID NO: 1201286
uacuacaguccagaacucc

SEQ ID NO: 1201288 - RNA, 19 nt, Artificial Sequence
  Description of Artificial Sequence: Synthetic oligonucleotide
  Sense strand starting at position 3224 of SEQ ID NO: 917007
augucaacuggucaacuaa

SEQ ID NO: 1201289 - RNA, 19 nt, Artificial Sequence
  Description of Artificial Sequence: Synthetic oligonucleotide
  Antisense strand to SEQ ID NO: 1201288
uuaguugaccaguugacau

SEQ ID NO: 1201290 - RNA, 19 nt, Artificial Sequence
  Description of Artificial Sequence: Synthetic oligonucleotide
  Sense strand starting at position 3347 of SEQ ID NO: 917007
uugauugguagugagauca

SEQ ID NO: 1201291 - RNA, 19 nt, Artificial Sequence
  Description of Artificial Sequence: Synthetic oligonucleotide
  Antisense strand to SEQ ID NO: 1201290
ugaucucacuaccaaucaa

SEQ ID NO: 1201292 - RNA, 19 nt, Artificial Sequence
  Description of Artificial Sequence: Synthetic oligonucleotide
  Sense strand starting at position 3460 of SEQ ID NO: 917007
gaggucuucuuccuggauu

SEQ ID NO: 1201293 - RNA, 19 nt, Artificial Sequence
  Description of Artificial Sequence: Synthetic oligonucleotide
  Antisense strand to SEQ ID NO: 1201292
aauccaggaagaagaccuc

SEQ ID NO: 1201294 - RNA, 19 nt, Artificial Sequence
  Description of Artificial Sequence: Synthetic oligonucleotide
  Sense strand starting at position 3472 of SEQ ID NO: 917007
cuggauuuccucugccuuu

SEQ ID NO: 1201295 - RNA, 19 nt, Artificial Sequence
  Description of Artificial Sequence: Synthetic oligonucleotide
  Antisense strand to SEQ ID NO: 1201294
aaaggcagaggaaauccag

SEQ ID NO: 1201296 - RNA, 19 nt, Artificial Sequence
  Description of Artificial Sequence: Synthetic oligonucleotide
  Sense strand starting at position 3544 of SEQ ID NO: 917007
agacaaauauccucuggua

SEQ ID NO: 1201297 - RNA, 19 nt, Artificial Sequence
  Description of Artificial Sequence: Synthetic oligonucleotide
  Antisense strand to SEQ ID NO: 1201296
uaccagaggauauuugucu

SEQ ID NO: 1201298 - RNA, 19 nt, Artificial Sequence
  Description of Artificial Sequence: Synthetic oligonucleotide
  Sense strand starting at position 3546 of SEQ ID NO: 917007
acaaauauccucugguaug

SEQ ID NO: 1201299 - RNA, 19 nt, Artificial Sequence
  Description of Artificial Sequence: Synthetic oligonucleotide
  Antisense strand to SEQ ID NO: 1201298
cauaccagaggauauuugu

SEQ ID NO: 1201300 - RNA, 19 nt, Artificial Sequence
  Description of Artificial Sequence: Synthetic oligonucleotide
  Sense strand starting at position 3638 of SEQ ID NO: 917007
uuuaguguuggcuggauuu

SEQ ID NO: 1201301 - RNA, 19 nt, Artificial Sequence
  Description of Artificial Sequence: Synthetic oligonucleotide
  Antisense strand to SEQ ID NO: 1201300
aaauccagccaacacuaaa

SEQ ID NO: 1201302 - RNA, 19 nt, Artificial Sequence
  Description of Artificial Sequence: Synthetic oligonucleotide
  Sense strand starting at position 3732 of SEQ ID NO: 917007
gacuucuguccugagcacu

SEQ ID NO: 1201303 - RNA, 19 nt, Artificial Sequence
  Description of Artificial Sequence: Synthetic oligonucleotide
  Antisense strand to SEQ ID NO: 1201302
agugcucaggacagaaguc

SEQ ID NO: 1201304 - RNA, 19 nt, Artificial Sequence
  Description of Artificial Sequence: Synthetic oligonucleotide
  Sense strand starting at position 3754 of SEQ ID NO: 917007
ugcaguccuguugcucuaa

SEQ ID NO: 1201305 - RNA, 19 nt, Artificial Sequence
  Description of Artificial Sequence: Synthetic oligonucleotide
  Antisense strand to SEQ ID NO: 1201304
uuagagcaacaggacugca

SEQ ID NO: 1201306 - RNA, 19 nt, Artificial Sequence
  Description of Artificial Sequence: Synthetic oligonucleotide
  Sense strand starting at position 3778 of SEQ ID NO: 917007
agcugcugccauguuguaa

SEQ ID NO: 1201307 - RNA, 19 nt, Artificial Sequence
  Description of Artificial Sequence: Synthetic oligonucleotide
  Antisense strand to SEQ ID NO: 1201306
uuacaacauggcagcagcu

SEQ ID NO: 1201308 - RNA, 19 nt, Artificial Sequence
  Description of Artificial Sequence: Synthetic oligonucleotide
  Sense strand starting at position 3844 of SEQ ID NO: 917007
aacugaaguccucaguuga

SEQ ID NO: 1201309 - RNA, 19 nt, Artificial Sequence
  Description of Artificial Sequence: Synthetic oligonucleotide
  Antisense strand to SEQ ID NO: 1201308
ucaacugaggacuucaguu

SEQ ID NO: 1201310 - RNA, 19 nt, Artificial Sequence
  Description of Artificial Sequence: Synthetic oligonucleotide
  Sense strand starting at position 184 of SEQ ID NO: 917008
ggcuguuacaaagauagca

SEQ ID NO: 1201311 - RNA, 19 nt, Artificial Sequence
  Description of Artificial Sequence: Synthetic oligonucleotide
  Antisense strand to SEQ ID NO: 1201310
ugcuaucuuuguaacagcc

SEQ ID NO: 1201312 - RNA, 19 nt, Artificial Sequence
  Description of Artificial Sequence: Synthetic oligonucleotide
  Sense strand starting at position 296 of SEQ ID NO: 917008
uuauauuugucccaaggag

SEQ ID NO: 1201313 - RNA, 19 nt, Artificial Sequence
  Description of Artificial Sequence: Synthetic oligonucleotide
  Antisense strand to SEQ ID NO: 1201312
cuccuugggacaaauauaa

SEQ ID NO: 1201314 - RNA, 19 nt, Artificial Sequence
  Description of Artificial Sequence: Synthetic oligonucleotide
  Sense strand starting at position 346 of SEQ ID NO: 917008
gagguuagccaagguuauc

SEQ ID NO: 1201315 - RNA, 19 nt, Artificial Sequence
  Description of Artificial Sequence: Synthetic oligonucleotide
  Antisense strand to SEQ ID NO: 1201314
gauaaccuuggcuaaccuc

SEQ ID NO: 1201316 - RNA, 19 nt, Artificial Sequence
  Description of Artificial Sequence: Synthetic oligonucleotide
  Sense strand starting at position 380 of SEQ ID NO: 917008
agaacaacuuucuaagaga

SEQ ID NO: 1201317 - RNA, 19 nt, Artificial Sequence
  Description of Artificial Sequence: Synthetic oligonucleotide
  Antisense strand to SEQ ID NO: 1201316
ucucuuagaaaguuguucu

SEQ ID NO: 1201318 - RNA, 19 nt, Artificial Sequence
  Description of Artificial Sequence: Synthetic oligonucleotide
  Sense strand starting at position 670 of SEQ ID NO: 917008
ccgauaauagcgcaccaau

SEQ ID NO: 1201319 - RNA, 19 nt, Artificial Sequence
  Description of Artificial Sequence: Synthetic oligonucleotide
  Antisense strand to SEQ ID NO: 1201318
auuggugcgcuauuaucgg

SEQ ID NO: 1201320 - RNA, 19 nt, Artificial Sequence
  Description of Artificial Sequence: Synthetic oligonucleotide
  Sense strand starting at position 673 of SEQ ID NO: 917008
auaauagcgcaccaauauu

SEQ ID NO: 1201321 - RNA, 19 nt, Artificial Sequence
  Description of Artificial Sequence: Synthetic oligonucleotide
  Antisense strand to SEQ ID NO: 1201320
aauauuggugcgcuauuau

SEQ ID NO: 1201322 - RNA, 19 nt, Artificial Sequence
  Description of Artificial Sequence: Synthetic oligonucleotide
  Sense strand starting at position 743 of SEQ ID NO: 917008
auuauaaaggguugaguca

SEQ ID NO: 1201323 - RNA, 19 nt, Artificial Sequence
  Description of Artificial Sequence: Synthetic oligonucleotide
  Antisense strand to SEQ ID NO: 1201322
ugacucaacccuuuauaau

SEQ ID NO: 1201324 - RNA, 19 nt, Artificial Sequence
  Description of Artificial Sequence: Synthetic oligonucleotide
  Sense strand starting at position 760 of SEQ ID NO: 917008
caagcuccugauuguguaa

SEQ ID NO: 1201325 - RNA, 19 nt, Artificial Sequence
  Description of Artificial Sequence: Synthetic oligonucleotide
  Antisense strand to SEQ ID NO: 1201324
uuacacaaucaggagcuug

SEQ ID NO: 1201326 - RNA, 19 nt, Artificial Sequence
  Description of Artificial Sequence: Synthetic oligonucleotide
  Sense strand starting at position 763 of SEQ ID NO: 917008
gcuccugauuguguaagau

SEQ ID NO: 1201327 - RNA, 19 nt, Artificial Sequence
  Description of Artificial Sequence: Synthetic oligonucleotide
  Antisense strand to SEQ ID NO: 1201326
aucuuacacaaucaggagc

SEQ ID NO: 1201328 - RNA, 19 nt, Artificial Sequence
  Description of Artificial Sequence: Synthetic oligonucleotide
  Sense strand starting at position 905 of SEQ ID NO: 917008
accagaaacgcugaaucau

SEQ ID NO: 1201329 - RNA, 19 nt, Artificial Sequence
  Description of Artificial Sequence: Synthetic oligonucleotide
  Antisense strand to SEQ ID NO: 1201328
augauucagcguuucuggu

SEQ ID NO: 1201330 - RNA, 19 nt, Artificial Sequence
  Description of Artificial Sequence: Synthetic oligonucleotide
  Sense strand starting at position 917 of SEQ ID NO: 917008
gaaucaugacuccgagguu

SEQ ID NO: 1201331 - RNA, 19 nt, Artificial Sequence
  Description of Artificial Sequence: Synthetic oligonucleotide
  Antisense strand to SEQ ID NO: 1201330
aaccucggagucaugauuc

SEQ ID NO: 1201332 - RNA, 19 nt, Artificial Sequence
  Description of Artificial Sequence: Synthetic oligonucleotide
  Sense strand starting at position 920 of SEQ ID NO: 917008
ucaugacuccgagguugua

SEQ ID NO: 1201333 - RNA, 19 nt, Artificial Sequence
  Description of Artificial Sequence: Synthetic oligonucleotide
  Antisense strand to SEQ ID NO: 1201332
uacaaccucggagucauga

SEQ ID NO: 1201334 - RNA, 19 nt, Artificial Sequence
  Description of Artificial Sequence: Synthetic oligonucleotide
  Sense strand starting at position 1027 of SEQ ID NO: 917008
uccagagaagucuggcaga

SEQ ID NO: 1201335 - RNA, 19 nt, Artificial Sequence
  Description of Artificial Sequence: Synthetic oligonucleotide
  Antisense strand to SEQ ID NO: 1201334
ucugccagacuucucugga

SEQ ID NO: 1201336 - RNA, 19 nt, Artificial Sequence
  Description of Artificial Sequence: Synthetic oligonucleotide
  Sense strand starting at position 1227 of SEQ ID NO: 917008
ccgagaaauucucuacuug

SEQ ID NO: 1201337 - RNA, 19 nt, Artificial Sequence
  Description of Artificial Sequence: Synthetic oligonucleotide
  Antisense strand to SEQ ID NO: 1201336
caaguagagaauuucucgg

SEQ ID NO: 1201338 - RNA, 19 nt, Artificial Sequence
  Description of Artificial Sequence: Synthetic oligonucleotide
  Sense strand starting at position 1629 of SEQ ID NO: 917008
gagggacucacuugaaggu

SEQ ID NO: 1201339 - RNA, 19 nt, Artificial Sequence
  Description of Artificial Sequence: Synthetic oligonucleotide
  Antisense strand to SEQ ID NO: 1201338
accuucaagugagucccuc

SEQ ID NO: 1201340 - RNA, 19 nt, Artificial Sequence
  Description of Artificial Sequence: Synthetic oligonucleotide
  Sense strand starting at position 2894 of SEQ ID NO: 917008
uuuauuguuugcucaagau

SEQ ID NO: 1201341 - RNA, 19 nt, Artificial Sequence
  Description of Artificial Sequence: Synthetic oligonucleotide
  Antisense strand to SEQ ID NO: 1201340
aucuugagcaaacaauaaa

SEQ ID NO: 1201342 - RNA, 19 nt, Artificial Sequence
  Description of Artificial Sequence: Synthetic oligonucleotide
  Sense strand starting at position 2898 of SEQ ID NO: 917008
uuguuugcucaagauaauu

SEQ ID NO: 1201343 - RNA, 19 nt, Artificial Sequence
  Description of Artificial Sequence: Synthetic oligonucleotide
  Antisense strand to SEQ ID NO: 1201342
aauuaucuugagcaaacaa

SEQ ID NO: 1201344 - RNA, 19 nt, Artificial Sequence
  Description of Artificial Sequence: Synthetic oligonucleotide
  Sense strand starting at position 2906 of SEQ ID NO: 917008
ucaagauaauuugggagau

SEQ ID NO: 1201345 - RNA, 19 nt, Artificial Sequence
  Description of Artificial Sequence: Synthetic oligonucleotide
  Antisense strand to SEQ ID NO: 1201344
aucucccaaauuaucuuga

SEQ ID NO: 1201346 - RNA, 19 nt, Artificial Sequence
  Description of Artificial Sequence: Synthetic oligonucleotide
  Sense strand starting at position 2907 of SEQ ID NO: 917008
caagauaauuugggagaug

SEQ ID NO: 1201347 - RNA, 19 nt, Artificial Sequence
  Description of Artificial Sequence: Synthetic oligonucleotide
  Antisense strand to SEQ ID NO: 1201346
caucucccaaauuaucuug

SEQ ID NO: 1201348 - RNA, 19 nt, Artificial Sequence
  Description of Artificial Sequence: Synthetic oligonucleotide
  Sense strand starting at position 2981 of SEQ ID NO: 917008
ggcugugggcguguuugaa

SEQ ID NO: 1201349 - RNA, 19 nt, Artificial Sequence
  Description of Artificial Sequence: Synthetic oligonucleotide
  Antisense strand to SEQ ID NO: 1201348
uucaaacacgcccacagcc

SEQ ID NO: 1201350 - RNA, 19 nt, Artificial Sequence
  Description of Artificial Sequence: Synthetic oligonucleotide
  Sense strand starting at position 3081 of SEQ ID NO: 917008
cuuccugucuuucugaaag

SEQ ID NO: 1201351 - RNA, 19 nt, Artificial Sequence
  Description of Artificial Sequence: Synthetic oligonucleotide
  Antisense strand to SEQ ID NO: 1201350
cuuucagaaagacaggaag

SEQ ID NO: 1201352 - RNA, 19 nt, Artificial Sequence
  Description of Artificial Sequence: Synthetic oligonucleotide
  Sense strand starting at position 3131 of SEQ ID NO: 917008
uaauaugucccagagugau

SEQ ID NO: 1201353 - RNA, 19 nt, Artificial Sequence
  Description of Artificial Sequence: Synthetic oligonucleotide
  Antisense strand to SEQ ID NO: 1201352
aucacucugggacauauua

SEQ ID NO: 1201354 - RNA, 19 nt, Artificial Sequence
  Description of Artificial Sequence: Synthetic oligonucleotide
  Sense strand starting at position 3135 of SEQ ID NO: 917008
augucccagagugaugauu

SEQ ID NO: 1201355 - RNA, 19 nt, Artificial Sequence
  Description of Artificial Sequence: Synthetic oligonucleotide
  Antisense strand to SEQ ID NO: 1201354
aaucaucacucugggacau

SEQ ID NO: 1201356 - RNA, 19 nt, Artificial Sequence
  Description of Artificial Sequence: Synthetic oligonucleotide
  Sense strand starting at position 3211 of SEQ ID NO: 917008
uccauugcugaguguuaga

SEQ ID NO: 1201357 - RNA, 19 nt, Artificial Sequence
  Description of Artificial Sequence: Synthetic oligonucleotide
  Antisense strand to SEQ ID NO: 1201356
ucuaacacucagcaaugga

SEQ ID NO: 1201358 - RNA, 19 nt, Artificial Sequence
  Description of Artificial Sequence: Synthetic oligonucleotide
  Sense strand starting at position 3334 of SEQ ID NO: 917008
agaaauuguuccucugcua

SEQ ID NO: 1201359 - RNA, 19 nt, Artificial Sequence
  Description of Artificial Sequence: Synthetic oligonucleotide
  Antisense strand to SEQ ID NO: 1201358
uagcagaggaacaauuucu

SEQ ID NO: 1201360 - RNA, 19 nt, Artificial Sequence
  Description of Artificial Sequence: Synthetic oligonucleotide
  Sense strand starting at position 3353 of SEQ ID NO: 917008
ugaguauuuguguggcucu

SEQ ID NO: 1201361 - RNA, 19 nt, Artificial Sequence
  Description of Artificial Sequence: Synthetic oligonucleotide
  Antisense strand to SEQ ID NO: 1201360
agagccacacaaauacuca

SEQ ID NO: 1201362 - RNA, 19 nt, Artificial Sequence
  Description of Artificial Sequence: Synthetic oligonucleotide
  Sense strand starting at position 3356 of SEQ ID NO: 917008
guauuuguguggcucuuua

SEQ ID NO: 1201363 - RNA, 19 nt, Artificial Sequence
  Description of Artificial Sequence: Synthetic oligonucleotide
  Antisense strand to SEQ ID NO: 1201362
uaaagagccacacaaauac

SEQ ID NO: 1201364 - RNA, 19 nt, Artificial Sequence
  Description of Artificial Sequence: Synthetic oligonucleotide
  Sense strand starting at position 3504 of SEQ ID NO: 917008
auuagugacugagaaauga

SEQ ID NO: 1201365 - RNA, 19 nt, Artificial Sequence
  Description of Artificial Sequence: Synthetic oligonucleotide
  Antisense strand to SEQ ID NO: 1201364
ucauuucucagucacuaau

SEQ ID NO: 1201366 - RNA, 19 nt, Artificial Sequence
  Description of Artificial Sequence: Synthetic oligonucleotide
  Sense strand starting at position 3572 of SEQ ID NO: 917008
cacgcuugguaaccuuaau

SEQ ID NO: 1201367 - RNA, 19 nt, Artificial Sequence
  Description of Artificial Sequence: Synthetic oligonucleotide
  Antisense strand to SEQ ID NO: 1201366
auuaagguuaccaagcgug

SEQ ID NO: 1201368 - RNA, 19 nt, Artificial Sequence
  Description of Artificial Sequence: Synthetic oligonucleotide
  Sense strand starting at position 3595 of SEQ ID NO: 917008
cgacuuuaauaucuagaca

SEQ ID NO: 1201369 - RNA, 19 nt, Artificial Sequence
  Description of Artificial Sequence: Synthetic oligonucleotide
  Antisense strand to SEQ ID NO: 1201368
ugucuagauauuaaagucg

SEQ ID NO: 1201370 - RNA, 19 nt, Artificial Sequence
  Description of Artificial Sequence: Synthetic oligonucleotide
  Sense strand starting at position 3686 of SEQ ID NO: 917008
uaaggagauucuuugugcu

SEQ ID NO: 1201371 - RNA, 19 nt, Artificial Sequence
  Description of Artificial Sequence: Synthetic oligonucleotide
  Antisense strand to SEQ ID NO: 1201370
agcacaaagaaucuccuua

SEQ ID NO: 1201372 - RNA, 19 nt, Artificial Sequence
  Description of Artificial Sequence: Synthetic oligonucleotide
  Sense strand starting at position 3688 of SEQ ID NO: 917008
aggagauucuuugugcuac

SEQ ID NO: 1201373 - RNA, 19 nt, Artificial Sequence
  Description of Artificial Sequence: Synthetic oligonucleotide
  Antisense strand to SEQ ID NO: 1201372
guagcacaaagaaucuccu

SEQ ID NO: 1201374 - RNA, 19 nt, Artificial Sequence
  Description of Artificial Sequence: Synthetic oligonucleotide
  Sense strand starting at position 3690 of SEQ ID NO: 917008
gagauucuuugugcuacaa

SEQ ID NO: 1201375 - RNA, 19 nt, Artificial Sequence
  Description of Artificial Sequence: Synthetic oligonucleotide
  Antisense strand to SEQ ID NO: 1201374
uuguagcacaaagaaucuc

SEQ ID NO: 1201376 - RNA, 19 nt, Artificial Sequence
  Description of Artificial Sequence: Synthetic oligonucleotide
  Sense strand starting at position 3708 of SEQ ID NO: 917008
augugcuaaguauaggauu

SEQ ID NO: 1201377 - RNA, 19 nt, Artificial Sequence
  Description of Artificial Sequence: Synthetic oligonucleotide
  Antisense strand to SEQ ID NO: 1201376
aauccuauacuuagcacau

SEQ ID NO: 1201378 - RNA, 19 nt, Artificial Sequence
  Description of Artificial Sequence: Synthetic oligonucleotide
  Sense strand starting at position 3803 of SEQ ID NO: 917008
uuaacagcugauugggaua

SEQ ID NO: 1201379 - RNA, 19 nt, Artificial Sequence
  Description of Artificial Sequence: Synthetic oligonucleotide
  Antisense strand to SEQ ID NO: 1201378
uaucccaaucagcuguuaa

SEQ ID NO: 1201380 - RNA, 19 nt, Artificial Sequence
  Description of Artificial Sequence: Synthetic oligonucleotide
  Sense strand starting at position 3837 of SEQ ID NO: 917008
cugaaaucauaguugaggu

SEQ ID NO: 1201381 - RNA, 19 nt, Artificial Sequence
  Description of Artificial Sequence: Synthetic oligonucleotide
  Antisense strand to SEQ ID NO: 1201380
accucaacuaugauuucag

SEQ ID NO: 1201382 - RNA, 19 nt, Artificial Sequence
  Description of Artificial Sequence: Synthetic oligonucleotide
  Sense strand starting at position 3838 of SEQ ID NO: 917008
ugaaaucauaguugaggua

SEQ ID NO: 1201383 - RNA, 19 nt, Artificial Sequence
  Description of Artificial Sequence: Synthetic oligonucleotide
  Antisense strand to SEQ ID NO: 1201382
uaccucaacuaugauuuca

SEQ ID NO: 1201384 - RNA, 19 nt, Artificial Sequence
  Description of Artificial Sequence: Synthetic oligonucleotide
  Sense strand starting at position 3851 of SEQ ID NO: 917008
gagguaauaggucaaugua

SEQ ID NO: 1201385 - RNA, 19 nt, Artificial Sequence
  Description of Artificial Sequence: Synthetic oligonucleotide
  Antisense strand to SEQ ID NO: 1201384
uacauugaccuauuaccuc

SEQ ID NO: 1201386 - RNA, 19 nt, Artificial Sequence
  Description of Artificial Sequence: Synthetic oligonucleotide
  Sense strand starting at position 3854 of SEQ ID NO: 917008
guaauaggucaauguauca

SEQ ID NO: 1201387 - RNA, 19 nt, Artificial Sequence
  Description of Artificial Sequence: Synthetic oligonucleotide
  Antisense strand to SEQ ID NO: 1201386
ugauacauugaccuauuac

SEQ ID NO: 1201388 - RNA, 19 nt, Artificial Sequence
  Description of Artificial Sequence: Synthetic oligonucleotide
  Sense strand starting at position 3889 of SEQ ID NO: 917008
aacggaggcuuucuagaga

SEQ ID NO: 1201389 - RNA, 19 nt, Artificial Sequence
  Description of Artificial Sequence: Synthetic oligonucleotide
  Antisense strand to SEQ ID NO: 1201388
ucucuagaaagccuccguu

SEQ ID NO: 1201390 - RNA, 19 nt, Artificial Sequence
  Description of Artificial Sequence: Synthetic oligonucleotide
  Sense strand starting at position 78 of SEQ ID NO: 917009
uccagagaagucuggcaga

SEQ ID NO: 1201391 - RNA, 19 nt, Artificial Sequence
  Description of Artificial Sequence: Synthetic oligonucleotide
  Antisense strand to SEQ ID NO: 1201390
ucugccagacuucucugga

SEQ ID NO: 1201392 - RNA, 19 nt, Artificial Sequence
  Description of Artificial Sequence: Synthetic oligonucleotide
  Sense strand starting at position 208 of SEQ ID NO: 917009
ccucgucucaucugaacga

SEQ ID NO: 1201393 - RNA, 19 nt, Artificial Sequence
  Description of Artificial Sequence: Synthetic oligonucleotide
  Antisense strand to SEQ ID NO: 1201392
ucguucagaugagacgagg

SEQ ID NO: 1201394 - RNA, 19 nt, Artificial Sequence
  Description of Artificial Sequence: Synthetic oligonucleotide
  Sense strand starting at position 278 of SEQ ID NO: 917009
ccgagaaauucucuacuug

SEQ ID NO: 1201395 - RNA, 19 nt, Artificial Sequence
  Description of Artificial Sequence: Synthetic oligonucleotide
  Antisense strand to SEQ ID NO: 1201394
caaguagagaauuucucgg

SEQ ID NO: 1201396 - RNA, 19 nt, Artificial Sequence
  Description of Artificial Sequence: Synthetic oligonucleotide
  Sense strand starting at position 680 of SEQ ID NO: 917009
gagggacucacuugaaggu

SEQ ID NO: 1201397 - RNA, 19 nt, Artificial Sequence
  Description of Artificial Sequence: Synthetic oligonucleotide
  Antisense strand to SEQ ID NO: 1201396
accuucaagugagucccuc

SEQ ID NO: 1201398 - RNA, 19 nt, Artificial Sequence
  Description of Artificial Sequence: Synthetic oligonucleotide
  Sense strand starting at position 1945 of SEQ ID NO: 917009
uuuauuguuugcucaagau

SEQ ID NO: 1201399 - RNA, 19 nt, Artificial Sequence
  Description of Artificial Sequence: Synthetic oligonucleotide
  Antisense strand to SEQ ID NO: 1201398
aucuugagcaaacaauaaa

SEQ ID NO: 1201400 - RNA, 19 nt, Artificial Sequence
  Description of Artificial Sequence: Synthetic oligonucleotide
  Sense strand starting at position 1949 of SEQ ID NO: 917009
uuguuugcucaagauaauu

SEQ ID NO: 1201401 - RNA, 19 nt, Artificial Sequence
  Description of Artificial Sequence: Synthetic oligonucleotide
  Antisense strand to SEQ ID NO: 1201400
aauuaucuugagcaaacaa

SEQ ID NO: 1201402 - RNA, 19 nt, Artificial Sequence
  Description of Artificial Sequence: Synthetic oligonucleotide
  Sense strand starting at position 1957 of SEQ ID NO: 917009
ucaagauaauuugggagau

SEQ ID NO: 1201403 - RNA, 19 nt, Artificial Sequence
  Description of Artificial Sequence: Synthetic oligonucleotide
  Antisense strand to SEQ ID NO: 1201402
aucucccaaauuaucuuga

SEQ ID NO: 1201404 - RNA, 19 nt, Artificial Sequence
  Description of Artificial Sequence: Synthetic oligonucleotide
  Sense strand starting at position 1958 of SEQ ID NO: 917009
caagauaauuugggagaug

SEQ ID NO: 1201405 - RNA, 19 nt, Artificial Sequence
  Description of Artificial Sequence: Synthetic oligonucleotide
  Antisense strand to SEQ ID NO: 1201404
caucucccaaauuaucuug

SEQ ID NO: 1201406 - RNA, 19 nt, Artificial Sequence
  Description of Artificial Sequence: Synthetic oligonucleotide
  Sense strand starting at position 2032 of SEQ ID NO: 917009
ggcugugggcguguuugaa

SEQ ID NO: 1201407 - RNA, 19 nt, Artificial Sequence
  Description of Artificial Sequence: Synthetic oligonucleotide
  Antisense strand to SEQ ID NO: 1201406
uucaaacacgcccacagcc

SEQ ID NO: 1201408 - RNA, 19 nt, Artificial Sequence
  Description of Artificial Sequence: Synthetic oligonucleotide
  Sense strand starting at position 2132 of SEQ ID NO: 917009
cuuccugucuuucugaaag

SEQ ID NO: 1201409 - RNA, 19 nt, Artificial Sequence
  Description of Artificial Sequence: Synthetic oligonucleotide
  Antisense strand to SEQ ID NO: 1201408
cuuucagaaagacaggaag

SEQ ID NO: 1201410 - RNA, 19 nt, Artificial Sequence
  Description of Artificial Sequence: Synthetic oligonucleotide
  Sense strand starting at position 2182 of SEQ ID NO: 917009
uaauaugucccagagugau

SEQ ID NO: 1201411 - RNA, 19 nt, Artificial Sequence
  Description of Artificial Sequence: Synthetic oligonucleotide
  Antisense strand to SEQ ID NO: 1201410
aucacucugggacauauua

SEQ ID NO: 1201412 - RNA, 19 nt, Artificial Sequence
  Description of Artificial Sequence: Synthetic oligonucleotide
  Sense strand starting at position 2186 of SEQ ID NO: 917009
augucccagagugaugauu

SEQ ID NO: 1201413 - RNA, 19 nt, Artificial Sequence
  Description of Artificial Sequence: Synthetic oligonucleotide
  Antisense strand to SEQ ID NO: 1201412
aaucaucacucugggacau

SEQ ID NO: 1201414 - RNA, 19 nt, Artificial Sequence
  Description of Artificial Sequence: Synthetic oligonucleotide
  Sense strand starting at position 2262 of SEQ ID NO: 917009
uccauugcugaguguuaga

SEQ ID NO: 1201415 - RNA, 19 nt, Artificial Sequence
  Description of Artificial Sequence: Synthetic oligonucleotide
  Antisense strand to SEQ ID NO: 1201414
ucuaacacucagcaaugga

SEQ ID NO: 1201416 - RNA, 19 nt, Artificial Sequence
  Description of Artificial Sequence: Synthetic oligonucleotide
  Sense strand starting at position 2385 of SEQ ID NO: 917009
agaaauuguuccucugcua

SEQ ID NO: 1201417 - RNA, 19 nt, Artificial Sequence
  Description of Artificial Sequence: Synthetic oligonucleotide
  Antisense strand to SEQ ID NO: 1201416
uagcagaggaacaauuucu

SEQ ID NO: 1201418 - RNA, 19 nt, Artificial Sequence
  Description of Artificial Sequence: Synthetic oligonucleotide
  Sense strand starting at position 2404 of SEQ ID NO: 917009
ugaguauuuguguggcucu

SEQ ID NO: 1201419 - RNA, 19 nt, Artificial Sequence
  Description of Artificial Sequence: Synthetic oligonucleotide
  Antisense strand to SEQ ID NO: 1201418
agagccacacaaauacuca

SEQ ID NO: 1201420 - RNA, 19 nt, Artificial Sequence
  Description of Artificial Sequence: Synthetic oligonucleotide
  Sense strand starting at position 2407 of SEQ ID NO: 917009
guauuuguguggcucuuua

SEQ ID NO: 1201421 - RNA, 19 nt, Artificial Sequence
  Description of Artificial Sequence: Synthetic oligonucleotide
  Antisense strand to SEQ ID NO: 1201420
uaaagagccacacaaauac

SEQ ID NO: 1201422 - RNA, 19 nt, Artificial Sequence
  Description of Artificial Sequence: Synthetic oligonucleotide
  Sense strand starting at position 2555 of SEQ ID NO: 917009
auuagugacugagaaauga

SEQ ID NO: 1201423 - RNA, 19 nt, Artificial Sequence
  Description of Artificial Sequence: Synthetic oligonucleotide
  Antisense strand to SEQ ID NO: 1201422
ucauuucucagucacuaau

SEQ ID NO: 1201424 - RNA, 19 nt, Artificial Sequence
  Description of Artificial Sequence: Synthetic oligonucleotide
  Sense strand starting at position 2623 of SEQ ID NO: 917009
cacgcuugguaaccuuaau

SEQ ID NO: 1201425 - RNA, 19 nt, Artificial Sequence
  Description of Artificial Sequence: Synthetic oligonucleotide
  Antisense strand to SEQ ID NO: 1201424
auuaagguuaccaagcgug

SEQ ID NO: 1201426 - RNA, 19 nt, Artificial Sequence
  Description of Artificial Sequence: Synthetic oligonucleotide
  Sense strand starting at position 2646 of SEQ ID NO: 917009
cgacuuuaauaucuagaca

SEQ ID NO: 1201427 - RNA, 19 nt, Artificial Sequence
  Description of Artificial Sequence: Synthetic oligonucleotide
  Antisense strand to SEQ ID NO: 1201426
ugucuagauauuaaagucg

SEQ ID NO: 1201428 - RNA, 19 nt, Artificial Sequence
  Description of Artificial Sequence: Synthetic oligonucleotide
  Sense strand starting at position 2737 of SEQ ID NO: 917009
uaaggagauucuuugugcu

SEQ ID NO: 1201429 - RNA, 19 nt, Artificial Sequence
  Description of Artificial Sequence: Synthetic oligonucleotide
  Antisense strand to SEQ ID NO: 1201428
agcacaaagaaucuccuua

SEQ ID NO: 1201430 - RNA, 19 nt, Artificial Sequence
  Description of Artificial Sequence: Synthetic oligonucleotide
  Sense strand starting at position 2739 of SEQ ID NO: 917009
aggagauucuuugugcuac

SEQ ID NO: 1201431 - RNA, 19 nt, Artificial Sequence
  Description of Artificial Sequence: Synthetic oligonucleotide
  Antisense strand to SEQ ID NO: 1201430
guagcacaaagaaucuccu

SEQ ID NO: 1201432 - RNA, 19 nt, Artificial Sequence
  Description of Artificial Sequence: Synthetic oligonucleotide
  Sense strand starting at position 2741 of SEQ ID NO: 917009
gagauucuuugugcuacaa

SEQ ID NO: 1201433 - RNA, 19 nt, Artificial Sequence
  Description of Artificial Sequence: Synthetic oligonucleotide
  Antisense strand to SEQ ID NO: 1201432
uuguagcacaaagaaucuc

SEQ ID NO: 1201434 - RNA, 19 nt, Artificial Sequence
  Description of Artificial Sequence: Synthetic oligonucleotide
  Sense strand starting at position 2759 of SEQ ID NO: 917009
augugcuaaguauaggauu

SEQ ID NO: 1201435 - RNA, 19 nt, Artificial Sequence
  Description of Artificial Sequence: Synthetic oligonucleotide
  Antisense strand to SEQ ID NO: 1201434
aauccuauacuuagcacau

SEQ ID NO: 1201436 - RNA, 19 nt, Artificial Sequence
  Description of Artificial Sequence: Synthetic oligonucleotide
  Sense strand starting at position 2854 of SEQ ID NO: 917009
uuaacagcugauugggaua

SEQ ID NO: 1201437 - RNA, 19 nt, Artificial Sequence
  Description of Artificial Sequence: Synthetic oligonucleotide
  Antisense strand to SEQ ID NO: 1201436
uaucccaaucagcuguuaa

SEQ ID NO: 1201438 - RNA, 19 nt, Artificial Sequence
  Description of Artificial Sequence: Synthetic oligonucleotide
  Sense strand starting at position 2888 of SEQ ID NO: 917009
cugaaaucauaguugaggu

SEQ ID NO: 1201439 - RNA, 19 nt, Artificial Sequence
  Description of Artificial Sequence: Synthetic oligonucleotide
  Antisense strand to SEQ ID NO: 1201438
accucaacuaugauuucag

SEQ ID NO: 1201440 - RNA, 19 nt, Artificial Sequence
  Description of Artificial Sequence: Synthetic oligonucleotide
  Sense strand starting at position 2889 of SEQ ID NO: 917009
ugaaaucauaguugaggua

SEQ ID NO: 1201441 - RNA, 19 nt, Artificial Sequence
  Description of Artificial Sequence: Synthetic oligonucleotide
  Antisense strand to SEQ ID NO: 1201440
uaccucaacuaugauuuca

SEQ ID NO: 1201442 - RNA, 19 nt, Artificial Sequence
  Description of Artificial Sequence: Synthetic oligonucleotide
  Sense strand starting at position 2902 of SEQ ID NO: 917009
gagguaauaggucaaugua

SEQ ID NO: 1201443 - RNA, 19 nt, Artificial Sequence
  Description of Artificial Sequence: Synthetic oligonucleotide
  Antisense strand to SEQ ID NO: 1201442
uacauugaccuauuaccuc

SEQ ID NO: 1201444 - RNA, 19 nt, Artificial Sequence
  Description of Artificial Sequence: Synthetic oligonucleotide
  Sense strand starting at position 2905 of SEQ ID NO: 917009
guaauaggucaauguauca

SEQ ID NO: 1201445 - RNA, 19 nt, Artificial Sequence
  Description of Artificial Sequence: Synthetic oligonucleotide
  Antisense strand to SEQ ID NO: 1201444
ugauacauugaccuauuac

SEQ ID NO: 1201446 - RNA, 19 nt, Artificial Sequence
  Description of Artificial Sequence: Synthetic oligonucleotide
  Sense strand starting at position 2940 of SEQ ID NO: 917009
aacggaggcuuucuagaga

SEQ ID NO: 1201447 - RNA, 19 nt, Artificial Sequence
  Description of Artificial Sequence: Synthetic oligonucleotide
  Antisense strand to SEQ ID NO: 1201446
ucucuagaaagccuccguu

SEQ ID NO: 1201448 - RNA, 19 nt, Artificial Sequence
  Description of Artificial Sequence: Synthetic oligonucleotide
  Sense strand starting at position 3118 of SEQ ID NO: 917009
aagaguggccucuaauagu

SEQ ID NO: 1201449 - RNA, 19 nt, Artificial Sequence
  Description of Artificial Sequence: Synthetic oligonucleotide
  Antisense strand to SEQ ID NO: 1201448
acuauuagaggccacucuu

SEQ ID NO: 1201450 - RNA, 19 nt, Artificial Sequence
  Description of Artificial Sequence: Synthetic oligonucleotide
  Sense strand starting at position 3124 of SEQ ID NO: 917009
ggccucuaauaguagauuu

SEQ ID NO: 1201451 - RNA, 19 nt, Artificial Sequence
  Description of Artificial Sequence: Synthetic oligonucleotide
  Antisense strand to SEQ ID NO: 1201450
aaaucuacuauuagaggcc

SEQ ID NO: 1201452 - RNA, 19 nt, Artificial Sequence
  Description of Artificial Sequence: Synthetic oligonucleotide
  Sense strand starting at position 3259 of SEQ ID NO: 917009
guaucagagugcuccauga

SEQ ID NO: 1201453 - RNA, 19 nt, Artificial Sequence
  Description of Artificial Sequence: Synthetic oligonucleotide
  Antisense strand to SEQ ID NO: 1201452
ucauggagcacucugauac

SEQ ID NO: 1201454 - RNA, 19 nt, Artificial Sequence
  Description of Artificial Sequence: Synthetic oligonucleotide
  Sense strand starting at position 3263 of SEQ ID NO: 917009
cagagugcuccaugaccau

SEQ ID NO: 1201455 - RNA, 19 nt, Artificial Sequence
  Description of Artificial Sequence: Synthetic oligonucleotide
  Antisense strand to SEQ ID NO: 1201454
auggucauggagcacucug

SEQ ID NO: 1201456 - RNA, 19 nt, Artificial Sequence
  Description of Artificial Sequence: Synthetic oligonucleotide
  Sense strand starting at position 3351 of SEQ ID NO: 917009
aaaguaggauuccugguua

SEQ ID NO: 1201457 - RNA, 19 nt, Artificial Sequence
  Description of Artificial Sequence: Synthetic oligonucleotide
  Antisense strand to SEQ ID NO: 1201456
uaaccaggaauccuacuuu

SEQ ID NO: 1201458 - RNA, 19 nt, Artificial Sequence
  Description of Artificial Sequence: Synthetic oligonucleotide
  Sense strand starting at position 3355 of SEQ ID NO: 917009
uaggauuccugguuaccua

SEQ ID NO: 1201459 - RNA, 19 nt, Artificial Sequence
  Description of Artificial Sequence: Synthetic oligonucleotide
  Antisense strand to SEQ ID NO: 1201458
uagguaaccaggaauccua

SEQ ID NO: 1201460 - RNA, 19 nt, Artificial Sequence
  Description of Artificial Sequence: Synthetic oligonucleotide
  Sense strand starting at position 3392 of SEQ ID NO: 917009
guggcaucuuuauucuauu

SEQ ID NO: 1201461 - RNA, 19 nt, Artificial Sequence
  Description of Artificial Sequence: Synthetic oligonucleotide
  Antisense strand to SEQ ID NO: 1201460
aauagaauaaagaugccac

SEQ ID NO: 1201462 - RNA, 19 nt, Artificial Sequence
  Description of Artificial Sequence: Synthetic oligonucleotide
  Sense strand starting at position 3411 of SEQ ID NO: 917009
uugcucagaugacaaauuu

SEQ ID NO: 1201463 - RNA, 19 nt, Artificial Sequence
  Description of Artificial Sequence: Synthetic oligonucleotide
  Antisense strand to SEQ ID NO: 1201462
aaauuugucaucugagcaa

SEQ ID NO: 1201464 - RNA, 19 nt, Artificial Sequence
  Description of Artificial Sequence: Synthetic oligonucleotide
  Sense strand starting at position 3420 of SEQ ID NO: 917009
ugacaaauuugagauugac

SEQ ID NO: 1201465 - RNA, 19 nt, Artificial Sequence
  Description of Artificial Sequence: Synthetic oligonucleotide
  Antisense strand to SEQ ID NO: 1201464
gucaaucucaaauuuguca

SEQ ID NO: 1201466 - RNA, 19 nt, Artificial Sequence
  Description of Artificial Sequence: Synthetic oligonucleotide
  Sense strand starting at position 3907 of SEQ ID NO: 917009
gagagagguuuacauugau

SEQ ID NO: 1201467 - RNA, 19 nt, Artificial Sequence
  Description of Artificial Sequence: Synthetic oligonucleotide
  Antisense strand to SEQ ID NO: 1201466
aucaauguaaaccucucuc

SEQ ID NO: 1201468 - RNA, 19 nt, Artificial Sequence
  Description of Artificial Sequence: Synthetic oligonucleotide
  Sense strand starting at position 3910 of SEQ ID NO: 917009
agagguuuacauugauaug

SEQ ID NO: 1201469 - RNA, 19 nt, Artificial Sequence
  Description of Artificial Sequence: Synthetic oligonucleotide
  Antisense strand to SEQ ID NO: 1201468
cauaucaauguaaaccucu

SEQ ID NO: 1201470 - RNA, 19 nt, Artificial Sequence
  Description of Artificial Sequence: Synthetic oligonucleotide
  Sense strand starting at position 56 of SEQ ID NO: 917010
gaccauuucucagagcaug

SEQ ID NO: 1201471 - RNA, 19 nt, Artificial Sequence
  Description of Artificial Sequence: Synthetic oligonucleotide
  Antisense strand to SEQ ID NO: 1201470
caugcucugagaaaugguc

SEQ ID NO: 1201472 - RNA, 19 nt, Artificial Sequence
  Description of Artificial Sequence: Synthetic oligonucleotide
  Sense strand starting at position 280 of SEQ ID NO: 917010
uacagaauguggcuaauua

SEQ ID NO: 1201473 - RNA, 19 nt, Artificial Sequence
  Description of Artificial Sequence: Synthetic oligonucleotide
  Antisense strand to SEQ ID NO: 1201472
uaauuagccacauucugua

SEQ ID NO: 1201474 - RNA, 19 nt, Artificial Sequence
  Description of Artificial Sequence: Synthetic oligonucleotide
  Sense strand starting at position 281 of SEQ ID NO: 917010
acagaauguggcuaauuac

SEQ ID NO: 1201475 - RNA, 19 nt, Artificial Sequence
  Description of Artificial Sequence: Synthetic oligonucleotide
  Antisense strand to SEQ ID NO: 1201474
guaauuagccacauucugu

SEQ ID NO: 1201476 - RNA, 19 nt, Artificial Sequence
  Description of Artificial Sequence: Synthetic oligonucleotide
  Sense strand starting at position 290 of SEQ ID NO: 917010
ggcuaauuacgacgagaag

SEQ ID NO: 1201477 - RNA, 19 nt, Artificial Sequence
  Description of Artificial Sequence: Synthetic oligonucleotide
  Antisense strand to SEQ ID NO: 1201476
cuucucgucguaauuagcc

SEQ ID NO: 1201478 - RNA, 19 nt, Artificial Sequence
  Description of Artificial Sequence: Synthetic oligonucleotide
  Sense strand starting at position 291 of SEQ ID NO: 917010
gcuaauuacgacgagaaga

SEQ ID NO: 1201479 - RNA, 19 nt, Artificial Sequence
  Description of Artificial Sequence: Synthetic oligonucleotide
  Antisense strand to SEQ ID NO: 1201478
ucuucucgucguaauuagc

SEQ ID NO: 1201480 - RNA, 19 nt, Artificial Sequence
  Description of Artificial Sequence: Synthetic oligonucleotide
  Sense strand starting at position 671 of SEQ ID NO: 917010
ccaacacaacggugacauu

SEQ ID NO: 1201481 - RNA, 19 nt, Artificial Sequence
  Description of Artificial Sequence: Synthetic oligonucleotide
  Antisense strand to SEQ ID NO: 1201480
aaugucaccguuguguugg

SEQ ID NO: 1201482 - RNA, 19 nt, Artificial Sequence
  Description of Artificial Sequence: Synthetic oligonucleotide
  Sense strand starting at position 701 of SEQ ID NO: 917010
gaugcaguuucuuugacaa

SEQ ID NO: 1201483 - RNA, 19 nt, Artificial Sequence
  Description of Artificial Sequence: Synthetic oligonucleotide
  Antisense strand to SEQ ID NO: 1201482
uugucaaagaaacugcauc

SEQ ID NO: 1201484 - RNA, 19 nt, Artificial Sequence
  Description of Artificial Sequence: Synthetic oligonucleotide
  Sense strand starting at position 879 of SEQ ID NO: 917010
ugcccaauggauuggugaa

SEQ ID NO: 1201485 - RNA, 19 nt, Artificial Sequence
  Description of Artificial Sequence: Synthetic oligonucleotide
  Antisense strand to SEQ ID NO: 1201484
uucaccaauccauugggca

SEQ ID NO: 1201486 - RNA, 19 nt, Artificial Sequence
  Description of Artificial Sequence: Synthetic oligonucleotide
  Sense strand starting at position 1328 of SEQ ID NO: 917010
cgguguuugauuuaggugu

SEQ ID NO: 1201487 - RNA, 19 nt, Artificial Sequence
  Description of Artificial Sequence: Synthetic oligonucleotide
  Antisense strand to SEQ ID NO: 1201486
acaccuaaaucaaacaccg

SEQ ID NO: 1201488 - RNA, 19 nt, Artificial Sequence
  Description of Artificial Sequence: Synthetic oligonucleotide
  Sense strand starting at position 1332 of SEQ ID NO: 917010
guuugauuuagguguuaau

SEQ ID NO: 1201489 - RNA, 19 nt, Artificial Sequence
  Description of Artificial Sequence: Synthetic oligonucleotide
  Antisense strand to SEQ ID NO: 1201488
auuaacaccuaaaucaaac

SEQ ID NO: 1201490 - RNA, 19 nt, Artificial Sequence
  Description of Artificial Sequence: Synthetic oligonucleotide
  Sense strand starting at position 1348 of SEQ ID NO: 917010
aauguuuacgugucgccua

SEQ ID NO: 1201491 - RNA, 19 nt, Artificial Sequence
  Description of Artificial Sequence: Synthetic oligonucleotide
  Antisense strand to SEQ ID NO: 1201490
uaggcgacacguaaacauu

SEQ ID NO: 1201492 - RNA, 19 nt, Artificial Sequence
  Description of Artificial Sequence: Synthetic oligonucleotide
  Sense strand starting at position 1350 of SEQ ID NO: 917010
uguuuacgugucgccuaaa

SEQ ID NO: 1201493 - RNA, 19 nt, Artificial Sequence
  Description of Artificial Sequence: Synthetic oligonucleotide
  Antisense strand to SEQ ID NO: 1201492
uuuaggcgacacguaaaca

SEQ ID NO: 1201494 - RNA, 19 nt, Artificial Sequence
  Description of Artificial Sequence: Synthetic oligonucleotide
  Sense strand starting at position 1380 of SEQ ID NO: 917010
ugaaccaguuccuccaaga

SEQ ID NO: 1201495 - RNA, 19 nt, Artificial Sequence
  Description of Artificial Sequence: Synthetic oligonucleotide
  Antisense strand to SEQ ID NO: 1201494
ucuuggaggaacugguuca

SEQ ID NO: 1201496 - RNA, 19 nt, Artificial Sequence
  Description of Artificial Sequence: Synthetic oligonucleotide
  Sense strand starting at position 1409 of SEQ ID NO: 917010
gccuuaaagagggaagcuu

SEQ ID NO: 1201497 - RNA, 19 nt, Artificial Sequence
  Description of Artificial Sequence: Synthetic oligonucleotide
  Antisense strand to SEQ ID NO: 1201496
aagcuucccucuuuaaggc

SEQ ID NO: 1201498 - RNA, 19 nt, Artificial Sequence
  Description of Artificial Sequence: Synthetic oligonucleotide
  Sense strand starting at position 2698 of SEQ ID NO: 917010
gcagcuucgguugucacaa

SEQ ID NO: 1201499 - RNA, 19 nt, Artificial Sequence
  Description of Artificial Sequence: Synthetic oligonucleotide
  Antisense strand to SEQ ID NO: 1201498
uugugacaaccgaagcugc

SEQ ID NO: 1201500 - RNA, 19 nt, Artificial Sequence
  Description of Artificial Sequence: Synthetic oligonucleotide
  Sense strand starting at position 2835 of SEQ ID NO: 917010
gccacaaugucaguggaaa

SEQ ID NO: 1201501 - RNA, 19 nt, Artificial Sequence
  Description of Artificial Sequence: Synthetic oligonucleotide
  Antisense strand to SEQ ID NO: 1201500
uuuccacugacauuguggc

SEQ ID NO: 1201502 - RNA, 19 nt, Artificial Sequence
  Description of Artificial Sequence: Synthetic oligonucleotide
  Sense strand starting at position 2836 of SEQ ID NO: 917010
ccacaaugucaguggaaag

SEQ ID NO: 1201503 - RNA, 19 nt, Artificial Sequence
  Description of Artificial Sequence: Synthetic oligonucleotide
  Antisense strand to SEQ ID NO: 1201502
cuuuccacugacauugugg

SEQ ID NO: 1201504 - RNA, 19 nt, Artificial Sequence
  Description of Artificial Sequence: Synthetic oligonucleotide
  Sense strand starting at position 2865 of SEQ ID NO: 917010
agagaaacguuuccuccuu

SEQ ID NO: 1201505 - RNA, 19 nt, Artificial Sequence
  Description of Artificial Sequence: Synthetic oligonucleotide
  Antisense strand to SEQ ID NO: 1201504
aaggaggaaacguuucucu

SEQ ID NO: 1201506 - RNA, 19 nt, Artificial Sequence
  Description of Artificial Sequence: Synthetic oligonucleotide
  Sense strand starting at position 2984 of SEQ ID NO: 917010
ucggguugacccugagaac

SEQ ID NO: 1201507 - RNA, 19 nt, Artificial Sequence
  Description of Artificial Sequence: Synthetic oligonucleotide
  Antisense strand to SEQ ID NO: 1201506
guucucagggucaacccga

SEQ ID NO: 1201508 - RNA, 19 nt, Artificial Sequence
  Description of Artificial Sequence: Synthetic oligonucleotide
  Sense strand starting at position 2985 of SEQ ID NO: 917010
cggguugacccugagaaca

SEQ ID NO: 1201509 - RNA, 19 nt, Artificial Sequence
  Description of Artificial Sequence: Synthetic oligonucleotide
  Antisense strand to SEQ ID NO: 1201508
uguucucagggucaacccg

SEQ ID NO: 1201510 - RNA, 19 nt, Artificial Sequence
  Description of Artificial Sequence: Synthetic oligonucleotide
  Sense strand starting at position 3119 of SEQ ID NO: 917010
cauggugaaauauggugua

SEQ ID NO: 1201511 - RNA, 19 nt, Artificial Sequence
  Description of Artificial Sequence: Synthetic oligonucleotide
  Antisense strand to SEQ ID NO: 1201510
uacaccauauuucaccaug

SEQ ID NO: 1201512 - RNA, 19 nt, Artificial Sequence
  Description of Artificial Sequence: Synthetic oligonucleotide
  Sense strand starting at position 3136 of SEQ ID NO: 917010
uagaauggucuguguagaa

SEQ ID NO: 1201513 - RNA, 19 nt, Artificial Sequence
  Description of Artificial Sequence: Synthetic oligonucleotide
  Antisense strand to SEQ ID NO: 1201512
uucuacacagaccauucua

SEQ ID NO: 1201514 - RNA, 19 nt, Artificial Sequence
  Description of Artificial Sequence: Synthetic oligonucleotide
  Sense strand starting at position 3152 of SEQ ID NO: 917010
gaacaagcucuggguacua

SEQ ID NO: 1201515 - RNA, 19 nt, Artificial Sequence
  Description of Artificial Sequence: Synthetic oligonucleotide
  Antisense strand to SEQ ID NO: 1201514
uaguacccagagcuuguuc

SEQ ID NO: 1201516 - RNA, 19 nt, Artificial Sequence
  Description of Artificial Sequence: Synthetic oligonucleotide
  Sense strand starting at position 3154 of SEQ ID NO: 917010
acaagcucuggguacuaaa

SEQ ID NO: 1201517 - RNA, 19 nt, Artificial Sequence
  Description of Artificial Sequence: Synthetic oligonucleotide
  Antisense strand to SEQ ID NO: 1201516
uuuaguacccagagcuugu

SEQ ID NO: 1201518 - RNA, 19 nt, Artificial Sequence
  Description of Artificial Sequence: Synthetic oligonucleotide
  Sense strand starting at position 3163 of SEQ ID NO: 917010
ggguacuaaaguugcaaga

SEQ ID NO: 1201519 - RNA, 19 nt, Artificial Sequence
  Description of Artificial Sequence: Synthetic oligonucleotide
  Antisense strand to SEQ ID NO: 1201518
ucuugcaacuuuaguaccc

SEQ ID NO: 1201520 - RNA, 19 nt, Artificial Sequence
  Description of Artificial Sequence: Synthetic oligonucleotide
  Sense strand starting at position 3227 of SEQ ID NO: 917010
uggcuuucuggccaggaga

SEQ ID NO: 1201521 - RNA, 19 nt, Artificial Sequence
  Description of Artificial Sequence: Synthetic oligonucleotide
  Antisense strand to SEQ ID NO: 1201520
ucuccuggccagaaagcca

SEQ ID NO: 1201522 - RNA, 19 nt, Artificial Sequence
  Description of Artificial Sequence: Synthetic oligonucleotide
  Sense strand starting at position 3230 of SEQ ID NO: 917010
cuuucuggccaggagagua

SEQ ID NO: 1201523 - RNA, 19 nt, Artificial Sequence
  Description of Artificial Sequence: Synthetic oligonucleotide
  Antisense strand to SEQ ID NO: 1201522
uacucuccuggccagaaag

SEQ ID NO: 1201524 - RNA, 19 nt, Artificial Sequence
  Description of Artificial Sequence: Synthetic oligonucleotide
  Sense strand starting at position 3420 of SEQ ID NO: 917010
agcaguggccuggaaagaa

SEQ ID NO: 1201525 - RNA, 19 nt, Artificial Sequence
  Description of Artificial Sequence: Synthetic oligonucleotide
  Antisense strand to SEQ ID NO: 1201524
uucuuuccaggccacugcu

SEQ ID NO: 1201526 - RNA, 19 nt, Artificial Sequence
  Description of Artificial Sequence: Synthetic oligonucleotide
  Sense strand starting at position 3451 of SEQ ID NO: 917010
ugggcuucuguagaacaaa

SEQ ID NO: 1201527 - RNA, 19 nt, Artificial Sequence
  Description of Artificial Sequence: Synthetic oligonucleotide
  Antisense strand to SEQ ID NO: 1201526
uuuguucuacagaagccca

SEQ ID NO: 1201528 - RNA, 19 nt, Artificial Sequence
  Description of Artificial Sequence: Synthetic oligonucleotide
  Sense strand starting at position 3626 of SEQ ID NO: 917010
ggaauuaugucuuuacagg

SEQ ID NO: 1201529 - RNA, 19 nt, Artificial Sequence
  Description of Artificial Sequence: Synthetic oligonucleotide
  Antisense strand to SEQ ID NO: 1201528
ccuguaaagacauaauucc

SEQ ID NO: 1201530 - RNA, 19 nt, Artificial Sequence
  Description of Artificial Sequence: Synthetic oligonucleotide
  Sense strand starting at position 3627 of SEQ ID NO: 917010
gaauuaugucuuuacaggu

SEQ ID NO: 1201531 - RNA, 19 nt, Artificial Sequence
  Description of Artificial Sequence: Synthetic oligonucleotide
  Antisense strand to SEQ ID NO: 1201530
accuguaaagacauaauuc

SEQ ID NO: 1201532 - RNA, 19 nt, Artificial Sequence
  Description of Artificial Sequence: Synthetic oligonucleotide
  Sense strand starting at position 3786 of SEQ ID NO: 917010
uguauaugguguccuagaa

SEQ ID NO: 1201533 - RNA, 19 nt, Artificial Sequence
  Description of Artificial Sequence: Synthetic oligonucleotide
  Antisense strand to SEQ ID NO: 1201532
uucuaggacaccauauaca

SEQ ID NO: 1201534 - RNA, 19 nt, Artificial Sequence
  Description of Artificial Sequence: Synthetic oligonucleotide
  Sense strand starting at position 3790 of SEQ ID NO: 917010
uaugguguccuagaacacu

SEQ ID NO: 1201535 - RNA, 19 nt, Artificial Sequence
  Description of Artificial Sequence: Synthetic oligonucleotide
  Antisense strand to SEQ ID NO: 1201534
aguguucuaggacaccaua

SEQ ID NO: 1201536 - RNA, 19 nt, Artificial Sequence
  Description of Artificial Sequence: Synthetic oligonucleotide
  Sense strand starting at position 3829 of SEQ ID NO: 917010
gggaucagauguuuaaguu

SEQ ID NO: 1201537 - RNA, 19 nt, Artificial Sequence
  Description of Artificial Sequence: Synthetic oligonucleotide
  Antisense strand to SEQ ID NO: 1201536
aacuuaaacaucugauccc

SEQ ID NO: 1201538 - RNA, 19 nt, Artificial Sequence
  Description of Artificial Sequence: Synthetic oligonucleotide
  Sense strand starting at position 3830 of SEQ ID NO: 917010
ggaucagauguuuaaguuu

SEQ ID NO: 1201539 - RNA, 19 nt, Artificial Sequence
  Description of Artificial Sequence: Synthetic oligonucleotide
  Antisense strand to SEQ ID NO: 1201538
aaacuuaaacaucugaucc

SEQ ID NO: 1201540 - RNA, 19 nt, Artificial Sequence
  Description of Artificial Sequence: Synthetic oligonucleotide
  Sense strand starting at position 3862 of SEQ ID NO: 917010
gcuauuacuauuugggcga

SEQ ID NO: 1201541 - RNA, 19 nt, Artificial Sequence
  Description of Artificial Sequence: Synthetic oligonucleotide
  Antisense strand to SEQ ID NO: 1201540
ucgcccaaauaguaauagc

SEQ ID NO: 1201542 - RNA, 19 nt, Artificial Sequence
  Description of Artificial Sequence: Synthetic oligonucleotide
  Sense strand starting at position 3866 of SEQ ID NO: 917010
uuacuauuugggcgaucuu

SEQ ID NO: 1201543 - RNA, 19 nt, Artificial Sequence
  Description of Artificial Sequence: Synthetic oligonucleotide
  Antisense strand to SEQ ID NO: 1201542
aagaucgcccaaauaguaa

SEQ ID NO: 1201544 - RNA, 19 nt, Artificial Sequence
  Description of Artificial Sequence: Synthetic oligonucleotide
  Sense strand starting at position 3951 of SEQ ID NO: 917010
uuaucuuaugaguacuguu

SEQ ID NO: 1201545 - RNA, 19 nt, Artificial Sequence
  Description of Artificial Sequence: Synthetic oligonucleotide
  Antisense strand to SEQ ID NO: 1201544
aacaguacucauaagauaa

SEQ ID NO: 1201546 - RNA, 19 nt, Artificial Sequence
  Description of Artificial Sequence: Synthetic oligonucleotide
  Sense strand starting at position 3959 of SEQ ID NO: 917010
ugaguacuguuauuaugag

SEQ ID NO: 1201547 - RNA, 19 nt, Artificial Sequence
  Description of Artificial Sequence: Synthetic oligonucleotide
  Antisense strand to SEQ ID NO: 1201546
cucauaauaacaguacuca

SEQ ID NO: 1201548 - RNA, 19 nt, Artificial Sequence
  Description of Artificial Sequence: Synthetic oligonucleotide
  Sense strand starting at position 3977 of SEQ ID NO: 917010
guauuaaaguaguuaaccu

SEQ ID NO: 1201549 - RNA, 19 nt, Artificial Sequence
  Description of Artificial Sequence: Synthetic oligonucleotide
  Antisense strand to SEQ ID NO: 1201548
agguuaacuacuuuaauac

SEQ ID NO: 1201550 - RNA, 19 nt, Artificial Sequence
  Description of Artificial Sequence: Synthetic oligonucleotide
  Sense strand starting at position 78 of SEQ ID NO: 917011
cugcauucucaggaugucu

SEQ ID NO: 1201551 - RNA, 19 nt, Artificial Sequence
  Description of Artificial Sequence: Synthetic oligonucleotide
  Antisense strand to SEQ ID NO: 1201550
agacauccugagaaugcag

SEQ ID NO: 1201552 - RNA, 19 nt, Artificial Sequence
  Description of Artificial Sequence: Synthetic oligonucleotide
  Sense strand starting at position 230 of SEQ ID NO: 917011
ggacgucugcucguucuca

SEQ ID NO: 1201553 - RNA, 19 nt, Artificial Sequence
  Description of Artificial Sequence: Synthetic oligonucleotide
  Antisense strand to SEQ ID NO: 1201552
ugagaacgagcagacgucc

SEQ ID NO: 1201554 - RNA, 19 nt, Artificial Sequence
  Description of Artificial Sequence: Synthetic oligonucleotide
  Sense strand starting at position 329 of SEQ ID NO: 917011
uggcaaugugaagaaguua

SEQ ID NO: 1201555 - RNA, 19 nt, Artificial Sequence
  Description of Artificial Sequence: Synthetic oligonucleotide
  Antisense strand to SEQ ID NO: 1201554
uaacuucuucacauugcca

SEQ ID NO: 1201556 - RNA, 19 nt, Artificial Sequence
  Description of Artificial Sequence: Synthetic oligonucleotide
  Sense strand starting at position 337 of SEQ ID NO: 917011
ugaagaaguuacucuauau

SEQ ID NO: 1201557 - RNA, 19 nt, Artificial Sequence
  Description of Artificial Sequence: Synthetic oligonucleotide
  Antisense strand to SEQ ID NO: 1201556
auauagaguaacuucuuca

SEQ ID NO: 1201558 - RNA, 19 nt, Artificial Sequence
  Description of Artificial Sequence: Synthetic oligonucleotide
  Sense strand starting at position 712 of SEQ ID NO: 917011
auugguuucccagaauguc

SEQ ID NO: 1201559 - RNA, 19 nt, Artificial Sequence
  Description of Artificial Sequence: Synthetic oligonucleotide
  Antisense strand to SEQ ID NO: 1201558
gacauucugggaaaccaau

SEQ ID NO: 1201560 - RNA, 19 nt, Artificial Sequence
  Description of Artificial Sequence: Synthetic oligonucleotide
  Sense strand starting at position 1144 of SEQ ID NO: 917011
agcacugguccagauaguu

SEQ ID NO: 1201561 - RNA, 19 nt, Artificial Sequence
  Description of Artificial Sequence: Synthetic oligonucleotide
  Antisense strand to SEQ ID NO: 1201560
aacuaucuggaccagugcu

SEQ ID NO: 1201562 - RNA, 19 nt, Artificial Sequence
  Description of Artificial Sequence: Synthetic oligonucleotide
  Sense strand starting at position 1149 of SEQ ID NO: 917011
ugguccagauaguuggaaa

SEQ ID NO: 1201563 - RNA, 19 nt, Artificial Sequence
  Description of Artificial Sequence: Synthetic oligonucleotide
  Antisense strand to SEQ ID NO: 1201562
uuuccaacuaucuggacca

SEQ ID NO: 1201564 - RNA, 19 nt, Artificial Sequence
  Description of Artificial Sequence: Synthetic oligonucleotide
  Sense strand starting at position 1150 of SEQ ID NO: 917011
gguccagauaguuggaaau

SEQ ID NO: 1201565 - RNA, 19 nt, Artificial Sequence
  Description of Artificial Sequence: Synthetic oligonucleotide
  Antisense strand to SEQ ID NO: 1201564
auuuccaacuaucuggacc

SEQ ID NO: 1201566 - RNA, 19 nt, Artificial Sequence
  Description of Artificial Sequence: Synthetic oligonucleotide
  Sense strand starting at position 1184 of SEQ ID NO: 917011
gucuacagcuucuuaggaa

SEQ ID NO: 1201567 - RNA, 19 nt, Artificial Sequence
  Description of Artificial Sequence: Synthetic oligonucleotide
  Antisense strand to SEQ ID NO: 1201566
uuccuaagaagcuguagac

SEQ ID NO: 1201568 - RNA, 19 nt, Artificial Sequence
  Description of Artificial Sequence: Synthetic oligonucleotide
  Sense strand starting at position 1202 of SEQ ID NO: 917011
aaguuagguagagauguau

SEQ ID NO: 1201569 - RNA, 19 nt, Artificial Sequence
  Description of Artificial Sequence: Synthetic oligonucleotide
  Antisense strand to SEQ ID NO: 1201568
auacaucucuaccuaacuu

SEQ ID NO: 1201570 - RNA, 19 nt, Artificial Sequence
  Description of Artificial Sequence: Synthetic oligonucleotide
  Sense strand starting at position 1231 of SEQ ID NO: 917011
caugauugugagcagacga

SEQ ID NO: 1201571 - RNA, 19 nt, Artificial Sequence
  Description of Artificial Sequence: Synthetic oligonucleotide
  Antisense strand to SEQ ID NO: 1201570
ucgucugcucacaaucaug

SEQ ID NO: 1201572 - RNA, 19 nt, Artificial Sequence
  Description of Artificial Sequence: Synthetic oligonucleotide
  Sense strand starting at position 1270 of SEQ ID NO: 917011
acgaguaagagugguaaac

SEQ ID NO: 1201573 - RNA, 19 nt, Artificial Sequence
  Description of Artificial Sequence: Synthetic oligonucleotide
  Antisense strand to SEQ ID NO: 1201572
guuuaccacucuuacucgu

SEQ ID NO: 1201574 - RNA, 19 nt, Artificial Sequence
  Description of Artificial Sequence: Synthetic oligonucleotide
  Sense strand starting at position 1350 of SEQ ID NO: 917011
acaggugaguccuuggauc

SEQ ID NO: 1201575 - RNA, 19 nt, Artificial Sequence
  Description of Artificial Sequence: Synthetic oligonucleotide
  Antisense strand to SEQ ID NO: 1201574
gauccaaggacucaccugu

SEQ ID NO: 1201576 - RNA, 19 nt, Artificial Sequence
  Description of Artificial Sequence: Synthetic oligonucleotide
  Sense strand starting at position 1568 of SEQ ID NO: 917011
cggcucucacucuaacuau

SEQ ID NO: 1201577 - RNA, 19 nt, Artificial Sequence
  Description of Artificial Sequence: Synthetic oligonucleotide
  Antisense strand to SEQ ID NO: 1201576
auaguuagagugagagccg

SEQ ID NO: 1201578 - RNA, 19 nt, Artificial Sequence
  Description of Artificial Sequence: Synthetic oligonucleotide
  Sense strand starting at position 2065 of SEQ ID NO: 917011
agaacugcacucugggauu

SEQ ID NO: 1201579 - RNA, 19 nt, Artificial Sequence
  Description of Artificial Sequence: Synthetic oligonucleotide
  Antisense strand to SEQ ID NO: 1201578
aaucccagagugcaguucu

SEQ ID NO: 1201580 - RNA, 19 nt, Artificial Sequence
  Description of Artificial Sequence: Synthetic oligonucleotide
  Sense strand starting at position 2081 of SEQ ID NO: 917011
auuugaaguccucguucca

SEQ ID NO: 1201581 - RNA, 19 nt, Artificial Sequence
  Description of Artificial Sequence: Synthetic oligonucleotide
  Antisense strand to SEQ ID NO: 1201580
uggaacgaggacuucaaau

SEQ ID NO: 1201582 - RNA, 19 nt, Artificial Sequence
  Description of Artificial Sequence: Synthetic oligonucleotide
  Sense strand starting at position 2191 of SEQ ID NO: 917011
ccuggcauccgggaucuua

SEQ ID NO: 1201583 - RNA, 19 nt, Artificial Sequence
  Description of Artificial Sequence: Synthetic oligonucleotide
  Antisense strand to SEQ ID NO: 1201582
uaagaucccggaugccagg

SEQ ID NO: 1201584 - RNA, 19 nt, Artificial Sequence
  Description of Artificial Sequence: Synthetic oligonucleotide
  Sense strand starting at position 2349 of SEQ ID NO: 917011
ggugguugcgguagugaga

SEQ ID NO: 1201585 - RNA, 19 nt, Artificial Sequence
  Description of Artificial Sequence: Synthetic oligonucleotide
  Antisense strand to SEQ ID NO: 1201584
ucucacuaccgcaaccacc

SEQ ID NO: 1201586 - RNA, 19 nt, Artificial Sequence
  Description of Artificial Sequence: Synthetic oligonucleotide
  Sense strand starting at position 2404 of SEQ ID NO: 917011
ggauccuuguaagcaggau

SEQ ID NO: 1201587 - RNA, 19 nt, Artificial Sequence
  Description of Artificial Sequence: Synthetic oligonucleotide
  Antisense strand to SEQ ID NO: 1201586
auccugcuuacaaggaucc

SEQ ID NO: 1201588 - RNA, 19 nt, Artificial Sequence
  Description of Artificial Sequence: Synthetic oligonucleotide
  Sense strand starting at position 2605 of SEQ ID NO: 917011
ccaaaucagggaugauugu

SEQ ID NO: 1201589 - RNA, 19 nt, Artificial Sequence
  Description of Artificial Sequence: Synthetic oligonucleotide
  Antisense strand to SEQ ID NO: 1201588
acaaucaucccugauuugg

SEQ ID NO: 1201590 - RNA, 19 nt, Artificial Sequence
  Description of Artificial Sequence: Synthetic oligonucleotide
  Sense strand starting at position 2725 of SEQ ID NO: 917011
agauuaguguuagcaagga

SEQ ID NO: 1201591 - RNA, 19 nt, Artificial Sequence
  Description of Artificial Sequence: Synthetic oligonucleotide
  Antisense strand to SEQ ID NO: 1201590
uccuugcuaacacuaaucu

SEQ ID NO: 1201592 - RNA, 19 nt, Artificial Sequence
  Description of Artificial Sequence: Synthetic oligonucleotide
  Sense strand starting at position 2911 of SEQ ID NO: 917011
ccaauaauacuguguaccu

SEQ ID NO: 1201593 - RNA, 19 nt, Artificial Sequence
  Description of Artificial Sequence: Synthetic oligonucleotide
  Antisense strand to SEQ ID NO: 1201592
agguacacaguauuauugg

SEQ ID NO: 1201594 - RNA, 19 nt, Artificial Sequence
  Description of Artificial Sequence: Synthetic oligonucleotide
  Sense strand starting at position 3093 of SEQ ID NO: 917011
ugcuuaauuggucaauaau

SEQ ID NO: 1201595 - RNA, 19 nt, Artificial Sequence
  Description of Artificial Sequence: Synthetic oligonucleotide
  Antisense strand to SEQ ID NO: 1201594
auuauugaccaauuaagca

SEQ ID NO: 1201596 - RNA, 19 nt, Artificial Sequence
  Description of Artificial Sequence: Synthetic oligonucleotide
  Sense strand starting at position 3254 of SEQ ID NO: 917011
guuuacuuagguggaagua

SEQ ID NO: 1201597 - RNA, 19 nt, Artificial Sequence
  Description of Artificial Sequence: Synthetic oligonucleotide
  Antisense strand to SEQ ID NO: 1201596
uacuuccaccuaaguaaac

SEQ ID NO: 1201598 - RNA, 19 nt, Artificial Sequence
  Description of Artificial Sequence: Synthetic oligonucleotide
  Sense strand starting at position 3334 of SEQ ID NO: 917011
uaaugaagguuuguaugua

SEQ ID NO: 1201599 - RNA, 19 nt, Artificial Sequence
  Description of Artificial Sequence: Synthetic oligonucleotide
  Antisense strand to SEQ ID NO: 1201598
uacauacaaaccuucauua

SEQ ID NO: 1201600 - RNA, 19 nt, Artificial Sequence
  Description of Artificial Sequence: Synthetic oligonucleotide
  Sense strand starting at position 3363 of SEQ ID NO: 917011
acuauagguuuggcuauua

SEQ ID NO: 1201601 - RNA, 19 nt, Artificial Sequence
  Description of Artificial Sequence: Synthetic oligonucleotide
  Antisense strand to SEQ ID NO: 1201600
uaauagccaaaccuauagu

SEQ ID NO: 1201602 - RNA, 19 nt, Artificial Sequence
  Description of Artificial Sequence: Synthetic oligonucleotide
  Sense strand starting at position 3372 of SEQ ID NO: 917011
uuggcuauuaguggaacua

SEQ ID NO: 1201603 - RNA, 19 nt, Artificial Sequence
  Description of Artificial Sequence: Synthetic oligonucleotide
  Antisense strand to SEQ ID NO: 1201602
uaguuccacuaauagccaa

SEQ ID NO: 1201604 - RNA, 19 nt, Artificial Sequence
  Description of Artificial Sequence: Synthetic oligonucleotide
  Sense strand starting at position 3373 of SEQ ID NO: 917011
uggcuauuaguggaacuau

SEQ ID NO: 1201605 - RNA, 19 nt, Artificial Sequence
  Description of Artificial Sequence: Synthetic oligonucleotide
  Antisense strand to SEQ ID NO: 1201604
auaguuccacuaauagcca

SEQ ID NO: 1201606 - RNA, 19 nt, Artificial Sequence
  Description of Artificial Sequence: Synthetic oligonucleotide
  Sense strand starting at position 3409 of SEQ ID NO: 917011
uaagguaaucuuugugaaa

SEQ ID NO: 1201607 - RNA, 19 nt, Artificial Sequence
  Description of Artificial Sequence: Synthetic oligonucleotide
  Antisense strand to SEQ ID NO: 1201606
uuucacaaagauuaccuua

SEQ ID NO: 1201608 - RNA, 19 nt, Artificial Sequence
  Description of Artificial Sequence: Synthetic oligonucleotide
  Sense strand starting at position 3547 of SEQ ID NO: 917011
gaaauagaaugaguauguu

SEQ ID NO: 1201609 - RNA, 19 nt, Artificial Sequence
  Description of Artificial Sequence: Synthetic oligonucleotide
  Antisense strand to SEQ ID NO: 1201608
aacauacucauucuauuuc

SEQ ID NO: 1201610 - RNA, 19 nt, Artificial Sequence
  Description of Artificial Sequence: Synthetic oligonucleotide
  Sense strand starting at position 3550 of SEQ ID NO: 917011
auagaaugaguauguugaa

SEQ ID NO: 1201611 - RNA, 19 nt, Artificial Sequence
  Description of Artificial Sequence: Synthetic oligonucleotide
  Antisense strand to SEQ ID NO: 1201610
uucaacauacucauucuau

SEQ ID NO: 1201612 - RNA, 19 nt, Artificial Sequence
  Description of Artificial Sequence: Synthetic oligonucleotide
  Sense strand starting at position 3551 of SEQ ID NO: 917011
uagaaugaguauguugaaa

SEQ ID NO: 1201613 - RNA, 19 nt, Artificial Sequence
  Description of Artificial Sequence: Synthetic oligonucleotide
  Antisense strand to SEQ ID NO: 1201612
uuucaacauacucauucua

SEQ ID NO: 1201614 - RNA, 19 nt, Artificial Sequence
  Description of Artificial Sequence: Synthetic oligonucleotide
  Sense strand starting at position 3611 of SEQ ID NO: 917011
gcagacaaugacugcuaua

SEQ ID NO: 1201615 - RNA, 19 nt, Artificial Sequence
  Description of Artificial Sequence: Synthetic oligonucleotide
  Antisense strand to SEQ ID NO: 1201614
uauagcagucauugucugc

SEQ ID NO: 1201616 - RNA, 19 nt, Artificial Sequence
  Description of Artificial Sequence: Synthetic oligonucleotide
  Sense strand starting at position 3751 of SEQ ID NO: 917011
agagcuguugguuaccaua

SEQ ID NO: 1201617 - RNA, 19 nt, Artificial Sequence
  Description of Artificial Sequence: Synthetic oligonucleotide
  Antisense strand to SEQ ID NO: 1201616
uaugguaaccaacagcucu

SEQ ID NO: 1201618 - RNA, 19 nt, Artificial Sequence
  Description of Artificial Sequence: Synthetic oligonucleotide
  Sense strand starting at position 3830 of SEQ ID NO: 917011
aaguuuguagcagacugua

SEQ ID NO: 1201619 - RNA, 19 nt, Artificial Sequence
  Description of Artificial Sequence: Synthetic oligonucleotide
  Antisense strand to SEQ ID NO: 1201618
uacagucugcuacaaacuu

SEQ ID NO: 1201620 - RNA, 19 nt, Artificial Sequence
  Description of Artificial Sequence: Synthetic oligonucleotide
  Sense strand starting at position 3854 of SEQ ID NO: 917011
aacaaaucuuggguaagua

SEQ ID NO: 1201621 - RNA, 19 nt, Artificial Sequence
  Description of Artificial Sequence: Synthetic oligonucleotide
  Antisense strand to SEQ ID NO: 1201620
uacuuacccaagauuuguu

SEQ ID NO: 1201622 - RNA, 19 nt, Artificial Sequence
  Description of Artificial Sequence: Synthetic oligonucleotide
  Sense strand starting at position 3864 of SEQ ID NO: 917011
ggguaaguacuuugagaua

SEQ ID NO: 1201623 - RNA, 19 nt, Artificial Sequence
  Description of Artificial Sequence: Synthetic oligonucleotide
  Antisense strand to SEQ ID NO: 1201622
uaucucaaaguacuuaccc

SEQ ID NO: 1201624 - RNA, 19 nt, Artificial Sequence
  Description of Artificial Sequence: Synthetic oligonucleotide
  Sense strand starting at position 3886 of SEQ ID NO: 917011
uguugagggccuuaaaggu

SEQ ID NO: 1201625 - RNA, 19 nt, Artificial Sequence
  Description of Artificial Sequence: Synthetic oligonucleotide
  Antisense strand to SEQ ID NO: 1201624
accuuuaaggcccucaaca

SEQ ID NO: 1201626 - RNA, 19 nt, Artificial Sequence
  Description of Artificial Sequence: Synthetic oligonucleotide
  Sense strand starting at position 3892 of SEQ ID NO: 917011
gggccuuaaagguguauuu

SEQ ID NO: 1201627 - RNA, 19 nt, Artificial Sequence
  Description of Artificial Sequence: Synthetic oligonucleotide
  Antisense strand to SEQ ID NO: 1201626
aaauacaccuuuaaggccc

SEQ ID NO: 1201628 - RNA, 19 nt, Artificial Sequence
  Description of Artificial Sequence: Synthetic oligonucleotide
  Sense strand starting at position 3910 of SEQ ID NO: 917011
uuaugcuaucagcaauuga

SEQ ID NO: 1201629 - RNA, 19 nt, Artificial Sequence
  Description of Artificial Sequence: Synthetic oligonucleotide
  Antisense strand to SEQ ID NO: 1201628
ucaauugcugauagcauaa

SEQ ID NO: 1201630 - RNA, 19 nt, Artificial Sequence
  Description of Artificial Sequence: Synthetic oligonucleotide
  Sense strand starting at position 185 of SEQ ID NO: 917012
ugaggucaagacugugaca

SEQ ID NO: 1201631 - RNA, 19 nt, Artificial Sequence
  Description of Artificial Sequence: Synthetic oligonucleotide
  Antisense strand to SEQ ID NO: 1201630
ugucacagucuugaccuca

SEQ ID NO: 1201632 - RNA, 19 nt, Artificial Sequence
  Description of Artificial Sequence: Synthetic oligonucleotide
  Sense strand starting at position 232 of SEQ ID NO: 917012
auggaagguuagguuauau

SEQ ID NO: 1201633 - RNA, 19 nt, Artificial Sequence
  Description of Artificial Sequence: Synthetic oligonucleotide
  Antisense strand to SEQ ID NO: 1201632
auauaaccuaaccuuccau

SEQ ID NO: 1201634 - RNA, 19 nt, Artificial Sequence
  Description of Artificial Sequence: Synthetic oligonucleotide
  Sense strand starting at position 259 of SEQ ID NO: 917012
cuuguucaugcaggaggua

SEQ ID NO: 1201635 - RNA, 19 nt, Artificial Sequence
  Description of Artificial Sequence: Synthetic oligonucleotide
  Antisense strand to SEQ ID NO: 1201634
uaccuccugcaugaacaag

SEQ ID NO: 1201636 - RNA, 19 nt, Artificial Sequence
  Description of Artificial Sequence: Synthetic oligonucleotide
  Sense strand starting at position 260 of SEQ ID NO: 917012
uuguucaugcaggagguau

SEQ ID NO: 1201637 - RNA, 19 nt, Artificial Sequence
  Description of Artificial Sequence: Synthetic oligonucleotide
  Antisense strand to SEQ ID NO: 1201636
auaccuccugcaugaacaa

SEQ ID NO: 1201638 - RNA, 19 nt, Artificial Sequence
  Description of Artificial Sequence: Synthetic oligonucleotide
  Sense strand starting at position 835 of SEQ ID NO: 917012
aagggauuguuguuuaggu

SEQ ID NO: 1201639 - RNA, 19 nt, Artificial Sequence
  Description of Artificial Sequence: Synthetic oligonucleotide
  Antisense strand to SEQ ID NO: 1201638
accuaaacaacaaucccuu

SEQ ID NO: 1201640 - RNA, 19 nt, Artificial Sequence
  Description of Artificial Sequence: Synthetic oligonucleotide
  Sense strand starting at position 844 of SEQ ID NO: 917012
uuguuuaggucugugagaa

SEQ ID NO: 1201641 - RNA, 19 nt, Artificial Sequence
  Description of Artificial Sequence: Synthetic oligonucleotide
  Antisense strand to SEQ ID NO: 1201640
uucucacagaccuaaacaa

SEQ ID NO: 1201642 - RNA, 19 nt, Artificial Sequence
  Description of Artificial Sequence: Synthetic oligonucleotide
  Sense strand starting at position 845 of SEQ ID NO: 917012
uguuuaggucugugagaag

SEQ ID NO: 1201643 - RNA, 19 nt, Artificial Sequence
  Description of Artificial Sequence: Synthetic oligonucleotide
  Antisense strand to SEQ ID NO: 1201642
cuucucacagaccuaaaca

SEQ ID NO: 1201644 - RNA, 19 nt, Artificial Sequence
  Description of Artificial Sequence: Synthetic oligonucleotide
  Sense strand starting at position 919 of SEQ ID NO: 917012
ggacuagcucccugggaag

SEQ ID NO: 1201645 - RNA, 19 nt, Artificial Sequence
  Description of Artificial Sequence: Synthetic oligonucleotide
  Antisense strand to SEQ ID NO: 1201644
cuucccagggagcuagucc

SEQ ID NO: 1201646 - RNA, 19 nt, Artificial Sequence
  Description of Artificial Sequence: Synthetic oligonucleotide
  Sense strand starting at position 1852 of SEQ ID NO: 917012
uggucccagugaucuugaa

SEQ ID NO: 1201647 - RNA, 19 nt, Artificial Sequence
  Description of Artificial Sequence: Synthetic oligonucleotide
  Antisense strand to SEQ ID NO: 1201646
uucaagaucacugggacca

SEQ ID NO: 1201648 - RNA, 19 nt, Artificial Sequence
  Description of Artificial Sequence: Synthetic oligonucleotide
  Sense strand starting at position 1890 of SEQ ID NO: 917012
agccucaguccagagaauu

SEQ ID NO: 1201649 - RNA, 19 nt, Artificial Sequence
  Description of Artificial Sequence: Synthetic oligonucleotide
  Antisense strand to SEQ ID NO: 1201648
aauucucuggacugaggcu

SEQ ID NO: 1201650 - RNA, 19 nt, Artificial Sequence
  Description of Artificial Sequence: Synthetic oligonucleotide
  Sense strand starting at position 1952 of SEQ ID NO: 917012
ggaagagugaggcaguguu

SEQ ID NO: 1201651 - RNA, 19 nt, Artificial Sequence
  Description of Artificial Sequence: Synthetic oligonucleotide
  Antisense strand to SEQ ID NO: 1201650
aacacugccucacucuucc

SEQ ID NO: 1201652 - RNA, 19 nt, Artificial Sequence
  Description of Artificial Sequence: Synthetic oligonucleotide
  Sense strand starting at position 2164 of SEQ ID NO: 917012
uagccuuucccagauggau

SEQ ID NO: 1201653 - RNA, 19 nt, Artificial Sequence
  Description of Artificial Sequence: Synthetic oligonucleotide
  Antisense strand to SEQ ID NO: 1201652
auccaucugggaaaggcua

SEQ ID NO: 1201654 - RNA, 19 nt, Artificial Sequence
  Description of Artificial Sequence: Synthetic oligonucleotide
  Sense strand starting at position 2211 of SEQ ID NO: 917012
gagucaaauucucuggguu

SEQ ID NO: 1201655 - RNA, 19 nt, Artificial Sequence
  Description of Artificial Sequence: Synthetic oligonucleotide
  Antisense strand to SEQ ID NO: 1201654
aacccagagaauuugacuc

SEQ ID NO: 1201656 - RNA, 19 nt, Artificial Sequence
  Description of Artificial Sequence: Synthetic oligonucleotide
  Sense strand starting at position 2212 of SEQ ID NO: 917012
agucaaauucucuggguuc

SEQ ID NO: 1201657 - RNA, 19 nt, Artificial Sequence
  Description of Artificial Sequence: Synthetic oligonucleotide
  Antisense strand to SEQ ID NO: 1201656
gaacccagagaauuugacu

SEQ ID NO: 1201658 - RNA, 19 nt, Artificial Sequence
  Description of Artificial Sequence: Synthetic oligonucleotide
  Sense strand starting at position 2214 of SEQ ID NO: 917012
ucaaauucucuggguucca

SEQ ID NO: 1201659 - RNA, 19 nt, Artificial Sequence
  Description of Artificial Sequence: Synthetic oligonucleotide
  Antisense strand to SEQ ID NO: 1201658
uggaacccagagaauuuga

SEQ ID NO: 1201660 - RNA, 19 nt, Artificial Sequence
  Description of Artificial Sequence: Synthetic oligonucleotide
  Sense strand starting at position 2256 of SEQ ID NO: 917012
cuaagaaugugucuuggac

SEQ ID NO: 1201661 - RNA, 19 nt, Artificial Sequence
  Description of Artificial Sequence: Synthetic oligonucleotide
  Antisense strand to SEQ ID NO: 1201660
guccaagacacauucuuag

SEQ ID NO: 1201662 - RNA, 19 nt, Artificial Sequence
  Description of Artificial Sequence: Synthetic oligonucleotide
  Sense strand starting at position 2262 of SEQ ID NO: 917012
augugucuuggacacauaa

SEQ ID NO: 1201663 - RNA, 19 nt, Artificial Sequence
  Description of Artificial Sequence: Synthetic oligonucleotide
  Antisense strand to SEQ ID NO: 1201662
uuauguguccaagacacau

SEQ ID NO: 1201664 - RNA, 19 nt, Artificial Sequence
  Description of Artificial Sequence: Synthetic oligonucleotide
  Sense strand starting at position 2300 of SEQ ID NO: 917012
aacugaaacugucuggauc

SEQ ID NO: 1201665 - RNA, 19 nt, Artificial Sequence
  Description of Artificial Sequence: Synthetic oligonucleotide
  Antisense strand to SEQ ID NO: 1201664
gauccagacaguuucaguu

SEQ ID NO: 1201666 - RNA, 19 nt, Artificial Sequence
  Description of Artificial Sequence: Synthetic oligonucleotide
  Sense strand starting at position 2301 of SEQ ID NO: 917012
acugaaacugucuggaucu

SEQ ID NO: 1201667 - RNA, 19 nt, Artificial Sequence
  Description of Artificial Sequence: Synthetic oligonucleotide
  Antisense strand to SEQ ID NO: 1201666
agauccagacaguuucagu

SEQ ID NO: 1201668 - RNA, 19 nt, Artificial Sequence
  Description of Artificial Sequence: Synthetic oligonucleotide
  Sense strand starting at position 2369 of SEQ ID NO: 917012
aggauuuguucagauggga

SEQ ID NO: 1201669 - RNA, 19 nt, Artificial Sequence
  Description of Artificial Sequence: Synthetic oligonucleotide
  Antisense strand to SEQ ID NO: 1201668
ucccaucugaacaaauccu

SEQ ID NO: 1201670 - RNA, 19 nt, Artificial Sequence
  Description of Artificial Sequence: Synthetic oligonucleotide
  Sense strand starting at position 2422 of SEQ ID NO: 917012
cuccaugucccuuaguaau

SEQ ID NO: 1201671 - RNA, 19 nt, Artificial Sequence
  Description of Artificial Sequence: Synthetic oligonucleotide
  Antisense strand to SEQ ID NO: 1201670
auuacuaagggacauggag

SEQ ID NO: 1201672 - RNA, 19 nt, Artificial Sequence
  Description of Artificial Sequence: Synthetic oligonucleotide
  Sense strand starting at position 2445 of SEQ ID NO: 917012
cccuuuacuccagaguucu

SEQ ID NO: 1201673 - RNA, 19 nt, Artificial Sequence
  Description of Artificial Sequence: Synthetic oligonucleotide
  Antisense strand to SEQ ID NO: 1201672
agaacucuggaguaaaggg

SEQ ID NO: 1201674 - RNA, 19 nt, Artificial Sequence
  Description of Artificial Sequence: Synthetic oligonucleotide
  Sense strand starting at position 2481 of SEQ ID NO: 917012
ucccucuuucuugggaauu

SEQ ID NO: 1201675 - RNA, 19 nt, Artificial Sequence
  Description of Artificial Sequence: Synthetic oligonucleotide
  Antisense strand to SEQ ID NO: 1201674
aauucccaagaaagaggga

SEQ ID NO: 1201676 - RNA, 19 nt, Artificial Sequence
  Description of Artificial Sequence: Synthetic oligonucleotide
  Sense strand starting at position 2483 of SEQ ID NO: 917012
ccucuuucuugggaauuua

SEQ ID NO: 1201677 - RNA, 19 nt, Artificial Sequence
  Description of Artificial Sequence: Synthetic oligonucleotide
  Antisense strand to SEQ ID NO: 1201676
uaaauucccaagaaagagg

SEQ ID NO: 1201678 - RNA, 19 nt, Artificial Sequence
  Description of Artificial Sequence: Synthetic oligonucleotide
  Sense strand starting at position 2491 of SEQ ID NO: 917012
uugggaauuuacugaucca

SEQ ID NO: 1201679 - RNA, 19 nt, Artificial Sequence
  Description of Artificial Sequence: Synthetic oligonucleotide
  Antisense strand to SEQ ID NO: 1201678
uggaucaguaaauucccaa

SEQ ID NO: 1201680 - RNA, 19 nt, Artificial Sequence
  Description of Artificial Sequence: Synthetic oligonucleotide
  Sense strand starting at position 2777 of SEQ ID NO: 917012
gaagcugccguggaaauaa

SEQ ID NO: 1201681 - RNA, 19 nt, Artificial Sequence
  Description of Artificial Sequence: Synthetic oligonucleotide
  Antisense strand to SEQ ID NO: 1201680
uuauuuccacggcagcuuc

SEQ ID NO: 1201682 - RNA, 19 nt, Artificial Sequence
  Description of Artificial Sequence: Synthetic oligonucleotide
  Sense strand starting at position 2873 of SEQ ID NO: 917012
ccuuacagaucaucgacua

SEQ ID NO: 1201683 - RNA, 19 nt, Artificial Sequence
  Description of Artificial Sequence: Synthetic oligonucleotide
  Antisense strand to SEQ ID NO: 1201682
uagucgaugaucuguaagg

SEQ ID NO: 1201684 - RNA, 19 nt, Artificial Sequence
  Description of Artificial Sequence: Synthetic oligonucleotide
  Sense strand starting at position 2908 of SEQ ID NO: 917012
uuuauuucuucguuugcuu

SEQ ID NO: 1201685 - RNA, 19 nt, Artificial Sequence
  Description of Artificial Sequence: Synthetic oligonucleotide
  Antisense strand to SEQ ID NO: 1201684
aagcaaacgaagaaauaaa

SEQ ID NO: 1201686 - RNA, 19 nt, Artificial Sequence
  Description of Artificial Sequence: Synthetic oligonucleotide
  Sense strand starting at position 3117 of SEQ ID NO: 917012
agggucucaccauguuaca

SEQ ID NO: 1201687 - RNA, 19 nt, Artificial Sequence
  Description of Artificial Sequence: Synthetic oligonucleotide
  Antisense strand to SEQ ID NO: 1201686
uguaacauggugagacccu

SEQ ID NO: 1201688 - RNA, 19 nt, Artificial Sequence
  Description of Artificial Sequence: Synthetic oligonucleotide
  Sense strand starting at position 3389 of SEQ ID NO: 917012
uccugacucugguuacuuu

SEQ ID NO: 1201689 - RNA, 19 nt, Artificial Sequence
  Description of Artificial Sequence: Synthetic oligonucleotide
  Antisense strand to SEQ ID NO: 1201688
aaaguaaccagagucagga

SEQ ID NO: 1201690 - RNA, 19 nt, Artificial Sequence
  Description of Artificial Sequence: Synthetic oligonucleotide
  Sense strand starting at position 3416 of SEQ ID NO: 917012
cucauugaugcagacaucu

SEQ ID NO: 1201691 - RNA, 19 nt, Artificial Sequence
  Description of Artificial Sequence: Synthetic oligonucleotide
  Antisense strand to SEQ ID NO: 1201690
agaugucugcaucaaugag

SEQ ID NO: 1201692 - RNA, 19 nt, Artificial Sequence
  Description of Artificial Sequence: Synthetic oligonucleotide
  Sense strand starting at position 3612 of SEQ ID NO: 917012
cccuuaucccucugagaug

SEQ ID NO: 1201693 - RNA, 19 nt, Artificial Sequence
  Description of Artificial Sequence: Synthetic oligonucleotide
  Antisense strand to SEQ ID NO: 1201692
caucucagagggauaaggg

SEQ ID NO: 1201694 - RNA, 19 nt, Artificial Sequence
  Description of Artificial Sequence: Synthetic oligonucleotide
  Sense strand starting at position 3678 of SEQ ID NO: 917012
cucugugauccgcagauga

SEQ ID NO: 1201695 - RNA, 19 nt, Artificial Sequence
  Description of Artificial Sequence: Synthetic oligonucleotide
  Antisense strand to SEQ ID NO: 1201694
ucaucugcggaucacagag

SEQ ID NO: 1201696 - RNA, 19 nt, Artificial Sequence
  Description of Artificial Sequence: Synthetic oligonucleotide
  Sense strand starting at position 3680 of SEQ ID NO: 917012
cugugauccgcagaugaga

SEQ ID NO: 1201697 - RNA, 19 nt, Artificial Sequence
  Description of Artificial Sequence: Synthetic oligonucleotide
  Antisense strand to SEQ ID NO: 1201696
ucucaucugcggaucacag

SEQ ID NO: 1201698 - RNA, 19 nt, Artificial Sequence
  Description of Artificial Sequence: Synthetic oligonucleotide
  Sense strand starting at position 3682 of SEQ ID NO: 917012
gugauccgcagaugagaau

SEQ ID NO: 1201699 - RNA, 19 nt, Artificial Sequence
  Description of Artificial Sequence: Synthetic oligonucleotide
  Antisense strand to SEQ ID NO: 1201698
auucucaucugcggaucac

SEQ ID NO: 1201700 - RNA, 19 nt, Artificial Sequence
  Description of Artificial Sequence: Synthetic oligonucleotide
  Sense strand starting at position 3763 of SEQ ID NO: 917012
uggagaacuguaggguuga

SEQ ID NO: 1201701 - RNA, 19 nt, Artificial Sequence
  Description of Artificial Sequence: Synthetic oligonucleotide
  Antisense strand to SEQ ID NO: 1201700
ucaacccuacaguucucca

SEQ ID NO: 1201702 - RNA, 19 nt, Artificial Sequence
  Description of Artificial Sequence: Synthetic oligonucleotide
  Sense strand starting at position 3853 of SEQ ID NO: 917012
aaagcaguguucuugaaga

SEQ ID NO: 1201703 - RNA, 19 nt, Artificial Sequence
  Description of Artificial Sequence: Synthetic oligonucleotide
  Antisense strand to SEQ ID NO: 1201702
ucuucaagaacacugcuuu

SEQ ID NO: 1201704 - RNA, 19 nt, Artificial Sequence
  Description of Artificial Sequence: Synthetic oligonucleotide
  Sense strand starting at position 3855 of SEQ ID NO: 917012
agcaguguucuugaagaag

SEQ ID NO: 1201705 - RNA, 19 nt, Artificial Sequence
  Description of Artificial Sequence: Synthetic oligonucleotide
  Antisense strand to SEQ ID NO: 1201704
cuucuucaagaacacugcu

SEQ ID NO: 1201706 - RNA, 19 nt, Artificial Sequence
  Description of Artificial Sequence: Synthetic oligonucleotide
  Sense strand starting at position 3894 of SEQ ID NO: 917012
gcaaguuuccaguaugaag

SEQ ID NO: 1201707 - RNA, 19 nt, Artificial Sequence
  Description of Artificial Sequence: Synthetic oligonucleotide
  Antisense strand to SEQ ID NO: 1201706
cuucauacuggaaacuugc

SEQ ID NO: 1201708 - RNA, 19 nt, Artificial Sequence
  Description of Artificial Sequence: Synthetic oligonucleotide
  Sense strand starting at position 3977 of SEQ ID NO: 917012
cuagcuugaugcuuaaauc

SEQ ID NO: 1201709 - RNA, 19 nt, Artificial Sequence
  Description of Artificial Sequence: Synthetic oligonucleotide
  Antisense strand to SEQ ID NO: 1201708
gauuuaagcaucaagcuag

SEQ ID NO: 1201710 - RNA, 19 nt, Artificial Sequence
  Description of Artificial Sequence: Synthetic oligonucleotide
  Sense strand starting at position 19 of SEQ ID NO: 917013
acugcagaccuuugaacuu

SEQ ID NO: 1201711 - RNA, 19 nt, Artificial Sequence
  Description of Artificial Sequence: Synthetic oligonucleotide
  Antisense strand to SEQ ID NO: 1201710
aaguucaaaggucugcagu

SEQ ID NO: 1201712 - RNA, 19 nt, Artificial Sequence
  Description of Artificial Sequence: Synthetic oligonucleotide
  Sense strand starting at position 128 of SEQ ID NO: 917013
acugacuucuuccucgaau

SEQ ID NO: 1201713 - RNA, 19 nt, Artificial Sequence
  Description of Artificial Sequence: Synthetic oligonucleotide
  Antisense strand to SEQ ID NO: 1201712
auucgaggaagaagucagu

SEQ ID NO: 1201714 - RNA, 19 nt, Artificial Sequence
  Description of Artificial Sequence: Synthetic oligonucleotide
  Sense strand starting at position 129 of SEQ ID NO: 917013
cugacuucuuccucgaauc

SEQ ID NO: 1201715 - RNA, 19 nt, Artificial Sequence
  Description of Artificial Sequence: Synthetic oligonucleotide
  Antisense strand to SEQ ID NO: 1201714
gauucgaggaagaagucag

SEQ ID NO: 1201716 - RNA, 19 nt, Artificial Sequence
  Description of Artificial Sequence: Synthetic oligonucleotide
  Sense strand starting at position 130 of SEQ ID NO: 917013
ugacuucuuccucgaauca

SEQ ID NO: 1201717 - RNA, 19 nt, Artificial Sequence
  Description of Artificial Sequence: Synthetic oligonucleotide
  Antisense strand to SEQ ID NO: 1201716
ugauucgaggaagaaguca

SEQ ID NO: 1201718 - RNA, 19 nt, Artificial Sequence
  Description of Artificial Sequence: Synthetic oligonucleotide
  Sense strand starting at position 394 of SEQ ID NO: 917013
aagaauuaugguuguauug

SEQ ID NO: 1201719 - RNA, 19 nt, Artificial Sequence
  Description of Artificial Sequence: Synthetic oligonucleotide
  Antisense strand to SEQ ID NO: 1201718
caauacaaccauaauucuu

SEQ ID NO: 1201720 - RNA, 19 nt, Artificial Sequence
  Description of Artificial Sequence: Synthetic oligonucleotide
  Sense strand starting at position 466 of SEQ ID NO: 917013
agagaauauauacgugaac

SEQ ID NO: 1201721 - RNA, 19 nt, Artificial Sequence
  Description of Artificial Sequence: Synthetic oligonucleotide
  Antisense strand to SEQ ID NO: 1201720
guucacguauauauucucu

SEQ ID NO: 1201722 - RNA, 19 nt, Artificial Sequence
  Description of Artificial Sequence: Synthetic oligonucleotide
  Sense strand starting at position 467 of SEQ ID NO: 917013
gagaauauauacgugaacu

SEQ ID NO: 1201723 - RNA, 19 nt, Artificial Sequence
  Description of Artificial Sequence: Synthetic oligonucleotide
  Antisense strand to SEQ ID NO: 1201722
aguucacguauauauucuc

SEQ ID NO: 1201724 - RNA, 19 nt, Artificial Sequence
  Description of Artificial Sequence: Synthetic oligonucleotide
  Sense strand starting at position 469 of SEQ ID NO: 917013
gaauauauacgugaacuuc

SEQ ID NO: 1201725 - RNA, 19 nt, Artificial Sequence
  Description of Artificial Sequence: Synthetic oligonucleotide
  Antisense strand to SEQ ID NO: 1201724
gaaguucacguauauauuc

SEQ ID NO: 1201726 - RNA, 19 nt, Artificial Sequence
  Description of Artificial Sequence: Synthetic oligonucleotide
  Sense strand starting at position 477 of SEQ ID NO: 917013
acgugaacuuccuuguauc

SEQ ID NO: 1201727 - RNA, 19 nt, Artificial Sequence
  Description of Artificial Sequence: Synthetic oligonucleotide
  Antisense strand to SEQ ID NO: 1201726
gauacaaggaaguucacgu

SEQ ID NO: 1201728 - RNA, 19 nt, Artificial Sequence
  Description of Artificial Sequence: Synthetic oligonucleotide
  Sense strand starting at position 541 of SEQ ID NO: 917013
aggagaauuuauuaacuca

SEQ ID NO: 1201729 - RNA, 19 nt, Artificial Sequence
  Description of Artificial Sequence: Synthetic oligonucleotide
  Antisense strand to SEQ ID NO: 1201728
ugaguuaauaaauucuccu

SEQ ID NO: 1201730 - RNA, 19 nt, Artificial Sequence
  Description of Artificial Sequence: Synthetic oligonucleotide
  Sense strand starting at position 563 of SEQ ID NO: 917013
agaagagguuucuuaaugu

SEQ ID NO: 1201731 - RNA, 19 nt, Artificial Sequence
  Description of Artificial Sequence: Synthetic oligonucleotide
  Antisense strand to SEQ ID NO: 1201730
acauuaagaaaccucuucu

SEQ ID NO: 1201732 - RNA, 19 nt, Artificial Sequence
  Description of Artificial Sequence: Synthetic oligonucleotide
  Sense strand starting at position 769 of SEQ ID NO: 917013
agauuaaaguccucgcauu

SEQ ID NO: 1201733 - RNA, 19 nt, Artificial Sequence
  Description of Artificial Sequence: Synthetic oligonucleotide
  Antisense strand to SEQ ID NO: 1201732
aaugcgaggacuuuaaucu

SEQ ID NO: 1201734 - RNA, 19 nt, Artificial Sequence
  Description of Artificial Sequence: Synthetic oligonucleotide
  Sense strand starting at position 770 of SEQ ID NO: 917013
gauuaaaguccucgcauuc

SEQ ID NO: 1201735 - RNA, 19 nt, Artificial Sequence
  Description of Artificial Sequence: Synthetic oligonucleotide
  Antisense strand to SEQ ID NO: 1201734
gaaugcgaggacuuuaauc

SEQ ID NO: 1201736 - RNA, 19 nt, Artificial Sequence
  Description of Artificial Sequence: Synthetic oligonucleotide
  Sense strand starting at position 801 of SEQ ID NO: 917013
acgguuguuuaacuguuua

SEQ ID NO: 1201737 - RNA, 19 nt, Artificial Sequence
  Description of Artificial Sequence: Synthetic oligonucleotide
  Antisense strand to SEQ ID NO: 1201736
uaaacaguuaaacaaccgu

SEQ ID NO: 1201738 - RNA, 19 nt, Artificial Sequence
  Description of Artificial Sequence: Synthetic oligonucleotide
  Sense strand starting at position 911 of SEQ ID NO: 917013
gagacaucuugacugucac

SEQ ID NO: 1201739 - RNA, 19 nt, Artificial Sequence
  Description of Artificial Sequence: Synthetic oligonucleotide
  Antisense strand to SEQ ID NO: 1201738
gugacagucaagaugucuc

SEQ ID NO: 1201740 - RNA, 19 nt, Artificial Sequence
  Description of Artificial Sequence: Synthetic oligonucleotide
  Sense strand starting at position 912 of SEQ ID NO: 917013
agacaucuugacugucaca

SEQ ID NO: 1201741 - RNA, 19 nt, Artificial Sequence
  Description of Artificial Sequence: Synthetic oligonucleotide
  Antisense strand to SEQ ID NO: 1201740
ugugacagucaagaugucu

SEQ ID NO: 1201742 - RNA, 19 nt, Artificial Sequence
  Description of Artificial Sequence: Synthetic oligonucleotide
  Sense strand starting at position 966 of SEQ ID NO: 917013
cagguaugccacugaacuu

SEQ ID NO: 1201743 - RNA, 19 nt, Artificial Sequence
  Description of Artificial Sequence: Synthetic oligonucleotide
  Antisense strand to SEQ ID NO: 1201742
aaguucaguggcauaccug

SEQ ID NO: 1201744 - RNA, 19 nt, Artificial Sequence
  Description of Artificial Sequence: Synthetic oligonucleotide
  Sense strand starting at position 1101 of SEQ ID NO: 917013
ugaagcuuggagugguuaa

SEQ ID NO: 1201745 - RNA, 19 nt, Artificial Sequence
  Description of Artificial Sequence: Synthetic oligonucleotide
  Antisense strand to SEQ ID NO: 1201744
uuaaccacuccaagcuuca

SEQ ID NO: 1201746 - RNA, 19 nt, Artificial Sequence
  Description of Artificial Sequence: Synthetic oligonucleotide
  Sense strand starting at position 2064 of SEQ ID NO: 917013
gaugaacucugauuggcca

SEQ ID NO: 1201747 - RNA, 19 nt, Artificial Sequence
  Description of Artificial Sequence: Synthetic oligonucleotide
  Antisense strand to SEQ ID NO: 1201746
uggccaaucagaguucauc

SEQ ID NO: 1201748 - RNA, 19 nt, Artificial Sequence
  Description of Artificial Sequence: Synthetic oligonucleotide
  Sense strand starting at position 2196 of SEQ ID NO: 917013
gccuuacucguugagucca

SEQ ID NO: 1201749 - RNA, 19 nt, Artificial Sequence
  Description of Artificial Sequence: Synthetic oligonucleotide
  Antisense strand to SEQ ID NO: 1201748
uggacucaacgaguaaggc

SEQ ID NO: 1201750 - RNA, 19 nt, Artificial Sequence
  Description of Artificial Sequence: Synthetic oligonucleotide
  Sense strand starting at position 2231 of SEQ ID NO: 917013
aagucuuuccauuggugaa

SEQ ID NO: 1201751 - RNA, 19 nt, Artificial Sequence
  Description of Artificial Sequence: Synthetic oligonucleotide
  Antisense strand to SEQ ID NO: 1201750
uucaccaauggaaagacuu

SEQ ID NO: 1201752 - RNA, 19 nt, Artificial Sequence
  Description of Artificial Sequence: Synthetic oligonucleotide
  Sense strand starting at position 2233 of SEQ ID NO: 917013
gucuuuccauuggugaaag

SEQ ID NO: 1201753 - RNA, 19 nt, Artificial Sequence
  Description of Artificial Sequence: Synthetic oligonucleotide
  Antisense strand to SEQ ID NO: 1201752
cuuucaccaauggaaagac

SEQ ID NO: 1201754 - RNA, 19 nt, Artificial Sequence
  Description of Artificial Sequence: Synthetic oligonucleotide
  Sense strand starting at position 2262 of SEQ ID NO: 917013
cggugcuucugauugguca

SEQ ID NO: 1201755 - RNA, 19 nt, Artificial Sequence
  Description of Artificial Sequence: Synthetic oligonucleotide
  Antisense strand to SEQ ID NO: 1201754
ugaccaaucagaagcaccg

SEQ ID NO: 1201756 - RNA, 19 nt, Artificial Sequence
  Description of Artificial Sequence: Synthetic oligonucleotide
  Sense strand starting at position 2264 of SEQ ID NO: 917013
gugcuucugauuggucaga

SEQ ID NO: 1201757 - RNA, 19 nt, Artificial Sequence
  Description of Artificial Sequence: Synthetic oligonucleotide
  Antisense strand to SEQ ID NO: 1201756
ucugaccaaucagaagcac

SEQ ID NO: 1201758 - RNA, 19 nt, Artificial Sequence
  Description of Artificial Sequence: Synthetic oligonucleotide
  Sense strand starting at position 2266 of SEQ ID NO: 917013
gcuucugauuggucagacu

SEQ ID NO: 1201759 - RNA, 19 nt, Artificial Sequence
  Description of Artificial Sequence: Synthetic oligonucleotide
  Antisense strand to SEQ ID NO: 1201758
agucugaccaaucagaagc

SEQ ID NO: 1201760 - RNA, 19 nt, Artificial Sequence
  Description of Artificial Sequence: Synthetic oligonucleotide
  Sense strand starting at position 2366 of SEQ ID NO: 917013
gagauuggcggguaaccua

SEQ ID NO: 1201761 - RNA, 19 nt, Artificial Sequence
  Description of Artificial Sequence: Synthetic oligonucleotide
  Antisense strand to SEQ ID NO: 1201760
uagguuacccgccaaucuc

SEQ ID NO: 1201762 - RNA, 19 nt, Artificial Sequence
  Description of Artificial Sequence: Synthetic oligonucleotide
  Sense strand starting at position 2404 of SEQ ID NO: 917013
gguaacuguggcuagggaa

SEQ ID NO: 1201763 - RNA, 19 nt, Artificial Sequence
  Description of Artificial Sequence: Synthetic oligonucleotide
  Antisense strand to SEQ ID NO: 1201762
uucccuagccacaguuacc

SEQ ID NO: 1201764 - RNA, 19 nt, Artificial Sequence
  Description of Artificial Sequence: Synthetic oligonucleotide
  Sense strand starting at position 2444 of SEQ ID NO: 917013
ugaguagccaguugggaaa

SEQ ID NO: 1201765 - RNA, 19 nt, Artificial Sequence
  Description of Artificial Sequence: Synthetic oligonucleotide
  Antisense strand to SEQ ID NO: 1201764
uuucccaacuggcuacuca

SEQ ID NO: 1201766 - RNA, 19 nt, Artificial Sequence
  Description of Artificial Sequence: Synthetic oligonucleotide
  Sense strand starting at position 2541 of SEQ ID NO: 917013
ugcgaucucgucucagcuu

SEQ ID NO: 1201767 - RNA, 19 nt, Artificial Sequence
  Description of Artificial Sequence: Synthetic oligonucleotide
  Antisense strand to SEQ ID NO: 1201766
aagcugagacgagaucgca

SEQ ID NO: 1201768 - RNA, 19 nt, Artificial Sequence
  Description of Artificial Sequence: Synthetic oligonucleotide
  Sense strand starting at position 2707 of SEQ ID NO: 917013
gucauaucguaguuaacuu

SEQ ID NO: 1201769 - RNA, 19 nt, Artificial Sequence
  Description of Artificial Sequence: Synthetic oligonucleotide
  Antisense strand to SEQ ID NO: 1201768
aaguuaacuacgauaugac

SEQ ID NO: 1201770 - RNA, 19 nt, Artificial Sequence
  Description of Artificial Sequence: Synthetic oligonucleotide
  Sense strand starting at position 2795 of SEQ ID NO: 917013
gccauacguuccucgguga

SEQ ID NO: 1201771 - RNA, 19 nt, Artificial Sequence
  Description of Artificial Sequence: Synthetic oligonucleotide
  Antisense strand to SEQ ID NO: 1201770
ucaccgaggaacguauggc

SEQ ID NO: 1201772 - RNA, 19 nt, Artificial Sequence
  Description of Artificial Sequence: Synthetic oligonucleotide
  Sense strand starting at position 2798 of SEQ ID NO: 917013
auacguuccucggugagca

SEQ ID NO: 1201773 - RNA, 19 nt, Artificial Sequence
  Description of Artificial Sequence: Synthetic oligonucleotide
  Antisense strand to SEQ ID NO: 1201772
ugcucaccgaggaacguau

SEQ ID NO: 1201774 - RNA, 19 nt, Artificial Sequence
  Description of Artificial Sequence: Synthetic oligonucleotide
  Sense strand starting at position 3092 of SEQ ID NO: 917013
ggagacuuagguugcagua

SEQ ID NO: 1201775 - RNA, 19 nt, Artificial Sequence
  Description of Artificial Sequence: Synthetic oligonucleotide
  Antisense strand to SEQ ID NO: 1201774
uacugcaaccuaagucucc

SEQ ID NO: 1201776 - RNA, 19 nt, Artificial Sequence
  Description of Artificial Sequence: Synthetic oligonucleotide
  Sense strand starting at position 3241 of SEQ ID NO: 917013
cuccauccuuaagauguga

SEQ ID NO: 1201777 - RNA, 19 nt, Artificial Sequence
  Description of Artificial Sequence: Synthetic oligonucleotide
  Antisense strand to SEQ ID NO: 1201776
ucacaucuuaaggauggag

SEQ ID NO: 1201778 - RNA, 19 nt, Artificial Sequence
  Description of Artificial Sequence: Synthetic oligonucleotide
  Sense strand starting at position 3246 of SEQ ID NO: 917013
uccuuaagaugugaucuca

SEQ ID NO: 1201779 - RNA, 19 nt, Artificial Sequence
  Description of Artificial Sequence: Synthetic oligonucleotide
  Antisense strand to SEQ ID NO: 1201778
ugagaucacaucuuaagga

SEQ ID NO: 1201780 - RNA, 19 nt, Artificial Sequence
  Description of Artificial Sequence: Synthetic oligonucleotide
  Sense strand starting at position 3254 of SEQ ID NO: 917013
augugaucucauuguaccu

SEQ ID NO: 1201781 - RNA, 19 nt, Artificial Sequence
  Description of Artificial Sequence: Synthetic oligonucleotide
  Antisense strand to SEQ ID NO: 1201780
agguacaaugagaucacau

SEQ ID NO: 1201782 - RNA, 19 nt, Artificial Sequence
  Description of Artificial Sequence: Synthetic oligonucleotide
  Sense strand starting at position 3279 of SEQ ID NO: 917013
gacagagaguuucuuguga

SEQ ID NO: 1201783 - RNA, 19 nt, Artificial Sequence
  Description of Artificial Sequence: Synthetic oligonucleotide
  Antisense strand to SEQ ID NO: 1201782
ucacaagaaacucucuguc

SEQ ID NO: 1201784 - RNA, 19 nt, Artificial Sequence
  Description of Artificial Sequence: Synthetic oligonucleotide
  Sense strand starting at position 3656 of SEQ ID NO: 917013
ggagaauugcuugaucgca

SEQ ID NO: 1201785 - RNA, 19 nt, Artificial Sequence
  Description of Artificial Sequence: Synthetic oligonucleotide
  Antisense strand to SEQ ID NO: 1201784
ugcgaucaagcaauucucc

SEQ ID NO: 1201786 - RNA, 19 nt, Artificial Sequence
  Description of Artificial Sequence: Synthetic oligonucleotide
  Sense strand starting at position 3658 of SEQ ID NO: 917013
agaauugcuugaucgcaag

SEQ ID NO: 1201787 - RNA, 19 nt, Artificial Sequence
  Description of Artificial Sequence: Synthetic oligonucleotide
  Antisense strand to SEQ ID NO: 1201786
cuugcgaucaagcaauucu

SEQ ID NO: 1201788 - RNA, 19 nt, Artificial Sequence
  Description of Artificial Sequence: Synthetic oligonucleotide
  Sense strand starting at position 3846 of SEQ ID NO: 917013
ugcaaaucaugugucauaa

SEQ ID NO: 1201789 - RNA, 19 nt, Artificial Sequence
  Description of Artificial Sequence: Synthetic oligonucleotide
  Antisense strand to SEQ ID NO: 1201788
uuaugacacaugauuugca

SEQ ID NO: 1201790 - RNA, 19 nt, Artificial Sequence
  Description of Artificial Sequence: Synthetic oligonucleotide
  Sense strand starting at position 302 of SEQ ID NO: 917014
cagggaauccaagguuucu

SEQ ID NO: 1201791 - RNA, 19 nt, Artificial Sequence
  Description of Artificial Sequence: Synthetic oligonucleotide
  Antisense strand to SEQ ID NO: 1201790
agaaaccuuggauucccug

SEQ ID NO: 1201792 - RNA, 19 nt, Artificial Sequence
  Description of Artificial Sequence: Synthetic oligonucleotide
  Sense strand starting at position 317 of SEQ ID NO: 917014
uucuguuugcuggagcaca

SEQ ID NO: 1201793 - RNA, 19 nt, Artificial Sequence
  Description of Artificial Sequence: Synthetic oligonucleotide
  Antisense strand to SEQ ID NO: 1201792
ugugcuccagcaaacagaa

SEQ ID NO: 1201794 - RNA, 19 nt, Artificial Sequence
  Description of Artificial Sequence: Synthetic oligonucleotide
  Sense strand starting at position 353 of SEQ ID NO: 917014
gguggugccagauaaauag

SEQ ID NO: 1201795 - RNA, 19 nt, Artificial Sequence
  Description of Artificial Sequence: Synthetic oligonucleotide
  Antisense strand to SEQ ID NO: 1201794
cuauuuaucuggcaccacc

SEQ ID NO: 1201796 - RNA, 19 nt, Artificial Sequence
  Description of Artificial Sequence: Synthetic oligonucleotide
  Sense strand starting at position 383 of SEQ ID NO: 917014
auaugccagcuauaaagau

SEQ ID NO: 1201797 - RNA, 19 nt, Artificial Sequence
  Description of Artificial Sequence: Synthetic oligonucleotide
  Antisense strand to SEQ ID NO: 1201796
aucuuuauagcuggcauau

SEQ ID NO: 1201798 - RNA, 19 nt, Artificial Sequence
  Description of Artificial Sequence: Synthetic oligonucleotide
  Sense strand starting at position 527 of SEQ ID NO: 917014
cagagaucgcuuuggauaa

SEQ ID NO: 1201799 - RNA, 19 nt, Artificial Sequence
  Description of Artificial Sequence: Synthetic oligonucleotide
  Antisense strand to SEQ ID NO: 1201798
uuauccaaagcgaucucug

SEQ ID NO: 1201800 - RNA, 19 nt, Artificial Sequence
  Description of Artificial Sequence: Synthetic oligonucleotide
  Sense strand starting at position 586 of SEQ ID NO: 917014
gagaaugacuguucucagg

SEQ ID NO: 1201801 - RNA, 19 nt, Artificial Sequence
  Description of Artificial Sequence: Synthetic oligonucleotide
  Antisense strand to SEQ ID NO: 1201800
ccugagaacagucauucuc

SEQ ID NO: 1201802 - RNA, 19 nt, Artificial Sequence
  Description of Artificial Sequence: Synthetic oligonucleotide
  Sense strand starting at position 588 of SEQ ID NO: 917014
gaaugacuguucucaggaa

SEQ ID NO: 1201803 - RNA, 19 nt, Artificial Sequence
  Description of Artificial Sequence: Synthetic oligonucleotide
  Antisense strand to SEQ ID NO: 1201802
uuccugagaacagucauuc

SEQ ID NO: 1201804 - RNA, 19 nt, Artificial Sequence
  Description of Artificial Sequence: Synthetic oligonucleotide
  Sense strand starting at position 592 of SEQ ID NO: 917014
gacuguucucaggaagggu

SEQ ID NO: 1201805 - RNA, 19 nt, Artificial Sequence
  Description of Artificial Sequence: Synthetic oligonucleotide
  Antisense strand to SEQ ID NO: 1201804
acccuuccugagaacaguc

SEQ ID NO: 1201806 - RNA, 19 nt, Artificial Sequence
  Description of Artificial Sequence: Synthetic oligonucleotide
  Sense strand starting at position 596 of SEQ ID NO: 917014
guucucaggaagggugaua

SEQ ID NO: 1201807 - RNA, 19 nt, Artificial Sequence
  Description of Artificial Sequence: Synthetic oligonucleotide
  Antisense strand to SEQ ID NO: 1201806
uaucacccuuccugagaac

SEQ ID NO: 1201808 - RNA, 19 nt, Artificial Sequence
  Description of Artificial Sequence: Synthetic oligonucleotide
  Sense strand starting at position 1341 of SEQ ID NO: 917014
ucgcacauccucugugaga

SEQ ID NO: 1201809 - RNA, 19 nt, Artificial Sequence
  Description of Artificial Sequence: Synthetic oligonucleotide
  Antisense strand to SEQ ID NO: 1201808
ucucacagaggaugugcga

SEQ ID NO: 1201810 - RNA, 19 nt, Artificial Sequence
  Description of Artificial Sequence: Synthetic oligonucleotide
  Sense strand starting at position 1582 of SEQ ID NO: 917014
gcuugccaguugucacuga

SEQ ID NO: 1201811 - RNA, 19 nt, Artificial Sequence
  Description of Artificial Sequence: Synthetic oligonucleotide
  Antisense strand to SEQ ID NO: 1201810
ucagugacaacuggcaagc

SEQ ID NO: 1201812 - RNA, 19 nt, Artificial Sequence
  Description of Artificial Sequence: Synthetic oligonucleotide
  Sense strand starting at position 1586 of SEQ ID NO: 917014
gccaguugucacugagagc

SEQ ID NO: 1201813 - RNA, 19 nt, Artificial Sequence
  Description of Artificial Sequence: Synthetic oligonucleotide
  Antisense strand to SEQ ID NO: 1201812
gcucucagugacaacuggc

SEQ ID NO: 1201814 - RNA, 19 nt, Artificial Sequence
  Description of Artificial Sequence: Synthetic oligonucleotide
  Sense strand starting at position 1740 of SEQ ID NO: 917014
augagaugcuacgccgaaa

SEQ ID NO: 1201815 - RNA, 19 nt, Artificial Sequence
  Description of Artificial Sequence: Synthetic oligonucleotide
  Antisense strand to SEQ ID NO: 1201814
uuucggcguagcaucucau

SEQ ID NO: 1201816 - RNA, 19 nt, Artificial Sequence
  Description of Artificial Sequence: Synthetic oligonucleotide
  Sense strand starting at position 1743 of SEQ ID NO: 917014
agaugcuacgccgaaagaa

SEQ ID NO: 1201817 - RNA, 19 nt, Artificial Sequence
  Description of Artificial Sequence: Synthetic oligonucleotide
  Antisense strand to SEQ ID NO: 1201816
uucuuucggcguagcaucu

SEQ ID NO: 1201818 - RNA, 19 nt, Artificial Sequence
  Description of Artificial Sequence: Synthetic oligonucleotide
  Sense strand starting at position 1797 of SEQ ID NO: 917014
uucugauaauugguugcaa

SEQ ID NO: 1201819 - RNA, 19 nt, Artificial Sequence
  Description of Artificial Sequence: Synthetic oligonucleotide
  Antisense strand to SEQ ID NO: 1201818
uugcaaccaauuaucagaa

SEQ ID NO: 1201820 - RNA, 19 nt, Artificial Sequence
  Description of Artificial Sequence: Synthetic oligonucleotide
  Sense strand starting at position 1798 of SEQ ID NO: 917014
ucugauaauugguugcaag

SEQ ID NO: 1201821 - RNA, 19 nt, Artificial Sequence
  Description of Artificial Sequence: Synthetic oligonucleotide
  Antisense strand to SEQ ID NO: 1201820
cuugcaaccaauuaucaga

SEQ ID NO: 1201822 - RNA, 19 nt, Artificial Sequence
  Description of Artificial Sequence: Synthetic oligonucleotide
  Sense strand starting at position 1799 of SEQ ID NO: 917014
cugauaauugguugcaaga

SEQ ID NO: 1201823 - RNA, 19 nt, Artificial Sequence
  Description of Artificial Sequence: Synthetic oligonucleotide
  Antisense strand to SEQ ID NO: 1201822
ucuugcaaccaauuaucag

SEQ ID NO: 1201824 - RNA, 19 nt, Artificial Sequence
  Description of Artificial Sequence: Synthetic oligonucleotide
  Sense strand starting at position 1801 of SEQ ID NO: 917014
gauaauugguugcaagaug

SEQ ID NO: 1201825 - RNA, 19 nt, Artificial Sequence
  Description of Artificial Sequence: Synthetic oligonucleotide
  Antisense strand to SEQ ID NO: 1201824
caucuugcaaccaauuauc

SEQ ID NO: 1201826 - RNA, 19 nt, Artificial Sequence
  Description of Artificial Sequence: Synthetic oligonucleotide
  Sense strand starting at position 1842 of SEQ ID NO: 917014
auugacacacguuaguaaa

SEQ ID NO: 1201827 - RNA, 19 nt, Artificial Sequence
  Description of Artificial Sequence: Synthetic oligonucleotide
  Antisense strand to SEQ ID NO: 1201826
uuuacuaacgugugucaau

SEQ ID NO: 1201828 - RNA, 19 nt, Artificial Sequence
  Description of Artificial Sequence: Synthetic oligonucleotide
  Sense strand starting at position 2031 of SEQ ID NO: 917014
cgggucaagcccuguucua

SEQ ID NO: 1201829 - RNA, 19 nt, Artificial Sequence
  Description of Artificial Sequence: Synthetic oligonucleotide
  Antisense strand to SEQ ID NO: 1201828
uagaacagggcuugacccg

SEQ ID NO: 1201830 - RNA, 19 nt, Artificial Sequence
  Description of Artificial Sequence: Synthetic oligonucleotide
  Sense strand starting at position 2056 of SEQ ID NO: 917014
gggacucuggugugaaagu

SEQ ID NO: 1201831 - RNA, 19 nt, Artificial Sequence
  Description of Artificial Sequence: Synthetic oligonucleotide
  Antisense strand to SEQ ID NO: 1201830
acuuucacaccagaguccc

SEQ ID NO: 1201832 - RNA, 19 nt, Artificial Sequence
  Description of Artificial Sequence: Synthetic oligonucleotide
  Sense strand starting at position 2065 of SEQ ID NO: 917014
gugugaaaguggucaggau

SEQ ID NO: 1201833 - RNA, 19 nt, Artificial Sequence
  Description of Artificial Sequence: Synthetic oligonucleotide
  Antisense strand to SEQ ID NO: 1201832
auccugaccacuuucacac

SEQ ID NO: 1201834 - RNA, 19 nt, Artificial Sequence
  Description of Artificial Sequence: Synthetic oligonucleotide
  Sense strand starting at position 2066 of SEQ ID NO: 917014
ugugaaaguggucaggaua

SEQ ID NO: 1201835 - RNA, 19 nt, Artificial Sequence
  Description of Artificial Sequence: Synthetic oligonucleotide
  Antisense strand to SEQ ID NO: 1201834
uauccugaccacuuucaca

SEQ ID NO: 1201836 - RNA, 19 nt, Artificial Sequence
  Description of Artificial Sequence: Synthetic oligonucleotide
  Sense strand starting at position 2086 of SEQ ID NO: 917014
ugcccugugucuccucuaa

SEQ ID NO: 1201837 - RNA, 19 nt, Artificial Sequence
  Description of Artificial Sequence: Synthetic oligonucleotide
  Antisense strand to SEQ ID NO: 1201836
uuagaggagacacagggca

SEQ ID NO: 1201838 - RNA, 19 nt, Artificial Sequence
  Description of Artificial Sequence: Synthetic oligonucleotide
  Sense strand starting at position 2088 of SEQ ID NO: 917014
cccugugucuccucuaacu

SEQ ID NO: 1201839 - RNA, 19 nt, Artificial Sequence
  Description of Artificial Sequence: Synthetic oligonucleotide
  Antisense strand to SEQ ID NO: 1201838
aguuagaggagacacaggg

SEQ ID NO: 1201840 - RNA, 19 nt, Artificial Sequence
  Description of Artificial Sequence: Synthetic oligonucleotide
  Sense strand starting at position 2231 of SEQ ID NO: 917014
cuauaaauggagugugaaa

SEQ ID NO: 1201841 - RNA, 19 nt, Artificial Sequence
  Description of Artificial Sequence: Synthetic oligonucleotide
  Antisense strand to SEQ ID NO: 1201840
uuucacacuccauuuauag

SEQ ID NO: 1201842 - RNA, 19 nt, Artificial Sequence
  Description of Artificial Sequence: Synthetic oligonucleotide
  Sense strand starting at position 2437 of SEQ ID NO: 917014
ugcaaacauugccuugaga

SEQ ID NO: 1201843 - RNA, 19 nt, Artificial Sequence
  Description of Artificial Sequence: Synthetic oligonucleotide
  Antisense strand to SEQ ID NO: 1201842
ucucaaggcaauguuugca

SEQ ID NO: 1201844 - RNA, 19 nt, Artificial Sequence
  Description of Artificial Sequence: Synthetic oligonucleotide
  Sense strand starting at position 2818 of SEQ ID NO: 917014
ccuggccucuagucuuaau

SEQ ID NO: 1201845 - RNA, 19 nt, Artificial Sequence
  Description of Artificial Sequence: Synthetic oligonucleotide
  Antisense strand to SEQ ID NO: 1201844
auuaagacuagaggccagg

SEQ ID NO: 1201846 - RNA, 19 nt, Artificial Sequence
  Description of Artificial Sequence: Synthetic oligonucleotide
  Sense strand starting at position 3217 of SEQ ID NO: 917014
augguuuaauuugaggaga

SEQ ID NO: 1201847 - RNA, 19 nt, Artificial Sequence
  Description of Artificial Sequence: Synthetic oligonucleotide
  Antisense strand to SEQ ID NO: 1201846
ucuccucaaauuaaaccau

SEQ ID NO: 1201848 - RNA, 19 nt, Artificial Sequence
  Description of Artificial Sequence: Synthetic oligonucleotide
  Sense strand starting at position 3219 of SEQ ID NO: 917014
gguuuaauuugaggagaca

SEQ ID NO: 1201849 - RNA, 19 nt, Artificial Sequence
  Description of Artificial Sequence: Synthetic oligonucleotide
  Antisense strand to SEQ ID NO: 1201848
ugucuccucaaauuaaacc

SEQ ID NO: 1201850 - RNA, 19 nt, Artificial Sequence
  Description of Artificial Sequence: Synthetic oligonucleotide
  Sense strand starting at position 3341 of SEQ ID NO: 917014
gaaggaucgugacucuggu

SEQ ID NO: 1201851 - RNA, 19 nt, Artificial Sequence
  Description of Artificial Sequence: Synthetic oligonucleotide
  Antisense strand to SEQ ID NO: 1201850
accagagucacgauccuuc

SEQ ID NO: 1201852 - RNA, 19 nt, Artificial Sequence
  Description of Artificial Sequence: Synthetic oligonucleotide
  Sense strand starting at position 3477 of SEQ ID NO: 917014
agguauucacaggguggau

SEQ ID NO: 1201853 - RNA, 19 nt, Artificial Sequence
  Description of Artificial Sequence: Synthetic oligonucleotide
  Antisense strand to SEQ ID NO: 1201852
auccacccugugaauaccu

SEQ ID NO: 1201854 - RNA, 19 nt, Artificial Sequence
  Description of Artificial Sequence: Synthetic oligonucleotide
  Sense strand starting at position 3503 of SEQ ID NO: 917014
gggugaguggcacauucua

SEQ ID NO: 1201855 - RNA, 19 nt, Artificial Sequence
  Description of Artificial Sequence: Synthetic oligonucleotide
  Antisense strand to SEQ ID NO: 1201854
uagaaugugccacucaccc

SEQ ID NO: 1201856 - RNA, 19 nt, Artificial Sequence
  Description of Artificial Sequence: Synthetic oligonucleotide
  Sense strand starting at position 3588 of SEQ ID NO: 917014
aggguucuguaauucugaa

SEQ ID NO: 1201857 - RNA, 19 nt, Artificial Sequence
  Description of Artificial Sequence: Synthetic oligonucleotide
  Antisense strand to SEQ ID NO: 1201856
uucagaauuacagaacccu

SEQ ID NO: 1201858 - RNA, 19 nt, Artificial Sequence
  Description of Artificial Sequence: Synthetic oligonucleotide
  Sense strand starting at position 3701 of SEQ ID NO: 917014
uugaaagggcuuuacguua

SEQ ID NO: 1201859 - RNA, 19 nt, Artificial Sequence
  Description of Artificial Sequence: Synthetic oligonucleotide
  Antisense strand to SEQ ID NO: 1201858
uaacguaaagcccuuucaa

SEQ ID NO: 1201860 - RNA, 19 nt, Artificial Sequence
  Description of Artificial Sequence: Synthetic oligonucleotide
  Sense strand starting at position 3706 of SEQ ID NO: 917014
agggcuuuacguuaauuaa

SEQ ID NO: 1201861 - RNA, 19 nt, Artificial Sequence
  Description of Artificial Sequence: Synthetic oligonucleotide
  Antisense strand to SEQ ID NO: 1201860
uuaauuaacguaaagcccu

SEQ ID NO: 1201862 - RNA, 19 nt, Artificial Sequence
  Description of Artificial Sequence: Synthetic oligonucleotide
  Sense strand starting at position 3709 of SEQ ID NO: 917014
gcuuuacguuaauuaauuc

SEQ ID NO: 1201863 - RNA, 19 nt, Artificial Sequence
  Description of Artificial Sequence: Synthetic oligonucleotide
  Antisense strand to SEQ ID NO: 1201862
gaauuaauuaacguaaagc

SEQ ID NO: 1201864 - RNA, 19 nt, Artificial Sequence
  Description of Artificial Sequence: Synthetic oligonucleotide
  Sense strand starting at position 3773 of SEQ ID NO: 917014
ccaguuuacagagggugaa

SEQ ID NO: 1201865 - RNA, 19 nt, Artificial Sequence
  Description of Artificial Sequence: Synthetic oligonucleotide
  Antisense strand to SEQ ID NO: 1201864
uucacccucuguaaacugg

SEQ ID NO: 1201866 - RNA, 19 nt, Artificial Sequence
  Description of Artificial Sequence: Synthetic oligonucleotide
  Sense strand starting at position 3774 of SEQ ID NO: 917014
caguuuacagagggugaaa

SEQ ID NO: 1201867 - RNA, 19 nt, Artificial Sequence
  Description of Artificial Sequence: Synthetic oligonucleotide
  Antisense strand to SEQ ID NO: 1201866
uuucacccucuguaaacug

SEQ ID NO: 1201868 - RNA, 19 nt, Artificial Sequence
  Description of Artificial Sequence: Synthetic oligonucleotide
  Sense strand starting at position 3947 of SEQ ID NO: 917014
ggacuaaugguguggagca

SEQ ID NO: 1201869 - RNA, 19 nt, Artificial Sequence
  Description of Artificial Sequence: Synthetic oligonucleotide
  Antisense strand to SEQ ID NO: 1201868
ugcuccacaccauuagucc

SEQ ID NO: 1201870 - RNA, 19 nt, Artificial Sequence
  Description of Artificial Sequence: Synthetic oligonucleotide
  Sense strand starting at position 39 of SEQ ID NO: 917015
uuuauauugccugaugaag

SEQ ID NO: 1201871 - RNA, 19 nt, Artificial Sequence
  Description of Artificial Sequence: Synthetic oligonucleotide
  Antisense strand to SEQ ID NO: 1201870
cuucaucaggcaauauaaa

SEQ ID NO: 1201872 - RNA, 19 nt, Artificial Sequence
  Description of Artificial Sequence: Synthetic oligonucleotide
  Sense strand starting at position 66 of SEQ ID NO: 917015
auuaauccugcuggcuaaa

SEQ ID NO: 1201873 - RNA, 19 nt, Artificial Sequence
  Description of Artificial Sequence: Synthetic oligonucleotide
  Antisense strand to SEQ ID NO: 1201872
uuuagccagcaggauuaau

SEQ ID NO: 1201874 - RNA, 19 nt, Artificial Sequence
  Description of Artificial Sequence: Synthetic oligonucleotide
  Sense strand starting at position 111 of SEQ ID NO: 917015
caggucacauugccagaaa

SEQ ID NO: 1201875 - RNA, 19 nt, Artificial Sequence
  Description of Artificial Sequence: Synthetic oligonucleotide
  Antisense strand to SEQ ID NO: 1201874
uuucuggcaaugugaccug

SEQ ID NO: 1201876 - RNA, 19 nt, Artificial Sequence
  Description of Artificial Sequence: Synthetic oligonucleotide
  Sense strand starting at position 347 of SEQ ID NO: 917015
ugagaaauguagguuugcu

SEQ ID NO: 1201877 - RNA, 19 nt, Artificial Sequence
  Description of Artificial Sequence: Synthetic oligonucleotide
  Antisense strand to SEQ ID NO: 1201876
agcaaaccuacauuucuca

SEQ ID NO: 1201878 - RNA, 19 nt, Artificial Sequence
  Description of Artificial Sequence: Synthetic oligonucleotide
  Sense strand starting at position 362 of SEQ ID NO: 917015
ugcuuugggacccagugaa

SEQ ID NO: 1201879 - RNA, 19 nt, Artificial Sequence
  Description of Artificial Sequence: Synthetic oligonucleotide
  Antisense strand to SEQ ID NO: 1201878
uucacugggucccaaagca

SEQ ID NO: 1201880 - RNA, 19 nt, Artificial Sequence
  Description of Artificial Sequence: Synthetic oligonucleotide
  Sense strand starting at position 375 of SEQ ID NO: 917015
agugaauaguuaucugcca

SEQ ID NO: 1201881 - RNA, 19 nt, Artificial Sequence
  Description of Artificial Sequence: Synthetic oligonucleotide
  Antisense strand to SEQ ID NO: 1201880
uggcagauaacuauucacu

SEQ ID NO: 1201882 - RNA, 19 nt, Artificial Sequence
  Description of Artificial Sequence: Synthetic oligonucleotide
  Sense strand starting at position 435 of SEQ ID NO: 917015
ucaguauugccuuacucac

SEQ ID NO: 1201883 - RNA, 19 nt, Artificial Sequence
  Description of Artificial Sequence: Synthetic oligonucleotide
  Antisense strand to SEQ ID NO: 1201882
gugaguaaggcaauacuga

SEQ ID NO: 1201884 - RNA, 19 nt, Artificial Sequence
  Description of Artificial Sequence: Synthetic oligonucleotide
  Sense strand starting at position 507 of SEQ ID NO: 917015
gaagaaguuuaugcagaca

SEQ ID NO: 1201885 - RNA, 19 nt, Artificial Sequence
  Description of Artificial Sequence: Synthetic oligonucleotide
  Antisense strand to SEQ ID NO: 1201884
ugucugcauaaacuucuuc

SEQ ID NO: 1201886 - RNA, 19 nt, Artificial Sequence
  Description of Artificial Sequence: Synthetic oligonucleotide
  Sense strand starting at position 510 of SEQ ID NO: 917015
gaaguuuaugcagacauug

SEQ ID NO: 1201887 - RNA, 19 nt, Artificial Sequence
  Description of Artificial Sequence: Synthetic oligonucleotide
  Antisense strand to SEQ ID NO: 1201886
caaugucugcauaaacuuc

SEQ ID NO: 1201888 - RNA, 19 nt, Artificial Sequence
  Description of Artificial Sequence: Synthetic oligonucleotide
  Sense strand starting at position 515 of SEQ ID NO: 917015
uuaugcagacauugacauu

SEQ ID NO: 1201889 - RNA, 19 nt, Artificial Sequence
  Description of Artificial Sequence: Synthetic oligonucleotide
  Antisense strand to SEQ ID NO: 1201888
aaugucaaugucugcauaa

SEQ ID NO: 1201890 - RNA, 19 nt, Artificial Sequence
  Description of Artificial Sequence: Synthetic oligonucleotide
  Sense strand starting at position 518 of SEQ ID NO: 917015
ugcagacauugacauuuga

SEQ ID NO: 1201891 - RNA, 19 nt, Artificial Sequence
  Description of Artificial Sequence: Synthetic oligonucleotide
  Antisense strand to SEQ ID NO: 1201890
ucaaaugucaaugucugca

SEQ ID NO: 1201892 - RNA, 19 nt, Artificial Sequence
  Description of Artificial Sequence: Synthetic oligonucleotide
  Sense strand starting at position 533 of SEQ ID NO: 917015
uugacaguauguuuaguca

SEQ ID NO: 1201893 - RNA, 19 nt, Artificial Sequence
  Description of Artificial Sequence: Synthetic oligonucleotide
  Antisense strand to SEQ ID NO: 1201892
ugacuaaacauacugucaa

SEQ ID NO: 1201894 - RNA, 19 nt, Artificial Sequence
  Description of Artificial Sequence: Synthetic oligonucleotide
  Sense strand starting at position 945 of SEQ ID NO: 917015
ggauuugguugauaaacuc

SEQ ID NO: 1201895 - RNA, 19 nt, Artificial Sequence
  Description of Artificial Sequence: Synthetic oligonucleotide
  Antisense strand to SEQ ID NO: 1201894
gaguuuaucaaccaaaucc

SEQ ID NO: 1201896 - RNA, 19 nt, Artificial Sequence
  Description of Artificial Sequence: Synthetic oligonucleotide
  Sense strand starting at position 952 of SEQ ID NO: 917015
guugauaaacucugauagu

SEQ ID NO: 1201897 - RNA, 19 nt, Artificial Sequence
  Description of Artificial Sequence: Synthetic oligonucleotide
  Antisense strand to SEQ ID NO: 1201896
acuaucagaguuuaucaac

SEQ ID NO: 1201898 - RNA, 19 nt, Artificial Sequence
  Description of Artificial Sequence: Synthetic oligonucleotide
  Sense strand starting at position 1260 of SEQ ID NO: 917015
acccauaacuaagaagaga

SEQ ID NO: 1201899 - RNA, 19 nt, Artificial Sequence
  Description of Artificial Sequence: Synthetic oligonucleotide
  Antisense strand to SEQ ID NO: 1201898
ucucuucuuaguuaugggu

SEQ ID NO: 1201900 - RNA, 19 nt, Artificial Sequence
  Description of Artificial Sequence: Synthetic oligonucleotide
  Sense strand starting at position 1300 of SEQ ID NO: 917015
agaccaggcuuuguaaacu

SEQ ID NO: 1201901 - RNA, 19 nt, Artificial Sequence
  Description of Artificial Sequence: Synthetic oligonucleotide
  Antisense strand to SEQ ID NO: 1201900
aguuuacaaagccuggucu

SEQ ID NO: 1201902 - RNA, 19 nt, Artificial Sequence
  Description of Artificial Sequence: Synthetic oligonucleotide
  Sense strand starting at position 1522 of SEQ ID NO: 917015
cuuacaaacuuugcggaaa

SEQ ID NO: 1201903 - RNA, 19 nt, Artificial Sequence
  Description of Artificial Sequence: Synthetic oligonucleotide
  Antisense strand to SEQ ID NO: 1201902
uuuccgcaaaguuuguaag

SEQ ID NO: 1201904 - RNA, 19 nt, Artificial Sequence
  Description of Artificial Sequence: Synthetic oligonucleotide
  Sense strand starting at position 1625 of SEQ ID NO: 917015
guagacagauuauaaagaa

SEQ ID NO: 1201905 - RNA, 19 nt, Artificial Sequence
  Description of Artificial Sequence: Synthetic oligonucleotide
  Antisense strand to SEQ ID NO: 1201904
uucuuuauaaucugucuac

SEQ ID NO: 1201906 - RNA, 19 nt, Artificial Sequence
  Description of Artificial Sequence: Synthetic oligonucleotide
  Sense strand starting at position 1646 of SEQ ID NO: 917015
agaaauuugaggugugcgu

SEQ ID NO: 1201907 - RNA, 19 nt, Artificial Sequence
  Description of Artificial Sequence: Synthetic oligonucleotide
  Antisense strand to SEQ ID NO: 1201906
acgcacaccucaaauuucu

SEQ ID NO: 1201908 - RNA, 19 nt, Artificial Sequence
  Description of Artificial Sequence: Synthetic oligonucleotide
  Sense strand starting at position 1653 of SEQ ID NO: 917015
ugaggugugcgugcuuaca

SEQ ID NO: 1201909 - RNA, 19 nt, Artificial Sequence
  Description of Artificial Sequence: Synthetic oligonucleotide
  Antisense strand to SEQ ID NO: 1201908
uguaagcacgcacaccuca

SEQ ID NO: 1201910 - RNA, 19 nt, Artificial Sequence
  Description of Artificial Sequence: Synthetic oligonucleotide
  Sense strand starting at position 2071 of SEQ ID NO: 917015
acucauuucugguugccga

SEQ ID NO: 1201911 - RNA, 19 nt, Artificial Sequence
  Description of Artificial Sequence: Synthetic oligonucleotide
  Antisense strand to SEQ ID NO: 1201910
ucggcaaccagaaaugagu

SEQ ID NO: 1201912 - RNA, 19 nt, Artificial Sequence
  Description of Artificial Sequence: Synthetic oligonucleotide
  Sense strand starting at position 2134 of SEQ ID NO: 917015
cucauagugugauuuguuu

SEQ ID NO: 1201913 - RNA, 19 nt, Artificial Sequence
  Description of Artificial Sequence: Synthetic oligonucleotide
  Antisense strand to SEQ ID NO: 1201912
aaacaaaucacacuaugag

SEQ ID NO: 1201914 - RNA, 19 nt, Artificial Sequence
  Description of Artificial Sequence: Synthetic oligonucleotide
  Sense strand starting at position 2273 of SEQ ID NO: 917015
gcaaguuaaccucagucuu

SEQ ID NO: 1201915 - RNA, 19 nt, Artificial Sequence
  Description of Artificial Sequence: Synthetic oligonucleotide
  Antisense strand to SEQ ID NO: 1201914
aagacugagguuaacuugc

SEQ ID NO: 1201916 - RNA, 19 nt, Artificial Sequence
  Description of Artificial Sequence: Synthetic oligonucleotide
  Sense strand starting at position 2598 of SEQ ID NO: 917015
uauugugcucccgaacacu

SEQ ID NO: 1201917 - RNA, 19 nt, Artificial Sequence
  Description of Artificial Sequence: Synthetic oligonucleotide
  Antisense strand to SEQ ID NO: 1201916
aguguucgggagcacaaua

SEQ ID NO: 1201918 - RNA, 19 nt, Artificial Sequence
  Description of Artificial Sequence: Synthetic oligonucleotide
  Sense strand starting at position 2790 of SEQ ID NO: 917015
ugcagaguuauauggagga

SEQ ID NO: 1201919 - RNA, 19 nt, Artificial Sequence
  Description of Artificial Sequence: Synthetic oligonucleotide
  Antisense strand to SEQ ID NO: 1201918
uccuccauauaacucugca

SEQ ID NO: 1201920 - RNA, 19 nt, Artificial Sequence
  Description of Artificial Sequence: Synthetic oligonucleotide
  Sense strand starting at position 3029 of SEQ ID NO: 917015
uuaaauauacgagaucugu

SEQ ID NO: 1201921 - RNA, 19 nt, Artificial Sequence
  Description of Artificial Sequence: Synthetic oligonucleotide
  Antisense strand to SEQ ID NO: 1201920
acagaucucguauauuuaa

SEQ ID NO: 1201922 - RNA, 19 nt, Artificial Sequence
  Description of Artificial Sequence: Synthetic oligonucleotide
  Sense strand starting at position 3048 of SEQ ID NO: 917015
gcguuauguggugaggaga

SEQ ID NO: 1201923 - RNA, 19 nt, Artificial Sequence
  Description of Artificial Sequence: Synthetic oligonucleotide
  Antisense strand to SEQ ID NO: 1201922
ucuccucaccacauaacgc

SEQ ID NO: 1201924 - RNA, 19 nt, Artificial Sequence
  Description of Artificial Sequence: Synthetic oligonucleotide
  Sense strand starting at position 3076 of SEQ ID NO: 917015
uuaagaguacuaugacauu

SEQ ID NO: 1201925 - RNA, 19 nt, Artificial Sequence
  Description of Artificial Sequence: Synthetic oligonucleotide
  Antisense strand to SEQ ID NO: 1201924
aaugucauaguacucuuaa

SEQ ID NO: 1201926 - RNA, 19 nt, Artificial Sequence
  Description of Artificial Sequence: Synthetic oligonucleotide
  Sense strand starting at position 3079 of SEQ ID NO: 917015
agaguacuaugacauuuga

SEQ ID NO: 1201927 - RNA, 19 nt, Artificial Sequence
  Description of Artificial Sequence: Synthetic oligonucleotide
  Antisense strand to SEQ ID NO: 1201926
ucaaaugucauaguacucu

SEQ ID NO: 1201928 - RNA, 19 nt, Artificial Sequence
  Description of Artificial Sequence: Synthetic oligonucleotide
  Sense strand starting at position 3317 of SEQ ID NO: 917015
acugcuugucuauauagaa

SEQ ID NO: 1201929 - RNA, 19 nt, Artificial Sequence
  Description of Artificial Sequence: Synthetic oligonucleotide
  Antisense strand to SEQ ID NO: 1201928
uucuauauagacaagcagu

SEQ ID NO: 1201930 - RNA, 19 nt, Artificial Sequence
  Description of Artificial Sequence: Synthetic oligonucleotide
  Sense strand starting at position 3363 of SEQ ID NO: 917015
acuaauauugacugaaguu

SEQ ID NO: 1201931 - RNA, 19 nt, Artificial Sequence
  Description of Artificial Sequence: Synthetic oligonucleotide
  Antisense strand to SEQ ID NO: 1201930
aacuucagucaauauuagu

SEQ ID NO: 1201932 - RNA, 19 nt, Artificial Sequence
  Description of Artificial Sequence: Synthetic oligonucleotide
  Sense strand starting at position 3377 of SEQ ID NO: 917015
aaguuuaauuguuucugga

SEQ ID NO: 1201933 - RNA, 19 nt, Artificial Sequence
  Description of Artificial Sequence: Synthetic oligonucleotide
  Antisense strand to SEQ ID NO: 1201932
uccagaaacaauuaaacuu

SEQ ID NO: 1201934 - RNA, 19 nt, Artificial Sequence
  Description of Artificial Sequence: Synthetic oligonucleotide
  Sense strand starting at position 3458 of SEQ ID NO: 917015
cuguaagggucagcucuaa

SEQ ID NO: 1201935 - RNA, 19 nt, Artificial Sequence
  Description of Artificial Sequence: Synthetic oligonucleotide
  Antisense strand to SEQ ID NO: 1201934
uuagagcugacccuuacag

SEQ ID NO: 1201936 - RNA, 19 nt, Artificial Sequence
  Description of Artificial Sequence: Synthetic oligonucleotide
  Sense strand starting at position 3533 of SEQ ID NO: 917015
uagcuaauguuacugagau

SEQ ID NO: 1201937 - RNA, 19 nt, Artificial Sequence
  Description of Artificial Sequence: Synthetic oligonucleotide
  Antisense strand to SEQ ID NO: 1201936
aucucaguaacauuagcua

SEQ ID NO: 1201938 - RNA, 19 nt, Artificial Sequence
  Description of Artificial Sequence: Synthetic oligonucleotide
  Sense strand starting at position 3535 of SEQ ID NO: 917015
gcuaauguuacugagaugu

SEQ ID NO: 1201939 - RNA, 19 nt, Artificial Sequence
  Description of Artificial Sequence: Synthetic oligonucleotide
  Antisense strand to SEQ ID NO: 1201938
acaucucaguaacauuagc

SEQ ID NO: 1201940 - RNA, 19 nt, Artificial Sequence
  Description of Artificial Sequence: Synthetic oligonucleotide
  Sense strand starting at position 3539 of SEQ ID NO: 917015
auguuacugagauguaaug

SEQ ID NO: 1201941 - RNA, 19 nt, Artificial Sequence
  Description of Artificial Sequence: Synthetic oligonucleotide
  Antisense strand to SEQ ID NO: 1201940
cauuacaucucaguaacau

SEQ ID NO: 1201942 - RNA, 19 nt, Artificial Sequence
  Description of Artificial Sequence: Synthetic oligonucleotide
  Sense strand starting at position 3602 of SEQ ID NO: 917015
ccugcuuggauguggaaau

SEQ ID NO: 1201943 - RNA, 19 nt, Artificial Sequence
  Description of Artificial Sequence: Synthetic oligonucleotide
  Antisense strand to SEQ ID NO: 1201942
auuuccacauccaagcagg

SEQ ID NO: 1201944 - RNA, 19 nt, Artificial Sequence
  Description of Artificial Sequence: Synthetic oligonucleotide
  Sense strand starting at position 3746 of SEQ ID NO: 917015
acaagagucgcauaaguug

SEQ ID NO: 1201945 - RNA, 19 nt, Artificial Sequence
  Description of Artificial Sequence: Synthetic oligonucleotide
  Antisense strand to SEQ ID NO: 1201944
caacuuaugcgacucuugu

SEQ ID NO: 1201946 - RNA, 19 nt, Artificial Sequence
  Description of Artificial Sequence: Synthetic oligonucleotide
  Sense strand starting at position 3818 of SEQ ID NO: 917015
aggcuuugcagucauggga

SEQ ID NO: 1201947 - RNA, 19 nt, Artificial Sequence
  Description of Artificial Sequence: Synthetic oligonucleotide
  Antisense strand to SEQ ID NO: 1201946
ucccaugacugcaaagccu

SEQ ID NO: 1201948 - RNA, 19 nt, Artificial Sequence
  Description of Artificial Sequence: Synthetic oligonucleotide
  Sense strand starting at position 3879 of SEQ ID NO: 917015
cgcacuuuacaugacagaa

SEQ ID NO: 1201949 - RNA, 19 nt, Artificial Sequence
  Description of Artificial Sequence: Synthetic oligonucleotide
  Antisense strand to SEQ ID NO: 1201948
uucugucauguaaagugcg

SEQ ID NO: 1201950 - RNA, 19 nt, Artificial Sequence
  Description of Artificial Sequence: Synthetic oligonucleotide
  Sense strand starting at position 119 of SEQ ID NO: 917016
ggucccuuucuccagagau

SEQ ID NO: 1201951 - RNA, 19 nt, Artificial Sequence
  Description of Artificial Sequence: Synthetic oligonucleotide
  Antisense strand to SEQ ID NO: 1201950
aucucuggagaaagggacc

SEQ ID NO: 1201952 - RNA, 19 nt, Artificial Sequence
  Description of Artificial Sequence: Synthetic oligonucleotide
  Sense strand starting at position 131 of SEQ ID NO: 917016
cagagauaccugcgaugac

SEQ ID NO: 1201953 - RNA, 19 nt, Artificial Sequence
  Description of Artificial Sequence: Synthetic oligonucleotide
  Antisense strand to SEQ ID NO: 1201952
gucaucgcagguaucucug

SEQ ID NO: 1201954 - RNA, 19 nt, Artificial Sequence
  Description of Artificial Sequence: Synthetic oligonucleotide
  Sense strand starting at position 265 of SEQ ID NO: 917016
ccaaucagcuguugagaaa

SEQ ID NO: 1201955 - RNA, 19 nt, Artificial Sequence
  Description of Artificial Sequence: Synthetic oligonucleotide
  Antisense strand to SEQ ID NO: 1201954
uuucucaacagcugauugg

SEQ ID NO: 1201956 - RNA, 19 nt, Artificial Sequence
  Description of Artificial Sequence: Synthetic oligonucleotide
  Sense strand starting at position 266 of SEQ ID NO: 917016
caaucagcuguugagaaac

SEQ ID NO: 1201957 - RNA, 19 nt, Artificial Sequence
  Description of Artificial Sequence: Synthetic oligonucleotide
  Antisense strand to SEQ ID NO: 1201956
guuucucaacagcugauug

SEQ ID NO: 1201958 - RNA, 19 nt, Artificial Sequence
  Description of Artificial Sequence: Synthetic oligonucleotide
  Sense strand starting at position 272 of SEQ ID NO: 917016
gcuguugagaaacagacuu

SEQ ID NO: 1201959 - RNA, 19 nt, Artificial Sequence
  Description of Artificial Sequence: Synthetic oligonucleotide
  Antisense strand to SEQ ID NO: 1201958
aagucuguuucucaacagc

SEQ ID NO: 1201960 - RNA, 19 nt, Artificial Sequence
  Description of Artificial Sequence: Synthetic oligonucleotide
  Sense strand starting at position 418 of SEQ ID NO: 917016
ugaucaugccagggcuaaa

SEQ ID NO: 1201961 - RNA, 19 nt, Artificial Sequence
  Description of Artificial Sequence: Synthetic oligonucleotide
  Antisense strand to SEQ ID NO: 1201960
uuuagcccuggcaugauca

SEQ ID NO: 1201962 - RNA, 19 nt, Artificial Sequence
  Description of Artificial Sequence: Synthetic oligonucleotide
  Sense strand starting at position 852 of SEQ ID NO: 917016
cgaagagccuuccagauac

SEQ ID NO: 1201963 - RNA, 19 nt, Artificial Sequence
  Description of Artificial Sequence: Synthetic oligonucleotide
  Antisense strand to SEQ ID NO: 1201962
guaucuggaaggcucuucg

SEQ ID NO: 1201964 - RNA, 19 nt, Artificial Sequence
  Description of Artificial Sequence: Synthetic oligonucleotide
  Sense strand starting at position 922 of SEQ ID NO: 917016
gcuccaauuuccucgagcu

SEQ ID NO: 1201965 - RNA, 19 nt, Artificial Sequence
  Description of Artificial Sequence: Synthetic oligonucleotide
  Antisense strand to SEQ ID NO: 1201964
agcucgaggaaauuggagc

SEQ ID NO: 1201966 - RNA, 19 nt, Artificial Sequence
  Description of Artificial Sequence: Synthetic oligonucleotide
  Sense strand starting at position 923 of SEQ ID NO: 917016
cuccaauuuccucgagcua

SEQ ID NO: 1201967 - RNA, 19 nt, Artificial Sequence
  Description of Artificial Sequence: Synthetic oligonucleotide
  Antisense strand to SEQ ID NO: 1201966
uagcucgaggaaauuggag

SEQ ID NO: 1201968 - RNA, 19 nt, Artificial Sequence
  Description of Artificial Sequence: Synthetic oligonucleotide
  Sense strand starting at position 934 of SEQ ID NO: 917016
ucgagcuauucucggcaua

SEQ ID NO: 1201969 - RNA, 19 nt, Artificial Sequence
  Description of Artificial Sequence: Synthetic oligonucleotide
  Antisense strand to SEQ ID NO: 1201968
uaugccgagaauagcucga

SEQ ID NO: 1201970 - RNA, 19 nt, Artificial Sequence
  Description of Artificial Sequence: Synthetic oligonucleotide
  Sense strand starting at position 935 of SEQ ID NO: 917016
cgagcuauucucggcauag

SEQ ID NO: 1201971 - RNA, 19 nt, Artificial Sequence
  Description of Artificial Sequence: Synthetic oligonucleotide
  Antisense strand to SEQ ID NO: 1201970
cuaugccgagaauagcucg

SEQ ID NO: 1201972 - RNA, 19 nt, Artificial Sequence
  Description of Artificial Sequence: Synthetic oligonucleotide
  Sense strand starting at position 936 of SEQ ID NO: 917016
gagcuauucucggcauagg

SEQ ID NO: 1201973 - RNA, 19 nt, Artificial Sequence
  Description of Artificial Sequence: Synthetic oligonucleotide
  Antisense strand to SEQ ID NO: 1201972
ccuaugccgagaauagcuc

SEQ ID NO: 1201974 - RNA, 19 nt, Artificial Sequence
  Description of Artificial Sequence: Synthetic oligonucleotide
  Sense strand starting at position 968 of SEQ ID NO: 917016
cagcauucuccagggagca

SEQ ID NO: 1201975 - RNA, 19 nt, Artificial Sequence
  Description of Artificial Sequence: Synthetic oligonucleotide
  Antisense strand to SEQ ID NO: 1201974
ugcucccuggagaaugcug

SEQ ID NO: 1201976 - RNA, 19 nt, Artificial Sequence
  Description of Artificial Sequence: Synthetic oligonucleotide
  Sense strand starting at position 969 of SEQ ID NO: 917016
agcauucuccagggagcaa

SEQ ID NO: 1201977 - RNA, 19 nt, Artificial Sequence
  Description of Artificial Sequence: Synthetic oligonucleotide
  Antisense strand to SEQ ID NO: 1201976
uugcucccuggagaaugcu

SEQ ID NO: 1201978 - RNA, 19 nt, Artificial Sequence
  Description of Artificial Sequence: Synthetic oligonucleotide
  Sense strand starting at position 2173 of SEQ ID NO: 917016
guggcaacguucuaggaga

SEQ ID NO: 1201979 - RNA, 19 nt, Artificial Sequence
  Description of Artificial Sequence: Synthetic oligonucleotide
  Antisense strand to SEQ ID NO: 1201978
ucuccuagaacguugccac

SEQ ID NO: 1201980 - RNA, 19 nt, Artificial Sequence
  Description of Artificial Sequence: Synthetic oligonucleotide
  Sense strand starting at position 2175 of SEQ ID NO: 917016
ggcaacguucuaggagagu

SEQ ID NO: 1201981 - RNA, 19 nt, Artificial Sequence
  Description of Artificial Sequence: Synthetic oligonucleotide
  Antisense strand to SEQ ID NO: 1201980
acucuccuagaacguugcc

SEQ ID NO: 1201982 - RNA, 19 nt, Artificial Sequence
  Description of Artificial Sequence: Synthetic oligonucleotide
  Sense strand starting at position 2383 of SEQ ID NO: 917016
ccucuccaacugugggaua

SEQ ID NO: 1201983 - RNA, 19 nt, Artificial Sequence
  Description of Artificial Sequence: Synthetic oligonucleotide
  Antisense strand to SEQ ID NO: 1201982
uaucccacaguuggagagg

SEQ ID NO: 1201984 - RNA, 19 nt, Artificial Sequence
  Description of Artificial Sequence: Synthetic oligonucleotide
  Sense strand starting at position 2385 of SEQ ID NO: 917016
ucuccaacugugggauaga

SEQ ID NO: 1201985 - RNA, 19 nt, Artificial Sequence
  Description of Artificial Sequence: Synthetic oligonucleotide
  Antisense strand to SEQ ID NO: 1201984
ucuaucccacaguuggaga

SEQ ID NO: 1201986 - RNA, 19 nt, Artificial Sequence
  Description of Artificial Sequence: Synthetic oligonucleotide
  Sense strand starting at position 2650 of SEQ ID NO: 917016
ccuccacuccugugugaau

SEQ ID NO: 1201987 - RNA, 19 nt, Artificial Sequence
  Description of Artificial Sequence: Synthetic oligonucleotide
  Antisense strand to SEQ ID NO: 1201986
auucacacaggaguggagg

SEQ ID NO: 1201988 - RNA, 19 nt, Artificial Sequence
  Description of Artificial Sequence: Synthetic oligonucleotide
  Sense strand starting at position 2651 of SEQ ID NO: 917016
cuccacuccugugugaaua

SEQ ID NO: 1201989 - RNA, 19 nt, Artificial Sequence
  Description of Artificial Sequence: Synthetic oligonucleotide
  Antisense strand to SEQ ID NO: 1201988
uauucacacaggaguggag

SEQ ID NO: 1201990 - RNA, 19 nt, Artificial Sequence
  Description of Artificial Sequence: Synthetic oligonucleotide
  Sense strand starting at position 2652 of SEQ ID NO: 917016
uccacuccugugugaauaa

SEQ ID NO: 1201991 - RNA, 19 nt, Artificial Sequence
  Description of Artificial Sequence: Synthetic oligonucleotide
  Antisense strand to SEQ ID NO: 1201990
uuauucacacaggagugga

SEQ ID NO: 1201992 - RNA, 19 nt, Artificial Sequence
  Description of Artificial Sequence: Synthetic oligonucleotide
  Sense strand starting at position 2653 of SEQ ID NO: 917016
ccacuccugugugaauaaa

SEQ ID NO: 1201993 - RNA, 19 nt, Artificial Sequence
  Description of Artificial Sequence: Synthetic oligonucleotide
  Antisense strand to SEQ ID NO: 1201992
uuuauucacacaggagugg

SEQ ID NO: 1201994 - RNA, 19 nt, Artificial Sequence
  Description of Artificial Sequence: Synthetic oligonucleotide
  Sense strand starting at position 2703 of SEQ ID NO: 917016
uuggcuuugugucggcauu

SEQ ID NO: 1201995 - RNA, 19 nt, Artificial Sequence
  Description of Artificial Sequence: Synthetic oligonucleotide
  Antisense strand to SEQ ID NO: 1201994
aaugccgacacaaagccaa

SEQ ID NO: 1201996 - RNA, 19 nt, Artificial Sequence
  Description of Artificial Sequence: Synthetic oligonucleotide
  Sense strand starting at position 2705 of SEQ ID NO: 917016
ggcuuugugucggcauuua

SEQ ID NO: 1201997 - RNA, 19 nt, Artificial Sequence
  Description of Artificial Sequence: Synthetic oligonucleotide
  Antisense strand to SEQ ID NO: 1201996
uaaaugccgacacaaagcc

SEQ ID NO: 1201998 - RNA, 19 nt, Artificial Sequence
  Description of Artificial Sequence: Synthetic oligonucleotide
  Sense strand starting at position 2716 of SEQ ID NO: 917016
ggcauuuagucacucuacu

SEQ ID NO: 1201999 - RNA, 19 nt, Artificial Sequence
  Description of Artificial Sequence: Synthetic oligonucleotide
  Antisense strand to SEQ ID NO: 1201998
aguagagugacuaaaugcc

SEQ ID NO: 1202000 - RNA, 19 nt, Artificial Sequence
  Description of Artificial Sequence: Synthetic oligonucleotide
  Sense strand starting at position 2895 of SEQ ID NO: 917016
caauuuagccguuguacuu

SEQ ID NO: 1202001 - RNA, 19 nt, Artificial Sequence
  Description of Artificial Sequence: Synthetic oligonucleotide
  Antisense strand to SEQ ID NO: 1202000
aaguacaacggcuaaauug

SEQ ID NO: 1202002 - RNA, 19 nt, Artificial Sequence
  Description of Artificial Sequence: Synthetic oligonucleotide
  Sense strand starting at position 3598 of SEQ ID NO: 917016
ggcaucauguagucucuca

SEQ ID NO: 1202003 - RNA, 19 nt, Artificial Sequence
  Description of Artificial Sequence: Synthetic oligonucleotide
  Antisense strand to SEQ ID NO: 1202002
ugagagacuacaugaugcc

SEQ ID NO: 1202004 - RNA, 19 nt, Artificial Sequence
  Description of Artificial Sequence: Synthetic oligonucleotide
  Sense strand starting at position 3678 of SEQ ID NO: 917016
caccaugugccuuaaggga

SEQ ID NO: 1202005 - RNA, 19 nt, Artificial Sequence
  Description of Artificial Sequence: Synthetic oligonucleotide
  Antisense strand to SEQ ID NO: 1202004
ucccuuaaggcacauggug

SEQ ID NO: 1202006 - RNA, 19 nt, Artificial Sequence
  Description of Artificial Sequence: Synthetic oligonucleotide
  Sense strand starting at position 3847 of SEQ ID NO: 917016
cucucuggucucugacaca

SEQ ID NO: 1202007 - RNA, 19 nt, Artificial Sequence
  Description of Artificial Sequence: Synthetic oligonucleotide
  Antisense strand to SEQ ID NO: 1202006
ugugucagagaccagagag

SEQ ID NO: 1202008 - RNA, 19 nt, Artificial Sequence
  Description of Artificial Sequence: Synthetic oligonucleotide
  Sense strand starting at position 3915 of SEQ ID NO: 917016
aaacaaguguguccagguu

SEQ ID NO: 1202009 - RNA, 19 nt, Artificial Sequence
  Description of Artificial Sequence: Synthetic oligonucleotide
  Antisense strand to SEQ ID NO: 1202008
aaccuggacacacuuguuu

SEQ ID NO: 1202010 - RNA, 19 nt, Artificial Sequence
  Description of Artificial Sequence: Synthetic oligonucleotide
  Sense strand starting at position 10 of SEQ ID NO: 917017
ggucccuuucuccagagau

SEQ ID NO: 1202011 - RNA, 19 nt, Artificial Sequence
  Description of Artificial Sequence: Synthetic oligonucleotide
  Antisense strand to SEQ ID NO: 1202010
aucucuggagaaagggacc

SEQ ID NO: 1202012 - RNA, 19 nt, Artificial Sequence
  Description of Artificial Sequence: Synthetic oligonucleotide
  Sense strand starting at position 22 of SEQ ID NO: 917017
cagagauaccugcgaugac

SEQ ID NO: 1202013 - RNA, 19 nt, Artificial Sequence
  Description of Artificial Sequence: Synthetic oligonucleotide
  Antisense strand to SEQ ID NO: 1202012
gucaucgcagguaucucug

SEQ ID NO: 1202014 - RNA, 19 nt, Artificial Sequence
  Description of Artificial Sequence: Synthetic oligonucleotide
  Sense strand starting at position 156 of SEQ ID NO: 917017
ccaaucagcuguugagaaa

SEQ ID NO: 1202015 - RNA, 19 nt, Artificial Sequence
  Description of Artificial Sequence: Synthetic oligonucleotide
  Antisense strand to SEQ ID NO: 1202014
uuucucaacagcugauugg

SEQ ID NO: 1202016 - RNA, 19 nt, Artificial Sequence
  Description of Artificial Sequence: Synthetic oligonucleotide
  Sense strand starting at position 157 of SEQ ID NO: 917017
caaucagcuguugagaaac

SEQ ID NO: 1202017 - RNA, 19 nt, Artificial Sequence
  Description of Artificial Sequence: Synthetic oligonucleotide
  Antisense strand to SEQ ID NO: 1202016
guuucucaacagcugauug

SEQ ID NO: 1202018 - RNA, 19 nt, Artificial Sequence
  Description of Artificial Sequence: Synthetic oligonucleotide
  Sense strand starting at position 163 of SEQ ID NO: 917017
gcuguugagaaacagacuu

SEQ ID NO: 1202019 - RNA, 19 nt, Artificial Sequence
  Description of Artificial Sequence: Synthetic oligonucleotide
  Antisense strand to SEQ ID NO: 1202018
aagucuguuucucaacagc

SEQ ID NO: 1202020 - RNA, 19 nt, Artificial Sequence
  Description of Artificial Sequence: Synthetic oligonucleotide
  Sense strand starting at position 309 of SEQ ID NO: 917017
ugaucaugccagggcuaaa

SEQ ID NO: 1202021 - RNA, 19 nt, Artificial Sequence
  Description of Artificial Sequence: Synthetic oligonucleotide
  Antisense strand to SEQ ID NO: 1202020
uuuagcccuggcaugauca

SEQ ID NO: 1202022 - RNA, 19 nt, Artificial Sequence
  Description of Artificial Sequence: Synthetic oligonucleotide
  Sense strand starting at position 743 of SEQ ID NO: 917017
cgaagagccuuccagauac

SEQ ID NO: 1202023 - RNA, 19 nt, Artificial Sequence
  Description of Artificial Sequence: Synthetic oligonucleotide
  Antisense strand to SEQ ID NO: 1202022
guaucuggaaggcucuucg

SEQ ID NO: 1202024 - RNA, 19 nt, Artificial Sequence
  Description of Artificial Sequence: Synthetic oligonucleotide
  Sense strand starting at position 813 of SEQ ID NO: 917017
gcuccaauuuccucgagcu

SEQ ID NO: 1202025 - RNA, 19 nt, Artificial Sequence
  Description of Artificial Sequence: Synthetic oligonucleotide
  Antisense strand to SEQ ID NO: 1202024
agcucgaggaaauuggagc

SEQ ID NO: 1202026 - RNA, 19 nt, Artificial Sequence
  Description of Artificial Sequence: Synthetic oligonucleotide
  Sense strand starting at position 814 of SEQ ID NO: 917017
cuccaauuuccucgagcua

SEQ ID NO: 1202027 - RNA, 19 nt, Artificial Sequence
  Description of Artificial Sequence: Synthetic oligonucleotide
  Antisense strand to SEQ ID NO: 1202026
uagcucgaggaaauuggag

SEQ ID NO: 1202028 - RNA, 19 nt, Artificial Sequence
  Description of Artificial Sequence: Synthetic oligonucleotide
  Sense strand starting at position 825 of SEQ ID NO: 917017
ucgagcuauucucggcaua

SEQ ID NO: 1202029 - RNA, 19 nt, Artificial Sequence
  Description of Artificial Sequence: Synthetic oligonucleotide
  Antisense strand to SEQ ID NO: 1202028
uaugccgagaauagcucga

SEQ ID NO: 1202030 - RNA, 19 nt, Artificial Sequence
  Description of Artificial Sequence: Synthetic oligonucleotide
  Sense strand starting at position 826 of SEQ ID NO: 917017
cgagcuauucucggcauag

SEQ ID NO: 1202031 - RNA, 19 nt, Artificial Sequence
  Description of Artificial Sequence: Synthetic oligonucleotide
  Antisense strand to SEQ ID NO: 1202030
cuaugccgagaauagcucg

SEQ ID NO: 1202032 - RNA, 19 nt, Artificial Sequence
  Description of Artificial Sequence: Synthetic oligonucleotide
  Sense strand starting at position 827 of SEQ ID NO: 917017
gagcuauucucggcauagg

SEQ ID NO: 1202033 - RNA, 19 nt, Artificial Sequence
  Description of Artificial Sequence: Synthetic oligonucleotide
  Antisense strand to SEQ ID NO: 1202032
ccuaugccgagaauagcuc

SEQ ID NO: 1202034 - RNA, 19 nt, Artificial Sequence
  Description of Artificial Sequence: Synthetic oligonucleotide
  Sense strand starting at position 859 of SEQ ID NO: 917017
cagcauucuccagggagca

SEQ ID NO: 1202035 - RNA, 19 nt, Artificial Sequence
  Description of Artificial Sequence: Synthetic oligonucleotide
  Antisense strand to SEQ ID NO: 1202034
ugcucccuggagaaugcug

SEQ ID NO: 1202036 - RNA, 19 nt, Artificial Sequence
  Description of Artificial Sequence: Synthetic oligonucleotide
  Sense strand starting at position 860 of SEQ ID NO: 917017
agcauucuccagggagcaa

SEQ ID NO: 1202037 - RNA, 19 nt, Artificial Sequence
  Description of Artificial Sequence: Synthetic oligonucleotide
  Antisense strand to SEQ ID NO: 1202036
uugcucccuggagaaugcu

SEQ ID NO: 1202038 - RNA, 19 nt, Artificial Sequence
  Description of Artificial Sequence: Synthetic oligonucleotide
  Sense strand starting at position 2064 of SEQ ID NO: 917017
guggcaacguucuaggaga

SEQ ID NO: 1202039 - RNA, 19 nt, Artificial Sequence
  Description of Artificial Sequence: Synthetic oligonucleotide
  Antisense strand to SEQ ID NO: 1202038
ucuccuagaacguugccac

SEQ ID NO: 1202040 - RNA, 19 nt, Artificial Sequence
  Description of Artificial Sequence: Synthetic oligonucleotide
  Sense strand starting at position 2066 of SEQ ID NO: 917017
ggcaacguucuaggagagu

SEQ ID NO: 1202041 - RNA, 19 nt, Artificial Sequence
  Description of Artificial Sequence: Synthetic oligonucleotide
  Antisense strand to SEQ ID NO: 1202040
acucuccuagaacguugcc

SEQ ID NO: 1202042 - RNA, 19 nt, Artificial Sequence
  Description of Artificial Sequence: Synthetic oligonucleotide
  Sense strand starting at position 2274 of SEQ ID NO: 917017
ccucuccaacugugggaua

SEQ ID NO: 1202043 - RNA, 19 nt, Artificial Sequence
  Description of Artificial Sequence: Synthetic oligonucleotide
  Antisense strand to SEQ ID NO: 1202042
uaucccacaguuggagagg

SEQ ID NO: 1202044 - RNA, 19 nt, Artificial Sequence
  Description of Artificial Sequence: Synthetic oligonucleotide
  Sense strand starting at position 2276 of SEQ ID NO: 917017
ucuccaacugugggauaga

SEQ ID NO: 1202045 - RNA, 19 nt, Artificial Sequence
  Description of Artificial Sequence: Synthetic oligonucleotide
  Antisense strand to SEQ ID NO: 1202044
ucuaucccacaguuggaga

SEQ ID NO: 1202046 - RNA, 19 nt, Artificial Sequence
  Description of Artificial Sequence: Synthetic oligonucleotide
  Sense strand starting at position 2541 of SEQ ID NO: 917017
ccuccacuccugugugaau

SEQ ID NO: 1202047 - RNA, 19 nt, Artificial Sequence
  Description of Artificial Sequence: Synthetic oligonucleotide
  Antisense strand to SEQ ID NO: 1202046
auucacacaggaguggagg

SEQ ID NO: 1202048 - RNA, 19 nt, Artificial Sequence
  Description of Artificial Sequence: Synthetic oligonucleotide
  Sense strand starting at position 2542 of SEQ ID NO: 917017
cuccacuccugugugaaua

SEQ ID NO: 1202049 - RNA, 19 nt, Artificial Sequence
  Description of Artificial Sequence: Synthetic oligonucleotide
  Antisense strand to SEQ ID NO: 1202048
uauucacacaggaguggag

SEQ ID NO: 1202050 - RNA, 19 nt, Artificial Sequence
  Description of Artificial Sequence: Synthetic oligonucleotide
  Sense strand starting at position 2543 of SEQ ID NO: 917017
uccacuccugugugaauaa

SEQ ID NO: 1202051 - RNA, 19 nt, Artificial Sequence
  Description of Artificial Sequence: Synthetic oligonucleotide
  Antisense strand to SEQ ID NO: 1202050
uuauucacacaggagugga

SEQ ID NO: 1202052 - RNA, 19 nt, Artificial Sequence
  Description of Artificial Sequence: Synthetic oligonucleotide
  Sense strand starting at position 2544 of SEQ ID NO: 917017
ccacuccugugugaauaaa

SEQ ID NO: 1202053 - RNA, 19 nt, Artificial Sequence
  Description of Artificial Sequence: Synthetic oligonucleotide
  Antisense strand to SEQ ID NO: 1202052
uuuauucacacaggagugg

SEQ ID NO: 1202054 - RNA, 19 nt, Artificial Sequence
  Description of Artificial Sequence: Synthetic oligonucleotide
  Sense strand starting at position 2594 of SEQ ID NO: 917017
uuggcuuugugucggcauu

SEQ ID NO: 1202055 - RNA, 19 nt, Artificial Sequence
  Description of Artificial Sequence: Synthetic oligonucleotide
  Antisense strand to SEQ ID NO: 1202054
aaugccgacacaaagccaa

SEQ ID NO: 1202056 - RNA, 19 nt, Artificial Sequence
  Description of Artificial Sequence: Synthetic oligonucleotide
  Sense strand starting at position 2596 of SEQ ID NO: 917017
ggcuuugugucggcauuua

SEQ ID NO: 1202057 - RNA, 19 nt, Artificial Sequence
  Description of Artificial Sequence: Synthetic oligonucleotide
  Antisense strand to SEQ ID NO: 1202056
uaaaugccgacacaaagcc

SEQ ID NO: 1202058 - RNA, 19 nt, Artificial Sequence
  Description of Artificial Sequence: Synthetic oligonucleotide
  Sense strand starting at position 2607 of SEQ ID NO: 917017
ggcauuuagucacucuacu

SEQ ID NO: 1202059 - RNA, 19 nt, Artificial Sequence
  Description of Artificial Sequence: Synthetic oligonucleotide
  Antisense strand to SEQ ID NO: 1202058
aguagagugacuaaaugcc

SEQ ID NO: 1202060 - RNA, 19 nt, Artificial Sequence
  Description of Artificial Sequence: Synthetic oligonucleotide
  Sense strand starting at position 2786 of SEQ ID NO: 917017
caauuuagccguuguacuu

SEQ ID NO: 1202061 - RNA, 19 nt, Artificial Sequence
  Description of Artificial Sequence: Synthetic oligonucleotide
  Antisense strand to SEQ ID NO: 1202060
aaguacaacggcuaaauug

SEQ ID NO: 1202062 - RNA, 19 nt, Artificial Sequence
  Description of Artificial Sequence: Synthetic oligonucleotide
  Sense strand starting at position 3489 of SEQ ID NO: 917017
ggcaucauguagucucuca

SEQ ID NO: 1202063 - RNA, 19 nt, Artificial Sequence
  Description of Artificial Sequence: Synthetic oligonucleotide
  Antisense strand to SEQ ID NO: 1202062
ugagagacuacaugaugcc

SEQ ID NO: 1202064 - RNA, 19 nt, Artificial Sequence
  Description of Artificial Sequence: Synthetic oligonucleotide
  Sense strand starting at position 3569 of SEQ ID NO: 917017
caccaugugccuuaaggga

SEQ ID NO: 1202065 - RNA, 19 nt, Artificial Sequence
  Description of Artificial Sequence: Synthetic oligonucleotide
  Antisense strand to SEQ ID NO: 1202064
ucccuuaaggcacauggug

SEQ ID NO: 1202066 - RNA, 19 nt, Artificial Sequence
  Description of Artificial Sequence: Synthetic oligonucleotide
  Sense strand starting at position 3738 of SEQ ID NO: 917017
cucucuggucucugacaca

SEQ ID NO: 1202067 - RNA, 19 nt, Artificial Sequence
  Description of Artificial Sequence: Synthetic oligonucleotide
  Antisense strand to SEQ ID NO: 1202066
ugugucagagaccagagag

SEQ ID NO: 1202068 - RNA, 19 nt, Artificial Sequence
  Description of Artificial Sequence: Synthetic oligonucleotide
  Sense strand starting at position 3806 of SEQ ID NO: 917017
aaacaaguguguccagguu

SEQ ID NO: 1202069 - RNA, 19 nt, Artificial Sequence
  Description of Artificial Sequence: Synthetic oligonucleotide
  Antisense strand to SEQ ID NO: 1202068
aaccuggacacacuuguuu

SEQ ID NO: 1202070 - RNA, 19 nt, Artificial Sequence
  Description of Artificial Sequence: Synthetic oligonucleotide
  Sense strand starting at position 101 of SEQ ID NO: 917018
cugccucucuaagaggaaa

SEQ ID NO: 1202071 - RNA, 19 nt, Artificial Sequence
  Description of Artificial Sequence: Synthetic oligonucleotide
  Antisense strand to SEQ ID NO: 1202070
uuuccucuuagagaggcag

SEQ ID NO: 1202072 - RNA, 19 nt, Artificial Sequence
  Description of Artificial Sequence: Synthetic oligonucleotide
  Sense strand starting at position 139 of SEQ ID NO: 917018
cacuuagugugguuucuga

SEQ ID NO: 1202073 - RNA, 19 nt, Artificial Sequence
  Description of Artificial Sequence: Synthetic oligonucleotide
  Antisense strand to SEQ ID NO: 1202072
ucagaaaccacacuaagug

SEQ ID NO: 1202074 - RNA, 19 nt, Artificial Sequence
  Description of Artificial Sequence: Synthetic oligonucleotide
  Sense strand starting at position 143 of SEQ ID NO: 917018
uagugugguuucugacuga

SEQ ID NO: 1202075 - RNA, 19 nt, Artificial Sequence
  Description of Artificial Sequence: Synthetic oligonucleotide
  Antisense strand to SEQ ID NO: 1202074
ucagucagaaaccacacua

SEQ ID NO: 1202076 - RNA, 19 nt, Artificial Sequence
  Description of Artificial Sequence: Synthetic oligonucleotide
  Sense strand starting at position 146 of SEQ ID NO: 917018
ugugguuucugacugaguc

SEQ ID NO: 1202077 - RNA, 19 nt, Artificial Sequence
  Description of Artificial Sequence: Synthetic oligonucleotide
  Antisense strand to SEQ ID NO: 1202076
gacucagucagaaaccaca

SEQ ID NO: 1202078 - RNA, 19 nt, Artificial Sequence
  Description of Artificial Sequence: Synthetic oligonucleotide
  Sense strand starting at position 147 of SEQ ID NO: 917018
gugguuucugacugaguca

SEQ ID NO: 1202079 - RNA, 19 nt, Artificial Sequence
  Description of Artificial Sequence: Synthetic oligonucleotide
  Antisense strand to SEQ ID NO: 1202078
ugacucagucagaaaccac

SEQ ID NO: 1202080 - RNA, 19 nt, Artificial Sequence
  Description of Artificial Sequence: Synthetic oligonucleotide
  Sense strand starting at position 152 of SEQ ID NO: 917018
uucugacugagucagagua

SEQ ID NO: 1202081 - RNA, 19 nt, Artificial Sequence
  Description of Artificial Sequence: Synthetic oligonucleotide
  Antisense strand to SEQ ID NO: 1202080
uacucugacucagucagaa

SEQ ID NO: 1202082 - RNA, 19 nt, Artificial Sequence
  Description of Artificial Sequence: Synthetic oligonucleotide
  Sense strand starting at position 200 of SEQ ID NO: 917018
acuggaugcccuuggacaa

SEQ ID NO: 1202083 - RNA, 19 nt, Artificial Sequence
  Description of Artificial Sequence: Synthetic oligonucleotide
  Antisense strand to SEQ ID NO: 1202082
uuguccaagggcauccagu

SEQ ID NO: 1202084 - RNA, 19 nt, Artificial Sequence
  Description of Artificial Sequence: Synthetic oligonucleotide
  Sense strand starting at position 238 of SEQ ID NO: 917018
aggucucugugucuuugaa

SEQ ID NO: 1202085 - RNA, 19 nt, Artificial Sequence
  Description of Artificial Sequence: Synthetic oligonucleotide
  Antisense strand to SEQ ID NO: 1202084
uucaaagacacagagaccu

SEQ ID NO: 1202086 - RNA, 19 nt, Artificial Sequence
  Description of Artificial Sequence: Synthetic oligonucleotide
  Sense strand starting at position 242 of SEQ ID NO: 917018
cucugugucuuugaaauaa

SEQ ID NO: 1202087 - RNA, 19 nt, Artificial Sequence
  Description of Artificial Sequence: Synthetic oligonucleotide
  Antisense strand to SEQ ID NO: 1202086
uuauuucaaagacacagag

SEQ ID NO: 1202088 - RNA, 19 nt, Artificial Sequence
  Description of Artificial Sequence: Synthetic oligonucleotide
  Sense strand starting at position 274 of SEQ ID NO: 917018
gugggcugugucuguccaa

SEQ ID NO: 1202089 - RNA, 19 nt, Artificial Sequence
  Description of Artificial Sequence: Synthetic oligonucleotide
  Antisense strand to SEQ ID NO: 1202088
uuggacagacacagcccac

SEQ ID NO: 1202090 - RNA, 19 nt, Artificial Sequence
  Description of Artificial Sequence: Synthetic oligonucleotide
  Sense strand starting at position 275 of SEQ ID NO: 917018
ugggcugugucuguccaaa

SEQ ID NO: 1202091 - RNA, 19 nt, Artificial Sequence
  Description of Artificial Sequence: Synthetic oligonucleotide
  Antisense strand to SEQ ID NO: 1202090
uuuggacagacacagccca

SEQ ID NO: 1202092 - RNA, 19 nt, Artificial Sequence
  Description of Artificial Sequence: Synthetic oligonucleotide
  Sense strand starting at position 287 of SEQ ID NO: 917018
guccaaaccuauugaggca

SEQ ID NO: 1202093 - RNA, 19 nt, Artificial Sequence
  Description of Artificial Sequence: Synthetic oligonucleotide
  Antisense strand to SEQ ID NO: 1202092
ugccucaauagguuuggac

SEQ ID NO: 1202094 - RNA, 19 nt, Artificial Sequence
  Description of Artificial Sequence: Synthetic oligonucleotide
  Sense strand starting at position 419 of SEQ ID NO: 917018
ucacguuaucugcagggca

SEQ ID NO: 1202095 - RNA, 19 nt, Artificial Sequence
  Description of Artificial Sequence: Synthetic oligonucleotide
  Antisense strand to SEQ ID NO: 1202094
ugcccugcagauaacguga

SEQ ID NO: 1202096 - RNA, 19 nt, Artificial Sequence
  Description of Artificial Sequence: Synthetic oligonucleotide
  Sense strand starting at position 704 of SEQ ID NO: 917018
ggucccuuucuccagagau

SEQ ID NO: 1202097 - RNA, 19 nt, Artificial Sequence
  Description of Artificial Sequence: Synthetic oligonucleotide
  Antisense strand to SEQ ID NO: 1202096
aucucuggagaaagggacc

SEQ ID NO: 1202098 - RNA, 19 nt, Artificial Sequence
  Description of Artificial Sequence: Synthetic oligonucleotide
  Sense strand starting at position 716 of SEQ ID NO: 917018
cagagauaccugcgaugac

SEQ ID NO: 1202099 - RNA, 19 nt, Artificial Sequence
  Description of Artificial Sequence: Synthetic oligonucleotide
  Antisense strand to SEQ ID NO: 1202098
gucaucgcagguaucucug

SEQ ID NO: 1202100 - RNA, 19 nt, Artificial Sequence
  Description of Artificial Sequence: Synthetic oligonucleotide
  Sense strand starting at position 850 of SEQ ID NO: 917018
ccaaucagcuguugagaaa

SEQ ID NO: 1202101 - RNA, 19 nt, Artificial Sequence
  Description of Artificial Sequence: Synthetic oligonucleotide
  Antisense strand to SEQ ID NO: 1202100
uuucucaacagcugauugg

SEQ ID NO: 1202102 - RNA, 19 nt, Artificial Sequence
  Description of Artificial Sequence: Synthetic oligonucleotide
  Sense strand starting at position 851 of SEQ ID NO: 917018
caaucagcuguugagaaac

SEQ ID NO: 1202103 - RNA, 19 nt, Artificial Sequence
  Description of Artificial Sequence: Synthetic oligonucleotide
  Antisense strand to SEQ ID NO: 1202102
guuucucaacagcugauug

SEQ ID NO: 1202104 - RNA, 19 nt, Artificial Sequence
  Description of Artificial Sequence: Synthetic oligonucleotide
  Sense strand starting at position 857 of SEQ ID NO: 917018
gcuguugagaaacagacuu

SEQ ID NO: 1202105 - RNA, 19 nt, Artificial Sequence
  Description of Artificial Sequence: Synthetic oligonucleotide
  Antisense strand to SEQ ID NO: 1202104
aagucuguuucucaacagc

SEQ ID NO: 1202106 - RNA, 19 nt, Artificial Sequence
  Description of Artificial Sequence: Synthetic oligonucleotide
  Sense strand starting at position 1003 of SEQ ID NO: 917018
ugaucaugccagggcuaaa

SEQ ID NO: 1202107 - RNA, 19 nt, Artificial Sequence
  Description of Artificial Sequence: Synthetic oligonucleotide
  Antisense strand to SEQ ID NO: 1202106
uuuagcccuggcaugauca

SEQ ID NO: 1202108 - RNA, 19 nt, Artificial Sequence
  Description of Artificial Sequence: Synthetic oligonucleotide
  Sense strand starting at position 1437 of SEQ ID NO: 917018
cgaagagccuuccagauac

SEQ ID NO: 1202109 - RNA, 19 nt, Artificial Sequence
  Description of Artificial Sequence: Synthetic oligonucleotide
  Antisense strand to SEQ ID NO: 1202108
guaucuggaaggcucuucg

SEQ ID NO: 1202110 - RNA, 19 nt, Artificial Sequence
  Description of Artificial Sequence: Synthetic oligonucleotide
  Sense strand starting at position 1507 of SEQ ID NO: 917018
gcuccaauuuccucgagcu

SEQ ID NO: 1202111 - RNA, 19 nt, Artificial Sequence
  Description of Artificial Sequence: Synthetic oligonucleotide
  Antisense strand to SEQ ID NO: 1202110
agcucgaggaaauuggagc

SEQ ID NO: 1202112 - RNA, 19 nt, Artificial Sequence
  Description of Artificial Sequence: Synthetic oligonucleotide
  Sense strand starting at position 1508 of SEQ ID NO: 917018
cuccaauuuccucgagcua

SEQ ID NO: 1202113 - RNA, 19 nt, Artificial Sequence
  Description of Artificial Sequence: Synthetic oligonucleotide
  Antisense strand to SEQ ID NO: 1202112
uagcucgaggaaauuggag

SEQ ID NO: 1202114 - RNA, 19 nt, Artificial Sequence
  Description of Artificial Sequence: Synthetic oligonucleotide
  Sense strand starting at position 1519 of SEQ ID NO: 917018
ucgagcuauucucggcaua

SEQ ID NO: 1202115 - RNA, 19 nt, Artificial Sequence
  Description of Artificial Sequence: Synthetic oligonucleotide
  Antisense strand to SEQ ID NO: 1202114
uaugccgagaauagcucga

SEQ ID NO: 1202116 - RNA, 19 nt, Artificial Sequence
  Description of Artificial Sequence: Synthetic oligonucleotide
  Sense strand starting at position 1520 of SEQ ID NO: 917018
cgagcuauucucggcauag

SEQ ID NO: 1202117 - RNA, 19 nt, Artificial Sequence
  Description of Artificial Sequence: Synthetic oligonucleotide
  Antisense strand to SEQ ID NO: 1202116
cuaugccgagaauagcucg

SEQ ID NO: 1202118 - RNA, 19 nt, Artificial Sequence
  Description of Artificial Sequence: Synthetic oligonucleotide
  Sense strand starting at position 1521 of SEQ ID NO: 917018
gagcuauucucggcauagg

SEQ ID NO: 1202119 - RNA, 19 nt, Artificial Sequence
  Description of Artificial Sequence: Synthetic oligonucleotide
  Antisense strand to SEQ ID NO: 1202118
ccuaugccgagaauagcuc

SEQ ID NO: 1202120 - RNA, 19 nt, Artificial Sequence
  Description of Artificial Sequence: Synthetic oligonucleotide
  Sense strand starting at position 1553 of SEQ ID NO: 917018
cagcauucuccagggagca

SEQ ID NO: 1202121 - RNA, 19 nt, Artificial Sequence
  Description of Artificial Sequence: Synthetic oligonucleotide
  Antisense strand to SEQ ID NO: 1202120
ugcucccuggagaaugcug

SEQ ID NO: 1202122 - RNA, 19 nt, Artificial Sequence
  Description of Artificial Sequence: Synthetic oligonucleotide
  Sense strand starting at position 1554 of SEQ ID NO: 917018
agcauucuccagggagcaa

SEQ ID NO: 1202123 - RNA, 19 nt, Artificial Sequence
  Description of Artificial Sequence: Synthetic oligonucleotide
  Antisense strand to SEQ ID NO: 1202122
uugcucccuggagaaugcu

SEQ ID NO: 1202124 - RNA, 19 nt, Artificial Sequence
  Description of Artificial Sequence: Synthetic oligonucleotide
  Sense strand starting at position 2758 of SEQ ID NO: 917018
guggcaacguucuaggaga

SEQ ID NO: 1202125 - RNA, 19 nt, Artificial Sequence
  Description of Artificial Sequence: Synthetic oligonucleotide
  Antisense strand to SEQ ID NO: 1202124
ucuccuagaacguugccac

SEQ ID NO: 1202126 - RNA, 19 nt, Artificial Sequence
  Description of Artificial Sequence: Synthetic oligonucleotide
  Sense strand starting at position 2760 of SEQ ID NO: 917018
ggcaacguucuaggagagu

SEQ ID NO: 1202127 - RNA, 19 nt, Artificial Sequence
  Description of Artificial Sequence: Synthetic oligonucleotide
  Antisense strand to SEQ ID NO: 1202126
acucuccuagaacguugcc

SEQ ID NO: 1202128 - RNA, 19 nt, Artificial Sequence
  Description of Artificial Sequence: Synthetic oligonucleotide
  Sense strand starting at position 2968 of SEQ ID NO: 917018
ccucuccaacugugggaua

SEQ ID NO: 1202129 - RNA, 19 nt, Artificial Sequence
  Description of Artificial Sequence: Synthetic oligonucleotide
  Antisense strand to SEQ ID NO: 1202128
uaucccacaguuggagagg

SEQ ID NO: 1202130 - RNA, 19 nt, Artificial Sequence
  Description of Artificial Sequence: Synthetic oligonucleotide
  Sense strand starting at position 2970 of SEQ ID NO: 917018
ucuccaacugugggauaga

SEQ ID NO: 1202131 - RNA, 19 nt, Artificial Sequence
  Description of Artificial Sequence: Synthetic oligonucleotide
  Antisense strand to SEQ ID NO: 1202130
ucuaucccacaguuggaga

SEQ ID NO: 1202132 - RNA, 19 nt, Artificial Sequence
  Description of Artificial Sequence: Synthetic oligonucleotide
  Sense strand starting at position 3235 of SEQ ID NO: 917018
ccuccacuccugugugaau

SEQ ID NO: 1202133 - RNA, 19 nt, Artificial Sequence
  Description of Artificial Sequence: Synthetic oligonucleotide
  Antisense strand to SEQ ID NO: 1202132
auucacacaggaguggagg

SEQ ID NO: 1202134 - RNA, 19 nt, Artificial Sequence
  Description of Artificial Sequence: Synthetic oligonucleotide
  Sense strand starting at position 3236 of SEQ ID NO: 917018
cuccacuccugugugaaua

SEQ ID NO: 1202135 - RNA, 19 nt, Artificial Sequence
  Description of Artificial Sequence: Synthetic oligonucleotide
  Antisense strand to SEQ ID NO: 1202134
uauucacacaggaguggag

SEQ ID NO: 1202136 - RNA, 19 nt, Artificial Sequence
  Description of Artificial Sequence: Synthetic oligonucleotide
  Sense strand starting at position 3237 of SEQ ID NO: 917018
uccacuccugugugaauaa

SEQ ID NO: 1202137 - RNA, 19 nt, Artificial Sequence
  Description of Artificial Sequence: Synthetic oligonucleotide
  Antisense strand to SEQ ID NO: 1202136
uuauucacacaggagugga

SEQ ID NO: 1202138 - RNA, 19 nt, Artificial Sequence
  Description of Artificial Sequence: Synthetic oligonucleotide
  Sense strand starting at position 3238 of SEQ ID NO: 917018
ccacuccugugugaauaaa

SEQ ID NO: 1202139 - RNA, 19 nt, Artificial Sequence
  Description of Artificial Sequence: Synthetic oligonucleotide
  Antisense strand to SEQ ID NO: 1202138
uuuauucacacaggagugg

SEQ ID NO: 1202140 - RNA, 19 nt, Artificial Sequence
  Description of Artificial Sequence: Synthetic oligonucleotide
  Sense strand starting at position 3288 of SEQ ID NO: 917018
uuggcuuugugucggcauu

SEQ ID NO: 1202141 - RNA, 19 nt, Artificial Sequence
  Description of Artificial Sequence: Synthetic oligonucleotide
  Antisense strand to SEQ ID NO: 1202140
aaugccgacacaaagccaa

SEQ ID NO: 1202142 - RNA, 19 nt, Artificial Sequence
  Description of Artificial Sequence: Synthetic oligonucleotide
  Sense strand starting at position 3290 of SEQ ID NO: 917018
ggcuuugugucggcauuua

SEQ ID NO: 1202143 - RNA, 19 nt, Artificial Sequence
  Description of Artificial Sequence: Synthetic oligonucleotide
  Antisense strand to SEQ ID NO: 1202142
uaaaugccgacacaaagcc

SEQ ID NO: 1202144 - RNA, 19 nt, Artificial Sequence
  Description of Artificial Sequence: Synthetic oligonucleotide
  Sense strand starting at position 3301 of SEQ ID NO: 917018
ggcauuuagucacucuacu

SEQ ID NO: 1202145 - RNA, 19 nt, Artificial Sequence
  Description of Artificial Sequence: Synthetic oligonucleotide
  Antisense strand to SEQ ID NO: 1202144
aguagagugacuaaaugcc

SEQ ID NO: 1202146 - RNA, 19 nt, Artificial Sequence
  Description of Artificial Sequence: Synthetic oligonucleotide
  Sense strand starting at position 3480 of SEQ ID NO: 917018
caauuuagccguuguacuu

SEQ ID NO: 1202147 - RNA, 19 nt, Artificial Sequence
  Description of Artificial Sequence: Synthetic oligonucleotide
  Antisense strand to SEQ ID NO: 1202146
aaguacaacggcuaaauug

SEQ ID NO: 1202148 - RNA, 19 nt, Artificial Sequence
  Description of Artificial Sequence: Synthetic oligonucleotide
  Sense strand starting at position 5 of SEQ ID NO: 917019
cagugagugaguugugauc

SEQ ID NO: 1202149 - RNA, 19 nt, Artificial Sequence
  Description of Artificial Sequence: Synthetic oligonucleotide
  Antisense strand to SEQ ID NO: 1202148
gaucacaacucacucacug

SEQ ID NO: 1202150 - RNA, 19 nt, Artificial Sequence
  Description of Artificial Sequence: Synthetic oligonucleotide
  Sense strand starting at position 154 of SEQ ID NO: 917019
gcgauuuagugguagagaa

SEQ ID NO: 1202151 - RNA, 19 nt, Artificial Sequence
  Description of Artificial Sequence: Synthetic oligonucleotide
  Antisense strand to SEQ ID NO: 1202150
uucucuaccacuaaaucgc

SEQ ID NO: 1202152 - RNA, 19 nt, Artificial Sequence
  Description of Artificial Sequence: Synthetic oligonucleotide
  Sense strand starting at position 243 of SEQ ID NO: 917019
gcggaauagaggcaaaucu

SEQ ID NO: 1202153 - RNA, 19 nt, Artificial Sequence
  Description of Artificial Sequence: Synthetic oligonucleotide
  Antisense strand to SEQ ID NO: 1202152
agauuugccucuauuccgc

SEQ ID NO: 1202154 - RNA, 19 nt, Artificial Sequence
  Description of Artificial Sequence: Synthetic oligonucleotide
  Sense strand starting at position 252 of SEQ ID NO: 917019
aggcaaaucuacuuuaggu

SEQ ID NO: 1202155 - RNA, 19 nt, Artificial Sequence
  Description of Artificial Sequence: Synthetic oligonucleotide
  Antisense strand to SEQ ID NO: 1202154
accuaaaguagauuugccu

SEQ ID NO: 1202156 - RNA, 19 nt, Artificial Sequence
  Description of Artificial Sequence: Synthetic oligonucleotide
  Sense strand starting at position 487 of SEQ ID NO: 917019
cuugucauaucagacagaa

SEQ ID NO: 1202157 - RNA, 19 nt, Artificial Sequence
  Description of Artificial Sequence: Synthetic oligonucleotide
  Antisense strand to SEQ ID NO: 1202156
uucugucugauaugacaag

SEQ ID NO: 1202158 - RNA, 19 nt, Artificial Sequence
  Description of Artificial Sequence: Synthetic oligonucleotide
  Sense strand starting at position 503 of SEQ ID NO: 917019
gaaagaauauuggauucga

SEQ ID NO: 1202159 - RNA, 19 nt, Artificial Sequence
  Description of Artificial Sequence: Synthetic oligonucleotide
  Antisense strand to SEQ ID NO: 1202158
ucgaauccaauauucuuuc

SEQ ID NO: 1202160 - RNA, 19 nt, Artificial Sequence
  Description of Artificial Sequence: Synthetic oligonucleotide
  Sense strand starting at position 522 of SEQ ID NO: 917019
uuccaagcucaaugguaaa

SEQ ID NO: 1202161 - RNA, 19 nt, Artificial Sequence
  Description of Artificial Sequence: Synthetic oligonucleotide
  Antisense strand to SEQ ID NO: 1202160
uuuaccauugagcuuggaa

SEQ ID NO: 1202162 - RNA, 19 nt, Artificial Sequence
  Description of Artificial Sequence: Synthetic oligonucleotide
  Sense strand starting at position 550 of SEQ ID NO: 917019
ggcuuuaaacuagggaaug

SEQ ID NO: 1202163 - RNA, 19 nt, Artificial Sequence
  Description of Artificial Sequence: Synthetic oligonucleotide
  Antisense strand to SEQ ID NO: 1202162
cauucccuaguuuaaagcc

SEQ ID NO: 1202164 - RNA, 19 nt, Artificial Sequence
  Description of Artificial Sequence: Synthetic oligonucleotide
  Sense strand starting at position 551 of SEQ ID NO: 917019
gcuuuaaacuagggaauga

SEQ ID NO: 1202165 - RNA, 19 nt, Artificial Sequence
  Description of Artificial Sequence: Synthetic oligonucleotide
  Antisense strand to SEQ ID NO: 1202164
ucauucccuaguuuaaagc

SEQ ID NO: 1202166 - RNA, 19 nt, Artificial Sequence
  Description of Artificial Sequence: Synthetic oligonucleotide
  Sense strand starting at position 745 of SEQ ID NO: 917019
ggcgcuuguaucccagcua

SEQ ID NO: 1202167 - RNA, 19 nt, Artificial Sequence
  Description of Artificial Sequence: Synthetic oligonucleotide
  Antisense strand to SEQ ID NO: 1202166
uagcugggauacaagcgcc

SEQ ID NO: 1202168 - RNA, 19 nt, Artificial Sequence
  Description of Artificial Sequence: Synthetic oligonucleotide
  Sense strand starting at position 938 of SEQ ID NO: 917019
ucaggugugcucuauucca

SEQ ID NO: 1202169 - RNA, 19 nt, Artificial Sequence
  Description of Artificial Sequence: Synthetic oligonucleotide
  Antisense strand to SEQ ID NO: 1202168
uggaauagagcacaccuga

SEQ ID NO: 1202170 - RNA, 19 nt, Artificial Sequence
  Description of Artificial Sequence: Synthetic oligonucleotide
  Sense strand starting at position 1153 of SEQ ID NO: 917019
ggcgaaugcacggaagagu

SEQ ID NO: 1202171 - RNA, 19 nt, Artificial Sequence
  Description of Artificial Sequence: Synthetic oligonucleotide
  Antisense strand to SEQ ID NO: 1202170
acucuuccgugcauucgcc

SEQ ID NO: 1202172 - RNA, 19 nt, Artificial Sequence
  Description of Artificial Sequence: Synthetic oligonucleotide
  Sense strand starting at position 1217 of SEQ ID NO: 917019
ucagcuagaucucucuagu

SEQ ID NO: 1202173 - RNA, 19 nt, Artificial Sequence
  Description of Artificial Sequence: Synthetic oligonucleotide
  Antisense strand to SEQ ID NO: 1202172
acuagagagaucuagcuga

SEQ ID NO: 1202174 - RNA, 19 nt, Artificial Sequence
  Description of Artificial Sequence: Synthetic oligonucleotide
  Sense strand starting at position 1356 of SEQ ID NO: 917019
guaagcggcuucucaaaua

SEQ ID NO: 1202175 - RNA, 19 nt, Artificial Sequence
  Description of Artificial Sequence: Synthetic oligonucleotide
  Antisense strand to SEQ ID NO: 1202174
uauuugagaagccgcuuac

SEQ ID NO: 1202176 - RNA, 19 nt, Artificial Sequence
  Description of Artificial Sequence: Synthetic oligonucleotide
  Sense strand starting at position 2224 of SEQ ID NO: 917019
gagccuguugcugaguuua

SEQ ID NO: 1202177 - RNA, 19 nt, Artificial Sequence
  Description of Artificial Sequence: Synthetic oligonucleotide
  Antisense strand to SEQ ID NO: 1202176
uaaacucagcaacaggcuc

SEQ ID NO: 1202178 - RNA, 19 nt, Artificial Sequence
  Description of Artificial Sequence: Synthetic oligonucleotide
  Sense strand starting at position 2273 of SEQ ID NO: 917019
uugcaugaauaauucugua

SEQ ID NO: 1202179 - RNA, 19 nt, Artificial Sequence
  Description of Artificial Sequence: Synthetic oligonucleotide
  Antisense strand to SEQ ID NO: 1202178
uacagaauuauucaugcaa

SEQ ID NO: 1202180 - RNA, 19 nt, Artificial Sequence
  Description of Artificial Sequence: Synthetic oligonucleotide
  Sense strand starting at position 2344 of SEQ ID NO: 917019
uuucucaugggccguuaau

SEQ ID NO: 1202181 - RNA, 19 nt, Artificial Sequence
  Description of Artificial Sequence: Synthetic oligonucleotide
  Antisense strand to SEQ ID NO: 1202180
auuaacggcccaugagaaa

SEQ ID NO: 1202182 - RNA, 19 nt, Artificial Sequence
  Description of Artificial Sequence: Synthetic oligonucleotide
  Sense strand starting at position 2356 of SEQ ID NO: 917019
cguuaauacuuauuaguca

SEQ ID NO: 1202183 - RNA, 19 nt, Artificial Sequence
  Description of Artificial Sequence: Synthetic oligonucleotide
  Antisense strand to SEQ ID NO: 1202182
ugacuaauaaguauuaacg

SEQ ID NO: 1202184 - RNA, 19 nt, Artificial Sequence
  Description of Artificial Sequence: Synthetic oligonucleotide
  Sense strand starting at position 2387 of SEQ ID NO: 917019
ugauaaugcccuugugcaa

SEQ ID NO: 1202185 - RNA, 19 nt, Artificial Sequence
  Description of Artificial Sequence: Synthetic oligonucleotide
  Antisense strand to SEQ ID NO: 1202184
uugcacaagggcauuauca

SEQ ID NO: 1202186 - RNA, 19 nt, Artificial Sequence
  Description of Artificial Sequence: Synthetic oligonucleotide
  Sense strand starting at position 2402 of SEQ ID NO: 917019
gcaagacuucugcagaucu

SEQ ID NO: 1202187 - RNA, 19 nt, Artificial Sequence
  Description of Artificial Sequence: Synthetic oligonucleotide
  Antisense strand to SEQ ID NO: 1202186
agaucugcagaagucuugc

SEQ ID NO: 1202188 - RNA, 19 nt, Artificial Sequence
  Description of Artificial Sequence: Synthetic oligonucleotide
  Sense strand starting at position 2404 of SEQ ID NO: 917019
aagacuucugcagaucugu

SEQ ID NO: 1202189 - RNA, 19 nt, Artificial Sequence
  Description of Artificial Sequence: Synthetic oligonucleotide
  Antisense strand to SEQ ID NO: 1202188
acagaucugcagaagucuu

SEQ ID NO: 1202190 - RNA, 19 nt, Artificial Sequence
  Description of Artificial Sequence: Synthetic oligonucleotide
  Sense strand starting at position 2410 of SEQ ID NO: 917019
ucugcagaucugugaccau

SEQ ID NO: 1202191 - RNA, 19 nt, Artificial Sequence
  Description of Artificial Sequence: Synthetic oligonucleotide
  Antisense strand to SEQ ID NO: 1202190
auggucacagaucugcaga

SEQ ID NO: 1202192 - RNA, 19 nt, Artificial Sequence
  Description of Artificial Sequence: Synthetic oligonucleotide
  Sense strand starting at position 2413 of SEQ ID NO: 917019
gcagaucugugaccauauu

SEQ ID NO: 1202193 - RNA, 19 nt, Artificial Sequence
  Description of Artificial Sequence: Synthetic oligonucleotide
  Antisense strand to SEQ ID NO: 1202192
aauauggucacagaucugc

SEQ ID NO: 1202194 - RNA, 19 nt, Artificial Sequence
  Description of Artificial Sequence: Synthetic oligonucleotide
  Sense strand starting at position 2470 of SEQ ID NO: 917019
gccugagaugcagguuuga

SEQ ID NO: 1202195 - RNA, 19 nt, Artificial Sequence
  Description of Artificial Sequence: Synthetic oligonucleotide
  Antisense strand to SEQ ID NO: 1202194
ucaaaccugcaucucaggc

SEQ ID NO: 1202196 - RNA, 19 nt, Artificial Sequence
  Description of Artificial Sequence: Synthetic oligonucleotide
  Sense strand starting at position 2487 of SEQ ID NO: 917019
gagagcuaguuucuccacu

SEQ ID NO: 1202197 - RNA, 19 nt, Artificial Sequence
  Description of Artificial Sequence: Synthetic oligonucleotide
  Antisense strand to SEQ ID NO: 1202196
aguggagaaacuagcucuc

SEQ ID NO: 1202198 - RNA, 19 nt, Artificial Sequence
  Description of Artificial Sequence: Synthetic oligonucleotide
  Sense strand starting at position 2488 of SEQ ID NO: 917019
agagcuaguuucuccacuu

SEQ ID NO: 1202199 - RNA, 19 nt, Artificial Sequence
  Description of Artificial Sequence: Synthetic oligonucleotide
  Antisense strand to SEQ ID NO: 1202198
aaguggagaaacuagcucu

SEQ ID NO: 1202200 - RNA, 19 nt, Artificial Sequence
  Description of Artificial Sequence: Synthetic oligonucleotide
  Sense strand starting at position 2489 of SEQ ID NO: 917019
gagcuaguuucuccacuug

SEQ ID NO: 1202201 - RNA, 19 nt, Artificial Sequence
  Description of Artificial Sequence: Synthetic oligonucleotide
  Antisense strand to SEQ ID NO: 1202200
caaguggagaaacuagcuc

SEQ ID NO: 1202202 - RNA, 19 nt, Artificial Sequence
  Description of Artificial Sequence: Synthetic oligonucleotide
  Sense strand starting at position 2539 of SEQ ID NO: 917019
ccucauguauaauaaagga

SEQ ID NO: 1202203 - RNA, 19 nt, Artificial Sequence
  Description of Artificial Sequence: Synthetic oligonucleotide
  Antisense strand to SEQ ID NO: 1202202
uccuuuauuauacaugagg

SEQ ID NO: 1202204 - RNA, 19 nt, Artificial Sequence
  Description of Artificial Sequence: Synthetic oligonucleotide
  Sense strand starting at position 2659 of SEQ ID NO: 917019
uuaugauuccauugcagau

SEQ ID NO: 1202205 - RNA, 19 nt, Artificial Sequence
  Description of Artificial Sequence: Synthetic oligonucleotide
  Antisense strand to SEQ ID NO: 1202204
aucugcaauggaaucauaa

SEQ ID NO: 1202206 - RNA, 19 nt, Artificial Sequence
  Description of Artificial Sequence: Synthetic oligonucleotide
  Sense strand starting at position 2661 of SEQ ID NO: 917019
augauuccauugcagauua

SEQ ID NO: 1202207 - RNA, 19 nt, Artificial Sequence
  Description of Artificial Sequence: Synthetic oligonucleotide
  Antisense strand to SEQ ID NO: 1202206
uaaucugcaauggaaucau

SEQ ID NO: 1202208 - RNA, 19 nt, Artificial Sequence
  Description of Artificial Sequence: Synthetic oligonucleotide
  Sense strand starting at position 2671 of SEQ ID NO: 917019
ugcagauuauaauugcaaa

SEQ ID NO: 1202209 - RNA, 19 nt, Artificial Sequence
  Description of Artificial Sequence: Synthetic oligonucleotide
  Antisense strand to SEQ ID NO: 1202208
uuugcaauuauaaucugca

SEQ ID NO: 1202210 - RNA, 19 nt, Artificial Sequence
  Description of Artificial Sequence: Synthetic oligonucleotide
  Sense strand starting at position 3002 of SEQ ID NO: 917019
augagauaguacuaagcaa

SEQ ID NO: 1202211 - RNA, 19 nt, Artificial Sequence
  Description of Artificial Sequence: Synthetic oligonucleotide
  Antisense strand to SEQ ID NO: 1202210
uugcuuaguacuaucucau

SEQ ID NO: 1202212 - RNA, 19 nt, Artificial Sequence
  Description of Artificial Sequence: Synthetic oligonucleotide
  Sense strand starting at position 3431 of SEQ ID NO: 917019
guaaguaacugguuccauu

SEQ ID NO: 1202213 - RNA, 19 nt, Artificial Sequence
  Description of Artificial Sequence: Synthetic oligonucleotide
  Antisense strand to SEQ ID NO: 1202212
aauggaaccaguuacuuac

SEQ ID NO: 1202214 - RNA, 19 nt, Artificial Sequence
  Description of Artificial Sequence: Synthetic oligonucleotide
  Sense strand starting at position 3452 of SEQ ID NO: 917019
gaggguauauagccuguaa

SEQ ID NO: 1202215 - RNA, 19 nt, Artificial Sequence
  Description of Artificial Sequence: Synthetic oligonucleotide
  Antisense strand to SEQ ID NO: 1202214
uuacaggcuauauacccuc

SEQ ID NO: 1202216 - RNA, 19 nt, Artificial Sequence
  Description of Artificial Sequence: Synthetic oligonucleotide
  Sense strand starting at position 3456 of SEQ ID NO: 917019
guauauagccuguaaggag

SEQ ID NO: 1202217 - RNA, 19 nt, Artificial Sequence
  Description of Artificial Sequence: Synthetic oligonucleotide
  Antisense strand to SEQ ID NO: 1202216
cuccuuacaggcuauauac

SEQ ID NO: 1202218 - RNA, 19 nt, Artificial Sequence
  Description of Artificial Sequence: Synthetic oligonucleotide
  Sense strand starting at position 3503 of SEQ ID NO: 917019
auaucuugaucagcaaagu

SEQ ID NO: 1202219 - RNA, 19 nt, Artificial Sequence
  Description of Artificial Sequence: Synthetic oligonucleotide
  Antisense strand to SEQ ID NO: 1202218
acuuugcugaucaagauau

SEQ ID NO: 1202220 - RNA, 19 nt, Artificial Sequence
  Description of Artificial Sequence: Synthetic oligonucleotide
  Sense strand starting at position 3583 of SEQ ID NO: 917019
cuuuacauuguauguuaca

SEQ ID NO: 1202221 - RNA, 19 nt, Artificial Sequence
  Description of Artificial Sequence: Synthetic oligonucleotide
  Antisense strand to SEQ ID NO: 1202220
uguaacauacaauguaaag

SEQ ID NO: 1202222 - RNA, 19 nt, Artificial Sequence
  Description of Artificial Sequence: Synthetic oligonucleotide
  Sense strand starting at position 3733 of SEQ ID NO: 917019
accauauaguguguucuuu

SEQ ID NO: 1202223 - RNA, 19 nt, Artificial Sequence
  Description of Artificial Sequence: Synthetic oligonucleotide
  Antisense strand to SEQ ID NO: 1202222
aaagaacacacuauauggu

SEQ ID NO: 1202224 - RNA, 19 nt, Artificial Sequence
  Description of Artificial Sequence: Synthetic oligonucleotide
  Sense strand starting at position 3795 of SEQ ID NO: 917019
auccaugcuguugauaaua

SEQ ID NO: 1202225 - RNA, 19 nt, Artificial Sequence
  Description of Artificial Sequence: Synthetic oligonucleotide
  Antisense strand to SEQ ID NO: 1202224
uauuaucaacagcauggau

SEQ ID NO: 1202226 - RNA, 19 nt, Artificial Sequence
  Description of Artificial Sequence: Synthetic oligonucleotide
  Sense strand starting at position 3879 of SEQ ID NO: 917019
aacauuagagcugguucua

SEQ ID NO: 1202227 - RNA, 19 nt, Artificial Sequence
  Description of Artificial Sequence: Synthetic oligonucleotide
  Antisense strand to SEQ ID NO: 1202226
uagaaccagcucuaauguu

SEQ ID NO: 1202228 - RNA, 19 nt, Artificial Sequence
  Description of Artificial Sequence: Synthetic oligonucleotide
  Sense strand starting at position 50 of SEQ ID NO: 917020
gucuaaauccgugcuuugu

SEQ ID NO: 1202229 - RNA, 19 nt, Artificial Sequence
  Description of Artificial Sequence: Synthetic oligonucleotide
  Antisense strand to SEQ ID NO: 1202228
acaaagcacggauuuagac

SEQ ID NO: 1202230 - RNA, 19 nt, Artificial Sequence
  Description of Artificial Sequence: Synthetic oligonucleotide
  Sense strand starting at position 80 of SEQ ID NO: 917020
uggugaucuugaucaagcu

SEQ ID NO: 1202231 - RNA, 19 nt, Artificial Sequence
  Description of Artificial Sequence: Synthetic oligonucleotide
  Antisense strand to SEQ ID NO: 1202230
agcuugaucaagaucacca

SEQ ID NO: 1202232 - RNA, 19 nt, Artificial Sequence
  Description of Artificial Sequence: Synthetic oligonucleotide
  Sense strand starting at position 81 of SEQ ID NO: 917020
ggugaucuugaucaagcua

SEQ ID NO: 1202233 - RNA, 19 nt, Artificial Sequence
  Description of Artificial Sequence: Synthetic oligonucleotide
  Antisense strand to SEQ ID NO: 1202232
uagcuugaucaagaucacc

SEQ ID NO: 1202234 - RNA, 19 nt, Artificial Sequence
  Description of Artificial Sequence: Synthetic oligonucleotide
  Sense strand starting at position 88 of SEQ ID NO: 917020
uugaucaagcuaugugaca

SEQ ID NO: 1202235 - RNA, 19 nt, Artificial Sequence
  Description of Artificial Sequence: Synthetic oligonucleotide
  Antisense strand to SEQ ID NO: 1202234
ugucacauagcuugaucaa

SEQ ID NO: 1202236 - RNA, 19 nt, Artificial Sequence
  Description of Artificial Sequence: Synthetic oligonucleotide
  Sense strand starting at position 149 of SEQ ID NO: 917020
gauaauagcgucuaccuca

SEQ ID NO: 1202237 - RNA, 19 nt, Artificial Sequence
  Description of Artificial Sequence: Synthetic oligonucleotide
  Antisense strand to SEQ ID NO: 1202236
ugagguagacgcuauuauc

SEQ ID NO: 1202238 - RNA, 19 nt, Artificial Sequence
  Description of Artificial Sequence: Synthetic oligonucleotide
  Sense strand starting at position 169 of SEQ ID NO: 917020
aggguucuugucggauuga

SEQ ID NO: 1202239 - RNA, 19 nt, Artificial Sequence
  Description of Artificial Sequence: Synthetic oligonucleotide
  Antisense strand to SEQ ID NO: 1202238
ucaauccgacaagaacccu

SEQ ID NO: 1202240 - RNA, 19 nt, Artificial Sequence
  Description of Artificial Sequence: Synthetic oligonucleotide
  Sense strand starting at position 199 of SEQ ID NO: 917020
ugcaauaagcacuagaagu

SEQ ID NO: 1202241 - RNA, 19 nt, Artificial Sequence
  Description of Artificial Sequence: Synthetic oligonucleotide
  Antisense strand to SEQ ID NO: 1202240
acuucuagugcuuauugca

SEQ ID NO: 1202242 - RNA, 19 nt, Artificial Sequence
  Description of Artificial Sequence: Synthetic oligonucleotide
  Sense strand starting at position 303 of SEQ ID NO: 917020
gauuaugaggucugagcuc

SEQ ID NO: 1202243 - RNA, 19 nt, Artificial Sequence
  Description of Artificial Sequence: Synthetic oligonucleotide
  Antisense strand to SEQ ID NO: 1202242
gagcucagaccucauaauc

SEQ ID NO: 1202244 - RNA, 19 nt, Artificial Sequence
  Description of Artificial Sequence: Synthetic oligonucleotide
  Sense strand starting at position 310 of SEQ ID NO: 917020
aggucugagcucuaaacaa

SEQ ID NO: 1202245 - RNA, 19 nt, Artificial Sequence
  Description of Artificial Sequence: Synthetic oligonucleotide
  Antisense strand to SEQ ID NO: 1202244
uuguuuagagcucagaccu

SEQ ID NO: 1202246 - RNA, 19 nt, Artificial Sequence
  Description of Artificial Sequence: Synthetic oligonucleotide
  Sense strand starting at position 318 of SEQ ID NO: 917020
gcucuaaacaaguggugaa

SEQ ID NO: 1202247 - RNA, 19 nt, Artificial Sequence
  Description of Artificial Sequence: Synthetic oligonucleotide
  Antisense strand to SEQ ID NO: 1202246
uucaccacuuguuuagagc

SEQ ID NO: 1202248 - RNA, 19 nt, Artificial Sequence
  Description of Artificial Sequence: Synthetic oligonucleotide
  Sense strand starting at position 592 of SEQ ID NO: 917020
cucagccuaucucuggaaa

SEQ ID NO: 1202249 - RNA, 19 nt, Artificial Sequence
  Description of Artificial Sequence: Synthetic oligonucleotide
  Antisense strand to SEQ ID NO: 1202248
uuuccagagauaggcugag

SEQ ID NO: 1202250 - RNA, 19 nt, Artificial Sequence
  Description of Artificial Sequence: Synthetic oligonucleotide
  Sense strand starting at position 595 of SEQ ID NO: 917020
agccuaucucuggaaacca

SEQ ID NO: 1202251 - RNA, 19 nt, Artificial Sequence
  Description of Artificial Sequence: Synthetic oligonucleotide
  Antisense strand to SEQ ID NO: 1202250
ugguuuccagagauaggcu

SEQ ID NO: 1202252 - RNA, 19 nt, Artificial Sequence
  Description of Artificial Sequence: Synthetic oligonucleotide
  Sense strand starting at position 853 of SEQ ID NO: 917020
ucuggcaucgcucagauua

SEQ ID NO: 1202253 - RNA, 19 nt, Artificial Sequence
  Description of Artificial Sequence: Synthetic oligonucleotide
  Antisense strand to SEQ ID NO: 1202252
uaaucugagcgaugccaga

SEQ ID NO: 1202254 - RNA, 19 nt, Artificial Sequence
  Description of Artificial Sequence: Synthetic oligonucleotide
  Sense strand starting at position 900 of SEQ ID NO: 917020
cguuucgauggcuaaggaa

SEQ ID NO: 1202255 - RNA, 19 nt, Artificial Sequence
  Description of Artificial Sequence: Synthetic oligonucleotide
  Antisense strand to SEQ ID NO: 1202254
uuccuuagccaucgaaacg

SEQ ID NO: 1202256 - RNA, 19 nt, Artificial Sequence
  Description of Artificial Sequence: Synthetic oligonucleotide
  Sense strand starting at position 979 of SEQ ID NO: 917020
cggugagucaguuugcgaa

SEQ ID NO: 1202257 - RNA, 19 nt, Artificial Sequence
  Description of Artificial Sequence: Synthetic oligonucleotide
  Antisense strand to SEQ ID NO: 1202256
uucgcaaacugacucaccg

SEQ ID NO: 1202258 - RNA, 19 nt, Artificial Sequence
  Description of Artificial Sequence: Synthetic oligonucleotide
  Sense strand starting at position 2844 of SEQ ID NO: 917020
gcgagacucccucauucca

SEQ ID NO: 1202259 - RNA, 19 nt, Artificial Sequence
  Description of Artificial Sequence: Synthetic oligonucleotide
  Antisense strand to SEQ ID NO: 1202258
uggaaugagggagucucgc

SEQ ID NO: 1202260 - RNA, 19 nt, Artificial Sequence
  Description of Artificial Sequence: Synthetic oligonucleotide
  Sense strand starting at position 2883 of SEQ ID NO: 917020
gaugacaagugagaaagaa

SEQ ID NO: 1202261 - RNA, 19 nt, Artificial Sequence
  Description of Artificial Sequence: Synthetic oligonucleotide
  Antisense strand to SEQ ID NO: 1202260
uucuuucucacuugucauc

SEQ ID NO: 1202262 - RNA, 19 nt, Artificial Sequence
  Description of Artificial Sequence: Synthetic oligonucleotide
  Sense strand starting at position 2942 of SEQ ID NO: 917020
ggguuugcuccauauccca

SEQ ID NO: 1202263 - RNA, 19 nt, Artificial Sequence
  Description of Artificial Sequence: Synthetic oligonucleotide
  Antisense strand to SEQ ID NO: 1202262
ugggauauggagcaaaccc

SEQ ID NO: 1202264 - RNA, 19 nt, Artificial Sequence
  Description of Artificial Sequence: Synthetic oligonucleotide
  Sense strand starting at position 3047 of SEQ ID NO: 917020
uuagauugccagggcuacu

SEQ ID NO: 1202265 - RNA, 19 nt, Artificial Sequence
  Description of Artificial Sequence: Synthetic oligonucleotide
  Antisense strand to SEQ ID NO: 1202264
aguagcccuggcaaucuaa

SEQ ID NO: 1202266 - RNA, 19 nt, Artificial Sequence
  Description of Artificial Sequence: Synthetic oligonucleotide
  Sense strand starting at position 3347 of SEQ ID NO: 917020
ggagccuuuggcuauuaac

SEQ ID NO: 1202267 - RNA, 19 nt, Artificial Sequence
  Description of Artificial Sequence: Synthetic oligonucleotide
  Antisense strand to SEQ ID NO: 1202266
guuaauagccaaaggcucc

SEQ ID NO: 1202268 - RNA, 19 nt, Artificial Sequence
  Description of Artificial Sequence: Synthetic oligonucleotide
  Sense strand starting at position 3420 of SEQ ID NO: 917020
ucaagcucgccagaggauu

SEQ ID NO: 1202269 - RNA, 19 nt, Artificial Sequence
  Description of Artificial Sequence: Synthetic oligonucleotide
  Antisense strand to SEQ ID NO: 1202268
aauccucuggcgagcuuga

SEQ ID NO: 1202270 - RNA, 19 nt, Artificial Sequence
  Description of Artificial Sequence: Synthetic oligonucleotide
  Sense strand starting at position 3428 of SEQ ID NO: 917020
gccagaggauuuggaggau

SEQ ID NO: 1202271 - RNA, 19 nt, Artificial Sequence
  Description of Artificial Sequence: Synthetic oligonucleotide
  Antisense strand to SEQ ID NO: 1202270
auccuccaaauccucuggc

SEQ ID NO: 1202272 - RNA, 19 nt, Artificial Sequence
  Description of Artificial Sequence: Synthetic oligonucleotide
  Sense strand starting at position 3440 of SEQ ID NO: 917020
ggaggauuguauguaaauu

SEQ ID NO: 1202273 - RNA, 19 nt, Artificial Sequence
  Description of Artificial Sequence: Synthetic oligonucleotide
  Antisense strand to SEQ ID NO: 1202272
aauuuacauacaauccucc

SEQ ID NO: 1202274 - RNA, 19 nt, Artificial Sequence
  Description of Artificial Sequence: Synthetic oligonucleotide
  Sense strand starting at position 3506 of SEQ ID NO: 917020
cgauguguccaggugugca

SEQ ID NO: 1202275 - RNA, 19 nt, Artificial Sequence
  Description of Artificial Sequence: Synthetic oligonucleotide
  Antisense strand to SEQ ID NO: 1202274
ugcacaccuggacacaucg

SEQ ID NO: 1202276 - RNA, 19 nt, Artificial Sequence
  Description of Artificial Sequence: Synthetic oligonucleotide
  Sense strand starting at position 3514 of SEQ ID NO: 917020
ccaggugugcaguacuaaa

SEQ ID NO: 1202277 - RNA, 19 nt, Artificial Sequence
  Description of Artificial Sequence: Synthetic oligonucleotide
  Antisense strand to SEQ ID NO: 1202276
uuuaguacugcacaccugg

SEQ ID NO: 1202278 - RNA, 19 nt, Artificial Sequence
  Description of Artificial Sequence: Synthetic oligonucleotide
  Sense strand starting at position 3645 of SEQ ID NO: 917020
augucuacaguguaacauu

SEQ ID NO: 1202279 - RNA, 19 nt, Artificial Sequence
  Description of Artificial Sequence: Synthetic oligonucleotide
  Antisense strand to SEQ ID NO: 1202278
aauguuacacuguagacau

SEQ ID NO: 1202280 - RNA, 19 nt, Artificial Sequence
  Description of Artificial Sequence: Synthetic oligonucleotide
  Sense strand starting at position 3696 of SEQ ID NO: 917020
ggcuuauuagaacggugaa

SEQ ID NO: 1202281 - RNA, 19 nt, Artificial Sequence
  Description of Artificial Sequence: Synthetic oligonucleotide
  Antisense strand to SEQ ID NO: 1202280
uucaccguucuaauaagcc

SEQ ID NO: 1202282 - RNA, 19 nt, Artificial Sequence
  Description of Artificial Sequence: Synthetic oligonucleotide
  Sense strand starting at position 3697 of SEQ ID NO: 917020
gcuuauuagaacggugaac

SEQ ID NO: 1202283 - RNA, 19 nt, Artificial Sequence
  Description of Artificial Sequence: Synthetic oligonucleotide
  Antisense strand to SEQ ID NO: 1202282
guucaccguucuaauaagc

SEQ ID NO: 1202284 - RNA, 19 nt, Artificial Sequence
  Description of Artificial Sequence: Synthetic oligonucleotide
  Sense strand starting at position 3699 of SEQ ID NO: 917020
uuauuagaacggugaacga

SEQ ID NO: 1202285 - RNA, 19 nt, Artificial Sequence
  Description of Artificial Sequence: Synthetic oligonucleotide
  Antisense strand to SEQ ID NO: 1202284
ucguucaccguucuaauaa

SEQ ID NO: 1202286 - RNA, 19 nt, Artificial Sequence
  Description of Artificial Sequence: Synthetic oligonucleotide
  Sense strand starting at position 3723 of SEQ ID NO: 917020
uuccaugauuggucaguuu

SEQ ID NO: 1202287 - RNA, 19 nt, Artificial Sequence
  Description of Artificial Sequence: Synthetic oligonucleotide
  Antisense strand to SEQ ID NO: 1202286
aaacugaccaaucauggaa

SEQ ID NO: 1202288 - RNA, 19 nt, Artificial Sequence
  Description of Artificial Sequence: Synthetic oligonucleotide
  Sense strand starting at position 3777 of SEQ ID NO: 917020
uuuccaguguuaccaugaa

SEQ ID NO: 1202289 - RNA, 19 nt, Artificial Sequence
  Description of Artificial Sequence: Synthetic oligonucleotide
  Antisense strand to SEQ ID NO: 1202288
uucaugguaacacuggaaa

SEQ ID NO: 1202290 - RNA, 19 nt, Artificial Sequence
  Description of Artificial Sequence: Synthetic oligonucleotide
  Sense strand starting at position 3809 of SEQ ID NO: 917020
uuguuaggauaguuaucaa

SEQ ID NO: 1202291 - RNA, 19 nt, Artificial Sequence
  Description of Artificial Sequence: Synthetic oligonucleotide
  Antisense strand to SEQ ID NO: 1202290
uugauaacuauccuaacaa

SEQ ID NO: 1202292 - RNA, 19 nt, Artificial Sequence
  Description of Artificial Sequence: Synthetic oligonucleotide
  Sense strand starting at position 3812 of SEQ ID NO: 917020
uuaggauaguuaucaauag

SEQ ID NO: 1202293 - RNA, 19 nt, Artificial Sequence
  Description of Artificial Sequence: Synthetic oligonucleotide
  Antisense strand to SEQ ID NO: 1202292
cuauugauaacuauccuaa

SEQ ID NO: 1202294 - RNA, 19 nt, Artificial Sequence
  Description of Artificial Sequence: Synthetic oligonucleotide
  Sense strand starting at position 3886 of SEQ ID NO: 917020
uauggacucuugucugagu

SEQ ID NO: 1202295 - RNA, 19 nt, Artificial Sequence
  Description of Artificial Sequence: Synthetic oligonucleotide
  Antisense strand to SEQ ID NO: 1202294
acucagacaagaguccaua

SEQ ID NO: 1202296 - RNA, 19 nt, Artificial Sequence
  Description of Artificial Sequence: Synthetic oligonucleotide
  Sense strand starting at position 3887 of SEQ ID NO: 917020
auggacucuugucugagua

SEQ ID NO: 1202297 - RNA, 19 nt, Artificial Sequence
  Description of Artificial Sequence: Synthetic oligonucleotide
  Antisense strand to SEQ ID NO: 1202296
uacucagacaagaguccau

SEQ ID NO: 1202298 - RNA, 19 nt, Artificial Sequence
  Description of Artificial Sequence: Synthetic oligonucleotide
  Sense strand starting at position 3888 of SEQ ID NO: 917020
uggacucuugucugaguau

SEQ ID NO: 1202299 - RNA, 19 nt, Artificial Sequence
  Description of Artificial Sequence: Synthetic oligonucleotide
  Antisense strand to SEQ ID NO: 1202298
auacucagacaagagucca

SEQ ID NO: 1202300 - RNA, 19 nt, Artificial Sequence
  Description of Artificial Sequence: Synthetic oligonucleotide
  Sense strand starting at position 3891 of SEQ ID NO: 917020
acucuugucugaguauauu

SEQ ID NO: 1202301 - RNA, 19 nt, Artificial Sequence
  Description of Artificial Sequence: Synthetic oligonucleotide
  Antisense strand to SEQ ID NO: 1202300
aauauacucagacaagagu

SEQ ID NO: 1202302 - RNA, 19 nt, Artificial Sequence
  Description of Artificial Sequence: Synthetic oligonucleotide
  Sense strand starting at position 3924 of SEQ ID NO: 917020
uacugcagaguauguauaa

SEQ ID NO: 1202303 - RNA, 19 nt, Artificial Sequence
  Description of Artificial Sequence: Synthetic oligonucleotide
  Antisense strand to SEQ ID NO: 1202302
uuauacauacucugcagua

SEQ ID NO: 1202304 - RNA, 19 nt, Artificial Sequence
  Description of Artificial Sequence: Synthetic oligonucleotide
  Sense strand starting at position 3936 of SEQ ID NO: 917020
uguauaaguaugugggaua

SEQ ID NO: 1202305 - RNA, 19 nt, Artificial Sequence
  Description of Artificial Sequence: Synthetic oligonucleotide
  Antisense strand to SEQ ID NO: 1202304
uaucccacauacuuauaca

SEQ ID NO: 1202306 - RNA, 19 nt, Artificial Sequence
  Description of Artificial Sequence: Synthetic oligonucleotide
  Sense strand starting at position 3964 of SEQ ID NO: 917020
cagaauuugugcgaagaac

SEQ ID NO: 1202307 - RNA, 19 nt, Artificial Sequence
  Description of Artificial Sequence: Synthetic oligonucleotide
  Antisense strand to SEQ ID NO: 1202306
guucuucgcacaaauucug

SEQ ID NO: 1202308 - RNA, 19 nt, Artificial Sequence
  Description of Artificial Sequence: Synthetic oligonucleotide
  Sense strand starting at position 26 of SEQ ID NO: 917021
gcauuaguucccugagagg

SEQ ID NO: 1202309 - RNA, 19 nt, Artificial Sequence
  Description of Artificial Sequence: Synthetic oligonucleotide
  Antisense strand to SEQ ID NO: 1202308
ccucucagggaacuaaugc

SEQ ID NO: 1202310 - RNA, 19 nt, Artificial Sequence
  Description of Artificial Sequence: Synthetic oligonucleotide
  Sense strand starting at position 139 of SEQ ID NO: 917021
ugcucauccugacuaguuu

SEQ ID NO: 1202311 - RNA, 19 nt, Artificial Sequence
  Description of Artificial Sequence: Synthetic oligonucleotide
  Antisense strand to SEQ ID NO: 1202310
aaacuagucaggaugagca

SEQ ID NO: 1202312 - RNA, 19 nt, Artificial Sequence
  Description of Artificial Sequence: Synthetic oligonucleotide
  Sense strand starting at position 140 of SEQ ID NO: 917021
gcucauccugacuaguuua

SEQ ID NO: 1202313 - RNA, 19 nt, Artificial Sequence
  Description of Artificial Sequence: Synthetic oligonucleotide
  Antisense strand to SEQ ID NO: 1202312
uaaacuagucaggaugagc

SEQ ID NO: 1202314 - RNA, 19 nt, Artificial Sequence
  Description of Artificial Sequence: Synthetic oligonucleotide
  Sense strand starting at position 161 of SEQ ID NO: 917021
aucguuugcauacaaggua

SEQ ID NO: 1202315 - RNA, 19 nt, Artificial Sequence
  Description of Artificial Sequence: Synthetic oligonucleotide
  Antisense strand to SEQ ID NO: 1202314
uaccuuguaugcaaacgau

SEQ ID NO: 1202316 - RNA, 19 nt, Artificial Sequence
  Description of Artificial Sequence: Synthetic oligonucleotide
  Sense strand starting at position 164 of SEQ ID NO: 917021
guuugcauacaagguauau

SEQ ID NO: 1202317 - RNA, 19 nt, Artificial Sequence
  Description of Artificial Sequence: Synthetic oligonucleotide
  Antisense strand to SEQ ID NO: 1202316
auauaccuuguaugcaaac

SEQ ID NO: 1202318 - RNA, 19 nt, Artificial Sequence
  Description of Artificial Sequence: Synthetic oligonucleotide
  Sense strand starting at position 183 of SEQ ID NO: 917021
uuauguaaagcugauucca

SEQ ID NO: 1202319 - RNA, 19 nt, Artificial Sequence
  Description of Artificial Sequence: Synthetic oligonucleotide
  Antisense strand to SEQ ID NO: 1202318
uggaaucagcuuuacauaa

SEQ ID NO: 1202320 - RNA, 19 nt, Artificial Sequence
  Description of Artificial Sequence: Synthetic oligonucleotide
  Sense strand starting at position 193 of SEQ ID NO: 917021
cugauuccacgccaaguau

SEQ ID NO: 1202321 - RNA, 19 nt, Artificial Sequence
  Description of Artificial Sequence: Synthetic oligonucleotide
  Antisense strand to SEQ ID NO: 1202320
auacuuggcguggaaucag

SEQ ID NO: 1202322 - RNA, 19 nt, Artificial Sequence
  Description of Artificial Sequence: Synthetic oligonucleotide
  Sense strand starting at position 798 of SEQ ID NO: 917021
gcgagacccuguuuauacu

SEQ ID NO: 1202323 - RNA, 19 nt, Artificial Sequence
  Description of Artificial Sequence: Synthetic oligonucleotide
  Antisense strand to SEQ ID NO: 1202322
aguauaaacagggucucgc

SEQ ID NO: 1202324 - RNA, 19 nt, Artificial Sequence
  Description of Artificial Sequence: Synthetic oligonucleotide
  Sense strand starting at position 799 of SEQ ID NO: 917021
cgagacccuguuuauacua

SEQ ID NO: 1202325 - RNA, 19 nt, Artificial Sequence
  Description of Artificial Sequence: Synthetic oligonucleotide
  Antisense strand to SEQ ID NO: 1202324
uaguauaaacagggucucg

SEQ ID NO: 1202326 - RNA, 19 nt, Artificial Sequence
  Description of Artificial Sequence: Synthetic oligonucleotide
  Sense strand starting at position 1019 of SEQ ID NO: 917021
aaguguaagaccugaggga

SEQ ID NO: 1202327 - RNA, 19 nt, Artificial Sequence
  Description of Artificial Sequence: Synthetic oligonucleotide
  Antisense strand to SEQ ID NO: 1202326
ucccucaggucuuacacuu

SEQ ID NO: 1202328 - RNA, 19 nt, Artificial Sequence
  Description of Artificial Sequence: Synthetic oligonucleotide
  Sense strand starting at position 1052 of SEQ ID NO: 917021
uugugagggaaccguuaaa

SEQ ID NO: 1202329 - RNA, 19 nt, Artificial Sequence
  Description of Artificial Sequence: Synthetic oligonucleotide
  Antisense strand to SEQ ID NO: 1202328
uuuaacgguucccucacaa

SEQ ID NO: 1202330 - RNA, 19 nt, Artificial Sequence
  Description of Artificial Sequence: Synthetic oligonucleotide
  Sense strand starting at position 1098 of SEQ ID NO: 917021
cacuuuguguuagugaaag

SEQ ID NO: 1202331 - RNA, 19 nt, Artificial Sequence
  Description of Artificial Sequence: Synthetic oligonucleotide
  Antisense strand to SEQ ID NO: 1202330
cuuucacuaacacaaagug

SEQ ID NO: 1202332 - RNA, 19 nt, Artificial Sequence
  Description of Artificial Sequence: Synthetic oligonucleotide
  Sense strand starting at position 1100 of SEQ ID NO: 917021
cuuuguguuagugaaagac

SEQ ID NO: 1202333 - RNA, 19 nt, Artificial Sequence
  Description of Artificial Sequence: Synthetic oligonucleotide
  Antisense strand to SEQ ID NO: 1202332
gucuuucacuaacacaaag

SEQ ID NO: 1202334 - RNA, 19 nt, Artificial Sequence
  Description of Artificial Sequence: Synthetic oligonucleotide
  Sense strand starting at position 1104 of SEQ ID NO: 917021
guguuagugaaagacuuag

SEQ ID NO: 1202335 - RNA, 19 nt, Artificial Sequence
  Description of Artificial Sequence: Synthetic oligonucleotide
  Antisense strand to SEQ ID NO: 1202334
cuaagucuuucacuaacac

SEQ ID NO: 1202336 - RNA, 19 nt, Artificial Sequence
  Description of Artificial Sequence: Synthetic oligonucleotide
  Sense strand starting at position 1141 of SEQ ID NO: 917021
ggacuuacuggcuauguga

SEQ ID NO: 1202337 - RNA, 19 nt, Artificial Sequence
  Description of Artificial Sequence: Synthetic oligonucleotide
  Antisense strand to SEQ ID NO: 1202336
ucacauagccaguaagucc

SEQ ID NO: 1202338 - RNA, 19 nt, Artificial Sequence
  Description of Artificial Sequence: Synthetic oligonucleotide
  Sense strand starting at position 1149 of SEQ ID NO: 917021
uggcuaugugacuaacugu

SEQ ID NO: 1202339 - RNA, 19 nt, Artificial Sequence
  Description of Artificial Sequence: Synthetic oligonucleotide
  Antisense strand to SEQ ID NO: 1202338
acaguuagucacauagcca

SEQ ID NO: 1202340 - RNA, 19 nt, Artificial Sequence
  Description of Artificial Sequence: Synthetic oligonucleotide
  Sense strand starting at position 1152 of SEQ ID NO: 917021
cuaugugacuaacuguaaa

SEQ ID NO: 1202341 - RNA, 19 nt, Artificial Sequence
  Description of Artificial Sequence: Synthetic oligonucleotide
  Antisense strand to SEQ ID NO: 1202340
uuuacaguuagucacauag

SEQ ID NO: 1202342 - RNA, 19 nt, Artificial Sequence
  Description of Artificial Sequence: Synthetic oligonucleotide
  Sense strand starting at position 1207 of SEQ ID NO: 917021
ugaggauguguuggguuaa

SEQ ID NO: 1202343 - RNA, 19 nt, Artificial Sequence
  Description of Artificial Sequence: Synthetic oligonucleotide
  Antisense strand to SEQ ID NO: 1202342
uuaacccaacacauccuca

SEQ ID NO: 1202344 - RNA, 19 nt, Artificial Sequence
  Description of Artificial Sequence: Synthetic oligonucleotide
  Sense strand starting at position 1218 of SEQ ID NO: 917021
uggguuaacuuauuggaag

SEQ ID NO: 1202345 - RNA, 19 nt, Artificial Sequence
  Description of Artificial Sequence: Synthetic oligonucleotide
  Antisense strand to SEQ ID NO: 1202344
cuuccaauaaguuaaccca

SEQ ID NO: 1202346 - RNA, 19 nt, Artificial Sequence
  Description of Artificial Sequence: Synthetic oligonucleotide
  Sense strand starting at position 1344 of SEQ ID NO: 917021
aggcuaacgaaggguuuau

SEQ ID NO: 1202347 - RNA, 19 nt, Artificial Sequence
  Description of Artificial Sequence: Synthetic oligonucleotide
  Antisense strand to SEQ ID NO: 1202346
auaaacccuucguuagccu

SEQ ID NO: 1202348 - RNA, 19 nt, Artificial Sequence
  Description of Artificial Sequence: Synthetic oligonucleotide
  Sense strand starting at position 1476 of SEQ ID NO: 917021
gcuagugaacucggauuaa

SEQ ID NO: 1202349 - RNA, 19 nt, Artificial Sequence
  Description of Artificial Sequence: Synthetic oligonucleotide
  Antisense strand to SEQ ID NO: 1202348
uuaauccgaguucacuagc

SEQ ID NO: 1202350 - RNA, 19 nt, Artificial Sequence
  Description of Artificial Sequence: Synthetic oligonucleotide
  Sense strand starting at position 1486 of SEQ ID NO: 917021
ucggauuaaucacuuccua

SEQ ID NO: 1202351 - RNA, 19 nt, Artificial Sequence
  Description of Artificial Sequence: Synthetic oligonucleotide
  Antisense strand to SEQ ID NO: 1202350
uaggaagugauuaauccga

SEQ ID NO: 1202352 - RNA, 19 nt, Artificial Sequence
  Description of Artificial Sequence: Synthetic oligonucleotide
  Sense strand starting at position 1501 of SEQ ID NO: 917021
ccuauuucuggguguuagu

SEQ ID NO: 1202353 - RNA, 19 nt, Artificial Sequence
  Description of Artificial Sequence: Synthetic oligonucleotide
  Antisense strand to SEQ ID NO: 1202352
acuaacacccagaaauagg

SEQ ID NO: 1202354 - RNA, 19 nt, Artificial Sequence
  Description of Artificial Sequence: Synthetic oligonucleotide
  Sense strand starting at position 1586 of SEQ ID NO: 917021
aaaggaugugacugugcuu

SEQ ID NO: 1202355 - RNA, 19 nt, Artificial Sequence
  Description of Artificial Sequence: Synthetic oligonucleotide
  Antisense strand to SEQ ID NO: 1202354
aagcacagucacauccuuu

SEQ ID NO: 1202356 - RNA, 19 nt, Artificial Sequence
  Description of Artificial Sequence: Synthetic oligonucleotide
  Sense strand starting at position 1591 of SEQ ID NO: 917021
augugacugugcuucuuga

SEQ ID NO: 1202357 - RNA, 19 nt, Artificial Sequence
  Description of Artificial Sequence: Synthetic oligonucleotide
  Antisense strand to SEQ ID NO: 1202356
ucaagaagcacagucacau

SEQ ID NO: 1202358 - RNA, 19 nt, Artificial Sequence
  Description of Artificial Sequence: Synthetic oligonucleotide
  Sense strand starting at position 1626 of SEQ ID NO: 917021
auuugucauucggagagac

SEQ ID NO: 1202359 - RNA, 19 nt, Artificial Sequence
  Description of Artificial Sequence: Synthetic oligonucleotide
  Antisense strand to SEQ ID NO: 1202358
gucucuccgaaugacaaau

SEQ ID NO: 1202360 - RNA, 19 nt, Artificial Sequence
  Description of Artificial Sequence: Synthetic oligonucleotide
  Sense strand starting at position 1888 of SEQ ID NO: 917021
cggcgaaccagcgauugaa

SEQ ID NO: 1202361 - RNA, 19 nt, Artificial Sequence
  Description of Artificial Sequence: Synthetic oligonucleotide
  Antisense strand to SEQ ID NO: 1202360
uucaaucgcugguucgccg

SEQ ID NO: 1202362 - RNA, 19 nt, Artificial Sequence
  Description of Artificial Sequence: Synthetic oligonucleotide
  Sense strand starting at position 1900 of SEQ ID NO: 917021
gauugaagcacuggucgua

SEQ ID NO: 1202363 - RNA, 19 nt, Artificial Sequence
  Description of Artificial Sequence: Synthetic oligonucleotide
  Antisense strand to SEQ ID NO: 1202362
uacgaccagugcuucaauc

SEQ ID NO: 1202364 - RNA, 19 nt, Artificial Sequence
  Description of Artificial Sequence: Synthetic oligonucleotide
  Sense strand starting at position 2459 of SEQ ID NO: 917021
guucgcagccguuuaaugu

SEQ ID NO: 1202365 - RNA, 19 nt, Artificial Sequence
  Description of Artificial Sequence: Synthetic oligonucleotide
  Antisense strand to SEQ ID NO: 1202364
acauuaaacggcugcgaac

SEQ ID NO: 1202366 - RNA, 19 nt, Artificial Sequence
  Description of Artificial Sequence: Synthetic oligonucleotide
  Sense strand starting at position 2472 of SEQ ID NO: 917021
uaaugugacgauuagcgaa

SEQ ID NO: 1202367 - RNA, 19 nt, Artificial Sequence
  Description of Artificial Sequence: Synthetic oligonucleotide
  Antisense strand to SEQ ID NO: 1202366
uucgcuaaucgucacauua

SEQ ID NO: 1202368 - RNA, 19 nt, Artificial Sequence
  Description of Artificial Sequence: Synthetic oligonucleotide
  Sense strand starting at position 2507 of SEQ ID NO: 917021
uaaagaguguuagcaagau

SEQ ID NO: 1202369 - RNA, 19 nt, Artificial Sequence
  Description of Artificial Sequence: Synthetic oligonucleotide
  Antisense strand to SEQ ID NO: 1202368
aucuugcuaacacucuuua

SEQ ID NO: 1202370 - RNA, 19 nt, Artificial Sequence
  Description of Artificial Sequence: Synthetic oligonucleotide
  Sense strand starting at position 2598 of SEQ ID NO: 917021
gcuaguguaaguggaaaca

SEQ ID NO: 1202371 - RNA, 19 nt, Artificial Sequence
  Description of Artificial Sequence: Synthetic oligonucleotide
  Antisense strand to SEQ ID NO: 1202370
uguuuccacuuacacuagc

SEQ ID NO: 1202372 - RNA, 19 nt, Artificial Sequence
  Description of Artificial Sequence: Synthetic oligonucleotide
  Sense strand starting at position 3017 of SEQ ID NO: 917021
guacucuucucaguacucu

SEQ ID NO: 1202373 - RNA, 19 nt, Artificial Sequence
  Description of Artificial Sequence: Synthetic oligonucleotide
  Antisense strand to SEQ ID NO: 1202372
agaguacugagaagaguac

SEQ ID NO: 1202374 - RNA, 19 nt, Artificial Sequence
  Description of Artificial Sequence: Synthetic oligonucleotide
  Sense strand starting at position 3026 of SEQ ID NO: 917021
ucaguacucuccuuggcua

SEQ ID NO: 1202375 - RNA, 19 nt, Artificial Sequence
  Description of Artificial Sequence: Synthetic oligonucleotide
  Antisense strand to SEQ ID NO: 1202374
uagccaaggagaguacuga

SEQ ID NO: 1202376 - RNA, 19 nt, Artificial Sequence
  Description of Artificial Sequence: Synthetic oligonucleotide
  Sense strand starting at position 3047 of SEQ ID NO: 917021
uugacugcuucuccagcaa

SEQ ID NO: 1202377 - RNA, 19 nt, Artificial Sequence
  Description of Artificial Sequence: Synthetic oligonucleotide
  Antisense strand to SEQ ID NO: 1202376
uugcuggagaagcagucaa

SEQ ID NO: 1202378 - RNA, 19 nt, Artificial Sequence
  Description of Artificial Sequence: Synthetic oligonucleotide
  Sense strand starting at position 3220 of SEQ ID NO: 917021
guuaguaacucauccuauu

SEQ ID NO: 1202379 - RNA, 19 nt, Artificial Sequence
  Description of Artificial Sequence: Synthetic oligonucleotide
  Antisense strand to SEQ ID NO: 1202378
aauaggaugaguuacuaac

SEQ ID NO: 1202380 - RNA, 19 nt, Artificial Sequence
  Description of Artificial Sequence: Synthetic oligonucleotide
  Sense strand starting at position 3302 of SEQ ID NO: 917021
ugagcucauuauguaguua

SEQ ID NO: 1202381 - RNA, 19 nt, Artificial Sequence
  Description of Artificial Sequence: Synthetic oligonucleotide
  Antisense strand to SEQ ID NO: 1202380
uaacuacauaaugagcuca

SEQ ID NO: 1202382 - RNA, 19 nt, Artificial Sequence
  Description of Artificial Sequence: Synthetic oligonucleotide
  Sense strand starting at position 3408 of SEQ ID NO: 917021
aucucagcucauuguaaug

SEQ ID NO: 1202383 - RNA, 19 nt, Artificial Sequence
  Description of Artificial Sequence: Synthetic oligonucleotide
  Antisense strand to SEQ ID NO: 1202382
cauuacaaugagcugagau

SEQ ID NO: 1202384 - RNA, 19 nt, Artificial Sequence
  Description of Artificial Sequence: Synthetic oligonucleotide
  Sense strand starting at position 3632 of SEQ ID NO: 917021
gcaccuggccguguuugau

SEQ ID NO: 1202385 - RNA, 19 nt, Artificial Sequence
  Description of Artificial Sequence: Synthetic oligonucleotide
  Antisense strand to SEQ ID NO: 1202384
aucaaacacggccaggugc

SEQ ID NO: 1202386 - RNA, 19 nt, Artificial Sequence
  Description of Artificial Sequence: Synthetic oligonucleotide
  Sense strand starting at position 3727 of SEQ ID NO: 917021
cgcaaacuucuagacucaa

SEQ ID NO: 1202387 - RNA, 19 nt, Artificial Sequence
  Description of Artificial Sequence: Synthetic oligonucleotide
  Antisense strand to SEQ ID NO: 1202386
uugagucuagaaguuugcg

SEQ ID NO: 1202388 - RNA, 19 nt, Artificial Sequence
  Description of Artificial Sequence: Synthetic oligonucleotide
  Sense strand starting at position 404 of SEQ ID NO: 917022
guacucuagccugagggau

SEQ ID NO: 1202389 - RNA, 19 nt, Artificial Sequence
  Description of Artificial Sequence: Synthetic oligonucleotide
  Antisense strand to SEQ ID NO: 1202388
aucccucaggcuagaguac

SEQ ID NO: 1202390 - RNA, 19 nt, Artificial Sequence
  Description of Artificial Sequence: Synthetic oligonucleotide
  Sense strand starting at position 545 of SEQ ID NO: 917022
ucggaggaguguuggaauu

SEQ ID NO: 1202391 - RNA, 19 nt, Artificial Sequence
  Description of Artificial Sequence: Synthetic oligonucleotide
  Antisense strand to SEQ ID NO: 1202390
aauuccaacacuccuccga

SEQ ID NO: 1202392 - RNA, 19 nt, Artificial Sequence
  Description of Artificial Sequence: Synthetic oligonucleotide
  Sense strand starting at position 546 of SEQ ID NO: 917022
cggaggaguguuggaauua

SEQ ID NO: 1202393 - RNA, 19 nt, Artificial Sequence
  Description of Artificial Sequence: Synthetic oligonucleotide
  Antisense strand to SEQ ID NO: 1202392
uaauuccaacacuccuccg

SEQ ID NO: 1202394 - RNA, 19 nt, Artificial Sequence
  Description of Artificial Sequence: Synthetic oligonucleotide
  Sense strand starting at position 547 of SEQ ID NO: 917022
ggaggaguguuggaauuac

SEQ ID NO: 1202395 - RNA, 19 nt, Artificial Sequence
  Description of Artificial Sequence: Synthetic oligonucleotide
  Antisense strand to SEQ ID NO: 1202394
guaauuccaacacuccucc

SEQ ID NO: 1202396 - RNA, 19 nt, Artificial Sequence
  Description of Artificial Sequence: Synthetic oligonucleotide
  Sense strand starting at position 669 of SEQ ID NO: 917022
ucaagaggcuaucaucaaa

SEQ ID NO: 1202397 - RNA, 19 nt, Artificial Sequence
  Description of Artificial Sequence: Synthetic oligonucleotide
  Antisense strand to SEQ ID NO: 1202396
uuugaugauagccucuuga

SEQ ID NO: 1202398 - RNA, 19 nt, Artificial Sequence
  Description of Artificial Sequence: Synthetic oligonucleotide
  Sense strand starting at position 704 of SEQ ID NO: 917022
gacucaagccaagguauau

SEQ ID NO: 1202399 - RNA, 19 nt, Artificial Sequence
  Description of Artificial Sequence: Synthetic oligonucleotide
  Antisense strand to SEQ ID NO: 1202398
auauaccuuggcuugaguc

SEQ ID NO: 1202400 - RNA, 19 nt, Artificial Sequence
  Description of Artificial Sequence: Synthetic oligonucleotide
  Sense strand starting at position 733 of SEQ ID NO: 917022
aaagaagugcugcaaagua

SEQ ID NO: 1202401 - RNA, 19 nt, Artificial Sequence
  Description of Artificial Sequence: Synthetic oligonucleotide
  Antisense strand to SEQ ID NO: 1202400
uacuuugcagcacuucuuu

SEQ ID NO: 1202402 - RNA, 19 nt, Artificial Sequence
  Description of Artificial Sequence: Synthetic oligonucleotide
  Sense strand starting at position 741 of SEQ ID NO: 917022
gcugcaaaguauuaggaga

SEQ ID NO: 1202403 - RNA, 19 nt, Artificial Sequence
  Description of Artificial Sequence: Synthetic oligonucleotide
  Antisense strand to SEQ ID NO: 1202402
ucuccuaauacuuugcagc

SEQ ID NO: 1202404 - RNA, 19 nt, Artificial Sequence
  Description of Artificial Sequence: Synthetic oligonucleotide
  Sense strand starting at position 764 of SEQ ID NO: 917022
agagcaacugauugugaca

SEQ ID NO: 1202405 - RNA, 19 nt, Artificial Sequence
  Description of Artificial Sequence: Synthetic oligonucleotide
  Antisense strand to SEQ ID NO: 1202404
ugucacaaucaguugcucu

SEQ ID NO: 1202406 - RNA, 19 nt, Artificial Sequence
  Description of Artificial Sequence: Synthetic oligonucleotide
  Sense strand starting at position 1367 of SEQ ID NO: 917022
aaaggugagguuuaguguu

SEQ ID NO: 1202407 - RNA, 19 nt, Artificial Sequence
  Description of Artificial Sequence: Synthetic oligonucleotide
  Antisense strand to SEQ ID NO: 1202406
aacacuaaaccucaccuuu

SEQ ID NO: 1202408 - RNA, 19 nt, Artificial Sequence
  Description of Artificial Sequence: Synthetic oligonucleotide
  Sense strand starting at position 1387 of SEQ ID NO: 917022
gggugcauuacugguguga

SEQ ID NO: 1202409 - RNA, 19 nt, Artificial Sequence
  Description of Artificial Sequence: Synthetic oligonucleotide
  Antisense strand to SEQ ID NO: 1202408
ucacaccaguaaugcaccc

SEQ ID NO: 1202410 - RNA, 19 nt, Artificial Sequence
  Description of Artificial Sequence: Synthetic oligonucleotide
  Sense strand starting at position 1391 of SEQ ID NO: 917022
gcauuacuggugugacuac

SEQ ID NO: 1202411 - RNA, 19 nt, Artificial Sequence
  Description of Artificial Sequence: Synthetic oligonucleotide
  Antisense strand to SEQ ID NO: 1202410
guagucacaccaguaaugc

SEQ ID NO: 1202412 - RNA, 19 nt, Artificial Sequence
  Description of Artificial Sequence: Synthetic oligonucleotide
  Sense strand starting at position 1574 of SEQ ID NO: 917022
uggucaugauggcuacaau

SEQ ID NO: 1202413 - RNA, 19 nt, Artificial Sequence
  Description of Artificial Sequence: Synthetic oligonucleotide
  Antisense strand to SEQ ID NO: 1202412
auuguagccaucaugacca

SEQ ID NO: 1202414 - RNA, 19 nt, Artificial Sequence
  Description of Artificial Sequence: Synthetic oligonucleotide
  Sense strand starting at position 1575 of SEQ ID NO: 917022
ggucaugauggcuacaauu

SEQ ID NO: 1202415 - RNA, 19 nt, Artificial Sequence
  Description of Artificial Sequence: Synthetic oligonucleotide
  Antisense strand to SEQ ID NO: 1202414
aauuguagccaucaugacc

SEQ ID NO: 1202416 - RNA, 19 nt, Artificial Sequence
  Description of Artificial Sequence: Synthetic oligonucleotide
  Sense strand starting at position 1612 of SEQ ID NO: 917022
ggcagaaucuaagaucaaa

SEQ ID NO: 1202417 - RNA, 19 nt, Artificial Sequence
  Description of Artificial Sequence: Synthetic oligonucleotide
  Antisense strand to SEQ ID NO: 1202416
uuugaucuuagauucugcc

SEQ ID NO: 1202418 - RNA, 19 nt, Artificial Sequence
  Description of Artificial Sequence: Synthetic oligonucleotide
  Sense strand starting at position 1666 of SEQ ID NO: 917022
ccugauaccuccgcccuaa

SEQ ID NO: 1202419 - RNA, 19 nt, Artificial Sequence
  Description of Artificial Sequence: Synthetic oligonucleotide
  Antisense strand to SEQ ID NO: 1202418
uuagggcggagguaucagg

SEQ ID NO: 1202420 - RNA, 19 nt, Artificial Sequence
  Description of Artificial Sequence: Synthetic oligonucleotide
  Sense strand starting at position 2047 of SEQ ID NO: 917022
ccgcuuucuggcgaggaaa

SEQ ID NO: 1202421 - RNA, 19 nt, Artificial Sequence
  Description of Artificial Sequence: Synthetic oligonucleotide
  Antisense strand to SEQ ID NO: 1202420
uuuccucgccagaaagcgg

SEQ ID NO: 1202422 - RNA, 19 nt, Artificial Sequence
  Description of Artificial Sequence: Synthetic oligonucleotide
  Sense strand starting at position 2246 of SEQ ID NO: 917022
uacaguugaucguuccgau

SEQ ID NO: 1202423 - RNA, 19 nt, Artificial Sequence
  Description of Artificial Sequence: Synthetic oligonucleotide
  Antisense strand to SEQ ID NO: 1202422
aucggaacgaucaacugua

SEQ ID NO: 1202424 - RNA, 19 nt, Artificial Sequence
  Description of Artificial Sequence: Synthetic oligonucleotide
  Sense strand starting at position 2428 of SEQ ID NO: 917022
aggaucucuugagcugagu

SEQ ID NO: 1202425 - RNA, 19 nt, Artificial Sequence
  Description of Artificial Sequence: Synthetic oligonucleotide
  Antisense strand to SEQ ID NO: 1202424
acucagcucaagagauccu

SEQ ID NO: 1202426 - RNA, 19 nt, Artificial Sequence
  Description of Artificial Sequence: Synthetic oligonucleotide
  Sense strand starting at position 2516 of SEQ ID NO: 917022
uaauaaucccugugcagug

SEQ ID NO: 1202427 - RNA, 19 nt, Artificial Sequence
  Description of Artificial Sequence: Synthetic oligonucleotide
  Antisense strand to SEQ ID NO: 1202426
cacugcacagggauuauua

SEQ ID NO: 1202428 - RNA, 19 nt, Artificial Sequence
  Description of Artificial Sequence: Synthetic oligonucleotide
  Sense strand starting at position 2685 of SEQ ID NO: 917022
gagagaacaucuguacguu

SEQ ID NO: 1202429 - RNA, 19 nt, Artificial Sequence
  Description of Artificial Sequence: Synthetic oligonucleotide
  Antisense strand to SEQ ID NO: 1202428
aacguacagauguucucuc

SEQ ID NO: 1202430 - RNA, 19 nt, Artificial Sequence
  Description of Artificial Sequence: Synthetic oligonucleotide
  Sense strand starting at position 2697 of SEQ ID NO: 917022
guacguugucuccgggaua

SEQ ID NO: 1202431 - RNA, 19 nt, Artificial Sequence
  Description of Artificial Sequence: Synthetic oligonucleotide
  Antisense strand to SEQ ID NO: 1202430
uaucccggagacaacguac

SEQ ID NO: 1202432 - RNA, 19 nt, Artificial Sequence
  Description of Artificial Sequence: Synthetic oligonucleotide
  Sense strand starting at position 2698 of SEQ ID NO: 917022
uacguugucuccgggauaa

SEQ ID NO: 1202433 - RNA, 19 nt, Artificial Sequence
  Description of Artificial Sequence: Synthetic oligonucleotide
  Antisense strand to SEQ ID NO: 1202432
uuaucccggagacaacgua

SEQ ID NO: 1202434 - RNA, 19 nt, Artificial Sequence
  Description of Artificial Sequence: Synthetic oligonucleotide
  Sense strand starting at position 2702 of SEQ ID NO: 917022
uugucuccgggauaaggaa

SEQ ID NO: 1202435 - RNA, 19 nt, Artificial Sequence
  Description of Artificial Sequence: Synthetic oligonucleotide
  Antisense strand to SEQ ID NO: 1202434
uuccuuaucccggagacaa

SEQ ID NO: 1202436 - RNA, 19 nt, Artificial Sequence
  Description of Artificial Sequence: Synthetic oligonucleotide
  Sense strand starting at position 2755 of SEQ ID NO: 917022
ucgaacugagccuaacaau

SEQ ID NO: 1202437 - RNA, 19 nt, Artificial Sequence
  Description of Artificial Sequence: Synthetic oligonucleotide
  Antisense strand to SEQ ID NO: 1202436
auuguuaggcucaguucga

SEQ ID NO: 1202438 - RNA, 19 nt, Artificial Sequence
  Description of Artificial Sequence: Synthetic oligonucleotide
  Sense strand starting at position 2793 of SEQ ID NO: 917022
ucacaauccagugaggugu

SEQ ID NO: 1202439 - RNA, 19 nt, Artificial Sequence
  Description of Artificial Sequence: Synthetic oligonucleotide
  Antisense strand to SEQ ID NO: 1202438
acaccucacuggauuguga

SEQ ID NO: 1202440 - RNA, 19 nt, Artificial Sequence
  Description of Artificial Sequence: Synthetic oligonucleotide
  Sense strand starting at position 2797 of SEQ ID NO: 917022
aauccagugaggugucuga

SEQ ID NO: 1202441 - RNA, 19 nt, Artificial Sequence
  Description of Artificial Sequence: Synthetic oligonucleotide
  Antisense strand to SEQ ID NO: 1202440
ucagacaccucacuggauu

SEQ ID NO: 1202442 - RNA, 19 nt, Artificial Sequence
  Description of Artificial Sequence: Synthetic oligonucleotide
  Sense strand starting at position 2801 of SEQ ID NO: 917022
cagugaggugucugaugag

SEQ ID NO: 1202443 - RNA, 19 nt, Artificial Sequence
  Description of Artificial Sequence: Synthetic oligonucleotide
  Antisense strand to SEQ ID NO: 1202442
cucaucagacaccucacug

SEQ ID NO: 1202444 - RNA, 19 nt, Artificial Sequence
  Description of Artificial Sequence: Synthetic oligonucleotide
  Sense strand starting at position 2964 of SEQ ID NO: 917022
ggcucaccugcugguuauu

SEQ ID NO: 1202445 - RNA, 19 nt, Artificial Sequence
  Description of Artificial Sequence: Synthetic oligonucleotide
  Antisense strand to SEQ ID NO: 1202444
aauaaccagcaggugagcc

SEQ ID NO: 1202446 - RNA, 19 nt, Artificial Sequence
  Description of Artificial Sequence: Synthetic oligonucleotide
  Sense strand starting at position 2973 of SEQ ID NO: 917022
gcugguuauuggugggcaa

SEQ ID NO: 1202447 - RNA, 19 nt, Artificial Sequence
  Description of Artificial Sequence: Synthetic oligonucleotide
  Antisense strand to SEQ ID NO: 1202446
uugcccaccaauaaccagc

SEQ ID NO: 1202448 - RNA, 19 nt, Artificial Sequence
  Description of Artificial Sequence: Synthetic oligonucleotide
  Sense strand starting at position 3014 of SEQ ID NO: 917022
agaauauccugcuuaagau

SEQ ID NO: 1202449 - RNA, 19 nt, Artificial Sequence
  Description of Artificial Sequence: Synthetic oligonucleotide
  Antisense strand to SEQ ID NO: 1202448
aucuuaagcaggauauucu

SEQ ID NO: 1202450 - RNA, 19 nt, Artificial Sequence
  Description of Artificial Sequence: Synthetic oligonucleotide
  Sense strand starting at position 3078 of SEQ ID NO: 917022
acagaacucugguggauuu

SEQ ID NO: 1202451 - RNA, 19 nt, Artificial Sequence
  Description of Artificial Sequence: Synthetic oligonucleotide
  Antisense strand to SEQ ID NO: 1202450
aaauccaccagaguucugu

SEQ ID NO: 1202452 - RNA, 19 nt, Artificial Sequence
  Description of Artificial Sequence: Synthetic oligonucleotide
  Sense strand starting at position 3130 of SEQ ID NO: 917022
gccagaaaccgaggaguua

SEQ ID NO: 1202453 - RNA, 19 nt, Artificial Sequence
  Description of Artificial Sequence: Synthetic oligonucleotide
  Antisense strand to SEQ ID NO: 1202452
uaacuccucgguuucuggc

SEQ ID NO: 1202454 - RNA, 19 nt, Artificial Sequence
  Description of Artificial Sequence: Synthetic oligonucleotide
  Sense strand starting at position 3141 of SEQ ID NO: 917022
aggaguuacuccuuaacuc

SEQ ID NO: 1202455 - RNA, 19 nt, Artificial Sequence
  Description of Artificial Sequence: Synthetic oligonucleotide
  Antisense strand to SEQ ID NO: 1202454
gaguuaaggaguaacuccu

SEQ ID NO: 1202456 - RNA, 19 nt, Artificial Sequence
  Description of Artificial Sequence: Synthetic oligonucleotide
  Sense strand starting at position 3417 of SEQ ID NO: 917022
gcgucuuucccagcacuuu

SEQ ID NO: 1202457 - RNA, 19 nt, Artificial Sequence
  Description of Artificial Sequence: Synthetic oligonucleotide
  Antisense strand to SEQ ID NO: 1202456
aaagugcugggaaagacgc

SEQ ID NO: 1202458 - RNA, 19 nt, Artificial Sequence
  Description of Artificial Sequence: Synthetic oligonucleotide
  Sense strand starting at position 3520 of SEQ ID NO: 917022
uuuaaagauacguaaggua

SEQ ID NO: 1202459 - RNA, 19 nt, Artificial Sequence
  Description of Artificial Sequence: Synthetic oligonucleotide
  Antisense strand to SEQ ID NO: 1202458
uaccuuacguaucuuuaaa

SEQ ID NO: 1202460 - RNA, 19 nt, Artificial Sequence
  Description of Artificial Sequence: Synthetic oligonucleotide
  Sense strand starting at position 3528 of SEQ ID NO: 917022
uacguaagguaucuuuacu

SEQ ID NO: 1202461 - RNA, 19 nt, Artificial Sequence
  Description of Artificial Sequence: Synthetic oligonucleotide
  Antisense strand to SEQ ID NO: 1202460
aguaaagauaccuuacgua

SEQ ID NO: 1202462 - RNA, 19 nt, Artificial Sequence
  Description of Artificial Sequence: Synthetic oligonucleotide
  Sense strand starting at position 3534 of SEQ ID NO: 917022
agguaucuuuacuaauugu

SEQ ID NO: 1202463 - RNA, 19 nt, Artificial Sequence
  Description of Artificial Sequence: Synthetic oligonucleotide
  Antisense strand to SEQ ID NO: 1202462
acaauuaguaaagauaccu

SEQ ID NO: 1202464 - RNA, 19 nt, Artificial Sequence
  Description of Artificial Sequence: Synthetic oligonucleotide
  Sense strand starting at position 3910 of SEQ ID NO: 917022
cuggguuuaugacuguaau

SEQ ID NO: 1202465 - RNA, 19 nt, Artificial Sequence
  Description of Artificial Sequence: Synthetic oligonucleotide
  Antisense strand to SEQ ID NO: 1202464
auuacagucauaaacccag

SEQ ID NO: 1202466 - RNA, 19 nt, Artificial Sequence
  Description of Artificial Sequence: Synthetic oligonucleotide
  Sense strand starting at position 3911 of SEQ ID NO: 917022
uggguuuaugacuguaauc

SEQ ID NO: 1202467 - RNA, 19 nt, Artificial Sequence
  Description of Artificial Sequence: Synthetic oligonucleotide
  Antisense strand to SEQ ID NO: 1202466
gauuacagucauaaaccca

SEQ ID NO: 1202468 - RNA, 19 nt, Artificial Sequence
  Description of Artificial Sequence: Synthetic oligonucleotide
  Sense strand starting at position 10 of SEQ ID NO: 917023
ggguguauggcuggacaga

SEQ ID NO: 1202469 - RNA, 19 nt, Artificial Sequence
  Description of Artificial Sequence: Synthetic oligonucleotide
  Antisense strand to SEQ ID NO: 1202468
ucuguccagccauacaccc

SEQ ID NO: 1202470 - RNA, 19 nt, Artificial Sequence
  Description of Artificial Sequence: Synthetic oligonucleotide
  Sense strand starting at position 11 of SEQ ID NO: 917023
gguguauggcuggacagau

SEQ ID NO: 1202471 - RNA, 19 nt, Artificial Sequence
  Description of Artificial Sequence: Synthetic oligonucleotide
  Antisense strand to SEQ ID NO: 1202470
aucuguccagccauacacc

SEQ ID NO: 1202472 - RNA, 19 nt, Artificial Sequence
  Description of Artificial Sequence: Synthetic oligonucleotide
  Sense strand starting at position 109 of SEQ ID NO: 917023
aaguguaaagauggguaaa

SEQ ID NO: 1202473 - RNA, 19 nt, Artificial Sequence
  Description of Artificial Sequence: Synthetic oligonucleotide
  Antisense strand to SEQ ID NO: 1202472
uuuacccaucuuuacacuu

SEQ ID NO: 1202474 - RNA, 19 nt, Artificial Sequence
  Description of Artificial Sequence: Synthetic oligonucleotide
  Sense strand starting at position 110 of SEQ ID NO: 917023
aguguaaagauggguaaau

SEQ ID NO: 1202475 - RNA, 19 nt, Artificial Sequence
  Description of Artificial Sequence: Synthetic oligonucleotide
  Antisense strand to SEQ ID NO: 1202474
auuuacccaucuuuacacu

SEQ ID NO: 1202476 - RNA, 19 nt, Artificial Sequence
  Description of Artificial Sequence: Synthetic oligonucleotide
  Sense strand starting at position 111 of SEQ ID NO: 917023
guguaaagauggguaaaug

SEQ ID NO: 1202477 - RNA, 19 nt, Artificial Sequence
  Description of Artificial Sequence: Synthetic oligonucleotide
  Antisense strand to SEQ ID NO: 1202476
cauuuacccaucuuuacac

SEQ ID NO: 1202478 - RNA, 19 nt, Artificial Sequence
  Description of Artificial Sequence: Synthetic oligonucleotide
  Sense strand starting at position 214 of SEQ ID NO: 917023
cuggauguguaggugaaga

SEQ ID NO: 1202479 - RNA, 19 nt, Artificial Sequence
  Description of Artificial Sequence: Synthetic oligonucleotide
  Antisense strand to SEQ ID NO: 1202478
ucuucaccuacacauccag

SEQ ID NO: 1202480 - RNA, 19 nt, Artificial Sequence
  Description of Artificial Sequence: Synthetic oligonucleotide
  Sense strand starting at position 260 of SEQ ID NO: 917023
gacagaugaguacguggau

SEQ ID NO: 1202481 - RNA, 19 nt, Artificial Sequence
  Description of Artificial Sequence: Synthetic oligonucleotide
  Antisense strand to SEQ ID NO: 1202480
auccacguacucaucuguc

SEQ ID NO: 1202482 - RNA, 19 nt, Artificial Sequence
  Description of Artificial Sequence: Synthetic oligonucleotide
  Sense strand starting at position 261 of SEQ ID NO: 917023
acagaugaguacguggaua

SEQ ID NO: 1202483 - RNA, 19 nt, Artificial Sequence
  Description of Artificial Sequence: Synthetic oligonucleotide
  Antisense strand to SEQ ID NO: 1202482
uauccacguacucaucugu

SEQ ID NO: 1202484 - RNA, 19 nt, Artificial Sequence
  Description of Artificial Sequence: Synthetic oligonucleotide
  Sense strand starting at position 263 of SEQ ID NO: 917023
agaugaguacguggauaug

SEQ ID NO: 1202485 - RNA, 19 nt, Artificial Sequence
  Description of Artificial Sequence: Synthetic oligonucleotide
  Antisense strand to SEQ ID NO: 1202484
cauauccacguacucaucu

SEQ ID NO: 1202486 - RNA, 19 nt, Artificial Sequence
  Description of Artificial Sequence: Synthetic oligonucleotide
  Sense strand starting at position 272 of SEQ ID NO: 917023
cguggauauguaggugaau

SEQ ID NO: 1202487 - RNA, 19 nt, Artificial Sequence
  Description of Artificial Sequence: Synthetic oligonucleotide
  Antisense strand to SEQ ID NO: 1202486
auucaccuacauauccacg

SEQ ID NO: 1202488 - RNA, 19 nt, Artificial Sequence
  Description of Artificial Sequence: Synthetic oligonucleotide
  Sense strand starting at position 273 of SEQ ID NO: 917023
guggauauguaggugaaua

SEQ ID NO: 1202489 - RNA, 19 nt, Artificial Sequence
  Description of Artificial Sequence: Synthetic oligonucleotide
  Antisense strand to SEQ ID NO: 1202488
uauucaccuacauauccac

SEQ ID NO: 1202490 - RNA, 19 nt, Artificial Sequence
  Description of Artificial Sequence: Synthetic oligonucleotide
  Sense strand starting at position 274 of SEQ ID NO: 917023
uggauauguaggugaauaa

SEQ ID NO: 1202491 - RNA, 19 nt, Artificial Sequence
  Description of Artificial Sequence: Synthetic oligonucleotide
  Antisense strand to SEQ ID NO: 1202490
uuauucaccuacauaucca

SEQ ID NO: 1202492 - RNA, 19 nt, Artificial Sequence
  Description of Artificial Sequence: Synthetic oligonucleotide
  Sense strand starting at position 613 of SEQ ID NO: 917023
uggagaguuagaugaguaa

SEQ ID NO: 1202493 - RNA, 19 nt, Artificial Sequence
  Description of Artificial Sequence: Synthetic oligonucleotide
  Antisense strand to SEQ ID NO: 1202492
uuacucaucuaacucucca

SEQ ID NO: 1202494 - RNA, 19 nt, Artificial Sequence
  Description of Artificial Sequence: Synthetic oligonucleotide
  Sense strand starting at position 639 of SEQ ID NO: 917023
uauaaaugaguggguggaa

SEQ ID NO: 1202495 - RNA, 19 nt, Artificial Sequence
  Description of Artificial Sequence: Synthetic oligonucleotide
  Antisense strand to SEQ ID NO: 1202494
uuccacccacucauuuaua

SEQ ID NO: 1202496 - RNA, 19 nt, Artificial Sequence
  Description of Artificial Sequence: Synthetic oligonucleotide
  Sense strand starting at position 673 of SEQ ID NO: 917023
uggguaaauggcugaguuu

SEQ ID NO: 1202497 - RNA, 19 nt, Artificial Sequence
  Description of Artificial Sequence: Synthetic oligonucleotide
  Antisense strand to SEQ ID NO: 1202496
aaacucagccauuuaccca

SEQ ID NO: 1202498 - RNA, 19 nt, Artificial Sequence
  Description of Artificial Sequence: Synthetic oligonucleotide
  Sense strand starting at position 674 of SEQ ID NO: 917023
ggguaaauggcugaguuug

SEQ ID NO: 1202499 - RNA, 19 nt, Artificial Sequence
  Description of Artificial Sequence: Synthetic oligonucleotide
  Antisense strand to SEQ ID NO: 1202498
caaacucagccauuuaccc

SEQ ID NO: 1202500 - RNA, 19 nt, Artificial Sequence
  Description of Artificial Sequence: Synthetic oligonucleotide
  Sense strand starting at position 748 of SEQ ID NO: 917023
uauaaaugaguggguggau

SEQ ID NO: 1202501 - RNA, 19 nt, Artificial Sequence
  Description of Artificial Sequence: Synthetic oligonucleotide
  Antisense strand to SEQ ID NO: 1202500
auccacccacucauuuaua

SEQ ID NO: 1202502 - RNA, 19 nt, Artificial Sequence
  Description of Artificial Sequence: Synthetic oligonucleotide
  Sense strand starting at position 1188 of SEQ ID NO: 917023
augauagauggcuggauga

SEQ ID NO: 1202503 - RNA, 19 nt, Artificial Sequence
  Description of Artificial Sequence: Synthetic oligonucleotide
  Antisense strand to SEQ ID NO: 1202502
ucauccagccaucuaucau

SEQ ID NO: 1202504 - RNA, 19 nt, Artificial Sequence
  Description of Artificial Sequence: Synthetic oligonucleotide
  Sense strand starting at position 1342 of SEQ ID NO: 917023
gauagauguguggaugguu

SEQ ID NO: 1202505 - RNA, 19 nt, Artificial Sequence
  Description of Artificial Sequence: Synthetic oligonucleotide
  Antisense strand to SEQ ID NO: 1202504
aaccauccacacaucuauc

SEQ ID NO: 1202506 - RNA, 19 nt, Artificial Sequence
  Description of Artificial Sequence: Synthetic oligonucleotide
  Sense strand starting at position 1370 of SEQ ID NO: 917023
gacgaauagaugggugguu

SEQ ID NO: 1202507 - RNA, 19 nt, Artificial Sequence
  Description of Artificial Sequence: Synthetic oligonucleotide
  Antisense strand to SEQ ID NO: 1202506
aaccacccaucuauucguc

SEQ ID NO: 1202508 - RNA, 19 nt, Artificial Sequence
  Description of Artificial Sequence: Synthetic oligonucleotide
  Sense strand starting at position 1488 of SEQ ID NO: 917023
cgacggauggguggauaau

SEQ ID NO: 1202509 - RNA, 19 nt, Artificial Sequence
  Description of Artificial Sequence: Synthetic oligonucleotide
  Antisense strand to SEQ ID NO: 1202508
auuauccacccauccgucg

SEQ ID NO: 1202510 - RNA, 19 nt, Artificial Sequence
  Description of Artificial Sequence: Synthetic oligonucleotide
  Sense strand starting at position 2238 of SEQ ID NO: 917023
cugggcauuagcugaaaga

SEQ ID NO: 1202511 - RNA, 19 nt, Artificial Sequence
  Description of Artificial Sequence: Synthetic oligonucleotide
  Antisense strand to SEQ ID NO: 1202510
ucuuucagcuaaugcccag

SEQ ID NO: 1202512 - RNA, 19 nt, Artificial Sequence
  Description of Artificial Sequence: Synthetic oligonucleotide
  Sense strand starting at position 2371 of SEQ ID NO: 917023
uuagucauuccaugacauu

SEQ ID NO: 1202513 - RNA, 19 nt, Artificial Sequence
  Description of Artificial Sequence: Synthetic oligonucleotide
  Antisense strand to SEQ ID NO: 1202512
aaugucauggaaugacuaa

SEQ ID NO: 1202514 - RNA, 19 nt, Artificial Sequence
  Description of Artificial Sequence: Synthetic oligonucleotide
  Sense strand starting at position 2377 of SEQ ID NO: 917023
auuccaugacauugagcaa

SEQ ID NO: 1202515 - RNA, 19 nt, Artificial Sequence
  Description of Artificial Sequence: Synthetic oligonucleotide
  Antisense strand to SEQ ID NO: 1202514
uugcucaaugucauggaau

SEQ ID NO: 1202516 - RNA, 19 nt, Artificial Sequence
  Description of Artificial Sequence: Synthetic oligonucleotide
  Sense strand starting at position 2416 of SEQ ID NO: 917023
gcuuccugaucuguaagau

SEQ ID NO: 1202517 - RNA, 19 nt, Artificial Sequence
  Description of Artificial Sequence: Synthetic oligonucleotide
  Antisense strand to SEQ ID NO: 1202516
aucuuacagaucaggaagc

SEQ ID NO: 1202518 - RNA, 19 nt, Artificial Sequence
  Description of Artificial Sequence: Synthetic oligonucleotide
  Sense strand starting at position 2417 of SEQ ID NO: 917023
cuuccugaucuguaagaug

SEQ ID NO: 1202519 - RNA, 19 nt, Artificial Sequence
  Description of Artificial Sequence: Synthetic oligonucleotide
  Antisense strand to SEQ ID NO: 1202518
caucuuacagaucaggaag

SEQ ID NO: 1202520 - RNA, 19 nt, Artificial Sequence
  Description of Artificial Sequence: Synthetic oligonucleotide
  Sense strand starting at position 2655 of SEQ ID NO: 917023
gcuccaauacuugaguuga

SEQ ID NO: 1202521 - RNA, 19 nt, Artificial Sequence
  Description of Artificial Sequence: Synthetic oligonucleotide
  Antisense strand to SEQ ID NO: 1202520
ucaacucaaguauuggagc

SEQ ID NO: 1202522 - RNA, 19 nt, Artificial Sequence
  Description of Artificial Sequence: Synthetic oligonucleotide
  Sense strand starting at position 2657 of SEQ ID NO: 917023
uccaauacuugaguugacu

SEQ ID NO: 1202523 - RNA, 19 nt, Artificial Sequence
  Description of Artificial Sequence: Synthetic oligonucleotide
  Antisense strand to SEQ ID NO: 1202522
agucaacucaaguauugga

SEQ ID NO: 1202524 - RNA, 19 nt, Artificial Sequence
  Description of Artificial Sequence: Synthetic oligonucleotide
  Sense strand starting at position 2898 of SEQ ID NO: 917023
caggaaauguaucugucuu

SEQ ID NO: 1202525 - RNA, 19 nt, Artificial Sequence
  Description of Artificial Sequence: Synthetic oligonucleotide
  Antisense strand to SEQ ID NO: 1202524
aagacagauacauuuccug

SEQ ID NO: 1202526 - RNA, 19 nt, Artificial Sequence
  Description of Artificial Sequence: Synthetic oligonucleotide
  Sense strand starting at position 2899 of SEQ ID NO: 917023
aggaaauguaucugucuug

SEQ ID NO: 1202527 - RNA, 19 nt, Artificial Sequence
  Description of Artificial Sequence: Synthetic oligonucleotide
  Antisense strand to SEQ ID NO: 1202526
caagacagauacauuuccu

SEQ ID NO: 1202528 - RNA, 19 nt, Artificial Sequence
  Description of Artificial Sequence: Synthetic oligonucleotide
  Sense strand starting at position 2900 of SEQ ID NO: 917023
ggaaauguaucugucuugu

SEQ ID NO: 1202529 - RNA, 19 nt, Artificial Sequence
  Description of Artificial Sequence: Synthetic oligonucleotide
  Antisense strand to SEQ ID NO: 1202528
acaagacagauacauuucc

SEQ ID NO: 1202530 - RNA, 19 nt, Artificial Sequence
  Description of Artificial Sequence: Synthetic oligonucleotide
  Sense strand starting at position 2921 of SEQ ID NO: 917023
aucccugaguccucacaca

SEQ ID NO: 1202531 - RNA, 19 nt, Artificial Sequence
  Description of Artificial Sequence: Synthetic oligonucleotide
  Antisense strand to SEQ ID NO: 1202530
ugugugaggacucagggau

SEQ ID NO: 1202532 - RNA, 19 nt, Artificial Sequence
  Description of Artificial Sequence: Synthetic oligonucleotide
  Sense strand starting at position 2954 of SEQ ID NO: 917023
ugacaaagaugucauuugu

SEQ ID NO: 1202533 - RNA, 19 nt, Artificial Sequence
  Description of Artificial Sequence: Synthetic oligonucleotide
  Antisense strand to SEQ ID NO: 1202532
acaaaugacaucuuuguca

SEQ ID NO: 1202534 - RNA, 19 nt, Artificial Sequence
  Description of Artificial Sequence: Synthetic oligonucleotide
  Sense strand starting at position 2964 of SEQ ID NO: 917023
gucauuuguucccauuucu

SEQ ID NO: 1202535 - RNA, 19 nt, Artificial Sequence
  Description of Artificial Sequence: Synthetic oligonucleotide
  Antisense strand to SEQ ID NO: 1202534
agaaaugggaacaaaugac

SEQ ID NO: 1202536 - RNA, 19 nt, Artificial Sequence
  Description of Artificial Sequence: Synthetic oligonucleotide
  Sense strand starting at position 2971 of SEQ ID NO: 917023
guucccauuucucagauga

SEQ ID NO: 1202537 - RNA, 19 nt, Artificial Sequence
  Description of Artificial Sequence: Synthetic oligonucleotide
  Antisense strand to SEQ ID NO: 1202536
ucaucugagaaaugggaac

SEQ ID NO: 1202538 - RNA, 19 nt, Artificial Sequence
  Description of Artificial Sequence: Synthetic oligonucleotide
  Sense strand starting at position 3036 of SEQ ID NO: 917023
ggacuugaaccaugucucu

SEQ ID NO: 1202539 - RNA, 19 nt, Artificial Sequence
  Description of Artificial Sequence: Synthetic oligonucleotide
  Antisense strand to SEQ ID NO: 1202538
agagacaugguucaagucc

SEQ ID NO: 1202540 - RNA, 19 nt, Artificial Sequence
  Description of Artificial Sequence: Synthetic oligonucleotide
  Sense strand starting at position 3175 of SEQ ID NO: 917023
aagggugaguuuccuggaa

SEQ ID NO: 1202541 - RNA, 19 nt, Artificial Sequence
  Description of Artificial Sequence: Synthetic oligonucleotide
  Antisense strand to SEQ ID NO: 1202540
uuccaggaaacucacccuu

SEQ ID NO: 1202542 - RNA, 19 nt, Artificial Sequence
  Description of Artificial Sequence: Synthetic oligonucleotide
  Sense strand starting at position 3179 of SEQ ID NO: 917023
gugaguuuccuggaacucu

SEQ ID NO: 1202543 - RNA, 19 nt, Artificial Sequence
  Description of Artificial Sequence: Synthetic oligonucleotide
  Antisense strand to SEQ ID NO: 1202542
agaguuccaggaaacucac

SEQ ID NO: 1202544 - RNA, 19 nt, Artificial Sequence
  Description of Artificial Sequence: Synthetic oligonucleotide
  Sense strand starting at position 3628 of SEQ ID NO: 917023
agauauauccagugccacu

SEQ ID NO: 1202545 - RNA, 19 nt, Artificial Sequence
  Description of Artificial Sequence: Synthetic oligonucleotide
  Antisense strand to SEQ ID NO: 1202544
aguggcacuggauauaucu

SEQ ID NO: 1202546 - RNA, 19 nt, Artificial Sequence
  Description of Artificial Sequence: Synthetic oligonucleotide
  Sense strand starting at position 3639 of SEQ ID NO: 917023
gugccacuucugggauuaa

SEQ ID NO: 1202547 - RNA, 19 nt, Artificial Sequence
  Description of Artificial Sequence: Synthetic oligonucleotide
  Antisense strand to SEQ ID NO: 1202546
uuaaucccagaaguggcac

SEQ ID NO: 1202548 - RNA, 19 nt, Artificial Sequence
  Description of Artificial Sequence: Synthetic oligonucleotide
  Sense strand starting at position 22 of SEQ ID NO: 917024
aauggaagguugguuauau

SEQ ID NO: 1202549 - RNA, 19 nt, Artificial Sequence
  Description of Artificial Sequence: Synthetic oligonucleotide
  Antisense strand to SEQ ID NO: 1202548
auauaaccaaccuuccauu

SEQ ID NO: 1202550 - RNA, 19 nt, Artificial Sequence
  Description of Artificial Sequence: Synthetic oligonucleotide
  Sense strand starting at position 23 of SEQ ID NO: 917024
auggaagguugguuauaug

SEQ ID NO: 1202551 - RNA, 19 nt, Artificial Sequence
  Description of Artificial Sequence: Synthetic oligonucleotide
  Antisense strand to SEQ ID NO: 1202550
cauauaaccaaccuuccau

SEQ ID NO: 1202552 - RNA, 19 nt, Artificial Sequence
  Description of Artificial Sequence: Synthetic oligonucleotide
  Sense strand starting at position 41 of SEQ ID NO: 917024
ggguguauggcuggacaga

SEQ ID NO: 1202553 - RNA, 19 nt, Artificial Sequence
  Description of Artificial Sequence: Synthetic oligonucleotide
  Antisense strand to SEQ ID NO: 1202552
ucuguccagccauacaccc

SEQ ID NO: 1202554 - RNA, 19 nt, Artificial Sequence
  Description of Artificial Sequence: Synthetic oligonucleotide
  Sense strand starting at position 42 of SEQ ID NO: 917024
gguguauggcuggacagau

SEQ ID NO: 1202555 - RNA, 19 nt, Artificial Sequence
  Description of Artificial Sequence: Synthetic oligonucleotide
  Antisense strand to SEQ ID NO: 1202554
aucuguccagccauacacc

SEQ ID NO: 1202556 - RNA, 19 nt, Artificial Sequence
  Description of Artificial Sequence: Synthetic oligonucleotide
  Sense strand starting at position 140 of SEQ ID NO: 917024
aaguguaaagauggguaaa

SEQ ID NO: 1202557 - RNA, 19 nt, Artificial Sequence
  Description of Artificial Sequence: Synthetic oligonucleotide
  Antisense strand to SEQ ID NO: 1202556
uuuacccaucuuuacacuu

SEQ ID NO: 1202558 - RNA, 19 nt, Artificial Sequence
  Description of Artificial Sequence: Synthetic oligonucleotide
  Sense strand starting at position 141 of SEQ ID NO: 917024
aguguaaagauggguaaau

SEQ ID NO: 1202559 - RNA, 19 nt, Artificial Sequence
  Description of Artificial Sequence: Synthetic oligonucleotide
  Antisense strand to SEQ ID NO: 1202558
auuuacccaucuuuacacu

SEQ ID NO: 1202560 - RNA, 19 nt, Artificial Sequence
  Description of Artificial Sequence: Synthetic oligonucleotide
  Sense strand starting at position 142 of SEQ ID NO: 917024
guguaaagauggguaaaug

SEQ ID NO: 1202561 - RNA, 19 nt, Artificial Sequence
  Description of Artificial Sequence: Synthetic oligonucleotide
  Antisense strand to SEQ ID NO: 1202560
cauuuacccaucuuuacac

SEQ ID NO: 1202562 - RNA, 19 nt, Artificial Sequence
  Description of Artificial Sequence: Synthetic oligonucleotide
  Sense strand starting at position 245 of SEQ ID NO: 917024
cuggauguguaggugaaga

SEQ ID NO: 1202563 - RNA, 19 nt, Artificial Sequence
  Description of Artificial Sequence: Synthetic oligonucleotide
  Antisense strand to SEQ ID NO: 1202562
ucuucaccuacacauccag

SEQ ID NO: 1202564 - RNA, 19 nt, Artificial Sequence
  Description of Artificial Sequence: Synthetic oligonucleotide
  Sense strand starting at position 291 of SEQ ID NO: 917024
gacagaugaguacguggau

SEQ ID NO: 1202565 - RNA, 19 nt, Artificial Sequence
  Description of Artificial Sequence: Synthetic oligonucleotide
  Antisense strand to SEQ ID NO: 1202564
auccacguacucaucuguc

SEQ ID NO: 1202566 - RNA, 19 nt, Artificial Sequence
  Description of Artificial Sequence: Synthetic oligonucleotide
  Sense strand starting at position 292 of SEQ ID NO: 917024
acagaugaguacguggaua

SEQ ID NO: 1202567 - RNA, 19 nt, Artificial Sequence
  Description of Artificial Sequence: Synthetic oligonucleotide
  Antisense strand to SEQ ID NO: 1202566
uauccacguacucaucugu

SEQ ID NO: 1202568 - RNA, 19 nt, Artificial Sequence
  Description of Artificial Sequence: Synthetic oligonucleotide
  Sense strand starting at position 294 of SEQ ID NO: 917024
agaugaguacguggauaug

SEQ ID NO: 1202569 - RNA, 19 nt, Artificial Sequence
  Description of Artificial Sequence: Synthetic oligonucleotide
  Antisense strand to SEQ ID NO: 1202568
cauauccacguacucaucu

SEQ ID NO: 1202570 - RNA, 19 nt, Artificial Sequence
  Description of Artificial Sequence: Synthetic oligonucleotide
  Sense strand starting at position 303 of SEQ ID NO: 917024
cguggauauguaggugaau

SEQ ID NO: 1202571 - RNA, 19 nt, Artificial Sequence
  Description of Artificial Sequence: Synthetic oligonucleotide
  Antisense strand to SEQ ID NO: 1202570
auucaccuacauauccacg

SEQ ID NO: 1202572 - RNA, 19 nt, Artificial Sequence
  Description of Artificial Sequence: Synthetic oligonucleotide
  Sense strand starting at position 304 of SEQ ID NO: 917024
guggauauguaggugaaua

SEQ ID NO: 1202573 - RNA, 19 nt, Artificial Sequence
  Description of Artificial Sequence: Synthetic oligonucleotide
  Antisense strand to SEQ ID NO: 1202572
uauucaccuacauauccac

SEQ ID NO: 1202574 - RNA, 19 nt, Artificial Sequence
  Description of Artificial Sequence: Synthetic oligonucleotide
  Sense strand starting at position 305 of SEQ ID NO: 917024
uggauauguaggugaauaa

SEQ ID NO: 1202575 - RNA, 19 nt, Artificial Sequence
  Description of Artificial Sequence: Synthetic oligonucleotide
  Antisense strand to SEQ ID NO: 1202574
uuauucaccuacauaucca

SEQ ID NO: 1202576 - RNA, 19 nt, Artificial Sequence
  Description of Artificial Sequence: Synthetic oligonucleotide
  Sense strand starting at position 644 of SEQ ID NO: 917024
uggagaguuagaugaguaa

SEQ ID NO: 1202577 - RNA, 19 nt, Artificial Sequence
  Description of Artificial Sequence: Synthetic oligonucleotide
  Antisense strand to SEQ ID NO: 1202576
uuacucaucuaacucucca

SEQ ID NO: 1202578 - RNA, 19 nt, Artificial Sequence
  Description of Artificial Sequence: Synthetic oligonucleotide
  Sense strand starting at position 670 of SEQ ID NO: 917024
uauaaaugaguggguggaa

SEQ ID NO: 1202579 - RNA, 19 nt, Artificial Sequence
  Description of Artificial Sequence: Synthetic oligonucleotide
  Antisense strand to SEQ ID NO: 1202578
uuccacccacucauuuaua

SEQ ID NO: 1202580 - RNA, 19 nt, Artificial Sequence
  Description of Artificial Sequence: Synthetic oligonucleotide
  Sense strand starting at position 704 of SEQ ID NO: 917024
uggguaaauggcugaguuu

SEQ ID NO: 1202581 - RNA, 19 nt, Artificial Sequence
  Description of Artificial Sequence: Synthetic oligonucleotide
  Antisense strand to SEQ ID NO: 1202580
aaacucagccauuuaccca

SEQ ID NO: 1202582 - RNA, 19 nt, Artificial Sequence
  Description of Artificial Sequence: Synthetic oligonucleotide
  Sense strand starting at position 705 of SEQ ID NO: 917024
ggguaaauggcugaguuug

SEQ ID NO: 1202583 - RNA, 19 nt, Artificial Sequence
  Description of Artificial Sequence: Synthetic oligonucleotide
  Antisense strand to SEQ ID NO: 1202582
caaacucagccauuuaccc

SEQ ID NO: 1202584 - RNA, 19 nt, Artificial Sequence
  Description of Artificial Sequence: Synthetic oligonucleotide
  Sense strand starting at position 779 of SEQ ID NO: 917024
uauaaaugaguggguggau

SEQ ID NO: 1202585 - RNA, 19 nt, Artificial Sequence
  Description of Artificial Sequence: Synthetic oligonucleotide
  Antisense strand to SEQ ID NO: 1202584
auccacccacucauuuaua

SEQ ID NO: 1202586 - RNA, 19 nt, Artificial Sequence
  Description of Artificial Sequence: Synthetic oligonucleotide
  Sense strand starting at position 1219 of SEQ ID NO: 917024
augauagauggcuggauga

SEQ ID NO: 1202587 - RNA, 19 nt, Artificial Sequence
  Description of Artificial Sequence: Synthetic oligonucleotide
  Antisense strand to SEQ ID NO: 1202586
ucauccagccaucuaucau

SEQ ID NO: 1202588 - RNA, 19 nt, Artificial Sequence
  Description of Artificial Sequence: Synthetic oligonucleotide
  Sense strand starting at position 1373 of SEQ ID NO: 917024
gauagauguguggaugguu

SEQ ID NO: 1202589 - RNA, 19 nt, Artificial Sequence
  Description of Artificial Sequence: Synthetic oligonucleotide
  Antisense strand to SEQ ID NO: 1202588
aaccauccacacaucuauc

SEQ ID NO: 1202590 - RNA, 19 nt, Artificial Sequence
  Description of Artificial Sequence: Synthetic oligonucleotide
  Sense strand starting at position 1401 of SEQ ID NO: 917024
gacgaauagaugggugguu

SEQ ID NO: 1202591 - RNA, 19 nt, Artificial Sequence
  Description of Artificial Sequence: Synthetic oligonucleotide
  Antisense strand to SEQ ID NO: 1202590
aaccacccaucuauucguc

SEQ ID NO: 1202592 - RNA, 19 nt, Artificial Sequence
  Description of Artificial Sequence: Synthetic oligonucleotide
  Sense strand starting at position 1519 of SEQ ID NO: 917024
cgacggauggguggauaau

SEQ ID NO: 1202593 - RNA, 19 nt, Artificial Sequence
  Description of Artificial Sequence: Synthetic oligonucleotide
  Antisense strand to SEQ ID NO: 1202592
auuauccacccauccgucg

SEQ ID NO: 1202594 - RNA, 19 nt, Artificial Sequence
  Description of Artificial Sequence: Synthetic oligonucleotide
  Sense strand starting at position 2269 of SEQ ID NO: 917024
cugggcauuagcugaaaga

SEQ ID NO: 1202595 - RNA, 19 nt, Artificial Sequence
  Description of Artificial Sequence: Synthetic oligonucleotide
  Antisense strand to SEQ ID NO: 1202594
ucuuucagcuaaugcccag

SEQ ID NO: 1202596 - RNA, 19 nt, Artificial Sequence
  Description of Artificial Sequence: Synthetic oligonucleotide
  Sense strand starting at position 2402 of SEQ ID NO: 917024
uuagucauuccaugacauu

SEQ ID NO: 1202597 - RNA, 19 nt, Artificial Sequence
  Description of Artificial Sequence: Synthetic oligonucleotide
  Antisense strand to SEQ ID NO: 1202596
aaugucauggaaugacuaa

SEQ ID NO: 1202598 - RNA, 19 nt, Artificial Sequence
  Description of Artificial Sequence: Synthetic oligonucleotide
  Sense strand starting at position 2408 of SEQ ID NO: 917024
auuccaugacauugagcaa

SEQ ID NO: 1202599 - RNA, 19 nt, Artificial Sequence
  Description of Artificial Sequence: Synthetic oligonucleotide
  Antisense strand to SEQ ID NO: 1202598
uugcucaaugucauggaau

SEQ ID NO: 1202600 - RNA, 19 nt, Artificial Sequence
  Description of Artificial Sequence: Synthetic oligonucleotide
  Sense strand starting at position 2447 of SEQ ID NO: 917024
gcuuccugaucuguaagau

SEQ ID NO: 1202601 - RNA, 19 nt, Artificial Sequence
  Description of Artificial Sequence: Synthetic oligonucleotide
  Antisense strand to SEQ ID NO: 1202600
aucuuacagaucaggaagc

SEQ ID NO: 1202602 - RNA, 19 nt, Artificial Sequence
  Description of Artificial Sequence: Synthetic oligonucleotide
  Sense strand starting at position 2448 of SEQ ID NO: 917024
cuuccugaucuguaagaug

SEQ ID NO: 1202603 - RNA, 19 nt, Artificial Sequence
  Description of Artificial Sequence: Synthetic oligonucleotide
  Antisense strand to SEQ ID NO: 1202602
caucuuacagaucaggaag

SEQ ID NO: 1202604 - RNA, 19 nt, Artificial Sequence
  Description of Artificial Sequence: Synthetic oligonucleotide
  Sense strand starting at position 2686 of SEQ ID NO: 917024
gcuccaauacuugaguuga

SEQ ID NO: 1202605 - RNA, 19 nt, Artificial Sequence
  Description of Artificial Sequence: Synthetic oligonucleotide
  Antisense strand to SEQ ID NO: 1202604
ucaacucaaguauuggagc

SEQ ID NO: 1202606 - RNA, 19 nt, Artificial Sequence
  Description of Artificial Sequence: Synthetic oligonucleotide
  Sense strand starting at position 2688 of SEQ ID NO: 917024
uccaauacuugaguugacu

SEQ ID NO: 1202607 - RNA, 19 nt, Artificial Sequence
  Description of Artificial Sequence: Synthetic oligonucleotide
  Antisense strand to SEQ ID NO: 1202606
agucaacucaaguauugga

SEQ ID NO: 1202608 - RNA, 19 nt, Artificial Sequence
  Description of Artificial Sequence: Synthetic oligonucleotide
  Sense strand starting at position 2929 of SEQ ID NO: 917024
caggaaauguaucugucuu

SEQ ID NO: 1202609 - RNA, 19 nt, Artificial Sequence
  Description of Artificial Sequence: Synthetic oligonucleotide
  Antisense strand to SEQ ID NO: 1202608
aagacagauacauuuccug

SEQ ID NO: 1202610 - RNA, 19 nt, Artificial Sequence
  Description of Artificial Sequence: Synthetic oligonucleotide
  Sense strand starting at position 2930 of SEQ ID NO: 917024
aggaaauguaucugucuug

SEQ ID NO: 1202611 - RNA, 19 nt, Artificial Sequence
  Description of Artificial Sequence: Synthetic oligonucleotide
  Antisense strand to SEQ ID NO: 1202610
caagacagauacauuuccu

SEQ ID NO: 1202612 - RNA, 19 nt, Artificial Sequence
  Description of Artificial Sequence: Synthetic oligonucleotide
  Sense strand starting at position 2952 of SEQ ID NO: 917024
aucccugaguccucacaca

SEQ ID NO: 1202613 - RNA, 19 nt, Artificial Sequence
  Description of Artificial Sequence: Synthetic oligonucleotide
  Antisense strand to SEQ ID NO: 1202612
ugugugaggacucagggau

SEQ ID NO: 1202614 - RNA, 19 nt, Artificial Sequence
  Description of Artificial Sequence: Synthetic oligonucleotide
  Sense strand starting at position 2985 of SEQ ID NO: 917024
ugacaaagaugucauuugu

SEQ ID NO: 1202615 - RNA, 19 nt, Artificial Sequence
  Description of Artificial Sequence: Synthetic oligonucleotide
  Antisense strand to SEQ ID NO: 1202614
acaaaugacaucuuuguca

SEQ ID NO: 1202616 - RNA, 19 nt, Artificial Sequence
  Description of Artificial Sequence: Synthetic oligonucleotide
  Sense strand starting at position 2995 of SEQ ID NO: 917024
gucauuuguucccauuucu

SEQ ID NO: 1202617 - RNA, 19 nt, Artificial Sequence
  Description of Artificial Sequence: Synthetic oligonucleotide
  Antisense strand to SEQ ID NO: 1202616
agaaaugggaacaaaugac

SEQ ID NO: 1202618 - RNA, 19 nt, Artificial Sequence
  Description of Artificial Sequence: Synthetic oligonucleotide
  Sense strand starting at position 3067 of SEQ ID NO: 917024
ggacuugaaccaugucucu

SEQ ID NO: 1202619 - RNA, 19 nt, Artificial Sequence
  Description of Artificial Sequence: Synthetic oligonucleotide
  Antisense strand to SEQ ID NO: 1202618
agagacaugguucaagucc

SEQ ID NO: 1202620 - RNA, 19 nt, Artificial Sequence
  Description of Artificial Sequence: Synthetic oligonucleotide
  Sense strand starting at position 3206 of SEQ ID NO: 917024
aagggugaguuuccuggaa

SEQ ID NO: 1202621 - RNA, 19 nt, Artificial Sequence
  Description of Artificial Sequence: Synthetic oligonucleotide
  Antisense strand to SEQ ID NO: 1202620
uuccaggaaacucacccuu

SEQ ID NO: 1202622 - RNA, 19 nt, Artificial Sequence
  Description of Artificial Sequence: Synthetic oligonucleotide
  Sense strand starting at position 3210 of SEQ ID NO: 917024
gugaguuuccuggaacucu

SEQ ID NO: 1202623 - RNA, 19 nt, Artificial Sequence
  Description of Artificial Sequence: Synthetic oligonucleotide
  Antisense strand to SEQ ID NO: 1202622
agaguuccaggaaacucac

SEQ ID NO: 1202624 - RNA, 19 nt, Artificial Sequence
  Description of Artificial Sequence: Synthetic oligonucleotide
  Sense strand starting at position 3659 of SEQ ID NO: 917024
agauauauccagugccacu

SEQ ID NO: 1202625 - RNA, 19 nt, Artificial Sequence
  Description of Artificial Sequence: Synthetic oligonucleotide
  Antisense strand to SEQ ID NO: 1202624
aguggcacuggauauaucu

SEQ ID NO: 1202626 - RNA, 19 nt, Artificial Sequence
  Description of Artificial Sequence: Synthetic oligonucleotide
  Sense strand starting at position 3670 of SEQ ID NO: 917024
gugccacuucugggauuaa

SEQ ID NO: 1202627 - RNA, 19 nt, Artificial Sequence
  Description of Artificial Sequence: Synthetic oligonucleotide
  Antisense strand to SEQ ID NO: 1202626
uuaaucccagaaguggcac

SEQ ID NO: 1202628 - RNA, 19 nt, Artificial Sequence
  Description of Artificial Sequence: Synthetic oligonucleotide
  Sense strand starting at position 11 of SEQ ID NO: 917025
uugcuagaugcucacaagu

SEQ ID NO: 1202629 - RNA, 19 nt, Artificial Sequence
  Description of Artificial Sequence: Synthetic oligonucleotide
  Antisense strand to SEQ ID NO: 1202628
acuugugagcaucuagcaa

SEQ ID NO: 1202630 - RNA, 19 nt, Artificial Sequence
  Description of Artificial Sequence: Synthetic oligonucleotide
  Sense strand starting at position 13 of SEQ ID NO: 917025
gcuagaugcucacaaguca

SEQ ID NO: 1202631 - RNA, 19 nt, Artificial Sequence
  Description of Artificial Sequence: Synthetic oligonucleotide
  Antisense strand to SEQ ID NO: 1202630
ugacuugugagcaucuagc

SEQ ID NO: 1202632 - RNA, 19 nt, Artificial Sequence
  Description of Artificial Sequence: Synthetic oligonucleotide
  Sense strand starting at position 160 of SEQ ID NO: 917025
ugagcuugcagagagcauu

SEQ ID NO: 1202633 - RNA, 19 nt, Artificial Sequence
  Description of Artificial Sequence: Synthetic oligonucleotide
  Antisense strand to SEQ ID NO: 1202632
aaugcucucugcaagcuca

SEQ ID NO: 1202634 - RNA, 19 nt, Artificial Sequence
  Description of Artificial Sequence: Synthetic oligonucleotide
  Sense strand starting at position 170 of SEQ ID NO: 917025
gagagcauuugcuggagga

SEQ ID NO: 1202635 - RNA, 19 nt, Artificial Sequence
  Description of Artificial Sequence: Synthetic oligonucleotide
  Antisense strand to SEQ ID NO: 1202634
uccuccagcaaaugcucuc

SEQ ID NO: 1202636 - RNA, 19 nt, Artificial Sequence
  Description of Artificial Sequence: Synthetic oligonucleotide
  Sense strand starting at position 207 of SEQ ID NO: 917025
cccaguuggcaccagauaa

SEQ ID NO: 1202637 - RNA, 19 nt, Artificial Sequence
  Description of Artificial Sequence: Synthetic oligonucleotide
  Antisense strand to SEQ ID NO: 1202636
uuaucuggugccaacuggg

SEQ ID NO: 1202638 - RNA, 19 nt, Artificial Sequence
  Description of Artificial Sequence: Synthetic oligonucleotide
  Sense strand starting at position 257 of SEQ ID NO: 917025
gauauaagguaucuggguu

SEQ ID NO: 1202639 - RNA, 19 nt, Artificial Sequence
  Description of Artificial Sequence: Synthetic oligonucleotide
  Antisense strand to SEQ ID NO: 1202638
aacccagauaccuuauauc

SEQ ID NO: 1202640 - RNA, 19 nt, Artificial Sequence
  Description of Artificial Sequence: Synthetic oligonucleotide
  Sense strand starting at position 258 of SEQ ID NO: 917025
auauaagguaucuggguuu

SEQ ID NO: 1202641 - RNA, 19 nt, Artificial Sequence
  Description of Artificial Sequence: Synthetic oligonucleotide
  Antisense strand to SEQ ID NO: 1202640
aaacccagauaccuuauau

SEQ ID NO: 1202642 - RNA, 19 nt, Artificial Sequence
  Description of Artificial Sequence: Synthetic oligonucleotide
  Sense strand starting at position 304 of SEQ ID NO: 917025
cggagcucaugugaaacau

SEQ ID NO: 1202643 - RNA, 19 nt, Artificial Sequence
  Description of Artificial Sequence: Synthetic oligonucleotide
  Antisense strand to SEQ ID NO: 1202642
auguuucacaugagcuccg

SEQ ID NO: 1202644 - RNA, 19 nt, Artificial Sequence
  Description of Artificial Sequence: Synthetic oligonucleotide
  Sense strand starting at position 410 of SEQ ID NO: 917025
agugaaccgcccugaacua

SEQ ID NO: 1202645 - RNA, 19 nt, Artificial Sequence
  Description of Artificial Sequence: Synthetic oligonucleotide
  Antisense strand to SEQ ID NO: 1202644
uaguucagggcgguucacu

SEQ ID NO: 1202646 - RNA, 19 nt, Artificial Sequence
  Description of Artificial Sequence: Synthetic oligonucleotide
  Sense strand starting at position 421 of SEQ ID NO: 917025
cugaacuaugacugccauu

SEQ ID NO: 1202647 - RNA, 19 nt, Artificial Sequence
  Description of Artificial Sequence: Synthetic oligonucleotide
  Antisense strand to SEQ ID NO: 1202646
aauggcagucauaguucag

SEQ ID NO: 1202648 - RNA, 19 nt, Artificial Sequence
  Description of Artificial Sequence: Synthetic oligonucleotide
  Sense strand starting at position 499 of SEQ ID NO: 917025
gcuuucugguucccaucau

SEQ ID NO: 1202649 - RNA, 19 nt, Artificial Sequence
  Description of Artificial Sequence: Synthetic oligonucleotide
  Antisense strand to SEQ ID NO: 1202648
augaugggaaccagaaagc

SEQ ID NO: 1202650 - RNA, 19 nt, Artificial Sequence
  Description of Artificial Sequence: Synthetic oligonucleotide
  Sense strand starting at position 500 of SEQ ID NO: 917025
cuuucugguucccaucauu

SEQ ID NO: 1202651 - RNA, 19 nt, Artificial Sequence
  Description of Artificial Sequence: Synthetic oligonucleotide
  Antisense strand to SEQ ID NO: 1202650
aaugaugggaaccagaaag

SEQ ID NO: 1202652 - RNA, 19 nt, Artificial Sequence
  Description of Artificial Sequence: Synthetic oligonucleotide
  Sense strand starting at position 609 of SEQ ID NO: 917025
ugguuaaacauugauggca

SEQ ID NO: 1202653 - RNA, 19 nt, Artificial Sequence
  Description of Artificial Sequence: Synthetic oligonucleotide
  Antisense strand to SEQ ID NO: 1202652
ugccaucaauguuuaacca

SEQ ID NO: 1202654 - RNA, 19 nt, Artificial Sequence
  Description of Artificial Sequence: Synthetic oligonucleotide
  Sense strand starting at position 990 of SEQ ID NO: 917025
caggguaucugccuaacau

SEQ ID NO: 1202655 - RNA, 19 nt, Artificial Sequence
  Description of Artificial Sequence: Synthetic oligonucleotide
  Antisense strand to SEQ ID NO: 1202654
auguuaggcagauacccug

SEQ ID NO: 1202656 - RNA, 19 nt, Artificial Sequence
  Description of Artificial Sequence: Synthetic oligonucleotide
  Sense strand starting at position 991 of SEQ ID NO: 917025
aggguaucugccuaacauu

SEQ ID NO: 1202657 - RNA, 19 nt, Artificial Sequence
  Description of Artificial Sequence: Synthetic oligonucleotide
  Antisense strand to SEQ ID NO: 1202656
aauguuaggcagauacccu

SEQ ID NO: 1202658 - RNA, 19 nt, Artificial Sequence
  Description of Artificial Sequence: Synthetic oligonucleotide
  Sense strand starting at position 1186 of SEQ ID NO: 917025
gcuggauagucccuggguu

SEQ ID NO: 1202659 - RNA, 19 nt, Artificial Sequence
  Description of Artificial Sequence: Synthetic oligonucleotide
  Antisense strand to SEQ ID NO: 1202658
aacccagggacuauccagc

SEQ ID NO: 1202660 - RNA, 19 nt, Artificial Sequence
  Description of Artificial Sequence: Synthetic oligonucleotide
  Sense strand starting at position 1187 of SEQ ID NO: 917025
cuggauagucccuggguuu

SEQ ID NO: 1202661 - RNA, 19 nt, Artificial Sequence
  Description of Artificial Sequence: Synthetic oligonucleotide
  Antisense strand to SEQ ID NO: 1202660
aaacccagggacuauccag

SEQ ID NO: 1202662 - RNA, 19 nt, Artificial Sequence
  Description of Artificial Sequence: Synthetic oligonucleotide
  Sense strand starting at position 1188 of SEQ ID NO: 917025
uggauagucccuggguuua

SEQ ID NO: 1202663 - RNA, 19 nt, Artificial Sequence
  Description of Artificial Sequence: Synthetic oligonucleotide
  Antisense strand to SEQ ID NO: 1202662
uaaacccagggacuaucca

SEQ ID NO: 1202664 - RNA, 19 nt, Artificial Sequence
  Description of Artificial Sequence: Synthetic oligonucleotide
  Sense strand starting at position 1190 of SEQ ID NO: 917025
gauagucccuggguuuaaa

SEQ ID NO: 1202665 - RNA, 19 nt, Artificial Sequence
  Description of Artificial Sequence: Synthetic oligonucleotide
  Antisense strand to SEQ ID NO: 1202664
uuuaaacccagggacuauc

SEQ ID NO: 1202666 - RNA, 19 nt, Artificial Sequence
  Description of Artificial Sequence: Synthetic oligonucleotide
  Sense strand starting at position 1302 of SEQ ID NO: 917025
aguggguggcucgaugaau

SEQ ID NO: 1202667 - RNA, 19 nt, Artificial Sequence
  Description of Artificial Sequence: Synthetic oligonucleotide
  Antisense strand to SEQ ID NO: 1202666
auucaucgagccacccacu

SEQ ID NO: 1202668 - RNA, 19 nt, Artificial Sequence
  Description of Artificial Sequence: Synthetic oligonucleotide
  Sense strand starting at position 1314 of SEQ ID NO: 917025
gaugaaugcaucugugguu

SEQ ID NO: 1202669 - RNA, 19 nt, Artificial Sequence
  Description of Artificial Sequence: Synthetic oligonucleotide
  Antisense strand to SEQ ID NO: 1202668
aaccacagaugcauucauc

SEQ ID NO: 1202670 - RNA, 19 nt, Artificial Sequence
  Description of Artificial Sequence: Synthetic oligonucleotide
  Sense strand starting at position 1440 of SEQ ID NO: 917025
ggcagaacuagagguuaaa

SEQ ID NO: 1202671 - RNA, 19 nt, Artificial Sequence
  Description of Artificial Sequence: Synthetic oligonucleotide
  Antisense strand to SEQ ID NO: 1202670
uuuaaccucuaguucugcc

SEQ ID NO: 1202672 - RNA, 19 nt, Artificial Sequence
  Description of Artificial Sequence: Synthetic oligonucleotide
  Sense strand starting at position 1464 of SEQ ID NO: 917025
ucaugccucuuggaggaaa

SEQ ID NO: 1202673 - RNA, 19 nt, Artificial Sequence
  Description of Artificial Sequence: Synthetic oligonucleotide
  Antisense strand to SEQ ID NO: 1202672
uuuccuccaagaggcauga

SEQ ID NO: 1202674 - RNA, 19 nt, Artificial Sequence
  Description of Artificial Sequence: Synthetic oligonucleotide
  Sense strand starting at position 1588 of SEQ ID NO: 917025
cgaaaucccucuuccaagu

SEQ ID NO: 1202675 - RNA, 19 nt, Artificial Sequence
  Description of Artificial Sequence: Synthetic oligonucleotide
  Antisense strand to SEQ ID NO: 1202674
acuuggaagagggauuucg

SEQ ID NO: 1202676 - RNA, 19 nt, Artificial Sequence
  Description of Artificial Sequence: Synthetic oligonucleotide
  Sense strand starting at position 2199 of SEQ ID NO: 917025
ucaguuuccucgccuggaa

SEQ ID NO: 1202677 - RNA, 19 nt, Artificial Sequence
  Description of Artificial Sequence: Synthetic oligonucleotide
  Antisense strand to SEQ ID NO: 1202676
uuccaggcgaggaaacuga

SEQ ID NO: 1202678 - RNA, 19 nt, Artificial Sequence
  Description of Artificial Sequence: Synthetic oligonucleotide
  Sense strand starting at position 2289 of SEQ ID NO: 917025
auucgaucuugcuccguga

SEQ ID NO: 1202679 - RNA, 19 nt, Artificial Sequence
  Description of Artificial Sequence: Synthetic oligonucleotide
  Antisense strand to SEQ ID NO: 1202678
ucacggagcaagaucgaau

SEQ ID NO: 1202680 - RNA, 19 nt, Artificial Sequence
  Description of Artificial Sequence: Synthetic oligonucleotide
  Sense strand starting at position 2291 of SEQ ID NO: 917025
ucgaucuugcuccgugacu

SEQ ID NO: 1202681 - RNA, 19 nt, Artificial Sequence
  Description of Artificial Sequence: Synthetic oligonucleotide
  Antisense strand to SEQ ID NO: 1202680
agucacggagcaagaucga

SEQ ID NO: 1202682 - RNA, 19 nt, Artificial Sequence
  Description of Artificial Sequence: Synthetic oligonucleotide
  Sense strand starting at position 2292 of SEQ ID NO: 917025
cgaucuugcuccgugacuu

SEQ ID NO: 1202683 - RNA, 19 nt, Artificial Sequence
  Description of Artificial Sequence: Synthetic oligonucleotide
  Antisense strand to SEQ ID NO: 1202682
aagucacggagcaagaucg

SEQ ID NO: 1202684 - RNA, 19 nt, Artificial Sequence
  Description of Artificial Sequence: Synthetic oligonucleotide
  Sense strand starting at position 2293 of SEQ ID NO: 917025
gaucuugcuccgugacuuc

SEQ ID NO: 1202685 - RNA, 19 nt, Artificial Sequence
  Description of Artificial Sequence: Synthetic oligonucleotide
  Antisense strand to SEQ ID NO: 1202684
gaagucacggagcaagauc

SEQ ID NO: 1202686 - RNA, 19 nt, Artificial Sequence
  Description of Artificial Sequence: Synthetic oligonucleotide
  Sense strand starting at position 2328 of SEQ ID NO: 917025
guguccuagucucuaaaug

SEQ ID NO: 1202687 - RNA, 19 nt, Artificial Sequence
  Description of Artificial Sequence: Synthetic oligonucleotide
  Antisense strand to SEQ ID NO: 1202686
cauuuagagacuaggacac

SEQ ID NO: 1202688 - RNA, 19 nt, Artificial Sequence
  Description of Artificial Sequence: Synthetic oligonucleotide
  Sense strand starting at position 2436 of SEQ ID NO: 917025
ggguauggcccauagagau

SEQ ID NO: 1202689 - RNA, 19 nt, Artificial Sequence
  Description of Artificial Sequence: Synthetic oligonucleotide
  Antisense strand to SEQ ID NO: 1202688
aucucuaugggccauaccc

SEQ ID NO: 1202690 - RNA, 19 nt, Artificial Sequence
  Description of Artificial Sequence: Synthetic oligonucleotide
  Sense strand starting at position 2522 of SEQ ID NO: 917025
cucggaguaggccaucaau

SEQ ID NO: 1202691 - RNA, 19 nt, Artificial Sequence
  Description of Artificial Sequence: Synthetic oligonucleotide
  Antisense strand to SEQ ID NO: 1202690
auugauggccuacuccgag

SEQ ID NO: 1202692 - RNA, 19 nt, Artificial Sequence
  Description of Artificial Sequence: Synthetic oligonucleotide
  Sense strand starting at position 2525 of SEQ ID NO: 917025
ggaguaggccaucaauguu

SEQ ID NO: 1202693 - RNA, 19 nt, Artificial Sequence
  Description of Artificial Sequence: Synthetic oligonucleotide
  Antisense strand to SEQ ID NO: 1202692
aacauugauggccuacucc

SEQ ID NO: 1202694 - RNA, 19 nt, Artificial Sequence
  Description of Artificial Sequence: Synthetic oligonucleotide
  Sense strand starting at position 2597 of SEQ ID NO: 917025
cgguggcgugaucaggaau

SEQ ID NO: 1202695 - RNA, 19 nt, Artificial Sequence
  Description of Artificial Sequence: Synthetic oligonucleotide
  Antisense strand to SEQ ID NO: 1202694
auuccugaucacgccaccg

SEQ ID NO: 1202696 - RNA, 19 nt, Artificial Sequence
  Description of Artificial Sequence: Synthetic oligonucleotide
  Sense strand starting at position 2655 of SEQ ID NO: 917025
guaucagccucccuaguaa

SEQ ID NO: 1202697 - RNA, 19 nt, Artificial Sequence
  Description of Artificial Sequence: Synthetic oligonucleotide
  Antisense strand to SEQ ID NO: 1202696
uuacuagggaggcugauac

SEQ ID NO: 1202698 - RNA, 19 nt, Artificial Sequence
  Description of Artificial Sequence: Synthetic oligonucleotide
  Sense strand starting at position 2814 of SEQ ID NO: 917025
ggauuagaggucugaguca

SEQ ID NO: 1202699 - RNA, 19 nt, Artificial Sequence
  Description of Artificial Sequence: Synthetic oligonucleotide
  Antisense strand to SEQ ID NO: 1202698
ugacucagaccucuaaucc

SEQ ID NO: 1202700 - RNA, 19 nt, Artificial Sequence
  Description of Artificial Sequence: Synthetic oligonucleotide
  Sense strand starting at position 2887 of SEQ ID NO: 917025
ugauacauguucucccuuu

SEQ ID NO: 1202701 - RNA, 19 nt, Artificial Sequence
  Description of Artificial Sequence: Synthetic oligonucleotide
  Antisense strand to SEQ ID NO: 1202700
aaagggagaacauguauca

SEQ ID NO: 1202702 - RNA, 19 nt, Artificial Sequence
  Description of Artificial Sequence: Synthetic oligonucleotide
  Sense strand starting at position 3303 of SEQ ID NO: 917025
acagcuuggcucugugacu

SEQ ID NO: 1202703 - RNA, 19 nt, Artificial Sequence
  Description of Artificial Sequence: Synthetic oligonucleotide
  Antisense strand to SEQ ID NO: 1202702
agucacagagccaagcugu

SEQ ID NO: 1202704 - RNA, 19 nt, Artificial Sequence
  Description of Artificial Sequence: Synthetic oligonucleotide
  Sense strand starting at position 3875 of SEQ ID NO: 917025
acagcuggaaagugaaauu

SEQ ID NO: 1202705 - RNA, 19 nt, Artificial Sequence
  Description of Artificial Sequence: Synthetic oligonucleotide
  Antisense strand to SEQ ID NO: 1202704
aauuucacuuuccagcugu

SEQ ID NO: 1202706 - RNA, 19 nt, Artificial Sequence
  Description of Artificial Sequence: Synthetic oligonucleotide
  Sense strand starting at position 3954 of SEQ ID NO: 917025
ccugaauaggagugaugug

SEQ ID NO: 1202707 - RNA, 19 nt, Artificial Sequence
  Description of Artificial Sequence: Synthetic oligonucleotide
  Antisense strand to SEQ ID NO: 1202706
cacaucacuccuauucagg

SEQ ID NO: 1202708 - RNA, 19 nt, Artificial Sequence
  Description of Artificial Sequence: Synthetic oligonucleotide
  Sense strand starting at position 215 of SEQ ID NO: 917026
uugguacagcuguacaaua

SEQ ID NO: 1202709 - RNA, 19 nt, Artificial Sequence
  Description of Artificial Sequence: Synthetic oligonucleotide
  Antisense strand to SEQ ID NO: 1202708
uauuguacagcuguaccaa

SEQ ID NO: 1202710 - RNA, 19 nt, Artificial Sequence
  Description of Artificial Sequence: Synthetic oligonucleotide
  Sense strand starting at position 354 of SEQ ID NO: 917026
aauguaauguagcuuaugu

SEQ ID NO: 1202711 - RNA, 19 nt, Artificial Sequence
  Description of Artificial Sequence: Synthetic oligonucleotide
  Antisense strand to SEQ ID NO: 1202710
acauaagcuacauuacauu

SEQ ID NO: 1202712 - RNA, 19 nt, Artificial Sequence
  Description of Artificial Sequence: Synthetic oligonucleotide
  Sense strand starting at position 367 of SEQ ID NO: 917026
uuauguguacugugcuuua

SEQ ID NO: 1202713 - RNA, 19 nt, Artificial Sequence
  Description of Artificial Sequence: Synthetic oligonucleotide
  Antisense strand to SEQ ID NO: 1202712
uaaagcacaguacacauaa

SEQ ID NO: 1202714 - RNA, 19 nt, Artificial Sequence
  Description of Artificial Sequence: Synthetic oligonucleotide
  Sense strand starting at position 371 of SEQ ID NO: 917026
guguacugugcuuuaacgu

SEQ ID NO: 1202715 - RNA, 19 nt, Artificial Sequence
  Description of Artificial Sequence: Synthetic oligonucleotide
  Antisense strand to SEQ ID NO: 1202714
acguuaaagcacaguacac

SEQ ID NO: 1202716 - RNA, 19 nt, Artificial Sequence
  Description of Artificial Sequence: Synthetic oligonucleotide
  Sense strand starting at position 379 of SEQ ID NO: 917026
ugcuuuaacgucuacuaua

SEQ ID NO: 1202717 - RNA, 19 nt, Artificial Sequence
  Description of Artificial Sequence: Synthetic oligonucleotide
  Antisense strand to SEQ ID NO: 1202716
uauaguagacguuaaagca

SEQ ID NO: 1202718 - RNA, 19 nt, Artificial Sequence
  Description of Artificial Sequence: Synthetic oligonucleotide
  Sense strand starting at position 478 of SEQ ID NO: 917026
agcuccauacaugauaagu

SEQ ID NO: 1202719 - RNA, 19 nt, Artificial Sequence
  Description of Artificial Sequence: Synthetic oligonucleotide
  Antisense strand to SEQ ID NO: 1202718
acuuaucauguauggagcu

SEQ ID NO: 1202720 - RNA, 19 nt, Artificial Sequence
  Description of Artificial Sequence: Synthetic oligonucleotide
  Sense strand starting at position 488 of SEQ ID NO: 917026
augauaaguucccuaugga

SEQ ID NO: 1202721 - RNA, 19 nt, Artificial Sequence
  Description of Artificial Sequence: Synthetic oligonucleotide
  Antisense strand to SEQ ID NO: 1202720
uccauagggaacuuaucau

SEQ ID NO: 1202722 - RNA, 19 nt, Artificial Sequence
  Description of Artificial Sequence: Synthetic oligonucleotide
  Sense strand starting at position 491 of SEQ ID NO: 917026
auaaguucccuauggagau

SEQ ID NO: 1202723 - RNA, 19 nt, Artificial Sequence
  Description of Artificial Sequence: Synthetic oligonucleotide
  Antisense strand to SEQ ID NO: 1202722
aucuccauagggaacuuau

SEQ ID NO: 1202724 - RNA, 19 nt, Artificial Sequence
  Description of Artificial Sequence: Synthetic oligonucleotide
  Sense strand starting at position 495 of SEQ ID NO: 917026
guucccuauggagauguau

SEQ ID NO: 1202725 - RNA, 19 nt, Artificial Sequence
  Description of Artificial Sequence: Synthetic oligonucleotide
  Antisense strand to SEQ ID NO: 1202724
auacaucuccauagggaac

SEQ ID NO: 1202726 - RNA, 19 nt, Artificial Sequence
  Description of Artificial Sequence: Synthetic oligonucleotide
  Sense strand starting at position 654 of SEQ ID NO: 917026
ccauauagcccagguugua

SEQ ID NO: 1202727 - RNA, 19 nt, Artificial Sequence
  Description of Artificial Sequence: Synthetic oligonucleotide
  Antisense strand to SEQ ID NO: 1202726
uacaaccugggcuauaugg

SEQ ID NO: 1202728 - RNA, 19 nt, Artificial Sequence
  Description of Artificial Sequence: Synthetic oligonucleotide
  Sense strand starting at position 664 of SEQ ID NO: 917026
cagguuguaguacaauaua

SEQ ID NO: 1202729 - RNA, 19 nt, Artificial Sequence
  Description of Artificial Sequence: Synthetic oligonucleotide
  Antisense strand to SEQ ID NO: 1202728
uauauuguacuacaaccug

SEQ ID NO: 1202730 - RNA, 19 nt, Artificial Sequence
  Description of Artificial Sequence: Synthetic oligonucleotide
  Sense strand starting at position 697 of SEQ ID NO: 917026
guagguacucuaugaugug

SEQ ID NO: 1202731 - RNA, 19 nt, Artificial Sequence
  Description of Artificial Sequence: Synthetic oligonucleotide
  Antisense strand to SEQ ID NO: 1202730
cacaucauagaguaccuac

SEQ ID NO: 1202732 - RNA, 19 nt, Artificial Sequence
  Description of Artificial Sequence: Synthetic oligonucleotide
  Sense strand starting at position 706 of SEQ ID NO: 917026
cuaugaugugcauaagcca

SEQ ID NO: 1202733 - RNA, 19 nt, Artificial Sequence
  Description of Artificial Sequence: Synthetic oligonucleotide
  Antisense strand to SEQ ID NO: 1202732
uggcuuaugcacaucauag

SEQ ID NO: 1202734 - RNA, 19 nt, Artificial Sequence
  Description of Artificial Sequence: Synthetic oligonucleotide
  Sense strand starting at position 736 of SEQ ID NO: 917026
cgacgccauuucucagaau

SEQ ID NO: 1202735 - RNA, 19 nt, Artificial Sequence
  Description of Artificial Sequence: Synthetic oligonucleotide
  Antisense strand to SEQ ID NO: 1202734
auucugagaaauggcgucg

SEQ ID NO: 1202736 - RNA, 19 nt, Artificial Sequence
  Description of Artificial Sequence: Synthetic oligonucleotide
  Sense strand starting at position 737 of SEQ ID NO: 917026
gacgccauuucucagaaug

SEQ ID NO: 1202737 - RNA, 19 nt, Artificial Sequence
  Description of Artificial Sequence: Synthetic oligonucleotide
  Antisense strand to SEQ ID NO: 1202736
cauucugagaaauggcguc

SEQ ID NO: 1202738 - RNA, 19 nt, Artificial Sequence
  Description of Artificial Sequence: Synthetic oligonucleotide
  Sense strand starting at position 739 of SEQ ID NO: 917026
cgccauuucucagaaugua

SEQ ID NO: 1202739 - RNA, 19 nt, Artificial Sequence
  Description of Artificial Sequence: Synthetic oligonucleotide
  Antisense strand to SEQ ID NO: 1202738
uacauucugagaaauggcg

SEQ ID NO: 1202740 - RNA, 19 nt, Artificial Sequence
  Description of Artificial Sequence: Synthetic oligonucleotide
  Sense strand starting at position 755 of SEQ ID NO: 917026
guaucuuccuauuaagaga

SEQ ID NO: 1202741 - RNA, 19 nt, Artificial Sequence
  Description of Artificial Sequence: Synthetic oligonucleotide
  Antisense strand to SEQ ID NO: 1202740
ucucuuaauaggaagauac

SEQ ID NO: 1202742 - RNA, 19 nt, Artificial Sequence
  Description of Artificial Sequence: Synthetic oligonucleotide
  Sense strand starting at position 762 of SEQ ID NO: 917026
ccuauuaagagacgcauga

SEQ ID NO: 1202743 - RNA, 19 nt, Artificial Sequence
  Description of Artificial Sequence: Synthetic oligonucleotide
  Antisense strand to SEQ ID NO: 1202742
ucaugcgucucuuaauagg

SEQ ID NO: 1202744 - RNA, 19 nt, Artificial Sequence
  Description of Artificial Sequence: Synthetic oligonucleotide
  Sense strand starting at position 811 of SEQ ID NO: 917026
agauuaagaugucuaaagu

SEQ ID NO: 1202745 - RNA, 19 nt, Artificial Sequence
  Description of Artificial Sequence: Synthetic oligonucleotide
  Antisense strand to SEQ ID NO: 1202744
acuuuagacaucuuaaucu

SEQ ID NO: 1202746 - RNA, 19 nt, Artificial Sequence
  Description of Artificial Sequence: Synthetic oligonucleotide
  Sense strand starting at position 1240 of SEQ ID NO: 917026
caagaaacaccguaacagu

SEQ ID NO: 1202747 - RNA, 19 nt, Artificial Sequence
  Description of Artificial Sequence: Synthetic oligonucleotide
  Antisense strand to SEQ ID NO: 1202746
acuguuacgguguuucuug

SEQ ID NO: 1202748 - RNA, 19 nt, Artificial Sequence
  Description of Artificial Sequence: Synthetic oligonucleotide
  Sense strand starting at position 1251 of SEQ ID NO: 917026
guaacagucugguuuguua

SEQ ID NO: 1202749 - RNA, 19 nt, Artificial Sequence
  Description of Artificial Sequence: Synthetic oligonucleotide
  Antisense strand to SEQ ID NO: 1202748
uaacaaaccagacuguuac

SEQ ID NO: 1202750 - RNA, 19 nt, Artificial Sequence
  Description of Artificial Sequence: Synthetic oligonucleotide
  Sense strand starting at position 1253 of SEQ ID NO: 917026
aacagucugguuuguuaau

SEQ ID NO: 1202751 - RNA, 19 nt, Artificial Sequence
  Description of Artificial Sequence: Synthetic oligonucleotide
  Antisense strand to SEQ ID NO: 1202750
auuaacaaaccagacuguu

SEQ ID NO: 1202752 - RNA, 19 nt, Artificial Sequence
  Description of Artificial Sequence: Synthetic oligonucleotide
  Sense strand starting at position 1263 of SEQ ID NO: 917026
uuuguuaauccugggauac

SEQ ID NO: 1202753 - RNA, 19 nt, Artificial Sequence
  Description of Artificial Sequence: Synthetic oligonucleotide
  Antisense strand to SEQ ID NO: 1202752
guaucccaggauuaacaaa

SEQ ID NO: 1202754 - RNA, 19 nt, Artificial Sequence
  Description of Artificial Sequence: Synthetic oligonucleotide
  Sense strand starting at position 1264 of SEQ ID NO: 917026
uuguuaauccugggauacu

SEQ ID NO: 1202755 - RNA, 19 nt, Artificial Sequence
  Description of Artificial Sequence: Synthetic oligonucleotide
  Antisense strand to SEQ ID NO: 1202754
aguaucccaggauuaacaa

SEQ ID NO: 1202756 - RNA, 19 nt, Artificial Sequence
  Description of Artificial Sequence: Synthetic oligonucleotide
  Sense strand starting at position 1311 of SEQ ID NO: 917026
ggccaagguugucauuuaa

SEQ ID NO: 1202757 - RNA, 19 nt, Artificial Sequence
  Description of Artificial Sequence: Synthetic oligonucleotide
  Antisense strand to SEQ ID NO: 1202756
uuaaaugacaaccuuggcc

SEQ ID NO: 1202758 - RNA, 19 nt, Artificial Sequence
  Description of Artificial Sequence: Synthetic oligonucleotide
  Sense strand starting at position 1340 of SEQ ID NO: 917026
cacuuaggacugugccauu

SEQ ID NO: 1202759 - RNA, 19 nt, Artificial Sequence
  Description of Artificial Sequence: Synthetic oligonucleotide
  Antisense strand to SEQ ID NO: 1202758
aauggcacaguccuaagug

SEQ ID NO: 1202760 - RNA, 19 nt, Artificial Sequence
  Description of Artificial Sequence: Synthetic oligonucleotide
  Sense strand starting at position 1351 of SEQ ID NO: 917026
gugccauuauggucacuga
